United States Patent Application Publication US 2005/0255487 A1 - sequence listing, part 47

SEQ ID NO: 1285128 - RNA, 19 nt, Homo sapiens
  misc_RNA (1)...(19): siRNA sense strand
cagauugucagauauauuc

SEQ ID NO: 1285129 - RNA, 19 nt, Homo sapiens
  misc_RNA (1)...(19): siRNA sense strand
gcagauugucagauauauu

SEQ ID NO: 1285130 - RNA, 19 nt, Homo sapiens
  misc_RNA (1)...(19): siRNA sense strand
gaagaacugccugcgcauu

SEQ ID NO: 1285131 - RNA, 19 nt, Homo sapiens
  misc_RNA (1)...(19): siRNA sense strand
caaauuuacaggcacagaa

SEQ ID NO: 1285132 - RNA, 19 nt, Homo sapiens
  misc_RNA (1)...(19): siRNA sense strand
gcaagacgaauuacaucug

SEQ ID NO: 1285133 - RNA, 19 nt, Homo sapiens
  misc_RNA (1)...(19): siRNA sense strand
uguccacccuauuaucuuu

SEQ ID NO: 1285134 - RNA, 19 nt, Homo sapiens
  misc_RNA (1)...(19): siRNA sense strand
ccaguuaacagcagauugu

SEQ ID NO: 1285135 - RNA, 19 nt, Homo sapiens
  misc_RNA (1)...(19): siRNA sense strand
aaaugcaauucaagccuuu

SEQ ID NO: 1285136 - RNA, 19 nt, Homo sapiens
  misc_RNA (1)...(19): siRNA sense strand
ccuagaagagugcuugaaa

SEQ ID NO: 1285137 - RNA, 19 nt, Homo sapiens
  misc_RNA (1)...(19): siRNA sense strand
agaagagugcuugaaauuu

SEQ ID NO: 1285138 - RNA, 19 nt, Homo sapiens
  misc_RNA (1)...(19): siRNA sense strand
ccgccuggauugcgugaaa

SEQ ID NO: 1285139 - RNA, 19 nt, Homo sapiens
  misc_RNA (1)...(19): siRNA sense strand
uggaggcccugaagcagaa

SEQ ID NO: 1285140 - RNA, 19 nt, Homo sapiens
  misc_RNA (1)...(19): siRNA sense strand
ccacauaaccacaaaauca

SEQ ID NO: 1285141 - RNA, 19 nt, Homo sapiens
  misc_RNA (1)...(19): siRNA sense strand
cgacgacauuugcaagaag

SEQ ID NO: 1285142 - RNA, 19 nt, Homo sapiens
  misc_RNA (1)...(19): siRNA sense strand
ugaagaaggagaagaacug

SEQ ID NO: 1285143 - RNA, 19 nt, Homo sapiens
  misc_RNA (1)...(19): siRNA sense strand
gaacaacugccuggaugca

SEQ ID NO: 1285144 - RNA, 19 nt, Homo sapiens
  misc_RNA (1)...(19): siRNA sense strand
aagcagaagucgcucuaca

SEQ ID NO: 1285145 - RNA, 19 nt, Homo sapiens
  misc_RNA (1)...(19): siRNA sense strand
gcagaagucgcucuacaac

SEQ ID NO: 1285146 - RNA, 19 nt, Homo sapiens
  misc_RNA (1)...(19): siRNA sense strand
ccagccacauaaccacaaa

SEQ ID NO: 1285147 - RNA, 19 nt, Homo sapiens
  misc_RNA (1)...(19): siRNA sense strand
gacgacauuugcaagaagu

SEQ ID NO: 1285148 - RNA, 19 nt, Homo sapiens
  misc_RNA (1)...(19): siRNA sense strand
gcagcugucuaaaggaaaa

SEQ ID NO: 1285149 - RNA, 19 nt, Homo sapiens
  misc_RNA (1)...(19): siRNA sense strand
aagaacugccugcgcauuu

SEQ ID NO: 1285150 - RNA, 19 nt, Homo sapiens
  misc_RNA (1)...(19): siRNA sense strand
acacaccucuguauuucca

SEQ ID NO: 1285151 - RNA, 19 nt, Homo sapiens
  misc_RNA (1)...(19): siRNA sense strand
caacagugggaacgaccua

SEQ ID NO: 1285152 - RNA, 19 nt, Homo sapiens
  misc_RNA (1)...(19): siRNA sense strand
gguggucccauucauauca

SEQ ID NO: 1285153 - RNA, 19 nt, Homo sapiens
  misc_RNA (1)...(19): siRNA sense strand
ugaaauucccacucauguu

SEQ ID NO: 1285154 - RNA, 19 nt, Homo sapiens
  misc_RNA (1)...(19): siRNA sense strand
uccaaugugucgggcaaua

SEQ ID NO: 1285155 - RNA, 19 nt, Homo sapiens
  misc_RNA (1)...(19): siRNA sense strand
acaaggcccuccggcaguu

SEQ ID NO: 1285156 - RNA, 19 nt, Homo sapiens
  misc_RNA (1)...(19): siRNA sense strand
gaagcccaacuguuugaau

SEQ ID NO: 1285157 - RNA, 19 nt, Homo sapiens
  misc_RNA (1)...(19): siRNA sense strand
caacugccagccagaguca

SEQ ID NO: 1285158 - RNA, 19 nt, Homo sapiens
  misc_RNA (1)...(19): siRNA sense strand
gaacugccugcgcauuuac

SEQ ID NO: 1285159 - RNA, 19 nt, Homo sapiens
  misc_RNA (1)...(19): siRNA sense strand
gaagcugaaauccaaugug

SEQ ID NO: 1285160 - RNA, 19 nt, Homo sapiens
  misc_RNA (1)...(19): siRNA sense strand
ccaacuguuugaauuugca

SEQ ID NO: 1285161 - RNA, 19 nt, Homo sapiens
  misc_RNA (1)...(19): siRNA sense strand
gcaaauuuacaggcacaga

SEQ ID NO: 1285162 - RNA, 19 nt, Homo sapiens
  misc_RNA (1)...(19): siRNA sense strand
cagccagccuucccaguac

SEQ ID NO: 1285163 - RNA, 19 nt, Homo sapiens
  misc_RNA (1)...(19): siRNA sense strand
cauaugaaccaguuaacag

SEQ ID NO: 1285164 - RNA, 19 nt, Homo sapiens
  misc_RNA (1)...(19): siRNA sense strand
ccagcagggucugagaaug

SEQ ID NO: 1285165 - RNA, 19 nt, Homo sapiens
  misc_RNA (1)...(19): siRNA sense strand
gggcaaggagaccaacuuc

SEQ ID NO: 1285166 - RNA, 19 nt, Homo sapiens
  misc_RNA (1)...(19): siRNA sense strand
ccaaguaccgcacgcuaag

SEQ ID NO: 1285167 - RNA, 19 nt, Homo sapiens
  misc_RNA (1)...(19): siRNA sense strand
ugaagcagaagucgcucua

SEQ ID NO: 1285168 - RNA, 19 nt, Homo sapiens
  misc_RNA (1)...(19): siRNA sense strand
ucgacgacauuugcaagaa

SEQ ID NO: 1285169 - RNA, 19 nt, Homo sapiens
  misc_RNA (1)...(19): siRNA sense strand
gcuacggaaugcucuucug

SEQ ID NO: 1285170 - RNA, 19 nt, Homo sapiens
  misc_RNA (1)...(19): siRNA sense strand
gcucuguccacccuauuau

SEQ ID NO: 1285171 - RNA, 19 nt, Homo sapiens
  misc_RNA (1)...(19): siRNA sense strand
gcauuuacuggagcaugua

SEQ ID NO: 1285172 - RNA, 19 nt, Homo sapiens
  misc_RNA (1)...(19): siRNA sense strand
gggcaauacacaccucugu

SEQ ID NO: 1285173 - RNA, 19 nt, Homo sapiens
  misc_RNA (1)...(19): siRNA sense strand
acagcagauugucagauau

SEQ ID NO: 1285174 - RNA, 19 nt, Homo sapiens
  misc_RNA (1)...(19): siRNA sense strand
ccugugugcuccuaugaag

SEQ ID NO: 1285175 - RNA, 19 nt, Homo sapiens
  misc_RNA (1)...(19): siRNA sense strand
gcuggaggauuccccauau

SEQ ID NO: 1285176 - RNA, 19 nt, Homo sapiens
  misc_RNA (1)...(19): siRNA sense strand
aagcacagcuacggaaugc

SEQ ID NO: 1285177 - RNA, 19 nt, Homo sapiens
  misc_RNA (1)...(19): siRNA sense strand
caagcacagcuacggaaug

SEQ ID NO: 1285178 - RNA, 19 nt, Homo sapiens
  misc_RNA (1)...(19): siRNA sense strand
caaccucgacgacauuugc

SEQ ID NO: 1285179 - RNA, 19 nt, Homo sapiens
  misc_RNA (1)...(19): siRNA sense strand
cgcauuuacuggagcaugu

SEQ ID NO: 1285180 - RNA, 19 nt, Homo sapiens
  misc_RNA (1)...(19): siRNA sense strand
gggcuuauuggcacaguca

SEQ ID NO: 1285181 - RNA, 19 nt, Homo sapiens
  misc_RNA (1)...(19): siRNA sense strand
uccacccuauuaucuuuaa

SEQ ID NO: 1285182 - RNA, 19 nt, Homo sapiens
  misc_RNA (1)...(19): siRNA sense strand
ccggguggucccauucaua

SEQ ID NO: 1285183 - RNA, 19 nt, Homo sapiens
  misc_RNA (1)...(19): siRNA sense strand
auucaagccuuuggcaaug

SEQ ID NO: 1285184 - RNA, 19 nt, Homo sapiens
  misc_RNA (1)...(19): siRNA sense strand
cggguggucccauucauau

SEQ ID NO: 1285185 - RNA, 19 nt, Homo sapiens
  misc_RNA (1)...(19): siRNA sense strand
accagagccugcagggaaa

SEQ ID NO: 1285186 - RNA, 19 nt, Homo sapiens
  misc_RNA (1)...(19): siRNA sense strand
caaugugucgggcaauaca

SEQ ID NO: 1285187 - RNA, 19 nt, Homo sapiens
  misc_RNA (1)...(19): siRNA sense strand
ccauggaggcccugaagca

SEQ ID NO: 1285188 - RNA, 19 nt, Homo sapiens
  misc_RNA (1)...(19): siRNA sense strand
acuccugcaagacgaauua

SEQ ID NO: 1285189 - RNA, 19 nt, Homo sapiens
  misc_RNA (1)...(19): siRNA sense strand
gaaauucccacucauguuu

SEQ ID NO: 1285190 - RNA, 19 nt, Homo sapiens
  misc_RNA (1)...(19): siRNA sense strand
gaagagugcuugaaauuuu

SEQ ID NO: 1285191 - RNA, 19 nt, Homo sapiens
  misc_RNA (1)...(19): siRNA sense strand
gggagaagcccaacuguuu

SEQ ID NO: 1285192 - RNA, 19 nt, Homo sapiens
  misc_RNA (1)...(19): siRNA sense strand
gaucucgccuugcggauuu

SEQ ID NO: 1285193 - RNA, 19 nt, Homo sapiens
  misc_RNA (1)...(19): siRNA sense strand
cacagaagcugaaauccaa

SEQ ID NO: 1285194 - RNA, 19 nt, Homo sapiens
  misc_RNA (1)...(19): siRNA sense strand
ggcaauggcuccgauguga

SEQ ID NO: 1285195 - RNA, 19 nt, Homo sapiens
  misc_RNA (1)...(19): siRNA sense strand
agaagucgcucuacaacug

SEQ ID NO: 1285196 - RNA, 19 nt, Homo sapiens
  misc_RNA (1)...(19): siRNA sense strand
gcagccagccuucccagua

SEQ ID NO: 1285197 - RNA, 19 nt, Homo sapiens
  misc_RNA (1)...(19): siRNA sense strand
aacagcagauugucagaua

SEQ ID NO: 1285198 - RNA, 19 nt, Homo sapiens
  misc_RNA (1)...(19): siRNA sense strand
ccaccagcguguccaauga

SEQ ID NO: 1285199 - RNA, 19 nt, Homo sapiens
  misc_RNA (1)...(19): siRNA sense strand
agaacugccugcgcauuua

SEQ ID NO: 1285200 - RNA, 19 nt, Homo sapiens
  misc_RNA (1)...(19): siRNA sense strand
uagaagagugcuugaaauu

SEQ ID NO: 1285201 - RNA, 19 nt, Homo sapiens
  misc_RNA (1)...(19): siRNA sense strand
ccacugcccuccggguuaa

SEQ ID NO: 1285202 - RNA, 19 nt, Homo sapiens
  misc_RNA (1)...(19): siRNA sense strand
cagcagauugucagauaua

SEQ ID NO: 1285203 - RNA, 19 nt, Homo sapiens
  misc_RNA (1)...(19): siRNA sense strand
ggagaagcccaacuguuug

SEQ ID NO: 1285204 - RNA, 19 nt, Homo sapiens
  misc_RNA (1)...(19): siRNA sense strand
gagaagcccaacuguuuga

SEQ ID NO: 1285205 - RNA, 19 nt, Homo sapiens
  misc_RNA (1)...(19): siRNA sense strand
gcacagaagcugaaaucca

SEQ ID NO: 1285206 - RNA, 19 nt, Homo sapiens
  misc_RNA (1)...(19): siRNA sense strand
cuagaagagugcuugaaau

SEQ ID NO: 1285207 - RNA, 19 nt, Homo sapiens
  misc_RNA (1)...(19): siRNA sense strand
guaugaagaaggagaagaa

SEQ ID NO: 1285208 - RNA, 19 nt, Homo sapiens
  misc_RNA (1)...(19): siRNA sense strand
ccuccaagcuguggucuga

SEQ ID NO: 1285209 - RNA, 19 nt, Homo sapiens
  misc_RNA (1)...(19): siRNA sense strand
aagcugaaauccaaugugu

SEQ ID NO: 1285210 - RNA, 19 nt, Homo sapiens
  misc_RNA (1)...(19): siRNA sense strand
gccaccgugugcaaauuua

SEQ ID NO: 1285211 - RNA, 19 nt, Homo sapiens
  misc_RNA (1)...(19): siRNA sense strand
cagcagggucugagaauga

SEQ ID NO: 1285212 - RNA, 19 nt, Homo sapiens
  misc_RNA (1)...(19): siRNA sense strand
gcccaacuguuugaauuug

SEQ ID NO: 1285213 - RNA, 19 nt, Homo sapiens
  misc_RNA (1)...(19): siRNA sense strand
aagcccaacuguuugaauu

SEQ ID NO: 1285214 - RNA, 19 nt, Homo sapiens
  misc_RNA (1)...(19): siRNA sense strand
gcaaggagaccaacuucag

SEQ ID NO: 1285215 - RNA, 19 nt, Homo sapiens
  misc_RNA (1)...(19): siRNA sense strand
cagauugucagauauauuc

SEQ ID NO: 1285216 - RNA, 19 nt, Homo sapiens
  misc_RNA (1)...(19): siRNA sense strand
gcagauugucagauauauu

SEQ ID NO: 1285217 - RNA, 19 nt, Homo sapiens
  misc_RNA (1)...(19): siRNA sense strand
gaagaacugccugcgcauu

SEQ ID NO: 1285218 - RNA, 19 nt, Homo sapiens
  misc_RNA (1)...(19): siRNA sense strand
caaauuuacaggcacagaa

SEQ ID NO: 1285219 - RNA, 19 nt, Homo sapiens
  misc_RNA (1)...(19): siRNA sense strand
gcaagacgaauuacaucug

SEQ ID NO: 1285220 - RNA, 19 nt, Homo sapiens
  misc_RNA (1)...(19): siRNA sense strand
uguccacccuauuaucuuu

SEQ ID NO: 1285221 - RNA, 19 nt, Homo sapiens
  misc_RNA (1)...(19): siRNA sense strand
ccaguuaacagcagauugu

SEQ ID NO: 1285222 - RNA, 19 nt, Homo sapiens
  misc_RNA (1)...(19): siRNA sense strand
aaaugcaauucaagccuuu

SEQ ID NO: 1285223 - RNA, 19 nt, Homo sapiens
  misc_RNA (1)...(19): siRNA sense strand
ccuagaagagugcuugaaa

SEQ ID NO: 1285224 - RNA, 19 nt, Homo sapiens
  misc_RNA (1)...(19): siRNA sense strand
agaagagugcuugaaauuu

SEQ ID NO: 1285225 - RNA, 19 nt, Homo sapiens
  misc_RNA (1)...(19): siRNA sense strand
ccgccuggauugcgugaaa

SEQ ID NO: 1285226 - RNA, 19 nt, Homo sapiens
  misc_RNA (1)...(19): siRNA sense strand
uggaggcccugaagcagaa

SEQ ID NO: 1285227 - RNA, 19 nt, Homo sapiens
  misc_RNA (1)...(19): siRNA sense strand
ccacauaaccacaaaauca

SEQ ID NO: 1285228 - RNA, 19 nt, Homo sapiens
  misc_RNA (1)...(19): siRNA sense strand
cgacgacauuugcaagaag

SEQ ID NO: 1285229 - RNA, 19 nt, Homo sapiens
  misc_RNA (1)...(19): siRNA sense strand
ugaagaaggagaagaacug

SEQ ID NO: 1285230 - RNA, 19 nt, Homo sapiens
  misc_RNA (1)...(19): siRNA sense strand
gaacaacugccuggaugca

SEQ ID NO: 1285231 - RNA, 19 nt, Homo sapiens
  misc_RNA (1)...(19): siRNA sense strand
aagcagaagucgcucuaca

SEQ ID NO: 1285232 - RNA, 19 nt, Homo sapiens
  misc_RNA (1)...(19): siRNA sense strand
gcagaagucgcucuacaac

SEQ ID NO: 1285233 - RNA, 19 nt, Homo sapiens
  misc_RNA (1)...(19): siRNA sense strand
ccagccacauaaccacaaa

SEQ ID NO: 1285234 - RNA, 19 nt, Homo sapiens
  misc_RNA (1)...(19): siRNA sense strand
gacgacauuugcaagaagu

SEQ ID NO: 1285235 - RNA, 19 nt, Homo sapiens
  misc_RNA (1)...(19): siRNA sense strand
gcagcugucuaaaggaaaa

SEQ ID NO: 1285236 - RNA, 19 nt, Homo sapiens
  misc_RNA (1)...(19): siRNA sense strand
aagaacugccugcgcauuu

SEQ ID NO: 1285237 - RNA, 19 nt, Homo sapiens
  misc_RNA (1)...(19): siRNA sense strand
acacaccucuguauuucca

SEQ ID NO: 1285238 - RNA, 19 nt, Homo sapiens
  misc_RNA (1)...(19): siRNA sense strand
caacagugggaacgaccua

SEQ ID NO: 1285239 - RNA, 19 nt, Homo sapiens
  misc_RNA (1)...(19): siRNA sense strand
gguggucccauucauauca

SEQ ID NO: 1285240 - RNA, 19 nt, Homo sapiens
  misc_RNA (1)...(19): siRNA sense strand
ugaaauucccacucauguu

SEQ ID NO: 1285241 - RNA, 19 nt, Homo sapiens
  misc_RNA (1)...(19): siRNA sense strand
uccaaugugucgggcaaua

SEQ ID NO: 1285242 - RNA, 19 nt, Homo sapiens
  misc_RNA (1)...(19): siRNA sense strand
acaaggcccuccggcaguu

SEQ ID NO: 1285243 - RNA, 19 nt, Homo sapiens
  misc_RNA (1)...(19): siRNA sense strand
gaagcccaacuguuugaau

SEQ ID NO: 1285244 - RNA, 19 nt, Homo sapiens
  misc_RNA (1)...(19): siRNA sense strand
caacugccagccagaguca

SEQ ID NO: 1285245 - RNA, 19 nt, Homo sapiens
  misc_RNA (1)...(19): siRNA sense strand
gaacugccugcgcauuuac

SEQ ID NO: 1285246 - RNA, 19 nt, Homo sapiens
  misc_RNA (1)...(19): siRNA sense strand
gaagcugaaauccaaugug

SEQ ID NO: 1285247 - RNA, 19 nt, Homo sapiens
  misc_RNA (1)...(19): siRNA sense strand
ccaacuguuugaauuugca

SEQ ID NO: 1285248 - RNA, 19 nt, Homo sapiens
  misc_RNA (1)...(19): siRNA sense strand
gcaaauuuacaggcacaga

SEQ ID NO: 1285249 - RNA, 19 nt, Homo sapiens
  misc_RNA (1)...(19): siRNA sense strand
cagccagccuucccaguac

SEQ ID NO: 1285250 - RNA, 19 nt, Homo sapiens
  misc_RNA (1)...(19): siRNA sense strand
cauaugaaccaguuaacag

SEQ ID NO: 1285251 - RNA, 19 nt, Homo sapiens
  misc_RNA (1)...(19): siRNA sense strand
ccagcagggucugagaaug

SEQ ID NO: 1285252 - RNA, 19 nt, Homo sapiens
  misc_RNA (1)...(19): siRNA sense strand
gggcaaggagaccaacuuc

SEQ ID NO: 1285253 - RNA, 19 nt, Homo sapiens
  misc_RNA (1)...(19): siRNA sense strand
ccaaguaccgcacgcuaag

SEQ ID NO: 1285254 - RNA, 19 nt, Homo sapiens
  misc_RNA (1)...(19): siRNA sense strand
ugaagcagaagucgcucua

SEQ ID NO: 1285255 - RNA, 19 nt, Homo sapiens
  misc_RNA (1)...(19): siRNA sense strand
ucgacgacauuugcaagaa

SEQ ID NO: 1285256 - RNA, 19 nt, Homo sapiens
  misc_RNA (1)...(19): siRNA sense strand
gcuacggaaugcucuucug

SEQ ID NO: 1285257 - RNA, 19 nt, Homo sapiens
  misc_RNA (1)...(19): siRNA sense strand
gcucuguccacccuauuau

SEQ ID NO: 1285258 - RNA, 19 nt, Homo sapiens
  misc_RNA (1)...(19): siRNA sense strand
gcauuuacuggagcaugua

SEQ ID NO: 1285259 - RNA, 19 nt, Homo sapiens
  misc_RNA (1)...(19): siRNA sense strand
gggcaauacacaccucugu

SEQ ID NO: 1285260 - RNA, 19 nt, Homo sapiens
  misc_RNA (1)...(19): siRNA sense strand
acagcagauugucagauau

SEQ ID NO: 1285261 - RNA, 19 nt, Homo sapiens
  misc_RNA (1)...(19): siRNA sense strand
ccugugugcuccuaugaag

SEQ ID NO: 1285262 - RNA, 19 nt, Homo sapiens
  misc_RNA (1)...(19): siRNA sense strand
gcuggaggauuccccauau

SEQ ID NO: 1285263 - RNA, 19 nt, Homo sapiens
  misc_RNA (1)...(19): siRNA sense strand
aagcacagcuacggaaugc

SEQ ID NO: 1285264 - RNA, 19 nt, Homo sapiens
  misc_RNA (1)...(19): siRNA sense strand
caagcacagcuacggaaug

SEQ ID NO: 1285265 - RNA, 19 nt, Homo sapiens
  misc_RNA (1)...(19): siRNA sense strand
caaccucgacgacauuugc

SEQ ID NO: 1285266 - RNA, 19 nt, Homo sapiens
  misc_RNA (1)...(19): siRNA sense strand
cgcauuuacuggagcaugu

SEQ ID NO: 1285267 - RNA, 19 nt, Homo sapiens
  misc_RNA (1)...(19): siRNA sense strand
gggcuuauuggcacaguca

SEQ ID NO: 1285268 - RNA, 19 nt, Homo sapiens
  misc_RNA (1)...(19): siRNA sense strand
uccacccuauuaucuuuaa

SEQ ID NO: 1285269 - RNA, 19 nt, Homo sapiens
  misc_RNA (1)...(19): siRNA sense strand
ccggguggucccauucaua

SEQ ID NO: 1285270 - RNA, 19 nt, Homo sapiens
  misc_RNA (1)...(19): siRNA sense strand
auucaagccuuuggcaaug

SEQ ID NO: 1285271 - RNA, 19 nt, Homo sapiens
  misc_RNA (1)...(19): siRNA sense strand
cggguggucccauucauau

SEQ ID NO: 1285272 - RNA, 19 nt, Homo sapiens
  misc_RNA (1)...(19): siRNA sense strand
accagagccugcagggaaa

SEQ ID NO: 1285273 - RNA, 19 nt, Homo sapiens
  misc_RNA (1)...(19): siRNA sense strand
caaugugucgggcaauaca

SEQ ID NO: 1285274 - RNA, 19 nt, Homo sapiens
  misc_RNA (1)...(19): siRNA sense strand
ccauggaggcccugaagca

SEQ ID NO: 1285275 - RNA, 19 nt, Homo sapiens
  misc_RNA (1)...(19): siRNA sense strand
acuccugcaagacgaauua

SEQ ID NO: 1285276 - RNA, 19 nt, Homo sapiens
  misc_RNA (1)...(19): siRNA sense strand
gaaaucaucuuuacggaau

SEQ ID NO: 1285277 - RNA, 19 nt, Homo sapiens
  misc_RNA (1)...(19): siRNA sense strand
gcucaaaucuucacagagu

SEQ ID NO: 1285278 - RNA, 19 nt, Homo sapiens
  misc_RNA (1)...(19): siRNA sense strand
ggagcaacuuagucaaaua

SEQ ID NO: 1285279 - RNA, 19 nt, Homo sapiens
  misc_RNA (1)...(19): siRNA sense strand
ccuguggacuggaguauua

SEQ ID NO: 1285280 - RNA, 19 nt, Homo sapiens
  misc_RNA (1)...(19): siRNA sense strand
cacaagcucuuucuggaua

SEQ ID NO: 1285281 - RNA, 19 nt, Homo sapiens
  misc_RNA (1)...(19): siRNA sense strand
cgagccaacugcuguauuu

SEQ ID NO: 1285282 - RNA, 19 nt, Homo sapiens
  misc_RNA (1)...(19): siRNA sense strand
cagcagagccuuaucuauu

SEQ ID NO: 1285283 - RNA, 19 nt, Homo sapiens
  misc_RNA (1)...(19): siRNA sense strand
ggacaaaguacuugauaug

SEQ ID NO: 1285284 - RNA, 19 nt, Homo sapiens
  misc_RNA (1)...(19): siRNA sense strand
ggaauguggugcugagaga

SEQ ID NO: 1285285 - RNA, 19 nt, Homo sapiens
  misc_RNA (1)...(19): siRNA sense strand
gcaaauggacaaaguacuu

SEQ ID NO: 1285286 - RNA, 19 nt, Homo sapiens
  misc_RNA (1)...(19): siRNA sense strand
gauuacagguccuaucaug

SEQ ID NO: 1285287 - RNA, 19 nt, Homo sapiens
  misc_RNA (1)...(19): siRNA sense strand
ggauacagagaccaauuua

SEQ ID NO: 1285288 - RNA, 19 nt, Homo sapiens
  misc_RNA (1)...(19): siRNA sense strand
gcugagagacuacauuuau

SEQ ID NO: 1285289 - RNA, 19 nt, Homo sapiens
  misc_RNA (1)...(19): siRNA sense strand
gcacggagugugaauguga

SEQ ID NO: 1285290 - RNA, 19 nt, Homo sapiens
  misc_RNA (1)...(19): siRNA sense strand
ccucagacuucacauguau

SEQ ID NO: 1285291 - RNA, 19 nt, Homo sapiens
  misc_RNA (1)...(19): siRNA sense strand
cugagagacuacauuuaua

SEQ ID NO: 1285292 - RNA, 19 nt, Homo sapiens
  misc_RNA (1)...(19): siRNA sense strand
acaaaguacuugauaugga

SEQ ID NO: 1285293 - RNA, 19 nt, Homo sapiens
  misc_RNA (1)...(19): siRNA sense strand
gagauuacagguccuauca

SEQ ID NO: 1285294 - RNA, 19 nt, Homo sapiens
  misc_RNA (1)...(19): siRNA sense strand
caacugcuguauuuaacau

SEQ ID NO: 1285295 - RNA, 19 nt, Homo sapiens
  misc_RNA (1)...(19): siRNA sense strand
acagagaccaauuuaguuu

SEQ ID NO: 1285296 - RNA, 19 nt, Homo sapiens
  misc_RNA (1)...(19): siRNA sense strand
ccacuguucccucguauug

SEQ ID NO: 1285297 - RNA, 19 nt, Homo sapiens
  misc_RNA (1)...(19): siRNA sense strand
uuuaacaucugccugcaaa

SEQ ID NO: 1285298 - RNA, 19 nt, Homo sapiens
  misc_RNA (1)...(19): siRNA sense strand
ugaccaugcugcucaaauc

SEQ ID NO: 1285299 - RNA, 19 nt, Homo sapiens
  misc_RNA (1)...(19): siRNA sense strand
ggucuuguccagcauugua

SEQ ID NO: 1285300 - RNA, 19 nt, Homo sapiens
  misc_RNA (1)...(19): siRNA sense strand
cuaccacuguucccucgua

SEQ ID NO: 1285301 - RNA, 19 nt, Homo sapiens
  misc_RNA (1)...(19): siRNA sense strand
agcagagccuuaucuauug

SEQ ID NO: 1285302 - RNA, 19 nt, Homo sapiens
  misc_RNA (1)...(19): siRNA sense strand
gguccuaucaugccucauu

SEQ ID NO: 1285303 - RNA, 19 nt, Homo sapiens
  misc_RNA (1)...(19): siRNA sense strand
gcagagccuuaucuauugg

SEQ ID NO: 1285304 - RNA, 19 nt, Homo sapiens
  misc_RNA (1)...(19): siRNA sense strand
agacuucacauguaucauu

SEQ ID NO: 1285305 - RNA, 19 nt, Homo sapiens
  misc_RNA (1)...(19): siRNA sense strand
uaacaucugccugcaaaug

SEQ ID NO: 1285306 - RNA, 19 nt, Homo sapiens
  misc_RNA (1)...(19): siRNA sense strand
gugcugagagacuacauuu

SEQ ID NO: 1285307 - RNA, 19 nt, Homo sapiens
  misc_RNA (1)...(19): siRNA sense strand
gacuucacauguaucauuc

SEQ ID NO: 1285308 - RNA, 19 nt, Homo sapiens
  misc_RNA (1)...(19): siRNA sense strand
cugggcagaucauuugaaa

SEQ ID NO: 1285309 - RNA, 19 nt, Homo sapiens
  misc_RNA (1)...(19): siRNA sense strand
auacagagaccaauuuagu

SEQ ID NO: 1285310 - RNA, 19 nt, Homo sapiens
  misc_RNA (1)...(19): siRNA sense strand
ccucugagcuccguuguac

SEQ ID NO: 1285311 - RNA, 19 nt, Homo sapiens
  misc_RNA (1)...(19): siRNA sense strand
gggcagaucauuugaaagc

SEQ ID NO: 1285312 - RNA, 19 nt, Homo sapiens
  misc_RNA (1)...(19): siRNA sense strand
agucaaauaccguuacuug

SEQ ID NO: 1285313 - RNA, 19 nt, Homo sapiens
  misc_RNA (1)...(19): siRNA sense strand
gagccaacugcuguauuua

SEQ ID NO: 1285314 - RNA, 19 nt, Homo sapiens
  misc_RNA (1)...(19): siRNA sense strand
uauuggagcugauagaaaa

SEQ ID NO: 1285315 - RNA, 19 nt, Homo sapiens
  misc_RNA (1)...(19): siRNA sense strand
gcuccacccugcuuugucu

SEQ ID NO: 1285316 - RNA, 19 nt, Homo sapiens
  misc_RNA (1)...(19): siRNA sense strand
gcuaugggaagagaaguuu

SEQ ID NO: 1285317 - RNA, 19 nt, Homo sapiens
  misc_RNA (1)...(19): siRNA sense strand
caaauggacaaaguacuug

SEQ ID NO: 1285318 - RNA, 19 nt, Homo sapiens
  misc_RNA (1)...(19): siRNA sense strand
ccaugcugcucaaaucuuc

SEQ ID NO: 1285319 - RNA, 19 nt, Homo sapiens
  misc_RNA (1)...(19): siRNA sense strand
guauuggagcugauagaaa

SEQ ID NO: 1285320 - RNA, 19 nt, Homo sapiens
  misc_RNA (1)...(19): siRNA sense strand
ugucuuggcuaccacuguu

SEQ ID NO: 1285321 - RNA, 19 nt, Homo sapiens
  misc_RNA (1)...(19): siRNA sense strand
gagcaacuuagucaaauac

SEQ ID NO: 1285322 - RNA, 19 nt, Homo sapiens
  misc_RNA (1)...(19): siRNA sense strand
gccaacugcuguauuuaac

SEQ ID NO: 1285323 - RNA, 19 nt, Homo sapiens
  misc_RNA (1)...(19): siRNA sense strand
gaaagcacaggaagaagcu

SEQ ID NO: 1285324 - RNA, 19 nt, Homo sapiens
  misc_RNA (1)...(19): siRNA sense strand
gauuugcuaugggaagaga

SEQ ID NO: 1285325 - RNA, 19 nt, Homo sapiens
  misc_RNA (1)...(19): siRNA sense strand
uggacaaaguacuugauau

SEQ ID NO: 1285326 - RNA, 19 nt, Homo sapiens
  misc_RNA (1)...(19): siRNA sense strand
caccucuucucaacccuuu

SEQ ID NO: 1285327 - RNA, 19 nt, Homo sapiens
  misc_RNA (1)...(19): siRNA sense strand
gcaacccugcagcauguuu

SEQ ID NO: 1285328 - RNA, 19 nt, Homo sapiens
  misc_RNA (1)...(19): siRNA sense strand
cugcucaaaucuucacaga

SEQ ID NO: 1285329 - RNA, 19 nt, Homo sapiens
  misc_RNA (1)...(19): siRNA sense strand
ucacagaguggaucuuucu

SEQ ID NO: 1285330 - RNA, 19 nt, Homo sapiens
  misc_RNA (1)...(19): siRNA sense strand
uggagcaacuuagucaaau

SEQ ID NO: 1285331 - RNA, 19 nt, Homo sapiens
  misc_RNA (1)...(19): siRNA sense strand
gacaaaguacuugauaugg

SEQ ID NO: 1285332 - RNA, 19 nt, Homo sapiens
  misc_RNA (1)...(19): siRNA sense strand
uggauacagagaccaauuu

SEQ ID NO: 1285333 - RNA, 19 nt, Homo sapiens
  misc_RNA (1)...(19): siRNA sense strand
ggagauuacagguccuauc

SEQ ID NO: 1285334 - RNA, 19 nt, Homo sapiens
  misc_RNA (1)...(19): siRNA sense strand
uaccugggcagaucauuug

SEQ ID NO: 1285335 - RNA, 19 nt, Homo sapiens
  misc_RNA (1)...(19): siRNA sense strand
cuaacacucuggagcaacu

SEQ ID NO: 1285336 - RNA, 19 nt, Homo sapiens
  misc_RNA (1)...(19): siRNA sense strand
gagcuuacuaacugugguu

SEQ ID NO: 1285337 - RNA, 19 nt, Homo sapiens
  misc_RNA (1)...(19): siRNA sense strand
uauacaggaucccaaacuc

SEQ ID NO: 1285338 - RNA, 19 nt, Homo sapiens
  misc_RNA (1)...(19): siRNA sense strand
uacagagaccaauuuaguu

SEQ ID NO: 1285339 - RNA, 19 nt, Homo sapiens
  misc_RNA (1)...(19): siRNA sense strand
gauacagagaccaauuuag

SEQ ID NO: 1285340 - RNA, 19 nt, Homo sapiens
  misc_RNA (1)...(19): siRNA sense strand
uuaccugggcagaucauuu

SEQ ID NO: 1285341 - RNA, 19 nt, Homo sapiens
  misc_RNA (1)...(19): siRNA sense strand
cuugggaaaucaucuuuac

SEQ ID NO: 1285342 - RNA, 19 nt, Homo sapiens
  misc_RNA (1)...(19): siRNA sense strand
cagagaccaauuuaguuug

SEQ ID NO: 1285343 - RNA, 19 nt, Homo sapiens
  misc_RNA (1)...(19): siRNA sense strand
gagugugaaugugaagaca

SEQ ID NO: 1285344 - RNA, 19 nt, Homo sapiens
  misc_RNA (1)...(19): siRNA sense strand
aucccaaacucuccucuga

SEQ ID NO: 1285345 - RNA, 19 nt, Homo sapiens
  misc_RNA (1)...(19): siRNA sense strand
uggagguuguucauaagga

SEQ ID NO: 1285346 - RNA, 19 nt, Homo sapiens
  misc_RNA (1)...(19): siRNA sense strand
agccaacugcuguauuuaa

SEQ ID NO: 1285347 - RNA, 19 nt, Homo sapiens
  misc_RNA (1)...(19): siRNA sense strand
ccagcagagccuuaucuau

SEQ ID NO: 1285348 - RNA, 19 nt, Homo sapiens
  misc_RNA (1)...(19): siRNA sense strand
cacggagugugaaugugaa

SEQ ID NO: 1285349 - RNA, 19 nt, Homo sapiens
  misc_RNA (1)...(19): siRNA sense strand
acuguucccucguauugga

SEQ ID NO: 1285350 - RNA, 19 nt, Homo sapiens
  misc_RNA (1)...(19): siRNA sense strand
uuugaaagcacaggaagaa

SEQ ID NO: 1285351 - RNA, 19 nt, Homo sapiens
  misc_RNA (1)...(19): siRNA sense strand
gccugcaaauggacaaagu

SEQ ID NO: 1285352 - RNA, 19 nt, Homo sapiens
  misc_RNA (1)...(19): siRNA sense strand
ucagacuucacauguauca

SEQ ID NO: 1285353 - RNA, 19 nt, Homo sapiens
  misc_RNA (1)...(19): siRNA sense strand
guauacaggaucccaaacu

SEQ ID NO: 1285354 - RNA, 19 nt, Homo sapiens
  misc_RNA (1)...(19): siRNA sense strand
gcuggaaagacaaguccuu

SEQ ID NO: 1285355 - RNA, 19 nt, Homo sapiens
  misc_RNA (1)...(19): siRNA sense strand
aaucaucuuuacggaaugu

SEQ ID NO: 1285356 - RNA, 19 nt, Homo sapiens
  misc_RNA (1)...(19): siRNA sense strand
acaucugccugcaaaugga

SEQ ID NO: 1285357 - RNA, 19 nt, Homo sapiens
  misc_RNA (1)...(19): siRNA sense strand
guccuaucaugccucauuc

SEQ ID NO: 1285358 - RNA, 19 nt, Homo sapiens
  misc_RNA (1)...(19): siRNA sense strand
ccuguggacuggaguauua

SEQ ID NO: 1285359 - RNA, 19 nt, Homo sapiens
  misc_RNA (1)...(19): siRNA sense strand
cagcagagccuuaucuauu

SEQ ID NO: 1285360 - RNA, 19 nt, Homo sapiens
  misc_RNA (1)...(19): siRNA sense strand
ccucagacuucacauguau

SEQ ID NO: 1285361 - RNA, 19 nt, Homo sapiens
  misc_RNA (1)...(19): siRNA sense strand
ccacuguucccucguauug

SEQ ID NO: 1285362 - RNA, 19 nt, Homo sapiens
  misc_RNA (1)...(19): siRNA sense strand
ggucuuguccagcauugua

SEQ ID NO: 1285363 - RNA, 19 nt, Homo sapiens
  misc_RNA (1)...(19): siRNA sense strand
cuaccacuguucccucgua

SEQ ID NO: 1285364 - RNA, 19 nt, Homo sapiens
  misc_RNA (1)...(19): siRNA sense strand
agcagagccuuaucuauug

SEQ ID NO: 1285365 - RNA, 19 nt, Homo sapiens
  misc_RNA (1)...(19): siRNA sense strand
gcagagccuuaucuauugg

SEQ ID NO: 1285366 - RNA, 19 nt, Homo sapiens
  misc_RNA (1)...(19): siRNA sense strand
agacuucacauguaucauu

SEQ ID NO: 1285367 - RNA, 19 nt, Homo sapiens
  misc_RNA (1)...(19): siRNA sense strand
gacuucacauguaucauuc

SEQ ID NO: 1285368 - RNA, 19 nt, Homo sapiens
  misc_RNA (1)...(19): siRNA sense strand
cugggcagaucauuugaaa

SEQ ID NO: 1285369 - RNA, 19 nt, Homo sapiens
  misc_RNA (1)...(19): siRNA sense strand
ccucugagcuccguuguac

SEQ ID NO: 1285370 - RNA, 19 nt, Homo sapiens
  misc_RNA (1)...(19): siRNA sense strand
gggcagaucauuugaaagc

SEQ ID NO: 1285371 - RNA, 19 nt, Homo sapiens
  misc_RNA (1)...(19): siRNA sense strand
uauuggagcugauagaaaa

SEQ ID NO: 1285372 - RNA, 19 nt, Homo sapiens
  misc_RNA (1)...(19): siRNA sense strand
gcuccacccugcuuugucu

SEQ ID NO: 1285373 - RNA, 19 nt, Homo sapiens
  misc_RNA (1)...(19): siRNA sense strand
gcuaugggaagagaaguuu

SEQ ID NO: 1285374 - RNA, 19 nt, Homo sapiens
  misc_RNA (1)...(19): siRNA sense strand
guauuggagcugauagaaa

SEQ ID NO: 1285375 - RNA, 19 nt, Homo sapiens
  misc_RNA (1)...(19): siRNA sense strand
ugucuuggcuaccacuguu

SEQ ID NO: 1285376 - RNA, 19 nt, Homo sapiens
  misc_RNA (1)...(19): siRNA sense strand
gaaagcacaggaagaagcu

SEQ ID NO: 1285377 - RNA, 19 nt, Homo sapiens
  misc_RNA (1)...(19): siRNA sense strand
gauuugcuaugggaagaga

SEQ ID NO: 1285378 - RNA, 19 nt, Homo sapiens
  misc_RNA (1)...(19): siRNA sense strand
caccucuucucaacccuuu

SEQ ID NO: 1285379 - RNA, 19 nt, Homo sapiens
  misc_RNA (1)...(19): siRNA sense strand
gcaacccugcagcauguuu

SEQ ID NO: 1285380 - RNA, 19 nt, Homo sapiens
  misc_RNA (1)...(19): siRNA sense strand
uaccugggcagaucauuug

SEQ ID NO: 1285381 - RNA, 19 nt, Homo sapiens
  misc_RNA (1)...(19): siRNA sense strand
uauacaggaucccaaacuc

SEQ ID NO: 1285382 - RNA, 19 nt, Homo sapiens
  misc_RNA (1)...(19): siRNA sense strand
uuaccugggcagaucauuu

SEQ ID NO: 1285383 - RNA, 19 nt, Homo sapiens
  misc_RNA (1)...(19): siRNA sense strand
aucccaaacucuccucuga

SEQ ID NO: 1285384 - RNA, 19 nt, Homo sapiens
  misc_RNA (1)...(19): siRNA sense strand
ccagcagagccuuaucuau

SEQ ID NO: 1285385 - RNA, 19 nt, Homo sapiens
  misc_RNA (1)...(19): siRNA sense strand
acuguucccucguauugga

SEQ ID NO: 1285386 - RNA, 19 nt, Homo sapiens
  misc_RNA (1)...(19): siRNA sense strand
uuugaaagcacaggaagaa

SEQ ID NO: 1285387 - RNA, 19 nt, Homo sapiens
  misc_RNA (1)...(19): siRNA sense strand
ucagacuucacauguauca

SEQ ID NO: 1285388 - RNA, 19 nt, Homo sapiens
  misc_RNA (1)...(19): siRNA sense strand
guauacaggaucccaaacu

SEQ ID NO: 1285389 - RNA, 19 nt, Homo sapiens
  misc_RNA (1)...(19): siRNA sense strand
gcuggaaagacaaguccuu

SEQ ID NO: 1285390 - RNA, 19 nt, Homo sapiens
  misc_RNA (1)...(19): siRNA sense strand
ccuguggacuggaguauua

SEQ ID NO: 1285391 - RNA, 19 nt, Homo sapiens
  misc_RNA (1)...(19): siRNA sense strand
cagcagagccuuaucuauu

SEQ ID NO: 1285392 - RNA, 19 nt, Homo sapiens
  misc_RNA (1)...(19): siRNA sense strand
ccucagacuucacauguau

SEQ ID NO: 1285393 - RNA, 19 nt, Homo sapiens
  misc_RNA (1)...(19): siRNA sense strand
ccacuguucccucguauug

SEQ ID NO: 1285394 - RNA, 19 nt, Homo sapiens
  misc_RNA (1)...(19): siRNA sense strand
ggucuuguccagcauugua

SEQ ID NO: 1285395 - RNA, 19 nt, Homo sapiens
  misc_RNA (1)...(19): siRNA sense strand
cuaccacuguucccucgua

SEQ ID NO: 1285396 - RNA, 19 nt, Homo sapiens
  misc_RNA (1)...(19): siRNA sense strand
agcagagccuuaucuauug

SEQ ID NO: 1285397 - RNA, 19 nt, Homo sapiens
  misc_RNA (1)...(19): siRNA sense strand
gcagagccuuaucuauugg

SEQ ID NO: 1285398 - RNA, 19 nt, Homo sapiens
  misc_RNA (1)...(19): siRNA sense strand
agacuucacauguaucauu

SEQ ID NO: 1285399 - RNA, 19 nt, Homo sapiens
  misc_RNA (1)...(19): siRNA sense strand
gacuucacauguaucauuc

SEQ ID NO: 1285400 - RNA, 19 nt, Homo sapiens
  misc_RNA (1)...(19): siRNA sense strand
cugggcagaucauuugaaa

SEQ ID NO: 1285401 - RNA, 19 nt, Homo sapiens
  misc_RNA (1)...(19): siRNA sense strand
ccucugagcuccguuguac

SEQ ID NO: 1285402 - RNA, 19 nt, Homo sapiens
  misc_RNA (1)...(19): siRNA sense strand
gggcagaucauuugaaagc

SEQ ID NO: 1285403 - RNA, 19 nt, Homo sapiens
  misc_RNA (1)...(19): siRNA sense strand
uauuggagcugauagaaaa

SEQ ID NO: 1285404 - RNA, 19 nt, Homo sapiens
  misc_RNA (1)...(19): siRNA sense strand
gcuccacccugcuuugucu

SEQ ID NO: 1285405 - RNA, 19 nt, Homo sapiens
  misc_RNA (1)...(19): siRNA sense strand
gcuaugggaagagaaguuu

SEQ ID NO: 1285406 - RNA, 19 nt, Homo sapiens
  misc_RNA (1)...(19): siRNA sense strand
guauuggagcugauagaaa

SEQ ID NO: 1285407 - RNA, 19 nt, Homo sapiens
  misc_RNA (1)...(19): siRNA sense strand
ugucuuggcuaccacuguu

SEQ ID NO: 1285408 - RNA, 19 nt, Homo sapiens
  misc_RNA (1)...(19): siRNA sense strand
gaaagcacaggaagaagcu

SEQ ID NO: 1285409 - RNA, 19 nt, Homo sapiens
  misc_RNA (1)...(19): siRNA sense strand
gauuugcuaugggaagaga

SEQ ID NO: 1285410 - RNA, 19 nt, Homo sapiens
  misc_RNA (1)...(19): siRNA sense strand
caccucuucucaacccuuu

SEQ ID NO: 1285411 - RNA, 19 nt, Homo sapiens
  misc_RNA (1)...(19): siRNA sense strand
gcaacccugcagcauguuu

SEQ ID NO: 1285412 - RNA, 19 nt, Homo sapiens
  misc_RNA (1)...(19): siRNA sense strand
uaccugggcagaucauuug

SEQ ID NO: 1285413 - RNA, 19 nt, Homo sapiens
  misc_RNA (1)...(19): siRNA sense strand
uauacaggaucccaaacuc

SEQ ID NO: 1285414 - RNA, 19 nt, Homo sapiens
  misc_RNA (1)...(19): siRNA sense strand
uuaccugggcagaucauuu

SEQ ID NO: 1285415 - RNA, 19 nt, Homo sapiens
  misc_RNA (1)...(19): siRNA sense strand
aucccaaacucuccucuga

SEQ ID NO: 1285416 - RNA, 19 nt, Homo sapiens
  misc_RNA (1)...(19): siRNA sense strand
ccagcagagccuuaucuau

SEQ ID NO: 1285417 - RNA, 19 nt, Homo sapiens
  misc_RNA (1)...(19): siRNA sense strand
acuguucccucguauugga

SEQ ID NO: 1285418 - RNA, 19 nt, Homo sapiens
  misc_RNA (1)...(19): siRNA sense strand
uuugaaagcacaggaagaa

SEQ ID NO: 1285419 - RNA, 19 nt, Homo sapiens
  misc_RNA (1)...(19): siRNA sense strand
ucagacuucacauguauca

SEQ ID NO: 1285420 - RNA, 19 nt, Homo sapiens
  misc_RNA (1)...(19): siRNA sense strand
guauacaggaucccaaacu

SEQ ID NO: 1285421 - RNA, 19 nt, Homo sapiens
  misc_RNA (1)...(19): siRNA sense strand
gcuggaaagacaaguccuu

SEQ ID NO: 1285422 - RNA, 19 nt, Homo sapiens
  misc_RNA (1)...(19): siRNA sense strand
gaaaucaucuuuacggaau

SEQ ID NO: 1285423 - RNA, 19 nt, Homo sapiens
  misc_RNA (1)...(19): siRNA sense strand
gcucaaaucuucacagagu

SEQ ID NO: 1285424 - RNA, 19 nt, Homo sapiens
  misc_RNA (1)...(19): siRNA sense strand
ggagcaacuuagucaaaua

SEQ ID NO: 1285425 - RNA, 19 nt, Homo sapiens
  misc_RNA (1)...(19): siRNA sense strand
ccuguggacuggaguauua

SEQ ID NO: 1285426 - RNA, 19 nt, Homo sapiens
  misc_RNA (1)...(19): siRNA sense strand
cacaagcucuuucuggaua

SEQ ID NO: 1285427 - RNA, 19 nt, Homo sapiens
  misc_RNA (1)...(19): siRNA sense strand
cgagccaacugcuguauuu

SEQ ID NO: 1285428 - RNA, 19 nt, Homo sapiens
  misc_RNA (1)...(19): siRNA sense strand
cagcagagccuuaucuauu

SEQ ID NO: 1285429 - RNA, 19 nt, Homo sapiens
  misc_RNA (1)...(19): siRNA sense strand
ggacaaaguacuugauaug

SEQ ID NO: 1285430 - RNA, 19 nt, Homo sapiens
  misc_RNA (1)...(19): siRNA sense strand
ggaauguggugcugagaga

SEQ ID NO: 1285431 - RNA, 19 nt, Homo sapiens
  misc_RNA (1)...(19): siRNA sense strand
gcaaauggacaaaguacuu

SEQ ID NO: 1285432 - RNA, 19 nt, Homo sapiens
  misc_RNA (1)...(19): siRNA sense strand
gauuacagguccuaucaug

SEQ ID NO: 1285433 - RNA, 19 nt, Homo sapiens
  misc_RNA (1)...(19): siRNA sense strand
ggauacagagaccaauuua

SEQ ID NO: 1285434 - RNA, 19 nt, Homo sapiens
  misc_RNA (1)...(19): siRNA sense strand
gcugagagacuacauuuau

SEQ ID NO: 1285435 - RNA, 19 nt, Homo sapiens
  misc_RNA (1)...(19): siRNA sense strand
gcacggagugugaauguga

SEQ ID NO: 1285436 - RNA, 19 nt, Homo sapiens
  misc_RNA (1)...(19): siRNA sense strand
ccucagacuucacauguau

SEQ ID NO: 1285437 - RNA, 19 nt, Homo sapiens
  misc_RNA (1)...(19): siRNA sense strand
cugagagacuacauuuaua

SEQ ID NO: 1285438 - RNA, 19 nt, Homo sapiens
  misc_RNA (1)...(19): siRNA sense strand
acaaaguacuugauaugga

SEQ ID NO: 1285439 - RNA, 19 nt, Homo sapiens
  misc_RNA (1)...(19): siRNA sense strand
gagauuacagguccuauca

SEQ ID NO: 1285440 - RNA, 19 nt, Homo sapiens
  misc_RNA (1)...(19): siRNA sense strand
caacugcuguauuuaacau

SEQ ID NO: 1285441 - RNA, 19 nt, Homo sapiens
  misc_RNA (1)...(19): siRNA sense strand
acagagaccaauuuaguuu

SEQ ID NO: 1285442 - RNA, 19 nt, Homo sapiens
  misc_RNA (1)...(19): siRNA sense strand
ccacuguucccucguauug

SEQ ID NO: 1285443 - RNA, 19 nt, Homo sapiens
  misc_RNA (1)...(19): siRNA sense strand
uuuaacaucugccugcaaa

SEQ ID NO: 1285444 - RNA, 19 nt, Homo sapiens
  misc_RNA (1)...(19): siRNA sense strand
ugaccaugcugcucaaauc

SEQ ID NO: 1285445 - RNA, 19 nt, Homo sapiens
  misc_RNA (1)...(19): siRNA sense strand
ggucuuguccagcauugua

SEQ ID NO: 1285446 - RNA, 19 nt, Homo sapiens
  misc_RNA (1)...(19): siRNA sense strand
cuaccacuguucccucgua

SEQ ID NO: 1285447 - RNA, 19 nt, Homo sapiens
  misc_RNA (1)...(19): siRNA sense strand
agcagagccuuaucuauug

SEQ ID NO: 1285448 - RNA, 19 nt, Homo sapiens
  misc_RNA (1)...(19): siRNA sense strand
gguccuaucaugccucauu

SEQ ID NO: 1285449 - RNA, 19 nt, Homo sapiens
  misc_RNA (1)...(19): siRNA sense strand
gcagagccuuaucuauugg

SEQ ID NO: 1285450 - RNA, 19 nt, Homo sapiens
  misc_RNA (1)...(19): siRNA sense strand
agacuucacauguaucauu

SEQ ID NO: 1285451 - RNA, 19 nt, Homo sapiens
  misc_RNA (1)...(19): siRNA sense strand
uaacaucugccugcaaaug

SEQ ID NO: 1285452 - RNA, 19 nt, Homo sapiens
  misc_RNA (1)...(19): siRNA sense strand
gugcugagagacuacauuu

SEQ ID NO: 1285453 - RNA, 19 nt, Homo sapiens
  misc_RNA (1)...(19): siRNA sense strand
gacuucacauguaucauuc

SEQ ID NO: 1285454 - RNA, 19 nt, Homo sapiens
  misc_RNA (1)...(19): siRNA sense strand
cugggcagaucauuugaaa

SEQ ID NO: 1285455 - RNA, 19 nt, Homo sapiens
  misc_RNA (1)...(19): siRNA sense strand
auacagagaccaauuuagu

SEQ ID NO: 1285456 - RNA, 19 nt, Homo sapiens
  misc_RNA (1)...(19): siRNA sense strand
ccucugagcuccguuguac

SEQ ID NO: 1285457 - RNA, 19 nt, Homo sapiens
  misc_RNA (1)...(19): siRNA sense strand
gggcagaucauuugaaagc

SEQ ID NO: 1285458 - RNA, 19 nt, Homo sapiens
  misc_RNA (1)...(19): siRNA sense strand
agucaaauaccguuacuug

SEQ ID NO: 1285459 - RNA, 19 nt, Homo sapiens
  misc_RNA (1)...(19): siRNA sense strand
gagccaacugcuguauuua

SEQ ID NO: 1285460 - RNA, 19 nt, Homo sapiens
  misc_RNA (1)...(19): siRNA sense strand
uauuggagcugauagaaaa

SEQ ID NO: 1285461 - RNA, 19 nt, Homo sapiens
  misc_RNA (1)...(19): siRNA sense strand
gcuccacccugcuuugucu

SEQ ID NO: 1285462 - RNA, 19 nt, Homo sapiens
  misc_RNA (1)...(19): siRNA sense strand
gcuaugggaagagaaguuu

SEQ ID NO: 1285463 - RNA, 19 nt, Homo sapiens
  misc_RNA (1)...(19): siRNA sense strand
caaauggacaaaguacuug

SEQ ID NO: 1285464 - RNA, 19 nt, Homo sapiens
  misc_RNA (1)...(19): siRNA sense strand
ccaugcugcucaaaucuuc

SEQ ID NO: 1285465 - RNA, 19 nt, Homo sapiens
  misc_RNA (1)...(19): siRNA sense strand
guauuggagcugauagaaa

SEQ ID NO: 1285466 - RNA, 19 nt, Homo sapiens
  misc_RNA (1)...(19): siRNA sense strand
ugucuuggcuaccacuguu

SEQ ID NO: 1285467 - RNA, 19 nt, Homo sapiens
  misc_RNA (1)...(19): siRNA sense strand
gagcaacuuagucaaauac

SEQ ID NO: 1285468 - RNA, 19 nt, Homo sapiens
  misc_RNA (1)...(19): siRNA sense strand
gccaacugcuguauuuaac

SEQ ID NO: 1285469 - RNA, 19 nt, Homo sapiens
  misc_RNA (1)...(19): siRNA sense strand
gaaagcacaggaagaagcu

SEQ ID NO: 1285470 - RNA, 19 nt, Homo sapiens
  misc_RNA (1)...(19): siRNA sense strand
gauuugcuaugggaagaga

SEQ ID NO: 1285471 - RNA, 19 nt, Homo sapiens
  misc_RNA (1)...(19): siRNA sense strand
uggacaaaguacuugauau

SEQ ID NO: 1285472 - RNA, 19 nt, Homo sapiens
  misc_RNA (1)...(19): siRNA sense strand
caccucuucucaacccuuu

SEQ ID NO: 1285473 - RNA, 19 nt, Homo sapiens
  misc_RNA (1)...(19): siRNA sense strand
gcaacccugcagcauguuu

SEQ ID NO: 1285474 - RNA, 19 nt, Homo sapiens
  misc_RNA (1)...(19): siRNA sense strand
cugcucaaaucuucacaga

SEQ ID NO: 1285475 - RNA, 19 nt, Homo sapiens
  misc_RNA (1)...(19): siRNA sense strand
ucacagaguggaucuuucu

SEQ ID NO: 1285476 - RNA, 19 nt, Homo sapiens
  misc_RNA (1)...(19): siRNA sense strand
uggagcaacuuagucaaau

SEQ ID NO: 1285477 - RNA, 19 nt, Homo sapiens
  misc_RNA (1)...(19): siRNA sense strand
gacaaaguacuugauaugg

SEQ ID NO: 1285478 - RNA, 19 nt, Homo sapiens
  misc_RNA (1)...(19): siRNA sense strand
uggauacagagaccaauuu

SEQ ID NO: 1285479 - RNA, 19 nt, Homo sapiens
  misc_RNA (1)...(19): siRNA sense strand
ggagauuacagguccuauc

SEQ ID NO: 1285480 - RNA, 19 nt, Homo sapiens
  misc_RNA (1)...(19): siRNA sense strand
uaccugggcagaucauuug

SEQ ID NO: 1285481 - RNA, 19 nt, Homo sapiens
  misc_RNA (1)...(19): siRNA sense strand
cuaacacucuggagcaacu

SEQ ID NO: 1285482 - RNA, 19 nt, Homo sapiens
  misc_RNA (1)...(19): siRNA sense strand
gagcuuacuaacugugguu

SEQ ID NO: 1285483 - RNA, 19 nt, Homo sapiens
  misc_RNA (1)...(19): siRNA sense strand
uauacaggaucccaaacuc

SEQ ID NO: 1285484 - RNA, 19 nt, Homo sapiens
  misc_RNA (1)...(19): siRNA sense strand
uacagagaccaauuuaguu

SEQ ID NO: 1285485 - RNA, 19 nt, Homo sapiens
  misc_RNA (1)...(19): siRNA sense strand
gauacagagaccaauuuag

SEQ ID NO: 1285486 - RNA, 19 nt, Homo sapiens
  misc_RNA (1)...(19): siRNA sense strand
uuaccugggcagaucauuu

SEQ ID NO: 1285487 - RNA, 19 nt, Homo sapiens
  misc_RNA (1)...(19): siRNA sense strand
cuugggaaaucaucuuuac

SEQ ID NO: 1285488 - RNA, 19 nt, Homo sapiens
  misc_RNA (1)...(19): siRNA sense strand
cagagaccaauuuaguuug

SEQ ID NO: 1285489 - RNA, 19 nt, Homo sapiens
  misc_RNA (1)...(19): siRNA sense strand
gagugugaaugugaagaca

SEQ ID NO: 1285490 - RNA, 19 nt, Homo sapiens
  misc_RNA (1)...(19): siRNA sense strand
aucccaaacucuccucuga

SEQ ID NO: 1285491 - RNA, 19 nt, Homo sapiens
  misc_RNA (1)...(19): siRNA sense strand
uggagguuguucauaagga

SEQ ID NO: 1285492 - RNA, 19 nt, Homo sapiens
  misc_RNA (1)...(19): siRNA sense strand
agccaacugcuguauuuaa

SEQ ID NO: 1285493 - RNA, 19 nt, Homo sapiens
  misc_RNA (1)...(19): siRNA sense strand
ccagcagagccuuaucuau

SEQ ID NO: 1285494 - RNA, 19 nt, Homo sapiens
  misc_RNA (1)...(19): siRNA sense strand
cacggagugugaaugugaa

SEQ ID NO: 1285495 - RNA, 19 nt, Homo sapiens
  misc_RNA (1)...(19): siRNA sense strand
acuguucccucguauugga

SEQ ID NO: 1285496 - RNA, 19 nt, Homo sapiens
  misc_RNA (1)...(19): siRNA sense strand
uuugaaagcacaggaagaa

SEQ ID NO: 1285497 - RNA, 19 nt, Homo sapiens
  misc_RNA (1)...(19): siRNA sense strand
gccugcaaauggacaaagu

SEQ ID NO: 1285498 - RNA, 19 nt, Homo sapiens
  misc_RNA (1)...(19): siRNA sense strand
ucagacuucacauguauca

SEQ ID NO: 1285499 - RNA, 19 nt, Homo sapiens
  misc_RNA (1)...(19): siRNA sense strand
guauacaggaucccaaacu

SEQ ID NO: 1285500 - RNA, 19 nt, Homo sapiens
  misc_RNA (1)...(19): siRNA sense strand
gcuggaaagacaaguccuu

SEQ ID NO: 1285501 - RNA, 19 nt, Homo sapiens
  misc_RNA (1)...(19): siRNA sense strand
aaucaucuuuacggaaugu

SEQ ID NO: 1285502 - RNA, 19 nt, Homo sapiens
  misc_RNA (1)...(19): siRNA sense strand
acaucugccugcaaaugga

SEQ ID NO: 1285503 - RNA, 19 nt, Homo sapiens
  misc_RNA (1)...(19): siRNA sense strand
guccuaucaugccucauuc

SEQ ID NO: 1285504 - RNA, 19 nt, Homo sapiens
  misc_RNA (1)...(19): siRNA sense strand
ccuguggacuggaguauua

SEQ ID NO: 1285505 - RNA, 19 nt, Homo sapiens
  misc_RNA (1)...(19): siRNA sense strand
cagcagagccuuaucuauu

SEQ ID NO: 1285506 - RNA, 19 nt, Homo sapiens
  misc_RNA (1)...(19): siRNA sense strand
ccucagacuucacauguau

SEQ ID NO: 1285507 - RNA, 19 nt, Homo sapiens
  misc_RNA (1)...(19): siRNA sense strand
ccacuguucccucguauug

SEQ ID NO: 1285508 - RNA, 19 nt, Homo sapiens
  misc_RNA (1)...(19): siRNA sense strand
ggucuuguccagcauugua

SEQ ID NO: 1285509 - RNA, 19 nt, Homo sapiens
  misc_RNA (1)...(19): siRNA sense strand
cuaccacuguucccucgua

SEQ ID NO: 1285510 - RNA, 19 nt, Homo sapiens
  misc_RNA (1)...(19): siRNA sense strand
agcagagccuuaucuauug

SEQ ID NO: 1285511 - RNA, 19 nt, Homo sapiens
  misc_RNA (1)...(19): siRNA sense strand
gcagagccuuaucuauugg

SEQ ID NO: 1285512 - RNA, 19 nt, Homo sapiens
  misc_RNA (1)...(19): siRNA sense strand
agacuucacauguaucauu

SEQ ID NO: 1285513 - RNA, 19 nt, Homo sapiens
  misc_RNA (1)...(19): siRNA sense strand
gacuucacauguaucauuc

SEQ ID NO: 1285514 - RNA, 19 nt, Homo sapiens
  misc_RNA (1)...(19): siRNA sense strand
cugggcagaucauuugaaa

SEQ ID NO: 1285515 - RNA, 19 nt, Homo sapiens
  misc_RNA (1)...(19): siRNA sense strand
ccucugagcuccguuguac

SEQ ID NO: 1285516 - RNA, 19 nt, Homo sapiens
  misc_RNA (1)...(19): siRNA sense strand
gggcagaucauuugaaagc

SEQ ID NO: 1285517 - RNA, 19 nt, Homo sapiens
  misc_RNA (1)...(19): siRNA sense strand
uauuggagcugauagaaaa

SEQ ID NO: 1285518 - RNA, 19 nt, Homo sapiens
  misc_RNA (1)...(19): siRNA sense strand
gcuccacccugcuuugucu

SEQ ID NO: 1285519 - RNA, 19 nt, Homo sapiens
  misc_RNA (1)...(19): siRNA sense strand
gcuaugggaagagaaguuu

SEQ ID NO: 1285520 - RNA, 19 nt, Homo sapiens
  misc_RNA (1)...(19): siRNA sense strand
guauuggagcugauagaaa

SEQ ID NO: 1285521 - RNA, 19 nt, Homo sapiens
  misc_RNA (1)...(19): siRNA sense strand
ugucuuggcuaccacuguu

SEQ ID NO: 1285522 - RNA, 19 nt, Homo sapiens
  misc_RNA (1)...(19): siRNA sense strand
gaaagcacaggaagaagcu

SEQ ID NO: 1285523 - RNA, 19 nt, Homo sapiens
  misc_RNA (1)...(19): siRNA sense strand
gauuugcuaugggaagaga

SEQ ID NO: 1285524 - RNA, 19 nt, Homo sapiens
  misc_RNA (1)...(19): siRNA sense strand
caccucuucucaacccuuu

SEQ ID NO: 1285525 - RNA, 19 nt, Homo sapiens
  misc_RNA (1)...(19): siRNA sense strand
gcaacccugcagcauguuu

SEQ ID NO: 1285526 - RNA, 19 nt, Homo sapiens
  misc_RNA (1)...(19): siRNA sense strand
uaccugggcagaucauuug

SEQ ID NO: 1285527 - RNA, 19 nt, Homo sapiens
  misc_RNA (1)...(19): siRNA sense strand
uauacaggaucccaaacuc

SEQ ID NO: 1285528 - RNA, 19 nt, Homo sapiens
  misc_RNA (1)...(19): siRNA sense strand
uuaccugggcagaucauuu

SEQ ID NO: 1285529 - RNA, 19 nt, Homo sapiens
  misc_RNA (1)...(19): siRNA sense strand
aucccaaacucuccucuga

SEQ ID NO: 1285530 - RNA, 19 nt, Homo sapiens
  misc_RNA (1)...(19): siRNA sense strand
ccagcagagccuuaucuau

SEQ ID NO: 1285531 - RNA, 19 nt, Homo sapiens
  misc_RNA (1)...(19): siRNA sense strand
acuguucccucguauugga

SEQ ID NO: 1285532 - RNA, 19 nt, Homo sapiens
  misc_RNA (1)...(19): siRNA sense strand
uuugaaagcacaggaagaa

SEQ ID NO: 1285533 - RNA, 19 nt, Homo sapiens
  misc_RNA (1)...(19): siRNA sense strand
ucagacuucacauguauca

SEQ ID NO: 1285534 - RNA, 19 nt, Homo sapiens
  misc_RNA (1)...(19): siRNA sense strand
guauacaggaucccaaacu

SEQ ID NO: 1285535 - RNA, 19 nt, Homo sapiens
  misc_RNA (1)...(19): siRNA sense strand
gcuggaaagacaaguccuu

SEQ ID NO: 1285536 - RNA, 19 nt, Homo sapiens
  misc_RNA (1)...(19): siRNA sense strand
ccuguggacuggaguauua

SEQ ID NO: 1285537 - RNA, 19 nt, Homo sapiens
  misc_RNA (1)...(19): siRNA sense strand
cagcagagccuuaucuauu

SEQ ID NO: 1285538 - RNA, 19 nt, Homo sapiens
  misc_RNA (1)...(19): siRNA sense strand
ccucagacuucacauguau

SEQ ID NO: 1285539 - RNA, 19 nt, Homo sapiens
  misc_RNA (1)...(19): siRNA sense strand
ccacuguucccucguauug

SEQ ID NO: 1285540 - RNA, 19 nt, Homo sapiens
  misc_RNA (1)...(19): siRNA sense strand
ggucuuguccagcauugua

SEQ ID NO: 1285541 - RNA, 19 nt, Homo sapiens
  misc_RNA (1)...(19): siRNA sense strand
cuaccacuguucccucgua

SEQ ID NO: 1285542 - RNA, 19 nt, Homo sapiens
  misc_RNA (1)...(19): siRNA sense strand
agcagagccuuaucuauug

SEQ ID NO: 1285543 - RNA, 19 nt, Homo sapiens
  misc_RNA (1)...(19): siRNA sense strand
gcagagccuuaucuauugg

SEQ ID NO: 1285544 - RNA, 19 nt, Homo sapiens
  misc_RNA (1)...(19): siRNA sense strand
agacuucacauguaucauu

SEQ ID NO: 1285545 - RNA, 19 nt, Homo sapiens
  misc_RNA (1)...(19): siRNA sense strand
gacuucacauguaucauuc

SEQ ID NO: 1285546 - RNA, 19 nt, Homo sapiens
  misc_RNA (1)...(19): siRNA sense strand
cugggcagaucauuugaaa

SEQ ID NO: 1285547 - RNA, 19 nt, Homo sapiens
  misc_RNA (1)...(19): siRNA sense strand
ccucugagcuccguuguac

SEQ ID NO: 1285548 - RNA, 19 nt, Homo sapiens
  misc_RNA (1)...(19): siRNA sense strand
gggcagaucauuugaaagc

SEQ ID NO: 1285549 - RNA, 19 nt, Homo sapiens
  misc_RNA (1)...(19): siRNA sense strand
uauuggagcugauagaaaa

SEQ ID NO: 1285550 - RNA, 19 nt, Homo sapiens
  misc_RNA (1)...(19): siRNA sense strand
gcuccacccugcuuugucu

SEQ ID NO: 1285551 - RNA, 19 nt, Homo sapiens
  misc_RNA (1)...(19): siRNA sense strand
gcuaugggaagagaaguuu

SEQ ID NO: 1285552 - RNA, 19 nt, Homo sapiens
  misc_RNA (1)...(19): siRNA sense strand
guauuggagcugauagaaa

SEQ ID NO: 1285553 - RNA, 19 nt, Homo sapiens
  misc_RNA (1)...(19): siRNA sense strand
ugucuuggcuaccacuguu

SEQ ID NO: 1285554 - RNA, 19 nt, Homo sapiens
  misc_RNA (1)...(19): siRNA sense strand
gaaagcacaggaagaagcu

SEQ ID NO: 1285555 - RNA, 19 nt, Homo sapiens
  misc_RNA (1)...(19): siRNA sense strand
gauuugcuaugggaagaga

SEQ ID NO: 1285556 - RNA, 19 nt, Homo sapiens
  misc_RNA (1)...(19): siRNA sense strand
caccucuucucaacccuuu

SEQ ID NO: 1285557 - RNA, 19 nt, Homo sapiens
  misc_RNA (1)...(19): siRNA sense strand
gcaacccugcagcauguuu

SEQ ID NO: 1285558 - RNA, 19 nt, Homo sapiens
  misc_RNA (1)...(19): siRNA sense strand
uaccugggcagaucauuug

SEQ ID NO: 1285559 - RNA, 19 nt, Homo sapiens
  misc_RNA (1)...(19): siRNA sense strand
uauacaggaucccaaacuc

SEQ ID NO: 1285560 - RNA, 19 nt, Homo sapiens
  misc_RNA (1)...(19): siRNA sense strand
uuaccugggcagaucauuu

SEQ ID NO: 1285561 - RNA, 19 nt, Homo sapiens
  misc_RNA (1)...(19): siRNA sense strand
aucccaaacucuccucuga

SEQ ID NO: 1285562 - RNA, 19 nt, Homo sapiens
  misc_RNA (1)...(19): siRNA sense strand
ccagcagagccuuaucuau

SEQ ID NO: 1285563 - RNA, 19 nt, Homo sapiens
  misc_RNA (1)...(19): siRNA sense strand
acuguucccucguauugga

SEQ ID NO: 1285564 - RNA, 19 nt, Homo sapiens
  misc_RNA (1)...(19): siRNA sense strand
uuugaaagcacaggaagaa

SEQ ID NO: 1285565 - RNA, 19 nt, Homo sapiens
  misc_RNA (1)...(19): siRNA sense strand
ucagacuucacauguauca

SEQ ID NO: 1285566 - RNA, 19 nt, Homo sapiens
  misc_RNA (1)...(19): siRNA sense strand
guauacaggaucccaaacu

SEQ ID NO: 1285567 - RNA, 19 nt, Homo sapiens
  misc_RNA (1)...(19): siRNA sense strand
gcuggaaagacaaguccuu

SEQ ID NO: 1285568 - RNA, 19 nt, Homo sapiens
  misc_RNA (1)...(19): siRNA sense strand
gaaaucaucuuuacggaau

SEQ ID NO: 1285569 - RNA, 19 nt, Homo sapiens
  misc_RNA (1)...(19): siRNA sense strand
gcucaaaucuucacagagu

SEQ ID NO: 1285570 - RNA, 19 nt, Homo sapiens
  misc_RNA (1)...(19): siRNA sense strand
ggagcaacuuagucaaaua

SEQ ID NO: 1285571 - RNA, 19 nt, Homo sapiens
  misc_RNA (1)...(19): siRNA sense strand
ccuguggacuggaguauua

SEQ ID NO: 1285572 - RNA, 19 nt, Homo sapiens
  misc_RNA (1)...(19): siRNA sense strand
cacaagcucuuucuggaua

SEQ ID NO: 1285573 - RNA, 19 nt, Homo sapiens
  misc_RNA (1)...(19): siRNA sense strand
cgagccaacugcuguauuu

SEQ ID NO: 1285574 - RNA, 19 nt, Homo sapiens
  misc_RNA (1)...(19): siRNA sense strand
cagcagagccuuaucuauu

SEQ ID NO: 1285575 - RNA, 19 nt, Homo sapiens
  misc_RNA (1)...(19): siRNA sense strand
ggacaaaguacuugauaug

SEQ ID NO: 1285576 - RNA, 19 nt, Homo sapiens
  misc_RNA (1)...(19): siRNA sense strand
ggaauguggugcugagaga

SEQ ID NO: 1285577 - RNA, 19 nt, Homo sapiens
  misc_RNA (1)...(19): siRNA sense strand
gcaaauggacaaaguacuu

SEQ ID NO: 1285578 - RNA, 19 nt, Homo sapiens
  misc_RNA (1)...(19): siRNA sense strand
gauuacagguccuaucaug

SEQ ID NO: 1285579 - RNA, 19 nt, Homo sapiens
  misc_RNA (1)...(19): siRNA sense strand
ggauacagagaccaauuua

SEQ ID NO: 1285580 - RNA, 19 nt, Homo sapiens
  misc_RNA (1)...(19): siRNA sense strand
gcugagagacuacauuuau

SEQ ID NO: 1285581 - RNA, 19 nt, Homo sapiens
  misc_RNA (1)...(19): siRNA sense strand
gcacggagugugaauguga

SEQ ID NO: 1285582 - RNA, 19 nt, Homo sapiens
  misc_RNA (1)...(19): siRNA sense strand
ccucagacuucacauguau

SEQ ID NO: 1285583 - RNA, 19 nt, Homo sapiens
  misc_RNA (1)...(19): siRNA sense strand
cugagagacuacauuuaua

SEQ ID NO: 1285584 - RNA, 19 nt, Homo sapiens
  misc_RNA (1)...(19): siRNA sense strand
acaaaguacuugauaugga

SEQ ID NO: 1285585 - RNA, 19 nt, Homo sapiens
  misc_RNA (1)...(19): siRNA sense strand
gagauuacagguccuauca

SEQ ID NO: 1285586 - RNA, 19 nt, Homo sapiens
  misc_RNA (1)...(19): siRNA sense strand
caacugcuguauuuaacau

SEQ ID NO: 1285587 - RNA, 19 nt, Homo sapiens
  misc_RNA (1)...(19): siRNA sense strand
acagagaccaauuuaguuu

SEQ ID NO: 1285588 - RNA, 19 nt, Homo sapiens
  misc_RNA (1)...(19): siRNA sense strand
ccacuguucccucguauug

SEQ ID NO: 1285589 - RNA, 19 nt, Homo sapiens
  misc_RNA (1)...(19): siRNA sense strand
uuuaacaucugccugcaaa

SEQ ID NO: 1285590 - RNA, 19 nt, Homo sapiens
  misc_RNA (1)...(19): siRNA sense strand
ugaccaugcugcucaaauc

SEQ ID NO: 1285591 - RNA, 19 nt, Homo sapiens
  misc_RNA (1)...(19): siRNA sense strand
ggucuuguccagcauugua

SEQ ID NO: 1285592 - RNA, 19 nt, Homo sapiens
  misc_RNA (1)...(19): siRNA sense strand
cuaccacuguucccucgua

SEQ ID NO: 1285593 - RNA, 19 nt, Homo sapiens
  misc_RNA (1)...(19): siRNA sense strand
agcagagccuuaucuauug

SEQ ID NO: 1285594 - RNA, 19 nt, Homo sapiens
  misc_RNA (1)...(19): siRNA sense strand
gguccuaucaugccucauu

SEQ ID NO: 1285595 - RNA, 19 nt, Homo sapiens
  misc_RNA (1)...(19): siRNA sense strand
gcagagccuuaucuauugg

SEQ ID NO: 1285596 - RNA, 19 nt, Homo sapiens
  misc_RNA (1)...(19): siRNA sense strand
agacuucacauguaucauu

SEQ ID NO: 1285597 - RNA, 19 nt, Homo sapiens
  misc_RNA (1)...(19): siRNA sense strand
uaacaucugccugcaaaug

SEQ ID NO: 1285598 - RNA, 19 nt, Homo sapiens
  misc_RNA (1)...(19): siRNA sense strand
gugcugagagacuacauuu

SEQ ID NO: 1285599 - RNA, 19 nt, Homo sapiens
  misc_RNA (1)...(19): siRNA sense strand
gacuucacauguaucauuc

SEQ ID NO: 1285600 - RNA, 19 nt, Homo sapiens
  misc_RNA (1)...(19): siRNA sense strand
cugggcagaucauuugaaa

SEQ ID NO: 1285601 - RNA, 19 nt, Homo sapiens
  misc_RNA (1)...(19): siRNA sense strand
auacagagaccaauuuagu

SEQ ID NO: 1285602 - RNA, 19 nt, Homo sapiens
  misc_RNA (1)...(19): siRNA sense strand
ccucugagcuccguuguac

SEQ ID NO: 1285603 - RNA, 19 nt, Homo sapiens
  misc_RNA (1)...(19): siRNA sense strand
gggcagaucauuugaaagc

SEQ ID NO: 1285604 - RNA, 19 nt, Homo sapiens
  misc_RNA (1)...(19): siRNA sense strand
agucaaauaccguuacuug

SEQ ID NO: 1285605 - RNA, 19 nt, Homo sapiens
  misc_RNA (1)...(19): siRNA sense strand
gagccaacugcuguauuua

SEQ ID NO: 1285606 - RNA, 19 nt, Homo sapiens
  misc_RNA (1)...(19): siRNA sense strand
uauuggagcugauagaaaa

SEQ ID NO: 1285607 - RNA, 19 nt, Homo sapiens
  misc_RNA (1)...(19): siRNA sense strand
gcuccacccugcuuugucu

SEQ ID NO: 1285608 - RNA, 19 nt, Homo sapiens
  misc_RNA (1)...(19): siRNA sense strand
gcuaugggaagagaaguuu

SEQ ID NO: 1285609 - RNA, 19 nt, Homo sapiens
  misc_RNA (1)...(19): siRNA sense strand
caaauggacaaaguacuug

SEQ ID NO: 1285610 - RNA, 19 nt, Homo sapiens
  misc_RNA (1)...(19): siRNA sense strand
ccaugcugcucaaaucuuc

SEQ ID NO: 1285611 - RNA, 19 nt, Homo sapiens
  misc_RNA (1)...(19): siRNA sense strand
guauuggagcugauagaaa

SEQ ID NO: 1285612 - RNA, 19 nt, Homo sapiens
  misc_RNA (1)...(19): siRNA sense strand
ugucuuggcuaccacuguu

SEQ ID NO: 1285613 - RNA, 19 nt, Homo sapiens
  misc_RNA (1)...(19): siRNA sense strand
gagcaacuuagucaaauac

SEQ ID NO: 1285614 - RNA, 19 nt, Homo sapiens
  misc_RNA (1)...(19): siRNA sense strand
gccaacugcuguauuuaac

SEQ ID NO: 1285615 - RNA, 19 nt, Homo sapiens
  misc_RNA (1)...(19): siRNA sense strand
gaaagcacaggaagaagcu

SEQ ID NO: 1285616 - RNA, 19 nt, Homo sapiens
  misc_RNA (1)...(19): siRNA sense strand
gauuugcuaugggaagaga

SEQ ID NO: 1285617 - RNA, 19 nt, Homo sapiens
  misc_RNA (1)...(19): siRNA sense strand
uggacaaaguacuugauau

SEQ ID NO: 1285618 - RNA, 19 nt, Homo sapiens
  misc_RNA (1)...(19): siRNA sense strand
caccucuucucaacccuuu

SEQ ID NO: 1285619 - RNA, 19 nt, Homo sapiens
  misc_RNA (1)...(19): siRNA sense strand
gcaacccugcagcauguuu

SEQ ID NO: 1285620 - RNA, 19 nt, Homo sapiens
  misc_RNA (1)...(19): siRNA sense strand
cugcucaaaucuucacaga

SEQ ID NO: 1285621 - RNA, 19 nt, Homo sapiens
  misc_RNA (1)...(19): siRNA sense strand
ucacagaguggaucuuucu

SEQ ID NO: 1285622 - RNA, 19 nt, Homo sapiens
  misc_RNA (1)...(19): siRNA sense strand
uggagcaacuuagucaaau

SEQ ID NO: 1285623 - RNA, 19 nt, Homo sapiens
  misc_RNA (1)...(19): siRNA sense strand
gacaaaguacuugauaugg

SEQ ID NO: 1285624 - RNA, 19 nt, Homo sapiens
  misc_RNA (1)...(19): siRNA sense strand
uggauacagagaccaauuu

SEQ ID NO: 1285625 - RNA, 19 nt, Homo sapiens
  misc_RNA (1)...(19): siRNA sense strand
ggagauuacagguccuauc

SEQ ID NO: 1285626 - RNA, 19 nt, Homo sapiens
  misc_RNA (1)...(19): siRNA sense strand
uaccugggcagaucauuug

SEQ ID NO: 1285627 - RNA, 19 nt, Homo sapiens
  misc_RNA (1)...(19): siRNA sense strand
cuaacacucuggagcaacu

SEQ ID NO: 1285628 - RNA, 19 nt, Homo sapiens
  misc_RNA (1)...(19): siRNA sense strand
gagcuuacuaacugugguu

SEQ ID NO: 1285629 - RNA, 19 nt, Homo sapiens
  misc_RNA (1)...(19): siRNA sense strand
uauacaggaucccaaacuc

SEQ ID NO: 1285630 - RNA, 19 nt, Homo sapiens
  misc_RNA (1)...(19): siRNA sense strand
uacagagaccaauuuaguu

SEQ ID NO: 1285631 - RNA, 19 nt, Homo sapiens
  misc_RNA (1)...(19): siRNA sense strand
gauacagagaccaauuuag

SEQ ID NO: 1285632 - RNA, 19 nt, Homo sapiens
  misc_RNA (1)...(19): siRNA sense strand
uuaccugggcagaucauuu

SEQ ID NO: 1285633 - RNA, 19 nt, Homo sapiens
  misc_RNA (1)...(19): siRNA sense strand
cuugggaaaucaucuuuac

SEQ ID NO: 1285634 - RNA, 19 nt, Homo sapiens
  misc_RNA (1)...(19): siRNA sense strand
cagagaccaauuuaguuug

SEQ ID NO: 1285635 - RNA, 19 nt, Homo sapiens
  misc_RNA (1)...(19): siRNA sense strand
gagugugaaugugaagaca

SEQ ID NO: 1285636 - RNA, 19 nt, Homo sapiens
  misc_RNA (1)...(19): siRNA sense strand
aucccaaacucuccucuga

SEQ ID NO: 1285637 - RNA, 19 nt, Homo sapiens
  misc_RNA (1)...(19): siRNA sense strand
uggagguuguucauaagga

SEQ ID NO: 1285638 - RNA, 19 nt, Homo sapiens
  misc_RNA (1)...(19): siRNA sense strand
agccaacugcuguauuuaa

SEQ ID NO: 1285639 - RNA, 19 nt, Homo sapiens
  misc_RNA (1)...(19): siRNA sense strand
ccagcagagccuuaucuau

SEQ ID NO: 1285640 - RNA, 19 nt, Homo sapiens
  misc_RNA (1)...(19): siRNA sense strand
cacggagugugaaugugaa

SEQ ID NO: 1285641 - RNA, 19 nt, Homo sapiens
  misc_RNA (1)...(19): siRNA sense strand
acuguucccucguauugga

SEQ ID NO: 1285642 - RNA, 19 nt, Homo sapiens
  misc_RNA (1)...(19): siRNA sense strand
uuugaaagcacaggaagaa

SEQ ID NO: 1285643 - RNA, 19 nt, Homo sapiens
  misc_RNA (1)...(19): siRNA sense strand
gccugcaaauggacaaagu

SEQ ID NO: 1285644 - RNA, 19 nt, Homo sapiens
  misc_RNA (1)...(19): siRNA sense strand
ucagacuucacauguauca

SEQ ID NO: 1285645 - RNA, 19 nt, Homo sapiens
  misc_RNA (1)...(19): siRNA sense strand
guauacaggaucccaaacu

SEQ ID NO: 1285646 - RNA, 19 nt, Homo sapiens
  misc_RNA (1)...(19): siRNA sense strand
gcuggaaagacaaguccuu

SEQ ID NO: 1285647 - RNA, 19 nt, Homo sapiens
  misc_RNA (1)...(19): siRNA sense strand
aaucaucuuuacggaaugu

SEQ ID NO: 1285648 - RNA, 19 nt, Homo sapiens
  misc_RNA (1)...(19): siRNA sense strand
acaucugccugcaaaugga

SEQ ID NO: 1285649 - RNA, 19 nt, Homo sapiens
  misc_RNA (1)...(19): siRNA sense strand
guccuaucaugccucauuc

SEQ ID NO: 1285650 - RNA, 19 nt, Homo sapiens
  misc_RNA (1)...(19): siRNA sense strand
ccuguggacuggaguauua

SEQ ID NO: 1285651 - RNA, 19 nt, Homo sapiens
  misc_RNA (1)...(19): siRNA sense strand
cagcagagccuuaucuauu

SEQ ID NO: 1285652 - RNA, 19 nt, Homo sapiens
  misc_RNA (1)...(19): siRNA sense strand
ccucagacuucacauguau

SEQ ID NO: 1285653 - RNA, 19 nt, Homo sapiens
  misc_RNA (1)...(19): siRNA sense strand
ccacuguucccucguauug

SEQ ID NO: 1285654 - RNA, 19 nt, Homo sapiens
  misc_RNA (1)...(19): siRNA sense strand
ggucuuguccagcauugua

SEQ ID NO: 1285655 - RNA, 19 nt, Homo sapiens
  misc_RNA (1)...(19): siRNA sense strand
cuaccacuguucccucgua

SEQ ID NO: 1285656 - RNA, 19 nt, Homo sapiens
  misc_RNA (1)...(19): siRNA sense strand
agcagagccuuaucuauug

SEQ ID NO: 1285657 - RNA, 19 nt, Homo sapiens
  misc_RNA (1)...(19): siRNA sense strand
gcagagccuuaucuauugg

SEQ ID NO: 1285658 - RNA, 19 nt, Homo sapiens
  misc_RNA (1)...(19): siRNA sense strand
agacuucacauguaucauu

SEQ ID NO: 1285659 - RNA, 19 nt, Homo sapiens
  misc_RNA (1)...(19): siRNA sense strand
gacuucacauguaucauuc

SEQ ID NO: 1285660 - RNA, 19 nt, Homo sapiens
  misc_RNA (1)...(19): siRNA sense strand
cugggcagaucauuugaaa

SEQ ID NO: 1285661 - RNA, 19 nt, Homo sapiens
  misc_RNA (1)...(19): siRNA sense strand
ccucugagcuccguuguac

SEQ ID NO: 1285662 - RNA, 19 nt, Homo sapiens
  misc_RNA (1)...(19): siRNA sense strand
gggcagaucauuugaaagc

SEQ ID NO: 1285663 - RNA, 19 nt, Homo sapiens
  misc_RNA (1)...(19): siRNA sense strand
uauuggagcugauagaaaa

SEQ ID NO: 1285664 - RNA, 19 nt, Homo sapiens
  misc_RNA (1)...(19): siRNA sense strand
gcuccacccugcuuugucu

SEQ ID NO: 1285665 - RNA, 19 nt, Homo sapiens
  misc_RNA (1)...(19): siRNA sense strand
gcuaugggaagagaaguuu

SEQ ID NO: 1285666 - RNA, 19 nt, Homo sapiens
  misc_RNA (1)...(19): siRNA sense strand
guauuggagcugauagaaa

SEQ ID NO: 1285667 - RNA, 19 nt, Homo sapiens
  misc_RNA (1)...(19): siRNA sense strand
ugucuuggcuaccacuguu

SEQ ID NO: 1285668 - RNA, 19 nt, Homo sapiens
  misc_RNA (1)...(19): siRNA sense strand
gaaagcacaggaagaagcu

SEQ ID NO: 1285669 - RNA, 19 nt, Homo sapiens
  misc_RNA (1)...(19): siRNA sense strand
gauuugcuaugggaagaga

SEQ ID NO: 1285670 - RNA, 19 nt, Homo sapiens
  misc_RNA (1)...(19): siRNA sense strand
caccucuucucaacccuuu

SEQ ID NO: 1285671 - RNA, 19 nt, Homo sapiens
  misc_RNA (1)...(19): siRNA sense strand
gcaacccugcagcauguuu

SEQ ID NO: 1285672 - RNA, 19 nt, Homo sapiens
  misc_RNA (1)...(19): siRNA sense strand
uaccugggcagaucauuug

SEQ ID NO: 1285673 - RNA, 19 nt, Homo sapiens
  misc_RNA (1)...(19): siRNA sense strand
uauacaggaucccaaacuc

SEQ ID NO: 1285674 - RNA, 19 nt, Homo sapiens
  misc_RNA (1)...(19): siRNA sense strand
uuaccugggcagaucauuu

SEQ ID NO: 1285675 - RNA, 19 nt, Homo sapiens
  misc_RNA (1)...(19): siRNA sense strand
aucccaaacucuccucuga

SEQ ID NO: 1285676 - RNA, 19 nt, Homo sapiens
  misc_RNA (1)...(19): siRNA sense strand
ccagcagagccuuaucuau

SEQ ID NO: 1285677 - RNA, 19 nt, Homo sapiens
  misc_RNA (1)...(19): siRNA sense strand
acuguucccucguauugga

SEQ ID NO: 1285678 - RNA, 19 nt, Homo sapiens
  misc_RNA (1)...(19): siRNA sense strand
uuugaaagcacaggaagaa

SEQ ID NO: 1285679 - RNA, 19 nt, Homo sapiens
  misc_RNA (1)...(19): siRNA sense strand
ucagacuucacauguauca

SEQ ID NO: 1285680 - RNA, 19 nt, Homo sapiens
  misc_RNA (1)...(19): siRNA sense strand
guauacaggaucccaaacu

SEQ ID NO: 1285681 - RNA, 19 nt, Homo sapiens
  misc_RNA (1)...(19): siRNA sense strand
gcuggaaagacaaguccuu

SEQ ID NO: 1285682 - RNA, 19 nt, Homo sapiens
  misc_RNA (1)...(19): siRNA sense strand
ccuguggacuggaguauua

SEQ ID NO: 1285683 - RNA, 19 nt, Homo sapiens
  misc_RNA (1)...(19): siRNA sense strand
cagcagagccuuaucuauu

SEQ ID NO: 1285684 - RNA, 19 nt, Homo sapiens
  misc_RNA (1)...(19): siRNA sense strand
ccucagacuucacauguau

SEQ ID NO: 1285685 - RNA, 19 nt, Homo sapiens
  misc_RNA (1)...(19): siRNA sense strand
ccacuguucccucguauug

SEQ ID NO: 1285686 - RNA, 19 nt, Homo sapiens
  misc_RNA (1)...(19): siRNA sense strand
ggucuuguccagcauugua

SEQ ID NO: 1285687 - RNA, 19 nt, Homo sapiens
  misc_RNA (1)...(19): siRNA sense strand
cuaccacuguucccucgua

SEQ ID NO: 1285688 - RNA, 19 nt, Homo sapiens
  misc_RNA (1)...(19): siRNA sense strand
agcagagccuuaucuauug

SEQ ID NO: 1285689 - RNA, 19 nt, Homo sapiens
  misc_RNA (1)...(19): siRNA sense strand
gcagagccuuaucuauugg

SEQ ID NO: 1285690 - RNA, 19 nt, Homo sapiens
  misc_RNA (1)...(19): siRNA sense strand
agacuucacauguaucauu

SEQ ID NO: 1285691 - RNA, 19 nt, Homo sapiens
  misc_RNA (1)...(19): siRNA sense strand
gacuucacauguaucauuc

SEQ ID NO: 1285692 - RNA, 19 nt, Homo sapiens
  misc_RNA (1)...(19): siRNA sense strand
cugggcagaucauuugaaa

SEQ ID NO: 1285693 - RNA, 19 nt, Homo sapiens
  misc_RNA (1)...(19): siRNA sense strand
ccucugagcuccguuguac

SEQ ID NO: 1285694 - RNA, 19 nt, Homo sapiens
  misc_RNA (1)...(19): siRNA sense strand
gggcagaucauuugaaagc

SEQ ID NO: 1285695 - RNA, 19 nt, Homo sapiens
  misc_RNA (1)...(19): siRNA sense strand
uauuggagcugauagaaaa

SEQ ID NO: 1285696 - RNA, 19 nt, Homo sapiens
  misc_RNA (1)...(19): siRNA sense strand
gcuccacccugcuuugucu

SEQ ID NO: 1285697 - RNA, 19 nt, Homo sapiens
  misc_RNA (1)...(19): siRNA sense strand
gcuaugggaagagaaguuu

SEQ ID NO: 1285698 - RNA, 19 nt, Homo sapiens
  misc_RNA (1)...(19): siRNA sense strand
guauuggagcugauagaaa

SEQ ID NO: 1285699 - RNA, 19 nt, Homo sapiens
  misc_RNA (1)...(19): siRNA sense strand
ugucuuggcuaccacuguu

SEQ ID NO: 1285700 - RNA, 19 nt, Homo sapiens
  misc_RNA (1)...(19): siRNA sense strand
gaaagcacaggaagaagcu

SEQ ID NO: 1285701 - RNA, 19 nt, Homo sapiens
  misc_RNA (1)...(19): siRNA sense strand
gauuugcuaugggaagaga

SEQ ID NO: 1285702 - RNA, 19 nt, Homo sapiens
  misc_RNA (1)...(19): siRNA sense strand
caccucuucucaacccuuu

SEQ ID NO: 1285703 - RNA, 19 nt, Homo sapiens
  misc_RNA (1)...(19): siRNA sense strand
gcaacccugcagcauguuu

SEQ ID NO: 1285704 - RNA, 19 nt, Homo sapiens
  misc_RNA (1)...(19): siRNA sense strand
uaccugggcagaucauuug

SEQ ID NO: 1285705 - RNA, 19 nt, Homo sapiens
  misc_RNA (1)...(19): siRNA sense strand
uauacaggaucccaaacuc

SEQ ID NO: 1285706 - RNA, 19 nt, Homo sapiens
  misc_RNA (1)...(19): siRNA sense strand
uuaccugggcagaucauuu

SEQ ID NO: 1285707 - RNA, 19 nt, Homo sapiens
  misc_RNA (1)...(19): siRNA sense strand
aucccaaacucuccucuga

SEQ ID NO: 1285708 - RNA, 19 nt, Homo sapiens
  misc_RNA (1)...(19): siRNA sense strand
ccagcagagccuuaucuau

SEQ ID NO: 1285709 - RNA, 19 nt, Homo sapiens
  misc_RNA (1)...(19): siRNA sense strand
acuguucccucguauugga

SEQ ID NO: 1285710 - RNA, 19 nt, Homo sapiens
  misc_RNA (1)...(19): siRNA sense strand
uuugaaagcacaggaagaa

SEQ ID NO: 1285711 - RNA, 19 nt, Homo sapiens
  misc_RNA (1)...(19): siRNA sense strand
ucagacuucacauguauca

SEQ ID NO: 1285712 - RNA, 19 nt, Homo sapiens
  misc_RNA (1)...(19): siRNA sense strand
guauacaggaucccaaacu

SEQ ID NO: 1285713 - RNA, 19 nt, Homo sapiens
  misc_RNA (1)...(19): siRNA sense strand
gcuggaaagacaaguccuu

SEQ ID NO: 1285714 - RNA, 19 nt, Homo sapiens
  misc_RNA (1)...(19): siRNA sense strand
gaagagagcuguuaggaaa

SEQ ID NO: 1285715 - RNA, 19 nt, Homo sapiens
  misc_RNA (1)...(19): siRNA sense strand
gcaaugaaguggccaaauu

SEQ ID NO: 1285716 - RNA, 19 nt, Homo sapiens
  misc_RNA (1)...(19): siRNA sense strand
gaaagucccuggauucaga

SEQ ID NO: 1285717 - RNA, 19 nt, Homo sapiens
  misc_RNA (1)...(19): siRNA sense strand
gcucauggcucucaaagaa

SEQ ID NO: 1285718 - RNA, 19 nt, Homo sapiens
  misc_RNA (1)...(19): siRNA sense strand
gcccagaaaugguugaaua

SEQ ID NO: 1285719 - RNA, 19 nt, Homo sapiens
  misc_RNA (1)...(19): siRNA sense strand
gcaacuagcuguucagucu

SEQ ID NO: 1285720 - RNA, 19 nt, Homo sapiens
  misc_RNA (1)...(19): siRNA sense strand
ggagagaugccuuauguuu

SEQ ID NO: 1285721 - RNA, 19 nt, Homo sapiens
  misc_RNA (1)...(19): siRNA sense strand
ggaccugagucuucaauga

SEQ ID NO: 1285722 - RNA, 19 nt, Homo sapiens
  misc_RNA (1)...(19): siRNA sense strand
gguuuaagaucuccuauga

SEQ ID NO: 1285723 - RNA, 19 nt, Homo sapiens
  misc_RNA (1)...(19): siRNA sense strand
uagcccagcucacaaauuu

SEQ ID NO: 1285724 - RNA, 19 nt, Homo sapiens
  misc_RNA (1)...(19): siRNA sense strand
gaagcgaccugguguuaca

SEQ ID NO: 1285725 - RNA, 19 nt, Homo sapiens
  misc_RNA (1)...(19): siRNA sense strand
gaaaauauguccacgaugu

SEQ ID NO: 1285726 - RNA, 19 nt, Homo sapiens
  misc_RNA (1)...(19): siRNA sense strand
cuaaucauuucccuacuua

SEQ ID NO: 1285727 - RNA, 19 nt, Homo sapiens
  misc_RNA (1)...(19): siRNA sense strand
gaagagaaauguuuaucac

SEQ ID NO: 1285728 - RNA, 19 nt, Homo sapiens
  misc_RNA (1)...(19): siRNA sense strand
gggcaaauaucugagcuuu

SEQ ID NO: 1285729 - RNA, 19 nt, Homo sapiens
  misc_RNA (1)...(19): siRNA sense strand
ccagguacccaguuuguua

SEQ ID NO: 1285730 - RNA, 19 nt, Homo sapiens
  misc_RNA (1)...(19): siRNA sense strand
caaguguucucccagauga

SEQ ID NO: 1285731 - RNA, 19 nt, Homo sapiens
  misc_RNA (1)...(19): siRNA sense strand
gcugaacacuuccgaaauc

SEQ ID NO: 1285732 - RNA, 19 nt, Homo sapiens
  misc_RNA (1)...(19): siRNA sense strand
caauaucgcuccucacucu

SEQ ID NO: 1285733 - RNA, 19 nt, Homo sapiens
  misc_RNA (1)...(19): siRNA sense strand
gaccggaacgugaagaaua

SEQ ID NO: 1285734 - RNA, 19 nt, Homo sapiens
  misc_RNA (1)...(19): siRNA sense strand
caucugcucugcccuuauu

SEQ ID NO: 1285735 - RNA, 19 nt, Homo sapiens
  misc_RNA (1)...(19): siRNA sense strand
ccgaaugucugaauguuga

SEQ ID NO: 1285736 - RNA, 19 nt, Homo sapiens
  misc_RNA (1)...(19): siRNA sense strand
ggucugggcacaaugguua

SEQ ID NO: 1285737 - RNA, 19 nt, Homo sapiens
  misc_RNA (1)...(19): siRNA sense strand
cagcaaggccaaacgguua

SEQ ID NO: 1285738 - RNA, 19 nt, Homo sapiens
  misc_RNA (1)...(19): siRNA sense strand
ccaaucaugugacuaguuc

SEQ ID NO: 1285739 - RNA, 19 nt, Homo sapiens
  misc_RNA (1)...(19): siRNA sense strand
gcuccucacucuacucuga

SEQ ID NO: 1285740 - RNA, 19 nt, Homo sapiens
  misc_RNA (1)...(19): siRNA sense strand
gcagaacggugagguagau

SEQ ID NO: 1285741 - RNA, 19 nt, Homo sapiens
  misc_RNA (1)...(19): siRNA sense strand
caaaguaccagaaccaaau

SEQ ID NO: 1285742 - RNA, 19 nt, Homo sapiens
  misc_RNA (1)...(19): siRNA sense strand
ugagaggucacauguguua

SEQ ID NO: 1285743 - RNA, 19 nt, Homo sapiens
  misc_RNA (1)...(19): siRNA sense strand
caaugaaagugaccucuuc

SEQ ID NO: 1285744 - RNA, 19 nt, Homo sapiens
  misc_RNA (1)...(19): siRNA sense strand
gaaucuagagggcaaauau

SEQ ID NO: 1285745 - RNA, 19 nt, Homo sapiens
  misc_RNA (1)...(19): siRNA sense strand
ggucacauguguuacuguu

SEQ ID NO: 1285746 - RNA, 19 nt, Homo sapiens
  misc_RNA (1)...(19): siRNA sense strand
aaaggaaagucccuggauu

SEQ ID NO: 1285747 - RNA, 19 nt, Homo sapiens
  misc_RNA (1)...(19): siRNA sense strand
ugaggacucuguaguugaa

SEQ ID NO: 1285748 - RNA, 19 nt, Homo sapiens
  misc_RNA (1)...(19): siRNA sense strand
ucacaaauuucccuaaggu

SEQ ID NO: 1285749 - RNA, 19 nt, Homo sapiens
  misc_RNA (1)...(19): siRNA sense strand
ccaaacgguuagaccaauu

SEQ ID NO: 1285750 - RNA, 19 nt, Homo sapiens
  misc_RNA (1)...(19): siRNA sense strand
uaaaugaggagaccuuguu

SEQ ID NO: 1285751 - RNA, 19 nt, Homo sapiens
  misc_RNA (1)...(19): siRNA sense strand
gagcagcugucugugaaga

SEQ ID NO: 1285752 - RNA, 19 nt, Homo sapiens
  misc_RNA (1)...(19): siRNA sense strand
gagagaugccuuauguuug

SEQ ID NO: 1285753 - RNA, 19 nt, Homo sapiens
  misc_RNA (1)...(19): siRNA sense strand
caaacgguuagaccaauua

SEQ ID NO: 1285754 - RNA, 19 nt, Homo sapiens
  misc_RNA (1)...(19): siRNA sense strand
gaaaggaaagucccuggau

SEQ ID NO: 1285755 - RNA, 19 nt, Homo sapiens
  misc_RNA (1)...(19): siRNA sense strand
acaggcagcugaacacuuc

SEQ ID NO: 1285756 - RNA, 19 nt, Homo sapiens
  misc_RNA (1)...(19): siRNA sense strand
ccaagaaccugagcuagca

SEQ ID NO: 1285757 - RNA, 19 nt, Homo sapiens
  misc_RNA (1)...(19): siRNA sense strand
ggaagagccccaaguauuu

SEQ ID NO: 1285758 - RNA, 19 nt, Homo sapiens
  misc_RNA (1)...(19): siRNA sense strand
gaccacgaaucccaagcua

SEQ ID NO: 1285759 - RNA, 19 nt, Homo sapiens
  misc_RNA (1)...(19): siRNA sense strand
aauaggacguucuuuggaa

SEQ ID NO: 1285760 - RNA, 19 nt, Homo sapiens
  misc_RNA (1)...(19): siRNA sense strand
ucauaagccuggagagaug

SEQ ID NO: 1285761 - RNA, 19 nt, Homo sapiens
  misc_RNA (1)...(19): siRNA sense strand
caaaguagcccagcucaca

SEQ ID NO: 1285762 - RNA, 19 nt, Homo sapiens
  misc_RNA (1)...(19): siRNA sense strand
guccagaccaaacucauua

SEQ ID NO: 1285763 - RNA, 19 nt, Homo sapiens
  misc_RNA (1)...(19): siRNA sense strand
ugaauacccuuaacaccau

SEQ ID NO: 1285764 - RNA, 19 nt, Homo sapiens
  misc_RNA (1)...(19): siRNA sense strand
ccaaccacaugaucaacaa

SEQ ID NO: 1285765 - RNA, 19 nt, Homo sapiens
  misc_RNA (1)...(19): siRNA sense strand
ucauuucccuacuuacgua

SEQ ID NO: 1285766 - RNA, 19 nt, Homo sapiens
  misc_RNA (1)...(19): siRNA sense strand
agacuucccuaaucauuuc

SEQ ID NO: 1285767 - RNA, 19 nt, Homo sapiens
  misc_RNA (1)...(19): siRNA sense strand
cuggagagaugccuuaugu

SEQ ID NO: 1285768 - RNA, 19 nt, Homo sapiens
  misc_RNA (1)...(19): siRNA sense strand
aaugcucaauuucguguua

SEQ ID NO: 1285769 - RNA, 19 nt, Homo sapiens
  misc_RNA (1)...(19): siRNA sense strand
uuuaagaucuccuaugagu

SEQ ID NO: 1285770 - RNA, 19 nt, Homo sapiens
  misc_RNA (1)...(19): siRNA sense strand
guuuaucacugcaacaaau

SEQ ID NO: 1285771 - RNA, 19 nt, Homo sapiens
  misc_RNA (1)...(19): siRNA sense strand
ugagguagauguccauuuu

SEQ ID NO: 1285772 - RNA, 19 nt, Homo sapiens
  misc_RNA (1)...(19): siRNA sense strand
gugaagcgaccugguguua

SEQ ID NO: 1285773 - RNA, 19 nt, Homo sapiens
  misc_RNA (1)...(19): siRNA sense strand
guaguacuguuugcucuau

SEQ ID NO: 1285774 - RNA, 19 nt, Homo sapiens
  misc_RNA (1)...(19): siRNA sense strand
ccgcugaccuccucaaugg

SEQ ID NO: 1285775 - RNA, 19 nt, Homo sapiens
  misc_RNA (1)...(19): siRNA sense strand
gaaugggcguuugaaagug

SEQ ID NO: 1285776 - RNA, 19 nt, Homo sapiens
  misc_RNA (1)...(19): siRNA sense strand
gcucacaaauuucccuaag

SEQ ID NO: 1285777 - RNA, 19 nt, Homo sapiens
  misc_RNA (1)...(19): siRNA sense strand
ggauugugcugaacguaca

SEQ ID NO: 1285778 - RNA, 19 nt, Homo sapiens
  misc_RNA (1)...(19): siRNA sense strand
acucuguaguugaagauua

SEQ ID NO: 1285779 - RNA, 19 nt, Homo sapiens
  misc_RNA (1)...(19): siRNA sense strand
gaagagaaacuggcugagu

SEQ ID NO: 1285780 - RNA, 19 nt, Homo sapiens
  misc_RNA (1)...(19): siRNA sense strand
ccacucacccgcaggcuuu

SEQ ID NO: 1285781 - RNA, 19 nt, Homo sapiens
  misc_RNA (1)...(19): siRNA sense strand
ggaacgugaagaauaugua

SEQ ID NO: 1285782 - RNA, 19 nt, Homo sapiens
  misc_RNA (1)...(19): siRNA sense strand
ggacaaaauugaacacaag

SEQ ID NO: 1285783 - RNA, 19 nt, Homo sapiens
  misc_RNA (1)...(19): siRNA sense strand
acaccgaccuguucaugga

SEQ ID NO: 1285784 - RNA, 19 nt, Homo sapiens
  misc_RNA (1)...(19): siRNA sense strand
caccagaagagaaauguuu

SEQ ID NO: 1285785 - RNA, 19 nt, Homo sapiens
  misc_RNA (1)...(19): siRNA sense strand
gcucuaugcugcaauacag

SEQ ID NO: 1285786 - RNA, 19 nt, Homo sapiens
  misc_RNA (1)...(19): siRNA sense strand
gcagaaugccaaucaugug

SEQ ID NO: 1285787 - RNA, 19 nt, Homo sapiens
  misc_RNA (1)...(19): siRNA sense strand
uaugaaacaccacguagaa

SEQ ID NO: 1285788 - RNA, 19 nt, Homo sapiens
  misc_RNA (1)...(19): siRNA sense strand
ccuaaucauuucccuacuu

SEQ ID NO: 1285789 - RNA, 19 nt, Homo sapiens
  misc_RNA (1)...(19): siRNA sense strand
gccguuggcuucgacguuu

SEQ ID NO: 1285790 - RNA, 19 nt, Homo sapiens
  misc_RNA (1)...(19): siRNA sense strand
acgauguaaugcucaauuu

SEQ ID NO: 1285791 - RNA, 19 nt, Homo sapiens
  misc_RNA (1)...(19): siRNA sense strand
ccacagcuggcaauccuuu

SEQ ID NO: 1285792 - RNA, 19 nt, Homo sapiens
  misc_RNA (1)...(19): siRNA sense strand
ucaccagccucaacugcaa

SEQ ID NO: 1285793 - RNA, 19 nt, Homo sapiens
  misc_RNA (1)...(19): siRNA sense strand
guuccuguauccucuaaug

SEQ ID NO: 1285794 - RNA, 19 nt, Homo sapiens
  misc_RNA (1)...(19): siRNA sense strand
ugaaugggcguuugaaagu

SEQ ID NO: 1285795 - RNA, 19 nt, Homo sapiens
  misc_RNA (1)...(19): siRNA sense strand
ugagguagauggucacacu

SEQ ID NO: 1285796 - RNA, 19 nt, Homo sapiens
  misc_RNA (1)...(19): siRNA sense strand
ccaggaugguggacggaaa

SEQ ID NO: 1285797 - RNA, 19 nt, Homo sapiens
  misc_RNA (1)...(19): siRNA sense strand
ccagaaggccaccaaaaua

SEQ ID NO: 1285798 - RNA, 19 nt, Homo sapiens
  misc_RNA (1)...(19): siRNA sense strand
cagcugaacacuuccgaaa

SEQ ID NO: 1285799 - RNA, 19 nt, Homo sapiens
  misc_RNA (1)...(19): siRNA sense strand
ggagccgaaugucugaaug

SEQ ID NO: 1285800 - RNA, 19 nt, Homo sapiens
  misc_RNA (1)...(19): siRNA sense strand
caaagcugccacugugaaa

SEQ ID NO: 1285801 - RNA, 19 nt, Homo sapiens
  misc_RNA (1)...(19): siRNA sense strand
cauaaaaccuuccguaaac

SEQ ID NO: 1285802 - RNA, 19 nt, Homo sapiens
  misc_RNA (1)...(19): siRNA sense strand
agagaugccuuauguuugc

SEQ ID NO: 1285803 - RNA, 19 nt, Homo sapiens
  misc_RNA (1)...(19): siRNA sense strand
caaacucauuaugcuugua

SEQ ID NO: 1285804 - RNA, 19 nt, Homo sapiens
  misc_RNA (1)...(19): siRNA sense strand
ucaauuucguguuacugaa

SEQ ID NO: 1285805 - RNA, 19 nt, Homo sapiens
  misc_RNA (1)...(19): siRNA sense strand
cagcggaccugagucuuca

SEQ ID NO: 1285806 - RNA, 19 nt, Homo sapiens
  misc_RNA (1)...(19): siRNA sense strand
ggacaccgaccuguucaug

SEQ ID NO: 1285807 - RNA, 19 nt, Homo sapiens
  misc_RNA (1)...(19): siRNA sense strand
uuugagaggucacaugugu

SEQ ID NO: 1285808 - RNA, 19 nt, Homo sapiens
  misc_RNA (1)...(19): siRNA sense strand
ccucacaaccaauauuuau

SEQ ID NO: 1285809 - RNA, 19 nt, Homo sapiens
  misc_RNA (1)...(19): siRNA sense strand
ccaaacucauuaugcuugu

SEQ ID NO: 1285810 - RNA, 19 nt, Homo sapiens
  misc_RNA (1)...(19): siRNA sense strand
cuagagggcaaauaucuga

SEQ ID NO: 1285811 - RNA, 19 nt, Homo sapiens
  misc_RNA (1)...(19): siRNA sense strand
gaacgugaagaauauguac

SEQ ID NO: 1285812 - RNA, 19 nt, Homo sapiens
  misc_RNA (1)...(19): siRNA sense strand
guaccuuuguuaccucugu

SEQ ID NO: 1285813 - RNA, 19 nt, Homo sapiens
  misc_RNA (1)...(19): siRNA sense strand
cagaaugccaaucauguga

SEQ ID NO: 1285814 - RNA, 19 nt, Homo sapiens
  misc_RNA (1)...(19): siRNA sense strand
gaagagagcuguuaggaaa

SEQ ID NO: 1285815 - RNA, 19 nt, Homo sapiens
  misc_RNA (1)...(19): siRNA sense strand
gcaaugaaguggccaaauu

SEQ ID NO: 1285816 - RNA, 19 nt, Homo sapiens
  misc_RNA (1)...(19): siRNA sense strand
gaaagucccuggauucaga

SEQ ID NO: 1285817 - RNA, 19 nt, Homo sapiens
  misc_RNA (1)...(19): siRNA sense strand
gcucauggcucucaaagaa

SEQ ID NO: 1285818 - RNA, 19 nt, Homo sapiens
  misc_RNA (1)...(19): siRNA sense strand
gcccagaaaugguugaaua

SEQ ID NO: 1285819 - RNA, 19 nt, Homo sapiens
  misc_RNA (1)...(19): siRNA sense strand
gcaacuagcuguucagucu

SEQ ID NO: 1285820 - RNA, 19 nt, Homo sapiens
  misc_RNA (1)...(19): siRNA sense strand
ggagagaugccuuauguuu

SEQ ID NO: 1285821 - RNA, 19 nt, Homo sapiens
  misc_RNA (1)...(19): siRNA sense strand
ggaccugagucuucaauga

SEQ ID NO: 1285822 - RNA, 19 nt, Homo sapiens
  misc_RNA (1)...(19): siRNA sense strand
gguuuaagaucuccuauga

SEQ ID NO: 1285823 - RNA, 19 nt, Homo sapiens
  misc_RNA (1)...(19): siRNA sense strand
uagcccagcucacaaauuu

SEQ ID NO: 1285824 - RNA, 19 nt, Homo sapiens
  misc_RNA (1)...(19): siRNA sense strand
gaagcgaccugguguuaca

SEQ ID NO: 1285825 - RNA, 19 nt, Homo sapiens
  misc_RNA (1)...(19): siRNA sense strand
gaaaauauguccacgaugu

SEQ ID NO: 1285826 - RNA, 19 nt, Homo sapiens
  misc_RNA (1)...(19): siRNA sense strand
cuaaucauuucccuacuua

SEQ ID NO: 1285827 - RNA, 19 nt, Homo sapiens
  misc_RNA (1)...(19): siRNA sense strand
gaagagaaauguuuaucac

SEQ ID NO: 1285828 - RNA, 19 nt, Homo sapiens
  misc_RNA (1)...(19): siRNA sense strand
gggcaaauaucugagcuuu

SEQ ID NO: 1285829 - RNA, 19 nt, Homo sapiens
  misc_RNA (1)...(19): siRNA sense strand
ccagguacccaguuuguua

SEQ ID NO: 1285830 - RNA, 19 nt, Homo sapiens
  misc_RNA (1)...(19): siRNA sense strand
caaguguucucccagauga

SEQ ID NO: 1285831 - RNA, 19 nt, Homo sapiens
  misc_RNA (1)...(19): siRNA sense strand
gcugaacacuuccgaaauc

SEQ ID NO: 1285832 - RNA, 19 nt, Homo sapiens
  misc_RNA (1)...(19): siRNA sense strand
caauaucgcuccucacucu

SEQ ID NO: 1285833 - RNA, 19 nt, Homo sapiens
  misc_RNA (1)...(19): siRNA sense strand
gaccggaacgugaagaaua

SEQ ID NO: 1285834 - RNA, 19 nt, Homo sapiens
  misc_RNA (1)...(19): siRNA sense strand
caucugcucugcccuuauu

SEQ ID NO: 1285835 - RNA, 19 nt, Homo sapiens
  misc_RNA (1)...(19): siRNA sense strand
ccgaaugucugaauguuga

SEQ ID NO: 1285836 - RNA, 19 nt, Homo sapiens
  misc_RNA (1)...(19): siRNA sense strand
ggucugggcacaaugguua

SEQ ID NO: 1285837 - RNA, 19 nt, Homo sapiens
  misc_RNA (1)...(19): siRNA sense strand
cagcaaggccaaacgguua

SEQ ID NO: 1285838 - RNA, 19 nt, Homo sapiens
  misc_RNA (1)...(19): siRNA sense strand
ccaaucaugugacuaguuc

SEQ ID NO: 1285839 - RNA, 19 nt, Homo sapiens
  misc_RNA (1)...(19): siRNA sense strand
gcuccucacucuacucuga

SEQ ID NO: 1285840 - RNA, 19 nt, Homo sapiens
  misc_RNA (1)...(19): siRNA sense strand
gcagaacggugagguagau

SEQ ID NO: 1285841 - RNA, 19 nt, Homo sapiens
  misc_RNA (1)...(19): siRNA sense strand
caaaguaccagaaccaaau

SEQ ID NO: 1285842 - RNA, 19 nt, Homo sapiens
  misc_RNA (1)...(19): siRNA sense strand
ugagaggucacauguguua

SEQ ID NO: 1285843 - RNA, 19 nt, Homo sapiens
  misc_RNA (1)...(19): siRNA sense strand
caaugaaagugaccucuuc

SEQ ID NO: 1285844 - RNA, 19 nt, Homo sapiens
  misc_RNA (1)...(19): siRNA sense strand
gaaucuagagggcaaauau

SEQ ID NO: 1285845 - RNA, 19 nt, Homo sapiens
  misc_RNA (1)...(19): siRNA sense strand
ggucacauguguuacuguu

SEQ ID NO: 1285846 - RNA, 19 nt, Homo sapiens
  misc_RNA (1)...(19): siRNA sense strand
aaaggaaagucccuggauu

SEQ ID NO: 1285847 - RNA, 19 nt, Homo sapiens
  misc_RNA (1)...(19): siRNA sense strand
ugaggacucuguaguugaa

SEQ ID NO: 1285848 - RNA, 19 nt, Homo sapiens
  misc_RNA (1)...(19): siRNA sense strand
ucacaaauuucccuaaggu

SEQ ID NO: 1285849 - RNA, 19 nt, Homo sapiens
  misc_RNA (1)...(19): siRNA sense strand
ccaaacgguuagaccaauu

SEQ ID NO: 1285850 - RNA, 19 nt, Homo sapiens
  misc_RNA (1)...(19): siRNA sense strand
uaaaugaggagaccuuguu

SEQ ID NO: 1285851 - RNA, 19 nt, Homo sapiens
  misc_RNA (1)...(19): siRNA sense strand
gagcagcugucugugaaga

SEQ ID NO: 1285852 - RNA, 19 nt, Homo sapiens
  misc_RNA (1)...(19): siRNA sense strand
gagagaugccuuauguuug

SEQ ID NO: 1285853 - RNA, 19 nt, Homo sapiens
  misc_RNA (1)...(19): siRNA sense strand
caaacgguuagaccaauua

SEQ ID NO: 1285854 - RNA, 19 nt, Homo sapiens
  misc_RNA (1)...(19): siRNA sense strand
gaaaggaaagucccuggau

SEQ ID NO: 1285855 - RNA, 19 nt, Homo sapiens
  misc_RNA (1)...(19): siRNA sense strand
acaggcagcugaacacuuc

SEQ ID NO: 1285856 - RNA, 19 nt, Homo sapiens
  misc_RNA (1)...(19): siRNA sense strand
ccaagaaccugagcuagca

SEQ ID NO: 1285857 - RNA, 19 nt, Homo sapiens
  misc_RNA (1)...(19): siRNA sense strand
ggaagagccccaaguauuu

SEQ ID NO: 1285858 - RNA, 19 nt, Homo sapiens
  misc_RNA (1)...(19): siRNA sense strand
gaccacgaaucccaagcua

SEQ ID NO: 1285859 - RNA, 19 nt, Homo sapiens
  misc_RNA (1)...(19): siRNA sense strand
aauaggacguucuuuggaa

SEQ ID NO: 1285860 - RNA, 19 nt, Homo sapiens
  misc_RNA (1)...(19): siRNA sense strand
ucauaagccuggagagaug

SEQ ID NO: 1285861 - RNA, 19 nt, Homo sapiens
  misc_RNA (1)...(19): siRNA sense strand
caaaguagcccagcucaca

SEQ ID NO: 1285862 - RNA, 19 nt, Homo sapiens
  misc_RNA (1)...(19): siRNA sense strand
guccagaccaaacucauua

SEQ ID NO: 1285863 - RNA, 19 nt, Homo sapiens
  misc_RNA (1)...(19): siRNA sense strand
ugaauacccuuaacaccau

SEQ ID NO: 1285864 - RNA, 19 nt, Homo sapiens
  misc_RNA (1)...(19): siRNA sense strand
ccaaccacaugaucaacaa

SEQ ID NO: 1285865 - RNA, 19 nt, Homo sapiens
  misc_RNA (1)...(19): siRNA sense strand
ucauuucccuacuuacgua

SEQ ID NO: 1285866 - RNA, 19 nt, Homo sapiens
  misc_RNA (1)...(19): siRNA sense strand
agacuucccuaaucauuuc

SEQ ID NO: 1285867 - RNA, 19 nt, Homo sapiens
  misc_RNA (1)...(19): siRNA sense strand
cuggagagaugccuuaugu

SEQ ID NO: 1285868 - RNA, 19 nt, Homo sapiens
  misc_RNA (1)...(19): siRNA sense strand
aaugcucaauuucguguua

SEQ ID NO: 1285869 - RNA, 19 nt, Homo sapiens
  misc_RNA (1)...(19): siRNA sense strand
uuuaagaucuccuaugagu

SEQ ID NO: 1285870 - RNA, 19 nt, Homo sapiens
  misc_RNA (1)...(19): siRNA sense strand
guuuaucacugcaacaaau

SEQ ID NO: 1285871 - RNA, 19 nt, Homo sapiens
  misc_RNA (1)...(19): siRNA sense strand
ugagguagauguccauuuu

SEQ ID NO: 1285872 - RNA, 19 nt, Homo sapiens
  misc_RNA (1)...(19): siRNA sense strand
gugaagcgaccugguguua

SEQ ID NO: 1285873 - RNA, 19 nt, Homo sapiens
  misc_RNA (1)...(19): siRNA sense strand
guaguacuguuugcucuau

SEQ ID NO: 1285874 - RNA, 19 nt, Homo sapiens
  misc_RNA (1)...(19): siRNA sense strand
ccgcugaccuccucaaugg

SEQ ID NO: 1285875 - RNA, 19 nt, Homo sapiens
  misc_RNA (1)...(19): siRNA sense strand
gaaugggcguuugaaagug

SEQ ID NO: 1285876 - RNA, 19 nt, Homo sapiens
  misc_RNA (1)...(19): siRNA sense strand
gcucacaaauuucccuaag

SEQ ID NO: 1285877 - RNA, 19 nt, Homo sapiens
  misc_RNA (1)...(19): siRNA sense strand
ggauugugcugaacguaca

SEQ ID NO: 1285878 - RNA, 19 nt, Homo sapiens
  misc_RNA (1)...(19): siRNA sense strand
acucuguaguugaagauua

SEQ ID NO: 1285879 - RNA, 19 nt, Homo sapiens
  misc_RNA (1)...(19): siRNA sense strand
gaagagaaacuggcugagu

SEQ ID NO: 1285880 - RNA, 19 nt, Homo sapiens
  misc_RNA (1)...(19): siRNA sense strand
ccacucacccgcaggcuuu

SEQ ID NO: 1285881 - RNA, 19 nt, Homo sapiens
  misc_RNA (1)...(19): siRNA sense strand
ggaacgugaagaauaugua

SEQ ID NO: 1285882 - RNA, 19 nt, Homo sapiens
  misc_RNA (1)...(19): siRNA sense strand
ggacaaaauugaacacaag

SEQ ID NO: 1285883 - RNA, 19 nt, Homo sapiens
  misc_RNA (1)...(19): siRNA sense strand
acaccgaccuguucaugga

SEQ ID NO: 1285884 - RNA, 19 nt, Homo sapiens
  misc_RNA (1)...(19): siRNA sense strand
caccagaagagaaauguuu

SEQ ID NO: 1285885 - RNA, 19 nt, Homo sapiens
  misc_RNA (1)...(19): siRNA sense strand
gcucuaugcugcaauacag

SEQ ID NO: 1285886 - RNA, 19 nt, Homo sapiens
  misc_RNA (1)...(19): siRNA sense strand
gcagaaugccaaucaugug

SEQ ID NO: 1285887 - RNA, 19 nt, Homo sapiens
  misc_RNA (1)...(19): siRNA sense strand
uaugaaacaccacguagaa

SEQ ID NO: 1285888 - RNA, 19 nt, Homo sapiens
  misc_RNA (1)...(19): siRNA sense strand
ccuaaucauuucccuacuu

SEQ ID NO: 1285889 - RNA, 19 nt, Homo sapiens
  misc_RNA (1)...(19): siRNA sense strand
gccguuggcuucgacguuu

SEQ ID NO: 1285890 - RNA, 19 nt, Homo sapiens
  misc_RNA (1)...(19): siRNA sense strand
acgauguaaugcucaauuu

SEQ ID NO: 1285891 - RNA, 19 nt, Homo sapiens
  misc_RNA (1)...(19): siRNA sense strand
ccacagcuggcaauccuuu

SEQ ID NO: 1285892 - RNA, 19 nt, Homo sapiens
  misc_RNA (1)...(19): siRNA sense strand
ucaccagccucaacugcaa

SEQ ID NO: 1285893 - RNA, 19 nt, Homo sapiens
  misc_RNA (1)...(19): siRNA sense strand
guuccuguauccucuaaug

SEQ ID NO: 1285894 - RNA, 19 nt, Homo sapiens
  misc_RNA (1)...(19): siRNA sense strand
ugaaugggcguuugaaagu

SEQ ID NO: 1285895 - RNA, 19 nt, Homo sapiens
  misc_RNA (1)...(19): siRNA sense strand
ugagguagauggucacacu

SEQ ID NO: 1285896 - RNA, 19 nt, Homo sapiens
  misc_RNA (1)...(19): siRNA sense strand
ccaggaugguggacggaaa

SEQ ID NO: 1285897 - RNA, 19 nt, Homo sapiens
  misc_RNA (1)...(19): siRNA sense strand
ccagaaggccaccaaaaua

SEQ ID NO: 1285898 - RNA, 19 nt, Homo sapiens
  misc_RNA (1)...(19): siRNA sense strand
cagcugaacacuuccgaaa

SEQ ID NO: 1285899 - RNA, 19 nt, Homo sapiens
  misc_RNA (1)...(19): siRNA sense strand
ggagccgaaugucugaaug

SEQ ID NO: 1285900 - RNA, 19 nt, Homo sapiens
  misc_RNA (1)...(19): siRNA sense strand
caaagcugccacugugaaa

SEQ ID NO: 1285901 - RNA, 19 nt, Homo sapiens
  misc_RNA (1)...(19): siRNA sense strand
cauaaaaccuuccguaaac

SEQ ID NO: 1285902 - RNA, 19 nt, Homo sapiens
  misc_RNA (1)...(19): siRNA sense strand
agagaugccuuauguuugc

SEQ ID NO: 1285903 - RNA, 19 nt, Homo sapiens
  misc_RNA (1)...(19): siRNA sense strand
caaacucauuaugcuugua

SEQ ID NO: 1285904 - RNA, 19 nt, Homo sapiens
  misc_RNA (1)...(19): siRNA sense strand
ucaauuucguguuacugaa

SEQ ID NO: 1285905 - RNA, 19 nt, Homo sapiens
  misc_RNA (1)...(19): siRNA sense strand
cagcggaccugagucuuca

SEQ ID NO: 1285906 - RNA, 19 nt, Homo sapiens
  misc_RNA (1)...(19): siRNA sense strand
ggacaccgaccuguucaug

SEQ ID NO: 1285907 - RNA, 19 nt, Homo sapiens
  misc_RNA (1)...(19): siRNA sense strand
uuugagaggucacaugugu

SEQ ID NO: 1285908 - RNA, 19 nt, Homo sapiens
  misc_RNA (1)...(19): siRNA sense strand
ccucacaaccaauauuuau

SEQ ID NO: 1285909 - RNA, 19 nt, Homo sapiens
  misc_RNA (1)...(19): siRNA sense strand
ccaaacucauuaugcuugu

SEQ ID NO: 1285910 - RNA, 19 nt, Homo sapiens
  misc_RNA (1)...(19): siRNA sense strand
cuagagggcaaauaucuga

SEQ ID NO: 1285911 - RNA, 19 nt, Homo sapiens
  misc_RNA (1)...(19): siRNA sense strand
gaacgugaagaauauguac

SEQ ID NO: 1285912 - RNA, 19 nt, Homo sapiens
  misc_RNA (1)...(19): siRNA sense strand
guaccuuuguuaccucugu

SEQ ID NO: 1285913 - RNA, 19 nt, Homo sapiens
  misc_RNA (1)...(19): siRNA sense strand
cagaaugccaaucauguga

SEQ ID NO: 1285914 - RNA, 19 nt, Homo sapiens
  misc_RNA (1)...(19): siRNA sense strand
gcaagaagcucuguacaug

SEQ ID NO: 1285915 - RNA, 19 nt, Homo sapiens
  misc_RNA (1)...(19): siRNA sense strand
gcauugaccuugacacuga

SEQ ID NO: 1285916 - RNA, 19 nt, Homo sapiens
  misc_RNA (1)...(19): siRNA sense strand
gcucagaguugucaagaau

SEQ ID NO: 1285917 - RNA, 19 nt, Homo sapiens
  misc_RNA (1)...(19): siRNA sense strand
gauaugaaguggaagaaca

SEQ ID NO: 1285918 - RNA, 19 nt, Homo sapiens
  misc_RNA (1)...(19): siRNA sense strand
ggcaagauaugaaguggaa

SEQ ID NO: 1285919 - RNA, 19 nt, Homo sapiens
  misc_RNA (1)...(19): siRNA sense strand
gcaacaacaucggcaaaga

SEQ ID NO: 1285920 - RNA, 19 nt, Homo sapiens
  misc_RNA (1)...(19): siRNA sense strand
gaucaaaucccaggaccua

SEQ ID NO: 1285921 - RNA, 19 nt, Homo sapiens
  misc_RNA (1)...(19): siRNA sense strand
aagaagcucuguacaugaa

SEQ ID NO: 1285922 - RNA, 19 nt, Homo sapiens
  misc_RNA (1)...(19): siRNA sense strand
gcgaggagcuggaguacag

SEQ ID NO: 1285923 - RNA, 19 nt, Homo sapiens
  misc_RNA (1)...(19): siRNA sense strand
gggaggugcucauccgaaa

SEQ ID NO: 1285924 - RNA, 19 nt, Homo sapiens
  misc_RNA (1)...(19): siRNA sense strand
gaccgaggcuuccgcuuca

SEQ ID NO: 1285925 - RNA, 19 nt, Homo sapiens
  misc_RNA (1)...(19): siRNA sense strand
ggucauguccaucaacaaa

SEQ ID NO: 1285926 - RNA, 19 nt, Homo sapiens
  misc_RNA (1)...(19): siRNA sense strand
cugaagggcuggcacaaga

SEQ ID NO: 1285927 - RNA, 19 nt, Homo sapiens
  misc_RNA (1)...(19): siRNA sense strand
gcaacaacccggcaagaca

SEQ ID NO: 1285928 - RNA, 19 nt, Homo sapiens
  misc_RNA (1)...(19): siRNA sense strand
gcaccagggcucagaguug

SEQ ID NO: 1285929 - RNA, 19 nt, Homo sapiens
  misc_RNA (1)...(19): siRNA sense strand
caagaagcucuguacauga

SEQ ID NO: 1285930 - RNA, 19 nt, Homo sapiens
  misc_RNA (1)...(19): siRNA sense strand
acaccaggcucgcuucuuc

SEQ ID NO: 1285931 - RNA, 19 nt, Homo sapiens
  misc_RNA (1)...(19): siRNA sense strand
gcaaagucauggaggaaaa

SEQ ID NO: 1285932 - RNA, 19 nt, Homo sapiens
  misc_RNA (1)...(19): siRNA sense strand
ggaacauucugcgcaacaa

SEQ ID NO: 1285933 - RNA, 19 nt, Homo sapiens
  misc_RNA (1)...(19): siRNA sense strand
ggacgggauccuucauuau

SEQ ID NO: 1285934 - RNA, 19 nt, Homo sapiens
  misc_RNA (1)...(19): siRNA sense strand
gacgggauccuucauuaug

SEQ ID NO: 1285935 - RNA, 19 nt, Homo sapiens
  misc_RNA (1)...(19): siRNA sense strand
caacaucuaccaccucaag

SEQ ID NO: 1285936 - RNA, 19 nt, Homo sapiens
  misc_RNA (1)...(19): siRNA sense strand
caagauaugaaguggaaga

SEQ ID NO: 1285937 - RNA, 19 nt, Homo sapiens
  misc_RNA (1)...(19): siRNA sense strand
ucaaaucccaggaccuauu

SEQ ID NO: 1285938 - RNA, 19 nt, Homo sapiens
  misc_RNA (1)...(19): siRNA sense strand
ugaaguggaagaacaaguu

SEQ ID NO: 1285939 - RNA, 19 nt, Homo sapiens
  misc_RNA (1)...(19): siRNA sense strand
gauagcagcgggaaagagu

SEQ ID NO: 1285940 - RNA, 19 nt, Homo sapiens
  misc_RNA (1)...(19): siRNA sense strand
gacgugagccuguggaaca

SEQ ID NO: 1285941 - RNA, 19 nt, Homo sapiens
  misc_RNA (1)...(19): siRNA sense strand
gaagggcuggcacaagaga

SEQ ID NO: 1285942 - RNA, 19 nt, Homo sapiens
  misc_RNA (1)...(19): siRNA sense strand
cgagacaggcgcaaaguca

SEQ ID NO: 1285943 - RNA, 19 nt, Homo sapiens
  misc_RNA (1)...(19): siRNA sense strand
caaggugacauccugcauu

SEQ ID NO: 1285944 - RNA, 19 nt, Homo sapiens
  misc_RNA (1)...(19): siRNA sense strand
ugccaaggaugacaccauu

SEQ ID NO: 1285945 - RNA, 19 nt, Homo sapiens
  misc_RNA (1)...(19): siRNA sense strand
ucagaguugucaagaaugg

SEQ ID NO: 1285946 - RNA, 19 nt, Homo sapiens
  misc_RNA (1)...(19): siRNA sense strand
gauccuucauuaugcaaca

SEQ ID NO: 1285947 - RNA, 19 nt, Homo sapiens
  misc_RNA (1)...(19): siRNA sense strand
caacaacccggcaagacau

SEQ ID NO: 1285948 - RNA, 19 nt, Homo sapiens
  misc_RNA (1)...(19): siRNA sense strand
aaggugacauccugcauuc

SEQ ID NO: 1285949 - RNA, 19 nt, Homo sapiens
  misc_RNA (1)...(19): siRNA sense strand
acacugaagacaacaucua

SEQ ID NO: 1285950 - RNA, 19 nt, Homo sapiens
  misc_RNA (1)...(19): siRNA sense strand
gcaagaucaccuucugcaa

SEQ ID NO: 1285951 - RNA, 19 nt, Homo sapiens
  misc_RNA (1)...(19): siRNA sense strand
ggaguccuguaccagugaa

SEQ ID NO: 1285952 - RNA, 19 nt, Homo sapiens
  misc_RNA (1)...(19): siRNA sense strand
caccagggcucagaguugu

SEQ ID NO: 1285953 - RNA, 19 nt, Homo sapiens
  misc_RNA (1)...(19): siRNA sense strand
ccagagcuuugccaaggau

SEQ ID NO: 1285954 - RNA, 19 nt, Homo sapiens
  misc_RNA (1)...(19): siRNA sense strand
caaccgaaagacccaagaa

SEQ ID NO: 1285955 - RNA, 19 nt, Homo sapiens
  misc_RNA (1)...(19): siRNA sense strand
caaaucccaggaccuauuc

SEQ ID NO: 1285956 - RNA, 19 nt, Homo sapiens
  misc_RNA (1)...(19): siRNA sense strand
guacaucgcagccuuugcu

SEQ ID NO: 1285957 - RNA, 19 nt, Homo sapiens
  misc_RNA (1)...(19): siRNA sense strand
gaggugcucauccgaaaca

SEQ ID NO: 1285958 - RNA, 19 nt, Homo sapiens
  misc_RNA (1)...(19): siRNA sense strand
gagggugucaugccugaga

SEQ ID NO: 1285959 - RNA, 19 nt, Homo sapiens
  misc_RNA (1)...(19): siRNA sense strand
acaccacggcggacucuuu

SEQ ID NO: 1285960 - RNA, 19 nt, Homo sapiens
  misc_RNA (1)...(19): siRNA sense strand
gcugaggcccagaagagaa

SEQ ID NO: 1285961 - RNA, 19 nt, Homo sapiens
  misc_RNA (1)...(19): siRNA sense strand
ucacccaguuugccuugga

SEQ ID NO: 1285962 - RNA, 19 nt, Homo sapiens
  misc_RNA (1)...(19): siRNA sense strand
ggucaccugcucaagaaga

SEQ ID NO: 1285963 - RNA, 19 nt, Homo sapiens
  misc_RNA (1)...(19): siRNA sense strand
gcgcaacaacaucggcaaa

SEQ ID NO: 1285964 - RNA, 19 nt, Homo sapiens
  misc_RNA (1)...(19): siRNA sense strand
caccaggccucagugacaa

SEQ ID NO: 1285965 - RNA, 19 nt, Homo sapiens
  misc_RNA (1)...(19): siRNA sense strand
gauugugccugugggaaca

SEQ ID NO: 1285966 - RNA, 19 nt, Homo sapiens
  misc_RNA (1)...(19): siRNA sense strand
gugagccuguggaacauuc

SEQ ID NO: 1285967 - RNA, 19 nt, Homo sapiens
  misc_RNA (1)...(19): siRNA sense strand
ucuaccaccucaagaucaa

SEQ ID NO: 1285968 - RNA, 19 nt, Homo sapiens
  misc_RNA (1)...(19): siRNA sense strand
ggaggaaaacaacaucgua

SEQ ID NO: 1285969 - RNA, 19 nt, Homo sapiens
  misc_RNA (1)...(19): siRNA sense strand
ccacacaccaggccucagu

SEQ ID NO: 1285970 - RNA, 19 nt, Homo sapiens
  misc_RNA (1)...(19): siRNA sense strand
cuggaccgcugcucucaug

SEQ ID NO: 1285971 - RNA, 19 nt, Homo sapiens
  misc_RNA (1)...(19): siRNA sense strand
aaacggacaagccgcaugu

SEQ ID NO: 1285972 - RNA, 19 nt, Homo sapiens
  misc_RNA (1)...(19): siRNA sense strand
caacaacaucggcaaagac

SEQ ID NO: 1285973 - RNA, 19 nt, Homo sapiens
  misc_RNA (1)...(19): siRNA sense strand
cagccugucugaggagaug

SEQ ID NO: 1285974 - RNA, 19 nt, Homo sapiens
  misc_RNA (1)...(19): siRNA sense strand
uggagucccugcaccgaau

SEQ ID NO: 1285975 - RNA, 19 nt, Homo sapiens
  misc_RNA (1)...(19): siRNA sense strand
gcgcaaagucauggaggaa

SEQ ID NO: 1285976 - RNA, 19 nt, Homo sapiens
  misc_RNA (1)...(19): siRNA sense strand
gcgagcgcaugguguacau

SEQ ID NO: 1285977 - RNA, 19 nt, Homo sapiens
  misc_RNA (1)...(19): siRNA sense strand
ucuggaaacccaacucaau

SEQ ID NO: 1285978 - RNA, 19 nt, Homo sapiens
  misc_RNA (1)...(19): siRNA sense strand
ccacacggaguucuucgau

SEQ ID NO: 1285979 - RNA, 19 nt, Homo sapiens
  misc_RNA (1)...(19): siRNA sense strand
gccaggcuaugggaacaug

SEQ ID NO: 1285980 - RNA, 19 nt, Homo sapiens
  misc_RNA (1)...(19): siRNA sense strand
gagcagcugcagcgagaca

SEQ ID NO: 1285981 - RNA, 19 nt, Homo sapiens
  misc_RNA (1)...(19): siRNA sense strand
ggcucagaguugucaagaa

SEQ ID NO: 1285982 - RNA, 19 nt, Homo sapiens
  misc_RNA (1)...(19): siRNA sense strand
gaacauucugcgcaacaac

SEQ ID NO: 1285983 - RNA, 19 nt, Homo sapiens
  misc_RNA (1)...(19): siRNA sense strand
gguguacaucgcagccuuu

SEQ ID NO: 1285984 - RNA, 19 nt, Homo sapiens
  misc_RNA (1)...(19): siRNA sense strand
gcagcgagacaggcgcaaa

SEQ ID NO: 1285985 - RNA, 19 nt, Homo sapiens
  misc_RNA (1)...(19): siRNA sense strand
cggccuacuccuccacaua

SEQ ID NO: 1285986 - RNA, 19 nt, Homo sapiens
  misc_RNA (1)...(19): siRNA sense strand
acaccaggccucagugaca

SEQ ID NO: 1285987 - RNA, 19 nt, Homo sapiens
  misc_RNA (1)...(19): siRNA sense strand
caccgacucuuugggaagu

SEQ ID NO: 1285988 - RNA, 19 nt, Homo sapiens
  misc_RNA (1)...(19): siRNA sense strand
caaugccugugcagcucaa

SEQ ID NO: 1285989 - RNA, 19 nt, Homo sapiens
  misc_RNA (1)...(19): siRNA sense strand
gcaagaagcucuguacaug

SEQ ID NO: 1285990 - RNA, 19 nt, Homo sapiens
  misc_RNA (1)...(19): siRNA sense strand
gcauugaccuugacacuga

SEQ ID NO: 1285991 - RNA, 19 nt, Homo sapiens
  misc_RNA (1)...(19): siRNA sense strand
gcucagaguugucaagaau

SEQ ID NO: 1285992 - RNA, 19 nt, Homo sapiens
  misc_RNA (1)...(19): siRNA sense strand
gauaugaaguggaagaaca

SEQ ID NO: 1285993 - RNA, 19 nt, Homo sapiens
  misc_RNA (1)...(19): siRNA sense strand
ggcaagauaugaaguggaa

SEQ ID NO: 1285994 - RNA, 19 nt, Homo sapiens
  misc_RNA (1)...(19): siRNA sense strand
gcaacaacaucggcaaaga

SEQ ID NO: 1285995 - RNA, 19 nt, Homo sapiens
  misc_RNA (1)...(19): siRNA sense strand
gaucaaaucccaggaccua

SEQ ID NO: 1285996 - RNA, 19 nt, Homo sapiens
  misc_RNA (1)...(19): siRNA sense strand
aagaagcucuguacaugaa

SEQ ID NO: 1285997 - RNA, 19 nt, Homo sapiens
  misc_RNA (1)...(19): siRNA sense strand
gcgaggagcuggaguacag

SEQ ID NO: 1285998 - RNA, 19 nt, Homo sapiens
  misc_RNA (1)...(19): siRNA sense strand
gggaggugcucauccgaaa

SEQ ID NO: 1285999 - RNA, 19 nt, Homo sapiens
  misc_RNA (1)...(19): siRNA sense strand
gaccgaggcuuccgcuuca

SEQ ID NO: 1286000 - RNA, 19 nt, Homo sapiens
  misc_RNA (1)...(19): siRNA sense strand
ggucauguccaucaacaaa

SEQ ID NO: 1286001 - RNA, 19 nt, Homo sapiens
  misc_RNA (1)...(19): siRNA sense strand
cugaagggcuggcacaaga

SEQ ID NO: 1286002 - RNA, 19 nt, Homo sapiens
  misc_RNA (1)...(19): siRNA sense strand
gcaacaacccggcaagaca

SEQ ID NO: 1286003 - RNA, 19 nt, Homo sapiens
  misc_RNA (1)...(19): siRNA sense strand
gcaccagggcucagaguug

SEQ ID NO: 1286004 - RNA, 19 nt, Homo sapiens
  misc_RNA (1)...(19): siRNA sense strand
caagaagcucuguacauga

SEQ ID NO: 1286005 - RNA, 19 nt, Homo sapiens
  misc_RNA (1)...(19): siRNA sense strand
acaccaggcucgcuucuuc

SEQ ID NO: 1286006 - RNA, 19 nt, Homo sapiens
  misc_RNA (1)...(19): siRNA sense strand
gcaaagucauggaggaaaa

SEQ ID NO: 1286007 - RNA, 19 nt, Homo sapiens
  misc_RNA (1)...(19): siRNA sense strand
ggaacauucugcgcaacaa

SEQ ID NO: 1286008 - RNA, 19 nt, Homo sapiens
  misc_RNA (1)...(19): siRNA sense strand
ggacgggauccuucauuau

SEQ ID NO: 1286009 - RNA, 19 nt, Homo sapiens
  misc_RNA (1)...(19): siRNA sense strand
gacgggauccuucauuaug

SEQ ID NO: 1286010 - RNA, 19 nt, Homo sapiens
  misc_RNA (1)...(19): siRNA sense strand
caacaucuaccaccucaag

SEQ ID NO: 1286011 - RNA, 19 nt, Homo sapiens
  misc_RNA (1)...(19): siRNA sense strand
caagauaugaaguggaaga

SEQ ID NO: 1286012 - RNA, 19 nt, Homo sapiens
  misc_RNA (1)...(19): siRNA sense strand
ucaaaucccaggaccuauu

SEQ ID NO: 1286013 - RNA, 19 nt, Homo sapiens
  misc_RNA (1)...(19): siRNA sense strand
ugaaguggaagaacaaguu

SEQ ID NO: 1286014 - RNA, 19 nt, Homo sapiens
  misc_RNA (1)...(19): siRNA sense strand
gauagcagcgggaaagagu

SEQ ID NO: 1286015 - RNA, 19 nt, Homo sapiens
  misc_RNA (1)...(19): siRNA sense strand
gacgugagccuguggaaca

SEQ ID NO: 1286016 - RNA, 19 nt, Homo sapiens
  misc_RNA (1)...(19): siRNA sense strand
gaagggcuggcacaagaga

SEQ ID NO: 1286017 - RNA, 19 nt, Homo sapiens
  misc_RNA (1)...(19): siRNA sense strand
cgagacaggcgcaaaguca

SEQ ID NO: 1286018 - RNA, 19 nt, Homo sapiens
  misc_RNA (1)...(19): siRNA sense strand
caaggugacauccugcauu

SEQ ID NO: 1286019 - RNA, 19 nt, Homo sapiens
  misc_RNA (1)...(19): siRNA sense strand
ugccaaggaugacaccauu

SEQ ID NO: 1286020 - RNA, 19 nt, Homo sapiens
  misc_RNA (1)...(19): siRNA sense strand
ucagaguugucaagaaugg

SEQ ID NO: 1286021 - RNA, 19 nt, Homo sapiens
  misc_RNA (1)...(19): siRNA sense strand
gauccuucauuaugcaaca

SEQ ID NO: 1286022 - RNA, 19 nt, Homo sapiens
  misc_RNA (1)...(19): siRNA sense strand
caacaacccggcaagacau

SEQ ID NO: 1286023 - RNA, 19 nt, Homo sapiens
  misc_RNA (1)...(19): siRNA sense strand
aaggugacauccugcauuc

SEQ ID NO: 1286024 - RNA, 19 nt, Homo sapiens
  misc_RNA (1)...(19): siRNA sense strand
acacugaagacaacaucua

SEQ ID NO: 1286025 - RNA, 19 nt, Homo sapiens
  misc_RNA (1)...(19): siRNA sense strand
gcaagaucaccuucugcaa

SEQ ID NO: 1286026 - RNA, 19 nt, Homo sapiens
  misc_RNA (1)...(19): siRNA sense strand
ggaguccuguaccagugaa

SEQ ID NO: 1286027 - RNA, 19 nt, Homo sapiens
  misc_RNA (1)...(19): siRNA sense strand
caccagggcucagaguugu

SEQ ID NO: 1286028 - RNA, 19 nt, Homo sapiens
  misc_RNA (1)...(19): siRNA sense strand
ccagagcuuugccaaggau

SEQ ID NO: 1286029 - RNA, 19 nt, Homo sapiens
  misc_RNA (1)...(19): siRNA sense strand
caaccgaaagacccaagaa

SEQ ID NO: 1286030 - RNA, 19 nt, Homo sapiens
  misc_RNA (1)...(19): siRNA sense strand
caaaucccaggaccuauuc

SEQ ID NO: 1286031 - RNA, 19 nt, Homo sapiens
  misc_RNA (1)...(19): siRNA sense strand
guacaucgcagccuuugcu

SEQ ID NO: 1286032 - RNA, 19 nt, Homo sapiens
  misc_RNA (1)...(19): siRNA sense strand
gaggugcucauccgaaaca

SEQ ID NO: 1286033 - RNA, 19 nt, Homo sapiens
  misc_RNA (1)...(19): siRNA sense strand
gagggugucaugccugaga

SEQ ID NO: 1286034 - RNA, 19 nt, Homo sapiens
  misc_RNA (1)...(19): siRNA sense strand
acaccacggcggacucuuu

SEQ ID NO: 1286035 - RNA, 19 nt, Homo sapiens
  misc_RNA (1)...(19): siRNA sense strand
gcugaggcccagaagagaa

SEQ ID NO: 1286036 - RNA, 19 nt, Homo sapiens
  misc_RNA (1)...(19): siRNA sense strand
ucacccaguuugccuugga

SEQ ID NO: 1286037 - RNA, 19 nt, Homo sapiens
  misc_RNA (1)...(19): siRNA sense strand
ggucaccugcucaagaaga

SEQ ID NO: 1286038 - RNA, 19 nt, Homo sapiens
  misc_RNA (1)...(19): siRNA sense strand
gcgcaacaacaucggcaaa

SEQ ID NO: 1286039 - RNA, 19 nt, Homo sapiens
  misc_RNA (1)...(19): siRNA sense strand
caccaggccucagugacaa

SEQ ID NO: 1286040 - RNA, 19 nt, Homo sapiens
  misc_RNA (1)...(19): siRNA sense strand
gauugugccugugggaaca

SEQ ID NO: 1286041 - RNA, 19 nt, Homo sapiens
  misc_RNA (1)...(19): siRNA sense strand
gugagccuguggaacauuc

SEQ ID NO: 1286042 - RNA, 19 nt, Homo sapiens
  misc_RNA (1)...(19): siRNA sense strand
ucuaccaccucaagaucaa

SEQ ID NO: 1286043 - RNA, 19 nt, Homo sapiens
  misc_RNA (1)...(19): siRNA sense strand
ggaggaaaacaacaucgua

SEQ ID NO: 1286044 - RNA, 19 nt, Homo sapiens
  misc_RNA (1)...(19): siRNA sense strand
ccacacaccaggccucagu

SEQ ID NO: 1286045 - RNA, 19 nt, Homo sapiens
  misc_RNA (1)...(19): siRNA sense strand
cuggaccgcugcucucaug

SEQ ID NO: 1286046 - RNA, 19 nt, Homo sapiens
  misc_RNA (1)...(19): siRNA sense strand
aaacggacaagccgcaugu

SEQ ID NO: 1286047 - RNA, 19 nt, Homo sapiens
  misc_RNA (1)...(19): siRNA sense strand
caacaacaucggcaaagac

SEQ ID NO: 1286048 - RNA, 19 nt, Homo sapiens
  misc_RNA (1)...(19): siRNA sense strand
cagccugucugaggagaug

SEQ ID NO: 1286049 - RNA, 19 nt, Homo sapiens
  misc_RNA (1)...(19): siRNA sense strand
uggagucccugcaccgaau

SEQ ID NO: 1286050 - RNA, 19 nt, Homo sapiens
  misc_RNA (1)...(19): siRNA sense strand
gcgcaaagucauggaggaa

SEQ ID NO: 1286051 - RNA, 19 nt, Homo sapiens
  misc_RNA (1)...(19): siRNA sense strand
gcgagcgcaugguguacau

SEQ ID NO: 1286052 - RNA, 19 nt, Homo sapiens
  misc_RNA (1)...(19): siRNA sense strand
ucuggaaacccaacucaau

SEQ ID NO: 1286053 - RNA, 19 nt, Homo sapiens
  misc_RNA (1)...(19): siRNA sense strand
ccacacggaguucuucgau

SEQ ID NO: 1286054 - RNA, 19 nt, Homo sapiens
  misc_RNA (1)...(19): siRNA sense strand
gccaggcuaugggaacaug

SEQ ID NO: 1286055 - RNA, 19 nt, Homo sapiens
  misc_RNA (1)...(19): siRNA sense strand
gagcagcugcagcgagaca

SEQ ID NO: 1286056 - RNA, 19 nt, Homo sapiens
  misc_RNA (1)...(19): siRNA sense strand
ggcucagaguugucaagaa

SEQ ID NO: 1286057 - RNA, 19 nt, Homo sapiens
  misc_RNA (1)...(19): siRNA sense strand
gaacauucugcgcaacaac

SEQ ID NO: 1286058 - RNA, 19 nt, Homo sapiens
  misc_RNA (1)...(19): siRNA sense strand
gguguacaucgcagccuuu

SEQ ID NO: 1286059 - RNA, 19 nt, Homo sapiens
  misc_RNA (1)...(19): siRNA sense strand
gcagcgagacaggcgcaaa

SEQ ID NO: 1286060 - RNA, 19 nt, Homo sapiens
  misc_RNA (1)...(19): siRNA sense strand
cggccuacuccuccacaua

SEQ ID NO: 1286061 - RNA, 19 nt, Homo sapiens
  misc_RNA (1)...(19): siRNA sense strand
acaccaggccucagugaca

SEQ ID NO: 1286062 - RNA, 19 nt, Homo sapiens
  misc_RNA (1)...(19): siRNA sense strand
caccgacucuuugggaagu

SEQ ID NO: 1286063 - RNA, 19 nt, Homo sapiens
  misc_RNA (1)...(19): siRNA sense strand
caaugccugugcagcucaa

SEQ ID NO: 1286064 - RNA, 19 nt, Homo sapiens
  misc_RNA (1)...(19): siRNA sense strand
ggagaaaccuguugugauu

SEQ ID NO: 1286065 - RNA, 19 nt, Homo sapiens
  misc_RNA (1)...(19): siRNA sense strand
ggacaaaguugcugaaauc

SEQ ID NO: 1286066 - RNA, 19 nt, Homo sapiens
  misc_RNA (1)...(19): siRNA sense strand
gaacagaugccuaaucauu

SEQ ID NO: 1286067 - RNA, 19 nt, Homo sapiens
  misc_RNA (1)...(19): siRNA sense strand
ggagacagguuucuuguga

SEQ ID NO: 1286068 - RNA, 19 nt, Homo sapiens
  misc_RNA (1)...(19): siRNA sense strand
gagaacagaugccuaauca

SEQ ID NO: 1286069 - RNA, 19 nt, Homo sapiens
  misc_RNA (1)...(19): siRNA sense strand
guucauaguuugagcguua

SEQ ID NO: 1286070 - RNA, 19 nt, Homo sapiens
  misc_RNA (1)...(19): siRNA sense strand
caaaguugcugaaaucgaa

SEQ ID NO: 1286071 - RNA, 19 nt, Homo sapiens
  misc_RNA (1)...(19): siRNA sense strand
cauuaaggaugacacauua

SEQ ID NO: 1286072 - RNA, 19 nt, Homo sapiens
  misc_RNA (1)...(19): siRNA sense strand
gauaugauguagaguuuga

SEQ ID NO: 1286073 - RNA, 19 nt, Homo sapiens
  misc_RNA (1)...(19): siRNA sense strand
caacugugcugcaucaaug

SEQ ID NO: 1286074 - RNA, 19 nt, Homo sapiens
  misc_RNA (1)...(19): siRNA sense strand
gcagugcaauggaauuuau

SEQ ID NO: 1286075 - RNA, 19 nt, Homo sapiens
  misc_RNA (1)...(19): siRNA sense strand
gggauaugauguagaguuu

SEQ ID NO: 1286076 - RNA, 19 nt, Homo sapiens
  misc_RNA (1)...(19): siRNA sense strand
ggugaaauguccaaaugaa

SEQ ID NO: 1286077 - RNA, 19 nt, Homo sapiens
  misc_RNA (1)...(19): siRNA sense strand
ggucacaaauguccaguug

SEQ ID NO: 1286078 - RNA, 19 nt, Homo sapiens
  misc_RNA (1)...(19): siRNA sense strand
aaccagagcugcuugcuuu

SEQ ID NO: 1286079 - RNA, 19 nt, Homo sapiens
  misc_RNA (1)...(19): siRNA sense strand
gaccagaacuguccuuugg

SEQ ID NO: 1286080 - RNA, 19 nt, Homo sapiens
  misc_RNA (1)...(19): siRNA sense strand
gauaauggaugccaaacca

SEQ ID NO: 1286081 - RNA, 19 nt, Homo sapiens
  misc_RNA (1)...(19): siRNA sense strand
ggaugcaggucacaaaugu

SEQ ID NO: 1286082 - RNA, 19 nt, Homo sapiens
  misc_RNA (1)...(19): siRNA sense strand
gaaccucuccagcucauuu

SEQ ID NO: 1286083 - RNA, 19 nt, Homo sapiens
  misc_RNA (1)...(19): siRNA sense strand
caaaugucaucugugaaua

SEQ ID NO: 1286084 - RNA, 19 nt, Homo sapiens
  misc_RNA (1)...(19): siRNA sense strand
gcaaaugucaucugugaau

SEQ ID NO: 1286085 - RNA, 19 nt, Homo sapiens
  misc_RNA (1)...(19): siRNA sense strand
ucucagagguccggaauuu

SEQ ID NO: 1286086 - RNA, 19 nt, Homo sapiens
  misc_RNA (1)...(19): siRNA sense strand
ugagacaucuugaggauca

SEQ ID NO: 1286087 - RNA, 19 nt, Homo sapiens
  misc_RNA (1)...(19): siRNA sense strand
uggcaaaugucaucuguga

SEQ ID NO: 1286088 - RNA, 19 nt, Homo sapiens
  misc_RNA (1)...(19): siRNA sense strand
guuagagggucgccuugua

SEQ ID NO: 1286089 - RNA, 19 nt, Homo sapiens
  misc_RNA (1)...(19): siRNA sense strand
ggccauagguucugcaaag

SEQ ID NO: 1286090 - RNA, 19 nt, Homo sapiens
  misc_RNA (1)...(19): siRNA sense strand
ccaauuccaugcacauuca

SEQ ID NO: 1286091 - RNA, 19 nt, Homo sapiens
  misc_RNA (1)...(19): siRNA sense strand
ugacaacugugcugcauca

SEQ ID NO: 1286092 - RNA, 19 nt, Homo sapiens
  misc_RNA (1)...(19): siRNA sense strand
acaauacgccuuacaauuc

SEQ ID NO: 1286093 - RNA, 19 nt, Homo sapiens
  misc_RNA (1)...(19): siRNA sense strand
gcgcuugcaccuucaguua

SEQ ID NO: 1286094 - RNA, 19 nt, Homo sapiens
  misc_RNA (1)...(19): siRNA sense strand
ucagagaacagaugccuaa

SEQ ID NO: 1286095 - RNA, 19 nt, Homo sapiens
  misc_RNA (1)...(19): siRNA sense strand
gcaaagccugcaucauaaa

SEQ ID NO: 1286096 - RNA, 19 nt, Homo sapiens
  misc_RNA (1)...(19): siRNA sense strand
gaucuagacugcccuacag

SEQ ID NO: 1286097 - RNA, 19 nt, Homo sapiens
  misc_RNA (1)...(19): siRNA sense strand
guauguaagugagcucaaa

SEQ ID NO: 1286098 - RNA, 19 nt, Homo sapiens
  misc_RNA (1)...(19): siRNA sense strand
gcaaaaccacgaagagaua

SEQ ID NO: 1286099 - RNA, 19 nt, Homo sapiens
  misc_RNA (1)...(19): siRNA sense strand
ugugaauacugcaauacua

SEQ ID NO: 1286100 - RNA, 19 nt, Homo sapiens
  misc_RNA (1)...(19): siRNA sense strand
ccagggauaugauguagag

SEQ ID NO: 1286101 - RNA, 19 nt, Homo sapiens
  misc_RNA (1)...(19): siRNA sense strand
caauacgccuuacaauucu

SEQ ID NO: 1286102 - RNA, 19 nt, Homo sapiens
  misc_RNA (1)...(19): siRNA sense strand
gcucagcgcugugcaaacu

SEQ ID NO: 1286103 - RNA, 19 nt, Homo sapiens
  misc_RNA (1)...(19): siRNA sense strand
gaagaggagaaaccuguug

SEQ ID NO: 1286104 - RNA, 19 nt, Homo sapiens
  misc_RNA (1)...(19): siRNA sense strand
gcacgccaccuacaagaga

SEQ ID NO: 1286105 - RNA, 19 nt, Homo sapiens
  misc_RNA (1)...(19): siRNA sense strand
gaacacccagucacacaug

SEQ ID NO: 1286106 - RNA, 19 nt, Homo sapiens
  misc_RNA (1)...(19): siRNA sense strand
ucacaaauguccaguugac

SEQ ID NO: 1286107 - RNA, 19 nt, Homo sapiens
  misc_RNA (1)...(19): siRNA sense strand
gaggagaaaccuguuguga

SEQ ID NO: 1286108 - RNA, 19 nt, Homo sapiens
  misc_RNA (1)...(19): siRNA sense strand
ggaaagcaaguaugaaugc

SEQ ID NO: 1286109 - RNA, 19 nt, Homo sapiens
  misc_RNA (1)...(19): siRNA sense strand
agaaaccuguugugauuca

SEQ ID NO: 1286110 - RNA, 19 nt, Homo sapiens
  misc_RNA (1)...(19): siRNA sense strand
guaagugagcucaaacgaa

SEQ ID NO: 1286111 - RNA, 19 nt, Homo sapiens
  misc_RNA (1)...(19): siRNA sense strand
uccgggagcugacugcuaa

SEQ ID NO: 1286112 - RNA, 19 nt, Homo sapiens
  misc_RNA (1)...(19): siRNA sense strand
ugaguuugcucuuauggau

SEQ ID NO: 1286113 - RNA, 19 nt, Homo sapiens
  misc_RNA (1)...(19): siRNA sense strand
ucaacuauuuccagacaau

SEQ ID NO: 1286114 - RNA, 19 nt, Homo sapiens
  misc_RNA (1)...(19): siRNA sense strand
caaacgccaugcggccaua

SEQ ID NO: 1286115 - RNA, 19 nt, Homo sapiens
  misc_RNA (1)...(19): siRNA sense strand
gcacaagauggaacugaga

SEQ ID NO: 1286116 - RNA, 19 nt, Homo sapiens
  misc_RNA (1)...(19): siRNA sense strand
gaagauuggcaacuuugga

SEQ ID NO: 1286117 - RNA, 19 nt, Homo sapiens
  misc_RNA (1)...(19): siRNA sense strand
cauugugaguuugcucuua

SEQ ID NO: 1286118 - RNA, 19 nt, Homo sapiens
  misc_RNA (1)...(19): siRNA sense strand
gcaauacuauacucaucag

SEQ ID NO: 1286119 - RNA, 19 nt, Homo sapiens
  misc_RNA (1)...(19): siRNA sense strand
uacaauacgccuuacaauu

SEQ ID NO: 1286120 - RNA, 19 nt, Homo sapiens
  misc_RNA (1)...(19): siRNA sense strand
gcucauuuauggaggagau

SEQ ID NO: 1286121 - RNA, 19 nt, Homo sapiens
  misc_RNA (1)...(19): siRNA sense strand
ggaugacacauuauuagug

SEQ ID NO: 1286122 - RNA, 19 nt, Homo sapiens
  misc_RNA (1)...(19): siRNA sense strand
guacaauacgccuuacaau

SEQ ID NO: 1286123 - RNA, 19 nt, Homo sapiens
  misc_RNA (1)...(19): siRNA sense strand
gcgcugugcaaacuauaua

SEQ ID NO: 1286124 - RNA, 19 nt, Homo sapiens
  misc_RNA (1)...(19): siRNA sense strand
gagcucaaacgaaccauuc

SEQ ID NO: 1286125 - RNA, 19 nt, Homo sapiens
  misc_RNA (1)...(19): siRNA sense strand
aaucaacuauuuccagaca

SEQ ID NO: 1286126 - RNA, 19 nt, Homo sapiens
  misc_RNA (1)...(19): siRNA sense strand
auacuauacucaucagaga

SEQ ID NO: 1286127 - RNA, 19 nt, Homo sapiens
  misc_RNA (1)...(19): siRNA sense strand
gaaaacagcuguggaucca

SEQ ID NO: 1286128 - RNA, 19 nt, Homo sapiens
  misc_RNA (1)...(19): siRNA sense strand
cccaggcuguucauaguuu

SEQ ID NO: 1286129 - RNA, 19 nt, Homo sapiens
  misc_RNA (1)...(19): siRNA sense strand
ccaugcacauucaguacuu

SEQ ID NO: 1286130 - RNA, 19 nt, Homo sapiens
  misc_RNA (1)...(19): siRNA sense strand
ucauagcccuggauucuac

SEQ ID NO: 1286131 - RNA, 19 nt, Homo sapiens
  misc_RNA (1)...(19): siRNA sense strand
ggagcugacugcuaaaaug

SEQ ID NO: 1286132 - RNA, 19 nt, Homo sapiens
  misc_RNA (1)...(19): siRNA sense strand
gagaacacccagucacaca

SEQ ID NO: 1286133 - RNA, 19 nt, Homo sapiens
  misc_RNA (1)...(19): siRNA sense strand
cagaguauguauguaagug

SEQ ID NO: 1286134 - RNA, 19 nt, Homo sapiens
  misc_RNA (1)...(19): siRNA sense strand
caggguacaauacgccuua

SEQ ID NO: 1286135 - RNA, 19 nt, Homo sapiens
  misc_RNA (1)...(19): siRNA sense strand
ggauccagccagucugaaa

SEQ ID NO: 1286136 - RNA, 19 nt, Homo sapiens
  misc_RNA (1)...(19): siRNA sense strand
agacagguuucuugugaca

SEQ ID NO: 1286137 - RNA, 19 nt, Homo sapiens
  misc_RNA (1)...(19): siRNA sense strand
gguacaauacgccuuacaa

SEQ ID NO: 1286138 - RNA, 19 nt, Homo sapiens
  misc_RNA (1)...(19): siRNA sense strand
gaaauguccaaaugaaggu

SEQ ID NO: 1286139 - RNA, 19 nt, Homo sapiens
  misc_RNA (1)...(19): siRNA sense strand
gcaaacuauauaucccuuu

SEQ ID NO: 1286140 - RNA, 19 nt, Homo sapiens
  misc_RNA (1)...(19): siRNA sense strand
guaagacaagaccaucaaa

SEQ ID NO: 1286141 - RNA, 19 nt, Homo sapiens
  misc_RNA (1)...(19): siRNA sense strand
ggcccaggcuguucauagu

SEQ ID NO: 1286142 - RNA, 19 nt, Homo sapiens
  misc_RNA (1)...(19): siRNA sense strand
gugaauacugcaauacuau

SEQ ID NO: 1286143 - RNA, 19 nt, Homo sapiens
  misc_RNA (1)...(19): siRNA sense strand
gcccuaagacaaagaacuu

SEQ ID NO: 1286144 - RNA, 19 nt, Homo sapiens
  misc_RNA (1)...(19): siRNA sense strand
aaugaaauacugcuggaaa

SEQ ID NO: 1286145 - RNA, 19 nt, Homo sapiens
  misc_RNA (1)...(19): siRNA sense strand
ucagcgcugugcaaacuau

SEQ ID NO: 1286146 - RNA, 19 nt, Homo sapiens
  misc_RNA (1)...(19): siRNA sense strand
uaagacaagaccaucaaau

SEQ ID NO: 1286147 - RNA, 19 nt, Homo sapiens
  misc_RNA (1)...(19): siRNA sense strand
gaaaagaugcagaggaauc

SEQ ID NO: 1286148 - RNA, 19 nt, Homo sapiens
  misc_RNA (1)...(19): siRNA sense strand
gaauacugcaauacuauac

SEQ ID NO: 1286149 - RNA, 19 nt, Homo sapiens
  misc_RNA (1)...(19): siRNA sense strand
uuagagggucgccuuguaa

SEQ ID NO: 1286150 - RNA, 19 nt, Homo sapiens
  misc_RNA (1)...(19): siRNA sense strand
gaagcccuaagacaaagaa

SEQ ID NO: 1286151 - RNA, 19 nt, Homo sapiens
  misc_RNA (1)...(19): siRNA sense strand
aagauaaagagauccauga

SEQ ID NO: 1286152 - RNA, 19 nt, Homo sapiens
  misc_RNA (1)...(19): siRNA sense strand
gggaaccucuccagcucau

SEQ ID NO: 1286153 - RNA, 19 nt, Homo sapiens
  misc_RNA (1)...(19): siRNA sense strand
cagcagugcaauggaauuu

SEQ ID NO: 1286154 - RNA, 19 nt, Homo sapiens
  misc_RNA (1)...(19): siRNA sense strand
gaaccauucgaacccuuga

SEQ ID NO: 1286155 - RNA, 19 nt, Homo sapiens
  misc_RNA (1)...(19): siRNA sense strand
gcaaaacgugagauucuuu

SEQ ID NO: 1286156 - RNA, 19 nt, Homo sapiens
  misc_RNA (1)...(19): siRNA sense strand
ccacgaagagauaauggau

SEQ ID NO: 1286157 - RNA, 19 nt, Homo sapiens
  misc_RNA (1)...(19): siRNA sense strand
cacaaugcaaggagaauau

SEQ ID NO: 1286158 - RNA, 19 nt, Homo sapiens
  misc_RNA (1)...(19): siRNA sense strand
uggcaaacccggguacaaa

SEQ ID NO: 1286159 - RNA, 19 nt, Homo sapiens
  misc_RNA (1)...(19): siRNA sense strand
aaaccuguugugauucaua

SEQ ID NO: 1286160 - RNA, 19 nt, Homo sapiens
  misc_RNA (1)...(19): siRNA sense strand
gcaacuuuggaaugcauuu

SEQ ID NO: 1286161 - RNA, 19 nt, Homo sapiens
  misc_RNA (1)...(19): siRNA sense strand
gaugauaguguggguggaa

SEQ ID NO: 1286162 - RNA, 19 nt, Homo sapiens
  misc_RNA (1)...(19): siRNA sense strand
aguuugcucuuauggauug

SEQ ID NO: 1286163 - RNA, 19 nt, Homo sapiens
  misc_RNA (1)...(19): siRNA sense strand
gccuuacaauucuugauca

SEQ ID NO: 1286164 - RNA, 19 nt, Homo sapiens
  misc_RNA (1)...(19): siRNA sense strand
ggagaaaccuguugugauu

SEQ ID NO: 1286165 - RNA, 19 nt, Homo sapiens
  misc_RNA (1)...(19): siRNA sense strand
ggacaaaguugcugaaauc

SEQ ID NO: 1286166 - RNA, 19 nt, Homo sapiens
  misc_RNA (1)...(19): siRNA sense strand
gaacagaugccuaaucauu

SEQ ID NO: 1286167 - RNA, 19 nt, Homo sapiens
  misc_RNA (1)...(19): siRNA sense strand
ggagacagguuucuuguga

SEQ ID NO: 1286168 - RNA, 19 nt, Homo sapiens
  misc_RNA (1)...(19): siRNA sense strand
gagaacagaugccuaauca

SEQ ID NO: 1286169 - RNA, 19 nt, Homo sapiens
  misc_RNA (1)...(19): siRNA sense strand
guucauaguuugagcguua

SEQ ID NO: 1286170 - RNA, 19 nt, Homo sapiens
  misc_RNA (1)...(19): siRNA sense strand
caaaguugcugaaaucgaa

SEQ ID NO: 1286171 - RNA, 19 nt, Homo sapiens
  misc_RNA (1)...(19): siRNA sense strand
cauuaaggaugacacauua

SEQ ID NO: 1286172 - RNA, 19 nt, Homo sapiens
  misc_RNA (1)...(19): siRNA sense strand
gauaugauguagaguuuga

SEQ ID NO: 1286173 - RNA, 19 nt, Homo sapiens
  misc_RNA (1)...(19): siRNA sense strand
caacugugcugcaucaaug

SEQ ID NO: 1286174 - RNA, 19 nt, Homo sapiens
  misc_RNA (1)...(19): siRNA sense strand
gcagugcaauggaauuuau

SEQ ID NO: 1286175 - RNA, 19 nt, Homo sapiens
  misc_RNA (1)...(19): siRNA sense strand
gggauaugauguagaguuu

SEQ ID NO: 1286176 - RNA, 19 nt, Homo sapiens
  misc_RNA (1)...(19): siRNA sense strand
ggugaaauguccaaaugaa

SEQ ID NO: 1286177 - RNA, 19 nt, Homo sapiens
  misc_RNA (1)...(19): siRNA sense strand
ggucacaaauguccaguug

SEQ ID NO: 1286178 - RNA, 19 nt, Homo sapiens
  misc_RNA (1)...(19): siRNA sense strand
aaccagagcugcuugcuuu

SEQ ID NO: 1286179 - RNA, 19 nt, Homo sapiens
  misc_RNA (1)...(19): siRNA sense strand
gaccagaacuguccuuugg

SEQ ID NO: 1286180 - RNA, 19 nt, Homo sapiens
  misc_RNA (1)...(19): siRNA sense strand
gauaauggaugccaaacca

SEQ ID NO: 1286181 - RNA, 19 nt, Homo sapiens
  misc_RNA (1)...(19): siRNA sense strand
ggaugcaggucacaaaugu

SEQ ID NO: 1286182 - RNA, 19 nt, Homo sapiens
  misc_RNA (1)...(19): siRNA sense strand
gaaccucuccagcucauuu

SEQ ID NO: 1286183 - RNA, 19 nt, Homo sapiens
  misc_RNA (1)...(19): siRNA sense strand
caaaugucaucugugaaua

SEQ ID NO: 1286184 - RNA, 19 nt, Homo sapiens
  misc_RNA (1)...(19): siRNA sense strand
gcaaaugucaucugugaau

SEQ ID NO: 1286185 - RNA, 19 nt, Homo sapiens
  misc_RNA (1)...(19): siRNA sense strand
ucucagagguccggaauuu

SEQ ID NO: 1286186 - RNA, 19 nt, Homo sapiens
  misc_RNA (1)...(19): siRNA sense strand
ugagacaucuugaggauca

SEQ ID NO: 1286187 - RNA, 19 nt, Homo sapiens
  misc_RNA (1)...(19): siRNA sense strand
uggcaaaugucaucuguga

SEQ ID NO: 1286188 - RNA, 19 nt, Homo sapiens
  misc_RNA (1)...(19): siRNA sense strand
guuagagggucgccuugua

SEQ ID NO: 1286189 - RNA, 19 nt, Homo sapiens
  misc_RNA (1)...(19): siRNA sense strand
ggccauagguucugcaaag

SEQ ID NO: 1286190 - RNA, 19 nt, Homo sapiens
  misc_RNA (1)...(19): siRNA sense strand
ccaauuccaugcacauuca

SEQ ID NO: 1286191 - RNA, 19 nt, Homo sapiens
  misc_RNA (1)...(19): siRNA sense strand
ugacaacugugcugcauca

SEQ ID NO: 1286192 - RNA, 19 nt, Homo sapiens
  misc_RNA (1)...(19): siRNA sense strand
acaauacgccuuacaauuc

SEQ ID NO: 1286193 - RNA, 19 nt, Homo sapiens
  misc_RNA (1)...(19): siRNA sense strand
gcgcuugcaccuucaguua

SEQ ID NO: 1286194 - RNA, 19 nt, Homo sapiens
  misc_RNA (1)...(19): siRNA sense strand
ucagagaacagaugccuaa

SEQ ID NO: 1286195 - RNA, 19 nt, Homo sapiens
  misc_RNA (1)...(19): siRNA sense strand
gcaaagccugcaucauaaa

SEQ ID NO: 1286196 - RNA, 19 nt, Homo sapiens
  misc_RNA (1)...(19): siRNA sense strand
gaucuagacugcccuacag

SEQ ID NO: 1286197 - RNA, 19 nt, Homo sapiens
  misc_RNA (1)...(19): siRNA sense strand
guauguaagugagcucaaa

SEQ ID NO: 1286198 - RNA, 19 nt, Homo sapiens
  misc_RNA (1)...(19): siRNA sense strand
gcaaaaccacgaagagaua

SEQ ID NO: 1286199 - RNA, 19 nt, Homo sapiens
  misc_RNA (1)...(19): siRNA sense strand
ugugaauacugcaauacua

SEQ ID NO: 1286200 - RNA, 19 nt, Homo sapiens
  misc_RNA (1)...(19): siRNA sense strand
ccagggauaugauguagag

SEQ ID NO: 1286201 - RNA, 19 nt, Homo sapiens
  misc_RNA (1)...(19): siRNA sense strand
caauacgccuuacaauucu

SEQ ID NO: 1286202 - RNA, 19 nt, Homo sapiens
  misc_RNA (1)...(19): siRNA sense strand
gcucagcgcugugcaaacu

SEQ ID NO: 1286203 - RNA, 19 nt, Homo sapiens
  misc_RNA (1)...(19): siRNA sense strand
gaagaggagaaaccuguug

SEQ ID NO: 1286204 - RNA, 19 nt, Homo sapiens
  misc_RNA (1)...(19): siRNA sense strand
gcacgccaccuacaagaga

SEQ ID NO: 1286205 - RNA, 19 nt, Homo sapiens
  misc_RNA (1)...(19): siRNA sense strand
gaacacccagucacacaug

SEQ ID NO: 1286206 - RNA, 19 nt, Homo sapiens
  misc_RNA (1)...(19): siRNA sense strand
ucacaaauguccaguugac

SEQ ID NO: 1286207 - RNA, 19 nt, Homo sapiens
  misc_RNA (1)...(19): siRNA sense strand
gaggagaaaccuguuguga

SEQ ID NO: 1286208 - RNA, 19 nt, Homo sapiens
  misc_RNA (1)...(19): siRNA sense strand
ggaaagcaaguaugaaugc

SEQ ID NO: 1286209 - RNA, 19 nt, Homo sapiens
  misc_RNA (1)...(19): siRNA sense strand
agaaaccuguugugauuca

SEQ ID NO: 1286210 - RNA, 19 nt, Homo sapiens
  misc_RNA (1)...(19): siRNA sense strand
guaagugagcucaaacgaa

SEQ ID NO: 1286211 - RNA, 19 nt, Homo sapiens
  misc_RNA (1)...(19): siRNA sense strand
uccgggagcugacugcuaa

SEQ ID NO: 1286212 - RNA, 19 nt, Homo sapiens
  misc_RNA (1)...(19): siRNA sense strand
ugaguuugcucuuauggau

SEQ ID NO: 1286213 - RNA, 19 nt, Homo sapiens
  misc_RNA (1)...(19): siRNA sense strand
ucaacuauuuccagacaau

SEQ ID NO: 1286214 - RNA, 19 nt, Homo sapiens
  misc_RNA (1)...(19): siRNA sense strand
caaacgccaugcggccaua

SEQ ID NO: 1286215 - RNA, 19 nt, Homo sapiens
  misc_RNA (1)...(19): siRNA sense strand
gcacaagauggaacugaga

SEQ ID NO: 1286216 - RNA, 19 nt, Homo sapiens
  misc_RNA (1)...(19): siRNA sense strand
gaagauuggcaacuuugga

SEQ ID NO: 1286217 - RNA, 19 nt, Homo sapiens
  misc_RNA (1)...(19): siRNA sense strand
cauugugaguuugcucuua

SEQ ID NO: 1286218 - RNA, 19 nt, Homo sapiens
  misc_RNA (1)...(19): siRNA sense strand
gcaauacuauacucaucag

SEQ ID NO: 1286219 - RNA, 19 nt, Homo sapiens
  misc_RNA (1)...(19): siRNA sense strand
uacaauacgccuuacaauu

SEQ ID NO: 1286220 - RNA, 19 nt, Homo sapiens
  misc_RNA (1)...(19): siRNA sense strand
gcucauuuauggaggagau

SEQ ID NO: 1286221 - RNA, 19 nt, Homo sapiens
  misc_RNA (1)...(19): siRNA sense strand
ggaugacacauuauuagug

SEQ ID NO: 1286222 - RNA, 19 nt, Homo sapiens
  misc_RNA (1)...(19): siRNA sense strand
guacaauacgccuuacaau

SEQ ID NO: 1286223 - RNA, 19 nt, Homo sapiens
  misc_RNA (1)...(19): siRNA sense strand
gcgcugugcaaacuauaua

SEQ ID NO: 1286224 - RNA, 19 nt, Homo sapiens
  misc_RNA (1)...(19): siRNA sense strand
gagcucaaacgaaccauuc

SEQ ID NO: 1286225 - RNA, 19 nt, Homo sapiens
  misc_RNA (1)...(19): siRNA sense strand
aaucaacuauuuccagaca

SEQ ID NO: 1286226 - RNA, 19 nt, Homo sapiens
  misc_RNA (1)...(19): siRNA sense strand
auacuauacucaucagaga

SEQ ID NO: 1286227 - RNA, 19 nt, Homo sapiens
  misc_RNA (1)...(19): siRNA sense strand
gaaaacagcuguggaucca

SEQ ID NO: 1286228 - RNA, 19 nt, Homo sapiens
  misc_RNA (1)...(19): siRNA sense strand
cccaggcuguucauaguuu

SEQ ID NO: 1286229 - RNA, 19 nt, Homo sapiens
  misc_RNA (1)...(19): siRNA sense strand
ccaugcacauucaguacuu

SEQ ID NO: 1286230 - RNA, 19 nt, Homo sapiens
  misc_RNA (1)...(19): siRNA sense strand
ucauagcccuggauucuac

SEQ ID NO: 1286231 - RNA, 19 nt, Homo sapiens
  misc_RNA (1)...(19): siRNA sense strand
ggagcugacugcuaaaaug

SEQ ID NO: 1286232 - RNA, 19 nt, Homo sapiens
  misc_RNA (1)...(19): siRNA sense strand
gagaacacccagucacaca

SEQ ID NO: 1286233 - RNA, 19 nt, Homo sapiens
  misc_RNA (1)...(19): siRNA sense strand
cagaguauguauguaagug

SEQ ID NO: 1286234 - RNA, 19 nt, Homo sapiens
  misc_RNA (1)...(19): siRNA sense strand
caggguacaauacgccuua

SEQ ID NO: 1286235 - RNA, 19 nt, Homo sapiens
  misc_RNA (1)...(19): siRNA sense strand
ggauccagccagucugaaa

SEQ ID NO: 1286236 - RNA, 19 nt, Homo sapiens
  misc_RNA (1)...(19): siRNA sense strand
agacagguuucuugugaca

SEQ ID NO: 1286237 - RNA, 19 nt, Homo sapiens
  misc_RNA (1)...(19): siRNA sense strand
gguacaauacgccuuacaa

SEQ ID NO: 1286238 - RNA, 19 nt, Homo sapiens
  misc_RNA (1)...(19): siRNA sense strand
gaaauguccaaaugaaggu

SEQ ID NO: 1286239 - RNA, 19 nt, Homo sapiens
  misc_RNA (1)...(19): siRNA sense strand
gcaaacuauauaucccuuu

SEQ ID NO: 1286240 - RNA, 19 nt, Homo sapiens
  misc_RNA (1)...(19): siRNA sense strand
guaagacaagaccaucaaa

SEQ ID NO: 1286241 - RNA, 19 nt, Homo sapiens
  misc_RNA (1)...(19): siRNA sense strand
ggcccaggcuguucauagu

SEQ ID NO: 1286242 - RNA, 19 nt, Homo sapiens
  misc_RNA (1)...(19): siRNA sense strand
gugaauacugcaauacuau

SEQ ID NO: 1286243 - RNA, 19 nt, Homo sapiens
  misc_RNA (1)...(19): siRNA sense strand
gcccuaagacaaagaacuu

SEQ ID NO: 1286244 - RNA, 19 nt, Homo sapiens
  misc_RNA (1)...(19): siRNA sense strand
aaugaaauacugcuggaaa

SEQ ID NO: 1286245 - RNA, 19 nt, Homo sapiens
  misc_RNA (1)...(19): siRNA sense strand
ucagcgcugugcaaacuau

SEQ ID NO: 1286246 - RNA, 19 nt, Homo sapiens
  misc_RNA (1)...(19): siRNA sense strand
uaagacaagaccaucaaau

SEQ ID NO: 1286247 - RNA, 19 nt, Homo sapiens
  misc_RNA (1)...(19): siRNA sense strand
gaaaagaugcagaggaauc

SEQ ID NO: 1286248 - RNA, 19 nt, Homo sapiens
  misc_RNA (1)...(19): siRNA sense strand
gaauacugcaauacuauac

SEQ ID NO: 1286249 - RNA, 19 nt, Homo sapiens
  misc_RNA (1)...(19): siRNA sense strand
uuagagggucgccuuguaa

SEQ ID NO: 1286250 - RNA, 19 nt, Homo sapiens
  misc_RNA (1)...(19): siRNA sense strand
gaagcccuaagacaaagaa

SEQ ID NO: 1286251 - RNA, 19 nt, Homo sapiens
  misc_RNA (1)...(19): siRNA sense strand
aagauaaagagauccauga

SEQ ID NO: 1286252 - RNA, 19 nt, Homo sapiens
  misc_RNA (1)...(19): siRNA sense strand
gggaaccucuccagcucau

SEQ ID NO: 1286253 - RNA, 19 nt, Homo sapiens
  misc_RNA (1)...(19): siRNA sense strand
cagcagugcaauggaauuu

SEQ ID NO: 1286254 - RNA, 19 nt, Homo sapiens
  misc_RNA (1)...(19): siRNA sense strand
gaaccauucgaacccuuga

SEQ ID NO: 1286255 - RNA, 19 nt, Homo sapiens
  misc_RNA (1)...(19): siRNA sense strand
gcaaaacgugagauucuuu

SEQ ID NO: 1286256 - RNA, 19 nt, Homo sapiens
  misc_RNA (1)...(19): siRNA sense strand
ccacgaagagauaauggau

SEQ ID NO: 1286257 - RNA, 19 nt, Homo sapiens
  misc_RNA (1)...(19): siRNA sense strand
cacaaugcaaggagaauau

SEQ ID NO: 1286258 - RNA, 19 nt, Homo sapiens
  misc_RNA (1)...(19): siRNA sense strand
uggcaaacccggguacaaa

SEQ ID NO: 1286259 - RNA, 19 nt, Homo sapiens
  misc_RNA (1)...(19): siRNA sense strand
aaaccuguugugauucaua

SEQ ID NO: 1286260 - RNA, 19 nt, Homo sapiens
  misc_RNA (1)...(19): siRNA sense strand
gcaacuuuggaaugcauuu

SEQ ID NO: 1286261 - RNA, 19 nt, Homo sapiens
  misc_RNA (1)...(19): siRNA sense strand
gaugauaguguggguggaa

SEQ ID NO: 1286262 - RNA, 19 nt, Homo sapiens
  misc_RNA (1)...(19): siRNA sense strand
aguuugcucuuauggauug

SEQ ID NO: 1286263 - RNA, 19 nt, Homo sapiens
  misc_RNA (1)...(19): siRNA sense strand
gccuuacaauucuugauca

SEQ ID NO: 1286264 - RNA, 19 nt, Homo sapiens
  misc_RNA (1)...(19): siRNA sense strand
ggacuuccaccguaaggua

SEQ ID NO: 1286265 - RNA, 19 nt, Homo sapiens
  misc_RNA (1)...(19): siRNA sense strand
ggucaucuguggcaacaag

SEQ ID NO: 1286266 - RNA, 19 nt, Homo sapiens
  misc_RNA (1)...(19): siRNA sense strand
acagugaccucaaguacau

SEQ ID NO: 1286267 - RNA, 19 nt, Homo sapiens
  misc_RNA (1)...(19): siRNA sense strand
caagugcaccauccaguga

SEQ ID NO: 1286268 - RNA, 19 nt, Homo sapiens
  misc_RNA (1)...(19): siRNA sense strand
caacagugaccucaaguac

SEQ ID NO: 1286269 - RNA, 19 nt, Homo sapiens
  misc_RNA (1)...(19): siRNA sense strand
gcaagaucuccgugcagua

SEQ ID NO: 1286270 - RNA, 19 nt, Homo sapiens
  misc_RNA (1)...(19): siRNA sense strand
ucgaggacuuccaccguaa

SEQ ID NO: 1286271 - RNA, 19 nt, Homo sapiens
  misc_RNA (1)...(19): siRNA sense strand
caacguggacgagauguuc

SEQ ID NO: 1286272 - RNA, 19 nt, Homo sapiens
  misc_RNA (1)...(19): siRNA sense strand
gucaaguccugccugaaga

SEQ ID NO: 1286273 - RNA, 19 nt, Homo sapiens
  misc_RNA (1)...(19): siRNA sense strand
ggucaaguccugccugaag

SEQ ID NO: 1286274 - RNA, 19 nt, Homo sapiens
  misc_RNA (1)...(19): siRNA sense strand
ugaagaacaagaccaagga

SEQ ID NO: 1286275 - RNA, 19 nt, Homo sapiens
  misc_RNA (1)...(19): siRNA sense strand
gugucucgcuuccucaaug

SEQ ID NO: 1286276 - RNA, 19 nt, Homo sapiens
  misc_RNA (1)...(19): siRNA sense strand
ucaacagugaccucaagua

SEQ ID NO: 1286277 - RNA, 19 nt, Homo sapiens
  misc_RNA (1)...(19): siRNA sense strand
caagagcuccaucgugucu

SEQ ID NO: 1286278 - RNA, 19 nt, Homo sapiens
  misc_RNA (1)...(19): siRNA sense strand
cgagaacugcgccuacuuc

SEQ ID NO: 1286279 - RNA, 19 nt, Homo sapiens
  misc_RNA (1)...(19): siRNA sense strand
ccaagaagaacaccaacgu

SEQ ID NO: 1286280 - RNA, 19 nt, Homo sapiens
  misc_RNA (1)...(19): siRNA sense strand
acaccaacguggacgagau

SEQ ID NO: 1286281 - RNA, 19 nt, Homo sapiens
  misc_RNA (1)...(19): siRNA sense strand
gaggucaagcgccuucaga

SEQ ID NO: 1286282 - RNA, 19 nt, Homo sapiens
  misc_RNA (1)...(19): siRNA sense strand
caagaucuccgugcaguac

SEQ ID NO: 1286283 - RNA, 19 nt, Homo sapiens
  misc_RNA (1)...(19): siRNA sense strand
aguccugccugaagaacaa

SEQ ID NO: 1286284 - RNA, 19 nt, Homo sapiens
  misc_RNA (1)...(19): siRNA sense strand
gacgagaacugcgccuacu

SEQ ID NO: 1286285 - RNA, 19 nt, Homo sapiens
  misc_RNA (1)...(19): siRNA sense strand
uggacgagauguucuacgu

SEQ ID NO: 1286286 - RNA, 19 nt, Homo sapiens
  misc_RNA (1)...(19): siRNA sense strand
caagcugccacacgagaug

SEQ ID NO: 1286287 - RNA, 19 nt, Homo sapiens
  misc_RNA (1)...(19): siRNA sense strand
cuuccucaauggccgcuuu

SEQ ID NO: 1286288 - RNA, 19 nt, Homo sapiens
  misc_RNA (1)...(19): siRNA sense strand
ucaaguccugccugaagaa

SEQ ID NO: 1286289 - RNA, 19 nt, Homo sapiens
  misc_RNA (1)...(19): siRNA sense strand
gauguucuacgugcucuuc

SEQ ID NO: 1286290 - RNA, 19 nt, Homo sapiens
  misc_RNA (1)...(19): siRNA sense strand
gcagaaagaucucagagua

SEQ ID NO: 1286291 - RNA, 19 nt, Homo sapiens
  misc_RNA (1)...(19): siRNA sense strand
gaagauauauaaccguuca

SEQ ID NO: 1286292 - RNA, 19 nt, Homo sapiens
  misc_RNA (1)...(19): siRNA sense strand
gagaacgucugcagcaauu

SEQ ID NO: 1286293 - RNA, 19 nt, Homo sapiens
  misc_RNA (1)...(19): siRNA sense strand
gaagaugaccugcccagaa

SEQ ID NO: 1286294 - RNA, 19 nt, Homo sapiens
  misc_RNA (1)...(19): siRNA sense strand
gaaugugcaugccuacuug

SEQ ID NO: 1286295 - RNA, 19 nt, Homo sapiens
  misc_RNA (1)...(19): siRNA sense strand
agaaagaucucagaguaaa

SEQ ID NO: 1286296 - RNA, 19 nt, Homo sapiens
  misc_RNA (1)...(19): siRNA sense strand
caacuccgauucagaagau

SEQ ID NO: 1286297 - RNA, 19 nt, Homo sapiens
  misc_RNA (1)...(19): siRNA sense strand
acucaugucugaauuagaa

SEQ ID NO: 1286298 - RNA, 19 nt, Homo sapiens
  misc_RNA (1)...(19): siRNA sense strand
gaugaaaguggaaugaauu

SEQ ID NO: 1286299 - RNA, 19 nt, Homo sapiens
  misc_RNA (1)...(19): siRNA sense strand
ggaagaggauaaguacaug

SEQ ID NO: 1286300 - RNA, 19 nt, Homo sapiens
  misc_RNA (1)...(19): siRNA sense strand
gaagacuauugauaccaaa

SEQ ID NO: 1286301 - RNA, 19 nt, Homo sapiens
  misc_RNA (1)...(19): siRNA sense strand
ucagauaugugaaguugau

SEQ ID NO: 1286302 - RNA, 19 nt, Homo sapiens
  misc_RNA (1)...(19): siRNA sense strand
gaagaugaaaguggaauga

SEQ ID NO: 1286303 - RNA, 19 nt, Homo sapiens
  misc_RNA (1)...(19): siRNA sense strand
uaucauggcuuugggaaug

SEQ ID NO: 1286304 - RNA, 19 nt, Homo sapiens
  misc_RNA (1)...(19): siRNA sense strand
ugacaguugugacagcuuu

SEQ ID NO: 1286305 - RNA, 19 nt, Homo sapiens
  misc_RNA (1)...(19): siRNA sense strand
cagcuuugcuucugauaau

SEQ ID NO: 1286306 - RNA, 19 nt, Homo sapiens
  misc_RNA (1)...(19): siRNA sense strand
gaccguggauggcuacaug

SEQ ID NO: 1286307 - RNA, 19 nt, Homo sapiens
  misc_RNA (1)...(19): siRNA sense strand
guggauggcuacaugaaug

SEQ ID NO: 1286308 - RNA, 19 nt, Homo sapiens
  misc_RNA (1)...(19): siRNA sense strand
ucacugggcucuacuuguc

SEQ ID NO: 1286309 - RNA, 19 nt, Homo sapiens
  misc_RNA (1)...(19): siRNA sense strand
cgucagaagacuauugaua

SEQ ID NO: 1286310 - RNA, 19 nt, Homo sapiens
  misc_RNA (1)...(19): siRNA sense strand
gaucucagaguaaagaaga

SEQ ID NO: 1286311 - RNA, 19 nt, Homo sapiens
  misc_RNA (1)...(19): siRNA sense strand
ggaaugugcaugccuacuu

SEQ ID NO: 1286312 - RNA, 19 nt, Homo sapiens
  misc_RNA (1)...(19): siRNA sense strand
ugaaguugauuuccaugga

SEQ ID NO: 1286313 - RNA, 19 nt, Homo sapiens
  misc_RNA (1)...(19): siRNA sense strand
agaagacuauugauaccaa

SEQ ID NO: 1286314 - RNA, 19 nt, Homo sapiens
  misc_RNA (1)...(19): siRNA sense strand
cagaaagaucucagaguaa

SEQ ID NO: 1286315 - RNA, 19 nt, Homo sapiens
  misc_RNA (1)...(19): siRNA sense strand
ggaggaagaggauaaguac

SEQ ID NO: 1286316 - RNA, 19 nt, Homo sapiens
  misc_RNA (1)...(19): siRNA sense strand
caucaaugccgucagaaga

SEQ ID NO: 1286317 - RNA, 19 nt, Homo sapiens
  misc_RNA (1)...(19): siRNA sense strand
aaacucaugucugaauuag

SEQ ID NO: 1286318 - RNA, 19 nt, Homo sapiens
  misc_RNA (1)...(19): siRNA sense strand
aagaugaccugcccagaag

SEQ ID NO: 1286319 - RNA, 19 nt, Homo sapiens
  misc_RNA (1)...(19): siRNA sense strand
agaugaaaguggaaugaau

SEQ ID NO: 1286320 - RNA, 19 nt, Homo sapiens
  misc_RNA (1)...(19): siRNA sense strand
ugucaucaaugccgucaga

SEQ ID NO: 1286321 - RNA, 19 nt, Homo sapiens
  misc_RNA (1)...(19): siRNA sense strand
ggagaacgucugcagcaau

SEQ ID NO: 1286322 - RNA, 19 nt, Homo sapiens
  misc_RNA (1)...(19): siRNA sense strand
cagaguaaagaagaacuua

SEQ ID NO: 1286323 - RNA, 19 nt, Homo sapiens
  misc_RNA (1)...(19): siRNA sense strand
gauaugugaaguugauuuc

SEQ ID NO: 1286324 - RNA, 19 nt, Homo sapiens
  misc_RNA (1)...(19): siRNA sense strand
gaacgucugcagcaauucu

SEQ ID NO: 1286325 - RNA, 19 nt, Homo sapiens
  misc_RNA (1)...(19): siRNA sense strand
cucgagagaagauauauaa

SEQ ID NO: 1286326 - RNA, 19 nt, Homo sapiens
  misc_RNA (1)...(19): siRNA sense strand
aaagaucucagaguaaaga

SEQ ID NO: 1286327 - RNA, 19 nt, Homo sapiens
  misc_RNA (1)...(19): siRNA sense strand
ucgaaaccguuauggugaa

SEQ ID NO: 1286328 - RNA, 19 nt, Homo sapiens
  misc_RNA (1)...(19): siRNA sense strand
gcuuugcuucugauaauuu

SEQ ID NO: 1286329 - RNA, 19 nt, Homo sapiens
  misc_RNA (1)...(19): siRNA sense strand
gggcucuacuugucaucaa

SEQ ID NO: 1286330 - RNA, 19 nt, Homo sapiens
  misc_RNA (1)...(19): siRNA sense strand
cagaggaggaguuggagaa

SEQ ID NO: 1286331 - RNA, 19 nt, Homo sapiens
  misc_RNA (1)...(19): siRNA sense strand
cuacaugaaugaagaugac

SEQ ID NO: 1286332 - RNA, 19 nt, Homo sapiens
  misc_RNA (1)...(19): siRNA sense strand
gaagaggauaaguacaugu

SEQ ID NO: 1286333 - RNA, 19 nt, Homo sapiens
  misc_RNA (1)...(19): siRNA sense strand
caaaacucaugucugaauu

SEQ ID NO: 1286334 - RNA, 19 nt, Homo sapiens
  misc_RNA (1)...(19): siRNA sense strand
ugacagcuuugcuucugau

SEQ ID NO: 1286335 - RNA, 19 nt, Homo sapiens
  misc_RNA (1)...(19): siRNA sense strand
gguguugcuuccaggagaa

SEQ ID NO: 1286336 - RNA, 19 nt, Homo sapiens
  misc_RNA (1)...(19): siRNA sense strand
gcaaaacucaugucugaau

SEQ ID NO: 1286337 - RNA, 19 nt, Homo sapiens
  misc_RNA (1)...(19): siRNA sense strand
cgccagcccucagagaauu

SEQ ID NO: 1286338 - RNA, 19 nt, Homo sapiens
  misc_RNA (1)...(19): siRNA sense strand
cgacugggguccuugugua

SEQ ID NO: 1286339 - RNA, 19 nt, Homo sapiens
  misc_RNA (1)...(19): siRNA sense strand
uugcaaaacucaugucuga

SEQ ID NO: 1286340 - RNA, 19 nt, Homo sapiens
  misc_RNA (1)...(19): siRNA sense strand
gagaauucugugacugauu

SEQ ID NO: 1286341 - RNA, 19 nt, Homo sapiens
  misc_RNA (1)...(19): siRNA sense strand
gugacagcuuugcuucuga

SEQ ID NO: 1286342 - RNA, 19 nt, Homo sapiens
  misc_RNA (1)...(19): siRNA sense strand
gugcaugccuacuugaaaa

SEQ ID NO: 1286343 - RNA, 19 nt, Homo sapiens
  misc_RNA (1)...(19): siRNA sense strand
gaaagaucucagaguaaag

SEQ ID NO: 1286344 - RNA, 19 nt, Homo sapiens
  misc_RNA (1)...(19): siRNA sense strand
uuacagaggaggaguugga

SEQ ID NO: 1286345 - RNA, 19 nt, Homo sapiens
  misc_RNA (1)...(19): siRNA sense strand
ggaggaggaggaagaggau

SEQ ID NO: 1286346 - RNA, 19 nt, Homo sapiens
  misc_RNA (1)...(19): siRNA sense strand
ccgugacccuuccgcauau

SEQ ID NO: 1286347 - RNA, 19 nt, Homo sapiens
  misc_RNA (1)...(19): siRNA sense strand
gucagaagacuauugauac

SEQ ID NO: 1286348 - RNA, 19 nt, Homo sapiens
  misc_RNA (1)...(19): siRNA sense strand
uaugugaaguugauuucca

SEQ ID NO: 1286349 - RNA, 19 nt, Homo sapiens
  misc_RNA (1)...(19): siRNA sense strand
gacccuuccgcauauaauu

SEQ ID NO: 1286350 - RNA, 19 nt, Homo sapiens
  misc_RNA (1)...(19): siRNA sense strand
aggaggaagaggauaagua

SEQ ID NO: 1286351 - RNA, 19 nt, Homo sapiens
  misc_RNA (1)...(19): siRNA sense strand
ccuuguguauuuagccaaa

SEQ ID NO: 1286352 - RNA, 19 nt, Homo sapiens
  misc_RNA (1)...(19): siRNA sense strand
gcuacaugaaugaagauga

SEQ ID NO: 1286353 - RNA, 19 nt, Homo sapiens
  misc_RNA (1)...(19): siRNA sense strand
ugucugaauuagaaagcuu

SEQ ID NO: 1286354 - RNA, 19 nt, Homo sapiens
  misc_RNA (1)...(19): siRNA sense strand
ugugacagcuuugcuucug

SEQ ID NO: 1286355 - RNA, 19 nt, Homo sapiens
  misc_RNA (1)...(19): siRNA sense strand
ucagaagacuauugauacc

SEQ ID NO: 1286356 - RNA, 19 nt, Homo sapiens
  misc_RNA (1)...(19): siRNA sense strand
gccgucagaagacuauuga

SEQ ID NO: 1286357 - RNA, 19 nt, Homo sapiens
  misc_RNA (1)...(19): siRNA sense strand
aagaggauaaguacauguu

SEQ ID NO: 1286358 - RNA, 19 nt, Homo sapiens
  misc_RNA (1)...(19): siRNA sense strand
ucaggguggcgaugaaguu

SEQ ID NO: 1286359 - RNA, 19 nt, Homo sapiens
  misc_RNA (1)...(19): siRNA sense strand
aaaccguuauggugaagag

SEQ ID NO: 1286360 - RNA, 19 nt, Homo sapiens
  misc_RNA (1)...(19): siRNA sense strand
aaaccucgucauccucuga

SEQ ID NO: 1286361 - RNA, 19 nt, Homo sapiens
  misc_RNA (1)...(19): siRNA sense strand
cgaaaccguuauggugaag

SEQ ID NO: 1286362 - RNA, 19 nt, Homo sapiens
  misc_RNA (1)...(19): siRNA sense strand
gcucuacuugucaucaaug

SEQ ID NO: 1286363 - RNA, 19 nt, Homo sapiens
  misc_RNA (1)...(19): siRNA sense strand
uauaauucgcccaguggaa

SEQ ID NO: 1286364 - RNA, 19 nt, Homo sapiens
  misc_RNA (1)...(19): siRNA sense strand
uccgugacccuuccgcaua

SEQ ID NO: 1286365 - RNA, 19 nt, Homo sapiens
  misc_RNA (1)...(19): siRNA sense strand
aggaggaggaagaggauaa

SEQ ID NO: 1286366 - RNA, 19 nt, Homo sapiens
  misc_RNA (1)...(19): siRNA sense strand
gcagaaagaucucagagua

SEQ ID NO: 1286367 - RNA, 19 nt, Homo sapiens
  misc_RNA (1)...(19): siRNA sense strand
gaagauauauaaccguuca

SEQ ID NO: 1286368 - RNA, 19 nt, Homo sapiens
  misc_RNA (1)...(19): siRNA sense strand
gagaacgucugcagcaauu

SEQ ID NO: 1286369 - RNA, 19 nt, Homo sapiens
  misc_RNA (1)...(19): siRNA sense strand
gaagaugaccugcccagaa

SEQ ID NO: 1286370 - RNA, 19 nt, Homo sapiens
  misc_RNA (1)...(19): siRNA sense strand
gaaugugcaugccuacuug

SEQ ID NO: 1286371 - RNA, 19 nt, Homo sapiens
  misc_RNA (1)...(19): siRNA sense strand
agaaagaucucagaguaaa

SEQ ID NO: 1286372 - RNA, 19 nt, Homo sapiens
  misc_RNA (1)...(19): siRNA sense strand
caacuccgauucagaagau

SEQ ID NO: 1286373 - RNA, 19 nt, Homo sapiens
  misc_RNA (1)...(19): siRNA sense strand
acucaugucugaauuagaa

SEQ ID NO: 1286374 - RNA, 19 nt, Homo sapiens
  misc_RNA (1)...(19): siRNA sense strand
gaugaaaguggaaugaauu

SEQ ID NO: 1286375 - RNA, 19 nt, Homo sapiens
  misc_RNA (1)...(19): siRNA sense strand
ggaagaggauaaguacaug

SEQ ID NO: 1286376 - RNA, 19 nt, Homo sapiens
  misc_RNA (1)...(19): siRNA sense strand
gaagacuauugauaccaaa

SEQ ID NO: 1286377 - RNA, 19 nt, Homo sapiens
  misc_RNA (1)...(19): siRNA sense strand
ucagauaugugaaguugau

SEQ ID NO: 1286378 - RNA, 19 nt, Homo sapiens
  misc_RNA (1)...(19): siRNA sense strand
gaagaugaaaguggaauga

SEQ ID NO: 1286379 - RNA, 19 nt, Homo sapiens
  misc_RNA (1)...(19): siRNA sense strand
uaucauggcuuugggaaug

SEQ ID NO: 1286380 - RNA, 19 nt, Homo sapiens
  misc_RNA (1)...(19): siRNA sense strand
ugacaguugugacagcuuu

SEQ ID NO: 1286381 - RNA, 19 nt, Homo sapiens
  misc_RNA (1)...(19): siRNA sense strand
cagcuuugcuucugauaau

SEQ ID NO: 1286382 - RNA, 19 nt, Homo sapiens
  misc_RNA (1)...(19): siRNA sense strand
gaccguggauggcuacaug

SEQ ID NO: 1286383 - RNA, 19 nt, Homo sapiens
  misc_RNA (1)...(19): siRNA sense strand
guggauggcuacaugaaug

SEQ ID NO: 1286384 - RNA, 19 nt, Homo sapiens
  misc_RNA (1)...(19): siRNA sense strand
ucacugggcucuacuuguc

SEQ ID NO: 1286385 - RNA, 19 nt, Homo sapiens
  misc_RNA (1)...(19): siRNA sense strand
cgucagaagacuauugaua

SEQ ID NO: 1286386 - RNA, 19 nt, Homo sapiens
  misc_RNA (1)...(19): siRNA sense strand
gaucucagaguaaagaaga

SEQ ID NO: 1286387 - RNA, 19 nt, Homo sapiens
  misc_RNA (1)...(19): siRNA sense strand
ggaaugugcaugccuacuu

SEQ ID NO: 1286388 - RNA, 19 nt, Homo sapiens
  misc_RNA (1)...(19): siRNA sense strand
ugaaguugauuuccaugga

SEQ ID NO: 1286389 - RNA, 19 nt, Homo sapiens
  misc_RNA (1)...(19): siRNA sense strand
agaagacuauugauaccaa

SEQ ID NO: 1286390 - RNA, 19 nt, Homo sapiens
  misc_RNA (1)...(19): siRNA sense strand
cagaaagaucucagaguaa

SEQ ID NO: 1286391 - RNA, 19 nt, Homo sapiens
  misc_RNA (1)...(19): siRNA sense strand
ggaggaagaggauaaguac

SEQ ID NO: 1286392 - RNA, 19 nt, Homo sapiens
  misc_RNA (1)...(19): siRNA sense strand
caucaaugccgucagaaga

SEQ ID NO: 1286393 - RNA, 19 nt, Homo sapiens
  misc_RNA (1)...(19): siRNA sense strand
aaacucaugucugaauuag

SEQ ID NO: 1286394 - RNA, 19 nt, Homo sapiens
  misc_RNA (1)...(19): siRNA sense strand
aagaugaccugcccagaag

SEQ ID NO: 1286395 - RNA, 19 nt, Homo sapiens
  misc_RNA (1)...(19): siRNA sense strand
agaugaaaguggaaugaau

SEQ ID NO: 1286396 - RNA, 19 nt, Homo sapiens
  misc_RNA (1)...(19): siRNA sense strand
ugucaucaaugccgucaga

SEQ ID NO: 1286397 - RNA, 19 nt, Homo sapiens
  misc_RNA (1)...(19): siRNA sense strand
ggagaacgucugcagcaau

SEQ ID NO: 1286398 - RNA, 19 nt, Homo sapiens
  misc_RNA (1)...(19): siRNA sense strand
cagaguaaagaagaacuua

SEQ ID NO: 1286399 - RNA, 19 nt, Homo sapiens
  misc_RNA (1)...(19): siRNA sense strand
gauaugugaaguugauuuc

SEQ ID NO: 1286400 - RNA, 19 nt, Homo sapiens
  misc_RNA (1)...(19): siRNA sense strand
gaacgucugcagcaauucu

SEQ ID NO: 1286401 - RNA, 19 nt, Homo sapiens
  misc_RNA (1)...(19): siRNA sense strand
cucgagagaagauauauaa

SEQ ID NO: 1286402 - RNA, 19 nt, Homo sapiens
  misc_RNA (1)...(19): siRNA sense strand
aaagaucucagaguaaaga

SEQ ID NO: 1286403 - RNA, 19 nt, Homo sapiens
  misc_RNA (1)...(19): siRNA sense strand
ucgaaaccguuauggugaa

SEQ ID NO: 1286404 - RNA, 19 nt, Homo sapiens
  misc_RNA (1)...(19): siRNA sense strand
gcuuugcuucugauaauuu

SEQ ID NO: 1286405 - RNA, 19 nt, Homo sapiens
  misc_RNA (1)...(19): siRNA sense strand
gggcucuacuugucaucaa

SEQ ID NO: 1286406 - RNA, 19 nt, Homo sapiens
  misc_RNA (1)...(19): siRNA sense strand
cagaggaggaguuggagaa

SEQ ID NO: 1286407 - RNA, 19 nt, Homo sapiens
  misc_RNA (1)...(19): siRNA sense strand
cuacaugaaugaagaugac

SEQ ID NO: 1286408 - RNA, 19 nt, Homo sapiens
  misc_RNA (1)...(19): siRNA sense strand
gaagaggauaaguacaugu

SEQ ID NO: 1286409 - RNA, 19 nt, Homo sapiens
  misc_RNA (1)...(19): siRNA sense strand
caaaacucaugucugaauu

SEQ ID NO: 1286410 - RNA, 19 nt, Homo sapiens
  misc_RNA (1)...(19): siRNA sense strand
ugacagcuuugcuucugau

SEQ ID NO: 1286411 - RNA, 19 nt, Homo sapiens
  misc_RNA (1)...(19): siRNA sense strand
gguguugcuuccaggagaa

SEQ ID NO: 1286412 - RNA, 19 nt, Homo sapiens
  misc_RNA (1)...(19): siRNA sense strand
gcaaaacucaugucugaau

SEQ ID NO: 1286413 - RNA, 19 nt, Homo sapiens
  misc_RNA (1)...(19): siRNA sense strand
cgccagcccucagagaauu

SEQ ID NO: 1286414 - RNA, 19 nt, Homo sapiens
  misc_RNA (1)...(19): siRNA sense strand
cgacugggguccuugugua

SEQ ID NO: 1286415 - RNA, 19 nt, Homo sapiens
  misc_RNA (1)...(19): siRNA sense strand
uugcaaaacucaugucuga

SEQ ID NO: 1286416 - RNA, 19 nt, Homo sapiens
  misc_RNA (1)...(19): siRNA sense strand
gagaauucugugacugauu

SEQ ID NO: 1286417 - RNA, 19 nt, Homo sapiens
  misc_RNA (1)...(19): siRNA sense strand
gugacagcuuugcuucuga

SEQ ID NO: 1286418 - RNA, 19 nt, Homo sapiens
  misc_RNA (1)...(19): siRNA sense strand
gugcaugccuacuugaaaa

SEQ ID NO: 1286419 - RNA, 19 nt, Homo sapiens
  misc_RNA (1)...(19): siRNA sense strand
gaaagaucucagaguaaag

SEQ ID NO: 1286420 - RNA, 19 nt, Homo sapiens
  misc_RNA (1)...(19): siRNA sense strand
uuacagaggaggaguugga

SEQ ID NO: 1286421 - RNA, 19 nt, Homo sapiens
  misc_RNA (1)...(19): siRNA sense strand
ggaggaggaggaagaggau

SEQ ID NO: 1286422 - RNA, 19 nt, Homo sapiens
  misc_RNA (1)...(19): siRNA sense strand
ccgugacccuuccgcauau

SEQ ID NO: 1286423 - RNA, 19 nt, Homo sapiens
  misc_RNA (1)...(19): siRNA sense strand
gucagaagacuauugauac

SEQ ID NO: 1286424 - RNA, 19 nt, Homo sapiens
  misc_RNA (1)...(19): siRNA sense strand
uaugugaaguugauuucca

SEQ ID NO: 1286425 - RNA, 19 nt, Homo sapiens
  misc_RNA (1)...(19): siRNA sense strand
gacccuuccgcauauaauu

SEQ ID NO: 1286426 - RNA, 19 nt, Homo sapiens
  misc_RNA (1)...(19): siRNA sense strand
aggaggaagaggauaagua

SEQ ID NO: 1286427 - RNA, 19 nt, Homo sapiens
  misc_RNA (1)...(19): siRNA sense strand
ccuuguguauuuagccaaa

SEQ ID NO: 1286428 - RNA, 19 nt, Homo sapiens
  misc_RNA (1)...(19): siRNA sense strand
gcuacaugaaugaagauga

SEQ ID NO: 1286429 - RNA, 19 nt, Homo sapiens
  misc_RNA (1)...(19): siRNA sense strand
ugucugaauuagaaagcuu

SEQ ID NO: 1286430 - RNA, 19 nt, Homo sapiens
  misc_RNA (1)...(19): siRNA sense strand
ugugacagcuuugcuucug

SEQ ID NO: 1286431 - RNA, 19 nt, Homo sapiens
  misc_RNA (1)...(19): siRNA sense strand
ucagaagacuauugauacc

SEQ ID NO: 1286432 - RNA, 19 nt, Homo sapiens
  misc_RNA (1)...(19): siRNA sense strand
gccgucagaagacuauuga

SEQ ID NO: 1286433 - RNA, 19 nt, Homo sapiens
  misc_RNA (1)...(19): siRNA sense strand
aagaggauaaguacauguu

SEQ ID NO: 1286434 - RNA, 19 nt, Homo sapiens
  misc_RNA (1)...(19): siRNA sense strand
ucaggguggcgaugaaguu

SEQ ID NO: 1286435 - RNA, 19 nt, Homo sapiens
  misc_RNA (1)...(19): siRNA sense strand
aaaccguuauggugaagag

SEQ ID NO: 1286436 - RNA, 19 nt, Homo sapiens
  misc_RNA (1)...(19): siRNA sense strand
aaaccucgucauccucuga

SEQ ID NO: 1286437 - RNA, 19 nt, Homo sapiens
  misc_RNA (1)...(19): siRNA sense strand
cgaaaccguuauggugaag

SEQ ID NO: 1286438 - RNA, 19 nt, Homo sapiens
  misc_RNA (1)...(19): siRNA sense strand
gcucuacuugucaucaaug

SEQ ID NO: 1286439 - RNA, 19 nt, Homo sapiens
  misc_RNA (1)...(19): siRNA sense strand
uauaauucgcccaguggaa

SEQ ID NO: 1286440 - RNA, 19 nt, Homo sapiens
  misc_RNA (1)...(19): siRNA sense strand
uccgugacccuuccgcaua

SEQ ID NO: 1286441 - RNA, 19 nt, Homo sapiens
  misc_RNA (1)...(19): siRNA sense strand
aggaggaggaagaggauaa

SEQ ID NO: 1286442 - RNA, 19 nt, Homo sapiens
  misc_RNA (1)...(19): siRNA sense strand
gcaccgagaucaagauguc

SEQ ID NO: 1286443 - RNA, 19 nt, Homo sapiens
  misc_RNA (1)...(19): siRNA sense strand
gcagagaccuacuucaacu

SEQ ID NO: 1286444 - RNA, 19 nt, Homo sapiens
  misc_RNA (1)...(19): siRNA sense strand
ggacgauacuggccuuugu

SEQ ID NO: 1286445 - RNA, 19 nt, Homo sapiens
  misc_RNA (1)...(19): siRNA sense strand
ggucaauguucuaaagaug

SEQ ID NO: 1286446 - RNA, 19 nt, Homo sapiens
  misc_RNA (1)...(19): siRNA sense strand
gggcguugcuucaccauag

SEQ ID NO: 1286447 - RNA, 19 nt, Homo sapiens
  misc_RNA (1)...(19): siRNA sense strand
gaacaacaucggacacauc

SEQ ID NO: 1286448 - RNA, 19 nt, Homo sapiens
  misc_RNA (1)...(19): siRNA sense strand
gaauaugugaugcccauga

SEQ ID NO: 1286449 - RNA, 19 nt, Homo sapiens
  misc_RNA (1)...(19): siRNA sense strand
ggaggagggugugauugug

SEQ ID NO: 1286450 - RNA, 19 nt, Homo sapiens
  misc_RNA (1)...(19): siRNA sense strand
gauacuggccuuugucucu

SEQ ID NO: 1286451 - RNA, 19 nt, Homo sapiens
  misc_RNA (1)...(19): siRNA sense strand
agaccuacuucaacuacaa

SEQ ID NO: 1286452 - RNA, 19 nt, Homo sapiens
  misc_RNA (1)...(19): siRNA sense strand
ucucuggcaucuucuuuau

SEQ ID NO: 1286453 - RNA, 19 nt, Homo sapiens
  misc_RNA (1)...(19): siRNA sense strand
caagaugucccugcacuca

SEQ ID NO: 1286454 - RNA, 19 nt, Homo sapiens
  misc_RNA (1)...(19): siRNA sense strand
ccaaggaugcagagaccua

SEQ ID NO: 1286455 - RNA, 19 nt, Homo sapiens
  misc_RNA (1)...(19): siRNA sense strand
gccgccaucuccuuccuuu

SEQ ID NO: 1286456 - RNA, 19 nt, Homo sapiens
  misc_RNA (1)...(19): siRNA sense strand
aauaugugaugcccaugaa

SEQ ID NO: 1286457 - RNA, 19 nt, Homo sapiens
  misc_RNA (1)...(19): siRNA sense strand
gcuugggccuccuggguau

SEQ ID NO: 1286458 - RNA, 19 nt, Homo sapiens
  misc_RNA (1)...(19): siRNA sense strand
ggguuuauccugaacaaca

SEQ ID NO: 1286459 - RNA, 19 nt, Homo sapiens
  misc_RNA (1)...(19): siRNA sense strand
aaguauggguggucguuug

SEQ ID NO: 1286460 - RNA, 19 nt, Homo sapiens
  misc_RNA (1)...(19): siRNA sense strand
caucuucuuuauccucuca

SEQ ID NO: 1286461 - RNA, 19 nt, Homo sapiens
  misc_RNA (1)...(19): siRNA sense strand
ucauuggguuuauccugaa

SEQ ID NO: 1286462 - RNA, 19 nt, Homo sapiens
  misc_RNA (1)...(19): siRNA sense strand
ggucagccucuucuucaug

SEQ ID NO: 1286463 - RNA, 19 nt, Homo sapiens
  misc_RNA (1)...(19): siRNA sense strand
gucagccucuucuucaugu

SEQ ID NO: 1286464 - RNA, 19 nt, Homo sapiens
  misc_RNA (1)...(19): siRNA sense strand
gucaauguucuaaagauga

SEQ ID NO: 1286465 - RNA, 19 nt, Homo sapiens
  misc_RNA (1)...(19): siRNA sense strand
gguuuauccugaacaacau

SEQ ID NO: 1286466 - RNA, 19 nt, Homo sapiens
  misc_RNA (1)...(19): siRNA sense strand
gagcaccgagaucaagaug

SEQ ID NO: 1286467 - RNA, 19 nt, Homo sapiens
  misc_RNA (1)...(19): siRNA sense strand
gagaccuacuucaacuaca

SEQ ID NO: 1286468 - RNA, 19 nt, Homo sapiens
  misc_RNA (1)...(19): siRNA sense strand
cacggucaauguucuaaag

SEQ ID NO: 1286469 - RNA, 19 nt, Homo sapiens
  misc_RNA (1)...(19): siRNA sense strand
gaaccagagcaccgagauc

SEQ ID NO: 1286470 - RNA, 19 nt, Homo sapiens
  misc_RNA (1)...(19): siRNA sense strand
ggcguugcuucaccauaga

SEQ ID NO: 1286471 - RNA, 19 nt, Homo sapiens
  misc_RNA (1)...(19): siRNA sense strand
cggucaauguucuaaagau

SEQ ID NO: 1286472 - RNA, 19 nt, Homo sapiens
  misc_RNA (1)...(19): siRNA sense strand
cagagaccuacuucaacua

SEQ ID NO: 1286473 - RNA, 19 nt, Homo sapiens
  misc_RNA (1)...(19): siRNA sense strand
ggaugcagagaccuacuuc

SEQ ID NO: 1286474 - RNA, 19 nt, Homo sapiens
  misc_RNA (1)...(19): siRNA sense strand
caacaggaccaaggaugca

SEQ ID NO: 1286475 - RNA, 19 nt, Homo sapiens
  misc_RNA (1)...(19): siRNA sense strand
ugaacaacaucggacacau

SEQ ID NO: 1286476 - RNA, 19 nt, Homo sapiens
  misc_RNA (1)...(19): siRNA sense strand
cgccaucuccuuccuuuua

SEQ ID NO: 1286477 - RNA, 19 nt, Homo sapiens
  misc_RNA (1)...(19): siRNA sense strand
uugcuucaccauagaauau

SEQ ID NO: 1286478 - RNA, 19 nt, Homo sapiens
  misc_RNA (1)...(19): siRNA sense strand
cuuugucucuggcaucuuc

SEQ ID NO: 1286479 - RNA, 19 nt, Homo sapiens
  misc_RNA (1)...(19): siRNA sense strand
ccgcucagccacaccauuc

SEQ ID NO: 1286480 - RNA, 19 nt, Homo sapiens
  misc_RNA (1)...(19): siRNA sense strand
gcaccgagaucaagauguc

SEQ ID NO: 1286481 - RNA, 19 nt, Homo sapiens
  misc_RNA (1)...(19): siRNA sense strand
gcagagaccuacuucaacu

SEQ ID NO: 1286482 - RNA, 19 nt, Homo sapiens
  misc_RNA (1)...(19): siRNA sense strand
ggacgauacuggccuuugu

SEQ ID NO: 1286483 - RNA, 19 nt, Homo sapiens
  misc_RNA (1)...(19): siRNA sense strand
ggucaauguucuaaagaug

SEQ ID NO: 1286484 - RNA, 19 nt, Homo sapiens
  misc_RNA (1)...(19): siRNA sense strand
gggcguugcuucaccauag

SEQ ID NO: 1286485 - RNA, 19 nt, Homo sapiens
  misc_RNA (1)...(19): siRNA sense strand
gaacaacaucggacacauc

SEQ ID NO: 1286486 - RNA, 19 nt, Homo sapiens
  misc_RNA (1)...(19): siRNA sense strand
gaauaugugaugcccauga

SEQ ID NO: 1286487 - RNA, 19 nt, Homo sapiens
  misc_RNA (1)...(19): siRNA sense strand
ggaggagggugugauugug

SEQ ID NO: 1286488 - RNA, 19 nt, Homo sapiens
  misc_RNA (1)...(19): siRNA sense strand
gauacuggccuuugucucu

SEQ ID NO: 1286489 - RNA, 19 nt, Homo sapiens
  misc_RNA (1)...(19): siRNA sense strand
agaccuacuucaacuacaa

SEQ ID NO: 1286490 - RNA, 19 nt, Homo sapiens
  misc_RNA (1)...(19): siRNA sense strand
ucucuggcaucuucuuuau

SEQ ID NO: 1286491 - RNA, 19 nt, Homo sapiens
  misc_RNA (1)...(19): siRNA sense strand
caagaugucccugcacuca

SEQ ID NO: 1286492 - RNA, 19 nt, Homo sapiens
  misc_RNA (1)...(19): siRNA sense strand
ccaaggaugcagagaccua

SEQ ID NO: 1286493 - RNA, 19 nt, Homo sapiens
  misc_RNA (1)...(19): siRNA sense strand
gccgccaucuccuuccuuu

SEQ ID NO: 1286494 - RNA, 19 nt, Homo sapiens
  misc_RNA (1)...(19): siRNA sense strand
aauaugugaugcccaugaa

SEQ ID NO: 1286495 - RNA, 19 nt, Homo sapiens
  misc_RNA (1)...(19): siRNA sense strand
gcuugggccuccuggguau

SEQ ID NO: 1286496 - RNA, 19 nt, Homo sapiens
  misc_RNA (1)...(19): siRNA sense strand
ggguuuauccugaacaaca

SEQ ID NO: 1286497 - RNA, 19 nt, Homo sapiens
  misc_RNA (1)...(19): siRNA sense strand
aaguauggguggucguuug

SEQ ID NO: 1286498 - RNA, 19 nt, Homo sapiens
  misc_RNA (1)...(19): siRNA sense strand
caucuucuuuauccucuca

SEQ ID NO: 1286499 - RNA, 19 nt, Homo sapiens
  misc_RNA (1)...(19): siRNA sense strand
ucauuggguuuauccugaa

SEQ ID NO: 1286500 - RNA, 19 nt, Homo sapiens
  misc_RNA (1)...(19): siRNA sense strand
ggucagccucuucuucaug

SEQ ID NO: 1286501 - RNA, 19 nt, Homo sapiens
  misc_RNA (1)...(19): siRNA sense strand
gucagccucuucuucaugu

SEQ ID NO: 1286502 - RNA, 19 nt, Homo sapiens
  misc_RNA (1)...(19): siRNA sense strand
gucaauguucuaaagauga

SEQ ID NO: 1286503 - RNA, 19 nt, Homo sapiens
  misc_RNA (1)...(19): siRNA sense strand
gguuuauccugaacaacau

SEQ ID NO: 1286504 - RNA, 19 nt, Homo sapiens
  misc_RNA (1)...(19): siRNA sense strand
gagcaccgagaucaagaug

SEQ ID NO: 1286505 - RNA, 19 nt, Homo sapiens
  misc_RNA (1)...(19): siRNA sense strand
gagaccuacuucaacuaca

SEQ ID NO: 1286506 - RNA, 19 nt, Homo sapiens
  misc_RNA (1)...(19): siRNA sense strand
cacggucaauguucuaaag

SEQ ID NO: 1286507 - RNA, 19 nt, Homo sapiens
  misc_RNA (1)...(19): siRNA sense strand
gaaccagagcaccgagauc

SEQ ID NO: 1286508 - RNA, 19 nt, Homo sapiens
  misc_RNA (1)...(19): siRNA sense strand
ggcguugcuucaccauaga

SEQ ID NO: 1286509 - RNA, 19 nt, Homo sapiens
  misc_RNA (1)...(19): siRNA sense strand
cggucaauguucuaaagau

SEQ ID NO: 1286510 - RNA, 19 nt, Homo sapiens
  misc_RNA (1)...(19): siRNA sense strand
cagagaccuacuucaacua

SEQ ID NO: 1286511 - RNA, 19 nt, Homo sapiens
  misc_RNA (1)...(19): siRNA sense strand
ggaugcagagaccuacuuc

SEQ ID NO: 1286512 - RNA, 19 nt, Homo sapiens
  misc_RNA (1)...(19): siRNA sense strand
caacaggaccaaggaugca

SEQ ID NO: 1286513 - RNA, 19 nt, Homo sapiens
  misc_RNA (1)...(19): siRNA sense strand
ugaacaacaucggacacau

SEQ ID NO: 1286514 - RNA, 19 nt, Homo sapiens
  misc_RNA (1)...(19): siRNA sense strand
cgccaucuccuuccuuuua

SEQ ID NO: 1286515 - RNA, 19 nt, Homo sapiens
  misc_RNA (1)...(19): siRNA sense strand
uugcuucaccauagaauau

SEQ ID NO: 1286516 - RNA, 19 nt, Homo sapiens
  misc_RNA (1)...(19): siRNA sense strand
cuuugucucuggcaucuuc

SEQ ID NO: 1286517 - RNA, 19 nt, Homo sapiens
  misc_RNA (1)...(19): siRNA sense strand
ccgcucagccacaccauuc

SEQ ID NO: 1286518 - RNA, 19 nt, Homo sapiens
  misc_RNA (1)...(19): siRNA sense strand
gguagaaacugaccacaua

SEQ ID NO: 1286519 - RNA, 19 nt, Homo sapiens
  misc_RNA (1)...(19): siRNA sense strand
gcaaaggugucaucuucua

SEQ ID NO: 1286520 - RNA, 19 nt, Homo sapiens
  misc_RNA (1)...(19): siRNA sense strand
caaggaagaucauuaagga

SEQ ID NO: 1286521 - RNA, 19 nt, Homo sapiens
  misc_RNA (1)...(19): siRNA sense strand
gcaggaagguagaaacuga

SEQ ID NO: 1286522 - RNA, 19 nt, Homo sapiens
  misc_RNA (1)...(19): siRNA sense strand
gcaugaagaucucaaugaa

SEQ ID NO: 1286523 - RNA, 19 nt, Homo sapiens
  misc_RNA (1)...(19): siRNA sense strand
gaacaucuuuaaccgaaug

SEQ ID NO: 1286524 - RNA, 19 nt, Homo sapiens
  misc_RNA (1)...(19): siRNA sense strand
caacauucaugaagacuga

SEQ ID NO: 1286525 - RNA, 19 nt, Homo sapiens
  misc_RNA (1)...(19): siRNA sense strand
gcacagaagugauucaacu

SEQ ID NO: 1286526 - RNA, 19 nt, Homo sapiens
  misc_RNA (1)...(19): siRNA sense strand
gaacugguauccgaucaga

SEQ ID NO: 1286527 - RNA, 19 nt, Homo sapiens
  misc_RNA (1)...(19): siRNA sense strand
gaaagauccuccccgaaua

SEQ ID NO: 1286528 - RNA, 19 nt, Homo sapiens
  misc_RNA (1)...(19): siRNA sense strand
gauauaaaguugggaagga

SEQ ID NO: 1286529 - RNA, 19 nt, Homo sapiens
  misc_RNA (1)...(19): siRNA sense strand
gaucagagagugagacaga

SEQ ID NO: 1286530 - RNA, 19 nt, Homo sapiens
  misc_RNA (1)...(19): siRNA sense strand
ugaaguagccaaacuauuc

SEQ ID NO: 1286531 - RNA, 19 nt, Homo sapiens
  misc_RNA (1)...(19): siRNA sense strand
cggcaaaggugucaucuuc

SEQ ID NO: 1286532 - RNA, 19 nt, Homo sapiens
  misc_RNA (1)...(19): siRNA sense strand
gaaaggaaauaugggaaag

SEQ ID NO: 1286533 - RNA, 19 nt, Homo sapiens
  misc_RNA (1)...(19): siRNA sense strand
ucaauguucuggagugauu

SEQ ID NO: 1286534 - RNA, 19 nt, Homo sapiens
  misc_RNA (1)...(19): siRNA sense strand
agucagcaguggcaaguua

SEQ ID NO: 1286535 - RNA, 19 nt, Homo sapiens
  misc_RNA (1)...(19): siRNA sense strand
gccaaacuauucaacauuc

SEQ ID NO: 1286536 - RNA, 19 nt, Homo sapiens
  misc_RNA (1)...(19): siRNA sense strand
gauguuggcuaugaagcua

SEQ ID NO: 1286537 - RNA, 19 nt, Homo sapiens
  misc_RNA (1)...(19): siRNA sense strand
caagcacgcucuaacaucu

SEQ ID NO: 1286538 - RNA, 19 nt, Homo sapiens
  misc_RNA (1)...(19): siRNA sense strand
gcugcaugcuucuacgaua

SEQ ID NO: 1286539 - RNA, 19 nt, Homo sapiens
  misc_RNA (1)...(19): siRNA sense strand
gaaagacggcaggaaggua

SEQ ID NO: 1286540 - RNA, 19 nt, Homo sapiens
  misc_RNA (1)...(19): siRNA sense strand
uagcaaggaagaucauuaa

SEQ ID NO: 1286541 - RNA, 19 nt, Homo sapiens
  misc_RNA (1)...(19): siRNA sense strand
gcaccaugaucacgcuguu

SEQ ID NO: 1286542 - RNA, 19 nt, Homo sapiens
  misc_RNA (1)...(19): siRNA sense strand
gaaguagccaaacuauuca

SEQ ID NO: 1286543 - RNA, 19 nt, Homo sapiens
  misc_RNA (1)...(19): siRNA sense strand
uccgaggccucagaaauua

SEQ ID NO: 1286544 - RNA, 19 nt, Homo sapiens
  misc_RNA (1)...(19): siRNA sense strand
ggagcccaauguugaguug

SEQ ID NO: 1286545 - RNA, 19 nt, Homo sapiens
  misc_RNA (1)...(19): siRNA sense strand
caagacugguggccuggaa

SEQ ID NO: 1286546 - RNA, 19 nt, Homo sapiens
  misc_RNA (1)...(19): siRNA sense strand
gcaaggaagaucauuaagg

SEQ ID NO: 1286547 - RNA, 19 nt, Homo sapiens
  misc_RNA (1)...(19): siRNA sense strand
gaaugccaauagcaaggaa

SEQ ID NO: 1286548 - RNA, 19 nt, Homo sapiens
  misc_RNA (1)...(19): siRNA sense strand
gcaugcuucuacgauauaa

SEQ ID NO: 1286549 - RNA, 19 nt, Homo sapiens
  misc_RNA (1)...(19): siRNA sense strand
caaugaaguagccaaacua

SEQ ID NO: 1286550 - RNA, 19 nt, Homo sapiens
  misc_RNA (1)...(19): siRNA sense strand
ccgaauaccucagcaacug

SEQ ID NO: 1286551 - RNA, 19 nt, Homo sapiens
  misc_RNA (1)...(19): siRNA sense strand
cagaagugauucaacucuu

SEQ ID NO: 1286552 - RNA, 19 nt, Homo sapiens
  misc_RNA (1)...(19): siRNA sense strand
cuucuacgauauaaaguug

SEQ ID NO: 1286553 - RNA, 19 nt, Homo sapiens
  misc_RNA (1)...(19): siRNA sense strand
ucaaugaaguagccaaacu

SEQ ID NO: 1286554 - RNA, 19 nt, Homo sapiens
  misc_RNA (1)...(19): siRNA sense strand
augaagaucucaaugaagu

SEQ ID NO: 1286555 - RNA, 19 nt, Homo sapiens
  misc_RNA (1)...(19): siRNA sense strand
guccgaggccucagaaauu

SEQ ID NO: 1286556 - RNA, 19 nt, Homo sapiens
  misc_RNA (1)...(19): siRNA sense strand
ccggguaaaugcagagcua

SEQ ID NO: 1286557 - RNA, 19 nt, Homo sapiens
  misc_RNA (1)...(19): siRNA sense strand
gaagaucucaaugaaguag

SEQ ID NO: 1286558 - RNA, 19 nt, Homo sapiens
  misc_RNA (1)...(19): siRNA sense strand
ggguagagcaccaugauca

SEQ ID NO: 1286559 - RNA, 19 nt, Homo sapiens
  misc_RNA (1)...(19): siRNA sense strand
ccaaacuauucaacauuca

SEQ ID NO: 1286560 - RNA, 19 nt, Homo sapiens
  misc_RNA (1)...(19): siRNA sense strand
cuaugaagcuauuggucuu

SEQ ID NO: 1286561 - RNA, 19 nt, Homo sapiens
  misc_RNA (1)...(19): siRNA sense strand
ggaaagauccuccccgaau

SEQ ID NO: 1286562 - RNA, 19 nt, Homo sapiens
  misc_RNA (1)...(19): siRNA sense strand
uagccaaacuauucaacau

SEQ ID NO: 1286563 - RNA, 19 nt, Homo sapiens
  misc_RNA (1)...(19): siRNA sense strand
uuugguggcuuccggguaa

SEQ ID NO: 1286564 - RNA, 19 nt, Homo sapiens
  misc_RNA (1)...(19): siRNA sense strand
ccucagaaauuacuauucc

SEQ ID NO: 1286565 - RNA, 19 nt, Homo sapiens
  misc_RNA (1)...(19): siRNA sense strand
ggaacaucuuuaaccgaau

SEQ ID NO: 1286566 - RNA, 19 nt, Homo sapiens
  misc_RNA (1)...(19): siRNA sense strand
ggugaugcccaaugcuauu

SEQ ID NO: 1286567 - RNA, 19 nt, Homo sapiens
  misc_RNA (1)...(19): siRNA sense strand
aaggaaauaugggaaagau

SEQ ID NO: 1286568 - RNA, 19 nt, Homo sapiens
  misc_RNA (1)...(19): siRNA sense strand
agaaaggaaauaugggaaa

SEQ ID NO: 1286569 - RNA, 19 nt, Homo sapiens
  misc_RNA (1)...(19): siRNA sense strand
cuacaagcacgcucuaaca

SEQ ID NO: 1286570 - RNA, 19 nt, Homo sapiens
  misc_RNA (1)...(19): siRNA sense strand
cugcaugcuucuacgauau

SEQ ID NO: 1286571 - RNA, 19 nt, Homo sapiens
  misc_RNA (1)...(19): siRNA sense strand
gccuggagcccaauguuga

SEQ ID NO: 1286572 - RNA, 19 nt, Homo sapiens
  misc_RNA (1)...(19): siRNA sense strand
aagauuggcuggagaaaau

SEQ ID NO: 1286573 - RNA, 19 nt, Homo sapiens
  misc_RNA (1)...(19): siRNA sense strand
gguaaaugcagagcuacaa

SEQ ID NO: 1286574 - RNA, 19 nt, Homo sapiens
  misc_RNA (1)...(19): siRNA sense strand
ccaauagcaaggaagauca

SEQ ID NO: 1286575 - RNA, 19 nt, Homo sapiens
  misc_RNA (1)...(19): siRNA sense strand
ggauugugcuauggaacau

SEQ ID NO: 1286576 - RNA, 19 nt, Homo sapiens
  misc_RNA (1)...(19): siRNA sense strand
ggaggacuacggcaaaggu

SEQ ID NO: 1286577 - RNA, 19 nt, Homo sapiens
  misc_RNA (1)...(19): siRNA sense strand
auagcaaggaagaucauua

SEQ ID NO: 1286578 - RNA, 19 nt, Homo sapiens
  misc_RNA (1)...(19): siRNA sense strand
gcaacuggaccauggaaaa

SEQ ID NO: 1286579 - RNA, 19 nt, Homo sapiens
  misc_RNA (1)...(19): siRNA sense strand
cugguggccuggaaauaga

SEQ ID NO: 1286580 - RNA, 19 nt, Homo sapiens
  misc_RNA (1)...(19): siRNA sense strand
caaaagcaacugcacaaga

SEQ ID NO: 1286581 - RNA, 19 nt, Homo sapiens
  misc_RNA (1)...(19): siRNA sense strand
gccuggaaauagacucaga

SEQ ID NO: 1286582 - RNA, 19 nt, Homo sapiens
  misc_RNA (1)...(19): siRNA sense strand
gggauugugcuauggaaca

SEQ ID NO: 1286583 - RNA, 19 nt, Homo sapiens
  misc_RNA (1)...(19): siRNA sense strand
ggaagauuggcuggagaaa

SEQ ID NO: 1286584 - RNA, 19 nt, Homo sapiens
  misc_RNA (1)...(19): siRNA sense strand
ugaagaucucaaugaagua

SEQ ID NO: 1286585 - RNA, 19 nt, Homo sapiens
  misc_RNA (1)...(19): siRNA sense strand
gaagcccgaggcagaggaa

SEQ ID NO: 1286586 - RNA, 19 nt, Homo sapiens
  misc_RNA (1)...(19): siRNA sense strand
uuaaggugaugcccaaugc

SEQ ID NO: 1286587 - RNA, 19 nt, Homo sapiens
  misc_RNA (1)...(19): siRNA sense strand
ggagucagcaguggcaagu

SEQ ID NO: 1286588 - RNA, 19 nt, Homo sapiens
  misc_RNA (1)...(19): siRNA sense strand
guagaaacugaccacauag

SEQ ID NO: 1286589 - RNA, 19 nt, Homo sapiens
  misc_RNA (1)...(19): siRNA sense strand
uaaggacggugagcagcau

SEQ ID NO: 1286590 - RNA, 19 nt, Homo sapiens
  misc_RNA (1)...(19): siRNA sense strand
gugcuauggaacaucuuua

SEQ ID NO: 1286591 - RNA, 19 nt, Homo sapiens
  misc_RNA (1)...(19): siRNA sense strand
guaaaugcagagcuacaag

SEQ ID NO: 1286592 - RNA, 19 nt, Homo sapiens
  misc_RNA (1)...(19): siRNA sense strand
uguugugaguggaagauug

SEQ ID NO: 1286593 - RNA, 19 nt, Homo sapiens
  misc_RNA (1)...(19): siRNA sense strand
uggcaucagucaauguucu

SEQ ID NO: 1286594 - RNA, 19 nt, Homo sapiens
  misc_RNA (1)...(19): siRNA sense strand
gaagauuggcuggagaaaa

SEQ ID NO: 1286595 - RNA, 19 nt, Homo sapiens
  misc_RNA (1)...(19): siRNA sense strand
gcuucuacgauauaaaguu

SEQ ID NO: 1286596 - RNA, 19 nt, Homo sapiens
  misc_RNA (1)...(19): siRNA sense strand
gugagcagcaugaagaucu

SEQ ID NO: 1286597 - RNA, 19 nt, Homo sapiens
  misc_RNA (1)...(19): siRNA sense strand
agaaacugaccacauagug

SEQ ID NO: 1286598 - RNA, 19 nt, Homo sapiens
  misc_RNA (1)...(19): siRNA sense strand
ggccuggagcccaauguug

SEQ ID NO: 1286599 - RNA, 19 nt, Homo sapiens
  misc_RNA (1)...(19): siRNA sense strand
gccaauagcaaggaagauc

SEQ ID NO: 1286600 - RNA, 19 nt, Homo sapiens
  misc_RNA (1)...(19): siRNA sense strand
guuaaggugaugcccaaug

SEQ ID NO: 1286601 - RNA, 19 nt, Homo sapiens
  misc_RNA (1)...(19): siRNA sense strand
ggucuuguggacaguaguu

SEQ ID NO: 1286602 - RNA, 19 nt, Homo sapiens
  misc_RNA (1)...(19): siRNA sense strand
gggcacagaagugauucaa

SEQ ID NO: 1286603 - RNA, 19 nt, Homo sapiens
  misc_RNA (1)...(19): siRNA sense strand
guagccaaacuauucaaca

SEQ ID NO: 1286604 - RNA, 19 nt, Homo sapiens
  misc_RNA (1)...(19): siRNA sense strand
gcagcaugaagaucucaau

SEQ ID NO: 1286605 - RNA, 19 nt, Homo sapiens
  misc_RNA (1)...(19): siRNA sense strand
ggacggugagcagcaugaa

SEQ ID NO: 1286606 - RNA, 19 nt, Homo sapiens
  misc_RNA (1)...(19): siRNA sense strand
aaggugaugcccaaugcua

SEQ ID NO: 1286607 - RNA, 19 nt, Homo sapiens
  misc_RNA (1)...(19): siRNA sense strand
cagcaugaagaucucaaug

SEQ ID NO: 1286608 - RNA, 19 nt, Homo sapiens
  misc_RNA (1)...(19): siRNA sense strand
uuacuuaucaagcugaaag

SEQ ID NO: 1286609 - RNA, 19 nt, Homo sapiens
  misc_RNA (1)...(19): siRNA sense strand
acugguauccgaucagaga

SEQ ID NO: 1286610 - RNA, 19 nt, Homo sapiens
  misc_RNA (1)...(19): siRNA sense strand
gagcugcuaagccguacug

SEQ ID NO: 1286611 - RNA, 19 nt, Homo sapiens
  misc_RNA (1)...(19): siRNA sense strand
gcggguagagcaccaugau

SEQ ID NO: 1286612 - RNA, 19 nt, Homo sapiens
  misc_RNA (1)...(19): siRNA sense strand
gguagaaacugaccacaua

SEQ ID NO: 1286613 - RNA, 19 nt, Homo sapiens
  misc_RNA (1)...(19): siRNA sense strand
gcaaaggugucaucuucua

SEQ ID NO: 1286614 - RNA, 19 nt, Homo sapiens
  misc_RNA (1)...(19): siRNA sense strand
caaggaagaucauuaagga

SEQ ID NO: 1286615 - RNA, 19 nt, Homo sapiens
  misc_RNA (1)...(19): siRNA sense strand
gcaggaagguagaaacuga

SEQ ID NO: 1286616 - RNA, 19 nt, Homo sapiens
  misc_RNA (1)...(19): siRNA sense strand
gcaugaagaucucaaugaa

SEQ ID NO: 1286617 - RNA, 19 nt, Homo sapiens
  misc_RNA (1)...(19): siRNA sense strand
gaacaucuuuaaccgaaug

SEQ ID NO: 1286618 - RNA, 19 nt, Homo sapiens
  misc_RNA (1)...(19): siRNA sense strand
caacauucaugaagacuga

SEQ ID NO: 1286619 - RNA, 19 nt, Homo sapiens
  misc_RNA (1)...(19): siRNA sense strand
gcacagaagugauucaacu

SEQ ID NO: 1286620 - RNA, 19 nt, Homo sapiens
  misc_RNA (1)...(19): siRNA sense strand
gaacugguauccgaucaga

SEQ ID NO: 1286621 - RNA, 19 nt, Homo sapiens
  misc_RNA (1)...(19): siRNA sense strand
gaaagauccuccccgaaua

SEQ ID NO: 1286622 - RNA, 19 nt, Homo sapiens
  misc_RNA (1)...(19): siRNA sense strand
gauauaaaguugggaagga

SEQ ID NO: 1286623 - RNA, 19 nt, Homo sapiens
  misc_RNA (1)...(19): siRNA sense strand
gaucagagagugagacaga

SEQ ID NO: 1286624 - RNA, 19 nt, Homo sapiens
  misc_RNA (1)...(19): siRNA sense strand
ugaaguagccaaacuauuc

SEQ ID NO: 1286625 - RNA, 19 nt, Homo sapiens
  misc_RNA (1)...(19): siRNA sense strand
cggcaaaggugucaucuuc

SEQ ID NO: 1286626 - RNA, 19 nt, Homo sapiens
  misc_RNA (1)...(19): siRNA sense strand
gaaaggaaauaugggaaag

SEQ ID NO: 1286627 - RNA, 19 nt, Homo sapiens
  misc_RNA (1)...(19): siRNA sense strand
ucaauguucuggagugauu

SEQ ID NO: 1286628 - RNA, 19 nt, Homo sapiens
  misc_RNA (1)...(19): siRNA sense strand
agucagcaguggcaaguua

SEQ ID NO: 1286629 - RNA, 19 nt, Homo sapiens
  misc_RNA (1)...(19): siRNA sense strand
gccaaacuauucaacauuc

SEQ ID NO: 1286630 - RNA, 19 nt, Homo sapiens
  misc_RNA (1)...(19): siRNA sense strand
gauguuggcuaugaagcua

SEQ ID NO: 1286631 - RNA, 19 nt, Homo sapiens
  misc_RNA (1)...(19): siRNA sense strand
caagcacgcucuaacaucu

SEQ ID NO: 1286632 - RNA, 19 nt, Homo sapiens
  misc_RNA (1)...(19): siRNA sense strand
gcugcaugcuucuacgaua

SEQ ID NO: 1286633 - RNA, 19 nt, Homo sapiens
  misc_RNA (1)...(19): siRNA sense strand
gaaagacggcaggaaggua

SEQ ID NO: 1286634 - RNA, 19 nt, Homo sapiens
  misc_RNA (1)...(19): siRNA sense strand
uagcaaggaagaucauuaa

SEQ ID NO: 1286635 - RNA, 19 nt, Homo sapiens
  misc_RNA (1)...(19): siRNA sense strand
gcaccaugaucacgcuguu

SEQ ID NO: 1286636 - RNA, 19 nt, Homo sapiens
  misc_RNA (1)...(19): siRNA sense strand
gaaguagccaaacuauuca

SEQ ID NO: 1286637 - RNA, 19 nt, Homo sapiens
  misc_RNA (1)...(19): siRNA sense strand
uccgaggccucagaaauua

SEQ ID NO: 1286638 - RNA, 19 nt, Homo sapiens
  misc_RNA (1)...(19): siRNA sense strand
ggagcccaauguugaguug

SEQ ID NO: 1286639 - RNA, 19 nt, Homo sapiens
  misc_RNA (1)...(19): siRNA sense strand
caagacugguggccuggaa

SEQ ID NO: 1286640 - RNA, 19 nt, Homo sapiens
  misc_RNA (1)...(19): siRNA sense strand
gcaaggaagaucauuaagg

SEQ ID NO: 1286641 - RNA, 19 nt, Homo sapiens
  misc_RNA (1)...(19): siRNA sense strand
gaaugccaauagcaaggaa

SEQ ID NO: 1286642 - RNA, 19 nt, Homo sapiens
  misc_RNA (1)...(19): siRNA sense strand
gcaugcuucuacgauauaa

SEQ ID NO: 1286643 - RNA, 19 nt, Homo sapiens
  misc_RNA (1)...(19): siRNA sense strand
caaugaaguagccaaacua

SEQ ID NO: 1286644 - RNA, 19 nt, Homo sapiens
  misc_RNA (1)...(19): siRNA sense strand
ccgaauaccucagcaacug

SEQ ID NO: 1286645 - RNA, 19 nt, Homo sapiens
  misc_RNA (1)...(19): siRNA sense strand
cagaagugauucaacucuu

SEQ ID NO: 1286646 - RNA, 19 nt, Homo sapiens
  misc_RNA (1)...(19): siRNA sense strand
cuucuacgauauaaaguug

SEQ ID NO: 1286647 - RNA, 19 nt, Homo sapiens
  misc_RNA (1)...(19): siRNA sense strand
ucaaugaaguagccaaacu

SEQ ID NO: 1286648 - RNA, 19 nt, Homo sapiens
  misc_RNA (1)...(19): siRNA sense strand
augaagaucucaaugaagu

SEQ ID NO: 1286649 - RNA, 19 nt, Homo sapiens
  misc_RNA (1)...(19): siRNA sense strand
guccgaggccucagaaauu

SEQ ID NO: 1286650 - RNA, 19 nt, Homo sapiens
  misc_RNA (1)...(19): siRNA sense strand
ccggguaaaugcagagcua

SEQ ID NO: 1286651 - RNA, 19 nt, Homo sapiens
  misc_RNA (1)...(19): siRNA sense strand
gaagaucucaaugaaguag

SEQ ID NO: 1286652 - RNA, 19 nt, Homo sapiens
  misc_RNA (1)...(19): siRNA sense strand
ggguagagcaccaugauca

SEQ ID NO: 1286653 - RNA, 19 nt, Homo sapiens
  misc_RNA (1)...(19): siRNA sense strand
ccaaacuauucaacauuca

SEQ ID NO: 1286654 - RNA, 19 nt, Homo sapiens
  misc_RNA (1)...(19): siRNA sense strand
cuaugaagcuauuggucuu

SEQ ID NO: 1286655 - RNA, 19 nt, Homo sapiens
  misc_RNA (1)...(19): siRNA sense strand
ggaaagauccuccccgaau

SEQ ID NO: 1286656 - RNA, 19 nt, Homo sapiens
  misc_RNA (1)...(19): siRNA sense strand
uagccaaacuauucaacau

SEQ ID NO: 1286657 - RNA, 19 nt, Homo sapiens
  misc_RNA (1)...(19): siRNA sense strand
uuugguggcuuccggguaa

SEQ ID NO: 1286658 - RNA, 19 nt, Homo sapiens
  misc_RNA (1)...(19): siRNA sense strand
ccucagaaauuacuauucc

SEQ ID NO: 1286659 - RNA, 19 nt, Homo sapiens
  misc_RNA (1)...(19): siRNA sense strand
ggaacaucuuuaaccgaau

SEQ ID NO: 1286660 - RNA, 19 nt, Homo sapiens
  misc_RNA (1)...(19): siRNA sense strand
ggugaugcccaaugcuauu

SEQ ID NO: 1286661 - RNA, 19 nt, Homo sapiens
  misc_RNA (1)...(19): siRNA sense strand
aaggaaauaugggaaagau

SEQ ID NO: 1286662 - RNA, 19 nt, Homo sapiens
  misc_RNA (1)...(19): siRNA sense strand
agaaaggaaauaugggaaa

SEQ ID NO: 1286663 - RNA, 19 nt, Homo sapiens
  misc_RNA (1)...(19): siRNA sense strand
cuacaagcacgcucuaaca

SEQ ID NO: 1286664 - RNA, 19 nt, Homo sapiens
  misc_RNA (1)...(19): siRNA sense strand
cugcaugcuucuacgauau

SEQ ID NO: 1286665 - RNA, 19 nt, Homo sapiens
  misc_RNA (1)...(19): siRNA sense strand
gccuggagcccaauguuga

SEQ ID NO: 1286666 - RNA, 19 nt, Homo sapiens
  misc_RNA (1)...(19): siRNA sense strand
aagauuggcuggagaaaau

SEQ ID NO: 1286667 - RNA, 19 nt, Homo sapiens
  misc_RNA (1)...(19): siRNA sense strand
gguaaaugcagagcuacaa

SEQ ID NO: 1286668 - RNA, 19 nt, Homo sapiens
  misc_RNA (1)...(19): siRNA sense strand
ccaauagcaaggaagauca

SEQ ID NO: 1286669 - RNA, 19 nt, Homo sapiens
  misc_RNA (1)...(19): siRNA sense strand
ggauugugcuauggaacau

SEQ ID NO: 1286670 - RNA, 19 nt, Homo sapiens
  misc_RNA (1)...(19): siRNA sense strand
ggaggacuacggcaaaggu

SEQ ID NO: 1286671 - RNA, 19 nt, Homo sapiens
  misc_RNA (1)...(19): siRNA sense strand
auagcaaggaagaucauua

SEQ ID NO: 1286672 - RNA, 19 nt, Homo sapiens
  misc_RNA (1)...(19): siRNA sense strand
gcaacuggaccauggaaaa

SEQ ID NO: 1286673 - RNA, 19 nt, Homo sapiens
  misc_RNA (1)...(19): siRNA sense strand
cugguggccuggaaauaga

SEQ ID NO: 1286674 - RNA, 19 nt, Homo sapiens
  misc_RNA (1)...(19): siRNA sense strand
caaaagcaacugcacaaga

SEQ ID NO: 1286675 - RNA, 19 nt, Homo sapiens
  misc_RNA (1)...(19): siRNA sense strand
gccuggaaauagacucaga

SEQ ID NO: 1286676 - RNA, 19 nt, Homo sapiens
  misc_RNA (1)...(19): siRNA sense strand
gggauugugcuauggaaca

SEQ ID NO: 1286677 - RNA, 19 nt, Homo sapiens
  misc_RNA (1)...(19): siRNA sense strand
ggaagauuggcuggagaaa

SEQ ID NO: 1286678 - RNA, 19 nt, Homo sapiens
  misc_RNA (1)...(19): siRNA sense strand
ugaagaucucaaugaagua

SEQ ID NO: 1286679 - RNA, 19 nt, Homo sapiens
  misc_RNA (1)...(19): siRNA sense strand
gaagcccgaggcagaggaa

SEQ ID NO: 1286680 - RNA, 19 nt, Homo sapiens
  misc_RNA (1)...(19): siRNA sense strand
uuaaggugaugcccaaugc

SEQ ID NO: 1286681 - RNA, 19 nt, Homo sapiens
  misc_RNA (1)...(19): siRNA sense strand
ggagucagcaguggcaagu

SEQ ID NO: 1286682 - RNA, 19 nt, Homo sapiens
  misc_RNA (1)...(19): siRNA sense strand
guagaaacugaccacauag

SEQ ID NO: 1286683 - RNA, 19 nt, Homo sapiens
  misc_RNA (1)...(19): siRNA sense strand
uaaggacggugagcagcau

SEQ ID NO: 1286684 - RNA, 19 nt, Homo sapiens
  misc_RNA (1)...(19): siRNA sense strand
gugcuauggaacaucuuua

SEQ ID NO: 1286685 - RNA, 19 nt, Homo sapiens
  misc_RNA (1)...(19): siRNA sense strand
guaaaugcagagcuacaag

SEQ ID NO: 1286686 - RNA, 19 nt, Homo sapiens
  misc_RNA (1)...(19): siRNA sense strand
uguugugaguggaagauug

SEQ ID NO: 1286687 - RNA, 19 nt, Homo sapiens
  misc_RNA (1)...(19): siRNA sense strand
uggcaucagucaauguucu

SEQ ID NO: 1286688 - RNA, 19 nt, Homo sapiens
  misc_RNA (1)...(19): siRNA sense strand
gaagauuggcuggagaaaa

SEQ ID NO: 1286689 - RNA, 19 nt, Homo sapiens
  misc_RNA (1)...(19): siRNA sense strand
gcuucuacgauauaaaguu

SEQ ID NO: 1286690 - RNA, 19 nt, Homo sapiens
  misc_RNA (1)...(19): siRNA sense strand
gugagcagcaugaagaucu

SEQ ID NO: 1286691 - RNA, 19 nt, Homo sapiens
  misc_RNA (1)...(19): siRNA sense strand
agaaacugaccacauagug

SEQ ID NO: 1286692 - RNA, 19 nt, Homo sapiens
  misc_RNA (1)...(19): siRNA sense strand
ggccuggagcccaauguug

SEQ ID NO: 1286693 - RNA, 19 nt, Homo sapiens
  misc_RNA (1)...(19): siRNA sense strand
gccaauagcaaggaagauc

SEQ ID NO: 1286694 - RNA, 19 nt, Homo sapiens
  misc_RNA (1)...(19): siRNA sense strand
guuaaggugaugcccaaug

SEQ ID NO: 1286695 - RNA, 19 nt, Homo sapiens
  misc_RNA (1)...(19): siRNA sense strand
ggucuuguggacaguaguu

SEQ ID NO: 1286696 - RNA, 19 nt, Homo sapiens
  misc_RNA (1)...(19): siRNA sense strand
gggcacagaagugauucaa

SEQ ID NO: 1286697 - RNA, 19 nt, Homo sapiens
  misc_RNA (1)...(19): siRNA sense strand
guagccaaacuauucaaca

SEQ ID NO: 1286698 - RNA, 19 nt, Homo sapiens
  misc_RNA (1)...(19): siRNA sense strand
gcagcaugaagaucucaau

SEQ ID NO: 1286699 - RNA, 19 nt, Homo sapiens
  misc_RNA (1)...(19): siRNA sense strand
ggacggugagcagcaugaa

SEQ ID NO: 1286700 - RNA, 19 nt, Homo sapiens
  misc_RNA (1)...(19): siRNA sense strand
aaggugaugcccaaugcua

SEQ ID NO: 1286701 - RNA, 19 nt, Homo sapiens
  misc_RNA (1)...(19): siRNA sense strand
cagcaugaagaucucaaug

SEQ ID NO: 1286702 - RNA, 19 nt, Homo sapiens
  misc_RNA (1)...(19): siRNA sense strand
uuacuuaucaagcugaaag

SEQ ID NO: 1286703 - RNA, 19 nt, Homo sapiens
  misc_RNA (1)...(19): siRNA sense strand
acugguauccgaucagaga

SEQ ID NO: 1286704 - RNA, 19 nt, Homo sapiens
  misc_RNA (1)...(19): siRNA sense strand
gagcugcuaagccguacug

SEQ ID NO: 1286705 - RNA, 19 nt, Homo sapiens
  misc_RNA (1)...(19): siRNA sense strand
gcggguagagcaccaugau

SEQ ID NO: 1286706 - RNA, 19 nt, Homo sapiens
  misc_RNA (1)...(19): siRNA sense strand
gguagaaacugaccacaua

SEQ ID NO: 1286707 - RNA, 19 nt, Homo sapiens
  misc_RNA (1)...(19): siRNA sense strand
gcaaaggugucaucuucua

SEQ ID NO: 1286708 - RNA, 19 nt, Homo sapiens
  misc_RNA (1)...(19): siRNA sense strand
caaggaagaucauuaagga

SEQ ID NO: 1286709 - RNA, 19 nt, Homo sapiens
  misc_RNA (1)...(19): siRNA sense strand
gcaggaagguagaaacuga

SEQ ID NO: 1286710 - RNA, 19 nt, Homo sapiens
  misc_RNA (1)...(19): siRNA sense strand
gcaugaagaucucaaugaa

SEQ ID NO: 1286711 - RNA, 19 nt, Homo sapiens
  misc_RNA (1)...(19): siRNA sense strand
gaacaucuuuaaccgaaug

SEQ ID NO: 1286712 - RNA, 19 nt, Homo sapiens
  misc_RNA (1)...(19): siRNA sense strand
caacauucaugaagacuga

SEQ ID NO: 1286713 - RNA, 19 nt, Homo sapiens
  misc_RNA (1)...(19): siRNA sense strand
gcacagaagugauucaacu

SEQ ID NO: 1286714 - RNA, 19 nt, Homo sapiens
  misc_RNA (1)...(19): siRNA sense strand
gaacugguauccgaucaga

SEQ ID NO: 1286715 - RNA, 19 nt, Homo sapiens
  misc_RNA (1)...(19): siRNA sense strand
gaaagauccuccccgaaua

SEQ ID NO: 1286716 - RNA, 19 nt, Homo sapiens
  misc_RNA (1)...(19): siRNA sense strand
gauauaaaguugggaagga

SEQ ID NO: 1286717 - RNA, 19 nt, Homo sapiens
  misc_RNA (1)...(19): siRNA sense strand
gaucagagagugagacaga

SEQ ID NO: 1286718 - RNA, 19 nt, Homo sapiens
  misc_RNA (1)...(19): siRNA sense strand
ugaaguagccaaacuauuc

SEQ ID NO: 1286719 - RNA, 19 nt, Homo sapiens
  misc_RNA (1)...(19): siRNA sense strand
cggcaaaggugucaucuuc

SEQ ID NO: 1286720 - RNA, 19 nt, Homo sapiens
  misc_RNA (1)...(19): siRNA sense strand
gaaaggaaauaugggaaag

SEQ ID NO: 1286721 - RNA, 19 nt, Homo sapiens
  misc_RNA (1)...(19): siRNA sense strand
ucaauguucuggagugauu

SEQ ID NO: 1286722 - RNA, 19 nt, Homo sapiens
  misc_RNA (1)...(19): siRNA sense strand
agucagcaguggcaaguua

SEQ ID NO: 1286723 - RNA, 19 nt, Homo sapiens
  misc_RNA (1)...(19): siRNA sense strand
gccaaacuauucaacauuc

SEQ ID NO: 1286724 - RNA, 19 nt, Homo sapiens
  misc_RNA (1)...(19): siRNA sense strand
gauguuggcuaugaagcua

SEQ ID NO: 1286725 - RNA, 19 nt, Homo sapiens
  misc_RNA (1)...(19): siRNA sense strand
caagcacgcucuaacaucu

SEQ ID NO: 1286726 - RNA, 19 nt, Homo sapiens
  misc_RNA (1)...(19): siRNA sense strand
gcugcaugcuucuacgaua

SEQ ID NO: 1286727 - RNA, 19 nt, Homo sapiens
  misc_RNA (1)...(19): siRNA sense strand
gaaagacggcaggaaggua

SEQ ID NO: 1286728 - RNA, 19 nt, Homo sapiens
  misc_RNA (1)...(19): siRNA sense strand
uagcaaggaagaucauuaa

SEQ ID NO: 1286729 - RNA, 19 nt, Homo sapiens
  misc_RNA (1)...(19): siRNA sense strand
gcaccaugaucacgcuguu

SEQ ID NO: 1286730 - RNA, 19 nt, Homo sapiens
  misc_RNA (1)...(19): siRNA sense strand
gaaguagccaaacuauuca

SEQ ID NO: 1286731 - RNA, 19 nt, Homo sapiens
  misc_RNA (1)...(19): siRNA sense strand
uccgaggccucagaaauua

SEQ ID NO: 1286732 - RNA, 19 nt, Homo sapiens
  misc_RNA (1)...(19): siRNA sense strand
ggagcccaauguugaguug

SEQ ID NO: 1286733 - RNA, 19 nt, Homo sapiens
  misc_RNA (1)...(19): siRNA sense strand
caagacugguggccuggaa

SEQ ID NO: 1286734 - RNA, 19 nt, Homo sapiens
  misc_RNA (1)...(19): siRNA sense strand
gcaaggaagaucauuaagg

SEQ ID NO: 1286735 - RNA, 19 nt, Homo sapiens
  misc_RNA (1)...(19): siRNA sense strand
gaaugccaauagcaaggaa

SEQ ID NO: 1286736 - RNA, 19 nt, Homo sapiens
  misc_RNA (1)...(19): siRNA sense strand
gcaugcuucuacgauauaa

SEQ ID NO: 1286737 - RNA, 19 nt, Homo sapiens
  misc_RNA (1)...(19): siRNA sense strand
caaugaaguagccaaacua

SEQ ID NO: 1286738 - RNA, 19 nt, Homo sapiens
  misc_RNA (1)...(19): siRNA sense strand
ccgaauaccucagcaacug

SEQ ID NO: 1286739 - RNA, 19 nt, Homo sapiens
  misc_RNA (1)...(19): siRNA sense strand
cagaagugauucaacucuu

SEQ ID NO: 1286740 - RNA, 19 nt, Homo sapiens
  misc_RNA (1)...(19): siRNA sense strand
cuucuacgauauaaaguug

SEQ ID NO: 1286741 - RNA, 19 nt, Homo sapiens
  misc_RNA (1)...(19): siRNA sense strand
ucaaugaaguagccaaacu

SEQ ID NO: 1286742 - RNA, 19 nt, Homo sapiens
  misc_RNA (1)...(19): siRNA sense strand
augaagaucucaaugaagu

SEQ ID NO: 1286743 - RNA, 19 nt, Homo sapiens
  misc_RNA (1)...(19): siRNA sense strand
guccgaggccucagaaauu

SEQ ID NO: 1286744 - RNA, 19 nt, Homo sapiens
  misc_RNA (1)...(19): siRNA sense strand
ccggguaaaugcagagcua

SEQ ID NO: 1286745 - RNA, 19 nt, Homo sapiens
  misc_RNA (1)...(19): siRNA sense strand
gaagaucucaaugaaguag

SEQ ID NO: 1286746 - RNA, 19 nt, Homo sapiens
  misc_RNA (1)...(19): siRNA sense strand
ggguagagcaccaugauca

SEQ ID NO: 1286747 - RNA, 19 nt, Homo sapiens
  misc_RNA (1)...(19): siRNA sense strand
ccaaacuauucaacauuca

SEQ ID NO: 1286748 - RNA, 19 nt, Homo sapiens
  misc_RNA (1)...(19): siRNA sense strand
cuaugaagcuauuggucuu

SEQ ID NO: 1286749 - RNA, 19 nt, Homo sapiens
  misc_RNA (1)...(19): siRNA sense strand
ggaaagauccuccccgaau

SEQ ID NO: 1286750 - RNA, 19 nt, Homo sapiens
  misc_RNA (1)...(19): siRNA sense strand
uagccaaacuauucaacau

SEQ ID NO: 1286751 - RNA, 19 nt, Homo sapiens
  misc_RNA (1)...(19): siRNA sense strand
uuugguggcuuccggguaa

SEQ ID NO: 1286752 - RNA, 19 nt, Homo sapiens
  misc_RNA (1)...(19): siRNA sense strand
ccucagaaauuacuauucc

SEQ ID NO: 1286753 - RNA, 19 nt, Homo sapiens
  misc_RNA (1)...(19): siRNA sense strand
ggaacaucuuuaaccgaau

SEQ ID NO: 1286754 - RNA, 19 nt, Homo sapiens
  misc_RNA (1)...(19): siRNA sense strand
ggugaugcccaaugcuauu

SEQ ID NO: 1286755 - RNA, 19 nt, Homo sapiens
  misc_RNA (1)...(19): siRNA sense strand
aaggaaauaugggaaagau

SEQ ID NO: 1286756 - RNA, 19 nt, Homo sapiens
  misc_RNA (1)...(19): siRNA sense strand
agaaaggaaauaugggaaa

SEQ ID NO: 1286757 - RNA, 19 nt, Homo sapiens
  misc_RNA (1)...(19): siRNA sense strand
cuacaagcacgcucuaaca

SEQ ID NO: 1286758 - RNA, 19 nt, Homo sapiens
  misc_RNA (1)...(19): siRNA sense strand
cugcaugcuucuacgauau

SEQ ID NO: 1286759 - RNA, 19 nt, Homo sapiens
  misc_RNA (1)...(19): siRNA sense strand
gccuggagcccaauguuga

SEQ ID NO: 1286760 - RNA, 19 nt, Homo sapiens
  misc_RNA (1)...(19): siRNA sense strand
aagauuggcuggagaaaau

SEQ ID NO: 1286761 - RNA, 19 nt, Homo sapiens
  misc_RNA (1)...(19): siRNA sense strand
gguaaaugcagagcuacaa

SEQ ID NO: 1286762 - RNA, 19 nt, Homo sapiens
  misc_RNA (1)...(19): siRNA sense strand
ccaauagcaaggaagauca

SEQ ID NO: 1286763 - RNA, 19 nt, Homo sapiens
  misc_RNA (1)...(19): siRNA sense strand
ggauugugcuauggaacau

SEQ ID NO: 1286764 - RNA, 19 nt, Homo sapiens
  misc_RNA (1)...(19): siRNA sense strand
ggaggacuacggcaaaggu

SEQ ID NO: 1286765 - RNA, 19 nt, Homo sapiens
  misc_RNA (1)...(19): siRNA sense strand
auagcaaggaagaucauua

SEQ ID NO: 1286766 - RNA, 19 nt, Homo sapiens
  misc_RNA (1)...(19): siRNA sense strand
gcaacuggaccauggaaaa

SEQ ID NO: 1286767 - RNA, 19 nt, Homo sapiens
  misc_RNA (1)...(19): siRNA sense strand
cugguggccuggaaauaga

SEQ ID NO: 1286768 - RNA, 19 nt, Homo sapiens
  misc_RNA (1)...(19): siRNA sense strand
caaaagcaacugcacaaga

SEQ ID NO: 1286769 - RNA, 19 nt, Homo sapiens
  misc_RNA (1)...(19): siRNA sense strand
gccuggaaauagacucaga

SEQ ID NO: 1286770 - RNA, 19 nt, Homo sapiens
  misc_RNA (1)...(19): siRNA sense strand
gggauugugcuauggaaca

SEQ ID NO: 1286771 - RNA, 19 nt, Homo sapiens
  misc_RNA (1)...(19): siRNA sense strand
ggaagauuggcuggagaaa

SEQ ID NO: 1286772 - RNA, 19 nt, Homo sapiens
  misc_RNA (1)...(19): siRNA sense strand
ugaagaucucaaugaagua

SEQ ID NO: 1286773 - RNA, 19 nt, Homo sapiens
  misc_RNA (1)...(19): siRNA sense strand
gaagcccgaggcagaggaa

SEQ ID NO: 1286774 - RNA, 19 nt, Homo sapiens
  misc_RNA (1)...(19): siRNA sense strand
uuaaggugaugcccaaugc

SEQ ID NO: 1286775 - RNA, 19 nt, Homo sapiens
  misc_RNA (1)...(19): siRNA sense strand
ggagucagcaguggcaagu

SEQ ID NO: 1286776 - RNA, 19 nt, Homo sapiens
  misc_RNA (1)...(19): siRNA sense strand
guagaaacugaccacauag

SEQ ID NO: 1286777 - RNA, 19 nt, Homo sapiens
  misc_RNA (1)...(19): siRNA sense strand
uaaggacggugagcagcau

SEQ ID NO: 1286778 - RNA, 19 nt, Homo sapiens
  misc_RNA (1)...(19): siRNA sense strand
gugcuauggaacaucuuua

SEQ ID NO: 1286779 - RNA, 19 nt, Homo sapiens
  misc_RNA (1)...(19): siRNA sense strand
guaaaugcagagcuacaag

SEQ ID NO: 1286780 - RNA, 19 nt, Homo sapiens
  misc_RNA (1)...(19): siRNA sense strand
uguugugaguggaagauug

SEQ ID NO: 1286781 - RNA, 19 nt, Homo sapiens
  misc_RNA (1)...(19): siRNA sense strand
uggcaucagucaauguucu

SEQ ID NO: 1286782 - RNA, 19 nt, Homo sapiens
  misc_RNA (1)...(19): siRNA sense strand
gaagauuggcuggagaaaa

SEQ ID NO: 1286783 - RNA, 19 nt, Homo sapiens
  misc_RNA (1)...(19): siRNA sense strand
gcuucuacgauauaaaguu

SEQ ID NO: 1286784 - RNA, 19 nt, Homo sapiens
  misc_RNA (1)...(19): siRNA sense strand
gugagcagcaugaagaucu

SEQ ID NO: 1286785 - RNA, 19 nt, Homo sapiens
  misc_RNA (1)...(19): siRNA sense strand
agaaacugaccacauagug

SEQ ID NO: 1286786 - RNA, 19 nt, Homo sapiens
  misc_RNA (1)...(19): siRNA sense strand
ggccuggagcccaauguug

SEQ ID NO: 1286787 - RNA, 19 nt, Homo sapiens
  misc_RNA (1)...(19): siRNA sense strand
gccaauagcaaggaagauc

SEQ ID NO: 1286788 - RNA, 19 nt, Homo sapiens
  misc_RNA (1)...(19): siRNA sense strand
guuaaggugaugcccaaug

SEQ ID NO: 1286789 - RNA, 19 nt, Homo sapiens
  misc_RNA (1)...(19): siRNA sense strand
ggucuuguggacaguaguu

SEQ ID NO: 1286790 - RNA, 19 nt, Homo sapiens
  misc_RNA (1)...(19): siRNA sense strand
gggcacagaagugauucaa

SEQ ID NO: 1286791 - RNA, 19 nt, Homo sapiens
  misc_RNA (1)...(19): siRNA sense strand
guagccaaacuauucaaca

SEQ ID NO: 1286792 - RNA, 19 nt, Homo sapiens
  misc_RNA (1)...(19): siRNA sense strand
gcagcaugaagaucucaau

SEQ ID NO: 1286793 - RNA, 19 nt, Homo sapiens
  misc_RNA (1)...(19): siRNA sense strand
ggacggugagcagcaugaa

SEQ ID NO: 1286794 - RNA, 19 nt, Homo sapiens
  misc_RNA (1)...(19): siRNA sense strand
aaggugaugcccaaugcua

SEQ ID NO: 1286795 - RNA, 19 nt, Homo sapiens
  misc_RNA (1)...(19): siRNA sense strand
cagcaugaagaucucaaug

SEQ ID NO: 1286796 - RNA, 19 nt, Homo sapiens
  misc_RNA (1)...(19): siRNA sense strand
uuacuuaucaagcugaaag

SEQ ID NO: 1286797 - RNA, 19 nt, Homo sapiens
  misc_RNA (1)...(19): siRNA sense strand
acugguauccgaucagaga

SEQ ID NO: 1286798 - RNA, 19 nt, Homo sapiens
  misc_RNA (1)...(19): siRNA sense strand
gagcugcuaagccguacug

SEQ ID NO: 1286799 - RNA, 19 nt, Homo sapiens
  misc_RNA (1)...(19): siRNA sense strand
gcggguagagcaccaugau

SEQ ID NO: 1286800 - RNA, 19 nt, Homo sapiens
  misc_RNA (1)...(19): siRNA sense strand
gguagaaacugaccacaua

SEQ ID NO: 1286801 - RNA, 19 nt, Homo sapiens
  misc_RNA (1)...(19): siRNA sense strand
gcaaaggugucaucuucua

SEQ ID NO: 1286802 - RNA, 19 nt, Homo sapiens
  misc_RNA (1)...(19): siRNA sense strand
caaggaagaucauuaagga

SEQ ID NO: 1286803 - RNA, 19 nt, Homo sapiens
  misc_RNA (1)...(19): siRNA sense strand
gcaggaagguagaaacuga

SEQ ID NO: 1286804 - RNA, 19 nt, Homo sapiens
  misc_RNA (1)...(19): siRNA sense strand
gcaugaagaucucaaugaa

SEQ ID NO: 1286805 - RNA, 19 nt, Homo sapiens
  misc_RNA (1)...(19): siRNA sense strand
gaacaucuuuaaccgaaug

SEQ ID NO: 1286806 - RNA, 19 nt, Homo sapiens
  misc_RNA (1)...(19): siRNA sense strand
caacauucaugaagacuga

SEQ ID NO: 1286807 - RNA, 19 nt, Homo sapiens
  misc_RNA (1)...(19): siRNA sense strand
gcacagaagugauucaacu

SEQ ID NO: 1286808 - RNA, 19 nt, Homo sapiens
  misc_RNA (1)...(19): siRNA sense strand
gaacugguauccgaucaga

SEQ ID NO: 1286809 - RNA, 19 nt, Homo sapiens
  misc_RNA (1)...(19): siRNA sense strand
gaaagauccuccccgaaua

SEQ ID NO: 1286810 - RNA, 19 nt, Homo sapiens
  misc_RNA (1)...(19): siRNA sense strand
gauauaaaguugggaagga

SEQ ID NO: 1286811 - RNA, 19 nt, Homo sapiens
  misc_RNA (1)...(19): siRNA sense strand
gaucagagagugagacaga

SEQ ID NO: 1286812 - RNA, 19 nt, Homo sapiens
  misc_RNA (1)...(19): siRNA sense strand
ugaaguagccaaacuauuc

SEQ ID NO: 1286813 - RNA, 19 nt, Homo sapiens
  misc_RNA (1)...(19): siRNA sense strand
cggcaaaggugucaucuuc

SEQ ID NO: 1286814 - RNA, 19 nt, Homo sapiens
  misc_RNA (1)...(19): siRNA sense strand
gaaaggaaauaugggaaag

SEQ ID NO: 1286815 - RNA, 19 nt, Homo sapiens
  misc_RNA (1)...(19): siRNA sense strand
ucaauguucuggagugauu

SEQ ID NO: 1286816 - RNA, 19 nt, Homo sapiens
  misc_RNA (1)...(19): siRNA sense strand
agucagcaguggcaaguua

SEQ ID NO: 1286817 - RNA, 19 nt, Homo sapiens
  misc_RNA (1)...(19): siRNA sense strand
gccaaacuauucaacauuc

SEQ ID NO: 1286818 - RNA, 19 nt, Homo sapiens
  misc_RNA (1)...(19): siRNA sense strand
gauguuggcuaugaagcua

SEQ ID NO: 1286819 - RNA, 19 nt, Homo sapiens
  misc_RNA (1)...(19): siRNA sense strand
caagcacgcucuaacaucu

SEQ ID NO: 1286820 - RNA, 19 nt, Homo sapiens
  misc_RNA (1)...(19): siRNA sense strand
gcugcaugcuucuacgaua

SEQ ID NO: 1286821 - RNA, 19 nt, Homo sapiens
  misc_RNA (1)...(19): siRNA sense strand
gaaagacggcaggaaggua

SEQ ID NO: 1286822 - RNA, 19 nt, Homo sapiens
  misc_RNA (1)...(19): siRNA sense strand
uagcaaggaagaucauuaa

SEQ ID NO: 1286823 - RNA, 19 nt, Homo sapiens
  misc_RNA (1)...(19): siRNA sense strand
gcaccaugaucacgcuguu

SEQ ID NO: 1286824 - RNA, 19 nt, Homo sapiens
  misc_RNA (1)...(19): siRNA sense strand
gaaguagccaaacuauuca

SEQ ID NO: 1286825 - RNA, 19 nt, Homo sapiens
  misc_RNA (1)...(19): siRNA sense strand
uccgaggccucagaaauua

SEQ ID NO: 1286826 - RNA, 19 nt, Homo sapiens
  misc_RNA (1)...(19): siRNA sense strand
ggagcccaauguugaguug

SEQ ID NO: 1286827 - RNA, 19 nt, Homo sapiens
  misc_RNA (1)...(19): siRNA sense strand
caagacugguggccuggaa

SEQ ID NO: 1286828 - RNA, 19 nt, Homo sapiens
  misc_RNA (1)...(19): siRNA sense strand
gcaaggaagaucauuaagg

SEQ ID NO: 1286829 - RNA, 19 nt, Homo sapiens
  misc_RNA (1)...(19): siRNA sense strand
gaaugccaauagcaaggaa

SEQ ID NO: 1286830 - RNA, 19 nt, Homo sapiens
  misc_RNA (1)...(19): siRNA sense strand
gcaugcuucuacgauauaa

SEQ ID NO: 1286831 - RNA, 19 nt, Homo sapiens
  misc_RNA (1)...(19): siRNA sense strand
caaugaaguagccaaacua

SEQ ID NO: 1286832 - RNA, 19 nt, Homo sapiens
  misc_RNA (1)...(19): siRNA sense strand
ccgaauaccucagcaacug

SEQ ID NO: 1286833 - RNA, 19 nt, Homo sapiens
  misc_RNA (1)...(19): siRNA sense strand
cagaagugauucaacucuu

SEQ ID NO: 1286834 - RNA, 19 nt, Homo sapiens
  misc_RNA (1)...(19): siRNA sense strand
cuucuacgauauaaaguug

SEQ ID NO: 1286835 - RNA, 19 nt, Homo sapiens
  misc_RNA (1)...(19): siRNA sense strand
ucaaugaaguagccaaacu

SEQ ID NO: 1286836 - RNA, 19 nt, Homo sapiens
  misc_RNA (1)...(19): siRNA sense strand
augaagaucucaaugaagu

SEQ ID NO: 1286837 - RNA, 19 nt, Homo sapiens
  misc_RNA (1)...(19): siRNA sense strand
guccgaggccucagaaauu

SEQ ID NO: 1286838 - RNA, 19 nt, Homo sapiens
  misc_RNA (1)...(19): siRNA sense strand
ccggguaaaugcagagcua

SEQ ID NO: 1286839 - RNA, 19 nt, Homo sapiens
  misc_RNA (1)...(19): siRNA sense strand
gaagaucucaaugaaguag

SEQ ID NO: 1286840 - RNA, 19 nt, Homo sapiens
  misc_RNA (1)...(19): siRNA sense strand
ggguagagcaccaugauca

SEQ ID NO: 1286841 - RNA, 19 nt, Homo sapiens
  misc_RNA (1)...(19): siRNA sense strand
ccaaacuauucaacauuca

SEQ ID NO: 1286842 - RNA, 19 nt, Homo sapiens
  misc_RNA (1)...(19): siRNA sense strand
cuaugaagcuauuggucuu

SEQ ID NO: 1286843 - RNA, 19 nt, Homo sapiens
  misc_RNA (1)...(19): siRNA sense strand
ggaaagauccuccccgaau

SEQ ID NO: 1286844 - RNA, 19 nt, Homo sapiens
  misc_RNA (1)...(19): siRNA sense strand
uagccaaacuauucaacau

SEQ ID NO: 1286845 - RNA, 19 nt, Homo sapiens
  misc_RNA (1)...(19): siRNA sense strand
uuugguggcuuccggguaa

SEQ ID NO: 1286846 - RNA, 19 nt, Homo sapiens
  misc_RNA (1)...(19): siRNA sense strand
ccucagaaauuacuauucc

SEQ ID NO: 1286847 - RNA, 19 nt, Homo sapiens
  misc_RNA (1)...(19): siRNA sense strand
ggaacaucuuuaaccgaau

SEQ ID NO: 1286848 - RNA, 19 nt, Homo sapiens
  misc_RNA (1)...(19): siRNA sense strand
ggugaugcccaaugcuauu

SEQ ID NO: 1286849 - RNA, 19 nt, Homo sapiens
  misc_RNA (1)...(19): siRNA sense strand
aaggaaauaugggaaagau

SEQ ID NO: 1286850 - RNA, 19 nt, Homo sapiens
  misc_RNA (1)...(19): siRNA sense strand
agaaaggaaauaugggaaa

SEQ ID NO: 1286851 - RNA, 19 nt, Homo sapiens
  misc_RNA (1)...(19): siRNA sense strand
cuacaagcacgcucuaaca

SEQ ID NO: 1286852 - RNA, 19 nt, Homo sapiens
  misc_RNA (1)...(19): siRNA sense strand
cugcaugcuucuacgauau

SEQ ID NO: 1286853 - RNA, 19 nt, Homo sapiens
  misc_RNA (1)...(19): siRNA sense strand
gccuggagcccaauguuga

SEQ ID NO: 1286854 - RNA, 19 nt, Homo sapiens
  misc_RNA (1)...(19): siRNA sense strand
aagauuggcuggagaaaau

SEQ ID NO: 1286855 - RNA, 19 nt, Homo sapiens
  misc_RNA (1)...(19): siRNA sense strand
gguaaaugcagagcuacaa

SEQ ID NO: 1286856 - RNA, 19 nt, Homo sapiens
  misc_RNA (1)...(19): siRNA sense strand
ccaauagcaaggaagauca

SEQ ID NO: 1286857 - RNA, 19 nt, Homo sapiens
  misc_RNA (1)...(19): siRNA sense strand
ggauugugcuauggaacau

SEQ ID NO: 1286858 - RNA, 19 nt, Homo sapiens
  misc_RNA (1)...(19): siRNA sense strand
ggaggacuacggcaaaggu

SEQ ID NO: 1286859 - RNA, 19 nt, Homo sapiens
  misc_RNA (1)...(19): siRNA sense strand
auagcaaggaagaucauua

SEQ ID NO: 1286860 - RNA, 19 nt, Homo sapiens
  misc_RNA (1)...(19): siRNA sense strand
gcaacuggaccauggaaaa

SEQ ID NO: 1286861 - RNA, 19 nt, Homo sapiens
  misc_RNA (1)...(19): siRNA sense strand
cugguggccuggaaauaga

SEQ ID NO: 1286862 - RNA, 19 nt, Homo sapiens
  misc_RNA (1)...(19): siRNA sense strand
caaaagcaacugcacaaga

SEQ ID NO: 1286863 - RNA, 19 nt, Homo sapiens
  misc_RNA (1)...(19): siRNA sense strand
gccuggaaauagacucaga

SEQ ID NO: 1286864 - RNA, 19 nt, Homo sapiens
  misc_RNA (1)...(19): siRNA sense strand
gggauugugcuauggaaca

SEQ ID NO: 1286865 - RNA, 19 nt, Homo sapiens
  misc_RNA (1)...(19): siRNA sense strand
ggaagauuggcuggagaaa

SEQ ID NO: 1286866 - RNA, 19 nt, Homo sapiens
  misc_RNA (1)...(19): siRNA sense strand
ugaagaucucaaugaagua

SEQ ID NO: 1286867 - RNA, 19 nt, Homo sapiens
  misc_RNA (1)...(19): siRNA sense strand
gaagcccgaggcagaggaa

SEQ ID NO: 1286868 - RNA, 19 nt, Homo sapiens
  misc_RNA (1)...(19): siRNA sense strand
uuaaggugaugcccaaugc

SEQ ID NO: 1286869 - RNA, 19 nt, Homo sapiens
  misc_RNA (1)...(19): siRNA sense strand
ggagucagcaguggcaagu

SEQ ID NO: 1286870 - RNA, 19 nt, Homo sapiens
  misc_RNA (1)...(19): siRNA sense strand
guagaaacugaccacauag

SEQ ID NO: 1286871 - RNA, 19 nt, Homo sapiens
  misc_RNA (1)...(19): siRNA sense strand
uaaggacggugagcagcau

SEQ ID NO: 1286872 - RNA, 19 nt, Homo sapiens
  misc_RNA (1)...(19): siRNA sense strand
gugcuauggaacaucuuua

SEQ ID NO: 1286873 - RNA, 19 nt, Homo sapiens
  misc_RNA (1)...(19): siRNA sense strand
guaaaugcagagcuacaag

SEQ ID NO: 1286874 - RNA, 19 nt, Homo sapiens
  misc_RNA (1)...(19): siRNA sense strand
uguugugaguggaagauug

SEQ ID NO: 1286875 - RNA, 19 nt, Homo sapiens
  misc_RNA (1)...(19): siRNA sense strand
uggcaucagucaauguucu

SEQ ID NO: 1286876 - RNA, 19 nt, Homo sapiens
  misc_RNA (1)...(19): siRNA sense strand
gaagauuggcuggagaaaa

SEQ ID NO: 1286877 - RNA, 19 nt, Homo sapiens
  misc_RNA (1)...(19): siRNA sense strand
gcuucuacgauauaaaguu

SEQ ID NO: 1286878 - RNA, 19 nt, Homo sapiens
  misc_RNA (1)...(19): siRNA sense strand
gugagcagcaugaagaucu

SEQ ID NO: 1286879 - RNA, 19 nt, Homo sapiens
  misc_RNA (1)...(19): siRNA sense strand
agaaacugaccacauagug

SEQ ID NO: 1286880 - RNA, 19 nt, Homo sapiens
  misc_RNA (1)...(19): siRNA sense strand
ggccuggagcccaauguug

SEQ ID NO: 1286881 - RNA, 19 nt, Homo sapiens
  misc_RNA (1)...(19): siRNA sense strand
gccaauagcaaggaagauc

SEQ ID NO: 1286882 - RNA, 19 nt, Homo sapiens
  misc_RNA (1)...(19): siRNA sense strand
guuaaggugaugcccaaug

SEQ ID NO: 1286883 - RNA, 19 nt, Homo sapiens
  misc_RNA (1)...(19): siRNA sense strand
ggucuuguggacaguaguu

SEQ ID NO: 1286884 - RNA, 19 nt, Homo sapiens
  misc_RNA (1)...(19): siRNA sense strand
gggcacagaagugauucaa

SEQ ID NO: 1286885 - RNA, 19 nt, Homo sapiens
  misc_RNA (1)...(19): siRNA sense strand
guagccaaacuauucaaca

SEQ ID NO: 1286886 - RNA, 19 nt, Homo sapiens
  misc_RNA (1)...(19): siRNA sense strand
gcagcaugaagaucucaau

SEQ ID NO: 1286887 - RNA, 19 nt, Homo sapiens
  misc_RNA (1)...(19): siRNA sense strand
ggacggugagcagcaugaa

SEQ ID NO: 1286888 - RNA, 19 nt, Homo sapiens
  misc_RNA (1)...(19): siRNA sense strand
aaggugaugcccaaugcua

SEQ ID NO: 1286889 - RNA, 19 nt, Homo sapiens
  misc_RNA (1)...(19): siRNA sense strand
cagcaugaagaucucaaug

SEQ ID NO: 1286890 - RNA, 19 nt, Homo sapiens
  misc_RNA (1)...(19): siRNA sense strand
uuacuuaucaagcugaaag

SEQ ID NO: 1286891 - RNA, 19 nt, Homo sapiens
  misc_RNA (1)...(19): siRNA sense strand
acugguauccgaucagaga

SEQ ID NO: 1286892 - RNA, 19 nt, Homo sapiens
  misc_RNA (1)...(19): siRNA sense strand
gagcugcuaagccguacug

SEQ ID NO: 1286893 - RNA, 19 nt, Homo sapiens
  misc_RNA (1)...(19): siRNA sense strand
gcggguagagcaccaugau

SEQ ID NO: 1286894 - RNA, 19 nt, Homo sapiens
  misc_RNA (1)...(19): siRNA sense strand
gguagaaacugaccacaua

SEQ ID NO: 1286895 - RNA, 19 nt, Homo sapiens
  misc_RNA (1)...(19): siRNA sense strand
gcaaaggugucaucuucua

SEQ ID NO: 1286896 - RNA, 19 nt, Homo sapiens
  misc_RNA (1)...(19): siRNA sense strand
caaggaagaucauuaagga

SEQ ID NO: 1286897 - RNA, 19 nt, Homo sapiens
  misc_RNA (1)...(19): siRNA sense strand
gcaggaagguagaaacuga

SEQ ID NO: 1286898 - RNA, 19 nt, Homo sapiens
  misc_RNA (1)...(19): siRNA sense strand
gcaugaagaucucaaugaa

SEQ ID NO: 1286899 - RNA, 19 nt, Homo sapiens
  misc_RNA (1)...(19): siRNA sense strand
gaacaucuuuaaccgaaug

SEQ ID NO: 1286900 - RNA, 19 nt, Homo sapiens
  misc_RNA (1)...(19): siRNA sense strand
caacauucaugaagacuga

SEQ ID NO: 1286901 - RNA, 19 nt, Homo sapiens
  misc_RNA (1)...(19): siRNA sense strand
gcacagaagugauucaacu

SEQ ID NO: 1286902 - RNA, 19 nt, Homo sapiens
  misc_RNA (1)...(19): siRNA sense strand
gaacugguauccgaucaga

SEQ ID NO: 1286903 - RNA, 19 nt, Homo sapiens
  misc_RNA (1)...(19): siRNA sense strand
gaaagauccuccccgaaua

SEQ ID NO: 1286904 - RNA, 19 nt, Homo sapiens
  misc_RNA (1)...(19): siRNA sense strand
gauauaaaguugggaagga

SEQ ID NO: 1286905 - RNA, 19 nt, Homo sapiens
  misc_RNA (1)...(19): siRNA sense strand
gaucagagagugagacaga

SEQ ID NO: 1286906 - RNA, 19 nt, Homo sapiens
  misc_RNA (1)...(19): siRNA sense strand
ugaaguagccaaacuauuc

SEQ ID NO: 1286907 - RNA, 19 nt, Homo sapiens
  misc_RNA (1)...(19): siRNA sense strand
cggcaaaggugucaucuuc

SEQ ID NO: 1286908 - RNA, 19 nt, Homo sapiens
  misc_RNA (1)...(19): siRNA sense strand
gaaaggaaauaugggaaag

SEQ ID NO: 1286909 - RNA, 19 nt, Homo sapiens
  misc_RNA (1)...(19): siRNA sense strand
ucaauguucuggagugauu

SEQ ID NO: 1286910 - RNA, 19 nt, Homo sapiens
  misc_RNA (1)...(19): siRNA sense strand
agucagcaguggcaaguua

SEQ ID NO: 1286911 - RNA, 19 nt, Homo sapiens
  misc_RNA (1)...(19): siRNA sense strand
gccaaacuauucaacauuc

SEQ ID NO: 1286912 - RNA, 19 nt, Homo sapiens
  misc_RNA (1)...(19): siRNA sense strand
gauguuggcuaugaagcua

SEQ ID NO: 1286913 - RNA, 19 nt, Homo sapiens
  misc_RNA (1)...(19): siRNA sense strand
caagcacgcucuaacaucu

SEQ ID NO: 1286914 - RNA, 19 nt, Homo sapiens
  misc_RNA (1)...(19): siRNA sense strand
gcugcaugcuucuacgaua

SEQ ID NO: 1286915 - RNA, 19 nt, Homo sapiens
  misc_RNA (1)...(19): siRNA sense strand
gaaagacggcaggaaggua

SEQ ID NO: 1286916 - RNA, 19 nt, Homo sapiens
  misc_RNA (1)...(19): siRNA sense strand
uagcaaggaagaucauuaa

SEQ ID NO: 1286917 - RNA, 19 nt, Homo sapiens
  misc_RNA (1)...(19): siRNA sense strand
gcaccaugaucacgcuguu

SEQ ID NO: 1286918 - RNA, 19 nt, Homo sapiens
  misc_RNA (1)...(19): siRNA sense strand
gaaguagccaaacuauuca

SEQ ID NO: 1286919 - RNA, 19 nt, Homo sapiens
  misc_RNA (1)...(19): siRNA sense strand
uccgaggccucagaaauua

SEQ ID NO: 1286920 - RNA, 19 nt, Homo sapiens
  misc_RNA (1)...(19): siRNA sense strand
ggagcccaauguugaguug

SEQ ID NO: 1286921 - RNA, 19 nt, Homo sapiens
  misc_RNA (1)...(19): siRNA sense strand
caagacugguggccuggaa

SEQ ID NO: 1286922 - RNA, 19 nt, Homo sapiens
  misc_RNA (1)...(19): siRNA sense strand
gcaaggaagaucauuaagg

SEQ ID NO: 1286923 - RNA, 19 nt, Homo sapiens
  misc_RNA (1)...(19): siRNA sense strand
gaaugccaauagcaaggaa

SEQ ID NO: 1286924 - RNA, 19 nt, Homo sapiens
  misc_RNA (1)...(19): siRNA sense strand
gcaugcuucuacgauauaa

SEQ ID NO: 1286925 - RNA, 19 nt, Homo sapiens
  misc_RNA (1)...(19): siRNA sense strand
caaugaaguagccaaacua

SEQ ID NO: 1286926 - RNA, 19 nt, Homo sapiens
  misc_RNA (1)...(19): siRNA sense strand
ccgaauaccucagcaacug

SEQ ID NO: 1286927 - RNA, 19 nt, Homo sapiens
  misc_RNA (1)...(19): siRNA sense strand
cagaagugauucaacucuu

SEQ ID NO: 1286928 - RNA, 19 nt, Homo sapiens
  misc_RNA (1)...(19): siRNA sense strand
cuucuacgauauaaaguug

SEQ ID NO: 1286929 - RNA, 19 nt, Homo sapiens
  misc_RNA (1)...(19): siRNA sense strand
ucaaugaaguagccaaacu

SEQ ID NO: 1286930 - RNA, 19 nt, Homo sapiens
  misc_RNA (1)...(19): siRNA sense strand
augaagaucucaaugaagu

SEQ ID NO: 1286931 - RNA, 19 nt, Homo sapiens
  misc_RNA (1)...(19): siRNA sense strand
guccgaggccucagaaauu

SEQ ID NO: 1286932 - RNA, 19 nt, Homo sapiens
  misc_RNA (1)...(19): siRNA sense strand
ccggguaaaugcagagcua

SEQ ID NO: 1286933 - RNA, 19 nt, Homo sapiens
  misc_RNA (1)...(19): siRNA sense strand
gaagaucucaaugaaguag

SEQ ID NO: 1286934 - RNA, 19 nt, Homo sapiens
  misc_RNA (1)...(19): siRNA sense strand
ggguagagcaccaugauca

SEQ ID NO: 1286935 - RNA, 19 nt, Homo sapiens
  misc_RNA (1)...(19): siRNA sense strand
ccaaacuauucaacauuca

SEQ ID NO: 1286936 - RNA, 19 nt, Homo sapiens
  misc_RNA (1)...(19): siRNA sense strand
cuaugaagcuauuggucuu

SEQ ID NO: 1286937 - RNA, 19 nt, Homo sapiens
  misc_RNA (1)...(19): siRNA sense strand
ggaaagauccuccccgaau

SEQ ID NO: 1286938 - RNA, 19 nt, Homo sapiens
  misc_RNA (1)...(19): siRNA sense strand
uagccaaacuauucaacau

SEQ ID NO: 1286939 - RNA, 19 nt, Homo sapiens
  misc_RNA (1)...(19): siRNA sense strand
uuugguggcuuccggguaa

SEQ ID NO: 1286940 - RNA, 19 nt, Homo sapiens
  misc_RNA (1)...(19): siRNA sense strand
ccucagaaauuacuauucc

SEQ ID NO: 1286941 - RNA, 19 nt, Homo sapiens
  misc_RNA (1)...(19): siRNA sense strand
ggaacaucuuuaaccgaau

SEQ ID NO: 1286942 - RNA, 19 nt, Homo sapiens
  misc_RNA (1)...(19): siRNA sense strand
ggugaugcccaaugcuauu

SEQ ID NO: 1286943 - RNA, 19 nt, Homo sapiens
  misc_RNA (1)...(19): siRNA sense strand
aaggaaauaugggaaagau

SEQ ID NO: 1286944 - RNA, 19 nt, Homo sapiens
  misc_RNA (1)...(19): siRNA sense strand
agaaaggaaauaugggaaa

SEQ ID NO: 1286945 - RNA, 19 nt, Homo sapiens
  misc_RNA (1)...(19): siRNA sense strand
cuacaagcacgcucuaaca

SEQ ID NO: 1286946 - RNA, 19 nt, Homo sapiens
  misc_RNA (1)...(19): siRNA sense strand
cugcaugcuucuacgauau

SEQ ID NO: 1286947 - RNA, 19 nt, Homo sapiens
  misc_RNA (1)...(19): siRNA sense strand
gccuggagcccaauguuga

SEQ ID NO: 1286948 - RNA, 19 nt, Homo sapiens
  misc_RNA (1)...(19): siRNA sense strand
aagauuggcuggagaaaau

SEQ ID NO: 1286949 - RNA, 19 nt, Homo sapiens
  misc_RNA (1)...(19): siRNA sense strand
gguaaaugcagagcuacaa

SEQ ID NO: 1286950 - RNA, 19 nt, Homo sapiens
  misc_RNA (1)...(19): siRNA sense strand
ccaauagcaaggaagauca

SEQ ID NO: 1286951 - RNA, 19 nt, Homo sapiens
  misc_RNA (1)...(19): siRNA sense strand
ggauugugcuauggaacau

SEQ ID NO: 1286952 - RNA, 19 nt, Homo sapiens
  misc_RNA (1)...(19): siRNA sense strand
ggaggacuacggcaaaggu

SEQ ID NO: 1286953 - RNA, 19 nt, Homo sapiens
  misc_RNA (1)...(19): siRNA sense strand
auagcaaggaagaucauua

SEQ ID NO: 1286954 - RNA, 19 nt, Homo sapiens
  misc_RNA (1)...(19): siRNA sense strand
gcaacuggaccauggaaaa

SEQ ID NO: 1286955 - RNA, 19 nt, Homo sapiens
  misc_RNA (1)...(19): siRNA sense strand
cugguggccuggaaauaga

SEQ ID NO: 1286956 - RNA, 19 nt, Homo sapiens
  misc_RNA (1)...(19): siRNA sense strand
caaaagcaacugcacaaga

SEQ ID NO: 1286957 - RNA, 19 nt, Homo sapiens
  misc_RNA (1)...(19): siRNA sense strand
gccuggaaauagacucaga

SEQ ID NO: 1286958 - RNA, 19 nt, Homo sapiens
  misc_RNA (1)...(19): siRNA sense strand
gggauugugcuauggaaca

SEQ ID NO: 1286959 - RNA, 19 nt, Homo sapiens
  misc_RNA (1)...(19): siRNA sense strand
ggaagauuggcuggagaaa

SEQ ID NO: 1286960 - RNA, 19 nt, Homo sapiens
  misc_RNA (1)...(19): siRNA sense strand
ugaagaucucaaugaagua

SEQ ID NO: 1286961 - RNA, 19 nt, Homo sapiens
  misc_RNA (1)...(19): siRNA sense strand
gaagcccgaggcagaggaa

SEQ ID NO: 1286962 - RNA, 19 nt, Homo sapiens
  misc_RNA (1)...(19): siRNA sense strand
uuaaggugaugcccaaugc

SEQ ID NO: 1286963 - RNA, 19 nt, Homo sapiens
  misc_RNA (1)...(19): siRNA sense strand
ggagucagcaguggcaagu

SEQ ID NO: 1286964 - RNA, 19 nt, Homo sapiens
  misc_RNA (1)...(19): siRNA sense strand
guagaaacugaccacauag

SEQ ID NO: 1286965 - RNA, 19 nt, Homo sapiens
  misc_RNA (1)...(19): siRNA sense strand
uaaggacggugagcagcau

SEQ ID NO: 1286966 - RNA, 19 nt, Homo sapiens
  misc_RNA (1)...(19): siRNA sense strand
gugcuauggaacaucuuua

SEQ ID NO: 1286967 - RNA, 19 nt, Homo sapiens
  misc_RNA (1)...(19): siRNA sense strand
guaaaugcagagcuacaag

SEQ ID NO: 1286968 - RNA, 19 nt, Homo sapiens
  misc_RNA (1)...(19): siRNA sense strand
uguugugaguggaagauug

SEQ ID NO: 1286969 - RNA, 19 nt, Homo sapiens
  misc_RNA (1)...(19): siRNA sense strand
uggcaucagucaauguucu

SEQ ID NO: 1286970 - RNA, 19 nt, Homo sapiens
  misc_RNA (1)...(19): siRNA sense strand
gaagauuggcuggagaaaa

SEQ ID NO: 1286971 - RNA, 19 nt, Homo sapiens
  misc_RNA (1)...(19): siRNA sense strand
gcuucuacgauauaaaguu

SEQ ID NO: 1286972 - RNA, 19 nt, Homo sapiens
  misc_RNA (1)...(19): siRNA sense strand
gugagcagcaugaagaucu

SEQ ID NO: 1286973 - RNA, 19 nt, Homo sapiens
  misc_RNA (1)...(19): siRNA sense strand
agaaacugaccacauagug

SEQ ID NO: 1286974 - RNA, 19 nt, Homo sapiens
  misc_RNA (1)...(19): siRNA sense strand
ggccuggagcccaauguug

SEQ ID NO: 1286975 - RNA, 19 nt, Homo sapiens
  misc_RNA (1)...(19): siRNA sense strand
gccaauagcaaggaagauc

SEQ ID NO: 1286976 - RNA, 19 nt, Homo sapiens
  misc_RNA (1)...(19): siRNA sense strand
guuaaggugaugcccaaug

SEQ ID NO: 1286977 - RNA, 19 nt, Homo sapiens
  misc_RNA (1)...(19): siRNA sense strand
ggucuuguggacaguaguu

SEQ ID NO: 1286978 - RNA, 19 nt, Homo sapiens
  misc_RNA (1)...(19): siRNA sense strand
gggcacagaagugauucaa

SEQ ID NO: 1286979 - RNA, 19 nt, Homo sapiens
  misc_RNA (1)...(19): siRNA sense strand
guagccaaacuauucaaca

SEQ ID NO: 1286980 - RNA, 19 nt, Homo sapiens
  misc_RNA (1)...(19): siRNA sense strand
gcagcaugaagaucucaau

SEQ ID NO: 1286981 - RNA, 19 nt, Homo sapiens
  misc_RNA (1)...(19): siRNA sense strand
ggacggugagcagcaugaa

SEQ ID NO: 1286982 - RNA, 19 nt, Homo sapiens
  misc_RNA (1)...(19): siRNA sense strand
aaggugaugcccaaugcua

SEQ ID NO: 1286983 - RNA, 19 nt, Homo sapiens
  misc_RNA (1)...(19): siRNA sense strand
cagcaugaagaucucaaug

SEQ ID NO: 1286984 - RNA, 19 nt, Homo sapiens
  misc_RNA (1)...(19): siRNA sense strand
uuacuuaucaagcugaaag

SEQ ID NO: 1286985 - RNA, 19 nt, Homo sapiens
  misc_RNA (1)...(19): siRNA sense strand
acugguauccgaucagaga

SEQ ID NO: 1286986 - RNA, 19 nt, Homo sapiens
  misc_RNA (1)...(19): siRNA sense strand
gagcugcuaagccguacug

SEQ ID NO: 1286987 - RNA, 19 nt, Homo sapiens
  misc_RNA (1)...(19): siRNA sense strand
gcggguagagcaccaugau

SEQ ID NO: 1286988 - RNA, 19 nt, Homo sapiens
  misc_RNA (1)...(19): siRNA sense strand
gguagaaacugaccacaua

SEQ ID NO: 1286989 - RNA, 19 nt, Homo sapiens
  misc_RNA (1)...(19): siRNA sense strand
gcaaaggugucaucuucua

SEQ ID NO: 1286990 - RNA, 19 nt, Homo sapiens
  misc_RNA (1)...(19): siRNA sense strand
caaggaagaucauuaagga

SEQ ID NO: 1286991 - RNA, 19 nt, Homo sapiens
  misc_RNA (1)...(19): siRNA sense strand
gcaggaagguagaaacuga

SEQ ID NO: 1286992 - RNA, 19 nt, Homo sapiens
  misc_RNA (1)...(19): siRNA sense strand
gcaugaagaucucaaugaa

SEQ ID NO: 1286993 - RNA, 19 nt, Homo sapiens
  misc_RNA (1)...(19): siRNA sense strand
gaacaucuuuaaccgaaug

SEQ ID NO: 1286994 - RNA, 19 nt, Homo sapiens
  misc_RNA (1)...(19): siRNA sense strand
caacauucaugaagacuga

SEQ ID NO: 1286995 - RNA, 19 nt, Homo sapiens
  misc_RNA (1)...(19): siRNA sense strand
gcacagaagugauucaacu

SEQ ID NO: 1286996 - RNA, 19 nt, Homo sapiens
  misc_RNA (1)...(19): siRNA sense strand
gaacugguauccgaucaga

SEQ ID NO: 1286997 - RNA, 19 nt, Homo sapiens
  misc_RNA (1)...(19): siRNA sense strand
gaaagauccuccccgaaua

SEQ ID NO: 1286998 - RNA, 19 nt, Homo sapiens
  misc_RNA (1)...(19): siRNA sense strand
gauauaaaguugggaagga

SEQ ID NO: 1286999 - RNA, 19 nt, Homo sapiens
  misc_RNA (1)...(19): siRNA sense strand
gaucagagagugagacaga

SEQ ID NO: 1287000 - RNA, 19 nt, Homo sapiens
  misc_RNA (1)...(19): siRNA sense strand
ugaaguagccaaacuauuc

SEQ ID NO: 1287001 - RNA, 19 nt, Homo sapiens
  misc_RNA (1)...(19): siRNA sense strand
cggcaaaggugucaucuuc

SEQ ID NO: 1287002 - RNA, 19 nt, Homo sapiens
  misc_RNA (1)...(19): siRNA sense strand
gaaaggaaauaugggaaag

SEQ ID NO: 1287003 - RNA, 19 nt, Homo sapiens
  misc_RNA (1)...(19): siRNA sense strand
ucaauguucuggagugauu

SEQ ID NO: 1287004 - RNA, 19 nt, Homo sapiens
  misc_RNA (1)...(19): siRNA sense strand
agucagcaguggcaaguua

SEQ ID NO: 1287005 - RNA, 19 nt, Homo sapiens
  misc_RNA (1)...(19): siRNA sense strand
gccaaacuauucaacauuc

SEQ ID NO: 1287006 - RNA, 19 nt, Homo sapiens
  misc_RNA (1)...(19): siRNA sense strand
gauguuggcuaugaagcua

SEQ ID NO: 1287007 - RNA, 19 nt, Homo sapiens
  misc_RNA (1)...(19): siRNA sense strand
caagcacgcucuaacaucu

SEQ ID NO: 1287008 - RNA, 19 nt, Homo sapiens
  misc_RNA (1)...(19): siRNA sense strand
gcugcaugcuucuacgaua

SEQ ID NO: 1287009 - RNA, 19 nt, Homo sapiens
  misc_RNA (1)...(19): siRNA sense strand
gaaagacggcaggaaggua

SEQ ID NO: 1287010 - RNA, 19 nt, Homo sapiens
  misc_RNA (1)...(19): siRNA sense strand
uagcaaggaagaucauuaa

SEQ ID NO: 1287011 - RNA, 19 nt, Homo sapiens
  misc_RNA (1)...(19): siRNA sense strand
gcaccaugaucacgcuguu

SEQ ID NO: 1287012 - RNA, 19 nt, Homo sapiens
  misc_RNA (1)...(19): siRNA sense strand
gaaguagccaaacuauuca

SEQ ID NO: 1287013 - RNA, 19 nt, Homo sapiens
  misc_RNA (1)...(19): siRNA sense strand
uccgaggccucagaaauua

SEQ ID NO: 1287014 - RNA, 19 nt, Homo sapiens
  misc_RNA (1)...(19): siRNA sense strand
ggagcccaauguugaguug

SEQ ID NO: 1287015 - RNA, 19 nt, Homo sapiens
  misc_RNA (1)...(19): siRNA sense strand
caagacugguggccuggaa

SEQ ID NO: 1287016 - RNA, 19 nt, Homo sapiens
  misc_RNA (1)...(19): siRNA sense strand
gcaaggaagaucauuaagg

SEQ ID NO: 1287017 - RNA, 19 nt, Homo sapiens
  misc_RNA (1)...(19): siRNA sense strand
gaaugccaauagcaaggaa

SEQ ID NO: 1287018 - RNA, 19 nt, Homo sapiens
  misc_RNA (1)...(19): siRNA sense strand
gcaugcuucuacgauauaa

SEQ ID NO: 1287019 - RNA, 19 nt, Homo sapiens
  misc_RNA (1)...(19): siRNA sense strand
caaugaaguagccaaacua

SEQ ID NO: 1287020 - RNA, 19 nt, Homo sapiens
  misc_RNA (1)...(19): siRNA sense strand
ccgaauaccucagcaacug

SEQ ID NO: 1287021 - RNA, 19 nt, Homo sapiens
  misc_RNA (1)...(19): siRNA sense strand
cagaagugauucaacucuu

SEQ ID NO: 1287022 - RNA, 19 nt, Homo sapiens
  misc_RNA (1)...(19): siRNA sense strand
cuucuacgauauaaaguug

SEQ ID NO: 1287023 - RNA, 19 nt, Homo sapiens
  misc_RNA (1)...(19): siRNA sense strand
ucaaugaaguagccaaacu

SEQ ID NO: 1287024 - RNA, 19 nt, Homo sapiens
  misc_RNA (1)...(19): siRNA sense strand
augaagaucucaaugaagu

SEQ ID NO: 1287025 - RNA, 19 nt, Homo sapiens
  misc_RNA (1)...(19): siRNA sense strand
guccgaggccucagaaauu

SEQ ID NO: 1287026 - RNA, 19 nt, Homo sapiens
  misc_RNA (1)...(19): siRNA sense strand
ccggguaaaugcagagcua

SEQ ID NO: 1287027 - RNA, 19 nt, Homo sapiens
  misc_RNA (1)...(19): siRNA sense strand
gaagaucucaaugaaguag

SEQ ID NO: 1287028 - RNA, 19 nt, Homo sapiens
  misc_RNA (1)...(19): siRNA sense strand
ggguagagcaccaugauca

SEQ ID NO: 1287029 - RNA, 19 nt, Homo sapiens
  misc_RNA (1)...(19): siRNA sense strand
ccaaacuauucaacauuca

SEQ ID NO: 1287030 - RNA, 19 nt, Homo sapiens
  misc_RNA (1)...(19): siRNA sense strand
cuaugaagcuauuggucuu

SEQ ID NO: 1287031 - RNA, 19 nt, Homo sapiens
  misc_RNA (1)...(19): siRNA sense strand
ggaaagauccuccccgaau

SEQ ID NO: 1287032 - RNA, 19 nt, Homo sapiens
  misc_RNA (1)...(19): siRNA sense strand
uagccaaacuauucaacau

SEQ ID NO: 1287033 - RNA, 19 nt, Homo sapiens
  misc_RNA (1)...(19): siRNA sense strand
uuugguggcuuccggguaa

SEQ ID NO: 1287034 - RNA, 19 nt, Homo sapiens
  misc_RNA (1)...(19): siRNA sense strand
ccucagaaauuacuauucc

SEQ ID NO: 1287035 - RNA, 19 nt, Homo sapiens
  misc_RNA (1)...(19): siRNA sense strand
ggaacaucuuuaaccgaau

SEQ ID NO: 1287036 - RNA, 19 nt, Homo sapiens
  misc_RNA (1)...(19): siRNA sense strand
ggugaugcccaaugcuauu

SEQ ID NO: 1287037 - RNA, 19 nt, Homo sapiens
  misc_RNA (1)...(19): siRNA sense strand
aaggaaauaugggaaagau

SEQ ID NO: 1287038 - RNA, 19 nt, Homo sapiens
  misc_RNA (1)...(19): siRNA sense strand
agaaaggaaauaugggaaa

SEQ ID NO: 1287039 - RNA, 19 nt, Homo sapiens
  misc_RNA (1)...(19): siRNA sense strand
cuacaagcacgcucuaaca

SEQ ID NO: 1287040 - RNA, 19 nt, Homo sapiens
  misc_RNA (1)...(19): siRNA sense strand
cugcaugcuucuacgauau

SEQ ID NO: 1287041 - RNA, 19 nt, Homo sapiens
  misc_RNA (1)...(19): siRNA sense strand
gccuggagcccaauguuga

SEQ ID NO: 1287042 - RNA, 19 nt, Homo sapiens
  misc_RNA (1)...(19): siRNA sense strand
aagauuggcuggagaaaau

SEQ ID NO: 1287043 - RNA, 19 nt, Homo sapiens
  misc_RNA (1)...(19): siRNA sense strand
gguaaaugcagagcuacaa

SEQ ID NO: 1287044 - RNA, 19 nt, Homo sapiens
  misc_RNA (1)...(19): siRNA sense strand
ccaauagcaaggaagauca

SEQ ID NO: 1287045 - RNA, 19 nt, Homo sapiens
  misc_RNA (1)...(19): siRNA sense strand
ggauugugcuauggaacau

SEQ ID NO: 1287046 - RNA, 19 nt, Homo sapiens
  misc_RNA (1)...(19): siRNA sense strand
ggaggacuacggcaaaggu

SEQ ID NO: 1287047 - RNA, 19 nt, Homo sapiens
  misc_RNA (1)...(19): siRNA sense strand
auagcaaggaagaucauua

SEQ ID NO: 1287048 - RNA, 19 nt, Homo sapiens
  misc_RNA (1)...(19): siRNA sense strand
gcaacuggaccauggaaaa

SEQ ID NO: 1287049 - RNA, 19 nt, Homo sapiens
  misc_RNA (1)...(19): siRNA sense strand
cugguggccuggaaauaga

SEQ ID NO: 1287050 - RNA, 19 nt, Homo sapiens
  misc_RNA (1)...(19): siRNA sense strand
caaaagcaacugcacaaga

SEQ ID NO: 1287051 - RNA, 19 nt, Homo sapiens
  misc_RNA (1)...(19): siRNA sense strand
gccuggaaauagacucaga

SEQ ID NO: 1287052 - RNA, 19 nt, Homo sapiens
  misc_RNA (1)...(19): siRNA sense strand
gggauugugcuauggaaca

SEQ ID NO: 1287053 - RNA, 19 nt, Homo sapiens
  misc_RNA (1)...(19): siRNA sense strand
ggaagauuggcuggagaaa

SEQ ID NO: 1287054 - RNA, 19 nt, Homo sapiens
  misc_RNA (1)...(19): siRNA sense strand
ugaagaucucaaugaagua

SEQ ID NO: 1287055 - RNA, 19 nt, Homo sapiens
  misc_RNA (1)...(19): siRNA sense strand
gaagcccgaggcagaggaa

SEQ ID NO: 1287056 - RNA, 19 nt, Homo sapiens
  misc_RNA (1)...(19): siRNA sense strand
uuaaggugaugcccaaugc

SEQ ID NO: 1287057 - RNA, 19 nt, Homo sapiens
  misc_RNA (1)...(19): siRNA sense strand
ggagucagcaguggcaagu

SEQ ID NO: 1287058 - RNA, 19 nt, Homo sapiens
  misc_RNA (1)...(19): siRNA sense strand
guagaaacugaccacauag

SEQ ID NO: 1287059 - RNA, 19 nt, Homo sapiens
  misc_RNA (1)...(19): siRNA sense strand
uaaggacggugagcagcau

SEQ ID NO: 1287060 - RNA, 19 nt, Homo sapiens
  misc_RNA (1)...(19): siRNA sense strand
gugcuauggaacaucuuua

SEQ ID NO: 1287061 - RNA, 19 nt, Homo sapiens
  misc_RNA (1)...(19): siRNA sense strand
guaaaugcagagcuacaag

SEQ ID NO: 1287062 - RNA, 19 nt, Homo sapiens
  misc_RNA (1)...(19): siRNA sense strand
uguugugaguggaagauug

SEQ ID NO: 1287063 - RNA, 19 nt, Homo sapiens
  misc_RNA (1)...(19): siRNA sense strand
uggcaucagucaauguucu

SEQ ID NO: 1287064 - RNA, 19 nt, Homo sapiens
  misc_RNA (1)...(19): siRNA sense strand
gaagauuggcuggagaaaa

SEQ ID NO: 1287065 - RNA, 19 nt, Homo sapiens
  misc_RNA (1)...(19): siRNA sense strand
gcuucuacgauauaaaguu

SEQ ID NO: 1287066 - RNA, 19 nt, Homo sapiens
  misc_RNA (1)...(19): siRNA sense strand
gugagcagcaugaagaucu

SEQ ID NO: 1287067 - RNA, 19 nt, Homo sapiens
  misc_RNA (1)...(19): siRNA sense strand
agaaacugaccacauagug

SEQ ID NO: 1287068 - RNA, 19 nt, Homo sapiens
  misc_RNA (1)...(19): siRNA sense strand
ggccuggagcccaauguug

SEQ ID NO: 1287069 - RNA, 19 nt, Homo sapiens
  misc_RNA (1)...(19): siRNA sense strand
gccaauagcaaggaagauc

SEQ ID NO: 1287070 - RNA, 19 nt, Homo sapiens
  misc_RNA (1)...(19): siRNA sense strand
guuaaggugaugcccaaug

SEQ ID NO: 1287071 - RNA, 19 nt, Homo sapiens
  misc_RNA (1)...(19): siRNA sense strand
ggucuuguggacaguaguu

SEQ ID NO: 1287072 - RNA, 19 nt, Homo sapiens
  misc_RNA (1)...(19): siRNA sense strand
gggcacagaagugauucaa

SEQ ID NO: 1287073 - RNA, 19 nt, Homo sapiens
  misc_RNA (1)...(19): siRNA sense strand
guagccaaacuauucaaca

SEQ ID NO: 1287074 - RNA, 19 nt, Homo sapiens
  misc_RNA (1)...(19): siRNA sense strand
gcagcaugaagaucucaau

SEQ ID NO: 1287075 - RNA, 19 nt, Homo sapiens
  misc_RNA (1)...(19): siRNA sense strand
ggacggugagcagcaugaa

SEQ ID NO: 1287076 - RNA, 19 nt, Homo sapiens
  misc_RNA (1)...(19): siRNA sense strand
aaggugaugcccaaugcua

SEQ ID NO: 1287077 - RNA, 19 nt, Homo sapiens
  misc_RNA (1)...(19): siRNA sense strand
cagcaugaagaucucaaug

SEQ ID NO: 1287078 - RNA, 19 nt, Homo sapiens
  misc_RNA (1)...(19): siRNA sense strand
uuacuuaucaagcugaaag

SEQ ID NO: 1287079 - RNA, 19 nt, Homo sapiens
  misc_RNA (1)...(19): siRNA sense strand
acugguauccgaucagaga

SEQ ID NO: 1287080 - RNA, 19 nt, Homo sapiens
  misc_RNA (1)...(19): siRNA sense strand
gagcugcuaagccguacug

SEQ ID NO: 1287081 - RNA, 19 nt, Homo sapiens
  misc_RNA (1)...(19): siRNA sense strand
gcggguagagcaccaugau

SEQ ID NO: 1287082 - RNA, 19 nt, Homo sapiens
  misc_RNA (1)...(19): siRNA sense strand
gaugugguccaacuucuuc

SEQ ID NO: 1287083 - RNA, 19 nt, Homo sapiens
  misc_RNA (1)...(19): siRNA sense strand
cuggagguguuccggcauu

SEQ ID NO: 1287084 - RNA, 19 nt, Homo sapiens
  misc_RNA (1)...(19): siRNA sense strand
gaugugguccaacuucuuc

SEQ ID NO: 1287085 - RNA, 19 nt, Homo sapiens
  misc_RNA (1)...(19): siRNA sense strand
cuggagguguuccggcauu

SEQ ID NO: 1287086 - RNA, 19 nt, Homo sapiens
  misc_RNA (1)...(19): siRNA sense strand
gaugugguccaacuucuuc

SEQ ID NO: 1287087 - RNA, 19 nt, Homo sapiens
  misc_RNA (1)...(19): siRNA sense strand
cuggagguguuccggcauu

SEQ ID NO: 1287088 - RNA, 19 nt, Homo sapiens
  misc_RNA (1)...(19): siRNA sense strand
aaaguacucugcuggauua

SEQ ID NO: 1287089 - RNA, 19 nt, Homo sapiens
  misc_RNA (1)...(19): siRNA sense strand
guacucugcuggauuagaa

SEQ ID NO: 1287090 - RNA, 19 nt, Homo sapiens
  misc_RNA (1)...(19): siRNA sense strand
gagcacacccagcaaauga

SEQ ID NO: 1287091 - RNA, 19 nt, Homo sapiens
  misc_RNA (1)...(19): siRNA sense strand
ccuccgggcugaagacuuu

SEQ ID NO: 1287092 - RNA, 19 nt, Homo sapiens
  misc_RNA (1)...(19): siRNA sense strand
ugaaggagcggcagaaguu

SEQ ID NO: 1287093 - RNA, 19 nt, Homo sapiens
  misc_RNA (1)...(19): siRNA sense strand
ggauuagaauuacuuagca

SEQ ID NO: 1287094 - RNA, 19 nt, Homo sapiens
  misc_RNA (1)...(19): siRNA sense strand
uagaauccaugacagcaaa

SEQ ID NO: 1287095 - RNA, 19 nt, Homo sapiens
  misc_RNA (1)...(19): siRNA sense strand
uagaauuacuuagcaggua

SEQ ID NO: 1287096 - RNA, 19 nt, Homo sapiens
  misc_RNA (1)...(19): siRNA sense strand
cagaagagccaaagacugu

SEQ ID NO: 1287097 - RNA, 19 nt, Homo sapiens
  misc_RNA (1)...(19): siRNA sense strand
caaaguacucugcuggauu

SEQ ID NO: 1287098 - RNA, 19 nt, Homo sapiens
  misc_RNA (1)...(19): siRNA sense strand
cuggagagcugguggauag

SEQ ID NO: 1287099 - RNA, 19 nt, Homo sapiens
  misc_RNA (1)...(19): siRNA sense strand
ccugaacucuggaggagaa

SEQ ID NO: 1287100 - RNA, 19 nt, Homo sapiens
  misc_RNA (1)...(19): siRNA sense strand
gccaaagacugugcaagug

SEQ ID NO: 1287101 - RNA, 19 nt, Homo sapiens
  misc_RNA (1)...(19): siRNA sense strand
gaaagaugcaaacauaugc

SEQ ID NO: 1287102 - RNA, 19 nt, Homo sapiens
  misc_RNA (1)...(19): siRNA sense strand
gcagugugaauuagaaaga

SEQ ID NO: 1287103 - RNA, 19 nt, Homo sapiens
  misc_RNA (1)...(19): siRNA sense strand
agaacaaccugcugcaucu

SEQ ID NO: 1287104 - RNA, 19 nt, Homo sapiens
  misc_RNA (1)...(19): siRNA sense strand
agaauuacuuagcagguau

SEQ ID NO: 1287105 - RNA, 19 nt, Homo sapiens
  misc_RNA (1)...(19): siRNA sense strand
gaggagaagagaacacugu

SEQ ID NO: 1287106 - RNA, 19 nt, Homo sapiens
  misc_RNA (1)...(19): siRNA sense strand
gaaggagcggcagaaguuu

SEQ ID NO: 1287107 - RNA, 19 nt, Homo sapiens
  misc_RNA (1)...(19): siRNA sense strand
agaaagaugcaaacauaug

SEQ ID NO: 1287108 - RNA, 19 nt, Homo sapiens
  misc_RNA (1)...(19): siRNA sense strand
ccaaaguacucugcuggau

SEQ ID NO: 1287109 - RNA, 19 nt, Homo sapiens
  misc_RNA (1)...(19): siRNA sense strand
gcgagguggucaugcuuuc

SEQ ID NO: 1287110 - RNA, 19 nt, Homo sapiens
  misc_RNA (1)...(19): siRNA sense strand
uuuaaucgcagacuuagaa

SEQ ID NO: 1287111 - RNA, 19 nt, Homo sapiens
  misc_RNA (1)...(19): siRNA sense strand
ugucauccauggaagugaa

SEQ ID NO: 1287112 - RNA, 19 nt, Homo sapiens
  misc_RNA (1)...(19): siRNA sense strand
agaagguccuggaaaugga

SEQ ID NO: 1287113 - RNA, 19 nt, Homo sapiens
  misc_RNA (1)...(19): siRNA sense strand
uaagaggaaggaacuugaa

SEQ ID NO: 1287114 - RNA, 19 nt, Homo sapiens
  misc_RNA (1)...(19): siRNA sense strand
agacuuaugugggcagugu

SEQ ID NO: 1287115 - RNA, 19 nt, Homo sapiens
  misc_RNA (1)...(19): siRNA sense strand
ggaagugaacguggacaug

SEQ ID NO: 1287116 - RNA, 19 nt, Homo sapiens
  misc_RNA (1)...(19): siRNA sense strand
gcccauaggcagcauguca

SEQ ID NO: 1287117 - RNA, 19 nt, Homo sapiens
  misc_RNA (1)...(19): siRNA sense strand
caacuggagaauuacaaga

SEQ ID NO: 1287118 - RNA, 19 nt, Homo sapiens
  misc_RNA (1)...(19): siRNA sense strand
agcaggacauggagcagua

SEQ ID NO: 1287119 - RNA, 19 nt, Homo sapiens
  misc_RNA (1)...(19): siRNA sense strand
acuggagaauuacaagaaa

SEQ ID NO: 1287120 - RNA, 19 nt, Homo sapiens
  misc_RNA (1)...(19): siRNA sense strand
agacuuagaauccaugaca

SEQ ID NO: 1287121 - RNA, 19 nt, Homo sapiens
  misc_RNA (1)...(19): siRNA sense strand
uugaggagguagagaacaa

SEQ ID NO: 1287122 - RNA, 19 nt, Homo sapiens
  misc_RNA (1)...(19): siRNA sense strand
ugacagcaaaucugacuca

SEQ ID NO: 1287123 - RNA, 19 nt, Homo sapiens
  misc_RNA (1)...(19): siRNA sense strand
ggagcacacccagcaaaug

SEQ ID NO: 1287124 - RNA, 19 nt, Homo sapiens
  misc_RNA (1)...(19): siRNA sense strand
cagcuuuaaucgcagacuu

SEQ ID NO: 1287125 - RNA, 19 nt, Homo sapiens
  misc_RNA (1)...(19): siRNA sense strand
gcaucuggaagacuuaugu

SEQ ID NO: 1287126 - RNA, 19 nt, Homo sapiens
  misc_RNA (1)...(19): siRNA sense strand
gcuggauuagaauuacuua

SEQ ID NO: 1287127 - RNA, 19 nt, Homo sapiens
  misc_RNA (1)...(19): siRNA sense strand
agauggaccugauggacau

SEQ ID NO: 1287128 - RNA, 19 nt, Homo sapiens
  misc_RNA (1)...(19): siRNA sense strand
gcacacccagcaaaugaag

SEQ ID NO: 1287129 - RNA, 19 nt, Homo sapiens
  misc_RNA (1)...(19): siRNA sense strand
cuuagcagguaugaggaua

SEQ ID NO: 1287130 - RNA, 19 nt, Homo sapiens
  misc_RNA (1)...(19): siRNA sense strand
cagaagguccuggaaaugg

SEQ ID NO: 1287131 - RNA, 19 nt, Homo sapiens
  misc_RNA (1)...(19): siRNA sense strand
gcaacuggagaauuacaag

SEQ ID NO: 1287132 - RNA, 19 nt, Homo sapiens
  misc_RNA (1)...(19): siRNA sense strand
gaauuagaaagaugcaaac

SEQ ID NO: 1287133 - RNA, 19 nt, Homo sapiens
  misc_RNA (1)...(19): siRNA sense strand
ggauacaugggcugcacuu

SEQ ID NO: 1287134 - RNA, 19 nt, Homo sapiens
  misc_RNA (1)...(19): siRNA sense strand
aagcaaaagugaaaagcaa

SEQ ID NO: 1287135 - RNA, 19 nt, Homo sapiens
  misc_RNA (1)...(19): siRNA sense strand
ggauagcgagguggucaug

SEQ ID NO: 1287136 - RNA, 19 nt, Homo sapiens
  misc_RNA (1)...(19): siRNA sense strand
ugggcagugugaauuagaa

SEQ ID NO: 1287137 - RNA, 19 nt, Homo sapiens
  misc_RNA (1)...(19): siRNA sense strand
gaauuacuuagcagguaug

SEQ ID NO: 1287138 - RNA, 19 nt, Homo sapiens
  misc_RNA (1)...(19): siRNA sense strand
gcagacuuagaauccauga

SEQ ID NO: 1287139 - RNA, 19 nt, Homo sapiens
  misc_RNA (1)...(19): siRNA sense strand
auacaugggcugcacuuca

SEQ ID NO: 1287140 - RNA, 19 nt, Homo sapiens
  misc_RNA (1)...(19): siRNA sense strand
gggcagugugaauuagaaa

SEQ ID NO: 1287141 - RNA, 19 nt, Homo sapiens
  misc_RNA (1)...(19): siRNA sense strand
ucacagaagagccaaagac

SEQ ID NO: 1287142 - RNA, 19 nt, Homo sapiens
  misc_RNA (1)...(19): siRNA sense strand
aauaagaggaaggaacuug

SEQ ID NO: 1287143 - RNA, 19 nt, Homo sapiens
  misc_RNA (1)...(19): siRNA sense strand
ugagcgugcagcaggauuu

SEQ ID NO: 1287144 - RNA, 19 nt, Homo sapiens
  misc_RNA (1)...(19): siRNA sense strand
gaacaaccugcugcaucug

SEQ ID NO: 1287145 - RNA, 19 nt, Homo sapiens
  misc_RNA (1)...(19): siRNA sense strand
uggagcagauggaccugau

SEQ ID NO: 1287146 - RNA, 19 nt, Homo sapiens
  misc_RNA (1)...(19): siRNA sense strand
auaagaggaaggaacuuga

SEQ ID NO: 1287147 - RNA, 19 nt, Homo sapiens
  misc_RNA (1)...(19): siRNA sense strand
aaaguacucugcuggauua

SEQ ID NO: 1287148 - RNA, 19 nt, Homo sapiens
  misc_RNA (1)...(19): siRNA sense strand
guacucugcuggauuagaa

SEQ ID NO: 1287149 - RNA, 19 nt, Homo sapiens
  misc_RNA (1)...(19): siRNA sense strand
gagcacacccagcaaauga

SEQ ID NO: 1287150 - RNA, 19 nt, Homo sapiens
  misc_RNA (1)...(19): siRNA sense strand
ccuccgggcugaagacuuu

SEQ ID NO: 1287151 - RNA, 19 nt, Homo sapiens
  misc_RNA (1)...(19): siRNA sense strand
ugaaggagcggcagaaguu

SEQ ID NO: 1287152 - RNA, 19 nt, Homo sapiens
  misc_RNA (1)...(19): siRNA sense strand
ggauuagaauuacuuagca

SEQ ID NO: 1287153 - RNA, 19 nt, Homo sapiens
  misc_RNA (1)...(19): siRNA sense strand
uagaauccaugacagcaaa

SEQ ID NO: 1287154 - RNA, 19 nt, Homo sapiens
  misc_RNA (1)...(19): siRNA sense strand
uagaauuacuuagcaggua

SEQ ID NO: 1287155 - RNA, 19 nt, Homo sapiens
  misc_RNA (1)...(19): siRNA sense strand
cagaagagccaaagacugu

SEQ ID NO: 1287156 - RNA, 19 nt, Homo sapiens
  misc_RNA (1)...(19): siRNA sense strand
caaaguacucugcuggauu

SEQ ID NO: 1287157 - RNA, 19 nt, Homo sapiens
  misc_RNA (1)...(19): siRNA sense strand
cuggagagcugguggauag

SEQ ID NO: 1287158 - RNA, 19 nt, Homo sapiens
  misc_RNA (1)...(19): siRNA sense strand
ccugaacucuggaggagaa

SEQ ID NO: 1287159 - RNA, 19 nt, Homo sapiens
  misc_RNA (1)...(19): siRNA sense strand
gccaaagacugugcaagug

SEQ ID NO: 1287160 - RNA, 19 nt, Homo sapiens
  misc_RNA (1)...(19): siRNA sense strand
gaaagaugcaaacauaugc

SEQ ID NO: 1287161 - RNA, 19 nt, Homo sapiens
  misc_RNA (1)...(19): siRNA sense strand
gcagugugaauuagaaaga

SEQ ID NO: 1287162 - RNA, 19 nt, Homo sapiens
  misc_RNA (1)...(19): siRNA sense strand
agaacaaccugcugcaucu

SEQ ID NO: 1287163 - RNA, 19 nt, Homo sapiens
  misc_RNA (1)...(19): siRNA sense strand
agaauuacuuagcagguau

SEQ ID NO: 1287164 - RNA, 19 nt, Homo sapiens
  misc_RNA (1)...(19): siRNA sense strand
gaggagaagagaacacugu

SEQ ID NO: 1287165 - RNA, 19 nt, Homo sapiens
  misc_RNA (1)...(19): siRNA sense strand
gaaggagcggcagaaguuu

SEQ ID NO: 1287166 - RNA, 19 nt, Homo sapiens
  misc_RNA (1)...(19): siRNA sense strand
agaaagaugcaaacauaug

SEQ ID NO: 1287167 - RNA, 19 nt, Homo sapiens
  misc_RNA (1)...(19): siRNA sense strand
ccaaaguacucugcuggau

SEQ ID NO: 1287168 - RNA, 19 nt, Homo sapiens
  misc_RNA (1)...(19): siRNA sense strand
gcgagguggucaugcuuuc

SEQ ID NO: 1287169 - RNA, 19 nt, Homo sapiens
  misc_RNA (1)...(19): siRNA sense strand
uuuaaucgcagacuuagaa

SEQ ID NO: 1287170 - RNA, 19 nt, Homo sapiens
  misc_RNA (1)...(19): siRNA sense strand
ugucauccauggaagugaa

SEQ ID NO: 1287171 - RNA, 19 nt, Homo sapiens
  misc_RNA (1)...(19): siRNA sense strand
agaagguccuggaaaugga

SEQ ID NO: 1287172 - RNA, 19 nt, Homo sapiens
  misc_RNA (1)...(19): siRNA sense strand
uaagaggaaggaacuugaa

SEQ ID NO: 1287173 - RNA, 19 nt, Homo sapiens
  misc_RNA (1)...(19): siRNA sense strand
agacuuaugugggcagugu

SEQ ID NO: 1287174 - RNA, 19 nt, Homo sapiens
  misc_RNA (1)...(19): siRNA sense strand
ggaagugaacguggacaug

SEQ ID NO: 1287175 - RNA, 19 nt, Homo sapiens
  misc_RNA (1)...(19): siRNA sense strand
gcccauaggcagcauguca

SEQ ID NO: 1287176 - RNA, 19 nt, Homo sapiens
  misc_RNA (1)...(19): siRNA sense strand
caacuggagaauuacaaga

SEQ ID NO: 1287177 - RNA, 19 nt, Homo sapiens
  misc_RNA (1)...(19): siRNA sense strand
agcaggacauggagcagua

SEQ ID NO: 1287178 - RNA, 19 nt, Homo sapiens
  misc_RNA (1)...(19): siRNA sense strand
acuggagaauuacaagaaa

SEQ ID NO: 1287179 - RNA, 19 nt, Homo sapiens
  misc_RNA (1)...(19): siRNA sense strand
agacuuagaauccaugaca

SEQ ID NO: 1287180 - RNA, 19 nt, Homo sapiens
  misc_RNA (1)...(19): siRNA sense strand
uugaggagguagagaacaa

SEQ ID NO: 1287181 - RNA, 19 nt, Homo sapiens
  misc_RNA (1)...(19): siRNA sense strand
ugacagcaaaucugacuca

SEQ ID NO: 1287182 - RNA, 19 nt, Homo sapiens
  misc_RNA (1)...(19): siRNA sense strand
ggagcacacccagcaaaug

SEQ ID NO: 1287183 - RNA, 19 nt, Homo sapiens
  misc_RNA (1)...(19): siRNA sense strand
cagcuuuaaucgcagacuu

SEQ ID NO: 1287184 - RNA, 19 nt, Homo sapiens
  misc_RNA (1)...(19): siRNA sense strand
gcaucuggaagacuuaugu

SEQ ID NO: 1287185 - RNA, 19 nt, Homo sapiens
  misc_RNA (1)...(19): siRNA sense strand
gcuggauuagaauuacuua

SEQ ID NO: 1287186 - RNA, 19 nt, Homo sapiens
  misc_RNA (1)...(19): siRNA sense strand
agauggaccugauggacau

SEQ ID NO: 1287187 - RNA, 19 nt, Homo sapiens
  misc_RNA (1)...(19): siRNA sense strand
gcacacccagcaaaugaag

SEQ ID NO: 1287188 - RNA, 19 nt, Homo sapiens
  misc_RNA (1)...(19): siRNA sense strand
cuuagcagguaugaggaua

SEQ ID NO: 1287189 - RNA, 19 nt, Homo sapiens
  misc_RNA (1)...(19): siRNA sense strand
cagaagguccuggaaaugg

SEQ ID NO: 1287190 - RNA, 19 nt, Homo sapiens
  misc_RNA (1)...(19): siRNA sense strand
gcaacuggagaauuacaag

SEQ ID NO: 1287191 - RNA, 19 nt, Homo sapiens
  misc_RNA (1)...(19): siRNA sense strand
gaauuagaaagaugcaaac

SEQ ID NO: 1287192 - RNA, 19 nt, Homo sapiens
  misc_RNA (1)...(19): siRNA sense strand
ggauacaugggcugcacuu

SEQ ID NO: 1287193 - RNA, 19 nt, Homo sapiens
  misc_RNA (1)...(19): siRNA sense strand
aagcaaaagugaaaagcaa

SEQ ID NO: 1287194 - RNA, 19 nt, Homo sapiens
  misc_RNA (1)...(19): siRNA sense strand
ggauagcgagguggucaug

SEQ ID NO: 1287195 - RNA, 19 nt, Homo sapiens
  misc_RNA (1)...(19): siRNA sense strand
ugggcagugugaauuagaa

SEQ ID NO: 1287196 - RNA, 19 nt, Homo sapiens
  misc_RNA (1)...(19): siRNA sense strand
gaauuacuuagcagguaug

SEQ ID NO: 1287197 - RNA, 19 nt, Homo sapiens
  misc_RNA (1)...(19): siRNA sense strand
gcagacuuagaauccauga

SEQ ID NO: 1287198 - RNA, 19 nt, Homo sapiens
  misc_RNA (1)...(19): siRNA sense strand
auacaugggcugcacuuca

SEQ ID NO: 1287199 - RNA, 19 nt, Homo sapiens
  misc_RNA (1)...(19): siRNA sense strand
gggcagugugaauuagaaa

SEQ ID NO: 1287200 - RNA, 19 nt, Homo sapiens
  misc_RNA (1)...(19): siRNA sense strand
ucacagaagagccaaagac

SEQ ID NO: 1287201 - RNA, 19 nt, Homo sapiens
  misc_RNA (1)...(19): siRNA sense strand
aauaagaggaaggaacuug

SEQ ID NO: 1287202 - RNA, 19 nt, Homo sapiens
  misc_RNA (1)...(19): siRNA sense strand
ugagcgugcagcaggauuu

SEQ ID NO: 1287203 - RNA, 19 nt, Homo sapiens
  misc_RNA (1)...(19): siRNA sense strand
gaacaaccugcugcaucug

SEQ ID NO: 1287204 - RNA, 19 nt, Homo sapiens
  misc_RNA (1)...(19): siRNA sense strand
uggagcagauggaccugau

SEQ ID NO: 1287205 - RNA, 19 nt, Homo sapiens
  misc_RNA (1)...(19): siRNA sense strand
auaagaggaaggaacuuga

SEQ ID NO: 1287206 - RNA, 19 nt, Homo sapiens
  misc_RNA (1)...(19): siRNA sense strand
gagcacacccagcaaauga

SEQ ID NO: 1287207 - RNA, 19 nt, Homo sapiens
  misc_RNA (1)...(19): siRNA sense strand
ugaaggagcggcagaaguu

SEQ ID NO: 1287208 - RNA, 19 nt, Homo sapiens
  misc_RNA (1)...(19): siRNA sense strand
uagaauccaugacagcaaa

SEQ ID NO: 1287209 - RNA, 19 nt, Homo sapiens
  misc_RNA (1)...(19): siRNA sense strand
ccugaacucuggaggagaa

SEQ ID NO: 1287210 - RNA, 19 nt, Homo sapiens
  misc_RNA (1)...(19): siRNA sense strand
gcagugugaauuagaaaga

SEQ ID NO: 1287211 - RNA, 19 nt, Homo sapiens
  misc_RNA (1)...(19): siRNA sense strand
gaaagaugcaaacauaugc

SEQ ID NO: 1287212 - RNA, 19 nt, Homo sapiens
  misc_RNA (1)...(19): siRNA sense strand
agaacaaccugcugcaucu

SEQ ID NO: 1287213 - RNA, 19 nt, Homo sapiens
  misc_RNA (1)...(19): siRNA sense strand
agaaagaugcaaacauaug

SEQ ID NO: 1287214 - RNA, 19 nt, Homo sapiens
  misc_RNA (1)...(19): siRNA sense strand
gaggagaagagaacacugu

SEQ ID NO: 1287215 - RNA, 19 nt, Homo sapiens
  misc_RNA (1)...(19): siRNA sense strand
gaaggagcggcagaaguuu

SEQ ID NO: 1287216 - RNA, 19 nt, Homo sapiens
  misc_RNA (1)...(19): siRNA sense strand
agacuuaugugggcagugu

SEQ ID NO: 1287217 - RNA, 19 nt, Homo sapiens
  misc_RNA (1)...(19): siRNA sense strand
ugucauccauggaagugaa

SEQ ID NO: 1287218 - RNA, 19 nt, Homo sapiens
  misc_RNA (1)...(19): siRNA sense strand
agaagguccuggaaaugga

SEQ ID NO: 1287219 - RNA, 19 nt, Homo sapiens
  misc_RNA (1)...(19): siRNA sense strand
uaagaggaaggaacuugaa

SEQ ID NO: 1287220 - RNA, 19 nt, Homo sapiens
  misc_RNA (1)...(19): siRNA sense strand
uuuaaucgcagacuuagaa

SEQ ID NO: 1287221 - RNA, 19 nt, Homo sapiens
  misc_RNA (1)...(19): siRNA sense strand
ggaagugaacguggacaug

SEQ ID NO: 1287222 - RNA, 19 nt, Homo sapiens
  misc_RNA (1)...(19): siRNA sense strand
gcccauaggcagcauguca

SEQ ID NO: 1287223 - RNA, 19 nt, Homo sapiens
  misc_RNA (1)...(19): siRNA sense strand
caacuggagaauuacaaga

SEQ ID NO: 1287224 - RNA, 19 nt, Homo sapiens
  misc_RNA (1)...(19): siRNA sense strand
agcaggacauggagcagua

SEQ ID NO: 1287225 - RNA, 19 nt, Homo sapiens
  misc_RNA (1)...(19): siRNA sense strand
acuggagaauuacaagaaa

SEQ ID NO: 1287226 - RNA, 19 nt, Homo sapiens
  misc_RNA (1)...(19): siRNA sense strand
agacuuagaauccaugaca

SEQ ID NO: 1287227 - RNA, 19 nt, Homo sapiens
  misc_RNA (1)...(19): siRNA sense strand
uugaggagguagagaacaa

SEQ ID NO: 1287228 - RNA, 19 nt, Homo sapiens
  misc_RNA (1)...(19): siRNA sense strand
ugacagcaaaucugacuca

SEQ ID NO: 1287229 - RNA, 19 nt, Homo sapiens
  misc_RNA (1)...(19): siRNA sense strand
ggagcacacccagcaaaug

SEQ ID NO: 1287230 - RNA, 19 nt, Homo sapiens
  misc_RNA (1)...(19): siRNA sense strand
gcaucuggaagacuuaugu

SEQ ID NO: 1287231 - RNA, 19 nt, Homo sapiens
  misc_RNA (1)...(19): siRNA sense strand
cagcuuuaaucgcagacuu

SEQ ID NO: 1287232 - RNA, 19 nt, Homo sapiens
  misc_RNA (1)...(19): siRNA sense strand
gcacacccagcaaaugaag

SEQ ID NO: 1287233 - RNA, 19 nt, Homo sapiens
  misc_RNA (1)...(19): siRNA sense strand
agauggaccugauggacau

SEQ ID NO: 1287234 - RNA, 19 nt, Homo sapiens
  misc_RNA (1)...(19): siRNA sense strand
gcaacuggagaauuacaag

SEQ ID NO: 1287235 - RNA, 19 nt, Homo sapiens
  misc_RNA (1)...(19): siRNA sense strand
cagaagguccuggaaaugg

SEQ ID NO: 1287236 - RNA, 19 nt, Homo sapiens
  misc_RNA (1)...(19): siRNA sense strand
gaauuagaaagaugcaaac

SEQ ID NO: 1287237 - RNA, 19 nt, Homo sapiens
  misc_RNA (1)...(19): siRNA sense strand
ugggcagugugaauuagaa

SEQ ID NO: 1287238 - RNA, 19 nt, Homo sapiens
  misc_RNA (1)...(19): siRNA sense strand
gcagacuuagaauccauga

SEQ ID NO: 1287239 - RNA, 19 nt, Homo sapiens
  misc_RNA (1)...(19): siRNA sense strand
gggcagugugaauuagaaa

SEQ ID NO: 1287240 - RNA, 19 nt, Homo sapiens
  misc_RNA (1)...(19): siRNA sense strand
aauaagaggaaggaacuug

SEQ ID NO: 1287241 - RNA, 19 nt, Homo sapiens
  misc_RNA (1)...(19): siRNA sense strand
gaacaaccugcugcaucug

SEQ ID NO: 1287242 - RNA, 19 nt, Homo sapiens
  misc_RNA (1)...(19): siRNA sense strand
uggagcagauggaccugau

SEQ ID NO: 1287243 - RNA, 19 nt, Homo sapiens
  misc_RNA (1)...(19): siRNA sense strand
auaagaggaaggaacuuga

SEQ ID NO: 1287244 - RNA, 19 nt, Homo sapiens
  misc_RNA (1)...(19): siRNA sense strand
gcaagaauauggacagaaa

SEQ ID NO: 1287245 - RNA, 19 nt, Homo sapiens
  misc_RNA (1)...(19): siRNA sense strand
gaggugaacuuucugguuu

SEQ ID NO: 1287246 - RNA, 19 nt, Homo sapiens
  misc_RNA (1)...(19): siRNA sense strand
gcaaagagaucuacaccau

SEQ ID NO: 1287247 - RNA, 19 nt, Homo sapiens
  misc_RNA (1)...(19): siRNA sense strand
gcaagugcuucauuugauu

SEQ ID NO: 1287248 - RNA, 19 nt, Homo sapiens
  misc_RNA (1)...(19): siRNA sense strand
uugaagaucuggaguauga

SEQ ID NO: 1287249 - RNA, 19 nt, Homo sapiens
  misc_RNA (1)...(19): siRNA sense strand
agacucaacugcaaggaua

SEQ ID NO: 1287250 - RNA, 19 nt, Homo sapiens
  misc_RNA (1)...(19): siRNA sense strand
aaagagaucuacaccauca

SEQ ID NO: 1287251 - RNA, 19 nt, Homo sapiens
  misc_RNA (1)...(19): siRNA sense strand
ucacucggcuuucacguuu

SEQ ID NO: 1287252 - RNA, 19 nt, Homo sapiens
  misc_RNA (1)...(19): siRNA sense strand
caacaaagccacaguccuu

SEQ ID NO: 1287253 - RNA, 19 nt, Homo sapiens
  misc_RNA (1)...(19): siRNA sense strand
caacaucaaugggacacua

SEQ ID NO: 1287254 - RNA, 19 nt, Homo sapiens
  misc_RNA (1)...(19): siRNA sense strand
gaauggagcacaugaaauc

SEQ ID NO: 1287255 - RNA, 19 nt, Homo sapiens
  misc_RNA (1)...(19): siRNA sense strand
ggaaaguacuuggcuagug

SEQ ID NO: 1287256 - RNA, 19 nt, Homo sapiens
  misc_RNA (1)...(19): siRNA sense strand
guucauaucuggaauacuc

SEQ ID NO: 1287257 - RNA, 19 nt, Homo sapiens
  misc_RNA (1)...(19): siRNA sense strand
gagaauggagcacaugaaa

SEQ ID NO: 1287258 - RNA, 19 nt, Homo sapiens
  misc_RNA (1)...(19): siRNA sense strand
gagcacaugaaaucaauaa

SEQ ID NO: 1287259 - RNA, 19 nt, Homo sapiens
  misc_RNA (1)...(19): siRNA sense strand
caaagccaauggaaauaga

SEQ ID NO: 1287260 - RNA, 19 nt, Homo sapiens
  misc_RNA (1)...(19): siRNA sense strand
gcacaugaaaucaauaauc

SEQ ID NO: 1287261 - RNA, 19 nt, Homo sapiens
  misc_RNA (1)...(19): siRNA sense strand
uauggaaccugaaugagaa

SEQ ID NO: 1287262 - RNA, 19 nt, Homo sapiens
  misc_RNA (1)...(19): siRNA sense strand
ggauauggaaccugaauga

SEQ ID NO: 1287263 - RNA, 19 nt, Homo sapiens
  misc_RNA (1)...(19): siRNA sense strand
agaagggacugcaguaugu

SEQ ID NO: 1287264 - RNA, 19 nt, Homo sapiens
  misc_RNA (1)...(19): siRNA sense strand
ccugauaguugcugugauu

SEQ ID NO: 1287265 - RNA, 19 nt, Homo sapiens
  misc_RNA (1)...(19): siRNA sense strand
ggaaauagauggggauguu

SEQ ID NO: 1287266 - RNA, 19 nt, Homo sapiens
  misc_RNA (1)...(19): siRNA sense strand
cgaggucaaugccaucaaa

SEQ ID NO: 1287267 - RNA, 19 nt, Homo sapiens
  misc_RNA (1)...(19): siRNA sense strand
gacaugacauugaagaucu

SEQ ID NO: 1287268 - RNA, 19 nt, Homo sapiens
  misc_RNA (1)...(19): siRNA sense strand
guauguagaggcugagaua

SEQ ID NO: 1287269 - RNA, 19 nt, Homo sapiens
  misc_RNA (1)...(19): siRNA sense strand
gcuaguggauccuuugaca

SEQ ID NO: 1287270 - RNA, 19 nt, Homo sapiens
  misc_RNA (1)...(19): siRNA sense strand
ggaagagaauggagcacau

SEQ ID NO: 1287271 - RNA, 19 nt, Homo sapiens
  misc_RNA (1)...(19): siRNA sense strand
gcaaaggcggcaaccauga

SEQ ID NO: 1287272 - RNA, 19 nt, Homo sapiens
  misc_RNA (1)...(19): siRNA sense strand
agucugagguguucauuug

SEQ ID NO: 1287273 - RNA, 19 nt, Homo sapiens
  misc_RNA (1)...(19): siRNA sense strand
guggauccuuugacaagua

SEQ ID NO: 1287274 - RNA, 19 nt, Homo sapiens
  misc_RNA (1)...(19): siRNA sense strand
gauguggacuggcagaaca

SEQ ID NO: 1287275 - RNA, 19 nt, Homo sapiens
  misc_RNA (1)...(19): siRNA sense strand
uaaccuggccagcaccuua

SEQ ID NO: 1287276 - RNA, 19 nt, Homo sapiens
  misc_RNA (1)...(19): siRNA sense strand
guugagacauuguauacga

SEQ ID NO: 1287277 - RNA, 19 nt, Homo sapiens
  misc_RNA (1)...(19): siRNA sense strand
ggcacgacgucccaaguaa

SEQ ID NO: 1287278 - RNA, 19 nt, Homo sapiens
  misc_RNA (1)...(19): siRNA sense strand
ggcaagugcuucauuugau

SEQ ID NO: 1287279 - RNA, 19 nt, Homo sapiens
  misc_RNA (1)...(19): siRNA sense strand
cggaugacaugacauugaa

SEQ ID NO: 1287280 - RNA, 19 nt, Homo sapiens
  misc_RNA (1)...(19): siRNA sense strand
ggaacccugucagugauuu

SEQ ID NO: 1287281 - RNA, 19 nt, Homo sapiens
  misc_RNA (1)...(19): siRNA sense strand
gaagucucguccacagcua

SEQ ID NO: 1287282 - RNA, 19 nt, Homo sapiens
  misc_RNA (1)...(19): siRNA sense strand
guuggcaagugcuucauuu

SEQ ID NO: 1287283 - RNA, 19 nt, Homo sapiens
  misc_RNA (1)...(19): siRNA sense strand
gaagcucacucagcagcaa

SEQ ID NO: 1287284 - RNA, 19 nt, Homo sapiens
  misc_RNA (1)...(19): siRNA sense strand
caucuucgcucugaaaugg

SEQ ID NO: 1287285 - RNA, 19 nt, Homo sapiens
  misc_RNA (1)...(19): siRNA sense strand
ucaccucacuggacuggaa

SEQ ID NO: 1287286 - RNA, 19 nt, Homo sapiens
  misc_RNA (1)...(19): siRNA sense strand
ccacgagucugagguguuc

SEQ ID NO: 1287287 - RNA, 19 nt, Homo sapiens
  misc_RNA (1)...(19): siRNA sense strand
gcucugaaauggaacaaaa

SEQ ID NO: 1287288 - RNA, 19 nt, Homo sapiens
  misc_RNA (1)...(19): siRNA sense strand
caccuuaggccaacauaaa

SEQ ID NO: 1287289 - RNA, 19 nt, Homo sapiens
  misc_RNA (1)...(19): siRNA sense strand
ggaacacuauuggcuaugg

SEQ ID NO: 1287290 - RNA, 19 nt, Homo sapiens
  misc_RNA (1)...(19): siRNA sense strand
gaacgcccgaggagauaaa

SEQ ID NO: 1287291 - RNA, 19 nt, Homo sapiens
  misc_RNA (1)...(19): siRNA sense strand
ccaaggcacuggcgguauc

SEQ ID NO: 1287292 - RNA, 19 nt, Homo sapiens
  misc_RNA (1)...(19): siRNA sense strand
gggcacgacgucccaagua

SEQ ID NO: 1287293 - RNA, 19 nt, Homo sapiens
  misc_RNA (1)...(19): siRNA sense strand
cagcucguguugagacauu

SEQ ID NO: 1287294 - RNA, 19 nt, Homo sapiens
  misc_RNA (1)...(19): siRNA sense strand
cauugaagaucuggaguau

SEQ ID NO: 1287295 - RNA, 19 nt, Homo sapiens
  misc_RNA (1)...(19): siRNA sense strand
gaagggacugcaguaugua

SEQ ID NO: 1287296 - RNA, 19 nt, Homo sapiens
  misc_RNA (1)...(19): siRNA sense strand
gcucggaugacaugacauu

SEQ ID NO: 1287297 - RNA, 19 nt, Homo sapiens
  misc_RNA (1)...(19): siRNA sense strand
cacgacgucccaaguaaua

SEQ ID NO: 1287298 - RNA, 19 nt, Homo sapiens
  misc_RNA (1)...(19): siRNA sense strand
caacugcaaggauauggaa

SEQ ID NO: 1287299 - RNA, 19 nt, Homo sapiens
  misc_RNA (1)...(19): siRNA sense strand
ccacagaggcaucagcaau

SEQ ID NO: 1287300 - RNA, 19 nt, Homo sapiens
  misc_RNA (1)...(19): siRNA sense strand
gcaggcauuuggagagaag

SEQ ID NO: 1287301 - RNA, 19 nt, Homo sapiens
  misc_RNA (1)...(19): siRNA sense strand
agauaagcaucaacaagga

SEQ ID NO: 1287302 - RNA, 19 nt, Homo sapiens
  misc_RNA (1)...(19): siRNA sense strand
gaugacaugacauugaaga

SEQ ID NO: 1287303 - RNA, 19 nt, Homo sapiens
  misc_RNA (1)...(19): siRNA sense strand
cagaacaacaugaccuuug

SEQ ID NO: 1287304 - RNA, 19 nt, Homo sapiens
  misc_RNA (1)...(19): siRNA sense strand
gaugguuucgcaagaauau

SEQ ID NO: 1287305 - RNA, 19 nt, Homo sapiens
  misc_RNA (1)...(19): siRNA sense strand
ccacccagcucguguugag

SEQ ID NO: 1287306 - RNA, 19 nt, Homo sapiens
  misc_RNA (1)...(19): siRNA sense strand
gaagagaauggagcacaug

SEQ ID NO: 1287307 - RNA, 19 nt, Homo sapiens
  misc_RNA (1)...(19): siRNA sense strand
ggauccuucuggaauguug

SEQ ID NO: 1287308 - RNA, 19 nt, Homo sapiens
  misc_RNA (1)...(19): siRNA sense strand
ucacacaggagaagccaaa

SEQ ID NO: 1287309 - RNA, 19 nt, Homo sapiens
  misc_RNA (1)...(19): siRNA sense strand
cagcaggcauuuggagaga

SEQ ID NO: 1287310 - RNA, 19 nt, Homo sapiens
  misc_RNA (1)...(19): siRNA sense strand
ggugaacuuucugguuuau

SEQ ID NO: 1287311 - RNA, 19 nt, Homo sapiens
  misc_RNA (1)...(19): siRNA sense strand
gugacgaggugaacuuucu

SEQ ID NO: 1287312 - RNA, 19 nt, Homo sapiens
  misc_RNA (1)...(19): siRNA sense strand
gcagaacaacaugaccuuu

SEQ ID NO: 1287313 - RNA, 19 nt, Homo sapiens
  misc_RNA (1)...(19): siRNA sense strand
uaugaugguuucgcaagaa

SEQ ID NO: 1287314 - RNA, 19 nt, Homo sapiens
  misc_RNA (1)...(19): siRNA sense strand
cgacgucccaaguaauaaa

SEQ ID NO: 1287315 - RNA, 19 nt, Homo sapiens
  misc_RNA (1)...(19): siRNA sense strand
gcacgacgucccaaguaau

SEQ ID NO: 1287316 - RNA, 19 nt, Homo sapiens
  misc_RNA (1)...(19): siRNA sense strand
auaaagaugucaccucacu

SEQ ID NO: 1287317 - RNA, 19 nt, Homo sapiens
  misc_RNA (1)...(19): siRNA sense strand
gagugcugguguagacaaa

SEQ ID NO: 1287318 - RNA, 19 nt, Homo sapiens
  misc_RNA (1)...(19): siRNA sense strand
acucaaagccaauggaaau

SEQ ID NO: 1287319 - RNA, 19 nt, Homo sapiens
  misc_RNA (1)...(19): siRNA sense strand
gcaguuuccuuuucauuca

SEQ ID NO: 1287320 - RNA, 19 nt, Homo sapiens
  misc_RNA (1)...(19): siRNA sense strand
gcaccuuaggccaacauaa

SEQ ID NO: 1287321 - RNA, 19 nt, Homo sapiens
  misc_RNA (1)...(19): siRNA sense strand
gagacauuguauacgagaa

SEQ ID NO: 1287322 - RNA, 19 nt, Homo sapiens
  misc_RNA (1)...(19): siRNA sense strand
gaagaucuggaguaugaag

SEQ ID NO: 1287323 - RNA, 19 nt, Homo sapiens
  misc_RNA (1)...(19): siRNA sense strand
gcaaaauccuccaaagaac

SEQ ID NO: 1287324 - RNA, 19 nt, Homo sapiens
  misc_RNA (1)...(19): siRNA sense strand
gaaccugaaugagaauagc

SEQ ID NO: 1287325 - RNA, 19 nt, Homo sapiens
  misc_RNA (1)...(19): siRNA sense strand
cagaagggacugcaguaug

SEQ ID NO: 1287326 - RNA, 19 nt, Homo sapiens
  misc_RNA (1)...(19): siRNA sense strand
ccuggaacccugucaguga

SEQ ID NO: 1287327 - RNA, 19 nt, Homo sapiens
  misc_RNA (1)...(19): siRNA sense strand
uggagcacaugaaaucaau

SEQ ID NO: 1287328 - RNA, 19 nt, Homo sapiens
  misc_RNA (1)...(19): siRNA sense strand
aacccaaacuccagcauca

SEQ ID NO: 1287329 - RNA, 19 nt, Homo sapiens
  misc_RNA (1)...(19): siRNA sense strand
ugaacuuucugguuuaucg

SEQ ID NO: 1287330 - RNA, 19 nt, Homo sapiens
  misc_RNA (1)...(19): siRNA sense strand
gagauuccacccaacaaag

SEQ ID NO: 1287331 - RNA, 19 nt, Homo sapiens
  misc_RNA (1)...(19): siRNA sense strand
ggguucauaugaugguuuc

SEQ ID NO: 1287332 - RNA, 19 nt, Homo sapiens
  misc_RNA (1)...(19): siRNA sense strand
acacacucaugaagcauca

SEQ ID NO: 1287333 - RNA, 19 nt, Homo sapiens
  misc_RNA (1)...(19): siRNA sense strand
ggacuggcagaacaacaug

SEQ ID NO: 1287334 - RNA, 19 nt, Homo sapiens
  misc_RNA (1)...(19): siRNA sense strand
gagaagccaaacagcaguu

SEQ ID NO: 1287335 - RNA, 19 nt, Homo sapiens
  misc_RNA (1)...(19): siRNA sense strand
aggugaacuuucugguuua

SEQ ID NO: 1287336 - RNA, 19 nt, Homo sapiens
  misc_RNA (1)...(19): siRNA sense strand
ggagcacaugaaaucaaua

SEQ ID NO: 1287337 - RNA, 19 nt, Homo sapiens
  misc_RNA (1)...(19): siRNA sense strand
uggcaagugcuucauuuga

SEQ ID NO: 1287338 - RNA, 19 nt, Homo sapiens
  misc_RNA (1)...(19): siRNA sense strand
gcugagauaagcaucaaca

SEQ ID NO: 1287339 - RNA, 19 nt, Homo sapiens
  misc_RNA (1)...(19): siRNA sense strand
uagagucccugucccugau

SEQ ID NO: 1287340 - RNA, 19 nt, Homo sapiens
  misc_RNA (1)...(19): siRNA sense strand
ugagauuccacccaacaaa

SEQ ID NO: 1287341 - RNA, 19 nt, Homo sapiens
  misc_RNA (1)...(19): siRNA sense strand
gugcuucauuugauucuac

SEQ ID NO: 1287342 - RNA, 19 nt, Homo sapiens
  misc_RNA (1)...(19): siRNA sense strand
ggaacgcccgaggagauaa

SEQ ID NO: 1287343 - RNA, 19 nt, Homo sapiens
  misc_RNA (1)...(19): siRNA sense strand
gcacccacacacucaugaa

SEQ ID NO: 1287344 - RNA, 19 nt, Homo sapiens
  misc_RNA (1)...(19): siRNA sense strand
gcaagaauauggacagaaa

SEQ ID NO: 1287345 - RNA, 19 nt, Homo sapiens
  misc_RNA (1)...(19): siRNA sense strand
gaggugaacuuucugguuu

SEQ ID NO: 1287346 - RNA, 19 nt, Homo sapiens
  misc_RNA (1)...(19): siRNA sense strand
gcaaagagaucuacaccau

SEQ ID NO: 1287347 - RNA, 19 nt, Homo sapiens
  misc_RNA (1)...(19): siRNA sense strand
gcaagugcuucauuugauu

SEQ ID NO: 1287348 - RNA, 19 nt, Homo sapiens
  misc_RNA (1)...(19): siRNA sense strand
uugaagaucuggaguauga

SEQ ID NO: 1287349 - RNA, 19 nt, Homo sapiens
  misc_RNA (1)...(19): siRNA sense strand
agacucaacugcaaggaua

SEQ ID NO: 1287350 - RNA, 19 nt, Homo sapiens
  misc_RNA (1)...(19): siRNA sense strand
aaagagaucuacaccauca

SEQ ID NO: 1287351 - RNA, 19 nt, Homo sapiens
  misc_RNA (1)...(19): siRNA sense strand
ucacucggcuuucacguuu

SEQ ID NO: 1287352 - RNA, 19 nt, Homo sapiens
  misc_RNA (1)...(19): siRNA sense strand
caacaaagccacaguccuu

SEQ ID NO: 1287353 - RNA, 19 nt, Homo sapiens
  misc_RNA (1)...(19): siRNA sense strand
caacaucaaugggacacua

SEQ ID NO: 1287354 - RNA, 19 nt, Homo sapiens
  misc_RNA (1)...(19): siRNA sense strand
gaauggagcacaugaaauc

SEQ ID NO: 1287355 - RNA, 19 nt, Homo sapiens
  misc_RNA (1)...(19): siRNA sense strand
ggaaaguacuuggcuagug

SEQ ID NO: 1287356 - RNA, 19 nt, Homo sapiens
  misc_RNA (1)...(19): siRNA sense strand
guucauaucuggaauacuc

SEQ ID NO: 1287357 - RNA, 19 nt, Homo sapiens
  misc_RNA (1)...(19): siRNA sense strand
gagaauggagcacaugaaa

SEQ ID NO: 1287358 - RNA, 19 nt, Homo sapiens
  misc_RNA (1)...(19): siRNA sense strand
gagcacaugaaaucaauaa

SEQ ID NO: 1287359 - RNA, 19 nt, Homo sapiens
  misc_RNA (1)...(19): siRNA sense strand
caaagccaauggaaauaga

SEQ ID NO: 1287360 - RNA, 19 nt, Homo sapiens
  misc_RNA (1)...(19): siRNA sense strand
gcacaugaaaucaauaauc

SEQ ID NO: 1287361 - RNA, 19 nt, Homo sapiens
  misc_RNA (1)...(19): siRNA sense strand
uauggaaccugaaugagaa

SEQ ID NO: 1287362 - RNA, 19 nt, Homo sapiens
  misc_RNA (1)...(19): siRNA sense strand
ggauauggaaccugaauga

SEQ ID NO: 1287363 - RNA, 19 nt, Homo sapiens
  misc_RNA (1)...(19): siRNA sense strand
agaagggacugcaguaugu

SEQ ID NO: 1287364 - RNA, 19 nt, Homo sapiens
  misc_RNA (1)...(19): siRNA sense strand
ccugauaguugcugugauu

SEQ ID NO: 1287365 - RNA, 19 nt, Homo sapiens
  misc_RNA (1)...(19): siRNA sense strand
ggaaauagauggggauguu

SEQ ID NO: 1287366 - RNA, 19 nt, Homo sapiens
  misc_RNA (1)...(19): siRNA sense strand
cgaggucaaugccaucaaa

SEQ ID NO: 1287367 - RNA, 19 nt, Homo sapiens
  misc_RNA (1)...(19): siRNA sense strand
gacaugacauugaagaucu

SEQ ID NO: 1287368 - RNA, 19 nt, Homo sapiens
  misc_RNA (1)...(19): siRNA sense strand
guauguagaggcugagaua

SEQ ID NO: 1287369 - RNA, 19 nt, Homo sapiens
  misc_RNA (1)...(19): siRNA sense strand
gcuaguggauccuuugaca

SEQ ID NO: 1287370 - RNA, 19 nt, Homo sapiens
  misc_RNA (1)...(19): siRNA sense strand
ggaagagaauggagcacau

SEQ ID NO: 1287371 - RNA, 19 nt, Homo sapiens
  misc_RNA (1)...(19): siRNA sense strand
gcaaaggcggcaaccauga

SEQ ID NO: 1287372 - RNA, 19 nt, Homo sapiens
  misc_RNA (1)...(19): siRNA sense strand
agucugagguguucauuug

SEQ ID NO: 1287373 - RNA, 19 nt, Homo sapiens
  misc_RNA (1)...(19): siRNA sense strand
guggauccuuugacaagua

SEQ ID NO: 1287374 - RNA, 19 nt, Homo sapiens
  misc_RNA (1)...(19): siRNA sense strand
gauguggacuggcagaaca

SEQ ID NO: 1287375 - RNA, 19 nt, Homo sapiens
  misc_RNA (1)...(19): siRNA sense strand
uaaccuggccagcaccuua

SEQ ID NO: 1287376 - RNA, 19 nt, Homo sapiens
  misc_RNA (1)...(19): siRNA sense strand
guugagacauuguauacga

SEQ ID NO: 1287377 - RNA, 19 nt, Homo sapiens
  misc_RNA (1)...(19): siRNA sense strand
ggcacgacgucccaaguaa

SEQ ID NO: 1287378 - RNA, 19 nt, Homo sapiens
  misc_RNA (1)...(19): siRNA sense strand
ggcaagugcuucauuugau

SEQ ID NO: 1287379 - RNA, 19 nt, Homo sapiens
  misc_RNA (1)...(19): siRNA sense strand
cggaugacaugacauugaa

SEQ ID NO: 1287380 - RNA, 19 nt, Homo sapiens
  misc_RNA (1)...(19): siRNA sense strand
ggaacccugucagugauuu

SEQ ID NO: 1287381 - RNA, 19 nt, Homo sapiens
  misc_RNA (1)...(19): siRNA sense strand
gaagucucguccacagcua

SEQ ID NO: 1287382 - RNA, 19 nt, Homo sapiens
  misc_RNA (1)...(19): siRNA sense strand
guuggcaagugcuucauuu

SEQ ID NO: 1287383 - RNA, 19 nt, Homo sapiens
  misc_RNA (1)...(19): siRNA sense strand
gaagcucacucagcagcaa

SEQ ID NO: 1287384 - RNA, 19 nt, Homo sapiens
  misc_RNA (1)...(19): siRNA sense strand
caucuucgcucugaaaugg

SEQ ID NO: 1287385 - RNA, 19 nt, Homo sapiens
  misc_RNA (1)...(19): siRNA sense strand
ucaccucacuggacuggaa

SEQ ID NO: 1287386 - RNA, 19 nt, Homo sapiens
  misc_RNA (1)...(19): siRNA sense strand
ccacgagucugagguguuc

SEQ ID NO: 1287387 - RNA, 19 nt, Homo sapiens
  misc_RNA (1)...(19): siRNA sense strand
gcucugaaauggaacaaaa

SEQ ID NO: 1287388 - RNA, 19 nt, Homo sapiens
  misc_RNA (1)...(19): siRNA sense strand
caccuuaggccaacauaaa

SEQ ID NO: 1287389 - RNA, 19 nt, Homo sapiens
  misc_RNA (1)...(19): siRNA sense strand
ggaacacuauuggcuaugg

SEQ ID NO: 1287390 - RNA, 19 nt, Homo sapiens
  misc_RNA (1)...(19): siRNA sense strand
gaacgcccgaggagauaaa

SEQ ID NO: 1287391 - RNA, 19 nt, Homo sapiens
  misc_RNA (1)...(19): siRNA sense strand
ccaaggcacuggcgguauc

SEQ ID NO: 1287392 - RNA, 19 nt, Homo sapiens
  misc_RNA (1)...(19): siRNA sense strand
gggcacgacgucccaagua

SEQ ID NO: 1287393 - RNA, 19 nt, Homo sapiens
  misc_RNA (1)...(19): siRNA sense strand
cagcucguguugagacauu

SEQ ID NO: 1287394 - RNA, 19 nt, Homo sapiens
  misc_RNA (1)...(19): siRNA sense strand
cauugaagaucuggaguau

SEQ ID NO: 1287395 - RNA, 19 nt, Homo sapiens
  misc_RNA (1)...(19): siRNA sense strand
gaagggacugcaguaugua

SEQ ID NO: 1287396 - RNA, 19 nt, Homo sapiens
  misc_RNA (1)...(19): siRNA sense strand
gcucggaugacaugacauu

SEQ ID NO: 1287397 - RNA, 19 nt, Homo sapiens
  misc_RNA (1)...(19): siRNA sense strand
cacgacgucccaaguaaua

SEQ ID NO: 1287398 - RNA, 19 nt, Homo sapiens
  misc_RNA (1)...(19): siRNA sense strand
caacugcaaggauauggaa

SEQ ID NO: 1287399 - RNA, 19 nt, Homo sapiens
  misc_RNA (1)...(19): siRNA sense strand
ccacagaggcaucagcaau

SEQ ID NO: 1287400 - RNA, 19 nt, Homo sapiens
  misc_RNA (1)...(19): siRNA sense strand
gcaggcauuuggagagaag

SEQ ID NO: 1287401 - RNA, 19 nt, Homo sapiens
  misc_RNA (1)...(19): siRNA sense strand
agauaagcaucaacaagga

SEQ ID NO: 1287402 - RNA, 19 nt, Homo sapiens
  misc_RNA (1)...(19): siRNA sense strand
gaugacaugacauugaaga

SEQ ID NO: 1287403 - RNA, 19 nt, Homo sapiens
  misc_RNA (1)...(19): siRNA sense strand
cagaacaacaugaccuuug

SEQ ID NO: 1287404 - RNA, 19 nt, Homo sapiens
  misc_RNA (1)...(19): siRNA sense strand
gaugguuucgcaagaauau

SEQ ID NO: 1287405 - RNA, 19 nt, Homo sapiens
  misc_RNA (1)...(19): siRNA sense strand
ccacccagcucguguugag

SEQ ID NO: 1287406 - RNA, 19 nt, Homo sapiens
  misc_RNA (1)...(19): siRNA sense strand
gaagagaauggagcacaug

SEQ ID NO: 1287407 - RNA, 19 nt, Homo sapiens
  misc_RNA (1)...(19): siRNA sense strand
ggauccuucuggaauguug

SEQ ID NO: 1287408 - RNA, 19 nt, Homo sapiens
  misc_RNA (1)...(19): siRNA sense strand
ucacacaggagaagccaaa

SEQ ID NO: 1287409 - RNA, 19 nt, Homo sapiens
  misc_RNA (1)...(19): siRNA sense strand
cagcaggcauuuggagaga

SEQ ID NO: 1287410 - RNA, 19 nt, Homo sapiens
  misc_RNA (1)...(19): siRNA sense strand
ggugaacuuucugguuuau

SEQ ID NO: 1287411 - RNA, 19 nt, Homo sapiens
  misc_RNA (1)...(19): siRNA sense strand
gugacgaggugaacuuucu

SEQ ID NO: 1287412 - RNA, 19 nt, Homo sapiens
  misc_RNA (1)...(19): siRNA sense strand
gcagaacaacaugaccuuu

SEQ ID NO: 1287413 - RNA, 19 nt, Homo sapiens
  misc_RNA (1)...(19): siRNA sense strand
uaugaugguuucgcaagaa

SEQ ID NO: 1287414 - RNA, 19 nt, Homo sapiens
  misc_RNA (1)...(19): siRNA sense strand
cgacgucccaaguaauaaa

SEQ ID NO: 1287415 - RNA, 19 nt, Homo sapiens
  misc_RNA (1)...(19): siRNA sense strand
gcacgacgucccaaguaau

SEQ ID NO: 1287416 - RNA, 19 nt, Homo sapiens
  misc_RNA (1)...(19): siRNA sense strand
auaaagaugucaccucacu

SEQ ID NO: 1287417 - RNA, 19 nt, Homo sapiens
  misc_RNA (1)...(19): siRNA sense strand
gagugcugguguagacaaa

SEQ ID NO: 1287418 - RNA, 19 nt, Homo sapiens
  misc_RNA (1)...(19): siRNA sense strand
acucaaagccaauggaaau

SEQ ID NO: 1287419 - RNA, 19 nt, Homo sapiens
  misc_RNA (1)...(19): siRNA sense strand
gcaguuuccuuuucauuca

SEQ ID NO: 1287420 - RNA, 19 nt, Homo sapiens
  misc_RNA (1)...(19): siRNA sense strand
gcaccuuaggccaacauaa

SEQ ID NO: 1287421 - RNA, 19 nt, Homo sapiens
  misc_RNA (1)...(19): siRNA sense strand
gagacauuguauacgagaa

SEQ ID NO: 1287422 - RNA, 19 nt, Homo sapiens
  misc_RNA (1)...(19): siRNA sense strand
gaagaucuggaguaugaag

SEQ ID NO: 1287423 - RNA, 19 nt, Homo sapiens
  misc_RNA (1)...(19): siRNA sense strand
gcaaaauccuccaaagaac

SEQ ID NO: 1287424 - RNA, 19 nt, Homo sapiens
  misc_RNA (1)...(19): siRNA sense strand
gaaccugaaugagaauagc

SEQ ID NO: 1287425 - RNA, 19 nt, Homo sapiens
  misc_RNA (1)...(19): siRNA sense strand
cagaagggacugcaguaug

SEQ ID NO: 1287426 - RNA, 19 nt, Homo sapiens
  misc_RNA (1)...(19): siRNA sense strand
ccuggaacccugucaguga

SEQ ID NO: 1287427 - RNA, 19 nt, Homo sapiens
  misc_RNA (1)...(19): siRNA sense strand
uggagcacaugaaaucaau

SEQ ID NO: 1287428 - RNA, 19 nt, Homo sapiens
  misc_RNA (1)...(19): siRNA sense strand
aacccaaacuccagcauca

SEQ ID NO: 1287429 - RNA, 19 nt, Homo sapiens
  misc_RNA (1)...(19): siRNA sense strand
ugaacuuucugguuuaucg

SEQ ID NO: 1287430 - RNA, 19 nt, Homo sapiens
  misc_RNA (1)...(19): siRNA sense strand
gagauuccacccaacaaag

SEQ ID NO: 1287431 - RNA, 19 nt, Homo sapiens
  misc_RNA (1)...(19): siRNA sense strand
ggguucauaugaugguuuc

SEQ ID NO: 1287432 - RNA, 19 nt, Homo sapiens
  misc_RNA (1)...(19): siRNA sense strand
acacacucaugaagcauca

SEQ ID NO: 1287433 - RNA, 19 nt, Homo sapiens
  misc_RNA (1)...(19): siRNA sense strand
ggacuggcagaacaacaug

SEQ ID NO: 1287434 - RNA, 19 nt, Homo sapiens
  misc_RNA (1)...(19): siRNA sense strand
gagaagccaaacagcaguu

SEQ ID NO: 1287435 - RNA, 19 nt, Homo sapiens
  misc_RNA (1)...(19): siRNA sense strand
aggugaacuuucugguuua

SEQ ID NO: 1287436 - RNA, 19 nt, Homo sapiens
  misc_RNA (1)...(19): siRNA sense strand
ggagcacaugaaaucaaua

SEQ ID NO: 1287437 - RNA, 19 nt, Homo sapiens
  misc_RNA (1)...(19): siRNA sense strand
uggcaagugcuucauuuga

SEQ ID NO: 1287438 - RNA, 19 nt, Homo sapiens
  misc_RNA (1)...(19): siRNA sense strand
gcugagauaagcaucaaca

SEQ ID NO: 1287439 - RNA, 19 nt, Homo sapiens
  misc_RNA (1)...(19): siRNA sense strand
uagagucccugucccugau

SEQ ID NO: 1287440 - RNA, 19 nt, Homo sapiens
  misc_RNA (1)...(19): siRNA sense strand
ugagauuccacccaacaaa

SEQ ID NO: 1287441 - RNA, 19 nt, Homo sapiens
  misc_RNA (1)...(19): siRNA sense strand
gugcuucauuugauucuac

SEQ ID NO: 1287442 - RNA, 19 nt, Homo sapiens
  misc_RNA (1)...(19): siRNA sense strand
ggaacgcccgaggagauaa

SEQ ID NO: 1287443 - RNA, 19 nt, Homo sapiens
  misc_RNA (1)...(19): siRNA sense strand
gcacccacacacucaugaa

SEQ ID NO: 1287444 - RNA, 19 nt, Homo sapiens
  misc_RNA (1)...(19): siRNA sense strand
gcaagaauauggacagaaa

SEQ ID NO: 1287445 - RNA, 19 nt, Homo sapiens
  misc_RNA (1)...(19): siRNA sense strand
gaggugaacuuucugguuu

SEQ ID NO: 1287446 - RNA, 19 nt, Homo sapiens
  misc_RNA (1)...(19): siRNA sense strand
gcaaagagaucuacaccau

SEQ ID NO: 1287447 - RNA, 19 nt, Homo sapiens
  misc_RNA (1)...(19): siRNA sense strand
gcaagugcuucauuugauu

SEQ ID NO: 1287448 - RNA, 19 nt, Homo sapiens
  misc_RNA (1)...(19): siRNA sense strand
uugaagaucuggaguauga

SEQ ID NO: 1287449 - RNA, 19 nt, Homo sapiens
  misc_RNA (1)...(19): siRNA sense strand
agacucaacugcaaggaua

SEQ ID NO: 1287450 - RNA, 19 nt, Homo sapiens
  misc_RNA (1)...(19): siRNA sense strand
aaagagaucuacaccauca

SEQ ID NO: 1287451 - RNA, 19 nt, Homo sapiens
  misc_RNA (1)...(19): siRNA sense strand
ucacucggcuuucacguuu

SEQ ID NO: 1287452 - RNA, 19 nt, Homo sapiens
  misc_RNA (1)...(19): siRNA sense strand
caacaaagccacaguccuu

SEQ ID NO: 1287453 - RNA, 19 nt, Homo sapiens
  misc_RNA (1)...(19): siRNA sense strand
caacaucaaugggacacua

SEQ ID NO: 1287454 - RNA, 19 nt, Homo sapiens
  misc_RNA (1)...(19): siRNA sense strand
gaauggagcacaugaaauc

SEQ ID NO: 1287455 - RNA, 19 nt, Homo sapiens
  misc_RNA (1)...(19): siRNA sense strand
ggaaaguacuuggcuagug

SEQ ID NO: 1287456 - RNA, 19 nt, Homo sapiens
  misc_RNA (1)...(19): siRNA sense strand
guucauaucuggaauacuc

SEQ ID NO: 1287457 - RNA, 19 nt, Homo sapiens
  misc_RNA (1)...(19): siRNA sense strand
gagaauggagcacaugaaa

SEQ ID NO: 1287458 - RNA, 19 nt, Homo sapiens
  misc_RNA (1)...(19): siRNA sense strand
gagcacaugaaaucaauaa

SEQ ID NO: 1287459 - RNA, 19 nt, Homo sapiens
  misc_RNA (1)...(19): siRNA sense strand
caaagccaauggaaauaga

SEQ ID NO: 1287460 - RNA, 19 nt, Homo sapiens
  misc_RNA (1)...(19): siRNA sense strand
gcacaugaaaucaauaauc

SEQ ID NO: 1287461 - RNA, 19 nt, Homo sapiens
  misc_RNA (1)...(19): siRNA sense strand
uauggaaccugaaugagaa

SEQ ID NO: 1287462 - RNA, 19 nt, Homo sapiens
  misc_RNA (1)...(19): siRNA sense strand
ggauauggaaccugaauga

SEQ ID NO: 1287463 - RNA, 19 nt, Homo sapiens
  misc_RNA (1)...(19): siRNA sense strand
agaagggacugcaguaugu

SEQ ID NO: 1287464 - RNA, 19 nt, Homo sapiens
  misc_RNA (1)...(19): siRNA sense strand
ccugauaguugcugugauu

SEQ ID NO: 1287465 - RNA, 19 nt, Homo sapiens
  misc_RNA (1)...(19): siRNA sense strand
ggaaauagauggggauguu

SEQ ID NO: 1287466 - RNA, 19 nt, Homo sapiens
  misc_RNA (1)...(19): siRNA sense strand
cgaggucaaugccaucaaa

SEQ ID NO: 1287467 - RNA, 19 nt, Homo sapiens
  misc_RNA (1)...(19): siRNA sense strand
gacaugacauugaagaucu

SEQ ID NO: 1287468 - RNA, 19 nt, Homo sapiens
  misc_RNA (1)...(19): siRNA sense strand
guauguagaggcugagaua

SEQ ID NO: 1287469 - RNA, 19 nt, Homo sapiens
  misc_RNA (1)...(19): siRNA sense strand
gcuaguggauccuuugaca

SEQ ID NO: 1287470 - RNA, 19 nt, Homo sapiens
  misc_RNA (1)...(19): siRNA sense strand
ggaagagaauggagcacau

SEQ ID NO: 1287471 - RNA, 19 nt, Homo sapiens
  misc_RNA (1)...(19): siRNA sense strand
gcaaaggcggcaaccauga

SEQ ID NO: 1287472 - RNA, 19 nt, Homo sapiens
  misc_RNA (1)...(19): siRNA sense strand
agucugagguguucauuug

SEQ ID NO: 1287473 - RNA, 19 nt, Homo sapiens
  misc_RNA (1)...(19): siRNA sense strand
guggauccuuugacaagua

SEQ ID NO: 1287474 - RNA, 19 nt, Homo sapiens
  misc_RNA (1)...(19): siRNA sense strand
gauguggacuggcagaaca

SEQ ID NO: 1287475 - RNA, 19 nt, Homo sapiens
  misc_RNA (1)...(19): siRNA sense strand
uaaccuggccagcaccuua

SEQ ID NO: 1287476 - RNA, 19 nt, Homo sapiens
  misc_RNA (1)...(19): siRNA sense strand
guugagacauuguauacga

SEQ ID NO: 1287477 - RNA, 19 nt, Homo sapiens
  misc_RNA (1)...(19): siRNA sense strand
ggcacgacgucccaaguaa

SEQ ID NO: 1287478 - RNA, 19 nt, Homo sapiens
  misc_RNA (1)...(19): siRNA sense strand
ggcaagugcuucauuugau

SEQ ID NO: 1287479 - RNA, 19 nt, Homo sapiens
  misc_RNA (1)...(19): siRNA sense strand
cggaugacaugacauugaa

SEQ ID NO: 1287480 - RNA, 19 nt, Homo sapiens
  misc_RNA (1)...(19): siRNA sense strand
ggaacccugucagugauuu

SEQ ID NO: 1287481 - RNA, 19 nt, Homo sapiens
  misc_RNA (1)...(19): siRNA sense strand
gaagucucguccacagcua

SEQ ID NO: 1287482 - RNA, 19 nt, Homo sapiens
  misc_RNA (1)...(19): siRNA sense strand
guuggcaagugcuucauuu

SEQ ID NO: 1287483 - RNA, 19 nt, Homo sapiens
  misc_RNA (1)...(19): siRNA sense strand
gaagcucacucagcagcaa

SEQ ID NO: 1287484 - RNA, 19 nt, Homo sapiens
  misc_RNA (1)...(19): siRNA sense strand
caucuucgcucugaaaugg

SEQ ID NO: 1287485 - RNA, 19 nt, Homo sapiens
  misc_RNA (1)...(19): siRNA sense strand
ucaccucacuggacuggaa

SEQ ID NO: 1287486 - RNA, 19 nt, Homo sapiens
  misc_RNA (1)...(19): siRNA sense strand
ccacgagucugagguguuc

SEQ ID NO: 1287487 - RNA, 19 nt, Homo sapiens
  misc_RNA (1)...(19): siRNA sense strand
gcucugaaauggaacaaaa

SEQ ID NO: 1287488 - RNA, 19 nt, Homo sapiens
  misc_RNA (1)...(19): siRNA sense strand
caccuuaggccaacauaaa

SEQ ID NO: 1287489 - RNA, 19 nt, Homo sapiens
  misc_RNA (1)...(19): siRNA sense strand
ggaacacuauuggcuaugg

SEQ ID NO: 1287490 - RNA, 19 nt, Homo sapiens
  misc_RNA (1)...(19): siRNA sense strand
gaacgcccgaggagauaaa

SEQ ID NO: 1287491 - RNA, 19 nt, Homo sapiens
  misc_RNA (1)...(19): siRNA sense strand
ccaaggcacuggcgguauc

SEQ ID NO: 1287492 - RNA, 19 nt, Homo sapiens
  misc_RNA (1)...(19): siRNA sense strand
gggcacgacgucccaagua

SEQ ID NO: 1287493 - RNA, 19 nt, Homo sapiens
  misc_RNA (1)...(19): siRNA sense strand
cagcucguguugagacauu

SEQ ID NO: 1287494 - RNA, 19 nt, Homo sapiens
  misc_RNA (1)...(19): siRNA sense strand
cauugaagaucuggaguau

SEQ ID NO: 1287495 - RNA, 19 nt, Homo sapiens
  misc_RNA (1)...(19): siRNA sense strand
gaagggacugcaguaugua

SEQ ID NO: 1287496 - RNA, 19 nt, Homo sapiens
  misc_RNA (1)...(19): siRNA sense strand
gcucggaugacaugacauu

SEQ ID NO: 1287497 - RNA, 19 nt, Homo sapiens
  misc_RNA (1)...(19): siRNA sense strand
cacgacgucccaaguaaua

SEQ ID NO: 1287498 - RNA, 19 nt, Homo sapiens
  misc_RNA (1)...(19): siRNA sense strand
caacugcaaggauauggaa

SEQ ID NO: 1287499 - RNA, 19 nt, Homo sapiens
  misc_RNA (1)...(19): siRNA sense strand
ccacagaggcaucagcaau

SEQ ID NO: 1287500 - RNA, 19 nt, Homo sapiens
  misc_RNA (1)...(19): siRNA sense strand
gcaggcauuuggagagaag

SEQ ID NO: 1287501 - RNA, 19 nt, Homo sapiens
  misc_RNA (1)...(19): siRNA sense strand
agauaagcaucaacaagga

SEQ ID NO: 1287502 - RNA, 19 nt, Homo sapiens
  misc_RNA (1)...(19): siRNA sense strand
gaugacaugacauugaaga

SEQ ID NO: 1287503 - RNA, 19 nt, Homo sapiens
  misc_RNA (1)...(19): siRNA sense strand
cagaacaacaugaccuuug

SEQ ID NO: 1287504 - RNA, 19 nt, Homo sapiens
  misc_RNA (1)...(19): siRNA sense strand
gaugguuucgcaagaauau

SEQ ID NO: 1287505 - RNA, 19 nt, Homo sapiens
  misc_RNA (1)...(19): siRNA sense strand
ccacccagcucguguugag

SEQ ID NO: 1287506 - RNA, 19 nt, Homo sapiens
  misc_RNA (1)...(19): siRNA sense strand
gaagagaauggagcacaug

SEQ ID NO: 1287507 - RNA, 19 nt, Homo sapiens
  misc_RNA (1)...(19): siRNA sense strand
ggauccuucuggaauguug

SEQ ID NO: 1287508 - RNA, 19 nt, Homo sapiens
  misc_RNA (1)...(19): siRNA sense strand
ucacacaggagaagccaaa

SEQ ID NO: 1287509 - RNA, 19 nt, Homo sapiens
  misc_RNA (1)...(19): siRNA sense strand
cagcaggcauuuggagaga

SEQ ID NO: 1287510 - RNA, 19 nt, Homo sapiens
  misc_RNA (1)...(19): siRNA sense strand
ggugaacuuucugguuuau

SEQ ID NO: 1287511 - RNA, 19 nt, Homo sapiens
  misc_RNA (1)...(19): siRNA sense strand
gugacgaggugaacuuucu

SEQ ID NO: 1287512 - RNA, 19 nt, Homo sapiens
  misc_RNA (1)...(19): siRNA sense strand
gcagaacaacaugaccuuu

SEQ ID NO: 1287513 - RNA, 19 nt, Homo sapiens
  misc_RNA (1)...(19): siRNA sense strand
uaugaugguuucgcaagaa

SEQ ID NO: 1287514 - RNA, 19 nt, Homo sapiens
  misc_RNA (1)...(19): siRNA sense strand
cgacgucccaaguaauaaa

SEQ ID NO: 1287515 - RNA, 19 nt, Homo sapiens
  misc_RNA (1)...(19): siRNA sense strand
gcacgacgucccaaguaau

SEQ ID NO: 1287516 - RNA, 19 nt, Homo sapiens
  misc_RNA (1)...(19): siRNA sense strand
auaaagaugucaccucacu

SEQ ID NO: 1287517 - RNA, 19 nt, Homo sapiens
  misc_RNA (1)...(19): siRNA sense strand
gagugcugguguagacaaa

SEQ ID NO: 1287518 - RNA, 19 nt, Homo sapiens
  misc_RNA (1)...(19): siRNA sense strand
acucaaagccaauggaaau

SEQ ID NO: 1287519 - RNA, 19 nt, Homo sapiens
  misc_RNA (1)...(19): siRNA sense strand
gcaguuuccuuuucauuca

SEQ ID NO: 1287520 - RNA, 19 nt, Homo sapiens
  misc_RNA (1)...(19): siRNA sense strand
gcaccuuaggccaacauaa

SEQ ID NO: 1287521 - RNA, 19 nt, Homo sapiens
  misc_RNA (1)...(19): siRNA sense strand
gagacauuguauacgagaa

SEQ ID NO: 1287522 - RNA, 19 nt, Homo sapiens
  misc_RNA (1)...(19): siRNA sense strand
gaagaucuggaguaugaag

SEQ ID NO: 1287523 - RNA, 19 nt, Homo sapiens
  misc_RNA (1)...(19): siRNA sense strand
gcaaaauccuccaaagaac

SEQ ID NO: 1287524 - RNA, 19 nt, Homo sapiens
  misc_RNA (1)...(19): siRNA sense strand
gaaccugaaugagaauagc

SEQ ID NO: 1287525 - RNA, 19 nt, Homo sapiens
  misc_RNA (1)...(19): siRNA sense strand
cagaagggacugcaguaug

SEQ ID NO: 1287526 - RNA, 19 nt, Homo sapiens
  misc_RNA (1)...(19): siRNA sense strand
ccuggaacccugucaguga

SEQ ID NO: 1287527 - RNA, 19 nt, Homo sapiens
  misc_RNA (1)...(19): siRNA sense strand
uggagcacaugaaaucaau

SEQ ID NO: 1287528 - RNA, 19 nt, Homo sapiens
  misc_RNA (1)...(19): siRNA sense strand
aacccaaacuccagcauca

SEQ ID NO: 1287529 - RNA, 19 nt, Homo sapiens
  misc_RNA (1)...(19): siRNA sense strand
ugaacuuucugguuuaucg

SEQ ID NO: 1287530 - RNA, 19 nt, Homo sapiens
  misc_RNA (1)...(19): siRNA sense strand
gagauuccacccaacaaag

SEQ ID NO: 1287531 - RNA, 19 nt, Homo sapiens
  misc_RNA (1)...(19): siRNA sense strand
ggguucauaugaugguuuc

SEQ ID NO: 1287532 - RNA, 19 nt, Homo sapiens
  misc_RNA (1)...(19): siRNA sense strand
acacacucaugaagcauca

SEQ ID NO: 1287533 - RNA, 19 nt, Homo sapiens
  misc_RNA (1)...(19): siRNA sense strand
ggacuggcagaacaacaug

SEQ ID NO: 1287534 - RNA, 19 nt, Homo sapiens
  misc_RNA (1)...(19): siRNA sense strand
gagaagccaaacagcaguu

SEQ ID NO: 1287535 - RNA, 19 nt, Homo sapiens
  misc_RNA (1)...(19): siRNA sense strand
aggugaacuuucugguuua

SEQ ID NO: 1287536 - RNA, 19 nt, Homo sapiens
  misc_RNA (1)...(19): siRNA sense strand
ggagcacaugaaaucaaua

SEQ ID NO: 1287537 - RNA, 19 nt, Homo sapiens
  misc_RNA (1)...(19): siRNA sense strand
uggcaagugcuucauuuga

SEQ ID NO: 1287538 - RNA, 19 nt, Homo sapiens
  misc_RNA (1)...(19): siRNA sense strand
gcugagauaagcaucaaca

SEQ ID NO: 1287539 - RNA, 19 nt, Homo sapiens
  misc_RNA (1)...(19): siRNA sense strand
uagagucccugucccugau

SEQ ID NO: 1287540 - RNA, 19 nt, Homo sapiens
  misc_RNA (1)...(19): siRNA sense strand
ugagauuccacccaacaaa

SEQ ID NO: 1287541 - RNA, 19 nt, Homo sapiens
  misc_RNA (1)...(19): siRNA sense strand
gugcuucauuugauucuac

SEQ ID NO: 1287542 - RNA, 19 nt, Homo sapiens
  misc_RNA (1)...(19): siRNA sense strand
ggaacgcccgaggagauaa

SEQ ID NO: 1287543 - RNA, 19 nt, Homo sapiens
  misc_RNA (1)...(19): siRNA sense strand
gcacccacacacucaugaa

SEQ ID NO: 1287544 - RNA, 19 nt, Homo sapiens
  misc_RNA (1)...(19): siRNA sense strand
gaugugguccaacuucuuc

SEQ ID NO: 1287545 - RNA, 19 nt, Homo sapiens
  misc_RNA (1)...(19): siRNA sense strand
cuggagguguuccggcauu

SEQ ID NO: 1287546 - RNA, 19 nt, Homo sapiens
  misc_RNA (1)...(19): siRNA sense strand
gaugugguccaacuucuuc

SEQ ID NO: 1287547 - RNA, 19 nt, Homo sapiens
  misc_RNA (1)...(19): siRNA sense strand
cuggagguguuccggcauu

SEQ ID NO: 1287548 - RNA, 19 nt, Homo sapiens
  misc_RNA (1)...(19): siRNA sense strand
gaugugguccaacuucuuc

SEQ ID NO: 1287549 - RNA, 19 nt, Homo sapiens
  misc_RNA (1)...(19): siRNA sense strand
cuggagguguuccggcauu

SEQ ID NO: 1287550 - RNA, 19 nt, Homo sapiens
  misc_RNA (1)...(19): siRNA sense strand
gaugugguccaacuucuuc

SEQ ID NO: 1287551 - RNA, 19 nt, Homo sapiens
  misc_RNA (1)...(19): siRNA sense strand
cuggagguguuccggcauu

SEQ ID NO: 1287552 - RNA, 19 nt, Homo sapiens
  misc_RNA (1)...(19): siRNA sense strand
gaugugguccaacuucuuc

SEQ ID NO: 1287553 - RNA, 19 nt, Homo sapiens
  misc_RNA (1)...(19): siRNA sense strand
cuggagguguuccggcauu

SEQ ID NO: 1287554 - RNA, 19 nt, Homo sapiens
  misc_RNA (1)...(19): siRNA sense strand
gaugugguccaacuucuuc

SEQ ID NO: 1287555 - RNA, 19 nt, Homo sapiens
  misc_RNA (1)...(19): siRNA sense strand
cuggagguguuccggcauu

SEQ ID NO: 1287556 - RNA, 19 nt, Homo sapiens
  misc_RNA (1)...(19): siRNA sense strand
gacgaguucuuuaugcuua

SEQ ID NO: 1287557 - RNA, 19 nt, Homo sapiens
  misc_RNA (1)...(19): siRNA sense strand
uggaguauccuaucaugua

SEQ ID NO: 1287558 - RNA, 19 nt, Homo sapiens
  misc_RNA (1)...(19): siRNA sense strand
ccaccuagccaucaauguu

SEQ ID NO: 1287559 - RNA, 19 nt, Homo sapiens
  misc_RNA (1)...(19): siRNA sense strand
ggaguauccuaucauguac

SEQ ID NO: 1287560 - RNA, 19 nt, Homo sapiens
  misc_RNA (1)...(19): siRNA sense strand
aaaguggaguauccuauca

SEQ ID NO: 1287561 - RNA, 19 nt, Homo sapiens
  misc_RNA (1)...(19): siRNA sense strand
gcacaucuucaacugcauu

SEQ ID NO: 1287562 - RNA, 19 nt, Homo sapiens
  misc_RNA (1)...(19): siRNA sense strand
aguguauccucccuucuua

SEQ ID NO: 1287563 - RNA, 19 nt, Homo sapiens
  misc_RNA (1)...(19): siRNA sense strand
ggacgaguucuuuaugcuu

SEQ ID NO: 1287564 - RNA, 19 nt, Homo sapiens
  misc_RNA (1)...(19): siRNA sense strand
gaaguacaaaguggaguau

SEQ ID NO: 1287565 - RNA, 19 nt, Homo sapiens
  misc_RNA (1)...(19): siRNA sense strand
gaacccagcaagcguaguc

SEQ ID NO: 1287566 - RNA, 19 nt, Homo sapiens
  misc_RNA (1)...(19): siRNA sense strand
ggcuuggccuggauuguug

SEQ ID NO: 1287567 - RNA, 19 nt, Homo sapiens
  misc_RNA (1)...(19): siRNA sense strand
ggaauaugguuuugugcuu

SEQ ID NO: 1287568 - RNA, 19 nt, Homo sapiens
  misc_RNA (1)...(19): siRNA sense strand
cagcaucuugguuggguua

SEQ ID NO: 1287569 - RNA, 19 nt, Homo sapiens
  misc_RNA (1)...(19): siRNA sense strand
caccuagccaucaauguuu

SEQ ID NO: 1287570 - RNA, 19 nt, Homo sapiens
  misc_RNA (1)...(19): siRNA sense strand
gcaucuugguuggguuaaa

SEQ ID NO: 1287571 - RNA, 19 nt, Homo sapiens
  misc_RNA (1)...(19): siRNA sense strand
caaaguggaguauccuauc

SEQ ID NO: 1287572 - RNA, 19 nt, Homo sapiens
  misc_RNA (1)...(19): siRNA sense strand
gggcuuggccuggauuguu

SEQ ID NO: 1287573 - RNA, 19 nt, Homo sapiens
  misc_RNA (1)...(19): siRNA sense strand
agaaguacaaaguggagua

SEQ ID NO: 1287574 - RNA, 19 nt, Homo sapiens
  misc_RNA (1)...(19): siRNA sense strand
caacugugugcucugcuuu

SEQ ID NO: 1287575 - RNA, 19 nt, Homo sapiens
  misc_RNA (1)...(19): siRNA sense strand
gaaaaugggcacaucuuca

SEQ ID NO: 1287576 - RNA, 19 nt, Homo sapiens
  misc_RNA (1)...(19): siRNA sense strand
uaaggaauaugguuuugug

SEQ ID NO: 1287577 - RNA, 19 nt, Homo sapiens
  misc_RNA (1)...(19): siRNA sense strand
uauccucccuucuuauuuu

SEQ ID NO: 1287578 - RNA, 19 nt, Homo sapiens
  misc_RNA (1)...(19): siRNA sense strand
gagcccaccagaacacguu

SEQ ID NO: 1287579 - RNA, 19 nt, Homo sapiens
  misc_RNA (1)...(19): siRNA sense strand
ucucuaaggaauaugguuu

SEQ ID NO: 1287580 - RNA, 19 nt, Homo sapiens
  misc_RNA (1)...(19): siRNA sense strand
guauccucccuucuuauuu

SEQ ID NO: 1287581 - RNA, 19 nt, Homo sapiens
  misc_RNA (1)...(19): siRNA sense strand
ucuuuaugcuuauggcuau

SEQ ID NO: 1287582 - RNA, 19 nt, Homo sapiens
  misc_RNA (1)...(19): siRNA sense strand
acaacugugugcucugcuu

SEQ ID NO: 1287583 - RNA, 19 nt, Homo sapiens
  misc_RNA (1)...(19): siRNA sense strand
uguauccucccuucuuauu

SEQ ID NO: 1287584 - RNA, 19 nt, Homo sapiens
  misc_RNA (1)...(19): siRNA sense strand
acaaaguggaguauccuau

SEQ ID NO: 1287585 - RNA, 19 nt, Homo sapiens
  misc_RNA (1)...(19): siRNA sense strand
ccagaacacguuggaagug

SEQ ID NO: 1287586 - RNA, 19 nt, Homo sapiens
  misc_RNA (1)...(19): siRNA sense strand
caucuugguuggguuaaaa

SEQ ID NO: 1287587 - RNA, 19 nt, Homo sapiens
  misc_RNA (1)...(19): siRNA sense strand
aguggaguauccuaucaug

SEQ ID NO: 1287588 - RNA, 19 nt, Homo sapiens
  misc_RNA (1)...(19): siRNA sense strand
cgaguucuuuaugcuuaug

SEQ ID NO: 1287589 - RNA, 19 nt, Homo sapiens
  misc_RNA (1)...(19): siRNA sense strand
ggagugagauuauauagua

SEQ ID NO: 1287590 - RNA, 19 nt, Homo sapiens
  misc_RNA (1)...(19): siRNA sense strand
caacagaguuccacagaug

SEQ ID NO: 1287591 - RNA, 19 nt, Homo sapiens
  misc_RNA (1)...(19): siRNA sense strand
gauaagcagugccuugaaa

SEQ ID NO: 1287592 - RNA, 19 nt, Homo sapiens
  misc_RNA (1)...(19): siRNA sense strand
gagcauuacuugguucaua

SEQ ID NO: 1287593 - RNA, 19 nt, Homo sapiens
  misc_RNA (1)...(19): siRNA sense strand
ggagagaaauugcuggaau

SEQ ID NO: 1287594 - RNA, 19 nt, Homo sapiens
  misc_RNA (1)...(19): siRNA sense strand
ggaauuguauuagauguug

SEQ ID NO: 1287595 - RNA, 19 nt, Homo sapiens
  misc_RNA (1)...(19): siRNA sense strand
ucaaccagaugaugaagua

SEQ ID NO: 1287596 - RNA, 19 nt, Homo sapiens
  misc_RNA (1)...(19): siRNA sense strand
gauaauggauggagcaagu

SEQ ID NO: 1287597 - RNA, 19 nt, Homo sapiens
  misc_RNA (1)...(19): siRNA sense strand
gggaguagauauuguccua

SEQ ID NO: 1287598 - RNA, 19 nt, Homo sapiens
  misc_RNA (1)...(19): siRNA sense strand
gaagcaagguaucauucuu

SEQ ID NO: 1287599 - RNA, 19 nt, Homo sapiens
  misc_RNA (1)...(19): siRNA sense strand
gaguagauauuguccuaga

SEQ ID NO: 1287600 - RNA, 19 nt, Homo sapiens
  misc_RNA (1)...(19): siRNA sense strand
ccagauagccacugccuuu

SEQ ID NO: 1287601 - RNA, 19 nt, Homo sapiens
  misc_RNA (1)...(19): siRNA sense strand
ggaagcagcaggaagcauu

SEQ ID NO: 1287602 - RNA, 19 nt, Homo sapiens
  misc_RNA (1)...(19): siRNA sense strand
gcaagugcauuugguacaa

SEQ ID NO: 1287603 - RNA, 19 nt, Homo sapiens
  misc_RNA (1)...(19): siRNA sense strand
uuccacagaugaagaaaua

SEQ ID NO: 1287604 - RNA, 19 nt, Homo sapiens
  misc_RNA (1)...(19): siRNA sense strand
ccagauaaauacaaagcuu

SEQ ID NO: 1287605 - RNA, 19 nt, Homo sapiens
  misc_RNA (1)...(19): siRNA sense strand
ggauggagcaagugcauuu

SEQ ID NO: 1287606 - RNA, 19 nt, Homo sapiens
  misc_RNA (1)...(19): siRNA sense strand
gaggauaacuuugugaaac

SEQ ID NO: 1287607 - RNA, 19 nt, Homo sapiens
  misc_RNA (1)...(19): siRNA sense strand
gauaucaucacacuucuug

SEQ ID NO: 1287608 - RNA, 19 nt, Homo sapiens
  misc_RNA (1)...(19): siRNA sense strand
cuacaacuacuaccacaua

SEQ ID NO: 1287609 - RNA, 19 nt, Homo sapiens
  misc_RNA (1)...(19): siRNA sense strand
gcaugcagccuugaagaua

SEQ ID NO: 1287610 - RNA, 19 nt, Homo sapiens
  misc_RNA (1)...(19): siRNA sense strand
ugaagacccuggacuuugu

SEQ ID NO: 1287611 - RNA, 19 nt, Homo sapiens
  misc_RNA (1)...(19): siRNA sense strand
gaaagcuguuuggaagaaa

SEQ ID NO: 1287612 - RNA, 19 nt, Homo sapiens
  misc_RNA (1)...(19): siRNA sense strand
ugaaagcuguuuggaagaa

SEQ ID NO: 1287613 - RNA, 19 nt, Homo sapiens
  misc_RNA (1)...(19): siRNA sense strand
caugcagccuugaagauaa

SEQ ID NO: 1287614 - RNA, 19 nt, Homo sapiens
  misc_RNA (1)...(19): siRNA sense strand
uggcagaaaugaagaugaa

SEQ ID NO: 1287615 - RNA, 19 nt, Homo sapiens
  misc_RNA (1)...(19): siRNA sense strand
gcagugccuugaaagauuc

SEQ ID NO: 1287616 - RNA, 19 nt, Homo sapiens
  misc_RNA (1)...(19): siRNA sense strand
ugauguaucuaaugggaaa

SEQ ID NO: 1287617 - RNA, 19 nt, Homo sapiens
  misc_RNA (1)...(19): siRNA sense strand
uagcuuuccugaaugauga

SEQ ID NO: 1287618 - RNA, 19 nt, Homo sapiens
  misc_RNA (1)...(19): siRNA sense strand
caagguaucauucuuucaa

SEQ ID NO: 1287619 - RNA, 19 nt, Homo sapiens
  misc_RNA (1)...(19): siRNA sense strand
ucucaucucucuccuggaa

SEQ ID NO: 1287620 - RNA, 19 nt, Homo sapiens
  misc_RNA (1)...(19): siRNA sense strand
auacagcucugcauuaucu

SEQ ID NO: 1287621 - RNA, 19 nt, Homo sapiens
  misc_RNA (1)...(19): siRNA sense strand
cuauacagcucugcauuau

SEQ ID NO: 1287622 - RNA, 19 nt, Homo sapiens
  misc_RNA (1)...(19): siRNA sense strand
uagaggagccaaagugauu

SEQ ID NO: 1287623 - RNA, 19 nt, Homo sapiens
  misc_RNA (1)...(19): siRNA sense strand
ucaguuagcacaucauaga

SEQ ID NO: 1287624 - RNA, 19 nt, Homo sapiens
  misc_RNA (1)...(19): siRNA sense strand
gaugaaguaguuggaauuu

SEQ ID NO: 1287625 - RNA, 19 nt, Homo sapiens
  misc_RNA (1)...(19): siRNA sense strand
ggagcaagugcauuuggua

SEQ ID NO: 1287626 - RNA, 19 nt, Homo sapiens
  misc_RNA (1)...(19): siRNA sense strand
aacguuagcuuuccugaau

SEQ ID NO: 1287627 - RNA, 19 nt, Homo sapiens
  misc_RNA (1)...(19): siRNA sense strand
gagccaaagugauuucaac

SEQ ID NO: 1287628 - RNA, 19 nt, Homo sapiens
  misc_RNA (1)...(19): siRNA sense strand
ccuauacagcucugcauua

SEQ ID NO: 1287629 - RNA, 19 nt, Homo sapiens
  misc_RNA (1)...(19): siRNA sense strand
ggauaacuuugugaaacuu

SEQ ID NO: 1287630 - RNA, 19 nt, Homo sapiens
  misc_RNA (1)...(19): siRNA sense strand
ugagccagauaaauacaaa

SEQ ID NO: 1287631 - RNA, 19 nt, Homo sapiens
  misc_RNA (1)...(19): siRNA sense strand
gaugaugaaccagcuguaa

SEQ ID NO: 1287632 - RNA, 19 nt, Homo sapiens
  misc_RNA (1)...(19): siRNA sense strand
ccacauaaacaugauauca

SEQ ID NO: 1287633 - RNA, 19 nt, Homo sapiens
  misc_RNA (1)...(19): siRNA sense strand
ugaaccagcuguaaaacua

SEQ ID NO: 1287634 - RNA, 19 nt, Homo sapiens
  misc_RNA (1)...(19): siRNA sense strand
ugaaguaguuggaauuuug

SEQ ID NO: 1287635 - RNA, 19 nt, Homo sapiens
  misc_RNA (1)...(19): siRNA sense strand
ggaggccacuggguaacaa

SEQ ID NO: 1287636 - RNA, 19 nt, Homo sapiens
  misc_RNA (1)...(19): siRNA sense strand
ccuagaugcuggagugaga

SEQ ID NO: 1287637 - RNA, 19 nt, Homo sapiens
  misc_RNA (1)...(19): siRNA sense strand
uuagaguacaugagcauua

SEQ ID NO: 1287638 - RNA, 19 nt, Homo sapiens
  misc_RNA (1)...(19): siRNA sense strand
ccucaagggagcaacguua

SEQ ID NO: 1287639 - RNA, 19 nt, Homo sapiens
  misc_RNA (1)...(19): siRNA sense strand
uaguaaagaugaugaacca

SEQ ID NO: 1287640 - RNA, 19 nt, Homo sapiens
  misc_RNA (1)...(19): siRNA sense strand
uuacagaggauaacuuugu

SEQ ID NO: 1287641 - RNA, 19 nt, Homo sapiens
  misc_RNA (1)...(19): siRNA sense strand
guagauauuguccuagaug

SEQ ID NO: 1287642 - RNA, 19 nt, Homo sapiens
  misc_RNA (1)...(19): siRNA sense strand
caacuacuaccacauaaac

SEQ ID NO: 1287643 - RNA, 19 nt, Homo sapiens
  misc_RNA (1)...(19): siRNA sense strand
agcauuacuugguucauaa

SEQ ID NO: 1287644 - RNA, 19 nt, Homo sapiens
  misc_RNA (1)...(19): siRNA sense strand
uacaacuacuaccacauaa

SEQ ID NO: 1287645 - RNA, 19 nt, Homo sapiens
  misc_RNA (1)...(19): siRNA sense strand
gcuggagugagauuauaua

SEQ ID NO: 1287646 - RNA, 19 nt, Homo sapiens
  misc_RNA (1)...(19): siRNA sense strand
ugcauuaucuuucucaucu

SEQ ID NO: 1287647 - RNA, 19 nt, Homo sapiens
  misc_RNA (1)...(19): siRNA sense strand
guuaaagcuugugcucuga

SEQ ID NO: 1287648 - RNA, 19 nt, Homo sapiens
  misc_RNA (1)...(19): siRNA sense strand
ugauugauguaucuaaugg

SEQ ID NO: 1287649 - RNA, 19 nt, Homo sapiens
  misc_RNA (1)...(19): siRNA sense strand
ccaacagaguuccacagau

SEQ ID NO: 1287650 - RNA, 19 nt, Homo sapiens
  misc_RNA (1)...(19): siRNA sense strand
cguuagcuuuccugaauga

SEQ ID NO: 1287651 - RNA, 19 nt, Homo sapiens
  misc_RNA (1)...(19): siRNA sense strand
aaagugauuucaacagcau

SEQ ID NO: 1287652 - RNA, 19 nt, Homo sapiens
  misc_RNA (1)...(19): siRNA sense strand
cauagaggagccaaaguga

SEQ ID NO: 1287653 - RNA, 19 nt, Homo sapiens
  misc_RNA (1)...(19): siRNA sense strand
aagcaagguaucauucuuu

SEQ ID NO: 1287654 - RNA, 19 nt, Homo sapiens
  misc_RNA (1)...(19): siRNA sense strand
caacagggaaaauaucuuu

SEQ ID NO: 1287655 - RNA, 19 nt, Homo sapiens
  misc_RNA (1)...(19): siRNA sense strand
agcagugccuugaaagauu

SEQ ID NO: 1287656 - RNA, 19 nt, Homo sapiens
  misc_RNA (1)...(19): siRNA sense strand
gcauuugguacaauagcua

SEQ ID NO: 1287657 - RNA, 19 nt, Homo sapiens
  misc_RNA (1)...(19): siRNA sense strand
caagugcauuugguacaau

SEQ ID NO: 1287658 - RNA, 19 nt, Homo sapiens
  misc_RNA (1)...(19): siRNA sense strand
ggaagcaagguaucauucu

SEQ ID NO: 1287659 - RNA, 19 nt, Homo sapiens
  misc_RNA (1)...(19): siRNA sense strand
gauguuggaagcaagguau

SEQ ID NO: 1287660 - RNA, 19 nt, Homo sapiens
  misc_RNA (1)...(19): siRNA sense strand
uugugaaguuguuagagua

SEQ ID NO: 1287661 - RNA, 19 nt, Homo sapiens
  misc_RNA (1)...(19): siRNA sense strand
caaauguacaacagggaaa

SEQ ID NO: 1287662 - RNA, 19 nt, Homo sapiens
  misc_RNA (1)...(19): siRNA sense strand
aagaaaaccuucaguugga

SEQ ID NO: 1287663 - RNA, 19 nt, Homo sapiens
  misc_RNA (1)...(19): siRNA sense strand
aagugcauuugguacaaua

SEQ ID NO: 1287664 - RNA, 19 nt, Homo sapiens
  misc_RNA (1)...(19): siRNA sense strand
gcauuacuugguucauaaa

SEQ ID NO: 1287665 - RNA, 19 nt, Homo sapiens
  misc_RNA (1)...(19): siRNA sense strand
acaugagcauuacuugguu

SEQ ID NO: 1287666 - RNA, 19 nt, Homo sapiens
  misc_RNA (1)...(19): siRNA sense strand
gaagcagcaggaagcauuc

SEQ ID NO: 1287667 - RNA, 19 nt, Homo sapiens
  misc_RNA (1)...(19): siRNA sense strand
uagaguacaugagcauuac

SEQ ID NO: 1287668 - RNA, 19 nt, Homo sapiens
  misc_RNA (1)...(19): siRNA sense strand
caacguuagcuuuccugaa

SEQ ID NO: 1287669 - RNA, 19 nt, Homo sapiens
  misc_RNA (1)...(19): siRNA sense strand
gccacuggguaacaacaga

SEQ ID NO: 1287670 - RNA, 19 nt, Homo sapiens
  misc_RNA (1)...(19): siRNA sense strand
gaugcuggagugagauuau

SEQ ID NO: 1287671 - RNA, 19 nt, Homo sapiens
  misc_RNA (1)...(19): siRNA sense strand
uaagcagugccuugaaaga

SEQ ID NO: 1287672 - RNA, 19 nt, Homo sapiens
  misc_RNA (1)...(19): siRNA sense strand
ucauagaggagccaaagug

SEQ ID NO: 1287673 - RNA, 19 nt, Homo sapiens
  misc_RNA (1)...(19): siRNA sense strand
gcagaaaugaagaugaaaa

SEQ ID NO: 1287674 - RNA, 19 nt, Homo sapiens
  misc_RNA (1)...(19): siRNA sense strand
uugcuggaauuguauuaga

SEQ ID NO: 1287675 - RNA, 19 nt, Homo sapiens
  misc_RNA (1)...(19): siRNA sense strand
ugaugaaguaguuggaauu

SEQ ID NO: 1287676 - RNA, 19 nt, Homo sapiens
  misc_RNA (1)...(19): siRNA sense strand
uauuagauguuggaagcaa

SEQ ID NO: 1287677 - RNA, 19 nt, Homo sapiens
  misc_RNA (1)...(19): siRNA sense strand
cagaggauaacuuugugaa

SEQ ID NO: 1287678 - RNA, 19 nt, Homo sapiens
  misc_RNA (1)...(19): siRNA sense strand
gaugaugaaguaguuggaa

SEQ ID NO: 1287679 - RNA, 19 nt, Homo sapiens
  misc_RNA (1)...(19): siRNA sense strand
gggagcaacguuagcuuuc

SEQ ID NO: 1287680 - RNA, 19 nt, Homo sapiens
  misc_RNA (1)...(19): siRNA sense strand
guuggaggccacuggguaa

SEQ ID NO: 1287681 - RNA, 19 nt, Homo sapiens
  misc_RNA (1)...(19): siRNA sense strand
uacagaggauaacuuugug

SEQ ID NO: 1287682 - RNA, 19 nt, Homo sapiens
  misc_RNA (1)...(19): siRNA sense strand
gauggagugcgugccuaua

SEQ ID NO: 1287683 - RNA, 19 nt, Homo sapiens
  misc_RNA (1)...(19): siRNA sense strand
ggauggagugcgugccuau

SEQ ID NO: 1287684 - RNA, 19 nt, Homo sapiens
  misc_RNA (1)...(19): siRNA sense strand
gaaguuguuagaguacaug

SEQ ID NO: 1287685 - RNA, 19 nt, Homo sapiens
  misc_RNA (1)...(19): siRNA sense strand
gagcaacguuagcuuuccu

SEQ ID NO: 1287686 - RNA, 19 nt, Homo sapiens
  misc_RNA (1)...(19): siRNA sense strand
gagugauugauguaucuaa

SEQ ID NO: 1287687 - RNA, 19 nt, Homo sapiens
  misc_RNA (1)...(19): siRNA sense strand
ccgagugauugauguaucu

SEQ ID NO: 1287688 - RNA, 19 nt, Homo sapiens
  misc_RNA (1)...(19): siRNA sense strand
gaguuccacagaugaagaa

SEQ ID NO: 1287689 - RNA, 19 nt, Homo sapiens
  misc_RNA (1)...(19): siRNA sense strand
caacagaguuccacagaug

SEQ ID NO: 1287690 - RNA, 19 nt, Homo sapiens
  misc_RNA (1)...(19): siRNA sense strand
gauaagcagugccuugaaa

SEQ ID NO: 1287691 - RNA, 19 nt, Homo sapiens
  misc_RNA (1)...(19): siRNA sense strand
gagcauuacuugguucaua

SEQ ID NO: 1287692 - RNA, 19 nt, Homo sapiens
  misc_RNA (1)...(19): siRNA sense strand
ggagagaaauugcuggaau

SEQ ID NO: 1287693 - RNA, 19 nt, Homo sapiens
  misc_RNA (1)...(19): siRNA sense strand
ggaauuguauuagauguug

SEQ ID NO: 1287694 - RNA, 19 nt, Homo sapiens
  misc_RNA (1)...(19): siRNA sense strand
ucaaccagaugaugaagua

SEQ ID NO: 1287695 - RNA, 19 nt, Homo sapiens
  misc_RNA (1)...(19): siRNA sense strand
gauaauggauggagcaagu

SEQ ID NO: 1287696 - RNA, 19 nt, Homo sapiens
  misc_RNA (1)...(19): siRNA sense strand
gaagcaagguaucauucuu

SEQ ID NO: 1287697 - RNA, 19 nt, Homo sapiens
  misc_RNA (1)...(19): siRNA sense strand
ggaagcagcaggaagcauu

SEQ ID NO: 1287698 - RNA, 19 nt, Homo sapiens
  misc_RNA (1)...(19): siRNA sense strand
gcaagugcauuugguacaa

SEQ ID NO: 1287699 - RNA, 19 nt, Homo sapiens
  misc_RNA (1)...(19): siRNA sense strand
uuccacagaugaagaaaua

SEQ ID NO: 1287700 - RNA, 19 nt, Homo sapiens
  misc_RNA (1)...(19): siRNA sense strand
ccagauaaauacaaagcuu

SEQ ID NO: 1287701 - RNA, 19 nt, Homo sapiens
  misc_RNA (1)...(19): siRNA sense strand
ggauggagcaagugcauuu

SEQ ID NO: 1287702 - RNA, 19 nt, Homo sapiens
  misc_RNA (1)...(19): siRNA sense strand
gaggauaacuuugugaaac

SEQ ID NO: 1287703 - RNA, 19 nt, Homo sapiens
  misc_RNA (1)...(19): siRNA sense strand
gcaugcagccuugaagaua

SEQ ID NO: 1287704 - RNA, 19 nt, Homo sapiens
  misc_RNA (1)...(19): siRNA sense strand
ugaagacccuggacuuugu

SEQ ID NO: 1287705 - RNA, 19 nt, Homo sapiens
  misc_RNA (1)...(19): siRNA sense strand
caugcagccuugaagauaa

SEQ ID NO: 1287706 - RNA, 19 nt, Homo sapiens
  misc_RNA (1)...(19): siRNA sense strand
uggcagaaaugaagaugaa

SEQ ID NO: 1287707 - RNA, 19 nt, Homo sapiens
  misc_RNA (1)...(19): siRNA sense strand
gcagugccuugaaagauuc

SEQ ID NO: 1287708 - RNA, 19 nt, Homo sapiens
  misc_RNA (1)...(19): siRNA sense strand
caagguaucauucuuucaa

SEQ ID NO: 1287709 - RNA, 19 nt, Homo sapiens
  misc_RNA (1)...(19): siRNA sense strand
ucucaucucucuccuggaa

SEQ ID NO: 1287710 - RNA, 19 nt, Homo sapiens
  misc_RNA (1)...(19): siRNA sense strand
auacagcucugcauuaucu

SEQ ID NO: 1287711 - RNA, 19 nt, Homo sapiens
  misc_RNA (1)...(19): siRNA sense strand
cuauacagcucugcauuau

SEQ ID NO: 1287712 - RNA, 19 nt, Homo sapiens
  misc_RNA (1)...(19): siRNA sense strand
uagaggagccaaagugauu

SEQ ID NO: 1287713 - RNA, 19 nt, Homo sapiens
  misc_RNA (1)...(19): siRNA sense strand
ucaguuagcacaucauaga

SEQ ID NO: 1287714 - RNA, 19 nt, Homo sapiens
  misc_RNA (1)...(19): siRNA sense strand
gaugaaguaguuggaauuu

SEQ ID NO: 1287715 - RNA, 19 nt, Homo sapiens
  misc_RNA (1)...(19): siRNA sense strand
ggagcaagugcauuuggua

SEQ ID NO: 1287716 - RNA, 19 nt, Homo sapiens
  misc_RNA (1)...(19): siRNA sense strand
gagccaaagugauuucaac

SEQ ID NO: 1287717 - RNA, 19 nt, Homo sapiens
  misc_RNA (1)...(19): siRNA sense strand
ugagccagauaaauacaaa

SEQ ID NO: 1287718 - RNA, 19 nt, Homo sapiens
  misc_RNA (1)...(19): siRNA sense strand
ccuauacagcucugcauua

SEQ ID NO: 1287719 - RNA, 19 nt, Homo sapiens
  misc_RNA (1)...(19): siRNA sense strand
ggauaacuuugugaaacuu

SEQ ID NO: 1287720 - RNA, 19 nt, Homo sapiens
  misc_RNA (1)...(19): siRNA sense strand
ugaaguaguuggaauuuug

SEQ ID NO: 1287721 - RNA, 19 nt, Homo sapiens
  misc_RNA (1)...(19): siRNA sense strand
uuacagaggauaacuuugu

SEQ ID NO: 1287722 - RNA, 19 nt, Homo sapiens
  misc_RNA (1)...(19): siRNA sense strand
uuagaguacaugagcauua

SEQ ID NO: 1287723 - RNA, 19 nt, Homo sapiens
  misc_RNA (1)...(19): siRNA sense strand
agcauuacuugguucauaa

SEQ ID NO: 1287724 - RNA, 19 nt, Homo sapiens
  misc_RNA (1)...(19): siRNA sense strand
ugcauuaucuuucucaucu

SEQ ID NO: 1287725 - RNA, 19 nt, Homo sapiens
  misc_RNA (1)...(19): siRNA sense strand
guuaaagcuugugcucuga

SEQ ID NO: 1287726 - RNA, 19 nt, Homo sapiens
  misc_RNA (1)...(19): siRNA sense strand
ccaacagaguuccacagau

SEQ ID NO: 1287727 - RNA, 19 nt, Homo sapiens
  misc_RNA (1)...(19): siRNA sense strand
aaagugauuucaacagcau

SEQ ID NO: 1287728 - RNA, 19 nt, Homo sapiens
  misc_RNA (1)...(19): siRNA sense strand
cauagaggagccaaaguga

SEQ ID NO: 1287729 - RNA, 19 nt, Homo sapiens
  misc_RNA (1)...(19): siRNA sense strand
aagcaagguaucauucuuu

SEQ ID NO: 1287730 - RNA, 19 nt, Homo sapiens
  misc_RNA (1)...(19): siRNA sense strand
agcagugccuugaaagauu

SEQ ID NO: 1287731 - RNA, 19 nt, Homo sapiens
  misc_RNA (1)...(19): siRNA sense strand
gcauuugguacaauagcua

SEQ ID NO: 1287732 - RNA, 19 nt, Homo sapiens
  misc_RNA (1)...(19): siRNA sense strand
caagugcauuugguacaau

SEQ ID NO: 1287733 - RNA, 19 nt, Homo sapiens
  misc_RNA (1)...(19): siRNA sense strand
gauguuggaagcaagguau

SEQ ID NO: 1287734 - RNA, 19 nt, Homo sapiens
  misc_RNA (1)...(19): siRNA sense strand
ggaagcaagguaucauucu

SEQ ID NO: 1287735 - RNA, 19 nt, Homo sapiens
  misc_RNA (1)...(19): siRNA sense strand
uugugaaguuguuagagua

SEQ ID NO: 1287736 - RNA, 19 nt, Homo sapiens
  misc_RNA (1)...(19): siRNA sense strand
aagugcauuugguacaaua

SEQ ID NO: 1287737 - RNA, 19 nt, Homo sapiens
  misc_RNA (1)...(19): siRNA sense strand
gcauuacuugguucauaaa

SEQ ID NO: 1287738 - RNA, 19 nt, Homo sapiens
  misc_RNA (1)...(19): siRNA sense strand
acaugagcauuacuugguu

SEQ ID NO: 1287739 - RNA, 19 nt, Homo sapiens
  misc_RNA (1)...(19): siRNA sense strand
gaagcagcaggaagcauuc

SEQ ID NO: 1287740 - RNA, 19 nt, Homo sapiens
  misc_RNA (1)...(19): siRNA sense strand
uagaguacaugagcauuac

SEQ ID NO: 1287741 - RNA, 19 nt, Homo sapiens
  misc_RNA (1)...(19): siRNA sense strand
uaagcagugccuugaaaga

SEQ ID NO: 1287742 - RNA, 19 nt, Homo sapiens
  misc_RNA (1)...(19): siRNA sense strand
ucauagaggagccaaagug

SEQ ID NO: 1287743 - RNA, 19 nt, Homo sapiens
  misc_RNA (1)...(19): siRNA sense strand
gcagaaaugaagaugaaaa

SEQ ID NO: 1287744 - RNA, 19 nt, Homo sapiens
  misc_RNA (1)...(19): siRNA sense strand
uugcuggaauuguauuaga

SEQ ID NO: 1287745 - RNA, 19 nt, Homo sapiens
  misc_RNA (1)...(19): siRNA sense strand
uauuagauguuggaagcaa

SEQ ID NO: 1287746 - RNA, 19 nt, Homo sapiens
  misc_RNA (1)...(19): siRNA sense strand
cagaggauaacuuugugaa

SEQ ID NO: 1287747 - RNA, 19 nt, Homo sapiens
  misc_RNA (1)...(19): siRNA sense strand
ugaugaaguaguuggaauu

SEQ ID NO: 1287748 - RNA, 19 nt, Homo sapiens
  misc_RNA (1)...(19): siRNA sense strand
gaugaugaaguaguuggaa

SEQ ID NO: 1287749 - RNA, 19 nt, Homo sapiens
  misc_RNA (1)...(19): siRNA sense strand
uacagaggauaacuuugug

SEQ ID NO: 1287750 - RNA, 19 nt, Homo sapiens
  misc_RNA (1)...(19): siRNA sense strand
gauggagugcgugccuaua

SEQ ID NO: 1287751 - RNA, 19 nt, Homo sapiens
  misc_RNA (1)...(19): siRNA sense strand
ggauggagugcgugccuau

SEQ ID NO: 1287752 - RNA, 19 nt, Homo sapiens
  misc_RNA (1)...(19): siRNA sense strand
gaaguuguuagaguacaug

SEQ ID NO: 1287753 - RNA, 19 nt, Homo sapiens
  misc_RNA (1)...(19): siRNA sense strand
gaguuccacagaugaagaa

SEQ ID NO: 1287754 - RNA, 19 nt, Homo sapiens
  misc_RNA (1)...(19): siRNA sense strand
gcaagguaucauucuuuca

SEQ ID NO: 1287755 - RNA, 19 nt, Homo sapiens
  misc_RNA (1)...(19): siRNA sense strand
aagauaagcagugccuuga

SEQ ID NO: 1287756 - RNA, 19 nt, Homo sapiens
  misc_RNA (1)...(19): siRNA sense strand
cagcaugcagccuugaaga

SEQ ID NO: 1287757 - RNA, 19 nt, Homo sapiens
  misc_RNA (1)...(19): siRNA sense strand
gcuggaauuguauuagaug

SEQ ID NO: 1287758 - RNA, 19 nt, Homo sapiens
  misc_RNA (1)...(19): siRNA sense strand
ugaaguuguuagaguacau

SEQ ID NO: 1287759 - RNA, 19 nt, Homo sapiens
  misc_RNA (1)...(19): siRNA sense strand
accagaugaugaaguaguu

SEQ ID NO: 1287760 - RNA, 19 nt, Homo sapiens
  misc_RNA (1)...(19): siRNA sense strand
ccacagaugaagaaauaac

SEQ ID NO: 1287761 - RNA, 19 nt, Homo sapiens
  misc_RNA (1)...(19): siRNA sense strand
aggcuuauauuuccaacag

SEQ ID NO: 1287762 - RNA, 19 nt, Homo sapiens
  misc_RNA (1)...(19): siRNA sense strand
cauuaucuuucucaucucu

SEQ ID NO: 1287763 - RNA, 19 nt, Homo sapiens
  misc_RNA (1)...(19): siRNA sense strand
gaagacccuggacuuugug

SEQ ID NO: 1287764 - RNA, 19 nt, Homo sapiens
  misc_RNA (1)...(19): siRNA sense strand
ucugaagacccuggacuuu

SEQ ID NO: 1287765 - RNA, 19 nt, Homo sapiens
  misc_RNA (1)...(19): siRNA sense strand
agcaagguaucauucuuuc

SEQ ID NO: 1287766 - RNA, 19 nt, Homo sapiens
  misc_RNA (1)...(19): siRNA sense strand
ggagccaaagugauuucaa

SEQ ID NO: 1287767 - RNA, 19 nt, Homo sapiens
  misc_RNA (1)...(19): siRNA sense strand
gaggagccaaagugauuuc

SEQ ID NO: 1287768 - RNA, 19 nt, Homo sapiens
  misc_RNA (1)...(19): siRNA sense strand
caucauagaggagccaaag

SEQ ID NO: 1287769 - RNA, 19 nt, Homo sapiens
  misc_RNA (1)...(19): siRNA sense strand
cuauucaguuagcacauca

SEQ ID NO: 1287770 - RNA, 19 nt, Homo sapiens
  misc_RNA (1)...(19): siRNA sense strand
aggauaacuuugugaaacu

SEQ ID NO: 1287771 - RNA, 19 nt, Homo sapiens
  misc_RNA (1)...(19): siRNA sense strand
uuugugaaguuguuagagu

SEQ ID NO: 1287772 - RNA, 19 nt, Homo sapiens
  misc_RNA (1)...(19): siRNA sense strand
agaggauaacuuugugaaa

SEQ ID NO: 1287773 - RNA, 19 nt, Homo sapiens
  misc_RNA (1)...(19): siRNA sense strand
caacagcaugcagccuuga

SEQ ID NO: 1287774 - RNA, 19 nt, Homo sapiens
  misc_RNA (1)...(19): siRNA sense strand
gauaacuuugugaaacuuc

SEQ ID NO: 1287775 - RNA, 19 nt, Homo sapiens
  misc_RNA (1)...(19): siRNA sense strand
uacaugagcauuacuuggu

SEQ ID NO: 1287776 - RNA, 19 nt, Homo sapiens
  misc_RNA (1)...(19): siRNA sense strand
cugaagacccuggacuuug

SEQ ID NO: 1287777 - RNA, 19 nt, Homo sapiens
  misc_RNA (1)...(19): siRNA sense strand
caacagaguuccacagaug

SEQ ID NO: 1287778 - RNA, 19 nt, Homo sapiens
  misc_RNA (1)...(19): siRNA sense strand
gauaagcagugccuugaaa

SEQ ID NO: 1287779 - RNA, 19 nt, Homo sapiens
  misc_RNA (1)...(19): siRNA sense strand
gagcauuacuugguucaua

SEQ ID NO: 1287780 - RNA, 19 nt, Homo sapiens
  misc_RNA (1)...(19): siRNA sense strand
ggagagaaauugcuggaau

SEQ ID NO: 1287781 - RNA, 19 nt, Homo sapiens
  misc_RNA (1)...(19): siRNA sense strand
ggaauuguauuagauguug

SEQ ID NO: 1287782 - RNA, 19 nt, Homo sapiens
  misc_RNA (1)...(19): siRNA sense strand
ucaaccagaugaugaagua

SEQ ID NO: 1287783 - RNA, 19 nt, Homo sapiens
  misc_RNA (1)...(19): siRNA sense strand
gauaauggauggagcaagu

SEQ ID NO: 1287784 - RNA, 19 nt, Homo sapiens
  misc_RNA (1)...(19): siRNA sense strand
gaagcaagguaucauucuu

SEQ ID NO: 1287785 - RNA, 19 nt, Homo sapiens
  misc_RNA (1)...(19): siRNA sense strand
ggaagcagcaggaagcauu

SEQ ID NO: 1287786 - RNA, 19 nt, Homo sapiens
  misc_RNA (1)...(19): siRNA sense strand
gcaagugcauuugguacaa

SEQ ID NO: 1287787 - RNA, 19 nt, Homo sapiens
  misc_RNA (1)...(19): siRNA sense strand
uuccacagaugaagaaaua

SEQ ID NO: 1287788 - RNA, 19 nt, Homo sapiens
  misc_RNA (1)...(19): siRNA sense strand
ccagauaaauacaaagcuu

SEQ ID NO: 1287789 - RNA, 19 nt, Homo sapiens
  misc_RNA (1)...(19): siRNA sense strand
ggauggagcaagugcauuu

SEQ ID NO: 1287790 - RNA, 19 nt, Homo sapiens
  misc_RNA (1)...(19): siRNA sense strand
gaggauaacuuugugaaac

SEQ ID NO: 1287791 - RNA, 19 nt, Homo sapiens
  misc_RNA (1)...(19): siRNA sense strand
gcaugcagccuugaagaua

SEQ ID NO: 1287792 - RNA, 19 nt, Homo sapiens
  misc_RNA (1)...(19): siRNA sense strand
ugaagacccuggacuuugu

SEQ ID NO: 1287793 - RNA, 19 nt, Homo sapiens
  misc_RNA (1)...(19): siRNA sense strand
caugcagccuugaagauaa

SEQ ID NO: 1287794 - RNA, 19 nt, Homo sapiens
  misc_RNA (1)...(19): siRNA sense strand
uggcagaaaugaagaugaa

SEQ ID NO: 1287795 - RNA, 19 nt, Homo sapiens
  misc_RNA (1)...(19): siRNA sense strand
gcagugccuugaaagauuc

SEQ ID NO: 1287796 - RNA, 19 nt, Homo sapiens
  misc_RNA (1)...(19): siRNA sense strand
caagguaucauucuuucaa

SEQ ID NO: 1287797 - RNA, 19 nt, Homo sapiens
  misc_RNA (1)...(19): siRNA sense strand
ucucaucucucuccuggaa

SEQ ID NO: 1287798 - RNA, 19 nt, Homo sapiens
  misc_RNA (1)...(19): siRNA sense strand
auacagcucugcauuaucu

SEQ ID NO: 1287799 - RNA, 19 nt, Homo sapiens
  misc_RNA (1)...(19): siRNA sense strand
cuauacagcucugcauuau

SEQ ID NO: 1287800 - RNA, 19 nt, Homo sapiens
  misc_RNA (1)...(19): siRNA sense strand
uagaggagccaaagugauu

SEQ ID NO: 1287801 - RNA, 19 nt, Homo sapiens
  misc_RNA (1)...(19): siRNA sense strand
ucaguuagcacaucauaga

SEQ ID NO: 1287802 - RNA, 19 nt, Homo sapiens
  misc_RNA (1)...(19): siRNA sense strand
gaugaaguaguuggaauuu

SEQ ID NO: 1287803 - RNA, 19 nt, Homo sapiens
  misc_RNA (1)...(19): siRNA sense strand
ggagcaagugcauuuggua

SEQ ID NO: 1287804 - RNA, 19 nt, Homo sapiens
  misc_RNA (1)...(19): siRNA sense strand
gagccaaagugauuucaac

SEQ ID NO: 1287805 - RNA, 19 nt, Homo sapiens
  misc_RNA (1)...(19): siRNA sense strand
ugagccagauaaauacaaa

SEQ ID NO: 1287806 - RNA, 19 nt, Homo sapiens
  misc_RNA (1)...(19): siRNA sense strand
ccuauacagcucugcauua

SEQ ID NO: 1287807 - RNA, 19 nt, Homo sapiens
  misc_RNA (1)...(19): siRNA sense strand
ggauaacuuugugaaacuu

SEQ ID NO: 1287808 - RNA, 19 nt, Homo sapiens
  misc_RNA (1)...(19): siRNA sense strand
ugaaguaguuggaauuuug

SEQ ID NO: 1287809 - RNA, 19 nt, Homo sapiens
  misc_RNA (1)...(19): siRNA sense strand
uuacagaggauaacuuugu

SEQ ID NO: 1287810 - RNA, 19 nt, Homo sapiens
  misc_RNA (1)...(19): siRNA sense strand
uuagaguacaugagcauua

SEQ ID NO: 1287811 - RNA, 19 nt, Homo sapiens
  misc_RNA (1)...(19): siRNA sense strand
agcauuacuugguucauaa

SEQ ID NO: 1287812 - RNA, 19 nt, Homo sapiens
  misc_RNA (1)...(19): siRNA sense strand
ugcauuaucuuucucaucu

SEQ ID NO: 1287813 - RNA, 19 nt, Homo sapiens
  misc_RNA (1)...(19): siRNA sense strand
guuaaagcuugugcucuga

SEQ ID NO: 1287814 - RNA, 19 nt, Homo sapiens
  misc_RNA (1)...(19): siRNA sense strand
ccaacagaguuccacagau

SEQ ID NO: 1287815 - RNA, 19 nt, Homo sapiens
  misc_RNA (1)...(19): siRNA sense strand
aaagugauuucaacagcau

SEQ ID NO: 1287816 - RNA, 19 nt, Homo sapiens
  misc_RNA (1)...(19): siRNA sense strand
cauagaggagccaaaguga

SEQ ID NO: 1287817 - RNA, 19 nt, Homo sapiens
  misc_RNA (1)...(19): siRNA sense strand
aagcaagguaucauucuuu

SEQ ID NO: 1287818 - RNA, 19 nt, Homo sapiens
  misc_RNA (1)...(19): siRNA sense strand
agcagugccuugaaagauu

SEQ ID NO: 1287819 - RNA, 19 nt, Homo sapiens
  misc_RNA (1)...(19): siRNA sense strand
gcauuugguacaauagcua

SEQ ID NO: 1287820 - RNA, 19 nt, Homo sapiens
  misc_RNA (1)...(19): siRNA sense strand
caagugcauuugguacaau

SEQ ID NO: 1287821 - RNA, 19 nt, Homo sapiens
  misc_RNA (1)...(19): siRNA sense strand
gauguuggaagcaagguau

SEQ ID NO: 1287822 - RNA, 19 nt, Homo sapiens
  misc_RNA (1)...(19): siRNA sense strand
ggaagcaagguaucauucu

SEQ ID NO: 1287823 - RNA, 19 nt, Homo sapiens
  misc_RNA (1)...(19): siRNA sense strand
uugugaaguuguuagagua

SEQ ID NO: 1287824 - RNA, 19 nt, Homo sapiens
  misc_RNA (1)...(19): siRNA sense strand
aagugcauuugguacaaua

SEQ ID NO: 1287825 - RNA, 19 nt, Homo sapiens
  misc_RNA (1)...(19): siRNA sense strand
gcauuacuugguucauaaa

SEQ ID NO: 1287826 - RNA, 19 nt, Homo sapiens
  misc_RNA (1)...(19): siRNA sense strand
acaugagcauuacuugguu

SEQ ID NO: 1287827 - RNA, 19 nt, Homo sapiens
  misc_RNA (1)...(19): siRNA sense strand
gaagcagcaggaagcauuc

SEQ ID NO: 1287828 - RNA, 19 nt, Homo sapiens
  misc_RNA (1)...(19): siRNA sense strand
uagaguacaugagcauuac

SEQ ID NO: 1287829 - RNA, 19 nt, Homo sapiens
  misc_RNA (1)...(19): siRNA sense strand
uaagcagugccuugaaaga

SEQ ID NO: 1287830 - RNA, 19 nt, Homo sapiens
  misc_RNA (1)...(19): siRNA sense strand
ucauagaggagccaaagug

SEQ ID NO: 1287831 - RNA, 19 nt, Homo sapiens
  misc_RNA (1)...(19): siRNA sense strand
gcagaaaugaagaugaaaa

SEQ ID NO: 1287832 - RNA, 19 nt, Homo sapiens
  misc_RNA (1)...(19): siRNA sense strand
uugcuggaauuguauuaga

SEQ ID NO: 1287833 - RNA, 19 nt, Homo sapiens
  misc_RNA (1)...(19): siRNA sense strand
uauuagauguuggaagcaa

SEQ ID NO: 1287834 - RNA, 19 nt, Homo sapiens
  misc_RNA (1)...(19): siRNA sense strand
cagaggauaacuuugugaa

SEQ ID NO: 1287835 - RNA, 19 nt, Homo sapiens
  misc_RNA (1)...(19): siRNA sense strand
ugaugaaguaguuggaauu

SEQ ID NO: 1287836 - RNA, 19 nt, Homo sapiens
  misc_RNA (1)...(19): siRNA sense strand
gaugaugaaguaguuggaa

SEQ ID NO: 1287837 - RNA, 19 nt, Homo sapiens
  misc_RNA (1)...(19): siRNA sense strand
uacagaggauaacuuugug

SEQ ID NO: 1287838 - RNA, 19 nt, Homo sapiens
  misc_RNA (1)...(19): siRNA sense strand
gauggagugcgugccuaua

SEQ ID NO: 1287839 - RNA, 19 nt, Homo sapiens
  misc_RNA (1)...(19): siRNA sense strand
ggauggagugcgugccuau

SEQ ID NO: 1287840 - RNA, 19 nt, Homo sapiens
  misc_RNA (1)...(19): siRNA sense strand
gaaguuguuagaguacaug

SEQ ID NO: 1287841 - RNA, 19 nt, Homo sapiens
  misc_RNA (1)...(19): siRNA sense strand
gaguuccacagaugaagaa

SEQ ID NO: 1287842 - RNA, 19 nt, Homo sapiens
  misc_RNA (1)...(19): siRNA sense strand
gcaagguaucauucuuuca

SEQ ID NO: 1287843 - RNA, 19 nt, Homo sapiens
  misc_RNA (1)...(19): siRNA sense strand
aagauaagcagugccuuga

SEQ ID NO: 1287844 - RNA, 19 nt, Homo sapiens
  misc_RNA (1)...(19): siRNA sense strand
cagcaugcagccuugaaga

SEQ ID NO: 1287845 - RNA, 19 nt, Homo sapiens
  misc_RNA (1)...(19): siRNA sense strand
gcuggaauuguauuagaug

SEQ ID NO: 1287846 - RNA, 19 nt, Homo sapiens
  misc_RNA (1)...(19): siRNA sense strand
ugaaguuguuagaguacau

SEQ ID NO: 1287847 - RNA, 19 nt, Homo sapiens
  misc_RNA (1)...(19): siRNA sense strand
accagaugaugaaguaguu

SEQ ID NO: 1287848 - RNA, 19 nt, Homo sapiens
  misc_RNA (1)...(19): siRNA sense strand
ccacagaugaagaaauaac

SEQ ID NO: 1287849 - RNA, 19 nt, Homo sapiens
  misc_RNA (1)...(19): siRNA sense strand
aggcuuauauuuccaacag

SEQ ID NO: 1287850 - RNA, 19 nt, Homo sapiens
  misc_RNA (1)...(19): siRNA sense strand
cauuaucuuucucaucucu

SEQ ID NO: 1287851 - RNA, 19 nt, Homo sapiens
  misc_RNA (1)...(19): siRNA sense strand
gaagacccuggacuuugug

SEQ ID NO: 1287852 - RNA, 19 nt, Homo sapiens
  misc_RNA (1)...(19): siRNA sense strand
ucugaagacccuggacuuu

SEQ ID NO: 1287853 - RNA, 19 nt, Homo sapiens
  misc_RNA (1)...(19): siRNA sense strand
agcaagguaucauucuuuc

SEQ ID NO: 1287854 - RNA, 19 nt, Homo sapiens
  misc_RNA (1)...(19): siRNA sense strand
ggagccaaagugauuucaa

SEQ ID NO: 1287855 - RNA, 19 nt, Homo sapiens
  misc_RNA (1)...(19): siRNA sense strand
gaggagccaaagugauuuc

SEQ ID NO: 1287856 - RNA, 19 nt, Homo sapiens
  misc_RNA (1)...(19): siRNA sense strand
caucauagaggagccaaag

SEQ ID NO: 1287857 - RNA, 19 nt, Homo sapiens
  misc_RNA (1)...(19): siRNA sense strand
cuauucaguuagcacauca

SEQ ID NO: 1287858 - RNA, 19 nt, Homo sapiens
  misc_RNA (1)...(19): siRNA sense strand
aggauaacuuugugaaacu

SEQ ID NO: 1287859 - RNA, 19 nt, Homo sapiens
  misc_RNA (1)...(19): siRNA sense strand
uuugugaaguuguuagagu

SEQ ID NO: 1287860 - RNA, 19 nt, Homo sapiens
  misc_RNA (1)...(19): siRNA sense strand
agaggauaacuuugugaaa

SEQ ID NO: 1287861 - RNA, 19 nt, Homo sapiens
  misc_RNA (1)...(19): siRNA sense strand
caacagcaugcagccuuga

SEQ ID NO: 1287862 - RNA, 19 nt, Homo sapiens
  misc_RNA (1)...(19): siRNA sense strand
gauaacuuugugaaacuuc

SEQ ID NO: 1287863 - RNA, 19 nt, Homo sapiens
  misc_RNA (1)...(19): siRNA sense strand
uacaugagcauuacuuggu

SEQ ID NO: 1287864 - RNA, 19 nt, Homo sapiens
  misc_RNA (1)...(19): siRNA sense strand
cugaagacccuggacuuug

SEQ ID NO: 1287865 - RNA, 19 nt, Homo sapiens
  misc_RNA (1)...(19): siRNA sense strand
ggauauagcuagugcaaua

SEQ ID NO: 1287866 - RNA, 19 nt, Homo sapiens
  misc_RNA (1)...(19): siRNA sense strand
uggaagagaugaagaauga

SEQ ID NO: 1287867 - RNA, 19 nt, Homo sapiens
  misc_RNA (1)...(19): siRNA sense strand
caaaccaacuuaauacuuc

SEQ ID NO: 1287868 - RNA, 19 nt, Homo sapiens
  misc_RNA (1)...(19): siRNA sense strand
ucaguaagaucccagauga

SEQ ID NO: 1287869 - RNA, 19 nt, Homo sapiens
  misc_RNA (1)...(19): siRNA sense strand
ccacauccaugguuucuau

SEQ ID NO: 1287870 - RNA, 19 nt, Homo sapiens
  misc_RNA (1)...(19): siRNA sense strand
guagaagaguauaugauug

SEQ ID NO: 1287871 - RNA, 19 nt, Homo sapiens
  misc_RNA (1)...(19): siRNA sense strand
uauggcagcugaugaugua

SEQ ID NO: 1287872 - RNA, 19 nt, Homo sapiens
  misc_RNA (1)...(19): siRNA sense strand
ggcaauaaauguguucgua

SEQ ID NO: 1287873 - RNA, 19 nt, Homo sapiens
  misc_RNA (1)...(19): siRNA sense strand
gcacgagcacuuaaacaaa

SEQ ID NO: 1287874 - RNA, 19 nt, Homo sapiens
  misc_RNA (1)...(19): siRNA sense strand
gcaauaaauguguucguaa

SEQ ID NO: 1287875 - RNA, 19 nt, Homo sapiens
  misc_RNA (1)...(19): siRNA sense strand
gcacuuaaacaaauucuca

SEQ ID NO: 1287876 - RNA, 19 nt, Homo sapiens
  misc_RNA (1)...(19): siRNA sense strand
gcaaggcaauaaauguguu

SEQ ID NO: 1287877 - RNA, 19 nt, Homo sapiens
  misc_RNA (1)...(19): siRNA sense strand
gagagccgcuuucaucaag

SEQ ID NO: 1287878 - RNA, 19 nt, Homo sapiens
  misc_RNA (1)...(19): siRNA sense strand
caauaaauguguucguaag

SEQ ID NO: 1287879 - RNA, 19 nt, Homo sapiens
  misc_RNA (1)...(19): siRNA sense strand
ucauguauccuguguuuaa

SEQ ID NO: 1287880 - RNA, 19 nt, Homo sapiens
  misc_RNA (1)...(19): siRNA sense strand
agucauguauccuguguuu

SEQ ID NO: 1287881 - RNA, 19 nt, Homo sapiens
  misc_RNA (1)...(19): siRNA sense strand
guaaaguacuccaaaaguu

SEQ ID NO: 1287882 - RNA, 19 nt, Homo sapiens
  misc_RNA (1)...(19): siRNA sense strand
gcagucauguauccugugu

SEQ ID NO: 1287883 - RNA, 19 nt, Homo sapiens
  misc_RNA (1)...(19): siRNA sense strand
cacgagcacuuaaacaaau

SEQ ID NO: 1287884 - RNA, 19 nt, Homo sapiens
  misc_RNA (1)...(19): siRNA sense strand
gaaaaggcacgagcacuua

SEQ ID NO: 1287885 - RNA, 19 nt, Homo sapiens
  misc_RNA (1)...(19): siRNA sense strand
gaacuucuugauacaguga

SEQ ID NO: 1287886 - RNA, 19 nt, Homo sapiens
  misc_RNA (1)...(19): siRNA sense strand
guaagugccaaccgacuaa

SEQ ID NO: 1287887 - RNA, 19 nt, Homo sapiens
  misc_RNA (1)...(19): siRNA sense strand
gaagagaugaagaaugaag

SEQ ID NO: 1287888 - RNA, 19 nt, Homo sapiens
  misc_RNA (1)...(19): siRNA sense strand
ggaugacaauggaagagau

SEQ ID NO: 1287889 - RNA, 19 nt, Homo sapiens
  misc_RNA (1)...(19): siRNA sense strand
aaagauggcaaggcaauaa

SEQ ID NO: 1287890 - RNA, 19 nt, Homo sapiens
  misc_RNA (1)...(19): siRNA sense strand
uguauccuguguuuaauga

SEQ ID NO: 1287891 - RNA, 19 nt, Homo sapiens
  misc_RNA (1)...(19): siRNA sense strand
cugaugauguagaagagua

SEQ ID NO: 1287892 - RNA, 19 nt, Homo sapiens
  misc_RNA (1)...(19): siRNA sense strand
cggagucccuucuucguau

SEQ ID NO: 1287893 - RNA, 19 nt, Homo sapiens
  misc_RNA (1)...(19): siRNA sense strand
caucaaaccaacuuaauac

SEQ ID NO: 1287894 - RNA, 19 nt, Homo sapiens
  misc_RNA (1)...(19): siRNA sense strand
gcagacaaucaaggauaua

SEQ ID NO: 1287895 - RNA, 19 nt, Homo sapiens
  misc_RNA (1)...(19): siRNA sense strand
caauggaagagaugaagaa

SEQ ID NO: 1287896 - RNA, 19 nt, Homo sapiens
  misc_RNA (1)...(19): siRNA sense strand
ucacacaagacaucauuau

SEQ ID NO: 1287897 - RNA, 19 nt, Homo sapiens
  misc_RNA (1)...(19): siRNA sense strand
gugauacucugaaaacgua

SEQ ID NO: 1287898 - RNA, 19 nt, Homo sapiens
  misc_RNA (1)...(19): siRNA sense strand
gauguagaagaguauauga

SEQ ID NO: 1287899 - RNA, 19 nt, Homo sapiens
  misc_RNA (1)...(19): siRNA sense strand
ccaaccgacuaauucauca

SEQ ID NO: 1287900 - RNA, 19 nt, Homo sapiens
  misc_RNA (1)...(19): siRNA sense strand
gauauagcuagugcaauaa

SEQ ID NO: 1287901 - RNA, 19 nt, Homo sapiens
  misc_RNA (1)...(19): siRNA sense strand
ugagguuucugcagacaau

SEQ ID NO: 1287902 - RNA, 19 nt, Homo sapiens
  misc_RNA (1)...(19): siRNA sense strand
ggcagcugaugauguagaa

SEQ ID NO: 1287903 - RNA, 19 nt, Homo sapiens
  misc_RNA (1)...(19): siRNA sense strand
gaaccgcagggcacuugaa

SEQ ID NO: 1287904 - RNA, 19 nt, Homo sapiens
  misc_RNA (1)...(19): siRNA sense strand
gaacgaccagagccagaau

SEQ ID NO: 1287905 - RNA, 19 nt, Homo sapiens
  misc_RNA (1)...(19): siRNA sense strand
auaaauguguucguaagug

SEQ ID NO: 1287906 - RNA, 19 nt, Homo sapiens
  misc_RNA (1)...(19): siRNA sense strand
gauggcaaggcaauaaaug

SEQ ID NO: 1287907 - RNA, 19 nt, Homo sapiens
  misc_RNA (1)...(19): siRNA sense strand
uccaaaaguuucagugaua

SEQ ID NO: 1287908 - RNA, 19 nt, Homo sapiens
  misc_RNA (1)...(19): siRNA sense strand
ggcacgagcacuuaaacaa

SEQ ID NO: 1287909 - RNA, 19 nt, Homo sapiens
  misc_RNA (1)...(19): siRNA sense strand
gaccagagccagaauucca

SEQ ID NO: 1287910 - RNA, 19 nt, Homo sapiens
  misc_RNA (1)...(19): siRNA sense strand
ggagucccuucuucguaug

SEQ ID NO: 1287911 - RNA, 19 nt, Homo sapiens
  misc_RNA (1)...(19): siRNA sense strand
uaaagauggcaaggcaaua

SEQ ID NO: 1287912 - RNA, 19 nt, Homo sapiens
  misc_RNA (1)...(19): siRNA sense strand
cagcugaugauguagaaga

SEQ ID NO: 1287913 - RNA, 19 nt, Homo sapiens
  misc_RNA (1)...(19): siRNA sense strand
aaucaaggauauagcuagu

SEQ ID NO: 1287914 - RNA, 19 nt, Homo sapiens
  misc_RNA (1)...(19): siRNA sense strand
cugcagacaaucaaggaua

SEQ ID NO: 1287915 - RNA, 19 nt, Homo sapiens
  misc_RNA (1)...(19): siRNA sense strand
gaaauaucaauaccagaac

SEQ ID NO: 1287916 - RNA, 19 nt, Homo sapiens
  misc_RNA (1)...(19): siRNA sense strand
ugagcuagaacgaguaaau

SEQ ID NO: 1287917 - RNA, 19 nt, Homo sapiens
  misc_RNA (1)...(19): siRNA sense strand
ugcagacaaucaaggauau

SEQ ID NO: 1287918 - RNA, 19 nt, Homo sapiens
  misc_RNA (1)...(19): siRNA sense strand
cuagaacgaguaaaucugu

SEQ ID NO: 1287919 - RNA, 19 nt, Homo sapiens
  misc_RNA (1)...(19): siRNA sense strand
gagcuagaacgaguaaauc

SEQ ID NO: 1287920 - RNA, 19 nt, Homo sapiens
  misc_RNA (1)...(19): siRNA sense strand
aaauccaggucucacacaa

SEQ ID NO: 1287921 - RNA, 19 nt, Homo sapiens
  misc_RNA (1)...(19): siRNA sense strand
gaugauguagaagaguaua

SEQ ID NO: 1287922 - RNA, 19 nt, Homo sapiens
  misc_RNA (1)...(19): siRNA sense strand
gaugacaauggaagagaug

SEQ ID NO: 1287923 - RNA, 19 nt, Homo sapiens
  misc_RNA (1)...(19): siRNA sense strand
uacagugaauaaugucuuc

SEQ ID NO: 1287924 - RNA, 19 nt, Homo sapiens
  misc_RNA (1)...(19): siRNA sense strand
ucccagaugagaucaauga

SEQ ID NO: 1287925 - RNA, 19 nt, Homo sapiens
  misc_RNA (1)...(19): siRNA sense strand
cauguauccuguguuuaau

SEQ ID NO: 1287926 - RNA, 19 nt, Homo sapiens
  misc_RNA (1)...(19): siRNA sense strand
acgagcacuuaaacaaauu

SEQ ID NO: 1287927 - RNA, 19 nt, Homo sapiens
  misc_RNA (1)...(19): siRNA sense strand
acugagagccgcuuucauc

SEQ ID NO: 1287928 - RNA, 19 nt, Homo sapiens
  misc_RNA (1)...(19): siRNA sense strand
cguaagugccaaccgacua

SEQ ID NO: 1287929 - RNA, 19 nt, Homo sapiens
  misc_RNA (1)...(19): siRNA sense strand
gagaucaaugacagaguga

SEQ ID NO: 1287930 - RNA, 19 nt, Homo sapiens
  misc_RNA (1)...(19): siRNA sense strand
aguaagaucccagaugaga

SEQ ID NO: 1287931 - RNA, 19 nt, Homo sapiens
  misc_RNA (1)...(19): siRNA sense strand
uuaaagauggcaaggcaau

SEQ ID NO: 1287932 - RNA, 19 nt, Homo sapiens
  misc_RNA (1)...(19): siRNA sense strand
cuugauacagugaauaaug

SEQ ID NO: 1287933 - RNA, 19 nt, Homo sapiens
  misc_RNA (1)...(19): siRNA sense strand
ucaaugacagagugagguu

SEQ ID NO: 1287934 - RNA, 19 nt, Homo sapiens
  misc_RNA (1)...(19): siRNA sense strand
auccaggucucacacaaga

SEQ ID NO: 1287935 - RNA, 19 nt, Homo sapiens
  misc_RNA (1)...(19): siRNA sense strand
ccucuaugcagucauguau

SEQ ID NO: 1287936 - RNA, 19 nt, Homo sapiens
  misc_RNA (1)...(19): siRNA sense strand
gccaaccgacuaauucauc

SEQ ID NO: 1287937 - RNA, 19 nt, Homo sapiens
  misc_RNA (1)...(19): siRNA sense strand
gcuagaacgaguaaaucug

SEQ ID NO: 1287938 - RNA, 19 nt, Homo sapiens
  misc_RNA (1)...(19): siRNA sense strand
aaaggcacgagcacuuaaa

SEQ ID NO: 1287939 - RNA, 19 nt, Homo sapiens
  misc_RNA (1)...(19): siRNA sense strand
guaagaucccagaugagau

SEQ ID NO: 1287940 - RNA, 19 nt, Homo sapiens
  misc_RNA (1)...(19): siRNA sense strand
ggcaaggcaauaaaugugu

SEQ ID NO: 1287941 - RNA, 19 nt, Homo sapiens
  misc_RNA (1)...(19): siRNA sense strand
ugagagccgcuuucaucaa

SEQ ID NO: 1287942 - RNA, 19 nt, Homo sapiens
  misc_RNA (1)...(19): siRNA sense strand
ucucacacaagacaucauu

SEQ ID NO: 1287943 - RNA, 19 nt, Homo sapiens
  misc_RNA (1)...(19): siRNA sense strand
ccagaugagaucaaugaca

SEQ ID NO: 1287944 - RNA, 19 nt, Homo sapiens
  misc_RNA (1)...(19): siRNA sense strand
ugacaauggaagagaugaa

SEQ ID NO: 1287945 - RNA, 19 nt, Homo sapiens
  misc_RNA (1)...(19): siRNA sense strand
cuucagaccuucaaaacug

SEQ ID NO: 1287946 - RNA, 19 nt, Homo sapiens
  misc_RNA (1)...(19): siRNA sense strand
gcacuugaacaccaaaaga

SEQ ID NO: 1287947 - RNA, 19 nt, Homo sapiens
  misc_RNA (1)...(19): siRNA sense strand
gaagaguauaugauugaac

SEQ ID NO: 1287948 - RNA, 19 nt, Homo sapiens
  misc_RNA (1)...(19): siRNA sense strand
cacacaagacaucauuaug

SEQ ID NO: 1287949 - RNA, 19 nt, Homo sapiens
  misc_RNA (1)...(19): siRNA sense strand
guauggcagcugaugaugu

SEQ ID NO: 1287950 - RNA, 19 nt, Homo sapiens
  misc_RNA (1)...(19): siRNA sense strand
cagggcacuugaacaccaa

SEQ ID NO: 1287951 - RNA, 19 nt, Homo sapiens
  misc_RNA (1)...(19): siRNA sense strand
cagaaccgcagggcacuug

SEQ ID NO: 1287952 - RNA, 19 nt, Homo sapiens
  misc_RNA (1)...(19): siRNA sense strand
ggauauagcuagugcaaua

SEQ ID NO: 1287953 - RNA, 19 nt, Homo sapiens
  misc_RNA (1)...(19): siRNA sense strand
uggaagagaugaagaauga

SEQ ID NO: 1287954 - RNA, 19 nt, Homo sapiens
  misc_RNA (1)...(19): siRNA sense strand
caaaccaacuuaauacuuc

SEQ ID NO: 1287955 - RNA, 19 nt, Homo sapiens
  misc_RNA (1)...(19): siRNA sense strand
ucaguaagaucccagauga

SEQ ID NO: 1287956 - RNA, 19 nt, Homo sapiens
  misc_RNA (1)...(19): siRNA sense strand
ccacauccaugguuucuau

SEQ ID NO: 1287957 - RNA, 19 nt, Homo sapiens
  misc_RNA (1)...(19): siRNA sense strand
guagaagaguauaugauug

SEQ ID NO: 1287958 - RNA, 19 nt, Homo sapiens
  misc_RNA (1)...(19): siRNA sense strand
uauggcagcugaugaugua

SEQ ID NO: 1287959 - RNA, 19 nt, Homo sapiens
  misc_RNA (1)...(19): siRNA sense strand
ggcaauaaauguguucgua

SEQ ID NO: 1287960 - RNA, 19 nt, Homo sapiens
  misc_RNA (1)...(19): siRNA sense strand
gcacgagcacuuaaacaaa

SEQ ID NO: 1287961 - RNA, 19 nt, Homo sapiens
  misc_RNA (1)...(19): siRNA sense strand
gcaauaaauguguucguaa

SEQ ID NO: 1287962 - RNA, 19 nt, Homo sapiens
  misc_RNA (1)...(19): siRNA sense strand
gcacuuaaacaaauucuca

SEQ ID NO: 1287963 - RNA, 19 nt, Homo sapiens
  misc_RNA (1)...(19): siRNA sense strand
gcaaggcaauaaauguguu

SEQ ID NO: 1287964 - RNA, 19 nt, Homo sapiens
  misc_RNA (1)...(19): siRNA sense strand
gagagccgcuuucaucaag

SEQ ID NO: 1287965 - RNA, 19 nt, Homo sapiens
  misc_RNA (1)...(19): siRNA sense strand
caauaaauguguucguaag

SEQ ID NO: 1287966 - RNA, 19 nt, Homo sapiens
  misc_RNA (1)...(19): siRNA sense strand
ucauguauccuguguuuaa

SEQ ID NO: 1287967 - RNA, 19 nt, Homo sapiens
  misc_RNA (1)...(19): siRNA sense strand
agucauguauccuguguuu

SEQ ID NO: 1287968 - RNA, 19 nt, Homo sapiens
  misc_RNA (1)...(19): siRNA sense strand
guaaaguacuccaaaaguu

SEQ ID NO: 1287969 - RNA, 19 nt, Homo sapiens
  misc_RNA (1)...(19): siRNA sense strand
gcagucauguauccugugu

SEQ ID NO: 1287970 - RNA, 19 nt, Homo sapiens
  misc_RNA (1)...(19): siRNA sense strand
cacgagcacuuaaacaaau

SEQ ID NO: 1287971 - RNA, 19 nt, Homo sapiens
  misc_RNA (1)...(19): siRNA sense strand
gaaaaggcacgagcacuua

SEQ ID NO: 1287972 - RNA, 19 nt, Homo sapiens
  misc_RNA (1)...(19): siRNA sense strand
gaacuucuugauacaguga

SEQ ID NO: 1287973 - RNA, 19 nt, Homo sapiens
  misc_RNA (1)...(19): siRNA sense strand
guaagugccaaccgacuaa

SEQ ID NO: 1287974 - RNA, 19 nt, Homo sapiens
  misc_RNA (1)...(19): siRNA sense strand
gaagagaugaagaaugaag

SEQ ID NO: 1287975 - RNA, 19 nt, Homo sapiens
  misc_RNA (1)...(19): siRNA sense strand
ggaugacaauggaagagau

SEQ ID NO: 1287976 - RNA, 19 nt, Homo sapiens
  misc_RNA (1)...(19): siRNA sense strand
aaagauggcaaggcaauaa

SEQ ID NO: 1287977 - RNA, 19 nt, Homo sapiens
  misc_RNA (1)...(19): siRNA sense strand
uguauccuguguuuaauga

SEQ ID NO: 1287978 - RNA, 19 nt, Homo sapiens
  misc_RNA (1)...(19): siRNA sense strand
cugaugauguagaagagua

SEQ ID NO: 1287979 - RNA, 19 nt, Homo sapiens
  misc_RNA (1)...(19): siRNA sense strand
cggagucccuucuucguau

SEQ ID NO: 1287980 - RNA, 19 nt, Homo sapiens
  misc_RNA (1)...(19): siRNA sense strand
caucaaaccaacuuaauac

SEQ ID NO: 1287981 - RNA, 19 nt, Homo sapiens
  misc_RNA (1)...(19): siRNA sense strand
gcagacaaucaaggauaua

SEQ ID NO: 1287982 - RNA, 19 nt, Homo sapiens
  misc_RNA (1)...(19): siRNA sense strand
caauggaagagaugaagaa

SEQ ID NO: 1287983 - RNA, 19 nt, Homo sapiens
  misc_RNA (1)...(19): siRNA sense strand
ucacacaagacaucauuau

SEQ ID NO: 1287984 - RNA, 19 nt, Homo sapiens
  misc_RNA (1)...(19): siRNA sense strand
gugauacucugaaaacgua

SEQ ID NO: 1287985 - RNA, 19 nt, Homo sapiens
  misc_RNA (1)...(19): siRNA sense strand
gauguagaagaguauauga

SEQ ID NO: 1287986 - RNA, 19 nt, Homo sapiens
  misc_RNA (1)...(19): siRNA sense strand
ccaaccgacuaauucauca

SEQ ID NO: 1287987 - RNA, 19 nt, Homo sapiens
  misc_RNA (1)...(19): siRNA sense strand
gauauagcuagugcaauaa

SEQ ID NO: 1287988 - RNA, 19 nt, Homo sapiens
  misc_RNA (1)...(19): siRNA sense strand
ugagguuucugcagacaau

SEQ ID NO: 1287989 - RNA, 19 nt, Homo sapiens
  misc_RNA (1)...(19): siRNA sense strand
ggcagcugaugauguagaa

SEQ ID NO: 1287990 - RNA, 19 nt, Homo sapiens
  misc_RNA (1)...(19): siRNA sense strand
gaaccgcagggcacuugaa

SEQ ID NO: 1287991 - RNA, 19 nt, Homo sapiens
  misc_RNA (1)...(19): siRNA sense strand
gaacgaccagagccagaau

SEQ ID NO: 1287992 - RNA, 19 nt, Homo sapiens
  misc_RNA (1)...(19): siRNA sense strand
auaaauguguucguaagug

SEQ ID NO: 1287993 - RNA, 19 nt, Homo sapiens
  misc_RNA (1)...(19): siRNA sense strand
gauggcaaggcaauaaaug

SEQ ID NO: 1287994 - RNA, 19 nt, Homo sapiens
  misc_RNA (1)...(19): siRNA sense strand
uccaaaaguuucagugaua

SEQ ID NO: 1287995 - RNA, 19 nt, Homo sapiens
  misc_RNA (1)...(19): siRNA sense strand
ggcacgagcacuuaaacaa

SEQ ID NO: 1287996 - RNA, 19 nt, Homo sapiens
  misc_RNA (1)...(19): siRNA sense strand
gaccagagccagaauucca

SEQ ID NO: 1287997 - RNA, 19 nt, Homo sapiens
  misc_RNA (1)...(19): siRNA sense strand
ggagucccuucuucguaug

SEQ ID NO: 1287998 - RNA, 19 nt, Homo sapiens
  misc_RNA (1)...(19): siRNA sense strand
uaaagauggcaaggcaaua

SEQ ID NO: 1287999 - RNA, 19 nt, Homo sapiens
  misc_RNA (1)...(19): siRNA sense strand
cagcugaugauguagaaga

SEQ ID NO: 1288000 - RNA, 19 nt, Homo sapiens
  misc_RNA (1)...(19): siRNA sense strand
aaucaaggauauagcuagu

SEQ ID NO: 1288001 - RNA, 19 nt, Homo sapiens
  misc_RNA (1)...(19): siRNA sense strand
cugcagacaaucaaggaua

SEQ ID NO: 1288002 - RNA, 19 nt, Homo sapiens
  misc_RNA (1)...(19): siRNA sense strand
gaaauaucaauaccagaac

SEQ ID NO: 1288003 - RNA, 19 nt, Homo sapiens
  misc_RNA (1)...(19): siRNA sense strand
ugagcuagaacgaguaaau

SEQ ID NO: 1288004 - RNA, 19 nt, Homo sapiens
  misc_RNA (1)...(19): siRNA sense strand
ugcagacaaucaaggauau

SEQ ID NO: 1288005 - RNA, 19 nt, Homo sapiens
  misc_RNA (1)...(19): siRNA sense strand
cuagaacgaguaaaucugu

SEQ ID NO: 1288006 - RNA, 19 nt, Homo sapiens
  misc_RNA (1)...(19): siRNA sense strand
gagcuagaacgaguaaauc

SEQ ID NO: 1288007 - RNA, 19 nt, Homo sapiens
  misc_RNA (1)...(19): siRNA sense strand
aaauccaggucucacacaa

SEQ ID NO: 1288008 - RNA, 19 nt, Homo sapiens
  misc_RNA (1)...(19): siRNA sense strand
gaugauguagaagaguaua

SEQ ID NO: 1288009 - RNA, 19 nt, Homo sapiens
  misc_RNA (1)...(19): siRNA sense strand
gaugacaauggaagagaug

SEQ ID NO: 1288010 - RNA, 19 nt, Homo sapiens
  misc_RNA (1)...(19): siRNA sense strand
uacagugaauaaugucuuc

SEQ ID NO: 1288011 - RNA, 19 nt, Homo sapiens
  misc_RNA (1)...(19): siRNA sense strand
ucccagaugagaucaauga

SEQ ID NO: 1288012 - RNA, 19 nt, Homo sapiens
  misc_RNA (1)...(19): siRNA sense strand
cauguauccuguguuuaau

SEQ ID NO: 1288013 - RNA, 19 nt, Homo sapiens
  misc_RNA (1)...(19): siRNA sense strand
acgagcacuuaaacaaauu

SEQ ID NO: 1288014 - RNA, 19 nt, Homo sapiens
  misc_RNA (1)...(19): siRNA sense strand
acugagagccgcuuucauc

SEQ ID NO: 1288015 - RNA, 19 nt, Homo sapiens
  misc_RNA (1)...(19): siRNA sense strand
cguaagugccaaccgacua

SEQ ID NO: 1288016 - RNA, 19 nt, Homo sapiens
  misc_RNA (1)...(19): siRNA sense strand
gagaucaaugacagaguga

SEQ ID NO: 1288017 - RNA, 19 nt, Homo sapiens
  misc_RNA (1)...(19): siRNA sense strand
aguaagaucccagaugaga

SEQ ID NO: 1288018 - RNA, 19 nt, Homo sapiens
  misc_RNA (1)...(19): siRNA sense strand
uuaaagauggcaaggcaau

SEQ ID NO: 1288019 - RNA, 19 nt, Homo sapiens
  misc_RNA (1)...(19): siRNA sense strand
cuugauacagugaauaaug

SEQ ID NO: 1288020 - RNA, 19 nt, Homo sapiens
  misc_RNA (1)...(19): siRNA sense strand
ucaaugacagagugagguu

SEQ ID NO: 1288021 - RNA, 19 nt, Homo sapiens
  misc_RNA (1)...(19): siRNA sense strand
auccaggucucacacaaga

SEQ ID NO: 1288022 - RNA, 19 nt, Homo sapiens
  misc_RNA (1)...(19): siRNA sense strand
ccucuaugcagucauguau

SEQ ID NO: 1288023 - RNA, 19 nt, Homo sapiens
  misc_RNA (1)...(19): siRNA sense strand
gccaaccgacuaauucauc

SEQ ID NO: 1288024 - RNA, 19 nt, Homo sapiens
  misc_RNA (1)...(19): siRNA sense strand
gcuagaacgaguaaaucug

SEQ ID NO: 1288025 - RNA, 19 nt, Homo sapiens
  misc_RNA (1)...(19): siRNA sense strand
aaaggcacgagcacuuaaa

SEQ ID NO: 1288026 - RNA, 19 nt, Homo sapiens
  misc_RNA (1)...(19): siRNA sense strand
guaagaucccagaugagau

SEQ ID NO: 1288027 - RNA, 19 nt, Homo sapiens
  misc_RNA (1)...(19): siRNA sense strand
ggcaaggcaauaaaugugu

SEQ ID NO: 1288028 - RNA, 19 nt, Homo sapiens
  misc_RNA (1)...(19): siRNA sense strand
ugagagccgcuuucaucaa

SEQ ID NO: 1288029 - RNA, 19 nt, Homo sapiens
  misc_RNA (1)...(19): siRNA sense strand
ucucacacaagacaucauu

SEQ ID NO: 1288030 - RNA, 19 nt, Homo sapiens
  misc_RNA (1)...(19): siRNA sense strand
ccagaugagaucaaugaca

SEQ ID NO: 1288031 - RNA, 19 nt, Homo sapiens
  misc_RNA (1)...(19): siRNA sense strand
ugacaauggaagagaugaa

SEQ ID NO: 1288032 - RNA, 19 nt, Homo sapiens
  misc_RNA (1)...(19): siRNA sense strand
cuucagaccuucaaaacug

SEQ ID NO: 1288033 - RNA, 19 nt, Homo sapiens
  misc_RNA (1)...(19): siRNA sense strand
gcacuugaacaccaaaaga

SEQ ID NO: 1288034 - RNA, 19 nt, Homo sapiens
  misc_RNA (1)...(19): siRNA sense strand
gaagaguauaugauugaac

SEQ ID NO: 1288035 - RNA, 19 nt, Homo sapiens
  misc_RNA (1)...(19): siRNA sense strand
cacacaagacaucauuaug

SEQ ID NO: 1288036 - RNA, 19 nt, Homo sapiens
  misc_RNA (1)...(19): siRNA sense strand
guauggcagcugaugaugu

SEQ ID NO: 1288037 - RNA, 19 nt, Homo sapiens
  misc_RNA (1)...(19): siRNA sense strand
cagggcacuugaacaccaa

SEQ ID NO: 1288038 - RNA, 19 nt, Homo sapiens
  misc_RNA (1)...(19): siRNA sense strand
cagaaccgcagggcacuug

SEQ ID NO: 1288039 - RNA, 19 nt, Homo sapiens
  misc_RNA (1)...(19): siRNA sense strand
ggauauagcuagugcaaua

SEQ ID NO: 1288040 - RNA, 19 nt, Homo sapiens
  misc_RNA (1)...(19): siRNA sense strand
uggaagagaugaagaauga

SEQ ID NO: 1288041 - RNA, 19 nt, Homo sapiens
  misc_RNA (1)...(19): siRNA sense strand
caaaccaacuuaauacuuc

SEQ ID NO: 1288042 - RNA, 19 nt, Homo sapiens
  misc_RNA (1)...(19): siRNA sense strand
ucaguaagaucccagauga

SEQ ID NO: 1288043 - RNA, 19 nt, Homo sapiens
  misc_RNA (1)...(19): siRNA sense strand
ccacauccaugguuucuau

SEQ ID NO: 1288044 - RNA, 19 nt, Homo sapiens
  misc_RNA (1)...(19): siRNA sense strand
guagaagaguauaugauug

SEQ ID NO: 1288045 - RNA, 19 nt, Homo sapiens
  misc_RNA (1)...(19): siRNA sense strand
uauggcagcugaugaugua

SEQ ID NO: 1288046 - RNA, 19 nt, Homo sapiens
  misc_RNA (1)...(19): siRNA sense strand
ggcaauaaauguguucgua

SEQ ID NO: 1288047 - RNA, 19 nt, Homo sapiens
  misc_RNA (1)...(19): siRNA sense strand
gcacgagcacuuaaacaaa

SEQ ID NO: 1288048 - RNA, 19 nt, Homo sapiens
  misc_RNA (1)...(19): siRNA sense strand
gcaauaaauguguucguaa

SEQ ID NO: 1288049 - RNA, 19 nt, Homo sapiens
  misc_RNA (1)...(19): siRNA sense strand
gcacuuaaacaaauucuca

SEQ ID NO: 1288050 - RNA, 19 nt, Homo sapiens
  misc_RNA (1)...(19): siRNA sense strand
gcaaggcaauaaauguguu

SEQ ID NO: 1288051 - RNA, 19 nt, Homo sapiens
  misc_RNA (1)...(19): siRNA sense strand
gagagccgcuuucaucaag

SEQ ID NO: 1288052 - RNA, 19 nt, Homo sapiens
  misc_RNA (1)...(19): siRNA sense strand
caauaaauguguucguaag

SEQ ID NO: 1288053 - RNA, 19 nt, Homo sapiens
  misc_RNA (1)...(19): siRNA sense strand
ucauguauccuguguuuaa

SEQ ID NO: 1288054 - RNA, 19 nt, Homo sapiens
  misc_RNA (1)...(19): siRNA sense strand
agucauguauccuguguuu

SEQ ID NO: 1288055 - RNA, 19 nt, Homo sapiens
  misc_RNA (1)...(19): siRNA sense strand
guaaaguacuccaaaaguu

SEQ ID NO: 1288056 - RNA, 19 nt, Homo sapiens
  misc_RNA (1)...(19): siRNA sense strand
gcagucauguauccugugu

SEQ ID NO: 1288057 - RNA, 19 nt, Homo sapiens
  misc_RNA (1)...(19): siRNA sense strand
cacgagcacuuaaacaaau

SEQ ID NO: 1288058 - RNA, 19 nt, Homo sapiens
  misc_RNA (1)...(19): siRNA sense strand
gaaaaggcacgagcacuua

SEQ ID NO: 1288059 - RNA, 19 nt, Homo sapiens
  misc_RNA (1)...(19): siRNA sense strand
gaacuucuugauacaguga

SEQ ID NO: 1288060 - RNA, 19 nt, Homo sapiens
  misc_RNA (1)...(19): siRNA sense strand
guaagugccaaccgacuaa

SEQ ID NO: 1288061 - RNA, 19 nt, Homo sapiens
  misc_RNA (1)...(19): siRNA sense strand
gaagagaugaagaaugaag

SEQ ID NO: 1288062 - RNA, 19 nt, Homo sapiens
  misc_RNA (1)...(19): siRNA sense strand
ggaugacaauggaagagau

SEQ ID NO: 1288063 - RNA, 19 nt, Homo sapiens
  misc_RNA (1)...(19): siRNA sense strand
aaagauggcaaggcaauaa

SEQ ID NO: 1288064 - RNA, 19 nt, Homo sapiens
  misc_RNA (1)...(19): siRNA sense strand
uguauccuguguuuaauga

SEQ ID NO: 1288065 - RNA, 19 nt, Homo sapiens
  misc_RNA (1)...(19): siRNA sense strand
cugaugauguagaagagua

SEQ ID NO: 1288066 - RNA, 19 nt, Homo sapiens
  misc_RNA (1)...(19): siRNA sense strand
cggagucccuucuucguau

SEQ ID NO: 1288067 - RNA, 19 nt, Homo sapiens
  misc_RNA (1)...(19): siRNA sense strand
caucaaaccaacuuaauac

SEQ ID NO: 1288068 - RNA, 19 nt, Homo sapiens
  misc_RNA (1)...(19): siRNA sense strand
gcagacaaucaaggauaua

SEQ ID NO: 1288069 - RNA, 19 nt, Homo sapiens
  misc_RNA (1)...(19): siRNA sense strand
caauggaagagaugaagaa

SEQ ID NO: 1288070 - RNA, 19 nt, Homo sapiens
  misc_RNA (1)...(19): siRNA sense strand
ucacacaagacaucauuau

SEQ ID NO: 1288071 - RNA, 19 nt, Homo sapiens
  misc_RNA (1)...(19): siRNA sense strand
gugauacucugaaaacgua

SEQ ID NO: 1288072 - RNA, 19 nt, Homo sapiens
  misc_RNA (1)...(19): siRNA sense strand
gauguagaagaguauauga

SEQ ID NO: 1288073 - RNA, 19 nt, Homo sapiens
  misc_RNA (1)...(19): siRNA sense strand
ccaaccgacuaauucauca

SEQ ID NO: 1288074 - RNA, 19 nt, Homo sapiens
  misc_RNA (1)...(19): siRNA sense strand
gauauagcuagugcaauaa

SEQ ID NO: 1288075 - RNA, 19 nt, Homo sapiens
  misc_RNA (1)...(19): siRNA sense strand
ugagguuucugcagacaau

SEQ ID NO: 1288076 - RNA, 19 nt, Homo sapiens
  misc_RNA (1)...(19): siRNA sense strand
ggcagcugaugauguagaa

SEQ ID NO: 1288077 - RNA, 19 nt, Homo sapiens
  misc_RNA (1)...(19): siRNA sense strand
gaaccgcagggcacuugaa

SEQ ID NO: 1288078 - RNA, 19 nt, Homo sapiens
  misc_RNA (1)...(19): siRNA sense strand
gaacgaccagagccagaau

SEQ ID NO: 1288079 - RNA, 19 nt, Homo sapiens
  misc_RNA (1)...(19): siRNA sense strand
auaaauguguucguaagug

SEQ ID NO: 1288080 - RNA, 19 nt, Homo sapiens
  misc_RNA (1)...(19): siRNA sense strand
gauggcaaggcaauaaaug

SEQ ID NO: 1288081 - RNA, 19 nt, Homo sapiens
  misc_RNA (1)...(19): siRNA sense strand
uccaaaaguuucagugaua

SEQ ID NO: 1288082 - RNA, 19 nt, Homo sapiens
  misc_RNA (1)...(19): siRNA sense strand
ggcacgagcacuuaaacaa

SEQ ID NO: 1288083 - RNA, 19 nt, Homo sapiens
  misc_RNA (1)...(19): siRNA sense strand
gaccagagccagaauucca

SEQ ID NO: 1288084 - RNA, 19 nt, Homo sapiens
  misc_RNA (1)...(19): siRNA sense strand
ggagucccuucuucguaug

SEQ ID NO: 1288085 - RNA, 19 nt, Homo sapiens
  misc_RNA (1)...(19): siRNA sense strand
uaaagauggcaaggcaaua

SEQ ID NO: 1288086 - RNA, 19 nt, Homo sapiens
  misc_RNA (1)...(19): siRNA sense strand
cagcugaugauguagaaga

SEQ ID NO: 1288087 - RNA, 19 nt, Homo sapiens
  misc_RNA (1)...(19): siRNA sense strand
aaucaaggauauagcuagu

SEQ ID NO: 1288088 - RNA, 19 nt, Homo sapiens
  misc_RNA (1)...(19): siRNA sense strand
cugcagacaaucaaggaua

SEQ ID NO: 1288089 - RNA, 19 nt, Homo sapiens
  misc_RNA (1)...(19): siRNA sense strand
gaaauaucaauaccagaac

SEQ ID NO: 1288090 - RNA, 19 nt, Homo sapiens
  misc_RNA (1)...(19): siRNA sense strand
ugagcuagaacgaguaaau

SEQ ID NO: 1288091 - RNA, 19 nt, Homo sapiens
  misc_RNA (1)...(19): siRNA sense strand
ugcagacaaucaaggauau

SEQ ID NO: 1288092 - RNA, 19 nt, Homo sapiens
  misc_RNA (1)...(19): siRNA sense strand
cuagaacgaguaaaucugu

SEQ ID NO: 1288093 - RNA, 19 nt, Homo sapiens
  misc_RNA (1)...(19): siRNA sense strand
gagcuagaacgaguaaauc

SEQ ID NO: 1288094 - RNA, 19 nt, Homo sapiens
  misc_RNA (1)...(19): siRNA sense strand
aaauccaggucucacacaa

SEQ ID NO: 1288095 - RNA, 19 nt, Homo sapiens
  misc_RNA (1)...(19): siRNA sense strand
gaugauguagaagaguaua

SEQ ID NO: 1288096 - RNA, 19 nt, Homo sapiens
  misc_RNA (1)...(19): siRNA sense strand
gaugacaauggaagagaug

SEQ ID NO: 1288097 - RNA, 19 nt, Homo sapiens
  misc_RNA (1)...(19): siRNA sense strand
uacagugaauaaugucuuc

SEQ ID NO: 1288098 - RNA, 19 nt, Homo sapiens
  misc_RNA (1)...(19): siRNA sense strand
ucccagaugagaucaauga

SEQ ID NO: 1288099 - RNA, 19 nt, Homo sapiens
  misc_RNA (1)...(19): siRNA sense strand
cauguauccuguguuuaau

SEQ ID NO: 1288100 - RNA, 19 nt, Homo sapiens
  misc_RNA (1)...(19): siRNA sense strand
acgagcacuuaaacaaauu

SEQ ID NO: 1288101 - RNA, 19 nt, Homo sapiens
  misc_RNA (1)...(19): siRNA sense strand
acugagagccgcuuucauc

SEQ ID NO: 1288102 - RNA, 19 nt, Homo sapiens
  misc_RNA (1)...(19): siRNA sense strand
cguaagugccaaccgacua

SEQ ID NO: 1288103 - RNA, 19 nt, Homo sapiens
  misc_RNA (1)...(19): siRNA sense strand
gagaucaaugacagaguga

SEQ ID NO: 1288104 - RNA, 19 nt, Homo sapiens
  misc_RNA (1)...(19): siRNA sense strand
aguaagaucccagaugaga

SEQ ID NO: 1288105 - RNA, 19 nt, Homo sapiens
  misc_RNA (1)...(19): siRNA sense strand
uuaaagauggcaaggcaau

SEQ ID NO: 1288106 - RNA, 19 nt, Homo sapiens
  misc_RNA (1)...(19): siRNA sense strand
cuugauacagugaauaaug

SEQ ID NO: 1288107 - RNA, 19 nt, Homo sapiens
  misc_RNA (1)...(19): siRNA sense strand
ucaaugacagagugagguu

SEQ ID NO: 1288108 - RNA, 19 nt, Homo sapiens
  misc_RNA (1)...(19): siRNA sense strand
auccaggucucacacaaga

SEQ ID NO: 1288109 - RNA, 19 nt, Homo sapiens
  misc_RNA (1)...(19): siRNA sense strand
ccucuaugcagucauguau

SEQ ID NO: 1288110 - RNA, 19 nt, Homo sapiens
  misc_RNA (1)...(19): siRNA sense strand
gccaaccgacuaauucauc

SEQ ID NO: 1288111 - RNA, 19 nt, Homo sapiens
  misc_RNA (1)...(19): siRNA sense strand
gcuagaacgaguaaaucug

SEQ ID NO: 1288112 - RNA, 19 nt, Homo sapiens
  misc_RNA (1)...(19): siRNA sense strand
aaaggcacgagcacuuaaa

SEQ ID NO: 1288113 - RNA, 19 nt, Homo sapiens
  misc_RNA (1)...(19): siRNA sense strand
guaagaucccagaugagau

SEQ ID NO: 1288114 - RNA, 19 nt, Homo sapiens
  misc_RNA (1)...(19): siRNA sense strand
ggcaaggcaauaaaugugu

SEQ ID NO: 1288115 - RNA, 19 nt, Homo sapiens
  misc_RNA (1)...(19): siRNA sense strand
ugagagccgcuuucaucaa

SEQ ID NO: 1288116 - RNA, 19 nt, Homo sapiens
  misc_RNA (1)...(19): siRNA sense strand
ucucacacaagacaucauu

SEQ ID NO: 1288117 - RNA, 19 nt, Homo sapiens
  misc_RNA (1)...(19): siRNA sense strand
ccagaugagaucaaugaca

SEQ ID NO: 1288118 - RNA, 19 nt, Homo sapiens
  misc_RNA (1)...(19): siRNA sense strand
ugacaauggaagagaugaa

SEQ ID NO: 1288119 - RNA, 19 nt, Homo sapiens
  misc_RNA (1)...(19): siRNA sense strand
cuucagaccuucaaaacug

SEQ ID NO: 1288120 - RNA, 19 nt, Homo sapiens
  misc_RNA (1)...(19): siRNA sense strand
gcacuugaacaccaaaaga

SEQ ID NO: 1288121 - RNA, 19 nt, Homo sapiens
  misc_RNA (1)...(19): siRNA sense strand
gaagaguauaugauugaac

SEQ ID NO: 1288122 - RNA, 19 nt, Homo sapiens
  misc_RNA (1)...(19): siRNA sense strand
cacacaagacaucauuaug

SEQ ID NO: 1288123 - RNA, 19 nt, Homo sapiens
  misc_RNA (1)...(19): siRNA sense strand
guauggcagcugaugaugu

SEQ ID NO: 1288124 - RNA, 19 nt, Homo sapiens
  misc_RNA (1)...(19): siRNA sense strand
cagggcacuugaacaccaa

SEQ ID NO: 1288125 - RNA, 19 nt, Homo sapiens
  misc_RNA (1)...(19): siRNA sense strand
cagaaccgcagggcacuug

SEQ ID NO: 1288126 - RNA, 19 nt, Homo sapiens
  misc_RNA (1)...(19): siRNA sense strand
ggauauagcuagugcaaua

SEQ ID NO: 1288127 - RNA, 19 nt, Homo sapiens
  misc_RNA (1)...(19): siRNA sense strand
uggaagagaugaagaauga

SEQ ID NO: 1288128 - RNA, 19 nt, Homo sapiens
  misc_RNA (1)...(19): siRNA sense strand
caaaccaacuuaauacuuc

SEQ ID NO: 1288129 - RNA, 19 nt, Homo sapiens
  misc_RNA (1)...(19): siRNA sense strand
ucaguaagaucccagauga

SEQ ID NO: 1288130 - RNA, 19 nt, Homo sapiens
  misc_RNA (1)...(19): siRNA sense strand
ccacauccaugguuucuau

SEQ ID NO: 1288131 - RNA, 19 nt, Homo sapiens
  misc_RNA (1)...(19): siRNA sense strand
guagaagaguauaugauug

SEQ ID NO: 1288132 - RNA, 19 nt, Homo sapiens
  misc_RNA (1)...(19): siRNA sense strand
uauggcagcugaugaugua

SEQ ID NO: 1288133 - RNA, 19 nt, Homo sapiens
  misc_RNA (1)...(19): siRNA sense strand
ggcaauaaauguguucgua

SEQ ID NO: 1288134 - RNA, 19 nt, Homo sapiens
  misc_RNA (1)...(19): siRNA sense strand
gcacgagcacuuaaacaaa

SEQ ID NO: 1288135 - RNA, 19 nt, Homo sapiens
  misc_RNA (1)...(19): siRNA sense strand
gcaauaaauguguucguaa

SEQ ID NO: 1288136 - RNA, 19 nt, Homo sapiens
  misc_RNA (1)...(19): siRNA sense strand
gcacuuaaacaaauucuca

SEQ ID NO: 1288137 - RNA, 19 nt, Homo sapiens
  misc_RNA (1)...(19): siRNA sense strand
gcaaggcaauaaauguguu

SEQ ID NO: 1288138 - RNA, 19 nt, Homo sapiens
  misc_RNA (1)...(19): siRNA sense strand
gagagccgcuuucaucaag

SEQ ID NO: 1288139 - RNA, 19 nt, Homo sapiens
  misc_RNA (1)...(19): siRNA sense strand
caauaaauguguucguaag

SEQ ID NO: 1288140 - RNA, 19 nt, Homo sapiens
  misc_RNA (1)...(19): siRNA sense strand
ucauguauccuguguuuaa

SEQ ID NO: 1288141 - RNA, 19 nt, Homo sapiens
  misc_RNA (1)...(19): siRNA sense strand
agucauguauccuguguuu

SEQ ID NO: 1288142 - RNA, 19 nt, Homo sapiens
  misc_RNA (1)...(19): siRNA sense strand
guaaaguacuccaaaaguu

SEQ ID NO: 1288143 - RNA, 19 nt, Homo sapiens
  misc_RNA (1)...(19): siRNA sense strand
gcagucauguauccugugu

SEQ ID NO: 1288144 - RNA, 19 nt, Homo sapiens
  misc_RNA (1)...(19): siRNA sense strand
cacgagcacuuaaacaaau

SEQ ID NO: 1288145 - RNA, 19 nt, Homo sapiens
  misc_RNA (1)...(19): siRNA sense strand
gaaaaggcacgagcacuua

SEQ ID NO: 1288146 - RNA, 19 nt, Homo sapiens
  misc_RNA (1)...(19): siRNA sense strand
gaacuucuugauacaguga

SEQ ID NO: 1288147 - RNA, 19 nt, Homo sapiens
  misc_RNA (1)...(19): siRNA sense strand
guaagugccaaccgacuaa

SEQ ID NO: 1288148 - RNA, 19 nt, Homo sapiens
  misc_RNA (1)...(19): siRNA sense strand
gaagagaugaagaaugaag

SEQ ID NO: 1288149 - RNA, 19 nt, Homo sapiens
  misc_RNA (1)...(19): siRNA sense strand
ggaugacaauggaagagau

SEQ ID NO: 1288150 - RNA, 19 nt, Homo sapiens
  misc_RNA (1)...(19): siRNA sense strand
aaagauggcaaggcaauaa

SEQ ID NO: 1288151 - RNA, 19 nt, Homo sapiens
  misc_RNA (1)...(19): siRNA sense strand
uguauccuguguuuaauga

SEQ ID NO: 1288152 - RNA, 19 nt, Homo sapiens
  misc_RNA (1)...(19): siRNA sense strand
cugaugauguagaagagua

SEQ ID NO: 1288153 - RNA, 19 nt, Homo sapiens
  misc_RNA (1)...(19): siRNA sense strand
cggagucccuucuucguau

SEQ ID NO: 1288154 - RNA, 19 nt, Homo sapiens
  misc_RNA (1)...(19): siRNA sense strand
caucaaaccaacuuaauac

SEQ ID NO: 1288155 - RNA, 19 nt, Homo sapiens
  misc_RNA (1)...(19): siRNA sense strand
gcagacaaucaaggauaua

SEQ ID NO: 1288156 - RNA, 19 nt, Homo sapiens
  misc_RNA (1)...(19): siRNA sense strand
caauggaagagaugaagaa

SEQ ID NO: 1288157 - RNA, 19 nt, Homo sapiens
  misc_RNA (1)...(19): siRNA sense strand
ucacacaagacaucauuau

SEQ ID NO: 1288158 - RNA, 19 nt, Homo sapiens
  misc_RNA (1)...(19): siRNA sense strand
gugauacucugaaaacgua

SEQ ID NO: 1288159 - RNA, 19 nt, Homo sapiens
  misc_RNA (1)...(19): siRNA sense strand
gauguagaagaguauauga

SEQ ID NO: 1288160 - RNA, 19 nt, Homo sapiens
  misc_RNA (1)...(19): siRNA sense strand
ccaaccgacuaauucauca

SEQ ID NO: 1288161 - RNA, 19 nt, Homo sapiens
  misc_RNA (1)...(19): siRNA sense strand
gauauagcuagugcaauaa

SEQ ID NO: 1288162 - RNA, 19 nt, Homo sapiens
  misc_RNA (1)...(19): siRNA sense strand
ugagguuucugcagacaau

SEQ ID NO: 1288163 - RNA, 19 nt, Homo sapiens
  misc_RNA (1)...(19): siRNA sense strand
ggcagcugaugauguagaa

SEQ ID NO: 1288164 - RNA, 19 nt, Homo sapiens
  misc_RNA (1)...(19): siRNA sense strand
gaaccgcagggcacuugaa

SEQ ID NO: 1288165 - RNA, 19 nt, Homo sapiens
  misc_RNA (1)...(19): siRNA sense strand
gaacgaccagagccagaau

SEQ ID NO: 1288166 - RNA, 19 nt, Homo sapiens
  misc_RNA (1)...(19): siRNA sense strand
auaaauguguucguaagug

SEQ ID NO: 1288167 - RNA, 19 nt, Homo sapiens
  misc_RNA (1)...(19): siRNA sense strand
gauggcaaggcaauaaaug

SEQ ID NO: 1288168 - RNA, 19 nt, Homo sapiens
  misc_RNA (1)...(19): siRNA sense strand
uccaaaaguuucagugaua

SEQ ID NO: 1288169 - RNA, 19 nt, Homo sapiens
  misc_RNA (1)...(19): siRNA sense strand
ggcacgagcacuuaaacaa

SEQ ID NO: 1288170 - RNA, 19 nt, Homo sapiens
  misc_RNA (1)...(19): siRNA sense strand
gaccagagccagaauucca

SEQ ID NO: 1288171 - RNA, 19 nt, Homo sapiens
  misc_RNA (1)...(19): siRNA sense strand
ggagucccuucuucguaug

SEQ ID NO: 1288172 - RNA, 19 nt, Homo sapiens
  misc_RNA (1)...(19): siRNA sense strand
uaaagauggcaaggcaaua

SEQ ID NO: 1288173 - RNA, 19 nt, Homo sapiens
  misc_RNA (1)...(19): siRNA sense strand
cagcugaugauguagaaga

SEQ ID NO: 1288174 - RNA, 19 nt, Homo sapiens
  misc_RNA (1)...(19): siRNA sense strand
aaucaaggauauagcuagu

SEQ ID NO: 1288175 - RNA, 19 nt, Homo sapiens
  misc_RNA (1)...(19): siRNA sense strand
cugcagacaaucaaggaua

SEQ ID NO: 1288176 - RNA, 19 nt, Homo sapiens
  misc_RNA (1)...(19): siRNA sense strand
gaaauaucaauaccagaac

SEQ ID NO: 1288177 - RNA, 19 nt, Homo sapiens
  misc_RNA (1)...(19): siRNA sense strand
ugagcuagaacgaguaaau

SEQ ID NO: 1288178 - RNA, 19 nt, Homo sapiens
  misc_RNA (1)...(19): siRNA sense strand
ugcagacaaucaaggauau

SEQ ID NO: 1288179 - RNA, 19 nt, Homo sapiens
  misc_RNA (1)...(19): siRNA sense strand
cuagaacgaguaaaucugu

SEQ ID NO: 1288180 - RNA, 19 nt, Homo sapiens
  misc_RNA (1)...(19): siRNA sense strand
gagcuagaacgaguaaauc

SEQ ID NO: 1288181 - RNA, 19 nt, Homo sapiens
  misc_RNA (1)...(19): siRNA sense strand
aaauccaggucucacacaa

SEQ ID NO: 1288182 - RNA, 19 nt, Homo sapiens
  misc_RNA (1)...(19): siRNA sense strand
gaugauguagaagaguaua

SEQ ID NO: 1288183 - RNA, 19 nt, Homo sapiens
  misc_RNA (1)...(19): siRNA sense strand
gaugacaauggaagagaug

SEQ ID NO: 1288184 - RNA, 19 nt, Homo sapiens
  misc_RNA (1)...(19): siRNA sense strand
uacagugaauaaugucuuc

SEQ ID NO: 1288185 - RNA, 19 nt, Homo sapiens
  misc_RNA (1)...(19): siRNA sense strand
ucccagaugagaucaauga

SEQ ID NO: 1288186 - RNA, 19 nt, Homo sapiens
  misc_RNA (1)...(19): siRNA sense strand
cauguauccuguguuuaau

SEQ ID NO: 1288187 - RNA, 19 nt, Homo sapiens
  misc_RNA (1)...(19): siRNA sense strand
acgagcacuuaaacaaauu

SEQ ID NO: 1288188 - RNA, 19 nt, Homo sapiens
  misc_RNA (1)...(19): siRNA sense strand
acugagagccgcuuucauc

SEQ ID NO: 1288189 - RNA, 19 nt, Homo sapiens
  misc_RNA (1)...(19): siRNA sense strand
cguaagugccaaccgacua

SEQ ID NO: 1288190 - RNA, 19 nt, Homo sapiens
  misc_RNA (1)...(19): siRNA sense strand
gagaucaaugacagaguga

SEQ ID NO: 1288191 - RNA, 19 nt, Homo sapiens
  misc_RNA (1)...(19): siRNA sense strand
aguaagaucccagaugaga

SEQ ID NO: 1288192 - RNA, 19 nt, Homo sapiens
  misc_RNA (1)...(19): siRNA sense strand
uuaaagauggcaaggcaau

SEQ ID NO: 1288193 - RNA, 19 nt, Homo sapiens
  misc_RNA (1)...(19): siRNA sense strand
cuugauacagugaauaaug

SEQ ID NO: 1288194 - RNA, 19 nt, Homo sapiens
  misc_RNA (1)...(19): siRNA sense strand
ucaaugacagagugagguu

SEQ ID NO: 1288195 - RNA, 19 nt, Homo sapiens
  misc_RNA (1)...(19): siRNA sense strand
auccaggucucacacaaga

SEQ ID NO: 1288196 - RNA, 19 nt, Homo sapiens
  misc_RNA (1)...(19): siRNA sense strand
ccucuaugcagucauguau

SEQ ID NO: 1288197 - RNA, 19 nt, Homo sapiens
  misc_RNA (1)...(19): siRNA sense strand
gccaaccgacuaauucauc

SEQ ID NO: 1288198 - RNA, 19 nt, Homo sapiens
  misc_RNA (1)...(19): siRNA sense strand
gcuagaacgaguaaaucug

SEQ ID NO: 1288199 - RNA, 19 nt, Homo sapiens
  misc_RNA (1)...(19): siRNA sense strand
aaaggcacgagcacuuaaa

SEQ ID NO: 1288200 - RNA, 19 nt, Homo sapiens
  misc_RNA (1)...(19): siRNA sense strand
guaagaucccagaugagau

SEQ ID NO: 1288201 - RNA, 19 nt, Homo sapiens
  misc_RNA (1)...(19): siRNA sense strand
ggcaaggcaauaaaugugu

SEQ ID NO: 1288202 - RNA, 19 nt, Homo sapiens
  misc_RNA (1)...(19): siRNA sense strand
ugagagccgcuuucaucaa

SEQ ID NO: 1288203 - RNA, 19 nt, Homo sapiens
  misc_RNA (1)...(19): siRNA sense strand
ucucacacaagacaucauu

SEQ ID NO: 1288204 - RNA, 19 nt, Homo sapiens
  misc_RNA (1)...(19): siRNA sense strand
ccagaugagaucaaugaca

SEQ ID NO: 1288205 - RNA, 19 nt, Homo sapiens
  misc_RNA (1)...(19): siRNA sense strand
ugacaauggaagagaugaa

SEQ ID NO: 1288206 - RNA, 19 nt, Homo sapiens
  misc_RNA (1)...(19): siRNA sense strand
cuucagaccuucaaaacug

SEQ ID NO: 1288207 - RNA, 19 nt, Homo sapiens
  misc_RNA (1)...(19): siRNA sense strand
gcacuugaacaccaaaaga

SEQ ID NO: 1288208 - RNA, 19 nt, Homo sapiens
  misc_RNA (1)...(19): siRNA sense strand
gaagaguauaugauugaac

SEQ ID NO: 1288209 - RNA, 19 nt, Homo sapiens
  misc_RNA (1)...(19): siRNA sense strand
cacacaagacaucauuaug

SEQ ID NO: 1288210 - RNA, 19 nt, Homo sapiens
  misc_RNA (1)...(19): siRNA sense strand
guauggcagcugaugaugu

SEQ ID NO: 1288211 - RNA, 19 nt, Homo sapiens
  misc_RNA (1)...(19): siRNA sense strand
cagggcacuugaacaccaa

SEQ ID NO: 1288212 - RNA, 19 nt, Homo sapiens
  misc_RNA (1)...(19): siRNA sense strand
cagaaccgcagggcacuug

SEQ ID NO: 1288213 - RNA, 19 nt, Homo sapiens
  misc_RNA (1)...(19): siRNA sense strand
ggauauagcuagugcaaua

SEQ ID NO: 1288214 - RNA, 19 nt, Homo sapiens
  misc_RNA (1)...(19): siRNA sense strand
uggaagagaugaagaauga

SEQ ID NO: 1288215 - RNA, 19 nt, Homo sapiens
  misc_RNA (1)...(19): siRNA sense strand
caaaccaacuuaauacuuc

SEQ ID NO: 1288216 - RNA, 19 nt, Homo sapiens
  misc_RNA (1)...(19): siRNA sense strand
ucaguaagaucccagauga

SEQ ID NO: 1288217 - RNA, 19 nt, Homo sapiens
  misc_RNA (1)...(19): siRNA sense strand
ccacauccaugguuucuau

SEQ ID NO: 1288218 - RNA, 19 nt, Homo sapiens
  misc_RNA (1)...(19): siRNA sense strand
guagaagaguauaugauug

SEQ ID NO: 1288219 - RNA, 19 nt, Homo sapiens
  misc_RNA (1)...(19): siRNA sense strand
uauggcagcugaugaugua

SEQ ID NO: 1288220 - RNA, 19 nt, Homo sapiens
  misc_RNA (1)...(19): siRNA sense strand
ggcaauaaauguguucgua

SEQ ID NO: 1288221 - RNA, 19 nt, Homo sapiens
  misc_RNA (1)...(19): siRNA sense strand
gcacgagcacuuaaacaaa

SEQ ID NO: 1288222 - RNA, 19 nt, Homo sapiens
  misc_RNA (1)...(19): siRNA sense strand
gcaauaaauguguucguaa

SEQ ID NO: 1288223 - RNA, 19 nt, Homo sapiens
  misc_RNA (1)...(19): siRNA sense strand
gcacuuaaacaaauucuca

SEQ ID NO: 1288224 - RNA, 19 nt, Homo sapiens
  misc_RNA (1)...(19): siRNA sense strand
gcaaggcaauaaauguguu

SEQ ID NO: 1288225 - RNA, 19 nt, Homo sapiens
  misc_RNA (1)...(19): siRNA sense strand
gagagccgcuuucaucaag

SEQ ID NO: 1288226 - RNA, 19 nt, Homo sapiens
  misc_RNA (1)...(19): siRNA sense strand
caauaaauguguucguaag

SEQ ID NO: 1288227 - RNA, 19 nt, Homo sapiens
  misc_RNA (1)...(19): siRNA sense strand
ucauguauccuguguuuaa

SEQ ID NO: 1288228 - RNA, 19 nt, Homo sapiens
  misc_RNA (1)...(19): siRNA sense strand
agucauguauccuguguuu

SEQ ID NO: 1288229 - RNA, 19 nt, Homo sapiens
  misc_RNA (1)...(19): siRNA sense strand
guaaaguacuccaaaaguu

SEQ ID NO: 1288230 - RNA, 19 nt, Homo sapiens
  misc_RNA (1)...(19): siRNA sense strand
gcagucauguauccugugu

SEQ ID NO: 1288231 - RNA, 19 nt, Homo sapiens
  misc_RNA (1)...(19): siRNA sense strand
cacgagcacuuaaacaaau

SEQ ID NO: 1288232 - RNA, 19 nt, Homo sapiens
  misc_RNA (1)...(19): siRNA sense strand
gaaaaggcacgagcacuua

SEQ ID NO: 1288233 - RNA, 19 nt, Homo sapiens
  misc_RNA (1)...(19): siRNA sense strand
gaacuucuugauacaguga

SEQ ID NO: 1288234 - RNA, 19 nt, Homo sapiens
  misc_RNA (1)...(19): siRNA sense strand
guaagugccaaccgacuaa

SEQ ID NO: 1288235 - RNA, 19 nt, Homo sapiens
  misc_RNA (1)...(19): siRNA sense strand
gaagagaugaagaaugaag

SEQ ID NO: 1288236 - RNA, 19 nt, Homo sapiens
  misc_RNA (1)...(19): siRNA sense strand
ggaugacaauggaagagau

SEQ ID NO: 1288237 - RNA, 19 nt, Homo sapiens
  misc_RNA (1)...(19): siRNA sense strand
aaagauggcaaggcaauaa

SEQ ID NO: 1288238 - RNA, 19 nt, Homo sapiens
  misc_RNA (1)...(19): siRNA sense strand
uguauccuguguuuaauga

SEQ ID NO: 1288239 - RNA, 19 nt, Homo sapiens
  misc_RNA (1)...(19): siRNA sense strand
cugaugauguagaagagua

SEQ ID NO: 1288240 - RNA, 19 nt, Homo sapiens
  misc_RNA (1)...(19): siRNA sense strand
cggagucccuucuucguau

SEQ ID NO: 1288241 - RNA, 19 nt, Homo sapiens
  misc_RNA (1)...(19): siRNA sense strand
caucaaaccaacuuaauac

SEQ ID NO: 1288242 - RNA, 19 nt, Homo sapiens
  misc_RNA (1)...(19): siRNA sense strand
gcagacaaucaaggauaua

SEQ ID NO: 1288243 - RNA, 19 nt, Homo sapiens
  misc_RNA (1)...(19): siRNA sense strand
caauggaagagaugaagaa

SEQ ID NO: 1288244 - RNA, 19 nt, Homo sapiens
  misc_RNA (1)...(19): siRNA sense strand
ucacacaagacaucauuau

SEQ ID NO: 1288245 - RNA, 19 nt, Homo sapiens
  misc_RNA (1)...(19): siRNA sense strand
gugauacucugaaaacgua

SEQ ID NO: 1288246 - RNA, 19 nt, Homo sapiens
  misc_RNA (1)...(19): siRNA sense strand
gauguagaagaguauauga

SEQ ID NO: 1288247 - RNA, 19 nt, Homo sapiens
  misc_RNA (1)...(19): siRNA sense strand
ccaaccgacuaauucauca

SEQ ID NO: 1288248 - RNA, 19 nt, Homo sapiens
  misc_RNA (1)...(19): siRNA sense strand
gauauagcuagugcaauaa

SEQ ID NO: 1288249 - RNA, 19 nt, Homo sapiens
  misc_RNA (1)...(19): siRNA sense strand
ugagguuucugcagacaau

SEQ ID NO: 1288250 - RNA, 19 nt, Homo sapiens
  misc_RNA (1)...(19): siRNA sense strand
ggcagcugaugauguagaa

SEQ ID NO: 1288251 - RNA, 19 nt, Homo sapiens
  misc_RNA (1)...(19): siRNA sense strand
gaaccgcagggcacuugaa

SEQ ID NO: 1288252 - RNA, 19 nt, Homo sapiens
  misc_RNA (1)...(19): siRNA sense strand
gaacgaccagagccagaau

SEQ ID NO: 1288253 - RNA, 19 nt, Homo sapiens
  misc_RNA (1)...(19): siRNA sense strand
auaaauguguucguaagug

SEQ ID NO: 1288254 - RNA, 19 nt, Homo sapiens
  misc_RNA (1)...(19): siRNA sense strand
gauggcaaggcaauaaaug

SEQ ID NO: 1288255 - RNA, 19 nt, Homo sapiens
  misc_RNA (1)...(19): siRNA sense strand
uccaaaaguuucagugaua

SEQ ID NO: 1288256 - RNA, 19 nt, Homo sapiens
  misc_RNA (1)...(19): siRNA sense strand
ggcacgagcacuuaaacaa

SEQ ID NO: 1288257 - RNA, 19 nt, Homo sapiens
  misc_RNA (1)...(19): siRNA sense strand
gaccagagccagaauucca

SEQ ID NO: 1288258 - RNA, 19 nt, Homo sapiens
  misc_RNA (1)...(19): siRNA sense strand
ggagucccuucuucguaug

SEQ ID NO: 1288259 - RNA, 19 nt, Homo sapiens
  misc_RNA (1)...(19): siRNA sense strand
uaaagauggcaaggcaaua

SEQ ID NO: 1288260 - RNA, 19 nt, Homo sapiens
  misc_RNA (1)...(19): siRNA sense strand
cagcugaugauguagaaga

SEQ ID NO: 1288261 - RNA, 19 nt, Homo sapiens
  misc_RNA (1)...(19): siRNA sense strand
aaucaaggauauagcuagu

SEQ ID NO: 1288262 - RNA, 19 nt, Homo sapiens
  misc_RNA (1)...(19): siRNA sense strand
cugcagacaaucaaggaua

SEQ ID NO: 1288263 - RNA, 19 nt, Homo sapiens
  misc_RNA (1)...(19): siRNA sense strand
gaaauaucaauaccagaac

SEQ ID NO: 1288264 - RNA, 19 nt, Homo sapiens
  misc_RNA (1)...(19): siRNA sense strand
ugagcuagaacgaguaaau

SEQ ID NO: 1288265 - RNA, 19 nt, Homo sapiens
  misc_RNA (1)...(19): siRNA sense strand
ugcagacaaucaaggauau

SEQ ID NO: 1288266 - RNA, 19 nt, Homo sapiens
  misc_RNA (1)...(19): siRNA sense strand
cuagaacgaguaaaucugu

SEQ ID NO: 1288267 - RNA, 19 nt, Homo sapiens
  misc_RNA (1)...(19): siRNA sense strand
gagcuagaacgaguaaauc

SEQ ID NO: 1288268 - RNA, 19 nt, Homo sapiens
  misc_RNA (1)...(19): siRNA sense strand
aaauccaggucucacacaa

SEQ ID NO: 1288269 - RNA, 19 nt, Homo sapiens
  misc_RNA (1)...(19): siRNA sense strand
gaugauguagaagaguaua

SEQ ID NO: 1288270 - RNA, 19 nt, Homo sapiens
  misc_RNA (1)...(19): siRNA sense strand
gaugacaauggaagagaug

SEQ ID NO: 1288271 - RNA, 19 nt, Homo sapiens
  misc_RNA (1)...(19): siRNA sense strand
uacagugaauaaugucuuc

SEQ ID NO: 1288272 - RNA, 19 nt, Homo sapiens
  misc_RNA (1)...(19): siRNA sense strand
ucccagaugagaucaauga

SEQ ID NO: 1288273 - RNA, 19 nt, Homo sapiens
  misc_RNA (1)...(19): siRNA sense strand
cauguauccuguguuuaau

SEQ ID NO: 1288274 - RNA, 19 nt, Homo sapiens
  misc_RNA (1)...(19): siRNA sense strand
acgagcacuuaaacaaauu

SEQ ID NO: 1288275 - RNA, 19 nt, Homo sapiens
  misc_RNA (1)...(19): siRNA sense strand
acugagagccgcuuucauc

SEQ ID NO: 1288276 - RNA, 19 nt, Homo sapiens
  misc_RNA (1)...(19): siRNA sense strand
cguaagugccaaccgacua

SEQ ID NO: 1288277 - RNA, 19 nt, Homo sapiens
  misc_RNA (1)...(19): siRNA sense strand
gagaucaaugacagaguga

SEQ ID NO: 1288278 - RNA, 19 nt, Homo sapiens
  misc_RNA (1)...(19): siRNA sense strand
aguaagaucccagaugaga

SEQ ID NO: 1288279 - RNA, 19 nt, Homo sapiens
  misc_RNA (1)...(19): siRNA sense strand
uuaaagauggcaaggcaau

SEQ ID NO: 1288280 - RNA, 19 nt, Homo sapiens
  misc_RNA (1)...(19): siRNA sense strand
cuugauacagugaauaaug

SEQ ID NO: 1288281 - RNA, 19 nt, Homo sapiens
  misc_RNA (1)...(19): siRNA sense strand
ucaaugacagagugagguu

SEQ ID NO: 1288282 - RNA, 19 nt, Homo sapiens
  misc_RNA (1)...(19): siRNA sense strand
auccaggucucacacaaga

SEQ ID NO: 1288283 - RNA, 19 nt, Homo sapiens
  misc_RNA (1)...(19): siRNA sense strand
ccucuaugcagucauguau

SEQ ID NO: 1288284 - RNA, 19 nt, Homo sapiens
  misc_RNA (1)...(19): siRNA sense strand
gccaaccgacuaauucauc

SEQ ID NO: 1288285 - RNA, 19 nt, Homo sapiens
  misc_RNA (1)...(19): siRNA sense strand
gcuagaacgaguaaaucug

SEQ ID NO: 1288286 - RNA, 19 nt, Homo sapiens
  misc_RNA (1)...(19): siRNA sense strand
aaaggcacgagcacuuaaa

SEQ ID NO: 1288287 - RNA, 19 nt, Homo sapiens
  misc_RNA (1)...(19): siRNA sense strand
guaagaucccagaugagau

SEQ ID NO: 1288288 - RNA, 19 nt, Homo sapiens
  misc_RNA (1)...(19): siRNA sense strand
ggcaaggcaauaaaugugu

SEQ ID NO: 1288289 - RNA, 19 nt, Homo sapiens
  misc_RNA (1)...(19): siRNA sense strand
ugagagccgcuuucaucaa

SEQ ID NO: 1288290 - RNA, 19 nt, Homo sapiens
  misc_RNA (1)...(19): siRNA sense strand
ucucacacaagacaucauu

SEQ ID NO: 1288291 - RNA, 19 nt, Homo sapiens
  misc_RNA (1)...(19): siRNA sense strand
ccagaugagaucaaugaca

SEQ ID NO: 1288292 - RNA, 19 nt, Homo sapiens
  misc_RNA (1)...(19): siRNA sense strand
ugacaauggaagagaugaa

SEQ ID NO: 1288293 - RNA, 19 nt, Homo sapiens
  misc_RNA (1)...(19): siRNA sense strand
cuucagaccuucaaaacug

SEQ ID NO: 1288294 - RNA, 19 nt, Homo sapiens
  misc_RNA (1)...(19): siRNA sense strand
gcacuugaacaccaaaaga

SEQ ID NO: 1288295 - RNA, 19 nt, Homo sapiens
  misc_RNA (1)...(19): siRNA sense strand
gaagaguauaugauugaac

SEQ ID NO: 1288296 - RNA, 19 nt, Homo sapiens
  misc_RNA (1)...(19): siRNA sense strand
cacacaagacaucauuaug

SEQ ID NO: 1288297 - RNA, 19 nt, Homo sapiens
  misc_RNA (1)...(19): siRNA sense strand
guauggcagcugaugaugu

SEQ ID NO: 1288298 - RNA, 19 nt, Homo sapiens
  misc_RNA (1)...(19): siRNA sense strand
cagggcacuugaacaccaa

SEQ ID NO: 1288299 - RNA, 19 nt, Homo sapiens
  misc_RNA (1)...(19): siRNA sense strand
cagaaccgcagggcacuug

SEQ ID NO: 1288300 - RNA, 19 nt, Homo sapiens
  misc_RNA (1)...(19): siRNA sense strand
ggauauagcuagugcaaua

SEQ ID NO: 1288301 - RNA, 19 nt, Homo sapiens
  misc_RNA (1)...(19): siRNA sense strand
uggaagagaugaagaauga

SEQ ID NO: 1288302 - RNA, 19 nt, Homo sapiens
  misc_RNA (1)...(19): siRNA sense strand
caaaccaacuuaauacuuc

SEQ ID NO: 1288303 - RNA, 19 nt, Homo sapiens
  misc_RNA (1)...(19): siRNA sense strand
ucaguaagaucccagauga

SEQ ID NO: 1288304 - RNA, 19 nt, Homo sapiens
  misc_RNA (1)...(19): siRNA sense strand
ccacauccaugguuucuau

SEQ ID NO: 1288305 - RNA, 19 nt, Homo sapiens
  misc_RNA (1)...(19): siRNA sense strand
guagaagaguauaugauug

SEQ ID NO: 1288306 - RNA, 19 nt, Homo sapiens
  misc_RNA (1)...(19): siRNA sense strand
uauggcagcugaugaugua

SEQ ID NO: 1288307 - RNA, 19 nt, Homo sapiens
  misc_RNA (1)...(19): siRNA sense strand
ggcaauaaauguguucgua

SEQ ID NO: 1288308 - RNA, 19 nt, Homo sapiens
  misc_RNA (1)...(19): siRNA sense strand
gcacgagcacuuaaacaaa

SEQ ID NO: 1288309 - RNA, 19 nt, Homo sapiens
  misc_RNA (1)...(19): siRNA sense strand
gcaauaaauguguucguaa

SEQ ID NO: 1288310 - RNA, 19 nt, Homo sapiens
  misc_RNA (1)...(19): siRNA sense strand
gcacuuaaacaaauucuca

SEQ ID NO: 1288311 - RNA, 19 nt, Homo sapiens
  misc_RNA (1)...(19): siRNA sense strand
gcaaggcaauaaauguguu

SEQ ID NO: 1288312 - RNA, 19 nt, Homo sapiens
  misc_RNA (1)...(19): siRNA sense strand
gagagccgcuuucaucaag

SEQ ID NO: 1288313 - RNA, 19 nt, Homo sapiens
  misc_RNA (1)...(19): siRNA sense strand
caauaaauguguucguaag

SEQ ID NO: 1288314 - RNA, 19 nt, Homo sapiens
  misc_RNA (1)...(19): siRNA sense strand
ucauguauccuguguuuaa

SEQ ID NO: 1288315 - RNA, 19 nt, Homo sapiens
  misc_RNA (1)...(19): siRNA sense strand
agucauguauccuguguuu

SEQ ID NO: 1288316 - RNA, 19 nt, Homo sapiens
  misc_RNA (1)...(19): siRNA sense strand
guaaaguacuccaaaaguu

SEQ ID NO: 1288317 - RNA, 19 nt, Homo sapiens
  misc_RNA (1)...(19): siRNA sense strand
gcagucauguauccugugu

SEQ ID NO: 1288318 - RNA, 19 nt, Homo sapiens
  misc_RNA (1)...(19): siRNA sense strand
cacgagcacuuaaacaaau

SEQ ID NO: 1288319 - RNA, 19 nt, Homo sapiens
  misc_RNA (1)...(19): siRNA sense strand
gaaaaggcacgagcacuua

SEQ ID NO: 1288320 - RNA, 19 nt, Homo sapiens
  misc_RNA (1)...(19): siRNA sense strand
gaacuucuugauacaguga

SEQ ID NO: 1288321 - RNA, 19 nt, Homo sapiens
  misc_RNA (1)...(19): siRNA sense strand
guaagugccaaccgacuaa

SEQ ID NO: 1288322 - RNA, 19 nt, Homo sapiens
  misc_RNA (1)...(19): siRNA sense strand
gaagagaugaagaaugaag

SEQ ID NO: 1288323 - RNA, 19 nt, Homo sapiens
  misc_RNA (1)...(19): siRNA sense strand
ggaugacaauggaagagau

SEQ ID NO: 1288324 - RNA, 19 nt, Homo sapiens
  misc_RNA (1)...(19): siRNA sense strand
aaagauggcaaggcaauaa

SEQ ID NO: 1288325 - RNA, 19 nt, Homo sapiens
  misc_RNA (1)...(19): siRNA sense strand
uguauccuguguuuaauga

SEQ ID NO: 1288326 - RNA, 19 nt, Homo sapiens
  misc_RNA (1)...(19): siRNA sense strand
cugaugauguagaagagua

SEQ ID NO: 1288327 - RNA, 19 nt, Homo sapiens
  misc_RNA (1)...(19): siRNA sense strand
cggagucccuucuucguau

SEQ ID NO: 1288328 - RNA, 19 nt, Homo sapiens
  misc_RNA (1)...(19): siRNA sense strand
caucaaaccaacuuaauac

SEQ ID NO: 1288329 - RNA, 19 nt, Homo sapiens
  misc_RNA (1)...(19): siRNA sense strand
gcagacaaucaaggauaua

SEQ ID NO: 1288330 - RNA, 19 nt, Homo sapiens
  misc_RNA (1)...(19): siRNA sense strand
caauggaagagaugaagaa

SEQ ID NO: 1288331 - RNA, 19 nt, Homo sapiens
  misc_RNA (1)...(19): siRNA sense strand
ucacacaagacaucauuau

SEQ ID NO: 1288332 - RNA, 19 nt, Homo sapiens
  misc_RNA (1)...(19): siRNA sense strand
gugauacucugaaaacgua

SEQ ID NO: 1288333 - RNA, 19 nt, Homo sapiens
  misc_RNA (1)...(19): siRNA sense strand
gauguagaagaguauauga

SEQ ID NO: 1288334 - RNA, 19 nt, Homo sapiens
  misc_RNA (1)...(19): siRNA sense strand
ccaaccgacuaauucauca

SEQ ID NO: 1288335 - RNA, 19 nt, Homo sapiens
  misc_RNA (1)...(19): siRNA sense strand
gauauagcuagugcaauaa

SEQ ID NO: 1288336 - RNA, 19 nt, Homo sapiens
  misc_RNA (1)...(19): siRNA sense strand
ugagguuucugcagacaau

SEQ ID NO: 1288337 - RNA, 19 nt, Homo sapiens
  misc_RNA (1)...(19): siRNA sense strand
ggcagcugaugauguagaa

SEQ ID NO: 1288338 - RNA, 19 nt, Homo sapiens
  misc_RNA (1)...(19): siRNA sense strand
gaaccgcagggcacuugaa

SEQ ID NO: 1288339 - RNA, 19 nt, Homo sapiens
  misc_RNA (1)...(19): siRNA sense strand
gaacgaccagagccagaau

SEQ ID NO: 1288340 - RNA, 19 nt, Homo sapiens
  misc_RNA (1)...(19): siRNA sense strand
auaaauguguucguaagug

SEQ ID NO: 1288341 - RNA, 19 nt, Homo sapiens
  misc_RNA (1)...(19): siRNA sense strand
gauggcaaggcaauaaaug

SEQ ID NO: 1288342 - RNA, 19 nt, Homo sapiens
  misc_RNA (1)...(19): siRNA sense strand
uccaaaaguuucagugaua

SEQ ID NO: 1288343 - RNA, 19 nt, Homo sapiens
  misc_RNA (1)...(19): siRNA sense strand
ggcacgagcacuuaaacaa

SEQ ID NO: 1288344 - RNA, 19 nt, Homo sapiens
  misc_RNA (1)...(19): siRNA sense strand
gaccagagccagaauucca

SEQ ID NO: 1288345 - RNA, 19 nt, Homo sapiens
  misc_RNA (1)...(19): siRNA sense strand
ggagucccuucuucguaug

SEQ ID NO: 1288346 - RNA, 19 nt, Homo sapiens
  misc_RNA (1)...(19): siRNA sense strand
uaaagauggcaaggcaaua

SEQ ID NO: 1288347 - RNA, 19 nt, Homo sapiens
  misc_RNA (1)...(19): siRNA sense strand
cagcugaugauguagaaga

SEQ ID NO: 1288348 - RNA, 19 nt, Homo sapiens
  misc_RNA (1)...(19): siRNA sense strand
aaucaaggauauagcuagu

SEQ ID NO: 1288349 - RNA, 19 nt, Homo sapiens
  misc_RNA (1)...(19): siRNA sense strand
cugcagacaaucaaggaua

SEQ ID NO: 1288350 - RNA, 19 nt, Homo sapiens
  misc_RNA (1)...(19): siRNA sense strand
gaaauaucaauaccagaac

SEQ ID NO: 1288351 - RNA, 19 nt, Homo sapiens
  misc_RNA (1)...(19): siRNA sense strand
ugagcuagaacgaguaaau

SEQ ID NO: 1288352 - RNA, 19 nt, Homo sapiens
  misc_RNA (1)...(19): siRNA sense strand
ugcagacaaucaaggauau

SEQ ID NO: 1288353 - RNA, 19 nt, Homo sapiens
  misc_RNA (1)...(19): siRNA sense strand
cuagaacgaguaaaucugu

SEQ ID NO: 1288354 - RNA, 19 nt, Homo sapiens
  misc_RNA (1)...(19): siRNA sense strand
gagcuagaacgaguaaauc

SEQ ID NO: 1288355 - RNA, 19 nt, Homo sapiens
  misc_RNA (1)...(19): siRNA sense strand
aaauccaggucucacacaa

SEQ ID NO: 1288356 - RNA, 19 nt, Homo sapiens
  misc_RNA (1)...(19): siRNA sense strand
gaugauguagaagaguaua

SEQ ID NO: 1288357 - RNA, 19 nt, Homo sapiens
  misc_RNA (1)...(19): siRNA sense strand
gaugacaauggaagagaug

SEQ ID NO: 1288358 - RNA, 19 nt, Homo sapiens
  misc_RNA (1)...(19): siRNA sense strand
uacagugaauaaugucuuc

SEQ ID NO: 1288359 - RNA, 19 nt, Homo sapiens
  misc_RNA (1)...(19): siRNA sense strand
ucccagaugagaucaauga

SEQ ID NO: 1288360 - RNA, 19 nt, Homo sapiens
  misc_RNA (1)...(19): siRNA sense strand
cauguauccuguguuuaau

SEQ ID NO: 1288361 - RNA, 19 nt, Homo sapiens
  misc_RNA (1)...(19): siRNA sense strand
acgagcacuuaaacaaauu

SEQ ID NO: 1288362 - RNA, 19 nt, Homo sapiens
  misc_RNA (1)...(19): siRNA sense strand
acugagagccgcuuucauc

SEQ ID NO: 1288363 - RNA, 19 nt, Homo sapiens
  misc_RNA (1)...(19): siRNA sense strand
cguaagugccaaccgacua

SEQ ID NO: 1288364 - RNA, 19 nt, Homo sapiens
  misc_RNA (1)...(19): siRNA sense strand
gagaucaaugacagaguga

SEQ ID NO: 1288365 - RNA, 19 nt, Homo sapiens
  misc_RNA (1)...(19): siRNA sense strand
aguaagaucccagaugaga

SEQ ID NO: 1288366 - RNA, 19 nt, Homo sapiens
  misc_RNA (1)...(19): siRNA sense strand
uuaaagauggcaaggcaau

SEQ ID NO: 1288367 - RNA, 19 nt, Homo sapiens
  misc_RNA (1)...(19): siRNA sense strand
cuugauacagugaauaaug

SEQ ID NO: 1288368 - RNA, 19 nt, Homo sapiens
  misc_RNA (1)...(19): siRNA sense strand
ucaaugacagagugagguu

SEQ ID NO: 1288369 - RNA, 19 nt, Homo sapiens
  misc_RNA (1)...(19): siRNA sense strand
auccaggucucacacaaga

SEQ ID NO: 1288370 - RNA, 19 nt, Homo sapiens
  misc_RNA (1)...(19): siRNA sense strand
ccucuaugcagucauguau

SEQ ID NO: 1288371 - RNA, 19 nt, Homo sapiens
  misc_RNA (1)...(19): siRNA sense strand
gccaaccgacuaauucauc

SEQ ID NO: 1288372 - RNA, 19 nt, Homo sapiens
  misc_RNA (1)...(19): siRNA sense strand
gcuagaacgaguaaaucug

SEQ ID NO: 1288373 - RNA, 19 nt, Homo sapiens
  misc_RNA (1)...(19): siRNA sense strand
aaaggcacgagcacuuaaa

SEQ ID NO: 1288374 - RNA, 19 nt, Homo sapiens
  misc_RNA (1)...(19): siRNA sense strand
guaagaucccagaugagau

SEQ ID NO: 1288375 - RNA, 19 nt, Homo sapiens
  misc_RNA (1)...(19): siRNA sense strand
ggcaaggcaauaaaugugu

SEQ ID NO: 1288376 - RNA, 19 nt, Homo sapiens
  misc_RNA (1)...(19): siRNA sense strand
ugagagccgcuuucaucaa

SEQ ID NO: 1288377 - RNA, 19 nt, Homo sapiens
  misc_RNA (1)...(19): siRNA sense strand
ucucacacaagacaucauu

SEQ ID NO: 1288378 - RNA, 19 nt, Homo sapiens
  misc_RNA (1)...(19): siRNA sense strand
ccagaugagaucaaugaca

SEQ ID NO: 1288379 - RNA, 19 nt, Homo sapiens
  misc_RNA (1)...(19): siRNA sense strand
ugacaauggaagagaugaa

SEQ ID NO: 1288380 - RNA, 19 nt, Homo sapiens
  misc_RNA (1)...(19): siRNA sense strand
cuucagaccuucaaaacug

SEQ ID NO: 1288381 - RNA, 19 nt, Homo sapiens
  misc_RNA (1)...(19): siRNA sense strand
gcacuugaacaccaaaaga

SEQ ID NO: 1288382 - RNA, 19 nt, Homo sapiens
  misc_RNA (1)...(19): siRNA sense strand
gaagaguauaugauugaac

SEQ ID NO: 1288383 - RNA, 19 nt, Homo sapiens
  misc_RNA (1)...(19): siRNA sense strand
cacacaagacaucauuaug

SEQ ID NO: 1288384 - RNA, 19 nt, Homo sapiens
  misc_RNA (1)...(19): siRNA sense strand
guauggcagcugaugaugu

SEQ ID NO: 1288385 - RNA, 19 nt, Homo sapiens
  misc_RNA (1)...(19): siRNA sense strand
cagggcacuugaacaccaa

SEQ ID NO: 1288386 - RNA, 19 nt, Homo sapiens
  misc_RNA (1)...(19): siRNA sense strand
cagaaccgcagggcacuug

SEQ ID NO: 1288387 - RNA, 19 nt, Homo sapiens
  misc_RNA (1)...(19): siRNA sense strand
ggacaacuccugcaaagaa

SEQ ID NO: 1288388 - RNA, 19 nt, Homo sapiens
  misc_RNA (1)...(19): siRNA sense strand
gcucaaugaucaggacuua

SEQ ID NO: 1288389 - RNA, 19 nt, Homo sapiens
  misc_RNA (1)...(19): siRNA sense strand
agacaaauaucccauucaa

SEQ ID NO: 1288390 - RNA, 19 nt, Homo sapiens
  misc_RNA (1)...(19): siRNA sense strand
ccacgaaauucagauauga

SEQ ID NO: 1288391 - RNA, 19 nt, Homo sapiens
  misc_RNA (1)...(19): siRNA sense strand
acaaauaucccauucaaga

SEQ ID NO: 1288392 - RNA, 19 nt, Homo sapiens
  misc_RNA (1)...(19): siRNA sense strand
gaacugcccacgaaauuca

SEQ ID NO: 1288393 - RNA, 19 nt, Homo sapiens
  misc_RNA (1)...(19): siRNA sense strand
gauguccuaugacgaauug

SEQ ID NO: 1288394 - RNA, 19 nt, Homo sapiens
  misc_RNA (1)...(19): siRNA sense strand
gacaacuccugcaaagaaa

SEQ ID NO: 1288395 - RNA, 19 nt, Homo sapiens
  misc_RNA (1)...(19): siRNA sense strand
ggaacucccuaaagcugaa

SEQ ID NO: 1288396 - RNA, 19 nt, Homo sapiens
  misc_RNA (1)...(19): siRNA sense strand
cacagacccuagcacuuua

SEQ ID NO: 1288397 - RNA, 19 nt, Homo sapiens
  misc_RNA (1)...(19): siRNA sense strand
cccuaaagcugaagaaugu

SEQ ID NO: 1288398 - RNA, 19 nt, Homo sapiens
  misc_RNA (1)...(19): siRNA sense strand
uaaaggaaccaguggaaga

SEQ ID NO: 1288399 - RNA, 19 nt, Homo sapiens
  misc_RNA (1)...(19): siRNA sense strand
ccuagcacuuuauccuuua

SEQ ID NO: 1288400 - RNA, 19 nt, Homo sapiens
  misc_RNA (1)...(19): siRNA sense strand
acacagacccuagcacuuu

SEQ ID NO: 1288401 - RNA, 19 nt, Homo sapiens
  misc_RNA (1)...(19): siRNA sense strand
ucagacaaauaucccauuc

SEQ ID NO: 1288402 - RNA, 19 nt, Homo sapiens
  misc_RNA (1)...(19): siRNA sense strand
gcugaagaaugugauacaa

SEQ ID NO: 1288403 - RNA, 19 nt, Homo sapiens
  misc_RNA (1)...(19): siRNA sense strand
gguaaaggaaccaguggaa

SEQ ID NO: 1288404 - RNA, 19 nt, Homo sapiens
  misc_RNA (1)...(19): siRNA sense strand
gugacuugcucaaugauca

SEQ ID NO: 1288405 - RNA, 19 nt, Homo sapiens
  misc_RNA (1)...(19): siRNA sense strand
cccuagcacuuuauccuuu

SEQ ID NO: 1288406 - RNA, 19 nt, Homo sapiens
  misc_RNA (1)...(19): siRNA sense strand
caaauaucccauucaagau

SEQ ID NO: 1288407 - RNA, 19 nt, Homo sapiens
  misc_RNA (1)...(19): siRNA sense strand
auacggaacucccuaaagc

SEQ ID NO: 1288408 - RNA, 19 nt, Homo sapiens
  misc_RNA (1)...(19): siRNA sense strand
gaagacacagacccuagca

SEQ ID NO: 1288409 - RNA, 19 nt, Homo sapiens
  misc_RNA (1)...(19): siRNA sense strand
cccacgaaauucagauaug

SEQ ID NO: 1288410 - RNA, 19 nt, Homo sapiens
  misc_RNA (1)...(19): siRNA sense strand
cuagcacuuuauccuuuaa

SEQ ID NO: 1288411 - RNA, 19 nt, Homo sapiens
  misc_RNA (1)...(19): siRNA sense strand
gcaaagaaaacuguacuug

SEQ ID NO: 1288412 - RNA, 19 nt, Homo sapiens
  misc_RNA (1)...(19): siRNA sense strand
cuaaagcugaagaauguga

SEQ ID NO: 1288413 - RNA, 19 nt, Homo sapiens
  misc_RNA (1)...(19): siRNA sense strand
acuuugaacugcccacgaa

SEQ ID NO: 1288414 - RNA, 19 nt, Homo sapiens
  misc_RNA (1)...(19): siRNA sense strand
gauacggaacucccuaaag

SEQ ID NO: 1288415 - RNA, 19 nt, Homo sapiens
  misc_RNA (1)...(19): siRNA sense strand
ucaaugaucaggacuuacu

SEQ ID NO: 1288416 - RNA, 19 nt, Homo sapiens
  misc_RNA (1)...(19): siRNA sense strand
guacuuguuccuccugcuu

SEQ ID NO: 1288417 - RNA, 19 nt, Homo sapiens
  misc_RNA (1)...(19): siRNA sense strand
ggauguccuaugacgaauu

SEQ ID NO: 1288418 - RNA, 19 nt, Homo sapiens
  misc_RNA (1)...(19): siRNA sense strand
uuccagagaucagcaagga

SEQ ID NO: 1288419 - RNA, 19 nt, Homo sapiens
  misc_RNA (1)...(19): siRNA sense strand
caaagaaaacuguacuugu

SEQ ID NO: 1288420 - RNA, 19 nt, Homo sapiens
  misc_RNA (1)...(19): siRNA sense strand
gacacagacccuagcacuu

SEQ ID NO: 1288421 - RNA, 19 nt, Homo sapiens
  misc_RNA (1)...(19): siRNA sense strand
ggaaccaguggaagacaca

SEQ ID NO: 1288422 - RNA, 19 nt, Homo sapiens
  misc_RNA (1)...(19): siRNA sense strand
caaugaucaggacuuacua

SEQ ID NO: 1288423 - RNA, 19 nt, Homo sapiens
  misc_RNA (1)...(19): siRNA sense strand
aaagcugaagaaugugaua

SEQ ID NO: 1288424 - RNA, 19 nt, Homo sapiens
  misc_RNA (1)...(19): siRNA sense strand
uugaacugcccacgaaauu

SEQ ID NO: 1288425 - RNA, 19 nt, Homo sapiens
  misc_RNA (1)...(19): siRNA sense strand
ggacaacuccugcaaagaa

SEQ ID NO: 1288426 - RNA, 19 nt, Homo sapiens
  misc_RNA (1)...(19): siRNA sense strand
gcucaaugaucaggacuua

SEQ ID NO: 1288427 - RNA, 19 nt, Homo sapiens
  misc_RNA (1)...(19): siRNA sense strand
agacaaauaucccauucaa

SEQ ID NO: 1288428 - RNA, 19 nt, Homo sapiens
  misc_RNA (1)...(19): siRNA sense strand
ccacgaaauucagauauga

SEQ ID NO: 1288429 - RNA, 19 nt, Homo sapiens
  misc_RNA (1)...(19): siRNA sense strand
acaaauaucccauucaaga

SEQ ID NO: 1288430 - RNA, 19 nt, Homo sapiens
  misc_RNA (1)...(19): siRNA sense strand
gaacugcccacgaaauuca

SEQ ID NO: 1288431 - RNA, 19 nt, Homo sapiens
  misc_RNA (1)...(19): siRNA sense strand
gauguccuaugacgaauug

SEQ ID NO: 1288432 - RNA, 19 nt, Homo sapiens
  misc_RNA (1)...(19): siRNA sense strand
gacaacuccugcaaagaaa

SEQ ID NO: 1288433 - RNA, 19 nt, Homo sapiens
  misc_RNA (1)...(19): siRNA sense strand
ggaacucccuaaagcugaa

SEQ ID NO: 1288434 - RNA, 19 nt, Homo sapiens
  misc_RNA (1)...(19): siRNA sense strand
cacagacccuagcacuuua

SEQ ID NO: 1288435 - RNA, 19 nt, Homo sapiens
  misc_RNA (1)...(19): siRNA sense strand
cccuaaagcugaagaaugu

SEQ ID NO: 1288436 - RNA, 19 nt, Homo sapiens
  misc_RNA (1)...(19): siRNA sense strand
uaaaggaaccaguggaaga

SEQ ID NO: 1288437 - RNA, 19 nt, Homo sapiens
  misc_RNA (1)...(19): siRNA sense strand
ccuagcacuuuauccuuua

SEQ ID NO: 1288438 - RNA, 19 nt, Homo sapiens
  misc_RNA (1)...(19): siRNA sense strand
acacagacccuagcacuuu

SEQ ID NO: 1288439 - RNA, 19 nt, Homo sapiens
  misc_RNA (1)...(19): siRNA sense strand
ucagacaaauaucccauuc

SEQ ID NO: 1288440 - RNA, 19 nt, Homo sapiens
  misc_RNA (1)...(19): siRNA sense strand
gcugaagaaugugauacaa

SEQ ID NO: 1288441 - RNA, 19 nt, Homo sapiens
  misc_RNA (1)...(19): siRNA sense strand
gguaaaggaaccaguggaa

SEQ ID NO: 1288442 - RNA, 19 nt, Homo sapiens
  misc_RNA (1)...(19): siRNA sense strand
gugacuugcucaaugauca

SEQ ID NO: 1288443 - RNA, 19 nt, Homo sapiens
  misc_RNA (1)...(19): siRNA sense strand
cccuagcacuuuauccuuu

SEQ ID NO: 1288444 - RNA, 19 nt, Homo sapiens
  misc_RNA (1)...(19): siRNA sense strand
caaauaucccauucaagau

SEQ ID NO: 1288445 - RNA, 19 nt, Homo sapiens
  misc_RNA (1)...(19): siRNA sense strand
auacggaacucccuaaagc

SEQ ID NO: 1288446 - RNA, 19 nt, Homo sapiens
  misc_RNA (1)...(19): siRNA sense strand
gaagacacagacccuagca

SEQ ID NO: 1288447 - RNA, 19 nt, Homo sapiens
  misc_RNA (1)...(19): siRNA sense strand
cccacgaaauucagauaug

SEQ ID NO: 1288448 - RNA, 19 nt, Homo sapiens
  misc_RNA (1)...(19): siRNA sense strand
cuagcacuuuauccuuuaa

SEQ ID NO: 1288449 - RNA, 19 nt, Homo sapiens
  misc_RNA (1)...(19): siRNA sense strand
gcaaagaaaacuguacuug

SEQ ID NO: 1288450 - RNA, 19 nt, Homo sapiens
  misc_RNA (1)...(19): siRNA sense strand
cuaaagcugaagaauguga

SEQ ID NO: 1288451 - RNA, 19 nt, Homo sapiens
  misc_RNA (1)...(19): siRNA sense strand
acuuugaacugcccacgaa

SEQ ID NO: 1288452 - RNA, 19 nt, Homo sapiens
  misc_RNA (1)...(19): siRNA sense strand
gauacggaacucccuaaag

SEQ ID NO: 1288453 - RNA, 19 nt, Homo sapiens
  misc_RNA (1)...(19): siRNA sense strand
ucaaugaucaggacuuacu

SEQ ID NO: 1288454 - RNA, 19 nt, Homo sapiens
  misc_RNA (1)...(19): siRNA sense strand
guacuuguuccuccugcuu

SEQ ID NO: 1288455 - RNA, 19 nt, Homo sapiens
  misc_RNA (1)...(19): siRNA sense strand
ggauguccuaugacgaauu

SEQ ID NO: 1288456 - RNA, 19 nt, Homo sapiens
  misc_RNA (1)...(19): siRNA sense strand
uuccagagaucagcaagga

SEQ ID NO: 1288457 - RNA, 19 nt, Homo sapiens
  misc_RNA (1)...(19): siRNA sense strand
caaagaaaacuguacuugu

SEQ ID NO: 1288458 - RNA, 19 nt, Homo sapiens
  misc_RNA (1)...(19): siRNA sense strand
gacacagacccuagcacuu

SEQ ID NO: 1288459 - RNA, 19 nt, Homo sapiens
  misc_RNA (1)...(19): siRNA sense strand
ggaaccaguggaagacaca

SEQ ID NO: 1288460 - RNA, 19 nt, Homo sapiens
  misc_RNA (1)...(19): siRNA sense strand
caaugaucaggacuuacua

SEQ ID NO: 1288461 - RNA, 19 nt, Homo sapiens
  misc_RNA (1)...(19): siRNA sense strand
aaagcugaagaaugugaua

SEQ ID NO: 1288462 - RNA, 19 nt, Homo sapiens
  misc_RNA (1)...(19): siRNA sense strand
uugaacugcccacgaaauu

SEQ ID NO: 1288463 - RNA, 19 nt, Homo sapiens
  misc_RNA (1)...(19): siRNA sense strand
gaaauugcacugucacuaa

SEQ ID NO: 1288464 - RNA, 19 nt, Homo sapiens
  misc_RNA (1)...(19): siRNA sense strand
gaaaguagccauaaagauc

SEQ ID NO: 1288465 - RNA, 19 nt, Homo sapiens
  misc_RNA (1)...(19): siRNA sense strand
guaagaaaguagccauaaa

SEQ ID NO: 1288466 - RNA, 19 nt, Homo sapiens
  misc_RNA (1)...(19): siRNA sense strand
ggaauaaacgccugaaaga

SEQ ID NO: 1288467 - RNA, 19 nt, Homo sapiens
  misc_RNA (1)...(19): siRNA sense strand
acacugagcuccuuagaga

SEQ ID NO: 1288468 - RNA, 19 nt, Homo sapiens
  misc_RNA (1)...(19): siRNA sense strand
gaacauacagcaagaaaca

SEQ ID NO: 1288469 - RNA, 19 nt, Homo sapiens
  misc_RNA (1)...(19): siRNA sense strand
gcauaggacucaaguguca

SEQ ID NO: 1288470 - RNA, 19 nt, Homo sapiens
  misc_RNA (1)...(19): siRNA sense strand
gaaguuugcuauugguuca

SEQ ID NO: 1288471 - RNA, 19 nt, Homo sapiens
  misc_RNA (1)...(19): siRNA sense strand
ccauaaagaucaucagcaa

SEQ ID NO: 1288472 - RNA, 19 nt, Homo sapiens
  misc_RNA (1)...(19): siRNA sense strand
caggaacucuauucuauuc

SEQ ID NO: 1288473 - RNA, 19 nt, Homo sapiens
  misc_RNA (1)...(19): siRNA sense strand
gaauaaacgccugaaagaa

SEQ ID NO: 1288474 - RNA, 19 nt, Homo sapiens
  misc_RNA (1)...(19): siRNA sense strand
caauggaaccuuuguaaau

SEQ ID NO: 1288475 - RNA, 19 nt, Homo sapiens
  misc_RNA (1)...(19): siRNA sense strand
gacaaaagcugugaauauu

SEQ ID NO: 1288476 - RNA, 19 nt, Homo sapiens
  misc_RNA (1)...(19): siRNA sense strand
gcaauggaaccuuuguaaa

SEQ ID NO: 1288477 - RNA, 19 nt, Homo sapiens
  misc_RNA (1)...(19): siRNA sense strand
uagaugaucagucaguuua

SEQ ID NO: 1288478 - RNA, 19 nt, Homo sapiens
  misc_RNA (1)...(19): siRNA sense strand
gagcauaggacucaagugu

SEQ ID NO: 1288479 - RNA, 19 nt, Homo sapiens
  misc_RNA (1)...(19): siRNA sense strand
ucacuaagcagaaauaaag

SEQ ID NO: 1288480 - RNA, 19 nt, Homo sapiens
  misc_RNA (1)...(19): siRNA sense strand
gaaugacaacuacugguuu

SEQ ID NO: 1288481 - RNA, 19 nt, Homo sapiens
  misc_RNA (1)...(19): siRNA sense strand
gaauauugcuuugaugaac

SEQ ID NO: 1288482 - RNA, 19 nt, Homo sapiens
  misc_RNA (1)...(19): siRNA sense strand
ggacaaaagcugugaauau

SEQ ID NO: 1288483 - RNA, 19 nt, Homo sapiens
  misc_RNA (1)...(19): siRNA sense strand
ccaagaaccugaggaccaa

SEQ ID NO: 1288484 - RNA, 19 nt, Homo sapiens
  misc_RNA (1)...(19): siRNA sense strand
ggaaaacgccguccuuuga

SEQ ID NO: 1288485 - RNA, 19 nt, Homo sapiens
  misc_RNA (1)...(19): siRNA sense strand
uucaagaucuucugucuga

SEQ ID NO: 1288486 - RNA, 19 nt, Homo sapiens
  misc_RNA (1)...(19): siRNA sense strand
agacccagcucucaauguu

SEQ ID NO: 1288487 - RNA, 19 nt, Homo sapiens
  misc_RNA (1)...(19): siRNA sense strand
gacagaagaagccuuaaga

SEQ ID NO: 1288488 - RNA, 19 nt, Homo sapiens
  misc_RNA (1)...(19): siRNA sense strand
agaaagcucuggaccuugu

SEQ ID NO: 1288489 - RNA, 19 nt, Homo sapiens
  misc_RNA (1)...(19): siRNA sense strand
gaugaagacaugaagagaa

SEQ ID NO: 1288490 - RNA, 19 nt, Homo sapiens
  misc_RNA (1)...(19): siRNA sense strand
gaucuucugucugaggaaa

SEQ ID NO: 1288491 - RNA, 19 nt, Homo sapiens
  misc_RNA (1)...(19): siRNA sense strand
gcuguggacugcuggaguu

SEQ ID NO: 1288492 - RNA, 19 nt, Homo sapiens
  misc_RNA (1)...(19): siRNA sense strand
gauaaauaccgaacauaca

SEQ ID NO: 1288493 - RNA, 19 nt, Homo sapiens
  misc_RNA (1)...(19): siRNA sense strand
aaaggaaguuugcuauugg

SEQ ID NO: 1288494 - RNA, 19 nt, Homo sapiens
  misc_RNA (1)...(19): siRNA sense strand
ccuaaggcauuaagagaug

SEQ ID NO: 1288495 - RNA, 19 nt, Homo sapiens
  misc_RNA (1)...(19): siRNA sense strand
ggcaauggaaccuuuguaa

SEQ ID NO: 1288496 - RNA, 19 nt, Homo sapiens
  misc_RNA (1)...(19): siRNA sense strand
gaagaucacaguggcaaug

SEQ ID NO: 1288497 - RNA, 19 nt, Homo sapiens
  misc_RNA (1)...(19): siRNA sense strand
augaagacaugaagagaaa

SEQ ID NO: 1288498 - RNA, 19 nt, Homo sapiens
  misc_RNA (1)...(19): siRNA sense strand
ucaagaaguuguugguagu

SEQ ID NO: 1288499 - RNA, 19 nt, Homo sapiens
  misc_RNA (1)...(19): siRNA sense strand
gaaguucuuguuucuguug

SEQ ID NO: 1288500 - RNA, 19 nt, Homo sapiens
  misc_RNA (1)...(19): siRNA sense strand
cucaggaacucuauucuau

SEQ ID NO: 1288501 - RNA, 19 nt, Homo sapiens
  misc_RNA (1)...(19): siRNA sense strand
gaugaucagucaguuuauc

SEQ ID NO: 1288502 - RNA, 19 nt, Homo sapiens
  misc_RNA (1)...(19): siRNA sense strand
ugaaagaagcuaccugcaa

SEQ ID NO: 1288503 - RNA, 19 nt, Homo sapiens
  misc_RNA (1)...(19): siRNA sense strand
uaagaaaguagccauaaag

SEQ ID NO: 1288504 - RNA, 19 nt, Homo sapiens
  misc_RNA (1)...(19): siRNA sense strand
ggggagagcuguuugacaa

SEQ ID NO: 1288505 - RNA, 19 nt, Homo sapiens
  misc_RNA (1)...(19): siRNA sense strand
gaucacaguggcaauggaa

SEQ ID NO: 1288506 - RNA, 19 nt, Homo sapiens
  misc_RNA (1)...(19): siRNA sense strand
gaagacaugaagagaaagu

SEQ ID NO: 1288507 - RNA, 19 nt, Homo sapiens
  misc_RNA (1)...(19): siRNA sense strand
gguauccaccuuucucuga

SEQ ID NO: 1288508 - RNA, 19 nt, Homo sapiens
  misc_RNA (1)...(19): siRNA sense strand
ucagggaaguggguccuaa

SEQ ID NO: 1288509 - RNA, 19 nt, Homo sapiens
  misc_RNA (1)...(19): siRNA sense strand
ccaccuuucucugagcaua

SEQ ID NO: 1288510 - RNA, 19 nt, Homo sapiens
  misc_RNA (1)...(19): siRNA sense strand
augagaaccuuauguggaa

SEQ ID NO: 1288511 - RNA, 19 nt, Homo sapiens
  misc_RNA (1)...(19): siRNA sense strand
gggaauaaacgccugaaag

SEQ ID NO: 1288512 - RNA, 19 nt, Homo sapiens
  misc_RNA (1)...(19): siRNA sense strand
aaacgccguccuuugaaua

SEQ ID NO: 1288513 - RNA, 19 nt, Homo sapiens
  misc_RNA (1)...(19): siRNA sense strand
gugaauauugcuuugauga

SEQ ID NO: 1288514 - RNA, 19 nt, Homo sapiens
  misc_RNA (1)...(19): siRNA sense strand
guagaugaucagucaguuu

SEQ ID NO: 1288515 - RNA, 19 nt, Homo sapiens
  misc_RNA (1)...(19): siRNA sense strand
gcacugucacuaagcagaa

SEQ ID NO: 1288516 - RNA, 19 nt, Homo sapiens
  misc_RNA (1)...(19): siRNA sense strand
acagauaaauaccgaacau

SEQ ID NO: 1288517 - RNA, 19 nt, Homo sapiens
  misc_RNA (1)...(19): siRNA sense strand
aaugacaacuacugguuug

SEQ ID NO: 1288518 - RNA, 19 nt, Homo sapiens
  misc_RNA (1)...(19): siRNA sense strand
cagaagaagccuuaagaca

SEQ ID NO: 1288519 - RNA, 19 nt, Homo sapiens
  misc_RNA (1)...(19): siRNA sense strand
gaggaaaacauguaagaaa

SEQ ID NO: 1288520 - RNA, 19 nt, Homo sapiens
  misc_RNA (1)...(19): siRNA sense strand
gaucagucaguuuauccua

SEQ ID NO: 1288521 - RNA, 19 nt, Homo sapiens
  misc_RNA (1)...(19): siRNA sense strand
aaaaggaaguuugcuauug

SEQ ID NO: 1288522 - RNA, 19 nt, Homo sapiens
  misc_RNA (1)...(19): siRNA sense strand
aauaaacgccugaaagaag

SEQ ID NO: 1288523 - RNA, 19 nt, Homo sapiens
  misc_RNA (1)...(19): siRNA sense strand
ugaaugacaacuacugguu

SEQ ID NO: 1288524 - RNA, 19 nt, Homo sapiens
  misc_RNA (1)...(19): siRNA sense strand
acccguggcuucaggauga

SEQ ID NO: 1288525 - RNA, 19 nt, Homo sapiens
  misc_RNA (1)...(19): siRNA sense strand
cugaaguucuuguuucugu

SEQ ID NO: 1288526 - RNA, 19 nt, Homo sapiens
  misc_RNA (1)...(19): siRNA sense strand
aaucauccuugcaucauca

SEQ ID NO: 1288527 - RNA, 19 nt, Homo sapiens
  misc_RNA (1)...(19): siRNA sense strand
uugcauacauagaagauca

SEQ ID NO: 1288528 - RNA, 19 nt, Homo sapiens
  misc_RNA (1)...(19): siRNA sense strand
agacaugaagagaaaguuu

SEQ ID NO: 1288529 - RNA, 19 nt, Homo sapiens
  misc_RNA (1)...(19): siRNA sense strand
ggacacugagcuccuuaga

SEQ ID NO: 1288530 - RNA, 19 nt, Homo sapiens
  misc_RNA (1)...(19): siRNA sense strand
caguuuauccuaaggcauu

SEQ ID NO: 1288531 - RNA, 19 nt, Homo sapiens
  misc_RNA (1)...(19): siRNA sense strand
caguggcaauggaaccuuu

SEQ ID NO: 1288532 - RNA, 19 nt, Homo sapiens
  misc_RNA (1)...(19): siRNA sense strand
ugugugugcugcuguguug

SEQ ID NO: 1288533 - RNA, 19 nt, Homo sapiens
  misc_RNA (1)...(19): siRNA sense strand
gaguuuaggaguuauucuu

SEQ ID NO: 1288534 - RNA, 19 nt, Homo sapiens
  misc_RNA (1)...(19): siRNA sense strand
gagcuuguagggaaaggaa

SEQ ID NO: 1288535 - RNA, 19 nt, Homo sapiens
  misc_RNA (1)...(19): siRNA sense strand
aaaguagccauaaagauca

SEQ ID NO: 1288536 - RNA, 19 nt, Homo sapiens
  misc_RNA (1)...(19): siRNA sense strand
uugccaaucuugaaugugu

SEQ ID NO: 1288537 - RNA, 19 nt, Homo sapiens
  misc_RNA (1)...(19): siRNA sense strand
uaccgaacauacagcaaga

SEQ ID NO: 1288538 - RNA, 19 nt, Homo sapiens
  misc_RNA (1)...(19): siRNA sense strand
ggaugaagacaugaagaga

SEQ ID NO: 1288539 - RNA, 19 nt, Homo sapiens
  misc_RNA (1)...(19): siRNA sense strand
guggacugcuggaguuuag

SEQ ID NO: 1288540 - RNA, 19 nt, Homo sapiens
  misc_RNA (1)...(19): siRNA sense strand
ccacucaggaacucuauuc

SEQ ID NO: 1288541 - RNA, 19 nt, Homo sapiens
  misc_RNA (1)...(19): siRNA sense strand
aaauugcacugucacuaag

SEQ ID NO: 1288542 - RNA, 19 nt, Homo sapiens
  misc_RNA (1)...(19): siRNA sense strand
ugaaauugcacugucacua

SEQ ID NO: 1288543 - RNA, 19 nt, Homo sapiens
  misc_RNA (1)...(19): siRNA sense strand
acucuuacauugcauacau

SEQ ID NO: 1288544 - RNA, 19 nt, Homo sapiens
  misc_RNA (1)...(19): siRNA sense strand
ggacugcuggaguuuagga

SEQ ID NO: 1288545 - RNA, 19 nt, Homo sapiens
  misc_RNA (1)...(19): siRNA sense strand
caaaagcugugaauauugc

SEQ ID NO: 1288546 - RNA, 19 nt, Homo sapiens
  misc_RNA (1)...(19): siRNA sense strand
ucaggaacucuauucuauu

SEQ ID NO: 1288547 - RNA, 19 nt, Homo sapiens
  misc_RNA (1)...(19): siRNA sense strand
uacgacagaagaagccuua

SEQ ID NO: 1288548 - RNA, 19 nt, Homo sapiens
  misc_RNA (1)...(19): siRNA sense strand
cgccugaaguucuuguuuc

SEQ ID NO: 1288549 - RNA, 19 nt, Homo sapiens
  misc_RNA (1)...(19): siRNA sense strand
uguaagaaaguagccauaa

SEQ ID NO: 1288550 - RNA, 19 nt, Homo sapiens
  misc_RNA (1)...(19): siRNA sense strand
gaaaacgccguccuuugaa

SEQ ID NO: 1288551 - RNA, 19 nt, Homo sapiens
  misc_RNA (1)...(19): siRNA sense strand
uugaaugugugaaugacaa

SEQ ID NO: 1288552 - RNA, 19 nt, Homo sapiens
  misc_RNA (1)...(19): siRNA sense strand
cagauaaauaccgaacaua

SEQ ID NO: 1288553 - RNA, 19 nt, Homo sapiens
  misc_RNA (1)...(19): siRNA sense strand
gaaccacugcugaaaagaa

SEQ ID NO: 1288554 - RNA, 19 nt, Homo sapiens
  misc_RNA (1)...(19): siRNA sense strand
gauccaaaggcacguuuua

SEQ ID NO: 1288555 - RNA, 19 nt, Homo sapiens
  misc_RNA (1)...(19): siRNA sense strand
ugaaguucuuguuucuguu

SEQ ID NO: 1288556 - RNA, 19 nt, Homo sapiens
  misc_RNA (1)...(19): siRNA sense strand
cuaaaucauccuugcauca

SEQ ID NO: 1288557 - RNA, 19 nt, Homo sapiens
  misc_RNA (1)...(19): siRNA sense strand
aagaaaguagccauaaaga

SEQ ID NO: 1288558 - RNA, 19 nt, Homo sapiens
  misc_RNA (1)...(19): siRNA sense strand
ucagucaguuuauccuaag

SEQ ID NO: 1288559 - RNA, 19 nt, Homo sapiens
  misc_RNA (1)...(19): siRNA sense strand
auacauagaagaucacagu

SEQ ID NO: 1288560 - RNA, 19 nt, Homo sapiens
  misc_RNA (1)...(19): siRNA sense strand
gcgccugaaguucuuguuu

SEQ ID NO: 1288561 - RNA, 19 nt, Homo sapiens
  misc_RNA (1)...(19): siRNA sense strand
acaaagcgcccagcugugu

SEQ ID NO: 1288562 - RNA, 19 nt, Homo sapiens
  misc_RNA (1)...(19): siRNA sense strand
gcccagccuucuacuaguc

SEQ ID NO: 1288563 - RNA, 19 nt, Homo sapiens
  misc_RNA (1)...(19): siRNA sense strand
gaaauugcacugucacuaa

SEQ ID NO: 1288564 - RNA, 19 nt, Homo sapiens
  misc_RNA (1)...(19): siRNA sense strand
gaaaguagccauaaagauc

SEQ ID NO: 1288565 - RNA, 19 nt, Homo sapiens
  misc_RNA (1)...(19): siRNA sense strand
guaagaaaguagccauaaa

SEQ ID NO: 1288566 - RNA, 19 nt, Homo sapiens
  misc_RNA (1)...(19): siRNA sense strand
ggaauaaacgccugaaaga

SEQ ID NO: 1288567 - RNA, 19 nt, Homo sapiens
  misc_RNA (1)...(19): siRNA sense strand
acacugagcuccuuagaga

SEQ ID NO: 1288568 - RNA, 19 nt, Homo sapiens
  misc_RNA (1)...(19): siRNA sense strand
gaacauacagcaagaaaca

SEQ ID NO: 1288569 - RNA, 19 nt, Homo sapiens
  misc_RNA (1)...(19): siRNA sense strand
gcauaggacucaaguguca

SEQ ID NO: 1288570 - RNA, 19 nt, Homo sapiens
  misc_RNA (1)...(19): siRNA sense strand
gaaguuugcuauugguuca

SEQ ID NO: 1288571 - RNA, 19 nt, Homo sapiens
  misc_RNA (1)...(19): siRNA sense strand
ccauaaagaucaucagcaa

SEQ ID NO: 1288572 - RNA, 19 nt, Homo sapiens
  misc_RNA (1)...(19): siRNA sense strand
caggaacucuauucuauuc

SEQ ID NO: 1288573 - RNA, 19 nt, Homo sapiens
  misc_RNA (1)...(19): siRNA sense strand
gaauaaacgccugaaagaa

SEQ ID NO: 1288574 - RNA, 19 nt, Homo sapiens
  misc_RNA (1)...(19): siRNA sense strand
caauggaaccuuuguaaau

SEQ ID NO: 1288575 - RNA, 19 nt, Homo sapiens
  misc_RNA (1)...(19): siRNA sense strand
gacaaaagcugugaauauu

SEQ ID NO: 1288576 - RNA, 19 nt, Homo sapiens
  misc_RNA (1)...(19): siRNA sense strand
gcaauggaaccuuuguaaa

SEQ ID NO: 1288577 - RNA, 19 nt, Homo sapiens
  misc_RNA (1)...(19): siRNA sense strand
uagaugaucagucaguuua

SEQ ID NO: 1288578 - RNA, 19 nt, Homo sapiens
  misc_RNA (1)...(19): siRNA sense strand
gagcauaggacucaagugu

SEQ ID NO: 1288579 - RNA, 19 nt, Homo sapiens
  misc_RNA (1)...(19): siRNA sense strand
ucacuaagcagaaauaaag

SEQ ID NO: 1288580 - RNA, 19 nt, Homo sapiens
  misc_RNA (1)...(19): siRNA sense strand
gaaugacaacuacugguuu

SEQ ID NO: 1288581 - RNA, 19 nt, Homo sapiens
  misc_RNA (1)...(19): siRNA sense strand
gaauauugcuuugaugaac

SEQ ID NO: 1288582 - RNA, 19 nt, Homo sapiens
  misc_RNA (1)...(19): siRNA sense strand
ggacaaaagcugugaauau

SEQ ID NO: 1288583 - RNA, 19 nt, Homo sapiens
  misc_RNA (1)...(19): siRNA sense strand
ccaagaaccugaggaccaa

SEQ ID NO: 1288584 - RNA, 19 nt, Homo sapiens
  misc_RNA (1)...(19): siRNA sense strand
ggaaaacgccguccuuuga

SEQ ID NO: 1288585 - RNA, 19 nt, Homo sapiens
  misc_RNA (1)...(19): siRNA sense strand
uucaagaucuucugucuga

SEQ ID NO: 1288586 - RNA, 19 nt, Homo sapiens
  misc_RNA (1)...(19): siRNA sense strand
agacccagcucucaauguu

SEQ ID NO: 1288587 - RNA, 19 nt, Homo sapiens
  misc_RNA (1)...(19): siRNA sense strand
gacagaagaagccuuaaga

SEQ ID NO: 1288588 - RNA, 19 nt, Homo sapiens
  misc_RNA (1)...(19): siRNA sense strand
agaaagcucuggaccuugu

SEQ ID NO: 1288589 - RNA, 19 nt, Homo sapiens
  misc_RNA (1)...(19): siRNA sense strand
gaugaagacaugaagagaa

SEQ ID NO: 1288590 - RNA, 19 nt, Homo sapiens
  misc_RNA (1)...(19): siRNA sense strand
gaucuucugucugaggaaa

SEQ ID NO: 1288591 - RNA, 19 nt, Homo sapiens
  misc_RNA (1)...(19): siRNA sense strand
gcuguggacugcuggaguu

SEQ ID NO: 1288592 - RNA, 19 nt, Homo sapiens
  misc_RNA (1)...(19): siRNA sense strand
gauaaauaccgaacauaca

SEQ ID NO: 1288593 - RNA, 19 nt, Homo sapiens
  misc_RNA (1)...(19): siRNA sense strand
aaaggaaguuugcuauugg

SEQ ID NO: 1288594 - RNA, 19 nt, Homo sapiens
  misc_RNA (1)...(19): siRNA sense strand
ccuaaggcauuaagagaug

SEQ ID NO: 1288595 - RNA, 19 nt, Homo sapiens
  misc_RNA (1)...(19): siRNA sense strand
ggcaauggaaccuuuguaa

SEQ ID NO: 1288596 - RNA, 19 nt, Homo sapiens
  misc_RNA (1)...(19): siRNA sense strand
gaagaucacaguggcaaug

SEQ ID NO: 1288597 - RNA, 19 nt, Homo sapiens
  misc_RNA (1)...(19): siRNA sense strand
augaagacaugaagagaaa

SEQ ID NO: 1288598 - RNA, 19 nt, Homo sapiens
  misc_RNA (1)...(19): siRNA sense strand
ucaagaaguuguugguagu

SEQ ID NO: 1288599 - RNA, 19 nt, Homo sapiens
  misc_RNA (1)...(19): siRNA sense strand
gaaguucuuguuucuguug

SEQ ID NO: 1288600 - RNA, 19 nt, Homo sapiens
  misc_RNA (1)...(19): siRNA sense strand
cucaggaacucuauucuau

SEQ ID NO: 1288601 - RNA, 19 nt, Homo sapiens
  misc_RNA (1)...(19): siRNA sense strand
gaugaucagucaguuuauc

SEQ ID NO: 1288602 - RNA, 19 nt, Homo sapiens
  misc_RNA (1)...(19): siRNA sense strand
ugaaagaagcuaccugcaa

SEQ ID NO: 1288603 - RNA, 19 nt, Homo sapiens
  misc_RNA (1)...(19): siRNA sense strand
uaagaaaguagccauaaag

SEQ ID NO: 1288604 - RNA, 19 nt, Homo sapiens
  misc_RNA (1)...(19): siRNA sense strand
ggggagagcuguuugacaa

SEQ ID NO: 1288605 - RNA, 19 nt, Homo sapiens
  misc_RNA (1)...(19): siRNA sense strand
gaucacaguggcaauggaa

SEQ ID NO: 1288606 - RNA, 19 nt, Homo sapiens
  misc_RNA (1)...(19): siRNA sense strand
gaagacaugaagagaaagu

SEQ ID NO: 1288607 - RNA, 19 nt, Homo sapiens
  misc_RNA (1)...(19): siRNA sense strand
gguauccaccuuucucuga

SEQ ID NO: 1288608 - RNA, 19 nt, Homo sapiens
  misc_RNA (1)...(19): siRNA sense strand
ucagggaaguggguccuaa

SEQ ID NO: 1288609 - RNA, 19 nt, Homo sapiens
  misc_RNA (1)...(19): siRNA sense strand
ccaccuuucucugagcaua

SEQ ID NO: 1288610 - RNA, 19 nt, Homo sapiens
  misc_RNA (1)...(19): siRNA sense strand
augagaaccuuauguggaa

SEQ ID NO: 1288611 - RNA, 19 nt, Homo sapiens
  misc_RNA (1)...(19): siRNA sense strand
gggaauaaacgccugaaag

SEQ ID NO: 1288612 - RNA, 19 nt, Homo sapiens
  misc_RNA (1)...(19): siRNA sense strand
aaacgccguccuuugaaua

SEQ ID NO: 1288613 - RNA, 19 nt, Homo sapiens
  misc_RNA (1)...(19): siRNA sense strand
gugaauauugcuuugauga

SEQ ID NO: 1288614 - RNA, 19 nt, Homo sapiens
  misc_RNA (1)...(19): siRNA sense strand
guagaugaucagucaguuu

SEQ ID NO: 1288615 - RNA, 19 nt, Homo sapiens
  misc_RNA (1)...(19): siRNA sense strand
gcacugucacuaagcagaa

SEQ ID NO: 1288616 - RNA, 19 nt, Homo sapiens
  misc_RNA (1)...(19): siRNA sense strand
acagauaaauaccgaacau

SEQ ID NO: 1288617 - RNA, 19 nt, Homo sapiens
  misc_RNA (1)...(19): siRNA sense strand
aaugacaacuacugguuug

SEQ ID NO: 1288618 - RNA, 19 nt, Homo sapiens
  misc_RNA (1)...(19): siRNA sense strand
cagaagaagccuuaagaca

SEQ ID NO: 1288619 - RNA, 19 nt, Homo sapiens
  misc_RNA (1)...(19): siRNA sense strand
gaggaaaacauguaagaaa

SEQ ID NO: 1288620 - RNA, 19 nt, Homo sapiens
  misc_RNA (1)...(19): siRNA sense strand
gaucagucaguuuauccua

SEQ ID NO: 1288621 - RNA, 19 nt, Homo sapiens
  misc_RNA (1)...(19): siRNA sense strand
aaaaggaaguuugcuauug

SEQ ID NO: 1288622 - RNA, 19 nt, Homo sapiens
  misc_RNA (1)...(19): siRNA sense strand
aauaaacgccugaaagaag

SEQ ID NO: 1288623 - RNA, 19 nt, Homo sapiens
  misc_RNA (1)...(19): siRNA sense strand
ugaaugacaacuacugguu

SEQ ID NO: 1288624 - RNA, 19 nt, Homo sapiens
  misc_RNA (1)...(19): siRNA sense strand
acccguggcuucaggauga

SEQ ID NO: 1288625 - RNA, 19 nt, Homo sapiens
  misc_RNA (1)...(19): siRNA sense strand
cugaaguucuuguuucugu

SEQ ID NO: 1288626 - RNA, 19 nt, Homo sapiens
  misc_RNA (1)...(19): siRNA sense strand
aaucauccuugcaucauca

SEQ ID NO: 1288627 - RNA, 19 nt, Homo sapiens
  misc_RNA (1)...(19): siRNA sense strand
uugcauacauagaagauca

SEQ ID NO: 1288628 - RNA, 19 nt, Homo sapiens
  misc_RNA (1)...(19): siRNA sense strand
agacaugaagagaaaguuu

SEQ ID NO: 1288629 - RNA, 19 nt, Homo sapiens
  misc_RNA (1)...(19): siRNA sense strand
ggacacugagcuccuuaga

SEQ ID NO: 1288630 - RNA, 19 nt, Homo sapiens
  misc_RNA (1)...(19): siRNA sense strand
caguuuauccuaaggcauu

SEQ ID NO: 1288631 - RNA, 19 nt, Homo sapiens
  misc_RNA (1)...(19): siRNA sense strand
caguggcaauggaaccuuu

SEQ ID NO: 1288632 - RNA, 19 nt, Homo sapiens
  misc_RNA (1)...(19): siRNA sense strand
ugugugugcugcuguguug

SEQ ID NO: 1288633 - RNA, 19 nt, Homo sapiens
  misc_RNA (1)...(19): siRNA sense strand
gaguuuaggaguuauucuu

SEQ ID NO: 1288634 - RNA, 19 nt, Homo sapiens
  misc_RNA (1)...(19): siRNA sense strand
gagcuuguagggaaaggaa

SEQ ID NO: 1288635 - RNA, 19 nt, Homo sapiens
  misc_RNA (1)...(19): siRNA sense strand
aaaguagccauaaagauca

SEQ ID NO: 1288636 - RNA, 19 nt, Homo sapiens
  misc_RNA (1)...(19): siRNA sense strand
uugccaaucuugaaugugu

SEQ ID NO: 1288637 - RNA, 19 nt, Homo sapiens
  misc_RNA (1)...(19): siRNA sense strand
uaccgaacauacagcaaga

SEQ ID NO: 1288638 - RNA, 19 nt, Homo sapiens
  misc_RNA (1)...(19): siRNA sense strand
ggaugaagacaugaagaga

SEQ ID NO: 1288639 - RNA, 19 nt, Homo sapiens
  misc_RNA (1)...(19): siRNA sense strand
guggacugcuggaguuuag

SEQ ID NO: 1288640 - RNA, 19 nt, Homo sapiens
  misc_RNA (1)...(19): siRNA sense strand
ccacucaggaacucuauuc

SEQ ID NO: 1288641 - RNA, 19 nt, Homo sapiens
  misc_RNA (1)...(19): siRNA sense strand
aaauugcacugucacuaag

SEQ ID NO: 1288642 - RNA, 19 nt, Homo sapiens
  misc_RNA (1)...(19): siRNA sense strand
ugaaauugcacugucacua

SEQ ID NO: 1288643 - RNA, 19 nt, Homo sapiens
  misc_RNA (1)...(19): siRNA sense strand
acucuuacauugcauacau

SEQ ID NO: 1288644 - RNA, 19 nt, Homo sapiens
  misc_RNA (1)...(19): siRNA sense strand
ggacugcuggaguuuagga

SEQ ID NO: 1288645 - RNA, 19 nt, Homo sapiens
  misc_RNA (1)...(19): siRNA sense strand
caaaagcugugaauauugc

SEQ ID NO: 1288646 - RNA, 19 nt, Homo sapiens
  misc_RNA (1)...(19): siRNA sense strand
ucaggaacucuauucuauu

SEQ ID NO: 1288647 - RNA, 19 nt, Homo sapiens
  misc_RNA (1)...(19): siRNA sense strand
uacgacagaagaagccuua

SEQ ID NO: 1288648 - RNA, 19 nt, Homo sapiens
  misc_RNA (1)...(19): siRNA sense strand
cgccugaaguucuuguuuc

SEQ ID NO: 1288649 - RNA, 19 nt, Homo sapiens
  misc_RNA (1)...(19): siRNA sense strand
uguaagaaaguagccauaa

SEQ ID NO: 1288650 - RNA, 19 nt, Homo sapiens
  misc_RNA (1)...(19): siRNA sense strand
gaaaacgccguccuuugaa

SEQ ID NO: 1288651 - RNA, 19 nt, Homo sapiens
  misc_RNA (1)...(19): siRNA sense strand
uugaaugugugaaugacaa

SEQ ID NO: 1288652 - RNA, 19 nt, Homo sapiens
  misc_RNA (1)...(19): siRNA sense strand
cagauaaauaccgaacaua

SEQ ID NO: 1288653 - RNA, 19 nt, Homo sapiens
  misc_RNA (1)...(19): siRNA sense strand
gaaccacugcugaaaagaa

SEQ ID NO: 1288654 - RNA, 19 nt, Homo sapiens
  misc_RNA (1)...(19): siRNA sense strand
gauccaaaggcacguuuua

SEQ ID NO: 1288655 - RNA, 19 nt, Homo sapiens
  misc_RNA (1)...(19): siRNA sense strand
ugaaguucuuguuucuguu

SEQ ID NO: 1288656 - RNA, 19 nt, Homo sapiens
  misc_RNA (1)...(19): siRNA sense strand
cuaaaucauccuugcauca

SEQ ID NO: 1288657 - RNA, 19 nt, Homo sapiens
  misc_RNA (1)...(19): siRNA sense strand
aagaaaguagccauaaaga

SEQ ID NO: 1288658 - RNA, 19 nt, Homo sapiens
  misc_RNA (1)...(19): siRNA sense strand
ucagucaguuuauccuaag

SEQ ID NO: 1288659 - RNA, 19 nt, Homo sapiens
  misc_RNA (1)...(19): siRNA sense strand
auacauagaagaucacagu

SEQ ID NO: 1288660 - RNA, 19 nt, Homo sapiens
  misc_RNA (1)...(19): siRNA sense strand
gcgccugaaguucuuguuu

SEQ ID NO: 1288661 - RNA, 19 nt, Homo sapiens
  misc_RNA (1)...(19): siRNA sense strand
acaaagcgcccagcugugu

SEQ ID NO: 1288662 - RNA, 19 nt, Homo sapiens
  misc_RNA (1)...(19): siRNA sense strand
gcccagccuucuacuaguc

SEQ ID NO: 1288663 - RNA, 19 nt, Homo sapiens
  misc_RNA (1)...(19): siRNA sense strand
ggagagagcacgauuuauu

SEQ ID NO: 1288664 - RNA, 19 nt, Homo sapiens
  misc_RNA (1)...(19): siRNA sense strand
agagaaacauguccauaua

SEQ ID NO: 1288665 - RNA, 19 nt, Homo sapiens
  misc_RNA (1)...(19): siRNA sense strand
cagaugcacuuuauuugua

SEQ ID NO: 1288666 - RNA, 19 nt, Homo sapiens
  misc_RNA (1)...(19): siRNA sense strand
ggacuuacgaguuugguua

SEQ ID NO: 1288667 - RNA, 19 nt, Homo sapiens
  misc_RNA (1)...(19): siRNA sense strand
aaacagauaucaggauuug

SEQ ID NO: 1288668 - RNA, 19 nt, Homo sapiens
  misc_RNA (1)...(19): siRNA sense strand
cuauggagcucauugguaa

SEQ ID NO: 1288669 - RNA, 19 nt, Homo sapiens
  misc_RNA (1)...(19): siRNA sense strand
aaacacaccuuuagugaag

SEQ ID NO: 1288670 - RNA, 19 nt, Homo sapiens
  misc_RNA (1)...(19): siRNA sense strand
gaacuuaaaggaucaguag

SEQ ID NO: 1288671 - RNA, 19 nt, Homo sapiens
  misc_RNA (1)...(19): siRNA sense strand
gaaaacagauaucaggauu

SEQ ID NO: 1288672 - RNA, 19 nt, Homo sapiens
  misc_RNA (1)...(19): siRNA sense strand
uaaaggaucaguagcaauu

SEQ ID NO: 1288673 - RNA, 19 nt, Homo sapiens
  misc_RNA (1)...(19): siRNA sense strand
aaaugggacuuacgaguuu

SEQ ID NO: 1288674 - RNA, 19 nt, Homo sapiens
  misc_RNA (1)...(19): siRNA sense strand
guuaucagaugcacuuuau

SEQ ID NO: 1288675 - RNA, 19 nt, Homo sapiens
  misc_RNA (1)...(19): siRNA sense strand
ugagauuggugaacgagua

SEQ ID NO: 1288676 - RNA, 19 nt, Homo sapiens
  misc_RNA (1)...(19): siRNA sense strand
gugaacgaguagauuauaa

SEQ ID NO: 1288677 - RNA, 19 nt, Homo sapiens
  misc_RNA (1)...(19): siRNA sense strand
gagagagcacgauuuauug

SEQ ID NO: 1288678 - RNA, 19 nt, Homo sapiens
  misc_RNA (1)...(19): siRNA sense strand
caaaugggacuuacgaguu

SEQ ID NO: 1288679 - RNA, 19 nt, Homo sapiens
  misc_RNA (1)...(19): siRNA sense strand
ggucauugcugugauuguu

SEQ ID NO: 1288680 - RNA, 19 nt, Homo sapiens
  misc_RNA (1)...(19): siRNA sense strand
ccagauccauuuucacuua

SEQ ID NO: 1288681 - RNA, 19 nt, Homo sapiens
  misc_RNA (1)...(19): siRNA sense strand
gaaggaauacuugacaguu

SEQ ID NO: 1288682 - RNA, 19 nt, Homo sapiens
  misc_RNA (1)...(19): siRNA sense strand
aaggaauacuugacaguuu

SEQ ID NO: 1288683 - RNA, 19 nt, Homo sapiens
  misc_RNA (1)...(19): siRNA sense strand
ucagaugacgccuguuaua

SEQ ID NO: 1288684 - RNA, 19 nt, Homo sapiens
  misc_RNA (1)...(19): siRNA sense strand
gaaaacacaccuuuaguga

SEQ ID NO: 1288685 - RNA, 19 nt, Homo sapiens
  misc_RNA (1)...(19): siRNA sense strand
gaugacgccuguuauagag

SEQ ID NO: 1288686 - RNA, 19 nt, Homo sapiens
  misc_RNA (1)...(19): siRNA sense strand
gagaaacauguccauauau

SEQ ID NO: 1288687 - RNA, 19 nt, Homo sapiens
  misc_RNA (1)...(19): siRNA sense strand
acgaguagauuauaagugu

SEQ ID NO: 1288688 - RNA, 19 nt, Homo sapiens
  misc_RNA (1)...(19): siRNA sense strand
cuacaaagcaacaguuaug

SEQ ID NO: 1288689 - RNA, 19 nt, Homo sapiens
  misc_RNA (1)...(19): siRNA sense strand
ccaccaacauuugaagcua

SEQ ID NO: 1288690 - RNA, 19 nt, Homo sapiens
  misc_RNA (1)...(19): siRNA sense strand
uauacgggauccuuuaaau

SEQ ID NO: 1288691 - RNA, 19 nt, Homo sapiens
  misc_RNA (1)...(19): siRNA sense strand
cgaguuugguuaucagaug

SEQ ID NO: 1288692 - RNA, 19 nt, Homo sapiens
  misc_RNA (1)...(19): siRNA sense strand
gaacgaguagauuauaagu

SEQ ID NO: 1288693 - RNA, 19 nt, Homo sapiens
  misc_RNA (1)...(19): siRNA sense strand
gugaggagccaccaacauu

SEQ ID NO: 1288694 - RNA, 19 nt, Homo sapiens
  misc_RNA (1)...(19): siRNA sense strand
gauggcagcgacacaauug

SEQ ID NO: 1288695 - RNA, 19 nt, Homo sapiens
  misc_RNA (1)...(19): siRNA sense strand
gcuauggagcucauuggua

SEQ ID NO: 1288696 - RNA, 19 nt, Homo sapiens
  misc_RNA (1)...(19): siRNA sense strand
gaggagccaccaacauuug

SEQ ID NO: 1288697 - RNA, 19 nt, Homo sapiens
  misc_RNA (1)...(19): siRNA sense strand
acacaccuuuagugaagua

SEQ ID NO: 1288698 - RNA, 19 nt, Homo sapiens
  misc_RNA (1)...(19): siRNA sense strand
ucucagaugacgccuguua

SEQ ID NO: 1288699 - RNA, 19 nt, Homo sapiens
  misc_RNA (1)...(19): siRNA sense strand
uagagaaacauguccauau

SEQ ID NO: 1288700 - RNA, 19 nt, Homo sapiens
  misc_RNA (1)...(19): siRNA sense strand
guuccaaagugucuuaaag

SEQ ID NO: 1288701 - RNA, 19 nt, Homo sapiens
  misc_RNA (1)...(19): siRNA sense strand
ggugaacgaguagauuaua

SEQ ID NO: 1288702 - RNA, 19 nt, Homo sapiens
  misc_RNA (1)...(19): siRNA sense strand
gaaguagaaguauuugagu

SEQ ID NO: 1288703 - RNA, 19 nt, Homo sapiens
  misc_RNA (1)...(19): siRNA sense strand
gaaacauguccauauauac

SEQ ID NO: 1288704 - RNA, 19 nt, Homo sapiens
  misc_RNA (1)...(19): siRNA sense strand
ugacgccuguuauagagaa

SEQ ID NO: 1288705 - RNA, 19 nt, Homo sapiens
  misc_RNA (1)...(19): siRNA sense strand
cgaguagauuauaagugua

SEQ ID NO: 1288706 - RNA, 19 nt, Homo sapiens
  misc_RNA (1)...(19): siRNA sense strand
gcacuuuauuuguaaugag

SEQ ID NO: 1288707 - RNA, 19 nt, Homo sapiens
  misc_RNA (1)...(19): siRNA sense strand
guagaaguauuugaguauc

SEQ ID NO: 1288708 - RNA, 19 nt, Homo sapiens
  misc_RNA (1)...(19): siRNA sense strand
guauuugaguaucuugaug

SEQ ID NO: 1288709 - RNA, 19 nt, Homo sapiens
  misc_RNA (1)...(19): siRNA sense strand
aggaauacuugacaguuug

SEQ ID NO: 1288710 - RNA, 19 nt, Homo sapiens
  misc_RNA (1)...(19): siRNA sense strand
ccaaaacccuacuaugaga

SEQ ID NO: 1288711 - RNA, 19 nt, Homo sapiens
  misc_RNA (1)...(19): siRNA sense strand
aguguaaaguggucaaaug

SEQ ID NO: 1288712 - RNA, 19 nt, Homo sapiens
  misc_RNA (1)...(19): siRNA sense strand
ccacccauacuauuuguga

SEQ ID NO: 1288713 - RNA, 19 nt, Homo sapiens
  misc_RNA (1)...(19): siRNA sense strand
caccaacauuugaagcuau

SEQ ID NO: 1288714 - RNA, 19 nt, Homo sapiens
  misc_RNA (1)...(19): siRNA sense strand
uuggagagagcacgauuua

SEQ ID NO: 1288715 - RNA, 19 nt, Homo sapiens
  misc_RNA (1)...(19): siRNA sense strand
gguuaucagaugcacuuua

SEQ ID NO: 1288716 - RNA, 19 nt, Homo sapiens
  misc_RNA (1)...(19): siRNA sense strand
ugaggagccaccaacauuu

SEQ ID NO: 1288717 - RNA, 19 nt, Homo sapiens
  misc_RNA (1)...(19): siRNA sense strand
ggaaggaauacuugacagu

SEQ ID NO: 1288718 - RNA, 19 nt, Homo sapiens
  misc_RNA (1)...(19): siRNA sense strand
gaggaaggaauacuugaca

SEQ ID NO: 1288719 - RNA, 19 nt, Homo sapiens
  misc_RNA (1)...(19): siRNA sense strand
ccaguuccaaagugucuua

SEQ ID NO: 1288720 - RNA, 19 nt, Homo sapiens
  misc_RNA (1)...(19): siRNA sense strand
ugaguaucuugaugcagua

SEQ ID NO: 1288721 - RNA, 19 nt, Homo sapiens
  misc_RNA (1)...(19): siRNA sense strand
caccuuuagugaaguagaa

SEQ ID NO: 1288722 - RNA, 19 nt, Homo sapiens
  misc_RNA (1)...(19): siRNA sense strand
acagauaucaggauuugga

SEQ ID NO: 1288723 - RNA, 19 nt, Homo sapiens
  misc_RNA (1)...(19): siRNA sense strand
ucauugcugugauuguuau

SEQ ID NO: 1288724 - RNA, 19 nt, Homo sapiens
  misc_RNA (1)...(19): siRNA sense strand
ucagaugcacuuuauuugu

SEQ ID NO: 1288725 - RNA, 19 nt, Homo sapiens
  misc_RNA (1)...(19): siRNA sense strand
gugcugcuccagaguguaa

SEQ ID NO: 1288726 - RNA, 19 nt, Homo sapiens
  misc_RNA (1)...(19): siRNA sense strand
ggaaaacacaccuuuagug

SEQ ID NO: 1288727 - RNA, 19 nt, Homo sapiens
  misc_RNA (1)...(19): siRNA sense strand
aaggaucaguagcaauuug

SEQ ID NO: 1288728 - RNA, 19 nt, Homo sapiens
  misc_RNA (1)...(19): siRNA sense strand
uauauacgggauccuuuaa

SEQ ID NO: 1288729 - RNA, 19 nt, Homo sapiens
  misc_RNA (1)...(19): siRNA sense strand
ugaaguagaaguauuugag

SEQ ID NO: 1288730 - RNA, 19 nt, Homo sapiens
  misc_RNA (1)...(19): siRNA sense strand
cuugacaguuuggauguuu

SEQ ID NO: 1288731 - RNA, 19 nt, Homo sapiens
  misc_RNA (1)...(19): siRNA sense strand
cauauauacgggauccuuu

SEQ ID NO: 1288732 - RNA, 19 nt, Homo sapiens
  misc_RNA (1)...(19): siRNA sense strand
auauauacgggauccuuua

SEQ ID NO: 1288733 - RNA, 19 nt, Homo sapiens
  misc_RNA (1)...(19): siRNA sense strand
cuuaaaggaucaguagcaa

SEQ ID NO: 1288734 - RNA, 19 nt, Homo sapiens
  misc_RNA (1)...(19): siRNA sense strand
uaaaccugaggaaggaaua

SEQ ID NO: 1288735 - RNA, 19 nt, Homo sapiens
  misc_RNA (1)...(19): siRNA sense strand
agaugacgccuguuauaga

SEQ ID NO: 1288736 - RNA, 19 nt, Homo sapiens
  misc_RNA (1)...(19): siRNA sense strand
ugugauuguuauugccaua

SEQ ID NO: 1288737 - RNA, 19 nt, Homo sapiens
  misc_RNA (1)...(19): siRNA sense strand
gagagcacgauuuauugug

SEQ ID NO: 1288738 - RNA, 19 nt, Homo sapiens
  misc_RNA (1)...(19): siRNA sense strand
gaaguauuugaguaucuug

SEQ ID NO: 1288739 - RNA, 19 nt, Homo sapiens
  misc_RNA (1)...(19): siRNA sense strand
ggcuaccugucucagauga

SEQ ID NO: 1288740 - RNA, 19 nt, Homo sapiens
  misc_RNA (1)...(19): siRNA sense strand
gauaucaggauuuggaaaa

SEQ ID NO: 1288741 - RNA, 19 nt, Homo sapiens
  misc_RNA (1)...(19): siRNA sense strand
ccucuugccacccauacua

SEQ ID NO: 1288742 - RNA, 19 nt, Homo sapiens
  misc_RNA (1)...(19): siRNA sense strand
ccaugguguugcugcugua

SEQ ID NO: 1288743 - RNA, 19 nt, Homo sapiens
  misc_RNA (1)...(19): siRNA sense strand
cagaugacgccuguuauag

SEQ ID NO: 1288744 - RNA, 19 nt, Homo sapiens
  misc_RNA (1)...(19): siRNA sense strand
uuggugaacgaguagauua

SEQ ID NO: 1288745 - RNA, 19 nt, Homo sapiens
  misc_RNA (1)...(19): siRNA sense strand
gucauugcugugauuguua

SEQ ID NO: 1288746 - RNA, 19 nt, Homo sapiens
  misc_RNA (1)...(19): siRNA sense strand
ggagccaccaacauuugaa

SEQ ID NO: 1288747 - RNA, 19 nt, Homo sapiens
  misc_RNA (1)...(19): siRNA sense strand
gcgcuuuccuggguugcuu

SEQ ID NO: 1288748 - RNA, 19 nt, Homo sapiens
  misc_RNA (1)...(19): siRNA sense strand
uacuacaaagcaacaguua

SEQ ID NO: 1288749 - RNA, 19 nt, Homo sapiens
  misc_RNA (1)...(19): siRNA sense strand
cuugaugcaguaacuuaua

SEQ ID NO: 1288750 - RNA, 19 nt, Homo sapiens
  misc_RNA (1)...(19): siRNA sense strand
aaacauguccauauauacg

SEQ ID NO: 1288751 - RNA, 19 nt, Homo sapiens
  misc_RNA (1)...(19): siRNA sense strand
guguaaaguggucaaaugu

SEQ ID NO: 1288752 - RNA, 19 nt, Homo sapiens
  misc_RNA (1)...(19): siRNA sense strand
cuuacgaguuugguuauca

SEQ ID NO: 1288753 - RNA, 19 nt, Homo sapiens
  misc_RNA (1)...(19): siRNA sense strand
uacgggauccuuuaaaugg

SEQ ID NO: 1288754 - RNA, 19 nt, Homo sapiens
  misc_RNA (1)...(19): siRNA sense strand
aaccaaaacccuacuauga

SEQ ID NO: 1288755 - RNA, 19 nt, Homo sapiens
  misc_RNA (1)...(19): siRNA sense strand
cccaauaugugaaaagguu

SEQ ID NO: 1288756 - RNA, 19 nt, Homo sapiens
  misc_RNA (1)...(19): siRNA sense strand
cgauggcagcgacacaauu

SEQ ID NO: 1288757 - RNA, 19 nt, Homo sapiens
  misc_RNA (1)...(19): siRNA sense strand
gauccauuuucacuuauug

SEQ ID NO: 1288758 - RNA, 19 nt, Homo sapiens
  misc_RNA (1)...(19): siRNA sense strand
uugaugcaguaacuuauag

SEQ ID NO: 1288759 - RNA, 19 nt, Homo sapiens
  misc_RNA (1)...(19): siRNA sense strand
guaucuugaugcaguaacu

SEQ ID NO: 1288760 - RNA, 19 nt, Homo sapiens
  misc_RNA (1)...(19): siRNA sense strand
caacauuugaagcuaugga

SEQ ID NO: 1288761 - RNA, 19 nt, Homo sapiens
  misc_RNA (1)...(19): siRNA sense strand
gagauuggugaacgaguag

SEQ ID NO: 1288762 - RNA, 19 nt, Homo sapiens
  misc_RNA (1)...(19): siRNA sense strand
ggagagagcacgauuuauu

SEQ ID NO: 1288763 - RNA, 19 nt, Homo sapiens
  misc_RNA (1)...(19): siRNA sense strand
agagaaacauguccauaua

SEQ ID NO: 1288764 - RNA, 19 nt, Homo sapiens
  misc_RNA (1)...(19): siRNA sense strand
cagaugcacuuuauuugua

SEQ ID NO: 1288765 - RNA, 19 nt, Homo sapiens
  misc_RNA (1)...(19): siRNA sense strand
ggacuuacgaguuugguua

SEQ ID NO: 1288766 - RNA, 19 nt, Homo sapiens
  misc_RNA (1)...(19): siRNA sense strand
aaacagauaucaggauuug

SEQ ID NO: 1288767 - RNA, 19 nt, Homo sapiens
  misc_RNA (1)...(19): siRNA sense strand
cuauggagcucauugguaa

SEQ ID NO: 1288768 - RNA, 19 nt, Homo sapiens
  misc_RNA (1)...(19): siRNA sense strand
aaacacaccuuuagugaag

SEQ ID NO: 1288769 - RNA, 19 nt, Homo sapiens
  misc_RNA (1)...(19): siRNA sense strand
gaacuuaaaggaucaguag

SEQ ID NO: 1288770 - RNA, 19 nt, Homo sapiens
  misc_RNA (1)...(19): siRNA sense strand
gaaaacagauaucaggauu

SEQ ID NO: 1288771 - RNA, 19 nt, Homo sapiens
  misc_RNA (1)...(19): siRNA sense strand
uaaaggaucaguagcaauu

SEQ ID NO: 1288772 - RNA, 19 nt, Homo sapiens
  misc_RNA (1)...(19): siRNA sense strand
aaaugggacuuacgaguuu

SEQ ID NO: 1288773 - RNA, 19 nt, Homo sapiens
  misc_RNA (1)...(19): siRNA sense strand
guuaucagaugcacuuuau

SEQ ID NO: 1288774 - RNA, 19 nt, Homo sapiens
  misc_RNA (1)...(19): siRNA sense strand
gagcugaauaugccacuua

SEQ ID NO: 1288775 - RNA, 19 nt, Homo sapiens
  misc_RNA (1)...(19): siRNA sense strand
ugagauuggugaacgagua

SEQ ID NO: 1288776 - RNA, 19 nt, Homo sapiens
  misc_RNA (1)...(19): siRNA sense strand
gugaacgaguagauuauaa

SEQ ID NO: 1288777 - RNA, 19 nt, Homo sapiens
  misc_RNA (1)...(19): siRNA sense strand
gagagagcacgauuuauug

SEQ ID NO: 1288778 - RNA, 19 nt, Homo sapiens
  misc_RNA (1)...(19): siRNA sense strand
caaaugggacuuacgaguu

SEQ ID NO: 1288779 - RNA, 19 nt, Homo sapiens
  misc_RNA (1)...(19): siRNA sense strand
ggucauugcugugauuguu

SEQ ID NO: 1288780 - RNA, 19 nt, Homo sapiens
  misc_RNA (1)...(19): siRNA sense strand
ccagauccauuuucacuua

SEQ ID NO: 1288781 - RNA, 19 nt, Homo sapiens
  misc_RNA (1)...(19): siRNA sense strand
gaaggaauacuugacaguu

SEQ ID NO: 1288782 - RNA, 19 nt, Homo sapiens
  misc_RNA (1)...(19): siRNA sense strand
aaggaauacuugacaguuu

SEQ ID NO: 1288783 - RNA, 19 nt, Homo sapiens
  misc_RNA (1)...(19): siRNA sense strand
ucagaugacgccuguuaua

SEQ ID NO: 1288784 - RNA, 19 nt, Homo sapiens
  misc_RNA (1)...(19): siRNA sense strand
gaaaacacaccuuuaguga

SEQ ID NO: 1288785 - RNA, 19 nt, Homo sapiens
  misc_RNA (1)...(19): siRNA sense strand
gaugacgccuguuauagag

SEQ ID NO: 1288786 - RNA, 19 nt, Homo sapiens
  misc_RNA (1)...(19): siRNA sense strand
gagaaacauguccauauau

SEQ ID NO: 1288787 - RNA, 19 nt, Homo sapiens
  misc_RNA (1)...(19): siRNA sense strand
ccacuuaccagacuaaauc

SEQ ID NO: 1288788 - RNA, 19 nt, Homo sapiens
  misc_RNA (1)...(19): siRNA sense strand
acgaguagauuauaagugu

SEQ ID NO: 1288789 - RNA, 19 nt, Homo sapiens
  misc_RNA (1)...(19): siRNA sense strand
cuacaaagcaacaguuaug

SEQ ID NO: 1288790 - RNA, 19 nt, Homo sapiens
  misc_RNA (1)...(19): siRNA sense strand
ccaccaacauuugaagcua

SEQ ID NO: 1288791 - RNA, 19 nt, Homo sapiens
  misc_RNA (1)...(19): siRNA sense strand
uauacgggauccuuuaaau

SEQ ID NO: 1288792 - RNA, 19 nt, Homo sapiens
  misc_RNA (1)...(19): siRNA sense strand
cgaguuugguuaucagaug

SEQ ID NO: 1288793 - RNA, 19 nt, Homo sapiens
  misc_RNA (1)...(19): siRNA sense strand
gaacgaguagauuauaagu

SEQ ID NO: 1288794 - RNA, 19 nt, Homo sapiens
  misc_RNA (1)...(19): siRNA sense strand
gugaggagccaccaacauu

SEQ ID NO: 1288795 - RNA, 19 nt, Homo sapiens
  misc_RNA (1)...(19): siRNA sense strand
gauggcagcgacacaauug

SEQ ID NO: 1288796 - RNA, 19 nt, Homo sapiens
  misc_RNA (1)...(19): siRNA sense strand
ucucagaugacgccuguua

SEQ ID NO: 1288797 - RNA, 19 nt, Homo sapiens
  misc_RNA (1)...(19): siRNA sense strand
gaggagccaccaacauuug

SEQ ID NO: 1288798 - RNA, 19 nt, Homo sapiens
  misc_RNA (1)...(19): siRNA sense strand
gcuauggagcucauuggua

SEQ ID NO: 1288799 - RNA, 19 nt, Homo sapiens
  misc_RNA (1)...(19): siRNA sense strand
acacaccuuuagugaagua

SEQ ID NO: 1288800 - RNA, 19 nt, Homo sapiens
  misc_RNA (1)...(19): siRNA sense strand
uagagaaacauguccauau

SEQ ID NO: 1288801 - RNA, 19 nt, Homo sapiens
  misc_RNA (1)...(19): siRNA sense strand
ggugaacgaguagauuaua

SEQ ID NO: 1288802 - RNA, 19 nt, Homo sapiens
  misc_RNA (1)...(19): siRNA sense strand
gaaguagaaguauuugagu

SEQ ID NO: 1288803 - RNA, 19 nt, Homo sapiens
  misc_RNA (1)...(19): siRNA sense strand
gaaacauguccauauauac

SEQ ID NO: 1288804 - RNA, 19 nt, Homo sapiens
  misc_RNA (1)...(19): siRNA sense strand
ugacgccuguuauagagaa

SEQ ID NO: 1288805 - RNA, 19 nt, Homo sapiens
  misc_RNA (1)...(19): siRNA sense strand
cgaguagauuauaagugua

SEQ ID NO: 1288806 - RNA, 19 nt, Homo sapiens
  misc_RNA (1)...(19): siRNA sense strand
gcacuuuauuuguaaugag

SEQ ID NO: 1288807 - RNA, 19 nt, Homo sapiens
  misc_RNA (1)...(19): siRNA sense strand
guagaaguauuugaguauc

SEQ ID NO: 1288808 - RNA, 19 nt, Homo sapiens
  misc_RNA (1)...(19): siRNA sense strand
guauuugaguaucuugaug

SEQ ID NO: 1288809 - RNA, 19 nt, Homo sapiens
  misc_RNA (1)...(19): siRNA sense strand
aggaauacuugacaguuug

SEQ ID NO: 1288810 - RNA, 19 nt, Homo sapiens
  misc_RNA (1)...(19): siRNA sense strand
ccaaaacccuacuaugaga

SEQ ID NO: 1288811 - RNA, 19 nt, Homo sapiens
  misc_RNA (1)...(19): siRNA sense strand
aguguaaaguggucaaaug

SEQ ID NO: 1288812 - RNA, 19 nt, Homo sapiens
  misc_RNA (1)...(19): siRNA sense strand
ccacccauacuauuuguga

SEQ ID NO: 1288813 - RNA, 19 nt, Homo sapiens
  misc_RNA (1)...(19): siRNA sense strand
uuggagagagcacgauuua

SEQ ID NO: 1288814 - RNA, 19 nt, Homo sapiens
  misc_RNA (1)...(19): siRNA sense strand
gguuaucagaugcacuuua

SEQ ID NO: 1288815 - RNA, 19 nt, Homo sapiens
  misc_RNA (1)...(19): siRNA sense strand
caccaacauuugaagcuau

SEQ ID NO: 1288816 - RNA, 19 nt, Homo sapiens
  misc_RNA (1)...(19): siRNA sense strand
ugaggagccaccaacauuu

SEQ ID NO: 1288817 - RNA, 19 nt, Homo sapiens
  misc_RNA (1)...(19): siRNA sense strand
ggaaggaauacuugacagu

SEQ ID NO: 1288818 - RNA, 19 nt, Homo sapiens
  misc_RNA (1)...(19): siRNA sense strand
gaggaaggaauacuugaca

SEQ ID NO: 1288819 - RNA, 19 nt, Homo sapiens
  misc_RNA (1)...(19): siRNA sense strand
ugaguaucuugaugcagua

SEQ ID NO: 1288820 - RNA, 19 nt, Homo sapiens
  misc_RNA (1)...(19): siRNA sense strand
caccuuuagugaaguagaa

SEQ ID NO: 1288821 - RNA, 19 nt, Homo sapiens
  misc_RNA (1)...(19): siRNA sense strand
acagauaucaggauuugga

SEQ ID NO: 1288822 - RNA, 19 nt, Homo sapiens
  misc_RNA (1)...(19): siRNA sense strand
ucauugcugugauuguuau

SEQ ID NO: 1288823 - RNA, 19 nt, Homo sapiens
  misc_RNA (1)...(19): siRNA sense strand
ucagaugcacuuuauuugu

SEQ ID NO: 1288824 - RNA, 19 nt, Homo sapiens
  misc_RNA (1)...(19): siRNA sense strand
gugcugcuccagaguguaa

SEQ ID NO: 1288825 - RNA, 19 nt, Homo sapiens
  misc_RNA (1)...(19): siRNA sense strand
ggaaaacacaccuuuagug

SEQ ID NO: 1288826 - RNA, 19 nt, Homo sapiens
  misc_RNA (1)...(19): siRNA sense strand
aaggaucaguagcaauuug

SEQ ID NO: 1288827 - RNA, 19 nt, Homo sapiens
  misc_RNA (1)...(19): siRNA sense strand
uauauacgggauccuuuaa

SEQ ID NO: 1288828 - RNA, 19 nt, Homo sapiens
  misc_RNA (1)...(19): siRNA sense strand
ugaaguagaaguauuugag

SEQ ID NO: 1288829 - RNA, 19 nt, Homo sapiens
  misc_RNA (1)...(19): siRNA sense strand
cuugacaguuuggauguuu

SEQ ID NO: 1288830 - RNA, 19 nt, Homo sapiens
  misc_RNA (1)...(19): siRNA sense strand
cauauauacgggauccuuu

SEQ ID NO: 1288831 - RNA, 19 nt, Homo sapiens
  misc_RNA (1)...(19): siRNA sense strand
auauauacgggauccuuua

SEQ ID NO: 1288832 - RNA, 19 nt, Homo sapiens
  misc_RNA (1)...(19): siRNA sense strand
cuuaaaggaucaguagcaa

SEQ ID NO: 1288833 - RNA, 19 nt, Homo sapiens
  misc_RNA (1)...(19): siRNA sense strand
uaaaccugaggaaggaaua

SEQ ID NO: 1288834 - RNA, 19 nt, Homo sapiens
  misc_RNA (1)...(19): siRNA sense strand
agaugacgccuguuauaga

SEQ ID NO: 1288835 - RNA, 19 nt, Homo sapiens
  misc_RNA (1)...(19): siRNA sense strand
ugugauuguuauugccaua

SEQ ID NO: 1288836 - RNA, 19 nt, Homo sapiens
  misc_RNA (1)...(19): siRNA sense strand
gagagcacgauuuauugug

SEQ ID NO: 1288837 - RNA, 19 nt, Homo sapiens
  misc_RNA (1)...(19): siRNA sense strand
gaaguauuugaguaucuug

SEQ ID NO: 1288838 - RNA, 19 nt, Homo sapiens
  misc_RNA (1)...(19): siRNA sense strand
ggcuaccugucucagauga

SEQ ID NO: 1288839 - RNA, 19 nt, Homo sapiens
  misc_RNA (1)...(19): siRNA sense strand
gauaucaggauuuggaaaa

SEQ ID NO: 1288840 - RNA, 19 nt, Homo sapiens
  misc_RNA (1)...(19): siRNA sense strand
ccucuugccacccauacua

SEQ ID NO: 1288841 - RNA, 19 nt, Homo sapiens
  misc_RNA (1)...(19): siRNA sense strand
ccaugguguugcugcugua

SEQ ID NO: 1288842 - RNA, 19 nt, Homo sapiens
  misc_RNA (1)...(19): siRNA sense strand
cagaugacgccuguuauag

SEQ ID NO: 1288843 - RNA, 19 nt, Homo sapiens
  misc_RNA (1)...(19): siRNA sense strand
cagaugguggagcugaaua

SEQ ID NO: 1288844 - RNA, 19 nt, Homo sapiens
  misc_RNA (1)...(19): siRNA sense strand
uuggugaacgaguagauua

SEQ ID NO: 1288845 - RNA, 19 nt, Homo sapiens
  misc_RNA (1)...(19): siRNA sense strand
gucauugcugugauuguua

SEQ ID NO: 1288846 - RNA, 19 nt, Homo sapiens
  misc_RNA (1)...(19): siRNA sense strand
ggagccaccaacauuugaa

SEQ ID NO: 1288847 - RNA, 19 nt, Homo sapiens
  misc_RNA (1)...(19): siRNA sense strand
gcgcuuuccuggguugcuu

SEQ ID NO: 1288848 - RNA, 19 nt, Homo sapiens
  misc_RNA (1)...(19): siRNA sense strand
uacuacaaagcaacaguua

SEQ ID NO: 1288849 - RNA, 19 nt, Homo sapiens
  misc_RNA (1)...(19): siRNA sense strand
cuugaugcaguaacuuaua

SEQ ID NO: 1288850 - RNA, 19 nt, Homo sapiens
  misc_RNA (1)...(19): siRNA sense strand
aaacauguccauauauacg

SEQ ID NO: 1288851 - RNA, 19 nt, Homo sapiens
  misc_RNA (1)...(19): siRNA sense strand
guguaaaguggucaaaugu

SEQ ID NO: 1288852 - RNA, 19 nt, Homo sapiens
  misc_RNA (1)...(19): siRNA sense strand
cuuacgaguuugguuauca

SEQ ID NO: 1288853 - RNA, 19 nt, Homo sapiens
  misc_RNA (1)...(19): siRNA sense strand
uacgggauccuuuaaaugg

SEQ ID NO: 1288854 - RNA, 19 nt, Homo sapiens
  misc_RNA (1)...(19): siRNA sense strand
gcagaugguggagcugaau

SEQ ID NO: 1288855 - RNA, 19 nt, Homo sapiens
  misc_RNA (1)...(19): siRNA sense strand
aaccaaaacccuacuauga

SEQ ID NO: 1288856 - RNA, 19 nt, Homo sapiens
  misc_RNA (1)...(19): siRNA sense strand
cccaauaugugaaaagguu

SEQ ID NO: 1288857 - RNA, 19 nt, Homo sapiens
  misc_RNA (1)...(19): siRNA sense strand
ggagcugaauaugccacuu

SEQ ID NO: 1288858 - RNA, 19 nt, Homo sapiens
  misc_RNA (1)...(19): siRNA sense strand
cgauggcagcgacacaauu

SEQ ID NO: 1288859 - RNA, 19 nt, Homo sapiens
  misc_RNA (1)...(19): siRNA sense strand
gauccauuuucacuuauug

SEQ ID NO: 1288860 - RNA, 19 nt, Homo sapiens
  misc_RNA (1)...(19): siRNA sense strand
uugaugcaguaacuuauag

SEQ ID NO: 1288861 - RNA, 19 nt, Homo sapiens
  misc_RNA (1)...(19): siRNA sense strand
guaucuugaugcaguaacu

SEQ ID NO: 1288862 - RNA, 19 nt, Homo sapiens
  misc_RNA (1)...(19): siRNA sense strand
ggagagagcacgauuuauu

SEQ ID NO: 1288863 - RNA, 19 nt, Homo sapiens
  misc_RNA (1)...(19): siRNA sense strand
agagaaacauguccauaua

SEQ ID NO: 1288864 - RNA, 19 nt, Homo sapiens
  misc_RNA (1)...(19): siRNA sense strand
cagaugcacuuuauuugua

SEQ ID NO: 1288865 - RNA, 19 nt, Homo sapiens
  misc_RNA (1)...(19): siRNA sense strand
ggacuuacgaguuugguua

SEQ ID NO: 1288866 - RNA, 19 nt, Homo sapiens
  misc_RNA (1)...(19): siRNA sense strand
aaacagauaucaggauuug

SEQ ID NO: 1288867 - RNA, 19 nt, Homo sapiens
  misc_RNA (1)...(19): siRNA sense strand
cuauggagcucauugguaa

SEQ ID NO: 1288868 - RNA, 19 nt, Homo sapiens
  misc_RNA (1)...(19): siRNA sense strand
aaacacaccuuuagugaag

SEQ ID NO: 1288869 - RNA, 19 nt, Homo sapiens
  misc_RNA (1)...(19): siRNA sense strand
gaacuuaaaggaucaguag

SEQ ID NO: 1288870 - RNA, 19 nt, Homo sapiens
  misc_RNA (1)...(19): siRNA sense strand
gaaaacagauaucaggauu

SEQ ID NO: 1288871 - RNA, 19 nt, Homo sapiens
  misc_RNA (1)...(19): siRNA sense strand
uaaaggaucaguagcaauu

SEQ ID NO: 1288872 - RNA, 19 nt, Homo sapiens
  misc_RNA (1)...(19): siRNA sense strand
aaaugggacuuacgaguuu

SEQ ID NO: 1288873 - RNA, 19 nt, Homo sapiens
  misc_RNA (1)...(19): siRNA sense strand
guuaucagaugcacuuuau

SEQ ID NO: 1288874 - RNA, 19 nt, Homo sapiens
  misc_RNA (1)...(19): siRNA sense strand
gagcugaauaugccacuua

SEQ ID NO: 1288875 - RNA, 19 nt, Homo sapiens
  misc_RNA (1)...(19): siRNA sense strand
gagcagagaggcugaauag

SEQ ID NO: 1288876 - RNA, 19 nt, Homo sapiens
  misc_RNA (1)...(19): siRNA sense strand
ugagauuggugaacgagua

SEQ ID NO: 1288877 - RNA, 19 nt, Homo sapiens
  misc_RNA (1)...(19): siRNA sense strand
gugaacgaguagauuauaa

SEQ ID NO: 1288878 - RNA, 19 nt, Homo sapiens
  misc_RNA (1)...(19): siRNA sense strand
gagagagcacgauuuauug

SEQ ID NO: 1288879 - RNA, 19 nt, Homo sapiens
  misc_RNA (1)...(19): siRNA sense strand
caaaugggacuuacgaguu

SEQ ID NO: 1288880 - RNA, 19 nt, Homo sapiens
  misc_RNA (1)...(19): siRNA sense strand
ggucauugcugugauuguu

SEQ ID NO: 1288881 - RNA, 19 nt, Homo sapiens
  misc_RNA (1)...(19): siRNA sense strand
ccagauccauuuucacuua

SEQ ID NO: 1288882 - RNA, 19 nt, Homo sapiens
  misc_RNA (1)...(19): siRNA sense strand
gaaggaauacuugacaguu

SEQ ID NO: 1288883 - RNA, 19 nt, Homo sapiens
  misc_RNA (1)...(19): siRNA sense strand
aaggaauacuugacaguuu

SEQ ID NO: 1288884 - RNA, 19 nt, Homo sapiens
  misc_RNA (1)...(19): siRNA sense strand
ucagaugacgccuguuaua

SEQ ID NO: 1288885 - RNA, 19 nt, Homo sapiens
  misc_RNA (1)...(19): siRNA sense strand
gaaaacacaccuuuaguga

SEQ ID NO: 1288886 - RNA, 19 nt, Homo sapiens
  misc_RNA (1)...(19): siRNA sense strand
gaugacgccuguuauagag

SEQ ID NO: 1288887 - RNA, 19 nt, Homo sapiens
  misc_RNA (1)...(19): siRNA sense strand
gagaaacauguccauauau

SEQ ID NO: 1288888 - RNA, 19 nt, Homo sapiens
  misc_RNA (1)...(19): siRNA sense strand
ccacuuaccagacuaaauc

SEQ ID NO: 1288889 - RNA, 19 nt, Homo sapiens
  misc_RNA (1)...(19): siRNA sense strand
acgaguagauuauaagugu

SEQ ID NO: 1288890 - RNA, 19 nt, Homo sapiens
  misc_RNA (1)...(19): siRNA sense strand
cuacaaagcaacaguuaug

SEQ ID NO: 1288891 - RNA, 19 nt, Homo sapiens
  misc_RNA (1)...(19): siRNA sense strand
ccaccaacauuugaagcua

SEQ ID NO: 1288892 - RNA, 19 nt, Homo sapiens
  misc_RNA (1)...(19): siRNA sense strand
uauacgggauccuuuaaau

SEQ ID NO: 1288893 - RNA, 19 nt, Homo sapiens
  misc_RNA (1)...(19): siRNA sense strand
cgaguuugguuaucagaug

SEQ ID NO: 1288894 - RNA, 19 nt, Homo sapiens
  misc_RNA (1)...(19): siRNA sense strand
gaacgaguagauuauaagu

SEQ ID NO: 1288895 - RNA, 19 nt, Homo sapiens
  misc_RNA (1)...(19): siRNA sense strand
gugaggagccaccaacauu

SEQ ID NO: 1288896 - RNA, 19 nt, Homo sapiens
  misc_RNA (1)...(19): siRNA sense strand
gauggcagcgacacaauug

SEQ ID NO: 1288897 - RNA, 19 nt, Homo sapiens
  misc_RNA (1)...(19): siRNA sense strand
ucucagaugacgccuguua

SEQ ID NO: 1288898 - RNA, 19 nt, Homo sapiens
  misc_RNA (1)...(19): siRNA sense strand
acacaccuuuagugaagua

SEQ ID NO: 1288899 - RNA, 19 nt, Homo sapiens
  misc_RNA (1)...(19): siRNA sense strand
gcuauggagcucauuggua

SEQ ID NO: 1288900 - RNA, 19 nt, Homo sapiens
  misc_RNA (1)...(19): siRNA sense strand
gaggagccaccaacauuug

SEQ ID NO: 1288901 - RNA, 19 nt, Homo sapiens
  misc_RNA (1)...(19): siRNA sense strand
uagagaaacauguccauau

SEQ ID NO: 1288902 - RNA, 19 nt, Homo sapiens
  misc_RNA (1)...(19): siRNA sense strand
guuccaaagugucuuaaag

SEQ ID NO: 1288903 - RNA, 19 nt, Homo sapiens
  misc_RNA (1)...(19): siRNA sense strand
ggugaacgaguagauuaua

SEQ ID NO: 1288904 - RNA, 19 nt, Homo sapiens
  misc_RNA (1)...(19): siRNA sense strand
gaaguagaaguauuugagu

SEQ ID NO: 1288905 - RNA, 19 nt, Homo sapiens
  misc_RNA (1)...(19): siRNA sense strand
gaaacauguccauauauac

SEQ ID NO: 1288906 - RNA, 19 nt, Homo sapiens
  misc_RNA (1)...(19): siRNA sense strand
ugacgccuguuauagagaa

SEQ ID NO: 1288907 - RNA, 19 nt, Homo sapiens
  misc_RNA (1)...(19): siRNA sense strand
cgaguagauuauaagugua

SEQ ID NO: 1288908 - RNA, 19 nt, Homo sapiens
  misc_RNA (1)...(19): siRNA sense strand
gcacuuuauuuguaaugag

SEQ ID NO: 1288909 - RNA, 19 nt, Homo sapiens
  misc_RNA (1)...(19): siRNA sense strand
guagaaguauuugaguauc

SEQ ID NO: 1288910 - RNA, 19 nt, Homo sapiens
  misc_RNA (1)...(19): siRNA sense strand
guauuugaguaucuugaug

SEQ ID NO: 1288911 - RNA, 19 nt, Homo sapiens
  misc_RNA (1)...(19): siRNA sense strand
aggaauacuugacaguuug

SEQ ID NO: 1288912 - RNA, 19 nt, Homo sapiens
  misc_RNA (1)...(19): siRNA sense strand
ccaaaacccuacuaugaga

SEQ ID NO: 1288913 - RNA, 19 nt, Homo sapiens
  misc_RNA (1)...(19): siRNA sense strand
aguguaaaguggucaaaug

SEQ ID NO: 1288914 - RNA, 19 nt, Homo sapiens
  misc_RNA (1)...(19): siRNA sense strand
ccacccauacuauuuguga

SEQ ID NO: 1288915 - RNA, 19 nt, Homo sapiens
  misc_RNA (1)...(19): siRNA sense strand
uuggagagagcacgauuua

SEQ ID NO: 1288916 - RNA, 19 nt, Homo sapiens
  misc_RNA (1)...(19): siRNA sense strand
gguuaucagaugcacuuua

SEQ ID NO: 1288917 - RNA, 19 nt, Homo sapiens
  misc_RNA (1)...(19): siRNA sense strand
caccaacauuugaagcuau

SEQ ID NO: 1288918 - RNA, 19 nt, Homo sapiens
  misc_RNA (1)...(19): siRNA sense strand
ugaggagccaccaacauuu

SEQ ID NO: 1288919 - RNA, 19 nt, Homo sapiens
  misc_RNA (1)...(19): siRNA sense strand
ggaaggaauacuugacagu

SEQ ID NO: 1288920 - RNA, 19 nt, Homo sapiens
  misc_RNA (1)...(19): siRNA sense strand
gaggaaggaauacuugaca

SEQ ID NO: 1288921 - RNA, 19 nt, Homo sapiens
  misc_RNA (1)...(19): siRNA sense strand
ccaguuccaaagugucuua

SEQ ID NO: 1288922 - RNA, 19 nt, Homo sapiens
  misc_RNA (1)...(19): siRNA sense strand
ugaguaucuugaugcagua

SEQ ID NO: 1288923 - RNA, 19 nt, Homo sapiens
  misc_RNA (1)...(19): siRNA sense strand
caccuuuagugaaguagaa

SEQ ID NO: 1288924 - RNA, 19 nt, Homo sapiens
  misc_RNA (1)...(19): siRNA sense strand
acagauaucaggauuugga

SEQ ID NO: 1288925 - RNA, 19 nt, Homo sapiens
  misc_RNA (1)...(19): siRNA sense strand
ucauugcugugauuguuau

SEQ ID NO: 1288926 - RNA, 19 nt, Homo sapiens
  misc_RNA (1)...(19): siRNA sense strand
ucagaugcacuuuauuugu

SEQ ID NO: 1288927 - RNA, 19 nt, Homo sapiens
  misc_RNA (1)...(19): siRNA sense strand
gugcugcuccagaguguaa

SEQ ID NO: 1288928 - RNA, 19 nt, Homo sapiens
  misc_RNA (1)...(19): siRNA sense strand
ggaaaacacaccuuuagug

SEQ ID NO: 1288929 - RNA, 19 nt, Homo sapiens
  misc_RNA (1)...(19): siRNA sense strand
aaggaucaguagcaauuug

SEQ ID NO: 1288930 - RNA, 19 nt, Homo sapiens
  misc_RNA (1)...(19): siRNA sense strand
uauauacgggauccuuuaa

SEQ ID NO: 1288931 - RNA, 19 nt, Homo sapiens
  misc_RNA (1)...(19): siRNA sense strand
ugaaguagaaguauuugag

SEQ ID NO: 1288932 - RNA, 19 nt, Homo sapiens
  misc_RNA (1)...(19): siRNA sense strand
cuugacaguuuggauguuu

SEQ ID NO: 1288933 - RNA, 19 nt, Homo sapiens
  misc_RNA (1)...(19): siRNA sense strand
cauauauacgggauccuuu

SEQ ID NO: 1288934 - RNA, 19 nt, Homo sapiens
  misc_RNA (1)...(19): siRNA sense strand
auauauacgggauccuuua

SEQ ID NO: 1288935 - RNA, 19 nt, Homo sapiens
  misc_RNA (1)...(19): siRNA sense strand
cuuaaaggaucaguagcaa

SEQ ID NO: 1288936 - RNA, 19 nt, Homo sapiens
  misc_RNA (1)...(19): siRNA sense strand
uaaaccugaggaaggaaua

SEQ ID NO: 1288937 - RNA, 19 nt, Homo sapiens
  misc_RNA (1)...(19): siRNA sense strand
agaugacgccuguuauaga

SEQ ID NO: 1288938 - RNA, 19 nt, Homo sapiens
  misc_RNA (1)...(19): siRNA sense strand
ugugauuguuauugccaua

SEQ ID NO: 1288939 - RNA, 19 nt, Homo sapiens
  misc_RNA (1)...(19): siRNA sense strand
gagagcacgauuuauugug

SEQ ID NO: 1288940 - RNA, 19 nt, Homo sapiens
  misc_RNA (1)...(19): siRNA sense strand
gaaguauuugaguaucuug

SEQ ID NO: 1288941 - RNA, 19 nt, Homo sapiens
  misc_RNA (1)...(19): siRNA sense strand
ggcuaccugucucagauga

SEQ ID NO: 1288942 - RNA, 19 nt, Homo sapiens
  misc_RNA (1)...(19): siRNA sense strand
ccucuugccacccauacua

SEQ ID NO: 1288943 - RNA, 19 nt, Homo sapiens
  misc_RNA (1)...(19): siRNA sense strand
gauaucaggauuuggaaaa

SEQ ID NO: 1288944 - RNA, 19 nt, Homo sapiens
  misc_RNA (1)...(19): siRNA sense strand
ccaugguguugcugcugua

SEQ ID NO: 1288945 - RNA, 19 nt, Homo sapiens
  misc_RNA (1)...(19): siRNA sense strand
cagaugacgccuguuauag

SEQ ID NO: 1288946 - RNA, 19 nt, Homo sapiens
  misc_RNA (1)...(19): siRNA sense strand
cagaugguggagcugaaua

SEQ ID NO: 1288947 - RNA, 19 nt, Homo sapiens
  misc_RNA (1)...(19): siRNA sense strand
gucauugcugugauuguua

SEQ ID NO: 1288948 - RNA, 19 nt, Homo sapiens
  misc_RNA (1)...(19): siRNA sense strand
uuggugaacgaguagauua

SEQ ID NO: 1288949 - RNA, 19 nt, Homo sapiens
  misc_RNA (1)...(19): siRNA sense strand
ggagccaccaacauuugaa

SEQ ID NO: 1288950 - RNA, 19 nt, Homo sapiens
  misc_RNA (1)...(19): siRNA sense strand
gcgcuuuccuggguugcuu

SEQ ID NO: 1288951 - RNA, 19 nt, Homo sapiens
  misc_RNA (1)...(19): siRNA sense strand
uacuacaaagcaacaguua

SEQ ID NO: 1288952 - RNA, 19 nt, Homo sapiens
  misc_RNA (1)...(19): siRNA sense strand
cuugaugcaguaacuuaua

SEQ ID NO: 1288953 - RNA, 19 nt, Homo sapiens
  misc_RNA (1)...(19): siRNA sense strand
aaacauguccauauauacg

SEQ ID NO: 1288954 - RNA, 19 nt, Homo sapiens
  misc_RNA (1)...(19): siRNA sense strand
guguaaaguggucaaaugu

SEQ ID NO: 1288955 - RNA, 19 nt, Homo sapiens
  misc_RNA (1)...(19): siRNA sense strand
cuuacgaguuugguuauca

SEQ ID NO: 1288956 - RNA, 19 nt, Homo sapiens
  misc_RNA (1)...(19): siRNA sense strand
aaccaaaacccuacuauga

SEQ ID NO: 1288957 - RNA, 19 nt, Homo sapiens
  misc_RNA (1)...(19): siRNA sense strand
gcagaugguggagcugaau

SEQ ID NO: 1288958 - RNA, 19 nt, Homo sapiens
  misc_RNA (1)...(19): siRNA sense strand
uacgggauccuuuaaaugg

SEQ ID NO: 1288959 - RNA, 19 nt, Homo sapiens
  misc_RNA (1)...(19): siRNA sense strand
cgauggcagcgacacaauu

SEQ ID NO: 1288960 - RNA, 19 nt, Homo sapiens
  misc_RNA (1)...(19): siRNA sense strand
ggagcugaauaugccacuu

SEQ ID NO: 1288961 - RNA, 19 nt, Homo sapiens
  misc_RNA (1)...(19): siRNA sense strand
caacauuugaagcuaugga

SEQ ID NO: 1288962 - RNA, 19 nt, Homo sapiens
  misc_RNA (1)...(19): siRNA sense strand
ggagagagcacgauuuauu

SEQ ID NO: 1288963 - RNA, 19 nt, Homo sapiens
  misc_RNA (1)...(19): siRNA sense strand
agagaaacauguccauaua

SEQ ID NO: 1288964 - RNA, 19 nt, Homo sapiens
  misc_RNA (1)...(19): siRNA sense strand
cagaugcacuuuauuugua

SEQ ID NO: 1288965 - RNA, 19 nt, Homo sapiens
  misc_RNA (1)...(19): siRNA sense strand
ggacuuacgaguuugguua

SEQ ID NO: 1288966 - RNA, 19 nt, Homo sapiens
  misc_RNA (1)...(19): siRNA sense strand
aaacagauaucaggauuug

SEQ ID NO: 1288967 - RNA, 19 nt, Homo sapiens
  misc_RNA (1)...(19): siRNA sense strand
cuauggagcucauugguaa

SEQ ID NO: 1288968 - RNA, 19 nt, Homo sapiens
  misc_RNA (1)...(19): siRNA sense strand
aaacacaccuuuagugaag

SEQ ID NO: 1288969 - RNA, 19 nt, Homo sapiens
  misc_RNA (1)...(19): siRNA sense strand
gaacuuaaaggaucaguag

SEQ ID NO: 1288970 - RNA, 19 nt, Homo sapiens
  misc_RNA (1)...(19): siRNA sense strand
gaaaacagauaucaggauu

SEQ ID NO: 1288971 - RNA, 19 nt, Homo sapiens
  misc_RNA (1)...(19): siRNA sense strand
uaaaggaucaguagcaauu

SEQ ID NO: 1288972 - RNA, 19 nt, Homo sapiens
  misc_RNA (1)...(19): siRNA sense strand
aaaugggacuuacgaguuu

SEQ ID NO: 1288973 - RNA, 19 nt, Homo sapiens
  misc_RNA (1)...(19): siRNA sense strand
guuaucagaugcacuuuau

SEQ ID NO: 1288974 - RNA, 19 nt, Homo sapiens
  misc_RNA (1)...(19): siRNA sense strand
ugagauuggugaacgagua

SEQ ID NO: 1288975 - RNA, 19 nt, Homo sapiens
  misc_RNA (1)...(19): siRNA sense strand
gugaacgaguagauuauaa

SEQ ID NO: 1288976 - RNA, 19 nt, Homo sapiens
  misc_RNA (1)...(19): siRNA sense strand
gagagagcacgauuuauug

SEQ ID NO: 1288977 - RNA, 19 nt, Homo sapiens
  misc_RNA (1)...(19): siRNA sense strand
caaaugggacuuacgaguu

SEQ ID NO: 1288978 - RNA, 19 nt, Homo sapiens
  misc_RNA (1)...(19): siRNA sense strand
ggucauugcugugauuguu

SEQ ID NO: 1288979 - RNA, 19 nt, Homo sapiens
  misc_RNA (1)...(19): siRNA sense strand
ccagauccauuuucacuua

SEQ ID NO: 1288980 - RNA, 19 nt, Homo sapiens
  misc_RNA (1)...(19): siRNA sense strand
gaaggaauacuugacaguu

SEQ ID NO: 1288981 - RNA, 19 nt, Homo sapiens
  misc_RNA (1)...(19): siRNA sense strand
aaggaauacuugacaguuu

SEQ ID NO: 1288982 - RNA, 19 nt, Homo sapiens
  misc_RNA (1)...(19): siRNA sense strand
ucagaugacgccuguuaua

SEQ ID NO: 1288983 - RNA, 19 nt, Homo sapiens
  misc_RNA (1)...(19): siRNA sense strand
gaaaacacaccuuuaguga

SEQ ID NO: 1288984 - RNA, 19 nt, Homo sapiens
  misc_RNA (1)...(19): siRNA sense strand
gaugacgccuguuauagag

SEQ ID NO: 1288985 - RNA, 19 nt, Homo sapiens
  misc_RNA (1)...(19): siRNA sense strand
gagaaacauguccauauau

SEQ ID NO: 1288986 - RNA, 19 nt, Homo sapiens
  misc_RNA (1)...(19): siRNA sense strand
acgaguagauuauaagugu

SEQ ID NO: 1288987 - RNA, 19 nt, Homo sapiens
  misc_RNA (1)...(19): siRNA sense strand
cuacaaagcaacaguuaug

SEQ ID NO: 1288988 - RNA, 19 nt, Homo sapiens
  misc_RNA (1)...(19): siRNA sense strand
ccaccaacauuugaagcua

SEQ ID NO: 1288989 - RNA, 19 nt, Homo sapiens
  misc_RNA (1)...(19): siRNA sense strand
uauacgggauccuuuaaau

SEQ ID NO: 1288990 - RNA, 19 nt, Homo sapiens
  misc_RNA (1)...(19): siRNA sense strand
cgaguuugguuaucagaug

SEQ ID NO: 1288991 - RNA, 19 nt, Homo sapiens
  misc_RNA (1)...(19): siRNA sense strand
gaacgaguagauuauaagu

SEQ ID NO: 1288992 - RNA, 19 nt, Homo sapiens
  misc_RNA (1)...(19): siRNA sense strand
gugaggagccaccaacauu

SEQ ID NO: 1288993 - RNA, 19 nt, Homo sapiens
  misc_RNA (1)...(19): siRNA sense strand
gauggcagcgacacaauug

SEQ ID NO: 1288994 - RNA, 19 nt, Homo sapiens
  misc_RNA (1)...(19): siRNA sense strand
gcuauggagcucauuggua

SEQ ID NO: 1288995 - RNA, 19 nt, Homo sapiens
  misc_RNA (1)...(19): siRNA sense strand
gaggagccaccaacauuug

SEQ ID NO: 1288996 - RNA, 19 nt, Homo sapiens
  misc_RNA (1)...(19): siRNA sense strand
acacaccuuuagugaagua

SEQ ID NO: 1288997 - RNA, 19 nt, Homo sapiens
  misc_RNA (1)...(19): siRNA sense strand
ucucagaugacgccuguua

SEQ ID NO: 1288998 - RNA, 19 nt, Homo sapiens
  misc_RNA (1)...(19): siRNA sense strand
uagagaaacauguccauau

SEQ ID NO: 1288999 - RNA, 19 nt, Homo sapiens
  misc_RNA (1)...(19): siRNA sense strand
ggugaacgaguagauuaua

SEQ ID NO: 1289000 - RNA, 19 nt, Homo sapiens
  misc_RNA (1)...(19): siRNA sense strand
gaaguagaaguauuugagu

SEQ ID NO: 1289001 - RNA, 19 nt, Homo sapiens
  misc_RNA (1)...(19): siRNA sense strand
gaaacauguccauauauac

SEQ ID NO: 1289002 - RNA, 19 nt, Homo sapiens
  misc_RNA (1)...(19): siRNA sense strand
ugacgccuguuauagagaa

SEQ ID NO: 1289003 - RNA, 19 nt, Homo sapiens
  misc_RNA (1)...(19): siRNA sense strand
cgaguagauuauaagugua

SEQ ID NO: 1289004 - RNA, 19 nt, Homo sapiens
  misc_RNA (1)...(19): siRNA sense strand
gcacuuuauuuguaaugag

SEQ ID NO: 1289005 - RNA, 19 nt, Homo sapiens
  misc_RNA (1)...(19): siRNA sense strand
guagaaguauuugaguauc

SEQ ID NO: 1289006 - RNA, 19 nt, Homo sapiens
  misc_RNA (1)...(19): siRNA sense strand
guauuugaguaucuugaug

SEQ ID NO: 1289007 - RNA, 19 nt, Homo sapiens
  misc_RNA (1)...(19): siRNA sense strand
aggaauacuugacaguuug

SEQ ID NO: 1289008 - RNA, 19 nt, Homo sapiens
  misc_RNA (1)...(19): siRNA sense strand
aguguaaaguggucaaaug

SEQ ID NO: 1289009 - RNA, 19 nt, Homo sapiens
  misc_RNA (1)...(19): siRNA sense strand
ccaaaacccuacuaugaga

SEQ ID NO: 1289010 - RNA, 19 nt, Homo sapiens
  misc_RNA (1)...(19): siRNA sense strand
ccacccauacuauuuguga

SEQ ID NO: 1289011 - RNA, 19 nt, Homo sapiens
  misc_RNA (1)...(19): siRNA sense strand
caccaacauuugaagcuau

SEQ ID NO: 1289012 - RNA, 19 nt, Homo sapiens
  misc_RNA (1)...(19): siRNA sense strand
uuggagagagcacgauuua

SEQ ID NO: 1289013 - RNA, 19 nt, Homo sapiens
  misc_RNA (1)...(19): siRNA sense strand
gguuaucagaugcacuuua

SEQ ID NO: 1289014 - RNA, 19 nt, Homo sapiens
  misc_RNA (1)...(19): siRNA sense strand
ugaggagccaccaacauuu

SEQ ID NO: 1289015 - RNA, 19 nt, Homo sapiens
  misc_RNA (1)...(19): siRNA sense strand
ggaaggaauacuugacagu

SEQ ID NO: 1289016 - RNA, 19 nt, Homo sapiens
  misc_RNA (1)...(19): siRNA sense strand
gaggaaggaauacuugaca

SEQ ID NO: 1289017 - RNA, 19 nt, Homo sapiens
  misc_RNA (1)...(19): siRNA sense strand
ugaguaucuugaugcagua

SEQ ID NO: 1289018 - RNA, 19 nt, Homo sapiens
  misc_RNA (1)...(19): siRNA sense strand
caccuuuagugaaguagaa

SEQ ID NO: 1289019 - RNA, 19 nt, Homo sapiens
  misc_RNA (1)...(19): siRNA sense strand
acagauaucaggauuugga

SEQ ID NO: 1289020 - RNA, 19 nt, Homo sapiens
  misc_RNA (1)...(19): siRNA sense strand
ucauugcugugauuguuau

SEQ ID NO: 1289021 - RNA, 19 nt, Homo sapiens
  misc_RNA (1)...(19): siRNA sense strand
ucagaugcacuuuauuugu

SEQ ID NO: 1289022 - RNA, 19 nt, Homo sapiens
  misc_RNA (1)...(19): siRNA sense strand
gugcugcuccagaguguaa

SEQ ID NO: 1289023 - RNA, 19 nt, Homo sapiens
  misc_RNA (1)...(19): siRNA sense strand
ggaaaacacaccuuuagug

SEQ ID NO: 1289024 - RNA, 19 nt, Homo sapiens
  misc_RNA (1)...(19): siRNA sense strand
aaggaucaguagcaauuug

SEQ ID NO: 1289025 - RNA, 19 nt, Homo sapiens
  misc_RNA (1)...(19): siRNA sense strand
uauauacgggauccuuuaa

SEQ ID NO: 1289026 - RNA, 19 nt, Homo sapiens
  misc_RNA (1)...(19): siRNA sense strand
ugaaguagaaguauuugag

SEQ ID NO: 1289027 - RNA, 19 nt, Homo sapiens
  misc_RNA (1)...(19): siRNA sense strand
cuugacaguuuggauguuu

SEQ ID NO: 1289028 - RNA, 19 nt, Homo sapiens
  misc_RNA (1)...(19): siRNA sense strand
cauauauacgggauccuuu

SEQ ID NO: 1289029 - RNA, 19 nt, Homo sapiens
  misc_RNA (1)...(19): siRNA sense strand
auauauacgggauccuuua

SEQ ID NO: 1289030 - RNA, 19 nt, Homo sapiens
  misc_RNA (1)...(19): siRNA sense strand
cuuaaaggaucaguagcaa

SEQ ID NO: 1289031 - RNA, 19 nt, Homo sapiens
  misc_RNA (1)...(19): siRNA sense strand
uaaaccugaggaaggaaua

SEQ ID NO: 1289032 - RNA, 19 nt, Homo sapiens
  misc_RNA (1)...(19): siRNA sense strand
agaugacgccuguuauaga

SEQ ID NO: 1289033 - RNA, 19 nt, Homo sapiens
  misc_RNA (1)...(19): siRNA sense strand
ugugauuguuauugccaua

SEQ ID NO: 1289034 - RNA, 19 nt, Homo sapiens
  misc_RNA (1)...(19): siRNA sense strand
gagagcacgauuuauugug

SEQ ID NO: 1289035 - RNA, 19 nt, Homo sapiens
  misc_RNA (1)...(19): siRNA sense strand
gaaguauuugaguaucuug

SEQ ID NO: 1289036 - RNA, 19 nt, Homo sapiens
  misc_RNA (1)...(19): siRNA sense strand
ccucuugccacccauacua

SEQ ID NO: 1289037 - RNA, 19 nt, Homo sapiens
  misc_RNA (1)...(19): siRNA sense strand
gauaucaggauuuggaaaa

SEQ ID NO: 1289038 - RNA, 19 nt, Homo sapiens
  misc_RNA (1)...(19): siRNA sense strand
ggcuaccugucucagauga

SEQ ID NO: 1289039 - RNA, 19 nt, Homo sapiens
  misc_RNA (1)...(19): siRNA sense strand
ccaugguguugcugcugua

SEQ ID NO: 1289040 - RNA, 19 nt, Homo sapiens
  misc_RNA (1)...(19): siRNA sense strand
cagaugacgccuguuauag

SEQ ID NO: 1289041 - RNA, 19 nt, Homo sapiens
  misc_RNA (1)...(19): siRNA sense strand
gucauugcugugauuguua

SEQ ID NO: 1289042 - RNA, 19 nt, Homo sapiens
  misc_RNA (1)...(19): siRNA sense strand
uuggugaacgaguagauua

SEQ ID NO: 1289043 - RNA, 19 nt, Homo sapiens
  misc_RNA (1)...(19): siRNA sense strand
ggagccaccaacauuugaa

SEQ ID NO: 1289044 - RNA, 19 nt, Homo sapiens
  misc_RNA (1)...(19): siRNA sense strand
gcgcuuuccuggguugcuu

SEQ ID NO: 1289045 - RNA, 19 nt, Homo sapiens
  misc_RNA (1)...(19): siRNA sense strand
uacuacaaagcaacaguua

SEQ ID NO: 1289046 - RNA, 19 nt, Homo sapiens
  misc_RNA (1)...(19): siRNA sense strand
cuugaugcaguaacuuaua

SEQ ID NO: 1289047 - RNA, 19 nt, Homo sapiens
  misc_RNA (1)...(19): siRNA sense strand
aaacauguccauauauacg

SEQ ID NO: 1289048 - RNA, 19 nt, Homo sapiens
  misc_RNA (1)...(19): siRNA sense strand
guguaaaguggucaaaugu

SEQ ID NO: 1289049 - RNA, 19 nt, Homo sapiens
  misc_RNA (1)...(19): siRNA sense strand
cuuacgaguuugguuauca

SEQ ID NO: 1289050 - RNA, 19 nt, Homo sapiens
  misc_RNA (1)...(19): siRNA sense strand
uacgggauccuuuaaaugg

SEQ ID NO: 1289051 - RNA, 19 nt, Homo sapiens
  misc_RNA (1)...(19): siRNA sense strand
aaccaaaacccuacuauga

SEQ ID NO: 1289052 - RNA, 19 nt, Homo sapiens
  misc_RNA (1)...(19): siRNA sense strand
cccaauaugugaaaagguu

SEQ ID NO: 1289053 - RNA, 19 nt, Homo sapiens
  misc_RNA (1)...(19): siRNA sense strand
cgauggcagcgacacaauu

SEQ ID NO: 1289054 - RNA, 19 nt, Homo sapiens
  misc_RNA (1)...(19): siRNA sense strand
gauccauuuucacuuauug

SEQ ID NO: 1289055 - RNA, 19 nt, Homo sapiens
  misc_RNA (1)...(19): siRNA sense strand
uugaugcaguaacuuauag

SEQ ID NO: 1289056 - RNA, 19 nt, Homo sapiens
  misc_RNA (1)...(19): siRNA sense strand
guaucuugaugcaguaacu

SEQ ID NO: 1289057 - RNA, 19 nt, Homo sapiens
  misc_RNA (1)...(19): siRNA sense strand
caacauuugaagcuaugga

SEQ ID NO: 1289058 - RNA, 19 nt, Homo sapiens
  misc_RNA (1)...(19): siRNA sense strand
gagauuggugaacgaguag

SEQ ID NO: 1289059 - RNA, 19 nt, Homo sapiens
  misc_RNA (1)...(19): siRNA sense strand
ggagagagcacgauuuauu

SEQ ID NO: 1289060 - RNA, 19 nt, Homo sapiens
  misc_RNA (1)...(19): siRNA sense strand
agagaaacauguccauaua

SEQ ID NO: 1289061 - RNA, 19 nt, Homo sapiens
  misc_RNA (1)...(19): siRNA sense strand
cagaugcacuuuauuugua

SEQ ID NO: 1289062 - RNA, 19 nt, Homo sapiens
  misc_RNA (1)...(19): siRNA sense strand
ggacuuacgaguuugguua

SEQ ID NO: 1289063 - RNA, 19 nt, Homo sapiens
  misc_RNA (1)...(19): siRNA sense strand
aaacagauaucaggauuug

SEQ ID NO: 1289064 - RNA, 19 nt, Homo sapiens
  misc_RNA (1)...(19): siRNA sense strand
cuauggagcucauugguaa

SEQ ID NO: 1289065 - RNA, 19 nt, Homo sapiens
  misc_RNA (1)...(19): siRNA sense strand
aaacacaccuuuagugaag

SEQ ID NO: 1289066 - RNA, 19 nt, Homo sapiens
  misc_RNA (1)...(19): siRNA sense strand
gaacuuaaaggaucaguag

SEQ ID NO: 1289067 - RNA, 19 nt, Homo sapiens
  misc_RNA (1)...(19): siRNA sense strand
gaaaacagauaucaggauu

SEQ ID NO: 1289068 - RNA, 19 nt, Homo sapiens
  misc_RNA (1)...(19): siRNA sense strand
uaaaggaucaguagcaauu

SEQ ID NO: 1289069 - RNA, 19 nt, Homo sapiens
  misc_RNA (1)...(19): siRNA sense strand
aaaugggacuuacgaguuu

SEQ ID NO: 1289070 - RNA, 19 nt, Homo sapiens
  misc_RNA (1)...(19): siRNA sense strand
guuaucagaugcacuuuau

SEQ ID NO: 1289071 - RNA, 19 nt, Homo sapiens
  misc_RNA (1)...(19): siRNA sense strand
ugagauuggugaacgagua

SEQ ID NO: 1289072 - RNA, 19 nt, Homo sapiens
  misc_RNA (1)...(19): siRNA sense strand
gugaacgaguagauuauaa

SEQ ID NO: 1289073 - RNA, 19 nt, Homo sapiens
  misc_RNA (1)...(19): siRNA sense strand
gagagagcacgauuuauug

SEQ ID NO: 1289074 - RNA, 19 nt, Homo sapiens
  misc_RNA (1)...(19): siRNA sense strand
caaaugggacuuacgaguu

SEQ ID NO: 1289075 - RNA, 19 nt, Homo sapiens
  misc_RNA (1)...(19): siRNA sense strand
ggucauugcugugauuguu

SEQ ID NO: 1289076 - RNA, 19 nt, Homo sapiens
  misc_RNA (1)...(19): siRNA sense strand
ccagauccauuuucacuua

SEQ ID NO: 1289077 - RNA, 19 nt, Homo sapiens
  misc_RNA (1)...(19): siRNA sense strand
gaaggaauacuugacaguu

SEQ ID NO: 1289078 - RNA, 19 nt, Homo sapiens
  misc_RNA (1)...(19): siRNA sense strand
aaggaauacuugacaguuu

SEQ ID NO: 1289079 - RNA, 19 nt, Homo sapiens
  misc_RNA (1)...(19): siRNA sense strand
ucagaugacgccuguuaua

SEQ ID NO: 1289080 - RNA, 19 nt, Homo sapiens
  misc_RNA (1)...(19): siRNA sense strand
gaaaacacaccuuuaguga

SEQ ID NO: 1289081 - RNA, 19 nt, Homo sapiens
  misc_RNA (1)...(19): siRNA sense strand
gaugacgccuguuauagag

SEQ ID NO: 1289082 - RNA, 19 nt, Homo sapiens
  misc_RNA (1)...(19): siRNA sense strand
gagaaacauguccauauau

SEQ ID NO: 1289083 - RNA, 19 nt, Homo sapiens
  misc_RNA (1)...(19): siRNA sense strand
acgaguagauuauaagugu

SEQ ID NO: 1289084 - RNA, 19 nt, Homo sapiens
  misc_RNA (1)...(19): siRNA sense strand
cuacaaagcaacaguuaug

SEQ ID NO: 1289085 - RNA, 19 nt, Homo sapiens
  misc_RNA (1)...(19): siRNA sense strand
ccaccaacauuugaagcua

SEQ ID NO: 1289086 - RNA, 19 nt, Homo sapiens
  misc_RNA (1)...(19): siRNA sense strand
uauacgggauccuuuaaau

SEQ ID NO: 1289087 - RNA, 19 nt, Homo sapiens
  misc_RNA (1)...(19): siRNA sense strand
cgaguuugguuaucagaug

SEQ ID NO: 1289088 - RNA, 19 nt, Homo sapiens
  misc_RNA (1)...(19): siRNA sense strand
gaacgaguagauuauaagu

SEQ ID NO: 1289089 - RNA, 19 nt, Homo sapiens
  misc_RNA (1)...(19): siRNA sense strand
gugaggagccaccaacauu

SEQ ID NO: 1289090 - RNA, 19 nt, Homo sapiens
  misc_RNA (1)...(19): siRNA sense strand
gauggcagcgacacaauug

SEQ ID NO: 1289091 - RNA, 19 nt, Homo sapiens
  misc_RNA (1)...(19): siRNA sense strand
gcuauggagcucauuggua

SEQ ID NO: 1289092 - RNA, 19 nt, Homo sapiens
  misc_RNA (1)...(19): siRNA sense strand
gaggagccaccaacauuug

SEQ ID NO: 1289093 - RNA, 19 nt, Homo sapiens
  misc_RNA (1)...(19): siRNA sense strand
acacaccuuuagugaagua

SEQ ID NO: 1289094 - RNA, 19 nt, Homo sapiens
  misc_RNA (1)...(19): siRNA sense strand
ucucagaugacgccuguua

SEQ ID NO: 1289095 - RNA, 19 nt, Homo sapiens
  misc_RNA (1)...(19): siRNA sense strand
uagagaaacauguccauau

SEQ ID NO: 1289096 - RNA, 19 nt, Homo sapiens
  misc_RNA (1)...(19): siRNA sense strand
guuccaaagugucuuaaag

SEQ ID NO: 1289097 - RNA, 19 nt, Homo sapiens
  misc_RNA (1)...(19): siRNA sense strand
ggugaacgaguagauuaua

SEQ ID NO: 1289098 - RNA, 19 nt, Homo sapiens
  misc_RNA (1)...(19): siRNA sense strand
gaaguagaaguauuugagu

SEQ ID NO: 1289099 - RNA, 19 nt, Homo sapiens
  misc_RNA (1)...(19): siRNA sense strand
gaaacauguccauauauac

SEQ ID NO: 1289100 - RNA, 19 nt, Homo sapiens
  misc_RNA (1)...(19): siRNA sense strand
ugacgccuguuauagagaa

SEQ ID NO: 1289101 - RNA, 19 nt, Homo sapiens
  misc_RNA (1)...(19): siRNA sense strand
cgaguagauuauaagugua

SEQ ID NO: 1289102 - RNA, 19 nt, Homo sapiens
  misc_RNA (1)...(19): siRNA sense strand
gcacuuuauuuguaaugag

SEQ ID NO: 1289103 - RNA, 19 nt, Homo sapiens
  misc_RNA (1)...(19): siRNA sense strand
guagaaguauuugaguauc

SEQ ID NO: 1289104 - RNA, 19 nt, Homo sapiens
  misc_RNA (1)...(19): siRNA sense strand
guauuugaguaucuugaug

SEQ ID NO: 1289105 - RNA, 19 nt, Homo sapiens
  misc_RNA (1)...(19): siRNA sense strand
aggaauacuugacaguuug

SEQ ID NO: 1289106 - RNA, 19 nt, Homo sapiens
  misc_RNA (1)...(19): siRNA sense strand
ccaaaacccuacuaugaga

SEQ ID NO: 1289107 - RNA, 19 nt, Homo sapiens
  misc_RNA (1)...(19): siRNA sense strand
aguguaaaguggucaaaug

SEQ ID NO: 1289108 - RNA, 19 nt, Homo sapiens
  misc_RNA (1)...(19): siRNA sense strand
ccacccauacuauuuguga

SEQ ID NO: 1289109 - RNA, 19 nt, Homo sapiens
  misc_RNA (1)...(19): siRNA sense strand
caccaacauuugaagcuau

SEQ ID NO: 1289110 - RNA, 19 nt, Homo sapiens
  misc_RNA (1)...(19): siRNA sense strand
uuggagagagcacgauuua

SEQ ID NO: 1289111 - RNA, 19 nt, Homo sapiens
  misc_RNA (1)...(19): siRNA sense strand
gguuaucagaugcacuuua

SEQ ID NO: 1289112 - RNA, 19 nt, Homo sapiens
  misc_RNA (1)...(19): siRNA sense strand
ugaggagccaccaacauuu

SEQ ID NO: 1289113 - RNA, 19 nt, Homo sapiens
  misc_RNA (1)...(19): siRNA sense strand
ggaaggaauacuugacagu

SEQ ID NO: 1289114 - RNA, 19 nt, Homo sapiens
  misc_RNA (1)...(19): siRNA sense strand
gaggaaggaauacuugaca

SEQ ID NO: 1289115 - RNA, 19 nt, Homo sapiens
  misc_RNA (1)...(19): siRNA sense strand
ccaguuccaaagugucuua

SEQ ID NO: 1289116 - RNA, 19 nt, Homo sapiens
  misc_RNA (1)...(19): siRNA sense strand
ugaguaucuugaugcagua

SEQ ID NO: 1289117 - RNA, 19 nt, Homo sapiens
  misc_RNA (1)...(19): siRNA sense strand
caccuuuagugaaguagaa

SEQ ID NO: 1289118 - RNA, 19 nt, Homo sapiens
  misc_RNA (1)...(19): siRNA sense strand
acagauaucaggauuugga

SEQ ID NO: 1289119 - RNA, 19 nt, Homo sapiens
  misc_RNA (1)...(19): siRNA sense strand
ucauugcugugauuguuau

SEQ ID NO: 1289120 - RNA, 19 nt, Homo sapiens
  misc_RNA (1)...(19): siRNA sense strand
ucagaugcacuuuauuugu

SEQ ID NO: 1289121 - RNA, 19 nt, Homo sapiens
  misc_RNA (1)...(19): siRNA sense strand
gugcugcuccagaguguaa

SEQ ID NO: 1289122 - RNA, 19 nt, Homo sapiens
  misc_RNA (1)...(19): siRNA sense strand
ggaaaacacaccuuuagug

SEQ ID NO: 1289123 - RNA, 19 nt, Homo sapiens
  misc_RNA (1)...(19): siRNA sense strand
aaggaucaguagcaauuug

SEQ ID NO: 1289124 - RNA, 19 nt, Homo sapiens
  misc_RNA (1)...(19): siRNA sense strand
uauauacgggauccuuuaa

SEQ ID NO: 1289125 - RNA, 19 nt, Homo sapiens
  misc_RNA (1)...(19): siRNA sense strand
ugaaguagaaguauuugag

SEQ ID NO: 1289126 - RNA, 19 nt, Homo sapiens
  misc_RNA (1)...(19): siRNA sense strand
cuugacaguuuggauguuu

SEQ ID NO: 1289127 - RNA, 19 nt, Homo sapiens
  misc_RNA (1)...(19): siRNA sense strand
cauauauacgggauccuuu

SEQ ID NO: 1289128 - RNA, 19 nt, Homo sapiens
  misc_RNA (1)...(19): siRNA sense strand
auauauacgggauccuuua

SEQ ID NO: 1289129 - RNA, 19 nt, Homo sapiens
  misc_RNA (1)...(19): siRNA sense strand
cuuaaaggaucaguagcaa

SEQ ID NO: 1289130 - RNA, 19 nt, Homo sapiens
  misc_RNA (1)...(19): siRNA sense strand
uaaaccugaggaaggaaua

SEQ ID NO: 1289131 - RNA, 19 nt, Homo sapiens
  misc_RNA (1)...(19): siRNA sense strand
agaugacgccuguuauaga

SEQ ID NO: 1289132 - RNA, 19 nt, Homo sapiens
  misc_RNA (1)...(19): siRNA sense strand
ugugauuguuauugccaua

SEQ ID NO: 1289133 - RNA, 19 nt, Homo sapiens
  misc_RNA (1)...(19): siRNA sense strand
gagagcacgauuuauugug

SEQ ID NO: 1289134 - RNA, 19 nt, Homo sapiens
  misc_RNA (1)...(19): siRNA sense strand
gaaguauuugaguaucuug

SEQ ID NO: 1289135 - RNA, 19 nt, Homo sapiens
  misc_RNA (1)...(19): siRNA sense strand
ggcuaccugucucagauga

SEQ ID NO: 1289136 - RNA, 19 nt, Homo sapiens
  misc_RNA (1)...(19): siRNA sense strand
gauaucaggauuuggaaaa

SEQ ID NO: 1289137 - RNA, 19 nt, Homo sapiens
  misc_RNA (1)...(19): siRNA sense strand
ccucuugccacccauacua

SEQ ID NO: 1289138 - RNA, 19 nt, Homo sapiens
  misc_RNA (1)...(19): siRNA sense strand
ccaugguguugcugcugua

SEQ ID NO: 1289139 - RNA, 19 nt, Homo sapiens
  misc_RNA (1)...(19): siRNA sense strand
cagaugacgccuguuauag

SEQ ID NO: 1289140 - RNA, 19 nt, Homo sapiens
  misc_RNA (1)...(19): siRNA sense strand
uuggugaacgaguagauua

SEQ ID NO: 1289141 - RNA, 19 nt, Homo sapiens
  misc_RNA (1)...(19): siRNA sense strand
gucauugcugugauuguua

SEQ ID NO: 1289142 - RNA, 19 nt, Homo sapiens
  misc_RNA (1)...(19): siRNA sense strand
ggagccaccaacauuugaa

SEQ ID NO: 1289143 - RNA, 19 nt, Homo sapiens
  misc_RNA (1)...(19): siRNA sense strand
gcgcuuuccuggguugcuu

SEQ ID NO: 1289144 - RNA, 19 nt, Homo sapiens
  misc_RNA (1)...(19): siRNA sense strand
uacuacaaagcaacaguua

SEQ ID NO: 1289145 - RNA, 19 nt, Homo sapiens
  misc_RNA (1)...(19): siRNA sense strand
cuugaugcaguaacuuaua

SEQ ID NO: 1289146 - RNA, 19 nt, Homo sapiens
  misc_RNA (1)...(19): siRNA sense strand
aaacauguccauauauacg

SEQ ID NO: 1289147 - RNA, 19 nt, Homo sapiens
  misc_RNA (1)...(19): siRNA sense strand
guguaaaguggucaaaugu

SEQ ID NO: 1289148 - RNA, 19 nt, Homo sapiens
  misc_RNA (1)...(19): siRNA sense strand
cuuacgaguuugguuauca

SEQ ID NO: 1289149 - RNA, 19 nt, Homo sapiens
  misc_RNA (1)...(19): siRNA sense strand
uacgggauccuuuaaaugg

SEQ ID NO: 1289150 - RNA, 19 nt, Homo sapiens
  misc_RNA (1)...(19): siRNA sense strand
aaccaaaacccuacuauga

SEQ ID NO: 1289151 - RNA, 19 nt, Homo sapiens
  misc_RNA (1)...(19): siRNA sense strand
cccaauaugugaaaagguu

SEQ ID NO: 1289152 - RNA, 19 nt, Homo sapiens
  misc_RNA (1)...(19): siRNA sense strand
cgauggcagcgacacaauu

SEQ ID NO: 1289153 - RNA, 19 nt, Homo sapiens
  misc_RNA (1)...(19): siRNA sense strand
gauccauuuucacuuauug

SEQ ID NO: 1289154 - RNA, 19 nt, Homo sapiens
  misc_RNA (1)...(19): siRNA sense strand
uugaugcaguaacuuauag

SEQ ID NO: 1289155 - RNA, 19 nt, Homo sapiens
  misc_RNA (1)...(19): siRNA sense strand
guaucuugaugcaguaacu

SEQ ID NO: 1289156 - RNA, 19 nt, Homo sapiens
  misc_RNA (1)...(19): siRNA sense strand
caacauuugaagcuaugga

SEQ ID NO: 1289157 - RNA, 19 nt, Homo sapiens
  misc_RNA (1)...(19): siRNA sense strand
gagauuggugaacgaguag

SEQ ID NO: 1289158 - RNA, 19 nt, Homo sapiens
  misc_RNA (1)...(19): siRNA sense strand
ggagagagcacgauuuauu

SEQ ID NO: 1289159 - RNA, 19 nt, Homo sapiens
  misc_RNA (1)...(19): siRNA sense strand
agagaaacauguccauaua

SEQ ID NO: 1289160 - RNA, 19 nt, Homo sapiens
  misc_RNA (1)...(19): siRNA sense strand
cagaugcacuuuauuugua

SEQ ID NO: 1289161 - RNA, 19 nt, Homo sapiens
  misc_RNA (1)...(19): siRNA sense strand
ggacuuacgaguuugguua

SEQ ID NO: 1289162 - RNA, 19 nt, Homo sapiens
  misc_RNA (1)...(19): siRNA sense strand
aaacagauaucaggauuug

SEQ ID NO: 1289163 - RNA, 19 nt, Homo sapiens
  misc_RNA (1)...(19): siRNA sense strand
cuauggagcucauugguaa

SEQ ID NO: 1289164 - RNA, 19 nt, Homo sapiens
  misc_RNA (1)...(19): siRNA sense strand
aaacacaccuuuagugaag

SEQ ID NO: 1289165 - RNA, 19 nt, Homo sapiens
  misc_RNA (1)...(19): siRNA sense strand
gaacuuaaaggaucaguag

SEQ ID NO: 1289166 - RNA, 19 nt, Homo sapiens
  misc_RNA (1)...(19): siRNA sense strand
gaaaacagauaucaggauu

SEQ ID NO: 1289167 - RNA, 19 nt, Homo sapiens
  misc_RNA (1)...(19): siRNA sense strand
uaaaggaucaguagcaauu

SEQ ID NO: 1289168 - RNA, 19 nt, Homo sapiens
  misc_RNA (1)...(19): siRNA sense strand
aaaugggacuuacgaguuu

SEQ ID NO: 1289169 - RNA, 19 nt, Homo sapiens
  misc_RNA (1)...(19): siRNA sense strand
guuaucagaugcacuuuau

SEQ ID NO: 1289170 - RNA, 19 nt, Homo sapiens
  misc_RNA (1)...(19): siRNA sense strand
gagcugaauaugccacuua

SEQ ID NO: 1289171 - RNA, 19 nt, Homo sapiens
  misc_RNA (1)...(19): siRNA sense strand
ugagauuggugaacgagua

SEQ ID NO: 1289172 - RNA, 19 nt, Homo sapiens
  misc_RNA (1)...(19): siRNA sense strand
gugaacgaguagauuauaa

SEQ ID NO: 1289173 - RNA, 19 nt, Homo sapiens
  misc_RNA (1)...(19): siRNA sense strand
gagagagcacgauuuauug

SEQ ID NO: 1289174 - RNA, 19 nt, Homo sapiens
  misc_RNA (1)...(19): siRNA sense strand
caaaugggacuuacgaguu

SEQ ID NO: 1289175 - RNA, 19 nt, Homo sapiens
  misc_RNA (1)...(19): siRNA sense strand
ggucauugcugugauuguu

SEQ ID NO: 1289176 - RNA, 19 nt, Homo sapiens
  misc_RNA (1)...(19): siRNA sense strand
ccagauccauuuucacuua

SEQ ID NO: 1289177 - RNA, 19 nt, Homo sapiens
  misc_RNA (1)...(19): siRNA sense strand
gaaggaauacuugacaguu

SEQ ID NO: 1289178 - RNA, 19 nt, Homo sapiens
  misc_RNA (1)...(19): siRNA sense strand
aaggaauacuugacaguuu

SEQ ID NO: 1289179 - RNA, 19 nt, Homo sapiens
  misc_RNA (1)...(19): siRNA sense strand
ucagaugacgccuguuaua

SEQ ID NO: 1289180 - RNA, 19 nt, Homo sapiens
  misc_RNA (1)...(19): siRNA sense strand
gaaaacacaccuuuaguga

SEQ ID NO: 1289181 - RNA, 19 nt, Homo sapiens
  misc_RNA (1)...(19): siRNA sense strand
gaugacgccuguuauagag

SEQ ID NO: 1289182 - RNA, 19 nt, Homo sapiens
  misc_RNA (1)...(19): siRNA sense strand
gagaaacauguccauauau

SEQ ID NO: 1289183 - RNA, 19 nt, Homo sapiens
  misc_RNA (1)...(19): siRNA sense strand
ccacuuaccagacuaaauc

SEQ ID NO: 1289184 - RNA, 19 nt, Homo sapiens
  misc_RNA (1)...(19): siRNA sense strand
acgaguagauuauaagugu

SEQ ID NO: 1289185 - RNA, 19 nt, Homo sapiens
  misc_RNA (1)...(19): siRNA sense strand
cuacaaagcaacaguuaug

SEQ ID NO: 1289186 - RNA, 19 nt, Homo sapiens
  misc_RNA (1)...(19): siRNA sense strand
ccaccaacauuugaagcua

SEQ ID NO: 1289187 - RNA, 19 nt, Homo sapiens
  misc_RNA (1)...(19): siRNA sense strand
uauacgggauccuuuaaau

SEQ ID NO: 1289188 - RNA, 19 nt, Homo sapiens
  misc_RNA (1)...(19): siRNA sense strand
cgaguuugguuaucagaug

SEQ ID NO: 1289189 - RNA, 19 nt, Homo sapiens
  misc_RNA (1)...(19): siRNA sense strand
gaacgaguagauuauaagu

SEQ ID NO: 1289190 - RNA, 19 nt, Homo sapiens
  misc_RNA (1)...(19): siRNA sense strand
gugaggagccaccaacauu

SEQ ID NO: 1289191 - RNA, 19 nt, Homo sapiens
  misc_RNA (1)...(19): siRNA sense strand
gauggcagcgacacaauug

SEQ ID NO: 1289192 - RNA, 19 nt, Homo sapiens
  misc_RNA (1)...(19): siRNA sense strand
ucucagaugacgccuguua

SEQ ID NO: 1289193 - RNA, 19 nt, Homo sapiens
  misc_RNA (1)...(19): siRNA sense strand
gaggagccaccaacauuug

SEQ ID NO: 1289194 - RNA, 19 nt, Homo sapiens
  misc_RNA (1)...(19): siRNA sense strand
gcuauggagcucauuggua

SEQ ID NO: 1289195 - RNA, 19 nt, Homo sapiens
  misc_RNA (1)...(19): siRNA sense strand
acacaccuuuagugaagua

SEQ ID NO: 1289196 - RNA, 19 nt, Homo sapiens
  misc_RNA (1)...(19): siRNA sense strand
uagagaaacauguccauau

SEQ ID NO: 1289197 - RNA, 19 nt, Homo sapiens
  misc_RNA (1)...(19): siRNA sense strand
guuccaaagugucuuaaag

SEQ ID NO: 1289198 - RNA, 19 nt, Homo sapiens
  misc_RNA (1)...(19): siRNA sense strand
ggugaacgaguagauuaua

SEQ ID NO: 1289199 - RNA, 19 nt, Homo sapiens
  misc_RNA (1)...(19): siRNA sense strand
gaaguagaaguauuugagu

SEQ ID NO: 1289200 - RNA, 19 nt, Homo sapiens
  misc_RNA (1)...(19): siRNA sense strand
gaaacauguccauauauac

SEQ ID NO: 1289201 - RNA, 19 nt, Homo sapiens
  misc_RNA (1)...(19): siRNA sense strand
ugacgccuguuauagagaa

SEQ ID NO: 1289202 - RNA, 19 nt, Homo sapiens
  misc_RNA (1)...(19): siRNA sense strand
cgaguagauuauaagugua

SEQ ID NO: 1289203 - RNA, 19 nt, Homo sapiens
  misc_RNA (1)...(19): siRNA sense strand
gcacuuuauuuguaaugag

SEQ ID NO: 1289204 - RNA, 19 nt, Homo sapiens
  misc_RNA (1)...(19): siRNA sense strand
guagaaguauuugaguauc

SEQ ID NO: 1289205 - RNA, 19 nt, Homo sapiens
  misc_RNA (1)...(19): siRNA sense strand
guauuugaguaucuugaug

SEQ ID NO: 1289206 - RNA, 19 nt, Homo sapiens
  misc_RNA (1)...(19): siRNA sense strand
aggaauacuugacaguuug

SEQ ID NO: 1289207 - RNA, 19 nt, Homo sapiens
  misc_RNA (1)...(19): siRNA sense strand
ccaaaacccuacuaugaga

SEQ ID NO: 1289208 - RNA, 19 nt, Homo sapiens
  misc_RNA (1)...(19): siRNA sense strand
aguguaaaguggucaaaug

SEQ ID NO: 1289209 - RNA, 19 nt, Homo sapiens
  misc_RNA (1)...(19): siRNA sense strand
ccacccauacuauuuguga

SEQ ID NO: 1289210 - RNA, 19 nt, Homo sapiens
  misc_RNA (1)...(19): siRNA sense strand
uuggagagagcacgauuua

SEQ ID NO: 1289211 - RNA, 19 nt, Homo sapiens
  misc_RNA (1)...(19): siRNA sense strand
gguuaucagaugcacuuua

SEQ ID NO: 1289212 - RNA, 19 nt, Homo sapiens
  misc_RNA (1)...(19): siRNA sense strand
caccaacauuugaagcuau

SEQ ID NO: 1289213 - RNA, 19 nt, Homo sapiens
  misc_RNA (1)...(19): siRNA sense strand
ugaggagccaccaacauuu

SEQ ID NO: 1289214 - RNA, 19 nt, Homo sapiens
  misc_RNA (1)...(19): siRNA sense strand
ggaaggaauacuugacagu

SEQ ID NO: 1289215 - RNA, 19 nt, Homo sapiens
  misc_RNA (1)...(19): siRNA sense strand
gaggaaggaauacuugaca

SEQ ID NO: 1289216 - RNA, 19 nt, Homo sapiens
  misc_RNA (1)...(19): siRNA sense strand
ccaguuccaaagugucuua

SEQ ID NO: 1289217 - RNA, 19 nt, Homo sapiens
  misc_RNA (1)...(19): siRNA sense strand
ugaguaucuugaugcagua

SEQ ID NO: 1289218 - RNA, 19 nt, Homo sapiens
  misc_RNA (1)...(19): siRNA sense strand
caccuuuagugaaguagaa

SEQ ID NO: 1289219 - RNA, 19 nt, Homo sapiens
  misc_RNA (1)...(19): siRNA sense strand
acagauaucaggauuugga

SEQ ID NO: 1289220 - RNA, 19 nt, Homo sapiens
  misc_RNA (1)...(19): siRNA sense strand
ucauugcugugauuguuau

SEQ ID NO: 1289221 - RNA, 19 nt, Homo sapiens
  misc_RNA (1)...(19): siRNA sense strand
ucagaugcacuuuauuugu

SEQ ID NO: 1289222 - RNA, 19 nt, Homo sapiens
  misc_RNA (1)...(19): siRNA sense strand
gugcugcuccagaguguaa

SEQ ID NO: 1289223 - RNA, 19 nt, Homo sapiens
  misc_RNA (1)...(19): siRNA sense strand
ggaaaacacaccuuuagug

SEQ ID NO: 1289224 - RNA, 19 nt, Homo sapiens
  misc_RNA (1)...(19): siRNA sense strand
aaggaucaguagcaauuug

SEQ ID NO: 1289225 - RNA, 19 nt, Homo sapiens
  misc_RNA (1)...(19): siRNA sense strand
uauauacgggauccuuuaa

SEQ ID NO: 1289226 - RNA, 19 nt, Homo sapiens
  misc_RNA (1)...(19): siRNA sense strand
ugaaguagaaguauuugag

SEQ ID NO: 1289227 - RNA, 19 nt, Homo sapiens
  misc_RNA (1)...(19): siRNA sense strand
cuugacaguuuggauguuu

SEQ ID NO: 1289228 - RNA, 19 nt, Homo sapiens
  misc_RNA (1)...(19): siRNA sense strand
cauauauacgggauccuuu

SEQ ID NO: 1289229 - RNA, 19 nt, Homo sapiens
  misc_RNA (1)...(19): siRNA sense strand
auauauacgggauccuuua

SEQ ID NO: 1289230 - RNA, 19 nt, Homo sapiens
  misc_RNA (1)...(19): siRNA sense strand
cuuaaaggaucaguagcaa

SEQ ID NO: 1289231 - RNA, 19 nt, Homo sapiens
  misc_RNA (1)...(19): siRNA sense strand
uaaaccugaggaaggaaua

SEQ ID NO: 1289232 - RNA, 19 nt, Homo sapiens
  misc_RNA (1)...(19): siRNA sense strand
agaugacgccuguuauaga

SEQ ID NO: 1289233 - RNA, 19 nt, Homo sapiens
  misc_RNA (1)...(19): siRNA sense strand
ugugauuguuauugccaua

SEQ ID NO: 1289234 - RNA, 19 nt, Homo sapiens
  misc_RNA (1)...(19): siRNA sense strand
gagagcacgauuuauugug

SEQ ID NO: 1289235 - RNA, 19 nt, Homo sapiens
  misc_RNA (1)...(19): siRNA sense strand
gaaguauuugaguaucuug

SEQ ID NO: 1289236 - RNA, 19 nt, Homo sapiens
  misc_RNA (1)...(19): siRNA sense strand
ggcuaccugucucagauga

SEQ ID NO: 1289237 - RNA, 19 nt, Homo sapiens
  misc_RNA (1)...(19): siRNA sense strand
gauaucaggauuuggaaaa

SEQ ID NO: 1289238 - RNA, 19 nt, Homo sapiens
  misc_RNA (1)...(19): siRNA sense strand
ccucuugccacccauacua

SEQ ID NO: 1289239 - RNA, 19 nt, Homo sapiens
  misc_RNA (1)...(19): siRNA sense strand
ccaugguguugcugcugua

SEQ ID NO: 1289240 - RNA, 19 nt, Homo sapiens
  misc_RNA (1)...(19): siRNA sense strand
cagaugacgccuguuauag

SEQ ID NO: 1289241 - RNA, 19 nt, Homo sapiens
  misc_RNA (1)...(19): siRNA sense strand
cagaugguggagcugaaua

SEQ ID NO: 1289242 - RNA, 19 nt, Homo sapiens
  misc_RNA (1)...(19): siRNA sense strand
gucauugcugugauuguua

SEQ ID NO: 1289243 - RNA, 19 nt, Homo sapiens
  misc_RNA (1)...(19): siRNA sense strand
ggagccaccaacauuugaa

SEQ ID NO: 1289244 - RNA, 19 nt, Homo sapiens
  misc_RNA (1)...(19): siRNA sense strand
uuggugaacgaguagauua

SEQ ID NO: 1289245 - RNA, 19 nt, Homo sapiens
  misc_RNA (1)...(19): siRNA sense strand
gcgcuuuccuggguugcuu

SEQ ID NO: 1289246 - RNA, 19 nt, Homo sapiens
  misc_RNA (1)...(19): siRNA sense strand
uacuacaaagcaacaguua

SEQ ID NO: 1289247 - RNA, 19 nt, Homo sapiens
  misc_RNA (1)...(19): siRNA sense strand
cuugaugcaguaacuuaua

SEQ ID NO: 1289248 - RNA, 19 nt, Homo sapiens
  misc_RNA (1)...(19): siRNA sense strand
aaacauguccauauauacg

SEQ ID NO: 1289249 - RNA, 19 nt, Homo sapiens
  misc_RNA (1)...(19): siRNA sense strand
guguaaaguggucaaaugu

SEQ ID NO: 1289250 - RNA, 19 nt, Homo sapiens
  misc_RNA (1)...(19): siRNA sense strand
cuuacgaguuugguuauca

SEQ ID NO: 1289251 - RNA, 19 nt, Homo sapiens
  misc_RNA (1)...(19): siRNA sense strand
uacgggauccuuuaaaugg

SEQ ID NO: 1289252 - RNA, 19 nt, Homo sapiens
  misc_RNA (1)...(19): siRNA sense strand
gcagaugguggagcugaau

SEQ ID NO: 1289253 - RNA, 19 nt, Homo sapiens
  misc_RNA (1)...(19): siRNA sense strand
aaccaaaacccuacuauga

SEQ ID NO: 1289254 - RNA, 19 nt, Homo sapiens
  misc_RNA (1)...(19): siRNA sense strand
uugaugcaguaacuuauag

SEQ ID NO: 1289255 - RNA, 19 nt, Homo sapiens
  misc_RNA (1)...(19): siRNA sense strand
ggagcugaauaugccacuu

SEQ ID NO: 1289256 - RNA, 19 nt, Homo sapiens
  misc_RNA (1)...(19): siRNA sense strand
cgauggcagcgacacaauu

SEQ ID NO: 1289257 - RNA, 19 nt, Homo sapiens
  misc_RNA (1)...(19): siRNA sense strand
gauccauuuucacuuauug

SEQ ID NO: 1289258 - RNA, 19 nt, Homo sapiens
  misc_RNA (1)...(19): siRNA sense strand
ggagagagcacgauuuauu

SEQ ID NO: 1289259 - RNA, 19 nt, Homo sapiens
  misc_RNA (1)...(19): siRNA sense strand
agagaaacauguccauaua

SEQ ID NO: 1289260 - RNA, 19 nt, Homo sapiens
  misc_RNA (1)...(19): siRNA sense strand
cagaugcacuuuauuugua

SEQ ID NO: 1289261 - RNA, 19 nt, Homo sapiens
  misc_RNA (1)...(19): siRNA sense strand
ggacuuacgaguuugguua

SEQ ID NO: 1289262 - RNA, 19 nt, Homo sapiens
  misc_RNA (1)...(19): siRNA sense strand
aaacagauaucaggauuug

SEQ ID NO: 1289263 - RNA, 19 nt, Homo sapiens
  misc_RNA (1)...(19): siRNA sense strand
cuauggagcucauugguaa

SEQ ID NO: 1289264 - RNA, 19 nt, Homo sapiens
  misc_RNA (1)...(19): siRNA sense strand
aaacacaccuuuagugaag

SEQ ID NO: 1289265 - RNA, 19 nt, Homo sapiens
  misc_RNA (1)...(19): siRNA sense strand
gaacuuaaaggaucaguag

SEQ ID NO: 1289266 - RNA, 19 nt, Homo sapiens
  misc_RNA (1)...(19): siRNA sense strand
gaaaacagauaucaggauu

SEQ ID NO: 1289267 - RNA, 19 nt, Homo sapiens
  misc_RNA (1)...(19): siRNA sense strand
uaaaggaucaguagcaauu

SEQ ID NO: 1289268 - RNA, 19 nt, Homo sapiens
  misc_RNA (1)...(19): siRNA sense strand
aaaugggacuuacgaguuu

SEQ ID NO: 1289269 - RNA, 19 nt, Homo sapiens
  misc_RNA (1)...(19): siRNA sense strand
guuaucagaugcacuuuau

SEQ ID NO: 1289270 - RNA, 19 nt, Homo sapiens
  misc_RNA (1)...(19): siRNA sense strand
ugagauuggugaacgagua

SEQ ID NO: 1289271 - RNA, 19 nt, Homo sapiens
  misc_RNA (1)...(19): siRNA sense strand
gugaacgaguagauuauaa

SEQ ID NO: 1289272 - RNA, 19 nt, Homo sapiens
  misc_RNA (1)...(19): siRNA sense strand
gagagagcacgauuuauug

SEQ ID NO: 1289273 - RNA, 19 nt, Homo sapiens
  misc_RNA (1)...(19): siRNA sense strand
caaaugggacuuacgaguu

SEQ ID NO: 1289274 - RNA, 19 nt, Homo sapiens
  misc_RNA (1)...(19): siRNA sense strand
ggucauugcugugauuguu

SEQ ID NO: 1289275 - RNA, 19 nt, Homo sapiens
  misc_RNA (1)...(19): siRNA sense strand
ccagauccauuuucacuua

SEQ ID NO: 1289276 - RNA, 19 nt, Homo sapiens
  misc_RNA (1)...(19): siRNA sense strand
gaaggaauacuugacaguu

SEQ ID NO: 1289277 - RNA, 19 nt, Homo sapiens
  misc_RNA (1)...(19): siRNA sense strand
aaggaauacuugacaguuu

SEQ ID NO: 1289278 - RNA, 19 nt, Homo sapiens
  misc_RNA (1)...(19): siRNA sense strand
ucagaugacgccuguuaua

SEQ ID NO: 1289279 - RNA, 19 nt, Homo sapiens
  misc_RNA (1)...(19): siRNA sense strand
gaaaacacaccuuuaguga

SEQ ID NO: 1289280 - RNA, 19 nt, Homo sapiens
  misc_RNA (1)...(19): siRNA sense strand
gaugacgccuguuauagag

SEQ ID NO: 1289281 - RNA, 19 nt, Homo sapiens
  misc_RNA (1)...(19): siRNA sense strand
gagaaacauguccauauau

SEQ ID NO: 1289282 - RNA, 19 nt, Homo sapiens
  misc_RNA (1)...(19): siRNA sense strand
acgaguagauuauaagugu

SEQ ID NO: 1289283 - RNA, 19 nt, Homo sapiens
  misc_RNA (1)...(19): siRNA sense strand
cuacaaagcaacaguuaug

SEQ ID NO: 1289284 - RNA, 19 nt, Homo sapiens
  misc_RNA (1)...(19): siRNA sense strand
ccaccaacauuugaagcua

SEQ ID NO: 1289285 - RNA, 19 nt, Homo sapiens
  misc_RNA (1)...(19): siRNA sense strand
uauacgggauccuuuaaau

SEQ ID NO: 1289286 - RNA, 19 nt, Homo sapiens
  misc_RNA (1)...(19): siRNA sense strand
cgaguuugguuaucagaug

SEQ ID NO: 1289287 - RNA, 19 nt, Homo sapiens
  misc_RNA (1)...(19): siRNA sense strand
gaacgaguagauuauaagu

SEQ ID NO: 1289288 - RNA, 19 nt, Homo sapiens
  misc_RNA (1)...(19): siRNA sense strand
gugaggagccaccaacauu

SEQ ID NO: 1289289 - RNA, 19 nt, Homo sapiens
  misc_RNA (1)...(19): siRNA sense strand
gauggcagcgacacaauug

SEQ ID NO: 1289290 - RNA, 19 nt, Homo sapiens
  misc_RNA (1)...(19): siRNA sense strand
gcuauggagcucauuggua

SEQ ID NO: 1289291 - RNA, 19 nt, Homo sapiens
  misc_RNA (1)...(19): siRNA sense strand
gaggagccaccaacauuug

SEQ ID NO: 1289292 - RNA, 19 nt, Homo sapiens
  misc_RNA (1)...(19): siRNA sense strand
acacaccuuuagugaagua

SEQ ID NO: 1289293 - RNA, 19 nt, Homo sapiens
  misc_RNA (1)...(19): siRNA sense strand
ucucagaugacgccuguua

SEQ ID NO: 1289294 - RNA, 19 nt, Homo sapiens
  misc_RNA (1)...(19): siRNA sense strand
uagagaaacauguccauau

SEQ ID NO: 1289295 - RNA, 19 nt, Homo sapiens
  misc_RNA (1)...(19): siRNA sense strand
guuccaaagugucuuaaag

SEQ ID NO: 1289296 - RNA, 19 nt, Homo sapiens
  misc_RNA (1)...(19): siRNA sense strand
ggugaacgaguagauuaua

SEQ ID NO: 1289297 - RNA, 19 nt, Homo sapiens
  misc_RNA (1)...(19): siRNA sense strand
gaaguagaaguauuugagu

SEQ ID NO: 1289298 - RNA, 19 nt, Homo sapiens
  misc_RNA (1)...(19): siRNA sense strand
gaaacauguccauauauac

SEQ ID NO: 1289299 - RNA, 19 nt, Homo sapiens
  misc_RNA (1)...(19): siRNA sense strand
ugacgccuguuauagagaa

SEQ ID NO: 1289300 - RNA, 19 nt, Homo sapiens
  misc_RNA (1)...(19): siRNA sense strand
cgaguagauuauaagugua

SEQ ID NO: 1289301 - RNA, 19 nt, Homo sapiens
  misc_RNA (1)...(19): siRNA sense strand
gcacuuuauuuguaaugag

SEQ ID NO: 1289302 - RNA, 19 nt, Homo sapiens
  misc_RNA (1)...(19): siRNA sense strand
guagaaguauuugaguauc

SEQ ID NO: 1289303 - RNA, 19 nt, Homo sapiens
  misc_RNA (1)...(19): siRNA sense strand
guauuugaguaucuugaug

SEQ ID NO: 1289304 - RNA, 19 nt, Homo sapiens
  misc_RNA (1)...(19): siRNA sense strand
aggaauacuugacaguuug

SEQ ID NO: 1289305 - RNA, 19 nt, Homo sapiens
  misc_RNA (1)...(19): siRNA sense strand
ccaaaacccuacuaugaga

SEQ ID NO: 1289306 - RNA, 19 nt, Homo sapiens
  misc_RNA (1)...(19): siRNA sense strand
aguguaaaguggucaaaug

SEQ ID NO: 1289307 - RNA, 19 nt, Homo sapiens
  misc_RNA (1)...(19): siRNA sense strand
ccacccauacuauuuguga

SEQ ID NO: 1289308 - RNA, 19 nt, Homo sapiens
  misc_RNA (1)...(19): siRNA sense strand
caccaacauuugaagcuau

SEQ ID NO: 1289309 - RNA, 19 nt, Homo sapiens
  misc_RNA (1)...(19): siRNA sense strand
uuggagagagcacgauuua

SEQ ID NO: 1289310 - RNA, 19 nt, Homo sapiens
  misc_RNA (1)...(19): siRNA sense strand
gguuaucagaugcacuuua

SEQ ID NO: 1289311 - RNA, 19 nt, Homo sapiens
  misc_RNA (1)...(19): siRNA sense strand
ugaggagccaccaacauuu

SEQ ID NO: 1289312 - RNA, 19 nt, Homo sapiens
  misc_RNA (1)...(19): siRNA sense strand
ggaaggaauacuugacagu

SEQ ID NO: 1289313 - RNA, 19 nt, Homo sapiens
  misc_RNA (1)...(19): siRNA sense strand
gaggaaggaauacuugaca

SEQ ID NO: 1289314 - RNA, 19 nt, Homo sapiens
  misc_RNA (1)...(19): siRNA sense strand
ccaguuccaaagugucuua

SEQ ID NO: 1289315 - RNA, 19 nt, Homo sapiens
  misc_RNA (1)...(19): siRNA sense strand
ugaguaucuugaugcagua

SEQ ID NO: 1289316 - RNA, 19 nt, Homo sapiens
  misc_RNA (1)...(19): siRNA sense strand
caccuuuagugaaguagaa

SEQ ID NO: 1289317 - RNA, 19 nt, Homo sapiens
  misc_RNA (1)...(19): siRNA sense strand
acagauaucaggauuugga

SEQ ID NO: 1289318 - RNA, 19 nt, Homo sapiens
  misc_RNA (1)...(19): siRNA sense strand
ucauugcugugauuguuau

SEQ ID NO: 1289319 - RNA, 19 nt, Homo sapiens
  misc_RNA (1)...(19): siRNA sense strand
ucagaugcacuuuauuugu

SEQ ID NO: 1289320 - RNA, 19 nt, Homo sapiens
  misc_RNA (1)...(19): siRNA sense strand
gugcugcuccagaguguaa

SEQ ID NO: 1289321 - RNA, 19 nt, Homo sapiens
  misc_RNA (1)...(19): siRNA sense strand
ggaaaacacaccuuuagug

SEQ ID NO: 1289322 - RNA, 19 nt, Homo sapiens
  misc_RNA (1)...(19): siRNA sense strand
aaggaucaguagcaauuug

SEQ ID NO: 1289323 - RNA, 19 nt, Homo sapiens
  misc_RNA (1)...(19): siRNA sense strand
uauauacgggauccuuuaa

SEQ ID NO: 1289324 - RNA, 19 nt, Homo sapiens
  misc_RNA (1)...(19): siRNA sense strand
ugaaguagaaguauuugag

SEQ ID NO: 1289325 - RNA, 19 nt, Homo sapiens
  misc_RNA (1)...(19): siRNA sense strand
cuugacaguuuggauguuu

SEQ ID NO: 1289326 - RNA, 19 nt, Homo sapiens
  misc_RNA (1)...(19): siRNA sense strand
cauauauacgggauccuuu

SEQ ID NO: 1289327 - RNA, 19 nt, Homo sapiens
  misc_RNA (1)...(19): siRNA sense strand
auauauacgggauccuuua

SEQ ID NO: 1289328 - RNA, 19 nt, Homo sapiens
  misc_RNA (1)...(19): siRNA sense strand
cuuaaaggaucaguagcaa

SEQ ID NO: 1289329 - RNA, 19 nt, Homo sapiens
  misc_RNA (1)...(19): siRNA sense strand
uaaaccugaggaaggaaua

SEQ ID NO: 1289330 - RNA, 19 nt, Homo sapiens
  misc_RNA (1)...(19): siRNA sense strand
agaugacgccuguuauaga

SEQ ID NO: 1289331 - RNA, 19 nt, Homo sapiens
  misc_RNA (1)...(19): siRNA sense strand
ugugauuguuauugccaua

SEQ ID NO: 1289332 - RNA, 19 nt, Homo sapiens
  misc_RNA (1)...(19): siRNA sense strand
gagagcacgauuuauugug

SEQ ID NO: 1289333 - RNA, 19 nt, Homo sapiens
  misc_RNA (1)...(19): siRNA sense strand
gaaguauuugaguaucuug

SEQ ID NO: 1289334 - RNA, 19 nt, Homo sapiens
  misc_RNA (1)...(19): siRNA sense strand
ggcuaccugucucagauga

SEQ ID NO: 1289335 - RNA, 19 nt, Homo sapiens
  misc_RNA (1)...(19): siRNA sense strand
gauaucaggauuuggaaaa

SEQ ID NO: 1289336 - RNA, 19 nt, Homo sapiens
  misc_RNA (1)...(19): siRNA sense strand
ccucuugccacccauacua

SEQ ID NO: 1289337 - RNA, 19 nt, Homo sapiens
  misc_RNA (1)...(19): siRNA sense strand
ccaugguguugcugcugua

SEQ ID NO: 1289338 - RNA, 19 nt, Homo sapiens
  misc_RNA (1)...(19): siRNA sense strand
cagaugacgccuguuauag

SEQ ID NO: 1289339 - RNA, 19 nt, Homo sapiens
  misc_RNA (1)...(19): siRNA sense strand
uuggugaacgaguagauua

SEQ ID NO: 1289340 - RNA, 19 nt, Homo sapiens
  misc_RNA (1)...(19): siRNA sense strand
gucauugcugugauuguua

SEQ ID NO: 1289341 - RNA, 19 nt, Homo sapiens
  misc_RNA (1)...(19): siRNA sense strand
ggagccaccaacauuugaa

SEQ ID NO: 1289342 - RNA, 19 nt, Homo sapiens
  misc_RNA (1)...(19): siRNA sense strand
gcgcuuuccuggguugcuu

SEQ ID NO: 1289343 - RNA, 19 nt, Homo sapiens
  misc_RNA (1)...(19): siRNA sense strand
uacuacaaagcaacaguua

SEQ ID NO: 1289344 - RNA, 19 nt, Homo sapiens
  misc_RNA (1)...(19): siRNA sense strand
cuugaugcaguaacuuaua

SEQ ID NO: 1289345 - RNA, 19 nt, Homo sapiens
  misc_RNA (1)...(19): siRNA sense strand
aaacauguccauauauacg

SEQ ID NO: 1289346 - RNA, 19 nt, Homo sapiens
  misc_RNA (1)...(19): siRNA sense strand
guguaaaguggucaaaugu

SEQ ID NO: 1289347 - RNA, 19 nt, Homo sapiens
  misc_RNA (1)...(19): siRNA sense strand
cuuacgaguuugguuauca

SEQ ID NO: 1289348 - RNA, 19 nt, Homo sapiens
  misc_RNA (1)...(19): siRNA sense strand
uacgggauccuuuaaaugg

SEQ ID NO: 1289349 - RNA, 19 nt, Homo sapiens
  misc_RNA (1)...(19): siRNA sense strand
aaccaaaacccuacuauga

SEQ ID NO: 1289350 - RNA, 19 nt, Homo sapiens
  misc_RNA (1)...(19): siRNA sense strand
cccaauaugugaaaagguu

SEQ ID NO: 1289351 - RNA, 19 nt, Homo sapiens
  misc_RNA (1)...(19): siRNA sense strand
cgauggcagcgacacaauu

SEQ ID NO: 1289352 - RNA, 19 nt, Homo sapiens
  misc_RNA (1)...(19): siRNA sense strand
gauccauuuucacuuauug

SEQ ID NO: 1289353 - RNA, 19 nt, Homo sapiens
  misc_RNA (1)...(19): siRNA sense strand
uugaugcaguaacuuauag

SEQ ID NO: 1289354 - RNA, 19 nt, Homo sapiens
  misc_RNA (1)...(19): siRNA sense strand
guaucuugaugcaguaacu

SEQ ID NO: 1289355 - RNA, 19 nt, Homo sapiens
  misc_RNA (1)...(19): siRNA sense strand
caacauuugaagcuaugga

SEQ ID NO: 1289356 - RNA, 19 nt, Homo sapiens
  misc_RNA (1)...(19): siRNA sense strand
gagauuggugaacgaguag

SEQ ID NO: 1289357 - RNA, 19 nt, Homo sapiens
  misc_RNA (1)...(19): siRNA sense strand
ggagagagcacgauuuauu

SEQ ID NO: 1289358 - RNA, 19 nt, Homo sapiens
  misc_RNA (1)...(19): siRNA sense strand
agagaaacauguccauaua

SEQ ID NO: 1289359 - RNA, 19 nt, Homo sapiens
  misc_RNA (1)...(19): siRNA sense strand
cagaugcacuuuauuugua

SEQ ID NO: 1289360 - RNA, 19 nt, Homo sapiens
  misc_RNA (1)...(19): siRNA sense strand
ggacuuacgaguuugguua

SEQ ID NO: 1289361 - RNA, 19 nt, Homo sapiens
  misc_RNA (1)...(19): siRNA sense strand
aaacagauaucaggauuug

SEQ ID NO: 1289362 - RNA, 19 nt, Homo sapiens
  misc_RNA (1)...(19): siRNA sense strand
cuauggagcucauugguaa

SEQ ID NO: 1289363 - RNA, 19 nt, Homo sapiens
  misc_RNA (1)...(19): siRNA sense strand
aaacacaccuuuagugaag

SEQ ID NO: 1289364 - RNA, 19 nt, Homo sapiens
  misc_RNA (1)...(19): siRNA sense strand
gaacuuaaaggaucaguag

SEQ ID NO: 1289365 - RNA, 19 nt, Homo sapiens
  misc_RNA (1)...(19): siRNA sense strand
gaaaacagauaucaggauu

SEQ ID NO: 1289366 - RNA, 19 nt, Homo sapiens
  misc_RNA (1)...(19): siRNA sense strand
uaaaggaucaguagcaauu

SEQ ID NO: 1289367 - RNA, 19 nt, Homo sapiens
  misc_RNA (1)...(19): siRNA sense strand
aaaugggacuuacgaguuu

SEQ ID NO: 1289368 - RNA, 19 nt, Homo sapiens
  misc_RNA (1)...(19): siRNA sense strand
guuaucagaugcacuuuau

SEQ ID NO: 1289369 - RNA, 19 nt, Homo sapiens
  misc_RNA (1)...(19): siRNA sense strand
ugagauuggugaacgagua

SEQ ID NO: 1289370 - RNA, 19 nt, Homo sapiens
  misc_RNA (1)...(19): siRNA sense strand
gugaacgaguagauuauaa

SEQ ID NO: 1289371 - RNA, 19 nt, Homo sapiens
  misc_RNA (1)...(19): siRNA sense strand
gagagagcacgauuuauug

SEQ ID NO: 1289372 - RNA, 19 nt, Homo sapiens
  misc_RNA (1)...(19): siRNA sense strand
caaaugggacuuacgaguu

SEQ ID NO: 1289373 - RNA, 19 nt, Homo sapiens
  misc_RNA (1)...(19): siRNA sense strand
ggucauugcugugauuguu

SEQ ID NO: 1289374 - RNA, 19 nt, Homo sapiens
  misc_RNA (1)...(19): siRNA sense strand
ccagauccauuuucacuua

SEQ ID NO: 1289375 - RNA, 19 nt, Homo sapiens
  misc_RNA (1)...(19): siRNA sense strand
gaaggaauacuugacaguu

SEQ ID NO: 1289376 - RNA, 19 nt, Homo sapiens
  misc_RNA (1)...(19): siRNA sense strand
aaggaauacuugacaguuu

SEQ ID NO: 1289377 - RNA, 19 nt, Homo sapiens
  misc_RNA (1)...(19): siRNA sense strand
ucagaugacgccuguuaua

SEQ ID NO: 1289378 - RNA, 19 nt, Homo sapiens
  misc_RNA (1)...(19): siRNA sense strand
gaaaacacaccuuuaguga

SEQ ID NO: 1289379 - RNA, 19 nt, Homo sapiens
  misc_RNA (1)...(19): siRNA sense strand
gaugacgccuguuauagag

SEQ ID NO: 1289380 - RNA, 19 nt, Homo sapiens
  misc_RNA (1)...(19): siRNA sense strand
gagaaacauguccauauau

SEQ ID NO: 1289381 - RNA, 19 nt, Homo sapiens
  misc_RNA (1)...(19): siRNA sense strand
acgaguagauuauaagugu

SEQ ID NO: 1289382 - RNA, 19 nt, Homo sapiens
  misc_RNA (1)...(19): siRNA sense strand
cuacaaagcaacaguuaug

SEQ ID NO: 1289383 - RNA, 19 nt, Homo sapiens
  misc_RNA (1)...(19): siRNA sense strand
ccaccaacauuugaagcua

SEQ ID NO: 1289384 - RNA, 19 nt, Homo sapiens
  misc_RNA (1)...(19): siRNA sense strand
uauacgggauccuuuaaau

SEQ ID NO: 1289385 - RNA, 19 nt, Homo sapiens
  misc_RNA (1)...(19): siRNA sense strand
cgaguuugguuaucagaug

SEQ ID NO: 1289386 - RNA, 19 nt, Homo sapiens
  misc_RNA (1)...(19): siRNA sense strand
gaacgaguagauuauaagu

SEQ ID NO: 1289387 - RNA, 19 nt, Homo sapiens
  misc_RNA (1)...(19): siRNA sense strand
gugaggagccaccaacauu

SEQ ID NO: 1289388 - RNA, 19 nt, Homo sapiens
  misc_RNA (1)...(19): siRNA sense strand
gauggcagcgacacaauug

SEQ ID NO: 1289389 - RNA, 19 nt, Homo sapiens
  misc_RNA (1)...(19): siRNA sense strand
gcuauggagcucauuggua

SEQ ID NO: 1289390 - RNA, 19 nt, Homo sapiens
  misc_RNA (1)...(19): siRNA sense strand
gaggagccaccaacauuug

SEQ ID NO: 1289391 - RNA, 19 nt, Homo sapiens
  misc_RNA (1)...(19): siRNA sense strand
acacaccuuuagugaagua

SEQ ID NO: 1289392 - RNA, 19 nt, Homo sapiens
  misc_RNA (1)...(19): siRNA sense strand
ucucagaugacgccuguua

SEQ ID NO: 1289393 - RNA, 19 nt, Homo sapiens
  misc_RNA (1)...(19): siRNA sense strand
uagagaaacauguccauau

SEQ ID NO: 1289394 - RNA, 19 nt, Homo sapiens
  misc_RNA (1)...(19): siRNA sense strand
ggugaacgaguagauuaua

SEQ ID NO: 1289395 - RNA, 19 nt, Homo sapiens
  misc_RNA (1)...(19): siRNA sense strand
gaaguagaaguauuugagu

SEQ ID NO: 1289396 - RNA, 19 nt, Homo sapiens
  misc_RNA (1)...(19): siRNA sense strand
gaaacauguccauauauac

SEQ ID NO: 1289397 - RNA, 19 nt, Homo sapiens
  misc_RNA (1)...(19): siRNA sense strand
ugacgccuguuauagagaa

SEQ ID NO: 1289398 - RNA, 19 nt, Homo sapiens
  misc_RNA (1)...(19): siRNA sense strand
cgaguagauuauaagugua

SEQ ID NO: 1289399 - RNA, 19 nt, Homo sapiens
  misc_RNA (1)...(19): siRNA sense strand
gcacuuuauuuguaaugag

SEQ ID NO: 1289400 - RNA, 19 nt, Homo sapiens
  misc_RNA (1)...(19): siRNA sense strand
guagaaguauuugaguauc

SEQ ID NO: 1289401 - RNA, 19 nt, Homo sapiens
  misc_RNA (1)...(19): siRNA sense strand
guauuugaguaucuugaug

SEQ ID NO: 1289402 - RNA, 19 nt, Homo sapiens
  misc_RNA (1)...(19): siRNA sense strand
aggaauacuugacaguuug

SEQ ID NO: 1289403 - RNA, 19 nt, Homo sapiens
  misc_RNA (1)...(19): siRNA sense strand
aguguaaaguggucaaaug

SEQ ID NO: 1289404 - RNA, 19 nt, Homo sapiens
  misc_RNA (1)...(19): siRNA sense strand
ccaaaacccuacuaugaga

SEQ ID NO: 1289405 - RNA, 19 nt, Homo sapiens
  misc_RNA (1)...(19): siRNA sense strand
ccacccauacuauuuguga

SEQ ID NO: 1289406 - RNA, 19 nt, Homo sapiens
  misc_RNA (1)...(19): siRNA sense strand
caccaacauuugaagcuau

SEQ ID NO: 1289407 - RNA, 19 nt, Homo sapiens
  misc_RNA (1)...(19): siRNA sense strand
uuggagagagcacgauuua

SEQ ID NO: 1289408 - RNA, 19 nt, Homo sapiens
  misc_RNA (1)...(19): siRNA sense strand
gguuaucagaugcacuuua

SEQ ID NO: 1289409 - RNA, 19 nt, Homo sapiens
  misc_RNA (1)...(19): siRNA sense strand
ugaggagccaccaacauuu

SEQ ID NO: 1289410 - RNA, 19 nt, Homo sapiens
  misc_RNA (1)...(19): siRNA sense strand
ggaaggaauacuugacagu

SEQ ID NO: 1289411 - RNA, 19 nt, Homo sapiens
  misc_RNA (1)...(19): siRNA sense strand
gaggaaggaauacuugaca

SEQ ID NO: 1289412 - RNA, 19 nt, Homo sapiens
  misc_RNA (1)...(19): siRNA sense strand
ugaguaucuugaugcagua

SEQ ID NO: 1289413 - RNA, 19 nt, Homo sapiens
  misc_RNA (1)...(19): siRNA sense strand
caccuuuagugaaguagaa

SEQ ID NO: 1289414 - RNA, 19 nt, Homo sapiens
  misc_RNA (1)...(19): siRNA sense strand
acagauaucaggauuugga

SEQ ID NO: 1289415 - RNA, 19 nt, Homo sapiens
  misc_RNA (1)...(19): siRNA sense strand
ucauugcugugauuguuau

SEQ ID NO: 1289416 - RNA, 19 nt, Homo sapiens
  misc_RNA (1)...(19): siRNA sense strand
ucagaugcacuuuauuugu

SEQ ID NO: 1289417 - RNA, 19 nt, Homo sapiens
  misc_RNA (1)...(19): siRNA sense strand
gugcugcuccagaguguaa

SEQ ID NO: 1289418 - RNA, 19 nt, Homo sapiens
  misc_RNA (1)...(19): siRNA sense strand
ggaaaacacaccuuuagug

SEQ ID NO: 1289419 - RNA, 19 nt, Homo sapiens
  misc_RNA (1)...(19): siRNA sense strand
aaggaucaguagcaauuug

SEQ ID NO: 1289420 - RNA, 19 nt, Homo sapiens
  misc_RNA (1)...(19): siRNA sense strand
uauauacgggauccuuuaa

SEQ ID NO: 1289421 - RNA, 19 nt, Homo sapiens
  misc_RNA (1)...(19): siRNA sense strand
ugaaguagaaguauuugag

SEQ ID NO: 1289422 - RNA, 19 nt, Homo sapiens
  misc_RNA (1)...(19): siRNA sense strand
cuugacaguuuggauguuu

SEQ ID NO: 1289423 - RNA, 19 nt, Homo sapiens
  misc_RNA (1)...(19): siRNA sense strand
cauauauacgggauccuuu

SEQ ID NO: 1289424 - RNA, 19 nt, Homo sapiens
  misc_RNA (1)...(19): siRNA sense strand
auauauacgggauccuuua

SEQ ID NO: 1289425 - RNA, 19 nt, Homo sapiens
  misc_RNA (1)...(19): siRNA sense strand
cuuaaaggaucaguagcaa

SEQ ID NO: 1289426 - RNA, 19 nt, Homo sapiens
  misc_RNA (1)...(19): siRNA sense strand
uaaaccugaggaaggaaua

SEQ ID NO: 1289427 - RNA, 19 nt, Homo sapiens
  misc_RNA (1)...(19): siRNA sense strand
agaugacgccuguuauaga

SEQ ID NO: 1289428 - RNA, 19 nt, Homo sapiens
  misc_RNA (1)...(19): siRNA sense strand
ugugauuguuauugccaua

SEQ ID NO: 1289429 - RNA, 19 nt, Homo sapiens
  misc_RNA (1)...(19): siRNA sense strand
gagagcacgauuuauugug

SEQ ID NO: 1289430 - RNA, 19 nt, Homo sapiens
  misc_RNA (1)...(19): siRNA sense strand
gaaguauuugaguaucuug

SEQ ID NO: 1289431 - RNA, 19 nt, Homo sapiens
  misc_RNA (1)...(19): siRNA sense strand
ccucuugccacccauacua

SEQ ID NO: 1289432 - RNA, 19 nt, Homo sapiens
  misc_RNA (1)...(19): siRNA sense strand
gauaucaggauuuggaaaa

SEQ ID NO: 1289433 - RNA, 19 nt, Homo sapiens
  misc_RNA (1)...(19): siRNA sense strand
ggcuaccugucucagauga

SEQ ID NO: 1289434 - RNA, 19 nt, Homo sapiens
  misc_RNA (1)...(19): siRNA sense strand
ccaugguguugcugcugua

SEQ ID NO: 1289435 - RNA, 19 nt, Homo sapiens
  misc_RNA (1)...(19): siRNA sense strand
cagaugacgccuguuauag

SEQ ID NO: 1289436 - RNA, 19 nt, Homo sapiens
  misc_RNA (1)...(19): siRNA sense strand
gucauugcugugauuguua

SEQ ID NO: 1289437 - RNA, 19 nt, Homo sapiens
  misc_RNA (1)...(19): siRNA sense strand
uuggugaacgaguagauua

SEQ ID NO: 1289438 - RNA, 19 nt, Homo sapiens
  misc_RNA (1)...(19): siRNA sense strand
ggagccaccaacauuugaa

SEQ ID NO: 1289439 - RNA, 19 nt, Homo sapiens
  misc_RNA (1)...(19): siRNA sense strand
gcgcuuuccuggguugcuu

SEQ ID NO: 1289440 - RNA, 19 nt, Homo sapiens
  misc_RNA (1)...(19): siRNA sense strand
uacuacaaagcaacaguua

SEQ ID NO: 1289441 - RNA, 19 nt, Homo sapiens
  misc_RNA (1)...(19): siRNA sense strand
cuugaugcaguaacuuaua

SEQ ID NO: 1289442 - RNA, 19 nt, Homo sapiens
  misc_RNA (1)...(19): siRNA sense strand
aaacauguccauauauacg

SEQ ID NO: 1289443 - RNA, 19 nt, Homo sapiens
  misc_RNA (1)...(19): siRNA sense strand
guguaaaguggucaaaugu

SEQ ID NO: 1289444 - RNA, 19 nt, Homo sapiens
  misc_RNA (1)...(19): siRNA sense strand
cuuacgaguuugguuauca

SEQ ID NO: 1289445 - RNA, 19 nt, Homo sapiens
  misc_RNA (1)...(19): siRNA sense strand
uacgggauccuuuaaaugg

SEQ ID NO: 1289446 - RNA, 19 nt, Homo sapiens
  misc_RNA (1)...(19): siRNA sense strand
aaccaaaacccuacuauga

SEQ ID NO: 1289447 - RNA, 19 nt, Homo sapiens
  misc_RNA (1)...(19): siRNA sense strand
cccaauaugugaaaagguu

SEQ ID NO: 1289448 - RNA, 19 nt, Homo sapiens
  misc_RNA (1)...(19): siRNA sense strand
cgauggcagcgacacaauu

SEQ ID NO: 1289449 - RNA, 19 nt, Homo sapiens
  misc_RNA (1)...(19): siRNA sense strand
gauccauuuucacuuauug

SEQ ID NO: 1289450 - RNA, 19 nt, Homo sapiens
  misc_RNA (1)...(19): siRNA sense strand
uugaugcaguaacuuauag

SEQ ID NO: 1289451 - RNA, 19 nt, Homo sapiens
  misc_RNA (1)...(19): siRNA sense strand
guaucuugaugcaguaacu

SEQ ID NO: 1289452 - RNA, 19 nt, Homo sapiens
  misc_RNA (1)...(19): siRNA sense strand
caacauuugaagcuaugga

SEQ ID NO: 1289453 - RNA, 19 nt, Homo sapiens
  misc_RNA (1)...(19): siRNA sense strand
gagauuggugaacgaguag

SEQ ID NO: 1289454 - RNA, 19 nt, Homo sapiens
  misc_RNA (1)...(19): siRNA sense strand
ggagagagcacgauuuauu

SEQ ID NO: 1289455 - RNA, 19 nt, Homo sapiens
  misc_RNA (1)...(19): siRNA sense strand
agagaaacauguccauaua

SEQ ID NO: 1289456 - RNA, 19 nt, Homo sapiens
  misc_RNA (1)...(19): siRNA sense strand
cagaugcacuuuauuugua

SEQ ID NO: 1289457 - RNA, 19 nt, Homo sapiens
  misc_RNA (1)...(19): siRNA sense strand
ggacuuacgaguuugguua

SEQ ID NO: 1289458 - RNA, 19 nt, Homo sapiens
  misc_RNA (1)...(19): siRNA sense strand
aaacagauaucaggauuug

SEQ ID NO: 1289459 - RNA, 19 nt, Homo sapiens
  misc_RNA (1)...(19): siRNA sense strand
cuauggagcucauugguaa

SEQ ID NO: 1289460 - RNA, 19 nt, Homo sapiens
  misc_RNA (1)...(19): siRNA sense strand
aaacacaccuuuagugaag

SEQ ID NO: 1289461 - RNA, 19 nt, Homo sapiens
  misc_RNA (1)...(19): siRNA sense strand
gaacuuaaaggaucaguag

SEQ ID NO: 1289462 - RNA, 19 nt, Homo sapiens
  misc_RNA (1)...(19): siRNA sense strand
gaaaacagauaucaggauu

SEQ ID NO: 1289463 - RNA, 19 nt, Homo sapiens
  misc_RNA (1)...(19): siRNA sense strand
uaaaggaucaguagcaauu

SEQ ID NO: 1289464 - RNA, 19 nt, Homo sapiens
  misc_RNA (1)...(19): siRNA sense strand
aaaugggacuuacgaguuu

SEQ ID NO: 1289465 - RNA, 19 nt, Homo sapiens
  misc_RNA (1)...(19): siRNA sense strand
guuaucagaugcacuuuau

SEQ ID NO: 1289466 - RNA, 19 nt, Homo sapiens
  misc_RNA (1)...(19): siRNA sense strand
gagcugaauaugccacuua

SEQ ID NO: 1289467 - RNA, 19 nt, Homo sapiens
  misc_RNA (1)...(19): siRNA sense strand
ugagauuggugaacgagua

SEQ ID NO: 1289468 - RNA, 19 nt, Homo sapiens
  misc_RNA (1)...(19): siRNA sense strand
gugaacgaguagauuauaa

SEQ ID NO: 1289469 - RNA, 19 nt, Homo sapiens
  misc_RNA (1)...(19): siRNA sense strand
gagagagcacgauuuauug

SEQ ID NO: 1289470 - RNA, 19 nt, Homo sapiens
  misc_RNA (1)...(19): siRNA sense strand
caaaugggacuuacgaguu

SEQ ID NO: 1289471 - RNA, 19 nt, Homo sapiens
  misc_RNA (1)...(19): siRNA sense strand
ggucauugcugugauuguu

SEQ ID NO: 1289472 - RNA, 19 nt, Homo sapiens
  misc_RNA (1)...(19): siRNA sense strand
ccagauccauuuucacuua

SEQ ID NO: 1289473 - RNA, 19 nt, Homo sapiens
  misc_RNA (1)...(19): siRNA sense strand
gaaggaauacuugacaguu

SEQ ID NO: 1289474 - RNA, 19 nt, Homo sapiens
  misc_RNA (1)...(19): siRNA sense strand
aaggaauacuugacaguuu

SEQ ID NO: 1289475 - RNA, 19 nt, Homo sapiens
  misc_RNA (1)...(19): siRNA sense strand
ucagaugacgccuguuaua

SEQ ID NO: 1289476 - RNA, 19 nt, Homo sapiens
  misc_RNA (1)...(19): siRNA sense strand
gaaaacacaccuuuaguga

SEQ ID NO: 1289477 - RNA, 19 nt, Homo sapiens
  misc_RNA (1)...(19): siRNA sense strand
gaugacgccuguuauagag

SEQ ID NO: 1289478 - RNA, 19 nt, Homo sapiens
  misc_RNA (1)...(19): siRNA sense strand
gagaaacauguccauauau

SEQ ID NO: 1289479 - RNA, 19 nt, Homo sapiens
  misc_RNA (1)...(19): siRNA sense strand
ccacuuaccagacuaaauc

SEQ ID NO: 1289480 - RNA, 19 nt, Homo sapiens
  misc_RNA (1)...(19): siRNA sense strand
acgaguagauuauaagugu

SEQ ID NO: 1289481 - RNA, 19 nt, Homo sapiens
  misc_RNA (1)...(19): siRNA sense strand
cuacaaagcaacaguuaug

SEQ ID NO: 1289482 - RNA, 19 nt, Homo sapiens
  misc_RNA (1)...(19): siRNA sense strand
ccaccaacauuugaagcua

SEQ ID NO: 1289483 - RNA, 19 nt, Homo sapiens
  misc_RNA (1)...(19): siRNA sense strand
uauacgggauccuuuaaau

SEQ ID NO: 1289484 - RNA, 19 nt, Homo sapiens
  misc_RNA (1)...(19): siRNA sense strand
cgaguuugguuaucagaug

SEQ ID NO: 1289485 - RNA, 19 nt, Homo sapiens
  misc_RNA (1)...(19): siRNA sense strand
gaacgaguagauuauaagu

SEQ ID NO: 1289486 - RNA, 19 nt, Homo sapiens
  misc_RNA (1)...(19): siRNA sense strand
gugaggagccaccaacauu

SEQ ID NO: 1289487 - RNA, 19 nt, Homo sapiens
  misc_RNA (1)...(19): siRNA sense strand
gauggcagcgacacaauug

SEQ ID NO: 1289488 - RNA, 19 nt, Homo sapiens
  misc_RNA (1)...(19): siRNA sense strand
ucucagaugacgccuguua

SEQ ID NO: 1289489 - RNA, 19 nt, Homo sapiens
  misc_RNA (1)...(19): siRNA sense strand
gaggagccaccaacauuug

SEQ ID NO: 1289490 - RNA, 19 nt, Homo sapiens
  misc_RNA (1)...(19): siRNA sense strand
gcuauggagcucauuggua

SEQ ID NO: 1289491 - RNA, 19 nt, Homo sapiens
  misc_RNA (1)...(19): siRNA sense strand
acacaccuuuagugaagua

SEQ ID NO: 1289492 - RNA, 19 nt, Homo sapiens
  misc_RNA (1)...(19): siRNA sense strand
uagagaaacauguccauau

SEQ ID NO: 1289493 - RNA, 19 nt, Homo sapiens
  misc_RNA (1)...(19): siRNA sense strand
ggugaacgaguagauuaua

SEQ ID NO: 1289494 - RNA, 19 nt, Homo sapiens
  misc_RNA (1)...(19): siRNA sense strand
gaaguagaaguauuugagu

SEQ ID NO: 1289495 - RNA, 19 nt, Homo sapiens
  misc_RNA (1)...(19): siRNA sense strand
gaaacauguccauauauac

SEQ ID NO: 1289496 - RNA, 19 nt, Homo sapiens
  misc_RNA (1)...(19): siRNA sense strand
ugacgccuguuauagagaa

SEQ ID NO: 1289497 - RNA, 19 nt, Homo sapiens
  misc_RNA (1)...(19): siRNA sense strand
cgaguagauuauaagugua

SEQ ID NO: 1289498 - RNA, 19 nt, Homo sapiens
  misc_RNA (1)...(19): siRNA sense strand
gcacuuuauuuguaaugag

SEQ ID NO: 1289499 - RNA, 19 nt, Homo sapiens
  misc_RNA (1)...(19): siRNA sense strand
guagaaguauuugaguauc

SEQ ID NO: 1289500 - RNA, 19 nt, Homo sapiens
  misc_RNA (1)...(19): siRNA sense strand
guauuugaguaucuugaug

SEQ ID NO: 1289501 - RNA, 19 nt, Homo sapiens
  misc_RNA (1)...(19): siRNA sense strand
aggaauacuugacaguuug

SEQ ID NO: 1289502 - RNA, 19 nt, Homo sapiens
  misc_RNA (1)...(19): siRNA sense strand
ccaaaacccuacuaugaga

SEQ ID NO: 1289503 - RNA, 19 nt, Homo sapiens
  misc_RNA (1)...(19): siRNA sense strand
aguguaaaguggucaaaug

SEQ ID NO: 1289504 - RNA, 19 nt, Homo sapiens
  misc_RNA (1)...(19): siRNA sense strand
ccacccauacuauuuguga

SEQ ID NO: 1289505 - RNA, 19 nt, Homo sapiens
  misc_RNA (1)...(19): siRNA sense strand
uuggagagagcacgauuua

SEQ ID NO: 1289506 - RNA, 19 nt, Homo sapiens
  misc_RNA (1)...(19): siRNA sense strand
gguuaucagaugcacuuua

SEQ ID NO: 1289507 - RNA, 19 nt, Homo sapiens
  misc_RNA (1)...(19): siRNA sense strand
caccaacauuugaagcuau

SEQ ID NO: 1289508 - RNA, 19 nt, Homo sapiens
  misc_RNA (1)...(19): siRNA sense strand
ugaggagccaccaacauuu

SEQ ID NO: 1289509 - RNA, 19 nt, Homo sapiens
  misc_RNA (1)...(19): siRNA sense strand
ggaaggaauacuugacagu

SEQ ID NO: 1289510 - RNA, 19 nt, Homo sapiens
  misc_RNA (1)...(19): siRNA sense strand
gaggaaggaauacuugaca

SEQ ID NO: 1289511 - RNA, 19 nt, Homo sapiens
  misc_RNA (1)...(19): siRNA sense strand
ugaguaucuugaugcagua

SEQ ID NO: 1289512 - RNA, 19 nt, Homo sapiens
  misc_RNA (1)...(19): siRNA sense strand
caccuuuagugaaguagaa

SEQ ID NO: 1289513 - RNA, 19 nt, Homo sapiens
  misc_RNA (1)...(19): siRNA sense strand
acagauaucaggauuugga

SEQ ID NO: 1289514 - RNA, 19 nt, Homo sapiens
  misc_RNA (1)...(19): siRNA sense strand
ucauugcugugauuguuau

SEQ ID NO: 1289515 - RNA, 19 nt, Homo sapiens
  misc_RNA (1)...(19): siRNA sense strand
ucagaugcacuuuauuugu

SEQ ID NO: 1289516 - RNA, 19 nt, Homo sapiens
  misc_RNA (1)...(19): siRNA sense strand
gugcugcuccagaguguaa

SEQ ID NO: 1289517 - RNA, 19 nt, Homo sapiens
  misc_RNA (1)...(19): siRNA sense strand
ggaaaacacaccuuuagug

SEQ ID NO: 1289518 - RNA, 19 nt, Homo sapiens
  misc_RNA (1)...(19): siRNA sense strand
aaggaucaguagcaauuug

SEQ ID NO: 1289519 - RNA, 19 nt, Homo sapiens
  misc_RNA (1)...(19): siRNA sense strand
uauauacgggauccuuuaa

SEQ ID NO: 1289520 - RNA, 19 nt, Homo sapiens
  misc_RNA (1)...(19): siRNA sense strand
ugaaguagaaguauuugag

SEQ ID NO: 1289521 - RNA, 19 nt, Homo sapiens
  misc_RNA (1)...(19): siRNA sense strand
cuugacaguuuggauguuu

SEQ ID NO: 1289522 - RNA, 19 nt, Homo sapiens
  misc_RNA (1)...(19): siRNA sense strand
cauauauacgggauccuuu

SEQ ID NO: 1289523 - RNA, 19 nt, Homo sapiens
  misc_RNA (1)...(19): siRNA sense strand
auauauacgggauccuuua

SEQ ID NO: 1289524 - RNA, 19 nt, Homo sapiens
  misc_RNA (1)...(19): siRNA sense strand
cuuaaaggaucaguagcaa

SEQ ID NO: 1289525 - RNA, 19 nt, Homo sapiens
  misc_RNA (1)...(19): siRNA sense strand
uaaaccugaggaaggaaua

SEQ ID NO: 1289526 - RNA, 19 nt, Homo sapiens
  misc_RNA (1)...(19): siRNA sense strand
agaugacgccuguuauaga

SEQ ID NO: 1289527 - RNA, 19 nt, Homo sapiens
  misc_RNA (1)...(19): siRNA sense strand
ugugauuguuauugccaua

SEQ ID NO: 1289528 - RNA, 19 nt, Homo sapiens
  misc_RNA (1)...(19): siRNA sense strand
gagagcacgauuuauugug

SEQ ID NO: 1289529 - RNA, 19 nt, Homo sapiens
  misc_RNA (1)...(19): siRNA sense strand
gaaguauuugaguaucuug

SEQ ID NO: 1289530 - RNA, 19 nt, Homo sapiens
  misc_RNA (1)...(19): siRNA sense strand
ggcuaccugucucagauga

SEQ ID NO: 1289531 - RNA, 19 nt, Homo sapiens
  misc_RNA (1)...(19): siRNA sense strand
gauaucaggauuuggaaaa

SEQ ID NO: 1289532 - RNA, 19 nt, Homo sapiens
  misc_RNA (1)...(19): siRNA sense strand
ccucuugccacccauacua

SEQ ID NO: 1289533 - RNA, 19 nt, Homo sapiens
  misc_RNA (1)...(19): siRNA sense strand
ccaugguguugcugcugua

SEQ ID NO: 1289534 - RNA, 19 nt, Homo sapiens
  misc_RNA (1)...(19): siRNA sense strand
cagaugacgccuguuauag

SEQ ID NO: 1289535 - RNA, 19 nt, Homo sapiens
  misc_RNA (1)...(19): siRNA sense strand
cagaugguggagcugaaua

SEQ ID NO: 1289536 - RNA, 19 nt, Homo sapiens
  misc_RNA (1)...(19): siRNA sense strand
uuggugaacgaguagauua

SEQ ID NO: 1289537 - RNA, 19 nt, Homo sapiens
  misc_RNA (1)...(19): siRNA sense strand
gucauugcugugauuguua

SEQ ID NO: 1289538 - RNA, 19 nt, Homo sapiens
  misc_RNA (1)...(19): siRNA sense strand
ggagccaccaacauuugaa

SEQ ID NO: 1289539 - RNA, 19 nt, Homo sapiens
  misc_RNA (1)...(19): siRNA sense strand
gcgcuuuccuggguugcuu

SEQ ID NO: 1289540 - RNA, 19 nt, Homo sapiens
  misc_RNA (1)...(19): siRNA sense strand
uacuacaaagcaacaguua

SEQ ID NO: 1289541 - RNA, 19 nt, Homo sapiens
  misc_RNA (1)...(19): siRNA sense strand
cuugaugcaguaacuuaua

SEQ ID NO: 1289542 - RNA, 19 nt, Homo sapiens
  misc_RNA (1)...(19): siRNA sense strand
aaacauguccauauauacg

SEQ ID NO: 1289543 - RNA, 19 nt, Homo sapiens
  misc_RNA (1)...(19): siRNA sense strand
guguaaaguggucaaaugu

SEQ ID NO: 1289544 - RNA, 19 nt, Homo sapiens
  misc_RNA (1)...(19): siRNA sense strand
cuuacgaguuugguuauca

SEQ ID NO: 1289545 - RNA, 19 nt, Homo sapiens
  misc_RNA (1)...(19): siRNA sense strand
uacgggauccuuuaaaugg

SEQ ID NO: 1289546 - RNA, 19 nt, Homo sapiens
  misc_RNA (1)...(19): siRNA sense strand
gcagaugguggagcugaau

SEQ ID NO: 1289547 - RNA, 19 nt, Homo sapiens
  misc_RNA (1)...(19): siRNA sense strand
aaccaaaacccuacuauga

SEQ ID NO: 1289548 - RNA, 19 nt, Homo sapiens
  misc_RNA (1)...(19): siRNA sense strand
cccaauaugugaaaagguu

SEQ ID NO: 1289549 - RNA, 19 nt, Homo sapiens
  misc_RNA (1)...(19): siRNA sense strand
ggagcugaauaugccacuu

SEQ ID NO: 1289550 - RNA, 19 nt, Homo sapiens
  misc_RNA (1)...(19): siRNA sense strand
cgauggcagcgacacaauu

SEQ ID NO: 1289551 - RNA, 19 nt, Homo sapiens
  misc_RNA (1)...(19): siRNA sense strand
gauccauuuucacuuauug

SEQ ID NO: 1289552 - RNA, 19 nt, Homo sapiens
  misc_RNA (1)...(19): siRNA sense strand
uugaugcaguaacuuauag

SEQ ID NO: 1289553 - RNA, 19 nt, Homo sapiens
  misc_RNA (1)...(19): siRNA sense strand
guaucuugaugcaguaacu

SEQ ID NO: 1289554 - RNA, 19 nt, Homo sapiens
  misc_RNA (1)...(19): siRNA sense strand
ggagagagcacgauuuauu

SEQ ID NO: 1289555 - RNA, 19 nt, Homo sapiens
  misc_RNA (1)...(19): siRNA sense strand
agagaaacauguccauaua

SEQ ID NO: 1289556 - RNA, 19 nt, Homo sapiens
  misc_RNA (1)...(19): siRNA sense strand
cagaugcacuuuauuugua

SEQ ID NO: 1289557 - RNA, 19 nt, Homo sapiens
  misc_RNA (1)...(19): siRNA sense strand
ggacuuacgaguuugguua

SEQ ID NO: 1289558 - RNA, 19 nt, Homo sapiens
  misc_RNA (1)...(19): siRNA sense strand
aaacagauaucaggauuug

SEQ ID NO: 1289559 - RNA, 19 nt, Homo sapiens
  misc_RNA (1)...(19): siRNA sense strand
cuauggagcucauugguaa

SEQ ID NO: 1289560 - RNA, 19 nt, Homo sapiens
  misc_RNA (1)...(19): siRNA sense strand
aaacacaccuuuagugaag

SEQ ID NO: 1289561 - RNA, 19 nt, Homo sapiens
  misc_RNA (1)...(19): siRNA sense strand
gaacuuaaaggaucaguag

SEQ ID NO: 1289562 - RNA, 19 nt, Homo sapiens
  misc_RNA (1)...(19): siRNA sense strand
gaaaacagauaucaggauu

SEQ ID NO: 1289563 - RNA, 19 nt, Homo sapiens
  misc_RNA (1)...(19): siRNA sense strand
uaaaggaucaguagcaauu

SEQ ID NO: 1289564 - RNA, 19 nt, Homo sapiens
  misc_RNA (1)...(19): siRNA sense strand
aaaugggacuuacgaguuu

SEQ ID NO: 1289565 - RNA, 19 nt, Homo sapiens
  misc_RNA (1)...(19): siRNA sense strand
guuaucagaugcacuuuau

SEQ ID NO: 1289566 - RNA, 19 nt, Homo sapiens
  misc_RNA (1)...(19): siRNA sense strand
ugagauuggugaacgagua

SEQ ID NO: 1289567 - RNA, 19 nt, Homo sapiens
  misc_RNA (1)...(19): siRNA sense strand
gugaacgaguagauuauaa

SEQ ID NO: 1289568 - RNA, 19 nt, Homo sapiens
  misc_RNA (1)...(19): siRNA sense strand
gagagagcacgauuuauug

SEQ ID NO: 1289569 - RNA, 19 nt, Homo sapiens
  misc_RNA (1)...(19): siRNA sense strand
caaaugggacuuacgaguu

SEQ ID NO: 1289570 - RNA, 19 nt, Homo sapiens
  misc_RNA (1)...(19): siRNA sense strand
ggucauugcugugauuguu

SEQ ID NO: 1289571 - RNA, 19 nt, Homo sapiens
  misc_RNA (1)...(19): siRNA sense strand
ccagauccauuuucacuua

SEQ ID NO: 1289572 - RNA, 19 nt, Homo sapiens
  misc_RNA (1)...(19): siRNA sense strand
gaaggaauacuugacaguu

SEQ ID NO: 1289573 - RNA, 19 nt, Homo sapiens
  misc_RNA (1)...(19): siRNA sense strand
aaggaauacuugacaguuu

SEQ ID NO: 1289574 - RNA, 19 nt, Homo sapiens
  misc_RNA (1)...(19): siRNA sense strand
ucagaugacgccuguuaua

SEQ ID NO: 1289575 - RNA, 19 nt, Homo sapiens
  misc_RNA (1)...(19): siRNA sense strand
gaaaacacaccuuuaguga

SEQ ID NO: 1289576 - RNA, 19 nt, Homo sapiens
  misc_RNA (1)...(19): siRNA sense strand
gaugacgccuguuauagag

SEQ ID NO: 1289577 - RNA, 19 nt, Homo sapiens
  misc_RNA (1)...(19): siRNA sense strand
gagaaacauguccauauau

SEQ ID NO: 1289578 - RNA, 19 nt, Homo sapiens
  misc_RNA (1)...(19): siRNA sense strand
acgaguagauuauaagugu

SEQ ID NO: 1289579 - RNA, 19 nt, Homo sapiens
  misc_RNA (1)...(19): siRNA sense strand
cuacaaagcaacaguuaug

SEQ ID NO: 1289580 - RNA, 19 nt, Homo sapiens
  misc_RNA (1)...(19): siRNA sense strand
ccaccaacauuugaagcua

SEQ ID NO: 1289581 - RNA, 19 nt, Homo sapiens
  misc_RNA (1)...(19): siRNA sense strand
uauacgggauccuuuaaau

SEQ ID NO: 1289582 - RNA, 19 nt, Homo sapiens
  misc_RNA (1)...(19): siRNA sense strand
cgaguuugguuaucagaug

SEQ ID NO: 1289583 - RNA, 19 nt, Homo sapiens
  misc_RNA (1)...(19): siRNA sense strand
gaacgaguagauuauaagu

SEQ ID NO: 1289584 - RNA, 19 nt, Homo sapiens
  misc_RNA (1)...(19): siRNA sense strand
gugaggagccaccaacauu

SEQ ID NO: 1289585 - RNA, 19 nt, Homo sapiens
  misc_RNA (1)...(19): siRNA sense strand
gauggcagcgacacaauug

SEQ ID NO: 1289586 - RNA, 19 nt, Homo sapiens
  misc_RNA (1)...(19): siRNA sense strand
gcuauggagcucauuggua

SEQ ID NO: 1289587 - RNA, 19 nt, Homo sapiens
  misc_RNA (1)...(19): siRNA sense strand
gaggagccaccaacauuug

SEQ ID NO: 1289588 - RNA, 19 nt, Homo sapiens
  misc_RNA (1)...(19): siRNA sense strand
acacaccuuuagugaagua

SEQ ID NO: 1289589 - RNA, 19 nt, Homo sapiens
  misc_RNA (1)...(19): siRNA sense strand
ucucagaugacgccuguua

SEQ ID NO: 1289590 - RNA, 19 nt, Homo sapiens
  misc_RNA (1)...(19): siRNA sense strand
uagagaaacauguccauau

SEQ ID NO: 1289591 - RNA, 19 nt, Homo sapiens
  misc_RNA (1)...(19): siRNA sense strand
guuccaaagugucuuaaag

SEQ ID NO: 1289592 - RNA, 19 nt, Homo sapiens
  misc_RNA (1)...(19): siRNA sense strand
ggugaacgaguagauuaua

SEQ ID NO: 1289593 - RNA, 19 nt, Homo sapiens
  misc_RNA (1)...(19): siRNA sense strand
gaaguagaaguauuugagu

SEQ ID NO: 1289594 - RNA, 19 nt, Homo sapiens
  misc_RNA (1)...(19): siRNA sense strand
gaaacauguccauauauac

SEQ ID NO: 1289595 - RNA, 19 nt, Homo sapiens
  misc_RNA (1)...(19): siRNA sense strand
ugacgccuguuauagagaa

SEQ ID NO: 1289596 - RNA, 19 nt, Homo sapiens
  misc_RNA (1)...(19): siRNA sense strand
cgaguagauuauaagugua

SEQ ID NO: 1289597 - RNA, 19 nt, Homo sapiens
  misc_RNA (1)...(19): siRNA sense strand
gcacuuuauuuguaaugag

SEQ ID NO: 1289598 - RNA, 19 nt, Homo sapiens
  misc_RNA (1)...(19): siRNA sense strand
guagaaguauuugaguauc

SEQ ID NO: 1289599 - RNA, 19 nt, Homo sapiens
  misc_RNA (1)...(19): siRNA sense strand
guauuugaguaucuugaug

SEQ ID NO: 1289600 - RNA, 19 nt, Homo sapiens
  misc_RNA (1)...(19): siRNA sense strand
aggaauacuugacaguuug

SEQ ID NO: 1289601 - RNA, 19 nt, Homo sapiens
  misc_RNA (1)...(19): siRNA sense strand
ccaaaacccuacuaugaga

SEQ ID NO: 1289602 - RNA, 19 nt, Homo sapiens
  misc_RNA (1)...(19): siRNA sense strand
aguguaaaguggucaaaug

SEQ ID NO: 1289603 - RNA, 19 nt, Homo sapiens
  misc_RNA (1)...(19): siRNA sense strand
ccacccauacuauuuguga

SEQ ID NO: 1289604 - RNA, 19 nt, Homo sapiens
  misc_RNA (1)...(19): siRNA sense strand
caccaacauuugaagcuau

SEQ ID NO: 1289605 - RNA, 19 nt, Homo sapiens
  misc_RNA (1)...(19): siRNA sense strand
uuggagagagcacgauuua

SEQ ID NO: 1289606 - RNA, 19 nt, Homo sapiens
  misc_RNA (1)...(19): siRNA sense strand
gguuaucagaugcacuuua

SEQ ID NO: 1289607 - RNA, 19 nt, Homo sapiens
  misc_RNA (1)...(19): siRNA sense strand
ugaggagccaccaacauuu

SEQ ID NO: 1289608 - RNA, 19 nt, Homo sapiens
  misc_RNA (1)...(19): siRNA sense strand
ggaaggaauacuugacagu

SEQ ID NO: 1289609 - RNA, 19 nt, Homo sapiens
  misc_RNA (1)...(19): siRNA sense strand
gaggaaggaauacuugaca

SEQ ID NO: 1289610 - RNA, 19 nt, Homo sapiens
  misc_RNA (1)...(19): siRNA sense strand
ccaguuccaaagugucuua

SEQ ID NO: 1289611 - RNA, 19 nt, Homo sapiens
  misc_RNA (1)...(19): siRNA sense strand
ugaguaucuugaugcagua

SEQ ID NO: 1289612 - RNA, 19 nt, Homo sapiens
  misc_RNA (1)...(19): siRNA sense strand
caccuuuagugaaguagaa

SEQ ID NO: 1289613 - RNA, 19 nt, Homo sapiens
  misc_RNA (1)...(19): siRNA sense strand
acagauaucaggauuugga

SEQ ID NO: 1289614 - RNA, 19 nt, Homo sapiens
  misc_RNA (1)...(19): siRNA sense strand
ucauugcugugauuguuau

SEQ ID NO: 1289615 - RNA, 19 nt, Homo sapiens
  misc_RNA (1)...(19): siRNA sense strand
ucagaugcacuuuauuugu

SEQ ID NO: 1289616 - RNA, 19 nt, Homo sapiens
  misc_RNA (1)...(19): siRNA sense strand
gugcugcuccagaguguaa

SEQ ID NO: 1289617 - RNA, 19 nt, Homo sapiens
  misc_RNA (1)...(19): siRNA sense strand
ggaaaacacaccuuuagug

SEQ ID NO: 1289618 - RNA, 19 nt, Homo sapiens
  misc_RNA (1)...(19): siRNA sense strand
aaggaucaguagcaauuug

SEQ ID NO: 1289619 - RNA, 19 nt, Homo sapiens
  misc_RNA (1)...(19): siRNA sense strand
uauauacgggauccuuuaa

SEQ ID NO: 1289620 - RNA, 19 nt, Homo sapiens
  misc_RNA (1)...(19): siRNA sense strand
ugaaguagaaguauuugag

SEQ ID NO: 1289621 - RNA, 19 nt, Homo sapiens
  misc_RNA (1)...(19): siRNA sense strand
cuugacaguuuggauguuu

SEQ ID NO: 1289622 - RNA, 19 nt, Homo sapiens
  misc_RNA (1)...(19): siRNA sense strand
cauauauacgggauccuuu

SEQ ID NO: 1289623 - RNA, 19 nt, Homo sapiens
  misc_RNA (1)...(19): siRNA sense strand
auauauacgggauccuuua

SEQ ID NO: 1289624 - RNA, 19 nt, Homo sapiens
  misc_RNA (1)...(19): siRNA sense strand
cuuaaaggaucaguagcaa

SEQ ID NO: 1289625 - RNA, 19 nt, Homo sapiens
  misc_RNA (1)...(19): siRNA sense strand
uaaaccugaggaaggaaua

SEQ ID NO: 1289626 - RNA, 19 nt, Homo sapiens
  misc_RNA (1)...(19): siRNA sense strand
agaugacgccuguuauaga

SEQ ID NO: 1289627 - RNA, 19 nt, Homo sapiens
  misc_RNA (1)...(19): siRNA sense strand
ugugauuguuauugccaua

SEQ ID NO: 1289628 - RNA, 19 nt, Homo sapiens
  misc_RNA (1)...(19): siRNA sense strand
gagagcacgauuuauugug

SEQ ID NO: 1289629 - RNA, 19 nt, Homo sapiens
  misc_RNA (1)...(19): siRNA sense strand
gaaguauuugaguaucuug

SEQ ID NO: 1289630 - RNA, 19 nt, Homo sapiens
  misc_RNA (1)...(19): siRNA sense strand
ggcuaccugucucagauga

SEQ ID NO: 1289631 - RNA, 19 nt, Homo sapiens
  misc_RNA (1)...(19): siRNA sense strand
gauaucaggauuuggaaaa

SEQ ID NO: 1289632 - RNA, 19 nt, Homo sapiens
  misc_RNA (1)...(19): siRNA sense strand
ccucuugccacccauacua

SEQ ID NO: 1289633 - RNA, 19 nt, Homo sapiens
  misc_RNA (1)...(19): siRNA sense strand
ccaugguguugcugcugua

SEQ ID NO: 1289634 - RNA, 19 nt, Homo sapiens
  misc_RNA (1)...(19): siRNA sense strand
cagaugacgccuguuauag

SEQ ID NO: 1289635 - RNA, 19 nt, Homo sapiens
  misc_RNA (1)...(19): siRNA sense strand
uuggugaacgaguagauua

SEQ ID NO: 1289636 - RNA, 19 nt, Homo sapiens
  misc_RNA (1)...(19): siRNA sense strand
gucauugcugugauuguua

SEQ ID NO: 1289637 - RNA, 19 nt, Homo sapiens
  misc_RNA (1)...(19): siRNA sense strand
ggagccaccaacauuugaa

SEQ ID NO: 1289638 - RNA, 19 nt, Homo sapiens
  misc_RNA (1)...(19): siRNA sense strand
gcgcuuuccuggguugcuu

SEQ ID NO: 1289639 - RNA, 19 nt, Homo sapiens
  misc_RNA (1)...(19): siRNA sense strand
uacuacaaagcaacaguua

SEQ ID NO: 1289640 - RNA, 19 nt, Homo sapiens
  misc_RNA (1)...(19): siRNA sense strand
cuugaugcaguaacuuaua

SEQ ID NO: 1289641 - RNA, 19 nt, Homo sapiens
  misc_RNA (1)...(19): siRNA sense strand
aaacauguccauauauacg

SEQ ID NO: 1289642 - RNA, 19 nt, Homo sapiens
  misc_RNA (1)...(19): siRNA sense strand
guguaaaguggucaaaugu

SEQ ID NO: 1289643 - RNA, 19 nt, Homo sapiens
  misc_RNA (1)...(19): siRNA sense strand
cuuacgaguuugguuauca

SEQ ID NO: 1289644 - RNA, 19 nt, Homo sapiens
  misc_RNA (1)...(19): siRNA sense strand
uacgggauccuuuaaaugg

SEQ ID NO: 1289645 - RNA, 19 nt, Homo sapiens
  misc_RNA (1)...(19): siRNA sense strand
aaccaaaacccuacuauga

SEQ ID NO: 1289646 - RNA, 19 nt, Homo sapiens
  misc_RNA (1)...(19): siRNA sense strand
cccaauaugugaaaagguu

SEQ ID NO: 1289647 - RNA, 19 nt, Homo sapiens
  misc_RNA (1)...(19): siRNA sense strand
cgauggcagcgacacaauu

SEQ ID NO: 1289648 - RNA, 19 nt, Homo sapiens
  misc_RNA (1)...(19): siRNA sense strand
gauccauuuucacuuauug

SEQ ID NO: 1289649 - RNA, 19 nt, Homo sapiens
  misc_RNA (1)...(19): siRNA sense strand
uugaugcaguaacuuauag

SEQ ID NO: 1289650 - RNA, 19 nt, Homo sapiens
  misc_RNA (1)...(19): siRNA sense strand
guaucuugaugcaguaacu

SEQ ID NO: 1289651 - RNA, 19 nt, Homo sapiens
  misc_RNA (1)...(19): siRNA sense strand
caacauuugaagcuaugga

SEQ ID NO: 1289652 - RNA, 19 nt, Homo sapiens
  misc_RNA (1)...(19): siRNA sense strand
gagauuggugaacgaguag

SEQ ID NO: 1289653 - RNA, 19 nt, Homo sapiens
  misc_RNA (1)...(19): siRNA sense strand
ggagagagcacgauuuauu

SEQ ID NO: 1289654 - RNA, 19 nt, Homo sapiens
  misc_RNA (1)...(19): siRNA sense strand
agagaaacauguccauaua

SEQ ID NO: 1289655 - RNA, 19 nt, Homo sapiens
  misc_RNA (1)...(19): siRNA sense strand
cagaugcacuuuauuugua

SEQ ID NO: 1289656 - RNA, 19 nt, Homo sapiens
  misc_RNA (1)...(19): siRNA sense strand
ggacuuacgaguuugguua

SEQ ID NO: 1289657 - RNA, 19 nt, Homo sapiens
  misc_RNA (1)...(19): siRNA sense strand
aaacagauaucaggauuug

SEQ ID NO: 1289658 - RNA, 19 nt, Homo sapiens
  misc_RNA (1)...(19): siRNA sense strand
cuauggagcucauugguaa

SEQ ID NO: 1289659 - RNA, 19 nt, Homo sapiens
  misc_RNA (1)...(19): siRNA sense strand
aaacacaccuuuagugaag

SEQ ID NO: 1289660 - RNA, 19 nt, Homo sapiens
  misc_RNA (1)...(19): siRNA sense strand
gaacuuaaaggaucaguag

SEQ ID NO: 1289661 - RNA, 19 nt, Homo sapiens
  misc_RNA (1)...(19): siRNA sense strand
gaaaacagauaucaggauu

SEQ ID NO: 1289662 - RNA, 19 nt, Homo sapiens
  misc_RNA (1)...(19): siRNA sense strand
uaaaggaucaguagcaauu

SEQ ID NO: 1289663 - RNA, 19 nt, Homo sapiens
  misc_RNA (1)...(19): siRNA sense strand
aaaugggacuuacgaguuu

SEQ ID NO: 1289664 - RNA, 19 nt, Homo sapiens
  misc_RNA (1)...(19): siRNA sense strand
guuaucagaugcacuuuau

SEQ ID NO: 1289665 - RNA, 19 nt, Homo sapiens
  misc_RNA (1)...(19): siRNA sense strand
gagcugaauaugccacuua

SEQ ID NO: 1289666 - RNA, 19 nt, Homo sapiens
  misc_RNA (1)...(19): siRNA sense strand
gagcagagaggcugaauag

SEQ ID NO: 1289667 - RNA, 19 nt, Homo sapiens
  misc_RNA (1)...(19): siRNA sense strand
ugagauuggugaacgagua

SEQ ID NO: 1289668 - RNA, 19 nt, Homo sapiens
  misc_RNA (1)...(19): siRNA sense strand
gugaacgaguagauuauaa

SEQ ID NO: 1289669 - RNA, 19 nt, Homo sapiens
  misc_RNA (1)...(19): siRNA sense strand
gagagagcacgauuuauug

SEQ ID NO: 1289670 - RNA, 19 nt, Homo sapiens
  misc_RNA (1)...(19): siRNA sense strand
caaaugggacuuacgaguu

SEQ ID NO: 1289671 - RNA, 19 nt, Homo sapiens
  misc_RNA (1)...(19): siRNA sense strand
ggucauugcugugauuguu

SEQ ID NO: 1289672 - RNA, 19 nt, Homo sapiens
  misc_RNA (1)...(19): siRNA sense strand
ccagauccauuuucacuua

SEQ ID NO: 1289673 - RNA, 19 nt, Homo sapiens
  misc_RNA (1)...(19): siRNA sense strand
gaaggaauacuugacaguu

SEQ ID NO: 1289674 - RNA, 19 nt, Homo sapiens
  misc_RNA (1)...(19): siRNA sense strand
aaggaauacuugacaguuu

SEQ ID NO: 1289675 - RNA, 19 nt, Homo sapiens
  misc_RNA (1)...(19): siRNA sense strand
ucagaugacgccuguuaua

SEQ ID NO: 1289676 - RNA, 19 nt, Homo sapiens
  misc_RNA (1)...(19): siRNA sense strand
gaaaacacaccuuuaguga

SEQ ID NO: 1289677 - RNA, 19 nt, Homo sapiens
  misc_RNA (1)...(19): siRNA sense strand
gaugacgccuguuauagag

SEQ ID NO: 1289678 - RNA, 19 nt, Homo sapiens
  misc_RNA (1)...(19): siRNA sense strand
gagaaacauguccauauau

SEQ ID NO: 1289679 - RNA, 19 nt, Homo sapiens
  misc_RNA (1)...(19): siRNA sense strand
ccacuuaccagacuaaauc

SEQ ID NO: 1289680 - RNA, 19 nt, Homo sapiens
  misc_RNA (1)...(19): siRNA sense strand
acgaguagauuauaagugu

SEQ ID NO: 1289681 - RNA, 19 nt, Homo sapiens
  misc_RNA (1)...(19): siRNA sense strand
cuacaaagcaacaguuaug

SEQ ID NO: 1289682 - RNA, 19 nt, Homo sapiens
  misc_RNA (1)...(19): siRNA sense strand
ccaccaacauuugaagcua

SEQ ID NO: 1289683 - RNA, 19 nt, Homo sapiens
  misc_RNA (1)...(19): siRNA sense strand
uauacgggauccuuuaaau

SEQ ID NO: 1289684 - RNA, 19 nt, Homo sapiens
  misc_RNA (1)...(19): siRNA sense strand
cgaguuugguuaucagaug

SEQ ID NO: 1289685 - RNA, 19 nt, Homo sapiens
  misc_RNA (1)...(19): siRNA sense strand
gaacgaguagauuauaagu

SEQ ID NO: 1289686 - RNA, 19 nt, Homo sapiens
  misc_RNA (1)...(19): siRNA sense strand
gugaggagccaccaacauu

SEQ ID NO: 1289687 - RNA, 19 nt, Homo sapiens
  misc_RNA (1)...(19): siRNA sense strand
gauggcagcgacacaauug

SEQ ID NO: 1289688 - RNA, 19 nt, Homo sapiens
  misc_RNA (1)...(19): siRNA sense strand
ucucagaugacgccuguua

SEQ ID NO: 1289689 - RNA, 19 nt, Homo sapiens
  misc_RNA (1)...(19): siRNA sense strand
acacaccuuuagugaagua

SEQ ID NO: 1289690 - RNA, 19 nt, Homo sapiens
  misc_RNA (1)...(19): siRNA sense strand
gcuauggagcucauuggua

SEQ ID NO: 1289691 - RNA, 19 nt, Homo sapiens
  misc_RNA (1)...(19): siRNA sense strand
gaggagccaccaacauuug

SEQ ID NO: 1289692 - RNA, 19 nt, Homo sapiens
  misc_RNA (1)...(19): siRNA sense strand
uagagaaacauguccauau

SEQ ID NO: 1289693 - RNA, 19 nt, Homo sapiens
  misc_RNA (1)...(19): siRNA sense strand
ggugaacgaguagauuaua

SEQ ID NO: 1289694 - RNA, 19 nt, Homo sapiens
  misc_RNA (1)...(19): siRNA sense strand
gaaguagaaguauuugagu

SEQ ID NO: 1289695 - RNA, 19 nt, Homo sapiens
  misc_RNA (1)...(19): siRNA sense strand
gaaacauguccauauauac

SEQ ID NO: 1289696 - RNA, 19 nt, Homo sapiens
  misc_RNA (1)...(19): siRNA sense strand
ugacgccuguuauagagaa

SEQ ID NO: 1289697 - RNA, 19 nt, Homo sapiens
  misc_RNA (1)...(19): siRNA sense strand
cgaguagauuauaagugua

SEQ ID NO: 1289698 - RNA, 19 nt, Homo sapiens
  misc_RNA (1)...(19): siRNA sense strand
gcacuuuauuuguaaugag

SEQ ID NO: 1289699 - RNA, 19 nt, Homo sapiens
  misc_RNA (1)...(19): siRNA sense strand
guagaaguauuugaguauc

SEQ ID NO: 1289700 - RNA, 19 nt, Homo sapiens
  misc_RNA (1)...(19): siRNA sense strand
guauuugaguaucuugaug

SEQ ID NO: 1289701 - RNA, 19 nt, Homo sapiens
  misc_RNA (1)...(19): siRNA sense strand
aggaauacuugacaguuug

SEQ ID NO: 1289702 - RNA, 19 nt, Homo sapiens
  misc_RNA (1)...(19): siRNA sense strand
ccaaaacccuacuaugaga

SEQ ID NO: 1289703 - RNA, 19 nt, Homo sapiens
  misc_RNA (1)...(19): siRNA sense strand
aguguaaaguggucaaaug

SEQ ID NO: 1289704 - RNA, 19 nt, Homo sapiens
  misc_RNA (1)...(19): siRNA sense strand
ccacccauacuauuuguga

SEQ ID NO: 1289705 - RNA, 19 nt, Homo sapiens
  misc_RNA (1)...(19): siRNA sense strand
uuggagagagcacgauuua

SEQ ID NO: 1289706 - RNA, 19 nt, Homo sapiens
  misc_RNA (1)...(19): siRNA sense strand
gguuaucagaugcacuuua

SEQ ID NO: 1289707 - RNA, 19 nt, Homo sapiens
  misc_RNA (1)...(19): siRNA sense strand
caccaacauuugaagcuau

SEQ ID NO: 1289708 - RNA, 19 nt, Homo sapiens
  misc_RNA (1)...(19): siRNA sense strand
ugaggagccaccaacauuu

SEQ ID NO: 1289709 - RNA, 19 nt, Homo sapiens
  misc_RNA (1)...(19): siRNA sense strand
ggaaggaauacuugacagu

SEQ ID NO: 1289710 - RNA, 19 nt, Homo sapiens
  misc_RNA (1)...(19): siRNA sense strand
gaggaaggaauacuugaca

SEQ ID NO: 1289711 - RNA, 19 nt, Homo sapiens
  misc_RNA (1)...(19): siRNA sense strand
ugaguaucuugaugcagua

SEQ ID NO: 1289712 - RNA, 19 nt, Homo sapiens
  misc_RNA (1)...(19): siRNA sense strand
caccuuuagugaaguagaa

SEQ ID NO: 1289713 - RNA, 19 nt, Homo sapiens
  misc_RNA (1)...(19): siRNA sense strand
acagauaucaggauuugga

SEQ ID NO: 1289714 - RNA, 19 nt, Homo sapiens
  misc_RNA (1)...(19): siRNA sense strand
ucauugcugugauuguuau

SEQ ID NO: 1289715 - RNA, 19 nt, Homo sapiens
  misc_RNA (1)...(19): siRNA sense strand
ucagaugcacuuuauuugu

SEQ ID NO: 1289716 - RNA, 19 nt, Homo sapiens
  misc_RNA (1)...(19): siRNA sense strand
gugcugcuccagaguguaa

SEQ ID NO: 1289717 - RNA, 19 nt, Homo sapiens
  misc_RNA (1)...(19): siRNA sense strand
ggaaaacacaccuuuagug

SEQ ID NO: 1289718 - RNA, 19 nt, Homo sapiens
  misc_RNA (1)...(19): siRNA sense strand
aaggaucaguagcaauuug

SEQ ID NO: 1289719 - RNA, 19 nt, Homo sapiens
  misc_RNA (1)...(19): siRNA sense strand
uauauacgggauccuuuaa

SEQ ID NO: 1289720 - RNA, 19 nt, Homo sapiens
  misc_RNA (1)...(19): siRNA sense strand
ugaaguagaaguauuugag

SEQ ID NO: 1289721 - RNA, 19 nt, Homo sapiens
  misc_RNA (1)...(19): siRNA sense strand
cuugacaguuuggauguuu

SEQ ID NO: 1289722 - RNA, 19 nt, Homo sapiens
  misc_RNA (1)...(19): siRNA sense strand
cauauauacgggauccuuu

SEQ ID NO: 1289723 - RNA, 19 nt, Homo sapiens
  misc_RNA (1)...(19): siRNA sense strand
auauauacgggauccuuua

SEQ ID NO: 1289724 - RNA, 19 nt, Homo sapiens
  misc_RNA (1)...(19): siRNA sense strand
cuuaaaggaucaguagcaa

SEQ ID NO: 1289725 - RNA, 19 nt, Homo sapiens
  misc_RNA (1)...(19): siRNA sense strand
uaaaccugaggaaggaaua

SEQ ID NO: 1289726 - RNA, 19 nt, Homo sapiens
  misc_RNA (1)...(19): siRNA sense strand
agaugacgccuguuauaga

SEQ ID NO: 1289727 - RNA, 19 nt, Homo sapiens
  misc_RNA (1)...(19): siRNA sense strand
ugugauuguuauugccaua

SEQ ID NO: 1289728 - RNA, 19 nt, Homo sapiens
  misc_RNA (1)...(19): siRNA sense strand
gagagcacgauuuauugug

SEQ ID NO: 1289729 - RNA, 19 nt, Homo sapiens
  misc_RNA (1)...(19): siRNA sense strand
gaaguauuugaguaucuug

SEQ ID NO: 1289730 - RNA, 19 nt, Homo sapiens
  misc_RNA (1)...(19): siRNA sense strand
ggcuaccugucucagauga

SEQ ID NO: 1289731 - RNA, 19 nt, Homo sapiens
  misc_RNA (1)...(19): siRNA sense strand
gauaucaggauuuggaaaa

SEQ ID NO: 1289732 - RNA, 19 nt, Homo sapiens
  misc_RNA (1)...(19): siRNA sense strand
ccucuugccacccauacua

SEQ ID NO: 1289733 - RNA, 19 nt, Homo sapiens
  misc_RNA (1)...(19): siRNA sense strand
ccaugguguugcugcugua

SEQ ID NO: 1289734 - RNA, 19 nt, Homo sapiens
  misc_RNA (1)...(19): siRNA sense strand
cagaugacgccuguuauag

SEQ ID NO: 1289735 - RNA, 19 nt, Homo sapiens
  misc_RNA (1)...(19): siRNA sense strand
cagaugguggagcugaaua

SEQ ID NO: 1289736 - RNA, 19 nt, Homo sapiens
  misc_RNA (1)...(19): siRNA sense strand
gucauugcugugauuguua

SEQ ID NO: 1289737 - RNA, 19 nt, Homo sapiens
  misc_RNA (1)...(19): siRNA sense strand
ggagccaccaacauuugaa

SEQ ID NO: 1289738 - RNA, 19 nt, Homo sapiens
  misc_RNA (1)...(19): siRNA sense strand
uuggugaacgaguagauua

SEQ ID NO: 1289739 - RNA, 19 nt, Homo sapiens
  misc_RNA (1)...(19): siRNA sense strand
gcgcuuuccuggguugcuu

SEQ ID NO: 1289740 - RNA, 19 nt, Homo sapiens
  misc_RNA (1)...(19): siRNA sense strand
uacuacaaagcaacaguua

SEQ ID NO: 1289741 - RNA, 19 nt, Homo sapiens
  misc_RNA (1)...(19): siRNA sense strand
cuugaugcaguaacuuaua

SEQ ID NO: 1289742 - RNA, 19 nt, Homo sapiens
  misc_RNA (1)...(19): siRNA sense strand
aaacauguccauauauacg

SEQ ID NO: 1289743 - RNA, 19 nt, Homo sapiens
  misc_RNA (1)...(19): siRNA sense strand
guguaaaguggucaaaugu

SEQ ID NO: 1289744 - RNA, 19 nt, Homo sapiens
  misc_RNA (1)...(19): siRNA sense strand
cuuacgaguuugguuauca

SEQ ID NO: 1289745 - RNA, 19 nt, Homo sapiens
  misc_RNA (1)...(19): siRNA sense strand
uacgggauccuuuaaaugg

SEQ ID NO: 1289746 - RNA, 19 nt, Homo sapiens
  misc_RNA (1)...(19): siRNA sense strand
gcagaugguggagcugaau

SEQ ID NO: 1289747 - RNA, 19 nt, Homo sapiens
  misc_RNA (1)...(19): siRNA sense strand
aaccaaaacccuacuauga

SEQ ID NO: 1289748 - RNA, 19 nt, Homo sapiens
  misc_RNA (1)...(19): siRNA sense strand
uugaugcaguaacuuauag

SEQ ID NO: 1289749 - RNA, 19 nt, Homo sapiens
  misc_RNA (1)...(19): siRNA sense strand
ggagcugaauaugccacuu

SEQ ID NO: 1289750 - RNA, 19 nt, Homo sapiens
  misc_RNA (1)...(19): siRNA sense strand
caacauuugaagcuaugga

SEQ ID NO: 1289751 - RNA, 19 nt, Homo sapiens
  misc_RNA (1)...(19): siRNA sense strand
cgauggcagcgacacaauu

SEQ ID NO: 1289752 - RNA, 19 nt, Homo sapiens
  misc_RNA (1)...(19): siRNA sense strand
gauccauuuucacuuauug

SEQ ID NO: 1289753 - RNA, 19 nt, Homo sapiens
  misc_RNA (1)...(19): siRNA sense strand
ggagagagcacgauuuauu

SEQ ID NO: 1289754 - RNA, 19 nt, Homo sapiens
  misc_RNA (1)...(19): siRNA sense strand
agagaaacauguccauaua

SEQ ID NO: 1289755 - RNA, 19 nt, Homo sapiens
  misc_RNA (1)...(19): siRNA sense strand
cagaugcacuuuauuugua

SEQ ID NO: 1289756 - RNA, 19 nt, Homo sapiens
  misc_RNA (1)...(19): siRNA sense strand
ggacuuacgaguuugguua

SEQ ID NO: 1289757 - RNA, 19 nt, Homo sapiens
  misc_RNA (1)...(19): siRNA sense strand
aaacagauaucaggauuug

SEQ ID NO: 1289758 - RNA, 19 nt, Homo sapiens
  misc_RNA (1)...(19): siRNA sense strand
cuauggagcucauugguaa

SEQ ID NO: 1289759 - RNA, 19 nt, Homo sapiens
  misc_RNA (1)...(19): siRNA sense strand
aaacacaccuuuagugaag

SEQ ID NO: 1289760 - RNA, 19 nt, Homo sapiens
  misc_RNA (1)...(19): siRNA sense strand
gaacuuaaaggaucaguag

SEQ ID NO: 1289761 - RNA, 19 nt, Homo sapiens
  misc_RNA (1)...(19): siRNA sense strand
gaaaacagauaucaggauu

SEQ ID NO: 1289762 - RNA, 19 nt, Homo sapiens
  misc_RNA (1)...(19): siRNA sense strand
uaaaggaucaguagcaauu

SEQ ID NO: 1289763 - RNA, 19 nt, Homo sapiens
  misc_RNA (1)...(19): siRNA sense strand
aaaugggacuuacgaguuu

SEQ ID NO: 1289764 - RNA, 19 nt, Homo sapiens
  misc_RNA (1)...(19): siRNA sense strand
guuaucagaugcacuuuau

SEQ ID NO: 1289765 - RNA, 19 nt, Homo sapiens
  misc_RNA (1)...(19): siRNA sense strand
gagcugaauaugccacuua

SEQ ID NO: 1289766 - RNA, 19 nt, Homo sapiens
  misc_RNA (1)...(19): siRNA sense strand
ugagauuggugaacgagua

SEQ ID NO: 1289767 - RNA, 19 nt, Homo sapiens
  misc_RNA (1)...(19): siRNA sense strand
gugaacgaguagauuauaa

SEQ ID NO: 1289768 - RNA, 19 nt, Homo sapiens
  misc_RNA (1)...(19): siRNA sense strand
gagagagcacgauuuauug

SEQ ID NO: 1289769 - RNA, 19 nt, Homo sapiens
  misc_RNA (1)...(19): siRNA sense strand
caaaugggacuuacgaguu

SEQ ID NO: 1289770 - RNA, 19 nt, Homo sapiens
  misc_RNA (1)...(19): siRNA sense strand
ggucauugcugugauuguu

SEQ ID NO: 1289771 - RNA, 19 nt, Homo sapiens
  misc_RNA (1)...(19): siRNA sense strand
ccagauccauuuucacuua

SEQ ID NO: 1289772 - RNA, 19 nt, Homo sapiens
  misc_RNA (1)...(19): siRNA sense strand
gaaggaauacuugacaguu

SEQ ID NO: 1289773 - RNA, 19 nt, Homo sapiens
  misc_RNA (1)...(19): siRNA sense strand
aaggaauacuugacaguuu

SEQ ID NO: 1289774 - RNA, 19 nt, Homo sapiens
  misc_RNA (1)...(19): siRNA sense strand
ucagaugacgccuguuaua

SEQ ID NO: 1289775 - RNA, 19 nt, Homo sapiens
  misc_RNA (1)...(19): siRNA sense strand
gaaaacacaccuuuaguga

SEQ ID NO: 1289776 - RNA, 19 nt, Homo sapiens
  misc_RNA (1)...(19): siRNA sense strand
gaugacgccuguuauagag

SEQ ID NO: 1289777 - RNA, 19 nt, Homo sapiens
  misc_RNA (1)...(19): siRNA sense strand
gagaaacauguccauauau

SEQ ID NO: 1289778 - RNA, 19 nt, Homo sapiens
  misc_RNA (1)...(19): siRNA sense strand
ccacuuaccagacuaaauc

SEQ ID NO: 1289779 - RNA, 19 nt, Homo sapiens
  misc_RNA (1)...(19): siRNA sense strand
acgaguagauuauaagugu

SEQ ID NO: 1289780 - RNA, 19 nt, Homo sapiens
  misc_RNA (1)...(19): siRNA sense strand
cuacaaagcaacaguuaug

SEQ ID NO: 1289781 - RNA, 19 nt, Homo sapiens
  misc_RNA (1)...(19): siRNA sense strand
ccaccaacauuugaagcua

SEQ ID NO: 1289782 - RNA, 19 nt, Homo sapiens
  misc_RNA (1)...(19): siRNA sense strand
uauacgggauccuuuaaau

SEQ ID NO: 1289783 - RNA, 19 nt, Homo sapiens
  misc_RNA (1)...(19): siRNA sense strand
cgaguuugguuaucagaug

SEQ ID NO: 1289784 - RNA, 19 nt, Homo sapiens
  misc_RNA (1)...(19): siRNA sense strand
gaacgaguagauuauaagu

SEQ ID NO: 1289785 - RNA, 19 nt, Homo sapiens
  misc_RNA (1)...(19): siRNA sense strand
gugaggagccaccaacauu

SEQ ID NO: 1289786 - RNA, 19 nt, Homo sapiens
  misc_RNA (1)...(19): siRNA sense strand
gauggcagcgacacaauug

SEQ ID NO: 1289787 - RNA, 19 nt, Homo sapiens
  misc_RNA (1)...(19): siRNA sense strand
ucucagaugacgccuguua

SEQ ID NO: 1289788 - RNA, 19 nt, Homo sapiens
  misc_RNA (1)...(19): siRNA sense strand
gaggagccaccaacauuug

SEQ ID NO: 1289789 - RNA, 19 nt, Homo sapiens
  misc_RNA (1)...(19): siRNA sense strand
gcuauggagcucauuggua

SEQ ID NO: 1289790 - RNA, 19 nt, Homo sapiens
  misc_RNA (1)...(19): siRNA sense strand
acacaccuuuagugaagua

SEQ ID NO: 1289791 - RNA, 19 nt, Homo sapiens
  misc_RNA (1)...(19): siRNA sense strand
uagagaaacauguccauau

SEQ ID NO: 1289792 - RNA, 19 nt, Homo sapiens
  misc_RNA (1)...(19): siRNA sense strand
guuccaaagugucuuaaag

SEQ ID NO: 1289793 - RNA, 19 nt, Homo sapiens
  misc_RNA (1)...(19): siRNA sense strand
ggugaacgaguagauuaua

SEQ ID NO: 1289794 - RNA, 19 nt, Homo sapiens
  misc_RNA (1)...(19): siRNA sense strand
gaaguagaaguauuugagu

SEQ ID NO: 1289795 - RNA, 19 nt, Homo sapiens
  misc_RNA (1)...(19): siRNA sense strand
gaaacauguccauauauac

SEQ ID NO: 1289796 - RNA, 19 nt, Homo sapiens
  misc_RNA (1)...(19): siRNA sense strand
ugacgccuguuauagagaa

SEQ ID NO: 1289797 - RNA, 19 nt, Homo sapiens
  misc_RNA (1)...(19): siRNA sense strand
cgaguagauuauaagugua

SEQ ID NO: 1289798 - RNA, 19 nt, Homo sapiens
  misc_RNA (1)...(19): siRNA sense strand
gcacuuuauuuguaaugag

SEQ ID NO: 1289799 - RNA, 19 nt, Homo sapiens
  misc_RNA (1)...(19): siRNA sense strand
guagaaguauuugaguauc

SEQ ID NO: 1289800 - RNA, 19 nt, Homo sapiens
  misc_RNA (1)...(19): siRNA sense strand
guauuugaguaucuugaug

SEQ ID NO: 1289801 - RNA, 19 nt, Homo sapiens
  misc_RNA (1)...(19): siRNA sense strand
aggaauacuugacaguuug

SEQ ID NO: 1289802 - RNA, 19 nt, Homo sapiens
  misc_RNA (1)...(19): siRNA sense strand
ccaaaacccuacuaugaga

SEQ ID NO: 1289803 - RNA, 19 nt, Homo sapiens
  misc_RNA (1)...(19): siRNA sense strand
aguguaaaguggucaaaug

SEQ ID NO: 1289804 - RNA, 19 nt, Homo sapiens
  misc_RNA (1)...(19): siRNA sense strand
ccacccauacuauuuguga

SEQ ID NO: 1289805 - RNA, 19 nt, Homo sapiens
  misc_RNA (1)...(19): siRNA sense strand
uuggagagagcacgauuua

SEQ ID NO: 1289806 - RNA, 19 nt, Homo sapiens
  misc_RNA (1)...(19): siRNA sense strand
gguuaucagaugcacuuua

SEQ ID NO: 1289807 - RNA, 19 nt, Homo sapiens
  misc_RNA (1)...(19): siRNA sense strand
caccaacauuugaagcuau

SEQ ID NO: 1289808 - RNA, 19 nt, Homo sapiens
  misc_RNA (1)...(19): siRNA sense strand
ugaggagccaccaacauuu

SEQ ID NO: 1289809 - RNA, 19 nt, Homo sapiens
  misc_RNA (1)...(19): siRNA sense strand
ggaaggaauacuugacagu

SEQ ID NO: 1289810 - RNA, 19 nt, Homo sapiens
  misc_RNA (1)...(19): siRNA sense strand
gaggaaggaauacuugaca

SEQ ID NO: 1289811 - RNA, 19 nt, Homo sapiens
  misc_RNA (1)...(19): siRNA sense strand
ccaguuccaaagugucuua

SEQ ID NO: 1289812 - RNA, 19 nt, Homo sapiens
  misc_RNA (1)...(19): siRNA sense strand
ugaguaucuugaugcagua

SEQ ID NO: 1289813 - RNA, 19 nt, Homo sapiens
  misc_RNA (1)...(19): siRNA sense strand
caccuuuagugaaguagaa

SEQ ID NO: 1289814 - RNA, 19 nt, Homo sapiens
  misc_RNA (1)...(19): siRNA sense strand
acagauaucaggauuugga

SEQ ID NO: 1289815 - RNA, 19 nt, Homo sapiens
  misc_RNA (1)...(19): siRNA sense strand
ucauugcugugauuguuau

SEQ ID NO: 1289816 - RNA, 19 nt, Homo sapiens
  misc_RNA (1)...(19): siRNA sense strand
ucagaugcacuuuauuugu

SEQ ID NO: 1289817 - RNA, 19 nt, Homo sapiens
  misc_RNA (1)...(19): siRNA sense strand
gugcugcuccagaguguaa

SEQ ID NO: 1289818 - RNA, 19 nt, Homo sapiens
  misc_RNA (1)...(19): siRNA sense strand
ggaaaacacaccuuuagug

SEQ ID NO: 1289819 - RNA, 19 nt, Homo sapiens
  misc_RNA (1)...(19): siRNA sense strand
aaggaucaguagcaauuug

SEQ ID NO: 1289820 - RNA, 19 nt, Homo sapiens
  misc_RNA (1)...(19): siRNA sense strand
uauauacgggauccuuuaa

SEQ ID NO: 1289821 - RNA, 19 nt, Homo sapiens
  misc_RNA (1)...(19): siRNA sense strand
ugaaguagaaguauuugag

SEQ ID NO: 1289822 - RNA, 19 nt, Homo sapiens
  misc_RNA (1)...(19): siRNA sense strand
cuugacaguuuggauguuu

SEQ ID NO: 1289823 - RNA, 19 nt, Homo sapiens
  misc_RNA (1)...(19): siRNA sense strand
cauauauacgggauccuuu

SEQ ID NO: 1289824 - RNA, 19 nt, Homo sapiens
  misc_RNA (1)...(19): siRNA sense strand
auauauacgggauccuuua

SEQ ID NO: 1289825 - RNA, 19 nt, Homo sapiens
  misc_RNA (1)...(19): siRNA sense strand
cuuaaaggaucaguagcaa

SEQ ID NO: 1289826 - RNA, 19 nt, Homo sapiens
  misc_RNA (1)...(19): siRNA sense strand
uaaaccugaggaaggaaua

SEQ ID NO: 1289827 - RNA, 19 nt, Homo sapiens
  misc_RNA (1)...(19): siRNA sense strand
agaugacgccuguuauaga

SEQ ID NO: 1289828 - RNA, 19 nt, Homo sapiens
  misc_RNA (1)...(19): siRNA sense strand
ugugauuguuauugccaua

SEQ ID NO: 1289829 - RNA, 19 nt, Homo sapiens
  misc_RNA (1)...(19): siRNA sense strand
gagagcacgauuuauugug

SEQ ID NO: 1289830 - RNA, 19 nt, Homo sapiens
  misc_RNA (1)...(19): siRNA sense strand
gaaguauuugaguaucuug

SEQ ID NO: 1289831 - RNA, 19 nt, Homo sapiens
  misc_RNA (1)...(19): siRNA sense strand
ggcuaccugucucagauga

SEQ ID NO: 1289832 - RNA, 19 nt, Homo sapiens
  misc_RNA (1)...(19): siRNA sense strand
gauaucaggauuuggaaaa

SEQ ID NO: 1289833 - RNA, 19 nt, Homo sapiens
  misc_RNA (1)...(19): siRNA sense strand
ccucuugccacccauacua

SEQ ID NO: 1289834 - RNA, 19 nt, Homo sapiens
  misc_RNA (1)...(19): siRNA sense strand
ccaugguguugcugcugua

SEQ ID NO: 1289835 - RNA, 19 nt, Homo sapiens
  misc_RNA (1)...(19): siRNA sense strand
cagaugacgccuguuauag

SEQ ID NO: 1289836 - RNA, 19 nt, Homo sapiens
  misc_RNA (1)...(19): siRNA sense strand
cagaugguggagcugaaua

SEQ ID NO: 1289837 - RNA, 19 nt, Homo sapiens
  misc_RNA (1)...(19): siRNA sense strand
gucauugcugugauuguua

SEQ ID NO: 1289838 - RNA, 19 nt, Homo sapiens
  misc_RNA (1)...(19): siRNA sense strand
ggagccaccaacauuugaa

SEQ ID NO: 1289839 - RNA, 19 nt, Homo sapiens
  misc_RNA (1)...(19): siRNA sense strand
uuggugaacgaguagauua

SEQ ID NO: 1289840 - RNA, 19 nt, Homo sapiens
  misc_RNA (1)...(19): siRNA sense strand
gcgcuuuccuggguugcuu

SEQ ID NO: 1289841 - RNA, 19 nt, Homo sapiens
  misc_RNA (1)...(19): siRNA sense strand
uacuacaaagcaacaguua

SEQ ID NO: 1289842 - RNA, 19 nt, Homo sapiens
  misc_RNA (1)...(19): siRNA sense strand
cuugaugcaguaacuuaua

SEQ ID NO: 1289843 - RNA, 19 nt, Homo sapiens
  misc_RNA (1)...(19): siRNA sense strand
aaacauguccauauauacg

SEQ ID NO: 1289844 - RNA, 19 nt, Homo sapiens
  misc_RNA (1)...(19): siRNA sense strand
guguaaaguggucaaaugu

SEQ ID NO: 1289845 - RNA, 19 nt, Homo sapiens
  misc_RNA (1)...(19): siRNA sense strand
cuuacgaguuugguuauca

SEQ ID NO: 1289846 - RNA, 19 nt, Homo sapiens
  misc_RNA (1)...(19): siRNA sense strand
uacgggauccuuuaaaugg

SEQ ID NO: 1289847 - RNA, 19 nt, Homo sapiens
  misc_RNA (1)...(19): siRNA sense strand
gcagaugguggagcugaau

SEQ ID NO: 1289848 - RNA, 19 nt, Homo sapiens
  misc_RNA (1)...(19): siRNA sense strand
aaccaaaacccuacuauga

SEQ ID NO: 1289849 - RNA, 19 nt, Homo sapiens
  misc_RNA (1)...(19): siRNA sense strand
uugaugcaguaacuuauag

SEQ ID NO: 1289850 - RNA, 19 nt, Homo sapiens
  misc_RNA (1)...(19): siRNA sense strand
ggagcugaauaugccacuu

SEQ ID NO: 1289851 - RNA, 19 nt, Homo sapiens
  misc_RNA (1)...(19): siRNA sense strand
cgauggcagcgacacaauu

SEQ ID NO: 1289852 - RNA, 19 nt, Homo sapiens
  misc_RNA (1)...(19): siRNA sense strand
gauccauuuucacuuauug

SEQ ID NO: 1289853 - RNA, 19 nt, Homo sapiens
  misc_RNA (1)...(19): siRNA sense strand
ggagagagcacgauuuauu

SEQ ID NO: 1289854 - RNA, 19 nt, Homo sapiens
  misc_RNA (1)...(19): siRNA sense strand
agagaaacauguccauaua

SEQ ID NO: 1289855 - RNA, 19 nt, Homo sapiens
  misc_RNA (1)...(19): siRNA sense strand
cagaugcacuuuauuugua

SEQ ID NO: 1289856 - RNA, 19 nt, Homo sapiens
  misc_RNA (1)...(19): siRNA sense strand
ggacuuacgaguuugguua

SEQ ID NO: 1289857 - RNA, 19 nt, Homo sapiens
  misc_RNA (1)...(19): siRNA sense strand
aaacagauaucaggauuug

SEQ ID NO: 1289858 - RNA, 19 nt, Homo sapiens
  misc_RNA (1)...(19): siRNA sense strand
cuauggagcucauugguaa

SEQ ID NO: 1289859 - RNA, 19 nt, Homo sapiens
  misc_RNA (1)...(19): siRNA sense strand
aaacacaccuuuagugaag

SEQ ID NO: 1289860 - RNA, 19 nt, Homo sapiens
  misc_RNA (1)...(19): siRNA sense strand
gaacuuaaaggaucaguag

SEQ ID NO: 1289861 - RNA, 19 nt, Homo sapiens
  misc_RNA (1)...(19): siRNA sense strand
gaaaacagauaucaggauu

SEQ ID NO: 1289862 - RNA, 19 nt, Homo sapiens
  misc_RNA (1)...(19): siRNA sense strand
uaaaggaucaguagcaauu

SEQ ID NO: 1289863 - RNA, 19 nt, Homo sapiens
  misc_RNA (1)...(19): siRNA sense strand
aaaugggacuuacgaguuu

SEQ ID NO: 1289864 - RNA, 19 nt, Homo sapiens
  misc_RNA (1)...(19): siRNA sense strand
guuaucagaugcacuuuau

SEQ ID NO: 1289865 - RNA, 19 nt, Homo sapiens
  misc_RNA (1)...(19): siRNA sense strand
gagcugaauaugccacuua

SEQ ID NO: 1289866 - RNA, 19 nt, Homo sapiens
  misc_RNA (1)...(19): siRNA sense strand
ugagauuggugaacgagua

SEQ ID NO: 1289867 - RNA, 19 nt, Homo sapiens
  misc_RNA (1)...(19): siRNA sense strand
gugaacgaguagauuauaa

SEQ ID NO: 1289868 - RNA, 19 nt, Homo sapiens
  misc_RNA (1)...(19): siRNA sense strand
gagagagcacgauuuauug

SEQ ID NO: 1289869 - RNA, 19 nt, Homo sapiens
  misc_RNA (1)...(19): siRNA sense strand
caaaugggacuuacgaguu

SEQ ID NO: 1289870 - RNA, 19 nt, Homo sapiens
  misc_RNA (1)...(19): siRNA sense strand
ggucauugcugugauuguu

SEQ ID NO: 1289871 - RNA, 19 nt, Homo sapiens
  misc_RNA (1)...(19): siRNA sense strand
ccagauccauuuucacuua

SEQ ID NO: 1289872 - RNA, 19 nt, Homo sapiens
  misc_RNA (1)...(19): siRNA sense strand
gaaggaauacuugacaguu

SEQ ID NO: 1289873 - RNA, 19 nt, Homo sapiens
  misc_RNA (1)...(19): siRNA sense strand
aaggaauacuugacaguuu

SEQ ID NO: 1289874 - RNA, 19 nt, Homo sapiens
  misc_RNA (1)...(19): siRNA sense strand
ucagaugacgccuguuaua

SEQ ID NO: 1289875 - RNA, 19 nt, Homo sapiens
  misc_RNA (1)...(19): siRNA sense strand
gaaaacacaccuuuaguga

SEQ ID NO: 1289876 - RNA, 19 nt, Homo sapiens
  misc_RNA (1)...(19): siRNA sense strand
gaugacgccuguuauagag

SEQ ID NO: 1289877 - RNA, 19 nt, Homo sapiens
  misc_RNA (1)...(19): siRNA sense strand
gagaaacauguccauauau

SEQ ID NO: 1289878 - RNA, 19 nt, Homo sapiens
  misc_RNA (1)...(19): siRNA sense strand
ccacuuaccagacuaaauc

SEQ ID NO: 1289879 - RNA, 19 nt, Homo sapiens
  misc_RNA (1)...(19): siRNA sense strand
acgaguagauuauaagugu

SEQ ID NO: 1289880 - RNA, 19 nt, Homo sapiens
  misc_RNA (1)...(19): siRNA sense strand
cuacaaagcaacaguuaug

SEQ ID NO: 1289881 - RNA, 19 nt, Homo sapiens
  misc_RNA (1)...(19): siRNA sense strand
ccaccaacauuugaagcua

SEQ ID NO: 1289882 - RNA, 19 nt, Homo sapiens
  misc_RNA (1)...(19): siRNA sense strand
uauacgggauccuuuaaau

SEQ ID NO: 1289883 - RNA, 19 nt, Homo sapiens
  misc_RNA (1)...(19): siRNA sense strand
cgaguuugguuaucagaug

SEQ ID NO: 1289884 - RNA, 19 nt, Homo sapiens
  misc_RNA (1)...(19): siRNA sense strand
gaacgaguagauuauaagu

SEQ ID NO: 1289885 - RNA, 19 nt, Homo sapiens
  misc_RNA (1)...(19): siRNA sense strand
gugaggagccaccaacauu

SEQ ID NO: 1289886 - RNA, 19 nt, Homo sapiens
  misc_RNA (1)...(19): siRNA sense strand
gauggcagcgacacaauug

SEQ ID NO: 1289887 - RNA, 19 nt, Homo sapiens
  misc_RNA (1)...(19): siRNA sense strand
ucucagaugacgccuguua

SEQ ID NO: 1289888 - RNA, 19 nt, Homo sapiens
  misc_RNA (1)...(19): siRNA sense strand
gaggagccaccaacauuug

SEQ ID NO: 1289889 - RNA, 19 nt, Homo sapiens
  misc_RNA (1)...(19): siRNA sense strand
gcuauggagcucauuggua

SEQ ID NO: 1289890 - RNA, 19 nt, Homo sapiens
  misc_RNA (1)...(19): siRNA sense strand
acacaccuuuagugaagua

SEQ ID NO: 1289891 - RNA, 19 nt, Homo sapiens
  misc_RNA (1)...(19): siRNA sense strand
uagagaaacauguccauau

SEQ ID NO: 1289892 - RNA, 19 nt, Homo sapiens
  misc_RNA (1)...(19): siRNA sense strand
guuccaaagugucuuaaag

SEQ ID NO: 1289893 - RNA, 19 nt, Homo sapiens
  misc_RNA (1)...(19): siRNA sense strand
ggugaacgaguagauuaua

SEQ ID NO: 1289894 - RNA, 19 nt, Homo sapiens
  misc_RNA (1)...(19): siRNA sense strand
gaaguagaaguauuugagu

SEQ ID NO: 1289895 - RNA, 19 nt, Homo sapiens
  misc_RNA (1)...(19): siRNA sense strand
gaaacauguccauauauac

SEQ ID NO: 1289896 - RNA, 19 nt, Homo sapiens
  misc_RNA (1)...(19): siRNA sense strand
ugacgccuguuauagagaa

SEQ ID NO: 1289897 - RNA, 19 nt, Homo sapiens
  misc_RNA (1)...(19): siRNA sense strand
cgaguagauuauaagugua

SEQ ID NO: 1289898 - RNA, 19 nt, Homo sapiens
  misc_RNA (1)...(19): siRNA sense strand
gcacuuuauuuguaaugag

SEQ ID NO: 1289899 - RNA, 19 nt, Homo sapiens
  misc_RNA (1)...(19): siRNA sense strand
guagaaguauuugaguauc

SEQ ID NO: 1289900 - RNA, 19 nt, Homo sapiens
  misc_RNA (1)...(19): siRNA sense strand
guauuugaguaucuugaug

SEQ ID NO: 1289901 - RNA, 19 nt, Homo sapiens
  misc_RNA (1)...(19): siRNA sense strand
aggaauacuugacaguuug

SEQ ID NO: 1289902 - RNA, 19 nt, Homo sapiens
  misc_RNA (1)...(19): siRNA sense strand
ccaaaacccuacuaugaga

SEQ ID NO: 1289903 - RNA, 19 nt, Homo sapiens
  misc_RNA (1)...(19): siRNA sense strand
aguguaaaguggucaaaug

SEQ ID NO: 1289904 - RNA, 19 nt, Homo sapiens
  misc_RNA (1)...(19): siRNA sense strand
ccacccauacuauuuguga

SEQ ID NO: 1289905 - RNA, 19 nt, Homo sapiens
  misc_RNA (1)...(19): siRNA sense strand
uuggagagagcacgauuua

SEQ ID NO: 1289906 - RNA, 19 nt, Homo sapiens
  misc_RNA (1)...(19): siRNA sense strand
gguuaucagaugcacuuua

SEQ ID NO: 1289907 - RNA, 19 nt, Homo sapiens
  misc_RNA (1)...(19): siRNA sense strand
caccaacauuugaagcuau

SEQ ID NO: 1289908 - RNA, 19 nt, Homo sapiens
  misc_RNA (1)...(19): siRNA sense strand
ugaggagccaccaacauuu

SEQ ID NO: 1289909 - RNA, 19 nt, Homo sapiens
  misc_RNA (1)...(19): siRNA sense strand
ggaaggaauacuugacagu

SEQ ID NO: 1289910 - RNA, 19 nt, Homo sapiens
  misc_RNA (1)...(19): siRNA sense strand
gaggaaggaauacuugaca

SEQ ID NO: 1289911 - RNA, 19 nt, Homo sapiens
  misc_RNA (1)...(19): siRNA sense strand
ccaguuccaaagugucuua

SEQ ID NO: 1289912 - RNA, 19 nt, Homo sapiens
  misc_RNA (1)...(19): siRNA sense strand
ugaguaucuugaugcagua

SEQ ID NO: 1289913 - RNA, 19 nt, Homo sapiens
  misc_RNA (1)...(19): siRNA sense strand
caccuuuagugaaguagaa

SEQ ID NO: 1289914 - RNA, 19 nt, Homo sapiens
  misc_RNA (1)...(19): siRNA sense strand
acagauaucaggauuugga

SEQ ID NO: 1289915 - RNA, 19 nt, Homo sapiens
  misc_RNA (1)...(19): siRNA sense strand
ucauugcugugauuguuau

SEQ ID NO: 1289916 - RNA, 19 nt, Homo sapiens
  misc_RNA (1)...(19): siRNA sense strand
ucagaugcacuuuauuugu

SEQ ID NO: 1289917 - RNA, 19 nt, Homo sapiens
  misc_RNA (1)...(19): siRNA sense strand
gugcugcuccagaguguaa

SEQ ID NO: 1289918 - RNA, 19 nt, Homo sapiens
  misc_RNA (1)...(19): siRNA sense strand
ggaaaacacaccuuuagug

SEQ ID NO: 1289919 - RNA, 19 nt, Homo sapiens
  misc_RNA (1)...(19): siRNA sense strand
aaggaucaguagcaauuug

SEQ ID NO: 1289920 - RNA, 19 nt, Homo sapiens
  misc_RNA (1)...(19): siRNA sense strand
uauauacgggauccuuuaa

SEQ ID NO: 1289921 - RNA, 19 nt, Homo sapiens
  misc_RNA (1)...(19): siRNA sense strand
ugaaguagaaguauuugag

SEQ ID NO: 1289922 - RNA, 19 nt, Homo sapiens
  misc_RNA (1)...(19): siRNA sense strand
cuugacaguuuggauguuu

SEQ ID NO: 1289923 - RNA, 19 nt, Homo sapiens
  misc_RNA (1)...(19): siRNA sense strand
cauauauacgggauccuuu

SEQ ID NO: 1289924 - RNA, 19 nt, Homo sapiens
  misc_RNA (1)...(19): siRNA sense strand
auauauacgggauccuuua

SEQ ID NO: 1289925 - RNA, 19 nt, Homo sapiens
  misc_RNA (1)...(19): siRNA sense strand
cuuaaaggaucaguagcaa

SEQ ID NO: 1289926 - RNA, 19 nt, Homo sapiens
  misc_RNA (1)...(19): siRNA sense strand
uaaaccugaggaaggaaua

SEQ ID NO: 1289927 - RNA, 19 nt, Homo sapiens
  misc_RNA (1)...(19): siRNA sense strand
agaugacgccuguuauaga

SEQ ID NO: 1289928 - RNA, 19 nt, Homo sapiens
  misc_RNA (1)...(19): siRNA sense strand
ugugauuguuauugccaua

SEQ ID NO: 1289929 - RNA, 19 nt, Homo sapiens
  misc_RNA (1)...(19): siRNA sense strand
gagagcacgauuuauugug

SEQ ID NO: 1289930 - RNA, 19 nt, Homo sapiens
  misc_RNA (1)...(19): siRNA sense strand
gaaguauuugaguaucuug

SEQ ID NO: 1289931 - RNA, 19 nt, Homo sapiens
  misc_RNA (1)...(19): siRNA sense strand
ggcuaccugucucagauga

SEQ ID NO: 1289932 - RNA, 19 nt, Homo sapiens
  misc_RNA (1)...(19): siRNA sense strand
gauaucaggauuuggaaaa

SEQ ID NO: 1289933 - RNA, 19 nt, Homo sapiens
  misc_RNA (1)...(19): siRNA sense strand
ccucuugccacccauacua

SEQ ID NO: 1289934 - RNA, 19 nt, Homo sapiens
  misc_RNA (1)...(19): siRNA sense strand
ccaugguguugcugcugua

SEQ ID NO: 1289935 - RNA, 19 nt, Homo sapiens
  misc_RNA (1)...(19): siRNA sense strand
cagaugacgccuguuauag

SEQ ID NO: 1289936 - RNA, 19 nt, Homo sapiens
  misc_RNA (1)...(19): siRNA sense strand
cagaugguggagcugaaua

SEQ ID NO: 1289937 - RNA, 19 nt, Homo sapiens
  misc_RNA (1)...(19): siRNA sense strand
gucauugcugugauuguua

SEQ ID NO: 1289938 - RNA, 19 nt, Homo sapiens
  misc_RNA (1)...(19): siRNA sense strand
ggagccaccaacauuugaa

SEQ ID NO: 1289939 - RNA, 19 nt, Homo sapiens
  misc_RNA (1)...(19): siRNA sense strand
uuggugaacgaguagauua

SEQ ID NO: 1289940 - RNA, 19 nt, Homo sapiens
  misc_RNA (1)...(19): siRNA sense strand
gcgcuuuccuggguugcuu

SEQ ID NO: 1289941 - RNA, 19 nt, Homo sapiens
  misc_RNA (1)...(19): siRNA sense strand
uacuacaaagcaacaguua

SEQ ID NO: 1289942 - RNA, 19 nt, Homo sapiens
  misc_RNA (1)...(19): siRNA sense strand
cuugaugcaguaacuuaua

SEQ ID NO: 1289943 - RNA, 19 nt, Homo sapiens
  misc_RNA (1)...(19): siRNA sense strand
aaacauguccauauauacg

SEQ ID NO: 1289944 - RNA, 19 nt, Homo sapiens
  misc_RNA (1)...(19): siRNA sense strand
guguaaaguggucaaaugu

SEQ ID NO: 1289945 - RNA, 19 nt, Homo sapiens
  misc_RNA (1)...(19): siRNA sense strand
cuuacgaguuugguuauca

SEQ ID NO: 1289946 - RNA, 19 nt, Homo sapiens
  misc_RNA (1)...(19): siRNA sense strand
uacgggauccuuuaaaugg

SEQ ID NO: 1289947 - RNA, 19 nt, Homo sapiens
  misc_RNA (1)...(19): siRNA sense strand
gcagaugguggagcugaau

SEQ ID NO: 1289948 - RNA, 19 nt, Homo sapiens
  misc_RNA (1)...(19): siRNA sense strand
aaccaaaacccuacuauga

SEQ ID NO: 1289949 - RNA, 19 nt, Homo sapiens
  misc_RNA (1)...(19): siRNA sense strand
uugaugcaguaacuuauag

SEQ ID NO: 1289950 - RNA, 19 nt, Homo sapiens
  misc_RNA (1)...(19): siRNA sense strand
ggagcugaauaugccacuu

SEQ ID NO: 1289951 - RNA, 19 nt, Homo sapiens
  misc_RNA (1)...(19): siRNA sense strand
cgauggcagcgacacaauu

SEQ ID NO: 1289952 - RNA, 19 nt, Homo sapiens
  misc_RNA (1)...(19): siRNA sense strand
gauccauuuucacuuauug

SEQ ID NO: 1289953 - RNA, 19 nt, Homo sapiens
  misc_RNA (1)...(19): siRNA sense strand
ggagagagcacgauuuauu

SEQ ID NO: 1289954 - RNA, 19 nt, Homo sapiens
  misc_RNA (1)...(19): siRNA sense strand
agagaaacauguccauaua

SEQ ID NO: 1289955 - RNA, 19 nt, Homo sapiens
  misc_RNA (1)...(19): siRNA sense strand
cagaugcacuuuauuugua

SEQ ID NO: 1289956 - RNA, 19 nt, Homo sapiens
  misc_RNA (1)...(19): siRNA sense strand
ggacuuacgaguuugguua

SEQ ID NO: 1289957 - RNA, 19 nt, Homo sapiens
  misc_RNA (1)...(19): siRNA sense strand
aaacagauaucaggauuug

SEQ ID NO: 1289958 - RNA, 19 nt, Homo sapiens
  misc_RNA (1)...(19): siRNA sense strand
cuauggagcucauugguaa

SEQ ID NO: 1289959 - RNA, 19 nt, Homo sapiens
  misc_RNA (1)...(19): siRNA sense strand
aaacacaccuuuagugaag

SEQ ID NO: 1289960 - RNA, 19 nt, Homo sapiens
  misc_RNA (1)...(19): siRNA sense strand
gaacuuaaaggaucaguag

SEQ ID NO: 1289961 - RNA, 19 nt, Homo sapiens
  misc_RNA (1)...(19): siRNA sense strand
gaaaacagauaucaggauu

SEQ ID NO: 1289962 - RNA, 19 nt, Homo sapiens
  misc_RNA (1)...(19): siRNA sense strand
uaaaggaucaguagcaauu

SEQ ID NO: 1289963 - RNA, 19 nt, Homo sapiens
  misc_RNA (1)...(19): siRNA sense strand
aaaugggacuuacgaguuu

SEQ ID NO: 1289964 - RNA, 19 nt, Homo sapiens
  misc_RNA (1)...(19): siRNA sense strand
guuaucagaugcacuuuau

SEQ ID NO: 1289965 - RNA, 19 nt, Homo sapiens
  misc_RNA (1)...(19): siRNA sense strand
gagcugaauaugccacuua

SEQ ID NO: 1289966 - RNA, 19 nt, Homo sapiens
  misc_RNA (1)...(19): siRNA sense strand
ugagauuggugaacgagua

SEQ ID NO: 1289967 - RNA, 19 nt, Homo sapiens
  misc_RNA (1)...(19): siRNA sense strand
gugaacgaguagauuauaa

SEQ ID NO: 1289968 - RNA, 19 nt, Homo sapiens
  misc_RNA (1)...(19): siRNA sense strand
gagagagcacgauuuauug

SEQ ID NO: 1289969 - RNA, 19 nt, Homo sapiens
  misc_RNA (1)...(19): siRNA sense strand
caaaugggacuuacgaguu

SEQ ID NO: 1289970 - RNA, 19 nt, Homo sapiens
  misc_RNA (1)...(19): siRNA sense strand
ggucauugcugugauuguu

SEQ ID NO: 1289971 - RNA, 19 nt, Homo sapiens
  misc_RNA (1)...(19): siRNA sense strand
ccagauccauuuucacuua

SEQ ID NO: 1289972 - RNA, 19 nt, Homo sapiens
  misc_RNA (1)...(19): siRNA sense strand
gaaggaauacuugacaguu

SEQ ID NO: 1289973 - RNA, 19 nt, Homo sapiens
  misc_RNA (1)...(19): siRNA sense strand
aaggaauacuugacaguuu

SEQ ID NO: 1289974 - RNA, 19 nt, Homo sapiens
  misc_RNA (1)...(19): siRNA sense strand
ucagaugacgccuguuaua

SEQ ID NO: 1289975 - RNA, 19 nt, Homo sapiens
  misc_RNA (1)...(19): siRNA sense strand
gaaaacacaccuuuaguga

SEQ ID NO: 1289976 - RNA, 19 nt, Homo sapiens
  misc_RNA (1)...(19): siRNA sense strand
gaugacgccuguuauagag

SEQ ID NO: 1289977 - RNA, 19 nt, Homo sapiens
  misc_RNA (1)...(19): siRNA sense strand
gagaaacauguccauauau

SEQ ID NO: 1289978 - RNA, 19 nt, Homo sapiens
  misc_RNA (1)...(19): siRNA sense strand
ccacuuaccagacuaaauc

SEQ ID NO: 1289979 - RNA, 19 nt, Homo sapiens
  misc_RNA (1)...(19): siRNA sense strand
acgaguagauuauaagugu

SEQ ID NO: 1289980 - RNA, 19 nt, Homo sapiens
  misc_RNA (1)...(19): siRNA sense strand
cuacaaagcaacaguuaug

SEQ ID NO: 1289981 - RNA, 19 nt, Homo sapiens
  misc_RNA (1)...(19): siRNA sense strand
ccaccaacauuugaagcua

SEQ ID NO: 1289982 - RNA, 19 nt, Homo sapiens
  misc_RNA (1)...(19): siRNA sense strand
uauacgggauccuuuaaau

SEQ ID NO: 1289983 - RNA, 19 nt, Homo sapiens
  misc_RNA (1)...(19): siRNA sense strand
cgaguuugguuaucagaug

SEQ ID NO: 1289984 - RNA, 19 nt, Homo sapiens
  misc_RNA (1)...(19): siRNA sense strand
gaacgaguagauuauaagu

SEQ ID NO: 1289985 - RNA, 19 nt, Homo sapiens
  misc_RNA (1)...(19): siRNA sense strand
gugaggagccaccaacauu

SEQ ID NO: 1289986 - RNA, 19 nt, Homo sapiens
  misc_RNA (1)...(19): siRNA sense strand
gauggcagcgacacaauug

SEQ ID NO: 1289987 - RNA, 19 nt, Homo sapiens
  misc_RNA (1)...(19): siRNA sense strand
ucucagaugacgccuguua

SEQ ID NO: 1289988 - RNA, 19 nt, Homo sapiens
  misc_RNA (1)...(19): siRNA sense strand
gaggagccaccaacauuug

SEQ ID NO: 1289989 - RNA, 19 nt, Homo sapiens
  misc_RNA (1)...(19): siRNA sense strand
gcuauggagcucauuggua

SEQ ID NO: 1289990 - RNA, 19 nt, Homo sapiens
  misc_RNA (1)...(19): siRNA sense strand
acacaccuuuagugaagua

SEQ ID NO: 1289991 - RNA, 19 nt, Homo sapiens
  misc_RNA (1)...(19): siRNA sense strand
uagagaaacauguccauau

SEQ ID NO: 1289992 - RNA, 19 nt, Homo sapiens
  misc_RNA (1)...(19): siRNA sense strand
guuccaaagugucuuaaag

SEQ ID NO: 1289993 - RNA, 19 nt, Homo sapiens
  misc_RNA (1)...(19): siRNA sense strand
ggugaacgaguagauuaua

SEQ ID NO: 1289994 - RNA, 19 nt, Homo sapiens
  misc_RNA (1)...(19): siRNA sense strand
gaaguagaaguauuugagu

SEQ ID NO: 1289995 - RNA, 19 nt, Homo sapiens
  misc_RNA (1)...(19): siRNA sense strand
gaaacauguccauauauac

SEQ ID NO: 1289996 - RNA, 19 nt, Homo sapiens
  misc_RNA (1)...(19): siRNA sense strand
ugacgccuguuauagagaa

SEQ ID NO: 1289997 - RNA, 19 nt, Homo sapiens
  misc_RNA (1)...(19): siRNA sense strand
cgaguagauuauaagugua

SEQ ID NO: 1289998 - RNA, 19 nt, Homo sapiens
  misc_RNA (1)...(19): siRNA sense strand
gcacuuuauuuguaaugag

SEQ ID NO: 1289999 - RNA, 19 nt, Homo sapiens
  misc_RNA (1)...(19): siRNA sense strand
guagaaguauuugaguauc

SEQ ID NO: 1290000 - RNA, 19 nt, Homo sapiens
  misc_RNA (1)...(19): siRNA sense strand
guauuugaguaucuugaug

SEQ ID NO: 1290001 - RNA, 19 nt, Homo sapiens
  misc_RNA (1)...(19): siRNA sense strand
aggaauacuugacaguuug

SEQ ID NO: 1290002 - RNA, 19 nt, Homo sapiens
  misc_RNA (1)...(19): siRNA sense strand
ccaaaacccuacuaugaga

SEQ ID NO: 1290003 - RNA, 19 nt, Homo sapiens
  misc_RNA (1)...(19): siRNA sense strand
aguguaaaguggucaaaug

SEQ ID NO: 1290004 - RNA, 19 nt, Homo sapiens
  misc_RNA (1)...(19): siRNA sense strand
ccacccauacuauuuguga

SEQ ID NO: 1290005 - RNA, 19 nt, Homo sapiens
  misc_RNA (1)...(19): siRNA sense strand
uuggagagagcacgauuua

SEQ ID NO: 1290006 - RNA, 19 nt, Homo sapiens
  misc_RNA (1)...(19): siRNA sense strand
gguuaucagaugcacuuua

SEQ ID NO: 1290007 - RNA, 19 nt, Homo sapiens
  misc_RNA (1)...(19): siRNA sense strand
caccaacauuugaagcuau

SEQ ID NO: 1290008 - RNA, 19 nt, Homo sapiens
  misc_RNA (1)...(19): siRNA sense strand
ugaggagccaccaacauuu

SEQ ID NO: 1290009 - RNA, 19 nt, Homo sapiens
  misc_RNA (1)...(19): siRNA sense strand
ggaaggaauacuugacagu

SEQ ID NO: 1290010 - RNA, 19 nt, Homo sapiens
  misc_RNA (1)...(19): siRNA sense strand
gaggaaggaauacuugaca

SEQ ID NO: 1290011 - RNA, 19 nt, Homo sapiens
  misc_RNA (1)...(19): siRNA sense strand
ccaguuccaaagugucuua

SEQ ID NO: 1290012 - RNA, 19 nt, Homo sapiens
  misc_RNA (1)...(19): siRNA sense strand
ugaguaucuugaugcagua

SEQ ID NO: 1290013 - RNA, 19 nt, Homo sapiens
  misc_RNA (1)...(19): siRNA sense strand
caccuuuagugaaguagaa

SEQ ID NO: 1290014 - RNA, 19 nt, Homo sapiens
  misc_RNA (1)...(19): siRNA sense strand
acagauaucaggauuugga

SEQ ID NO: 1290015 - RNA, 19 nt, Homo sapiens
  misc_RNA (1)...(19): siRNA sense strand
ucauugcugugauuguuau

SEQ ID NO: 1290016 - RNA, 19 nt, Homo sapiens
  misc_RNA (1)...(19): siRNA sense strand
ucagaugcacuuuauuugu

SEQ ID NO: 1290017 - RNA, 19 nt, Homo sapiens
  misc_RNA (1)...(19): siRNA sense strand
gugcugcuccagaguguaa

SEQ ID NO: 1290018 - RNA, 19 nt, Homo sapiens
  misc_RNA (1)...(19): siRNA sense strand
ggaaaacacaccuuuagug

SEQ ID NO: 1290019 - RNA, 19 nt, Homo sapiens
  misc_RNA (1)...(19): siRNA sense strand
aaggaucaguagcaauuug

SEQ ID NO: 1290020 - RNA, 19 nt, Homo sapiens
  misc_RNA (1)...(19): siRNA sense strand
uauauacgggauccuuuaa

SEQ ID NO: 1290021 - RNA, 19 nt, Homo sapiens
  misc_RNA (1)...(19): siRNA sense strand
ugaaguagaaguauuugag

SEQ ID NO: 1290022 - RNA, 19 nt, Homo sapiens
  misc_RNA (1)...(19): siRNA sense strand
cuugacaguuuggauguuu

SEQ ID NO: 1290023 - RNA, 19 nt, Homo sapiens
  misc_RNA (1)...(19): siRNA sense strand
cauauauacgggauccuuu

SEQ ID NO: 1290024 - RNA, 19 nt, Homo sapiens
  misc_RNA (1)...(19): siRNA sense strand
auauauacgggauccuuua

SEQ ID NO: 1290025 - RNA, 19 nt, Homo sapiens
  misc_RNA (1)...(19): siRNA sense strand
cuuaaaggaucaguagcaa

SEQ ID NO: 1290026 - RNA, 19 nt, Homo sapiens
  misc_RNA (1)...(19): siRNA sense strand
uaaaccugaggaaggaaua

SEQ ID NO: 1290027 - RNA, 19 nt, Homo sapiens
  misc_RNA (1)...(19): siRNA sense strand
agaugacgccuguuauaga

SEQ ID NO: 1290028 - RNA, 19 nt, Homo sapiens
  misc_RNA (1)...(19): siRNA sense strand
ugugauuguuauugccaua

SEQ ID NO: 1290029 - RNA, 19 nt, Homo sapiens
  misc_RNA (1)...(19): siRNA sense strand
gagagcacgauuuauugug

SEQ ID NO: 1290030 - RNA, 19 nt, Homo sapiens
  misc_RNA (1)...(19): siRNA sense strand
gaaguauuugaguaucuug

SEQ ID NO: 1290031 - RNA, 19 nt, Homo sapiens
  misc_RNA (1)...(19): siRNA sense strand
ggcuaccugucucagauga

SEQ ID NO: 1290032 - RNA, 19 nt, Homo sapiens
  misc_RNA (1)...(19): siRNA sense strand
gauaucaggauuuggaaaa

SEQ ID NO: 1290033 - RNA, 19 nt, Homo sapiens
  misc_RNA (1)...(19): siRNA sense strand
ccucuugccacccauacua

SEQ ID NO: 1290034 - RNA, 19 nt, Homo sapiens
  misc_RNA (1)...(19): siRNA sense strand
ccaugguguugcugcugua

SEQ ID NO: 1290035 - RNA, 19 nt, Homo sapiens
  misc_RNA (1)...(19): siRNA sense strand
cagaugacgccuguuauag

SEQ ID NO: 1290036 - RNA, 19 nt, Homo sapiens
  misc_RNA (1)...(19): siRNA sense strand
cagaugguggagcugaaua

SEQ ID NO: 1290037 - RNA, 19 nt, Homo sapiens
  misc_RNA (1)...(19): siRNA sense strand
gucauugcugugauuguua

SEQ ID NO: 1290038 - RNA, 19 nt, Homo sapiens
  misc_RNA (1)...(19): siRNA sense strand
ggagccaccaacauuugaa

SEQ ID NO: 1290039 - RNA, 19 nt, Homo sapiens
  misc_RNA (1)...(19): siRNA sense strand
uuggugaacgaguagauua

SEQ ID NO: 1290040 - RNA, 19 nt, Homo sapiens
  misc_RNA (1)...(19): siRNA sense strand
gcgcuuuccuggguugcuu

SEQ ID NO: 1290041 - RNA, 19 nt, Homo sapiens
  misc_RNA (1)...(19): siRNA sense strand
uacuacaaagcaacaguua

SEQ ID NO: 1290042 - RNA, 19 nt, Homo sapiens
  misc_RNA (1)...(19): siRNA sense strand
cuugaugcaguaacuuaua

SEQ ID NO: 1290043 - RNA, 19 nt, Homo sapiens
  misc_RNA (1)...(19): siRNA sense strand
aaacauguccauauauacg

SEQ ID NO: 1290044 - RNA, 19 nt, Homo sapiens
  misc_RNA (1)...(19): siRNA sense strand
guguaaaguggucaaaugu

SEQ ID NO: 1290045 - RNA, 19 nt, Homo sapiens
  misc_RNA (1)...(19): siRNA sense strand
cuuacgaguuugguuauca

SEQ ID NO: 1290046 - RNA, 19 nt, Homo sapiens
  misc_RNA (1)...(19): siRNA sense strand
uacgggauccuuuaaaugg

SEQ ID NO: 1290047 - RNA, 19 nt, Homo sapiens
  misc_RNA (1)...(19): siRNA sense strand
gcagaugguggagcugaau

SEQ ID NO: 1290048 - RNA, 19 nt, Homo sapiens
  misc_RNA (1)...(19): siRNA sense strand
aaccaaaacccuacuauga

SEQ ID NO: 1290049 - RNA, 19 nt, Homo sapiens
  misc_RNA (1)...(19): siRNA sense strand
uugaugcaguaacuuauag

SEQ ID NO: 1290050 - RNA, 19 nt, Homo sapiens
  misc_RNA (1)...(19): siRNA sense strand
ggagcugaauaugccacuu

SEQ ID NO: 1290051 - RNA, 19 nt, Homo sapiens
  misc_RNA (1)...(19): siRNA sense strand
cgauggcagcgacacaauu

SEQ ID NO: 1290052 - RNA, 19 nt, Homo sapiens
  misc_RNA (1)...(19): siRNA sense strand
gauccauuuucacuuauug

SEQ ID NO: 1290053 - RNA, 19 nt, Homo sapiens
  misc_RNA (1)...(19): siRNA sense strand
ggagagagcacgauuuauu

SEQ ID NO: 1290054 - RNA, 19 nt, Homo sapiens
  misc_RNA (1)...(19): siRNA sense strand
agagaaacauguccauaua

SEQ ID NO: 1290055 - RNA, 19 nt, Homo sapiens
  misc_RNA (1)...(19): siRNA sense strand
cagaugcacuuuauuugua

SEQ ID NO: 1290056 - RNA, 19 nt, Homo sapiens
  misc_RNA (1)...(19): siRNA sense strand
ggacuuacgaguuugguua

SEQ ID NO: 1290057 - RNA, 19 nt, Homo sapiens
  misc_RNA (1)...(19): siRNA sense strand
aaacagauaucaggauuug

SEQ ID NO: 1290058 - RNA, 19 nt, Homo sapiens
  misc_RNA (1)...(19): siRNA sense strand
cuauggagcucauugguaa

SEQ ID NO: 1290059 - RNA, 19 nt, Homo sapiens
  misc_RNA (1)...(19): siRNA sense strand
aaacacaccuuuagugaag

SEQ ID NO: 1290060 - RNA, 19 nt, Homo sapiens
  misc_RNA (1)...(19): siRNA sense strand
gaacuuaaaggaucaguag

SEQ ID NO: 1290061 - RNA, 19 nt, Homo sapiens
  misc_RNA (1)...(19): siRNA sense strand
gaaaacagauaucaggauu

SEQ ID NO: 1290062 - RNA, 19 nt, Homo sapiens
  misc_RNA (1)...(19): siRNA sense strand
uaaaggaucaguagcaauu

SEQ ID NO: 1290063 - RNA, 19 nt, Homo sapiens
  misc_RNA (1)...(19): siRNA sense strand
aaaugggacuuacgaguuu

SEQ ID NO: 1290064 - RNA, 19 nt, Homo sapiens
  misc_RNA (1)...(19): siRNA sense strand
guuaucagaugcacuuuau

SEQ ID NO: 1290065 - RNA, 19 nt, Homo sapiens
  misc_RNA (1)...(19): siRNA sense strand
ugagauuggugaacgagua

SEQ ID NO: 1290066 - RNA, 19 nt, Homo sapiens
  misc_RNA (1)...(19): siRNA sense strand
gugaacgaguagauuauaa

SEQ ID NO: 1290067 - RNA, 19 nt, Homo sapiens
  misc_RNA (1)...(19): siRNA sense strand
gagagagcacgauuuauug

SEQ ID NO: 1290068 - RNA, 19 nt, Homo sapiens
  misc_RNA (1)...(19): siRNA sense strand
caaaugggacuuacgaguu

SEQ ID NO: 1290069 - RNA, 19 nt, Homo sapiens
  misc_RNA (1)...(19): siRNA sense strand
ggucauugcugugauuguu

SEQ ID NO: 1290070 - RNA, 19 nt, Homo sapiens
  misc_RNA (1)...(19): siRNA sense strand
ccagauccauuuucacuua

SEQ ID NO: 1290071 - RNA, 19 nt, Homo sapiens
  misc_RNA (1)...(19): siRNA sense strand
gaaggaauacuugacaguu

SEQ ID NO: 1290072 - RNA, 19 nt, Homo sapiens
  misc_RNA (1)...(19): siRNA sense strand
aaggaauacuugacaguuu

SEQ ID NO: 1290073 - RNA, 19 nt, Homo sapiens
  misc_RNA (1)...(19): siRNA sense strand
ucagaugacgccuguuaua

SEQ ID NO: 1290074 - RNA, 19 nt, Homo sapiens
  misc_RNA (1)...(19): siRNA sense strand
gaaaacacaccuuuaguga

SEQ ID NO: 1290075 - RNA, 19 nt, Homo sapiens
  misc_RNA (1)...(19): siRNA sense strand
gaugacgccuguuauagag

SEQ ID NO: 1290076 - RNA, 19 nt, Homo sapiens
  misc_RNA (1)...(19): siRNA sense strand
gagaaacauguccauauau

SEQ ID NO: 1290077 - RNA, 19 nt, Homo sapiens
  misc_RNA (1)...(19): siRNA sense strand
acgaguagauuauaagugu

SEQ ID NO: 1290078 - RNA, 19 nt, Homo sapiens
  misc_RNA (1)...(19): siRNA sense strand
cuacaaagcaacaguuaug

SEQ ID NO: 1290079 - RNA, 19 nt, Homo sapiens
  misc_RNA (1)...(19): siRNA sense strand
ccaccaacauuugaagcua

SEQ ID NO: 1290080 - RNA, 19 nt, Homo sapiens
  misc_RNA (1)...(19): siRNA sense strand
uauacgggauccuuuaaau

SEQ ID NO: 1290081 - RNA, 19 nt, Homo sapiens
  misc_RNA (1)...(19): siRNA sense strand
cgaguuugguuaucagaug

SEQ ID NO: 1290082 - RNA, 19 nt, Homo sapiens
  misc_RNA (1)...(19): siRNA sense strand
gaacgaguagauuauaagu

SEQ ID NO: 1290083 - RNA, 19 nt, Homo sapiens
  misc_RNA (1)...(19): siRNA sense strand
gugaggagccaccaacauu

SEQ ID NO: 1290084 - RNA, 19 nt, Homo sapiens
  misc_RNA (1)...(19): siRNA sense strand
gauggcagcgacacaauug

SEQ ID NO: 1290085 - RNA, 19 nt, Homo sapiens
  misc_RNA (1)...(19): siRNA sense strand
gcuauggagcucauuggua

SEQ ID NO: 1290086 - RNA, 19 nt, Homo sapiens
  misc_RNA (1)...(19): siRNA sense strand
gaggagccaccaacauuug

SEQ ID NO: 1290087 - RNA, 19 nt, Homo sapiens
  misc_RNA (1)...(19): siRNA sense strand
acacaccuuuagugaagua

SEQ ID NO: 1290088 - RNA, 19 nt, Homo sapiens
  misc_RNA (1)...(19): siRNA sense strand
ucucagaugacgccuguua

SEQ ID NO: 1290089 - RNA, 19 nt, Homo sapiens
  misc_RNA (1)...(19): siRNA sense strand
uagagaaacauguccauau

SEQ ID NO: 1290090 - RNA, 19 nt, Homo sapiens
  misc_RNA (1)...(19): siRNA sense strand
guuccaaagugucuuaaag

SEQ ID NO: 1290091 - RNA, 19 nt, Homo sapiens
  misc_RNA (1)...(19): siRNA sense strand
ggugaacgaguagauuaua

SEQ ID NO: 1290092 - RNA, 19 nt, Homo sapiens
  misc_RNA (1)...(19): siRNA sense strand
gaaguagaaguauuugagu

SEQ ID NO: 1290093 - RNA, 19 nt, Homo sapiens
  misc_RNA (1)...(19): siRNA sense strand
gaaacauguccauauauac

SEQ ID NO: 1290094 - RNA, 19 nt, Homo sapiens
  misc_RNA (1)...(19): siRNA sense strand
ugacgccuguuauagagaa

SEQ ID NO: 1290095 - RNA, 19 nt, Homo sapiens
  misc_RNA (1)...(19): siRNA sense strand
cgaguagauuauaagugua

SEQ ID NO: 1290096 - RNA, 19 nt, Homo sapiens
  misc_RNA (1)...(19): siRNA sense strand
gcacuuuauuuguaaugag

SEQ ID NO: 1290097 - RNA, 19 nt, Homo sapiens
  misc_RNA (1)...(19): siRNA sense strand
guagaaguauuugaguauc

SEQ ID NO: 1290098 - RNA, 19 nt, Homo sapiens
  misc_RNA (1)...(19): siRNA sense strand
guauuugaguaucuugaug

SEQ ID NO: 1290099 - RNA, 19 nt, Homo sapiens
  misc_RNA (1)...(19): siRNA sense strand
aggaauacuugacaguuug

SEQ ID NO: 1290100 - RNA, 19 nt, Homo sapiens
  misc_RNA (1)...(19): siRNA sense strand
ccaaaacccuacuaugaga

SEQ ID NO: 1290101 - RNA, 19 nt, Homo sapiens
  misc_RNA (1)...(19): siRNA sense strand
aguguaaaguggucaaaug

SEQ ID NO: 1290102 - RNA, 19 nt, Homo sapiens
  misc_RNA (1)...(19): siRNA sense strand
ccacccauacuauuuguga

SEQ ID NO: 1290103 - RNA, 19 nt, Homo sapiens
  misc_RNA (1)...(19): siRNA sense strand
caccaacauuugaagcuau

SEQ ID NO: 1290104 - RNA, 19 nt, Homo sapiens
  misc_RNA (1)...(19): siRNA sense strand
uuggagagagcacgauuua

SEQ ID NO: 1290105 - RNA, 19 nt, Homo sapiens
  misc_RNA (1)...(19): siRNA sense strand
gguuaucagaugcacuuua

SEQ ID NO: 1290106 - RNA, 19 nt, Homo sapiens
  misc_RNA (1)...(19): siRNA sense strand
ugaggagccaccaacauuu

SEQ ID NO: 1290107 - RNA, 19 nt, Homo sapiens
  misc_RNA (1)...(19): siRNA sense strand
ggaaggaauacuugacagu

SEQ ID NO: 1290108 - RNA, 19 nt, Homo sapiens
  misc_RNA (1)...(19): siRNA sense strand
gaggaaggaauacuugaca

SEQ ID NO: 1290109 - RNA, 19 nt, Homo sapiens
  misc_RNA (1)...(19): siRNA sense strand
ccaguuccaaagugucuua

SEQ ID NO: 1290110 - RNA, 19 nt, Homo sapiens
  misc_RNA (1)...(19): siRNA sense strand
ugaguaucuugaugcagua

SEQ ID NO: 1290111 - RNA, 19 nt, Homo sapiens
  misc_RNA (1)...(19): siRNA sense strand
caccuuuagugaaguagaa

SEQ ID NO: 1290112 - RNA, 19 nt, Homo sapiens
  misc_RNA (1)...(19): siRNA sense strand
acagauaucaggauuugga

SEQ ID NO: 1290113 - RNA, 19 nt, Homo sapiens
  misc_RNA (1)...(19): siRNA sense strand
ucauugcugugauuguuau

SEQ ID NO: 1290114 - RNA, 19 nt, Homo sapiens
  misc_RNA (1)...(19): siRNA sense strand
ucagaugcacuuuauuugu

SEQ ID NO: 1290115 - RNA, 19 nt, Homo sapiens
  misc_RNA (1)...(19): siRNA sense strand
gugcugcuccagaguguaa

SEQ ID NO: 1290116 - RNA, 19 nt, Homo sapiens
  misc_RNA (1)...(19): siRNA sense strand
ggaaaacacaccuuuagug

SEQ ID NO: 1290117 - RNA, 19 nt, Homo sapiens
  misc_RNA (1)...(19): siRNA sense strand
aaggaucaguagcaauuug

SEQ ID NO: 1290118 - RNA, 19 nt, Homo sapiens
  misc_RNA (1)...(19): siRNA sense strand
uauauacgggauccuuuaa

SEQ ID NO: 1290119 - RNA, 19 nt, Homo sapiens
  misc_RNA (1)...(19): siRNA sense strand
ugaaguagaaguauuugag

SEQ ID NO: 1290120 - RNA, 19 nt, Homo sapiens
  misc_RNA (1)...(19): siRNA sense strand
cuugacaguuuggauguuu

SEQ ID NO: 1290121 - RNA, 19 nt, Homo sapiens
  misc_RNA (1)...(19): siRNA sense strand
cauauauacgggauccuuu

SEQ ID NO: 1290122 - RNA, 19 nt, Homo sapiens
  misc_RNA (1)...(19): siRNA sense strand
auauauacgggauccuuua

SEQ ID NO: 1290123 - RNA, 19 nt, Homo sapiens
  misc_RNA (1)...(19): siRNA sense strand
cuuaaaggaucaguagcaa

SEQ ID NO: 1290124 - RNA, 19 nt, Homo sapiens
  misc_RNA (1)...(19): siRNA sense strand
uaaaccugaggaaggaaua

SEQ ID NO: 1290125 - RNA, 19 nt, Homo sapiens
  misc_RNA (1)...(19): siRNA sense strand
agaugacgccuguuauaga

SEQ ID NO: 1290126 - RNA, 19 nt, Homo sapiens
  misc_RNA (1)...(19): siRNA sense strand
ugugauuguuauugccaua

SEQ ID NO: 1290127 - RNA, 19 nt, Homo sapiens
  misc_RNA (1)...(19): siRNA sense strand
gagagcacgauuuauugug

SEQ ID NO: 1290128 - RNA, 19 nt, Homo sapiens
  misc_RNA (1)...(19): siRNA sense strand
gaaguauuugaguaucuug

SEQ ID NO: 1290129 - RNA, 19 nt, Homo sapiens
  misc_RNA (1)...(19): siRNA sense strand
ggcuaccugucucagauga

SEQ ID NO: 1290130 - RNA, 19 nt, Homo sapiens
  misc_RNA (1)...(19): siRNA sense strand
gauaucaggauuuggaaaa

SEQ ID NO: 1290131 - RNA, 19 nt, Homo sapiens
  misc_RNA (1)...(19): siRNA sense strand
ccucuugccacccauacua

SEQ ID NO: 1290132 - RNA, 19 nt, Homo sapiens
  misc_RNA (1)...(19): siRNA sense strand
ccaugguguugcugcugua

SEQ ID NO: 1290133 - RNA, 19 nt, Homo sapiens
  misc_RNA (1)...(19): siRNA sense strand
cagaugacgccuguuauag

SEQ ID NO: 1290134 - RNA, 19 nt, Homo sapiens
  misc_RNA (1)...(19): siRNA sense strand
uuggugaacgaguagauua

SEQ ID NO: 1290135 - RNA, 19 nt, Homo sapiens
  misc_RNA (1)...(19): siRNA sense strand
gucauugcugugauuguua

SEQ ID NO: 1290136 - RNA, 19 nt, Homo sapiens
  misc_RNA (1)...(19): siRNA sense strand
ggagccaccaacauuugaa

SEQ ID NO: 1290137 - RNA, 19 nt, Homo sapiens
  misc_RNA (1)...(19): siRNA sense strand
gcgcuuuccuggguugcuu

SEQ ID NO: 1290138 - RNA, 19 nt, Homo sapiens
  misc_RNA (1)...(19): siRNA sense strand
uacuacaaagcaacaguua

SEQ ID NO: 1290139 - RNA, 19 nt, Homo sapiens
  misc_RNA (1)...(19): siRNA sense strand
cuugaugcaguaacuuaua

SEQ ID NO: 1290140 - RNA, 19 nt, Homo sapiens
  misc_RNA (1)...(19): siRNA sense strand
aaacauguccauauauacg

SEQ ID NO: 1290141 - RNA, 19 nt, Homo sapiens
  misc_RNA (1)...(19): siRNA sense strand
guguaaaguggucaaaugu

SEQ ID NO: 1290142 - RNA, 19 nt, Homo sapiens
  misc_RNA (1)...(19): siRNA sense strand
cuuacgaguuugguuauca

SEQ ID NO: 1290143 - RNA, 19 nt, Homo sapiens
  misc_RNA (1)...(19): siRNA sense strand
uacgggauccuuuaaaugg

SEQ ID NO: 1290144 - RNA, 19 nt, Homo sapiens
  misc_RNA (1)...(19): siRNA sense strand
aaccaaaacccuacuauga

SEQ ID NO: 1290145 - RNA, 19 nt, Homo sapiens
  misc_RNA (1)...(19): siRNA sense strand
cccaauaugugaaaagguu

SEQ ID NO: 1290146 - RNA, 19 nt, Homo sapiens
  misc_RNA (1)...(19): siRNA sense strand
cgauggcagcgacacaauu

SEQ ID NO: 1290147 - RNA, 19 nt, Homo sapiens
  misc_RNA (1)...(19): siRNA sense strand
gauccauuuucacuuauug

SEQ ID NO: 1290148 - RNA, 19 nt, Homo sapiens
  misc_RNA (1)...(19): siRNA sense strand
uugaugcaguaacuuauag

SEQ ID NO: 1290149 - RNA, 19 nt, Homo sapiens
  misc_RNA (1)...(19): siRNA sense strand
guaucuugaugcaguaacu

SEQ ID NO: 1290150 - RNA, 19 nt, Homo sapiens
  misc_RNA (1)...(19): siRNA sense strand
caacauuugaagcuaugga

SEQ ID NO: 1290151 - RNA, 19 nt, Homo sapiens
  misc_RNA (1)...(19): siRNA sense strand
gagauuggugaacgaguag

SEQ ID NO: 1290152 - RNA, 19 nt, Homo sapiens
  misc_RNA (1)...(19): siRNA sense strand
ggagagagcacgauuuauu

SEQ ID NO: 1290153 - RNA, 19 nt, Homo sapiens
  misc_RNA (1)...(19): siRNA sense strand
agagaaacauguccauaua

SEQ ID NO: 1290154 - RNA, 19 nt, Homo sapiens
  misc_RNA (1)...(19): siRNA sense strand
cagaugcacuuuauuugua

SEQ ID NO: 1290155 - RNA, 19 nt, Homo sapiens
  misc_RNA (1)...(19): siRNA sense strand
ggacuuacgaguuugguua

SEQ ID NO: 1290156 - RNA, 19 nt, Homo sapiens
  misc_RNA (1)...(19): siRNA sense strand
aaacagauaucaggauuug

SEQ ID NO: 1290157 - RNA, 19 nt, Homo sapiens
  misc_RNA (1)...(19): siRNA sense strand
cuauggagcucauugguaa

SEQ ID NO: 1290158 - RNA, 19 nt, Homo sapiens
  misc_RNA (1)...(19): siRNA sense strand
aaacacaccuuuagugaag

SEQ ID NO: 1290159 - RNA, 19 nt, Homo sapiens
  misc_RNA (1)...(19): siRNA sense strand
gaacuuaaaggaucaguag

SEQ ID NO: 1290160 - RNA, 19 nt, Homo sapiens
  misc_RNA (1)...(19): siRNA sense strand
gaaaacagauaucaggauu

SEQ ID NO: 1290161 - RNA, 19 nt, Homo sapiens
  misc_RNA (1)...(19): siRNA sense strand
uaaaggaucaguagcaauu

SEQ ID NO: 1290162 - RNA, 19 nt, Homo sapiens
  misc_RNA (1)...(19): siRNA sense strand
aaaugggacuuacgaguuu

SEQ ID NO: 1290163 - RNA, 19 nt, Homo sapiens
  misc_RNA (1)...(19): siRNA sense strand
guuaucagaugcacuuuau

SEQ ID NO: 1290164 - RNA, 19 nt, Homo sapiens
  misc_RNA (1)...(19): siRNA sense strand
gagcugaauaugccacuua

SEQ ID NO: 1290165 - RNA, 19 nt, Homo sapiens
  misc_RNA (1)...(19): siRNA sense strand
ugagauuggugaacgagua

SEQ ID NO: 1290166 - RNA, 19 nt, Homo sapiens
  misc_RNA (1)...(19): siRNA sense strand
gugaacgaguagauuauaa

SEQ ID NO: 1290167 - RNA, 19 nt, Homo sapiens
  misc_RNA (1)...(19): siRNA sense strand
gagagagcacgauuuauug

SEQ ID NO: 1290168 - RNA, 19 nt, Homo sapiens
  misc_RNA (1)...(19): siRNA sense strand
caaaugggacuuacgaguu

SEQ ID NO: 1290169 - RNA, 19 nt, Homo sapiens
  misc_RNA (1)...(19): siRNA sense strand
ggucauugcugugauuguu

SEQ ID NO: 1290170 - RNA, 19 nt, Homo sapiens
  misc_RNA (1)...(19): siRNA sense strand
ccagauccauuuucacuua

SEQ ID NO: 1290171 - RNA, 19 nt, Homo sapiens
  misc_RNA (1)...(19): siRNA sense strand
gaaggaauacuugacaguu

SEQ ID NO: 1290172 - RNA, 19 nt, Homo sapiens
  misc_RNA (1)...(19): siRNA sense strand
aaggaauacuugacaguuu

SEQ ID NO: 1290173 - RNA, 19 nt, Homo sapiens
  misc_RNA (1)...(19): siRNA sense strand
ucagaugacgccuguuaua

SEQ ID NO: 1290174 - RNA, 19 nt, Homo sapiens
  misc_RNA (1)...(19): siRNA sense strand
gaaaacacaccuuuaguga

SEQ ID NO: 1290175 - RNA, 19 nt, Homo sapiens
  misc_RNA (1)...(19): siRNA sense strand
gaugacgccuguuauagag

SEQ ID NO: 1290176 - RNA, 19 nt, Homo sapiens
  misc_RNA (1)...(19): siRNA sense strand
gagaaacauguccauauau

SEQ ID NO: 1290177 - RNA, 19 nt, Homo sapiens
  misc_RNA (1)...(19): siRNA sense strand
ccacuuaccagacuaaauc

SEQ ID NO: 1290178 - RNA, 19 nt, Homo sapiens
  misc_RNA (1)...(19): siRNA sense strand
acgaguagauuauaagugu

SEQ ID NO: 1290179 - RNA, 19 nt, Homo sapiens
  misc_RNA (1)...(19): siRNA sense strand
cuacaaagcaacaguuaug

SEQ ID NO: 1290180 - RNA, 19 nt, Homo sapiens
  misc_RNA (1)...(19): siRNA sense strand
ccaccaacauuugaagcua

SEQ ID NO: 1290181 - RNA, 19 nt, Homo sapiens
  misc_RNA (1)...(19): siRNA sense strand
uauacgggauccuuuaaau

SEQ ID NO: 1290182 - RNA, 19 nt, Homo sapiens
  misc_RNA (1)...(19): siRNA sense strand
cgaguuugguuaucagaug

SEQ ID NO: 1290183 - RNA, 19 nt, Homo sapiens
  misc_RNA (1)...(19): siRNA sense strand
gaacgaguagauuauaagu

SEQ ID NO: 1290184 - RNA, 19 nt, Homo sapiens
  misc_RNA (1)...(19): siRNA sense strand
gugaggagccaccaacauu

SEQ ID NO: 1290185 - RNA, 19 nt, Homo sapiens
  misc_RNA (1)...(19): siRNA sense strand
gauggcagcgacacaauug

SEQ ID NO: 1290186 - RNA, 19 nt, Homo sapiens
  misc_RNA (1)...(19): siRNA sense strand
ucucagaugacgccuguua

SEQ ID NO: 1290187 - RNA, 19 nt, Homo sapiens
  misc_RNA (1)...(19): siRNA sense strand
gaggagccaccaacauuug

SEQ ID NO: 1290188 - RNA, 19 nt, Homo sapiens
  misc_RNA (1)...(19): siRNA sense strand
gcuauggagcucauuggua

SEQ ID NO: 1290189 - RNA, 19 nt, Homo sapiens
  misc_RNA (1)...(19): siRNA sense strand
acacaccuuuagugaagua

SEQ ID NO: 1290190 - RNA, 19 nt, Homo sapiens
  misc_RNA (1)...(19): siRNA sense strand
uagagaaacauguccauau

SEQ ID NO: 1290191 - RNA, 19 nt, Homo sapiens
  misc_RNA (1)...(19): siRNA sense strand
ggugaacgaguagauuaua

SEQ ID NO: 1290192 - RNA, 19 nt, Homo sapiens
  misc_RNA (1)...(19): siRNA sense strand
gaaguagaaguauuugagu

SEQ ID NO: 1290193 - RNA, 19 nt, Homo sapiens
  misc_RNA (1)...(19): siRNA sense strand
gaaacauguccauauauac

SEQ ID NO: 1290194 - RNA, 19 nt, Homo sapiens
  misc_RNA (1)...(19): siRNA sense strand
ugacgccuguuauagagaa

SEQ ID NO: 1290195 - RNA, 19 nt, Homo sapiens
  misc_RNA (1)...(19): siRNA sense strand
cgaguagauuauaagugua

SEQ ID NO: 1290196 - RNA, 19 nt, Homo sapiens
  misc_RNA (1)...(19): siRNA sense strand
gcacuuuauuuguaaugag

SEQ ID NO: 1290197 - RNA, 19 nt, Homo sapiens
  misc_RNA (1)...(19): siRNA sense strand
guagaaguauuugaguauc

SEQ ID NO: 1290198 - RNA, 19 nt, Homo sapiens
  misc_RNA (1)...(19): siRNA sense strand
guauuugaguaucuugaug

SEQ ID NO: 1290199 - RNA, 19 nt, Homo sapiens
  misc_RNA (1)...(19): siRNA sense strand
aggaauacuugacaguuug

SEQ ID NO: 1290200 - RNA, 19 nt, Homo sapiens
  misc_RNA (1)...(19): siRNA sense strand
ccaaaacccuacuaugaga

SEQ ID NO: 1290201 - RNA, 19 nt, Homo sapiens
  misc_RNA (1)...(19): siRNA sense strand
aguguaaaguggucaaaug

SEQ ID NO: 1290202 - RNA, 19 nt, Homo sapiens
  misc_RNA (1)...(19): siRNA sense strand
ccacccauacuauuuguga

SEQ ID NO: 1290203 - RNA, 19 nt, Homo sapiens
  misc_RNA (1)...(19): siRNA sense strand
uuggagagagcacgauuua

SEQ ID NO: 1290204 - RNA, 19 nt, Homo sapiens
  misc_RNA (1)...(19): siRNA sense strand
gguuaucagaugcacuuua

SEQ ID NO: 1290205 - RNA, 19 nt, Homo sapiens
  misc_RNA (1)...(19): siRNA sense strand
caccaacauuugaagcuau

SEQ ID NO: 1290206 - RNA, 19 nt, Homo sapiens
  misc_RNA (1)...(19): siRNA sense strand
ugaggagccaccaacauuu

SEQ ID NO: 1290207 - RNA, 19 nt, Homo sapiens
  misc_RNA (1)...(19): siRNA sense strand
ggaaggaauacuugacagu

SEQ ID NO: 1290208 - RNA, 19 nt, Homo sapiens
  misc_RNA (1)...(19): siRNA sense strand
gaggaaggaauacuugaca

SEQ ID NO: 1290209 - RNA, 19 nt, Homo sapiens
  misc_RNA (1)...(19): siRNA sense strand
ugaguaucuugaugcagua

SEQ ID NO: 1290210 - RNA, 19 nt, Homo sapiens
  misc_RNA (1)...(19): siRNA sense strand
caccuuuagugaaguagaa

SEQ ID NO: 1290211 - RNA, 19 nt, Homo sapiens
  misc_RNA (1)...(19): siRNA sense strand
acagauaucaggauuugga

SEQ ID NO: 1290212 - RNA, 19 nt, Homo sapiens
  misc_RNA (1)...(19): siRNA sense strand
ucauugcugugauuguuau

SEQ ID NO: 1290213 - RNA, 19 nt, Homo sapiens
  misc_RNA (1)...(19): siRNA sense strand
ucagaugcacuuuauuugu

SEQ ID NO: 1290214 - RNA, 19 nt, Homo sapiens
  misc_RNA (1)...(19): siRNA sense strand
gugcugcuccagaguguaa

SEQ ID NO: 1290215 - RNA, 19 nt, Homo sapiens
  misc_RNA (1)...(19): siRNA sense strand
ggaaaacacaccuuuagug

SEQ ID NO: 1290216 - RNA, 19 nt, Homo sapiens
  misc_RNA (1)...(19): siRNA sense strand
aaggaucaguagcaauuug

SEQ ID NO: 1290217 - RNA, 19 nt, Homo sapiens
  misc_RNA (1)...(19): siRNA sense strand
uauauacgggauccuuuaa

SEQ ID NO: 1290218 - RNA, 19 nt, Homo sapiens
  misc_RNA (1)...(19): siRNA sense strand
ugaaguagaaguauuugag

SEQ ID NO: 1290219 - RNA, 19 nt, Homo sapiens
  misc_RNA (1)...(19): siRNA sense strand
cuugacaguuuggauguuu

SEQ ID NO: 1290220 - RNA, 19 nt, Homo sapiens
  misc_RNA (1)...(19): siRNA sense strand
cauauauacgggauccuuu

SEQ ID NO: 1290221 - RNA, 19 nt, Homo sapiens
  misc_RNA (1)...(19): siRNA sense strand
auauauacgggauccuuua

SEQ ID NO: 1290222 - RNA, 19 nt, Homo sapiens
  misc_RNA (1)...(19): siRNA sense strand
cuuaaaggaucaguagcaa

SEQ ID NO: 1290223 - RNA, 19 nt, Homo sapiens
  misc_RNA (1)...(19): siRNA sense strand
uaaaccugaggaaggaaua

SEQ ID NO: 1290224 - RNA, 19 nt, Homo sapiens
  misc_RNA (1)...(19): siRNA sense strand
agaugacgccuguuauaga

SEQ ID NO: 1290225 - RNA, 19 nt, Homo sapiens
  misc_RNA (1)...(19): siRNA sense strand
ugugauuguuauugccaua

SEQ ID NO: 1290226 - RNA, 19 nt, Homo sapiens
  misc_RNA (1)...(19): siRNA sense strand
gagagcacgauuuauugug

SEQ ID NO: 1290227 - RNA, 19 nt, Homo sapiens
  misc_RNA (1)...(19): siRNA sense strand
gaaguauuugaguaucuug

SEQ ID NO: 1290228 - RNA, 19 nt, Homo sapiens
  misc_RNA (1)...(19): siRNA sense strand
ggcuaccugucucagauga

SEQ ID NO: 1290229 - RNA, 19 nt, Homo sapiens
  misc_RNA (1)...(19): siRNA sense strand
gauaucaggauuuggaaaa

SEQ ID NO: 1290230 - RNA, 19 nt, Homo sapiens
  misc_RNA (1)...(19): siRNA sense strand
ccucuugccacccauacua

SEQ ID NO: 1290231 - RNA, 19 nt, Homo sapiens
  misc_RNA (1)...(19): siRNA sense strand
ccaugguguugcugcugua

SEQ ID NO: 1290232 - RNA, 19 nt, Homo sapiens
  misc_RNA (1)...(19): siRNA sense strand
cagaugacgccuguuauag

SEQ ID NO: 1290233 - RNA, 19 nt, Homo sapiens
  misc_RNA (1)...(19): siRNA sense strand
cagaugguggagcugaaua

SEQ ID NO: 1290234 - RNA, 19 nt, Homo sapiens
  misc_RNA (1)...(19): siRNA sense strand
uuggugaacgaguagauua

SEQ ID NO: 1290235 - RNA, 19 nt, Homo sapiens
  misc_RNA (1)...(19): siRNA sense strand
gucauugcugugauuguua

SEQ ID NO: 1290236 - RNA, 19 nt, Homo sapiens
  misc_RNA (1)...(19): siRNA sense strand
ggagccaccaacauuugaa

SEQ ID NO: 1290237 - RNA, 19 nt, Homo sapiens
  misc_RNA (1)...(19): siRNA sense strand
gcgcuuuccuggguugcuu

SEQ ID NO: 1290238 - RNA, 19 nt, Homo sapiens
  misc_RNA (1)...(19): siRNA sense strand
uacuacaaagcaacaguua

SEQ ID NO: 1290239 - RNA, 19 nt, Homo sapiens
  misc_RNA (1)...(19): siRNA sense strand
cuugaugcaguaacuuaua

SEQ ID NO: 1290240 - RNA, 19 nt, Homo sapiens
  misc_RNA (1)...(19): siRNA sense strand
aaacauguccauauauacg

SEQ ID NO: 1290241 - RNA, 19 nt, Homo sapiens
  misc_RNA (1)...(19): siRNA sense strand
guguaaaguggucaaaugu

SEQ ID NO: 1290242 - RNA, 19 nt, Homo sapiens
  misc_RNA (1)...(19): siRNA sense strand
cuuacgaguuugguuauca

SEQ ID NO: 1290243 - RNA, 19 nt, Homo sapiens
  misc_RNA (1)...(19): siRNA sense strand
uacgggauccuuuaaaugg

SEQ ID NO: 1290244 - RNA, 19 nt, Homo sapiens
  misc_RNA (1)...(19): siRNA sense strand
gcagaugguggagcugaau

SEQ ID NO: 1290245 - RNA, 19 nt, Homo sapiens
  misc_RNA (1)...(19): siRNA sense strand
aaccaaaacccuacuauga

SEQ ID NO: 1290246 - RNA, 19 nt, Homo sapiens
  misc_RNA (1)...(19): siRNA sense strand
cccaauaugugaaaagguu

SEQ ID NO: 1290247 - RNA, 19 nt, Homo sapiens
  misc_RNA (1)...(19): siRNA sense strand
ggagcugaauaugccacuu

SEQ ID NO: 1290248 - RNA, 19 nt, Homo sapiens
  misc_RNA (1)...(19): siRNA sense strand
cgauggcagcgacacaauu

SEQ ID NO: 1290249 - RNA, 19 nt, Homo sapiens
  misc_RNA (1)...(19): siRNA sense strand
gauccauuuucacuuauug

SEQ ID NO: 1290250 - RNA, 19 nt, Homo sapiens
  misc_RNA (1)...(19): siRNA sense strand
uugaugcaguaacuuauag

SEQ ID NO: 1290251 - RNA, 19 nt, Homo sapiens
  misc_RNA (1)...(19): siRNA sense strand
guaucuugaugcaguaacu

SEQ ID NO: 1290252 - RNA, 19 nt, Homo sapiens
  misc_RNA (1)...(19): siRNA sense strand
ggagagagcacgauuuauu

SEQ ID NO: 1290253 - RNA, 19 nt, Homo sapiens
  misc_RNA (1)...(19): siRNA sense strand
agagaaacauguccauaua

SEQ ID NO: 1290254 - RNA, 19 nt, Homo sapiens
  misc_RNA (1)...(19): siRNA sense strand
cagaugcacuuuauuugua

SEQ ID NO: 1290255 - RNA, 19 nt, Homo sapiens
  misc_RNA (1)...(19): siRNA sense strand
ggacuuacgaguuugguua

SEQ ID NO: 1290256 - RNA, 19 nt, Homo sapiens
  misc_RNA (1)...(19): siRNA sense strand
aaacagauaucaggauuug

SEQ ID NO: 1290257 - RNA, 19 nt, Homo sapiens
  misc_RNA (1)...(19): siRNA sense strand
cuauggagcucauugguaa

SEQ ID NO: 1290258 - RNA, 19 nt, Homo sapiens
  misc_RNA (1)...(19): siRNA sense strand
aaacacaccuuuagugaag

SEQ ID NO: 1290259 - RNA, 19 nt, Homo sapiens
  misc_RNA (1)...(19): siRNA sense strand
gaacuuaaaggaucaguag

SEQ ID NO: 1290260 - RNA, 19 nt, Homo sapiens
  misc_RNA (1)...(19): siRNA sense strand
gaaaacagauaucaggauu

SEQ ID NO: 1290261 - RNA, 19 nt, Homo sapiens
  misc_RNA (1)...(19): siRNA sense strand
uaaaggaucaguagcaauu

SEQ ID NO: 1290262 - RNA, 19 nt, Homo sapiens
  misc_RNA (1)...(19): siRNA sense strand
aaaugggacuuacgaguuu

SEQ ID NO: 1290263 - RNA, 19 nt, Homo sapiens
  misc_RNA (1)...(19): siRNA sense strand
guuaucagaugcacuuuau

SEQ ID NO: 1290264 - RNA, 19 nt, Homo sapiens
  misc_RNA (1)...(19): siRNA sense strand
gagcugaauaugccacuua

SEQ ID NO: 1290265 - RNA, 19 nt, Homo sapiens
  misc_RNA (1)...(19): siRNA sense strand
gagcagagaggcugaauag

SEQ ID NO: 1290266 - RNA, 19 nt, Homo sapiens
  misc_RNA (1)...(19): siRNA sense strand
ugagauuggugaacgagua

SEQ ID NO: 1290267 - RNA, 19 nt, Homo sapiens
  misc_RNA (1)...(19): siRNA sense strand
gugaacgaguagauuauaa

SEQ ID NO: 1290268 - RNA, 19 nt, Homo sapiens
  misc_RNA (1)...(19): siRNA sense strand
gagagagcacgauuuauug

SEQ ID NO: 1290269 - RNA, 19 nt, Homo sapiens
  misc_RNA (1)...(19): siRNA sense strand
caaaugggacuuacgaguu

SEQ ID NO: 1290270 - RNA, 19 nt, Homo sapiens
  misc_RNA (1)...(19): siRNA sense strand
ggucauugcugugauuguu

SEQ ID NO: 1290271 - RNA, 19 nt, Homo sapiens
  misc_RNA (1)...(19): siRNA sense strand
ccagauccauuuucacuua

SEQ ID NO: 1290272 - RNA, 19 nt, Homo sapiens
  misc_RNA (1)...(19): siRNA sense strand
gaaggaauacuugacaguu

SEQ ID NO: 1290273 - RNA, 19 nt, Homo sapiens
  misc_RNA (1)...(19): siRNA sense strand
aaggaauacuugacaguuu

SEQ ID NO: 1290274 - RNA, 19 nt, Homo sapiens
  misc_RNA (1)...(19): siRNA sense strand
ucagaugacgccuguuaua

SEQ ID NO: 1290275 - RNA, 19 nt, Homo sapiens
  misc_RNA (1)...(19): siRNA sense strand
gaaaacacaccuuuaguga

SEQ ID NO: 1290276 - RNA, 19 nt, Homo sapiens
  misc_RNA (1)...(19): siRNA sense strand
gaugacgccuguuauagag

SEQ ID NO: 1290277 - RNA, 19 nt, Homo sapiens
  misc_RNA (1)...(19): siRNA sense strand
gagaaacauguccauauau

SEQ ID NO: 1290278 - RNA, 19 nt, Homo sapiens
  misc_RNA (1)...(19): siRNA sense strand
ccacuuaccagacuaaauc

SEQ ID NO: 1290279 - RNA, 19 nt, Homo sapiens
  misc_RNA (1)...(19): siRNA sense strand
acgaguagauuauaagugu

SEQ ID NO: 1290280 - RNA, 19 nt, Homo sapiens
  misc_RNA (1)...(19): siRNA sense strand
cuacaaagcaacaguuaug

SEQ ID NO: 1290281 - RNA, 19 nt, Homo sapiens
  misc_RNA (1)...(19): siRNA sense strand
ccaccaacauuugaagcua

SEQ ID NO: 1290282 - RNA, 19 nt, Homo sapiens
  misc_RNA (1)...(19): siRNA sense strand
uauacgggauccuuuaaau

SEQ ID NO: 1290283 - RNA, 19 nt, Homo sapiens
  misc_RNA (1)...(19): siRNA sense strand
cgaguuugguuaucagaug

SEQ ID NO: 1290284 - RNA, 19 nt, Homo sapiens
  misc_RNA (1)...(19): siRNA sense strand
gaacgaguagauuauaagu

SEQ ID NO: 1290285 - RNA, 19 nt, Homo sapiens
  misc_RNA (1)...(19): siRNA sense strand
gugaggagccaccaacauu

SEQ ID NO: 1290286 - RNA, 19 nt, Homo sapiens
  misc_RNA (1)...(19): siRNA sense strand
gauggcagcgacacaauug

SEQ ID NO: 1290287 - RNA, 19 nt, Homo sapiens
  misc_RNA (1)...(19): siRNA sense strand
ucucagaugacgccuguua

SEQ ID NO: 1290288 - RNA, 19 nt, Homo sapiens
  misc_RNA (1)...(19): siRNA sense strand
acacaccuuuagugaagua

SEQ ID NO: 1290289 - RNA, 19 nt, Homo sapiens
  misc_RNA (1)...(19): siRNA sense strand
gcuauggagcucauuggua

SEQ ID NO: 1290290 - RNA, 19 nt, Homo sapiens
  misc_RNA (1)...(19): siRNA sense strand
gaggagccaccaacauuug

SEQ ID NO: 1290291 - RNA, 19 nt, Homo sapiens
  misc_RNA (1)...(19): siRNA sense strand
uagagaaacauguccauau

SEQ ID NO: 1290292 - RNA, 19 nt, Homo sapiens
  misc_RNA (1)...(19): siRNA sense strand
guuccaaagugucuuaaag

SEQ ID NO: 1290293 - RNA, 19 nt, Homo sapiens
  misc_RNA (1)...(19): siRNA sense strand
ggugaacgaguagauuaua

SEQ ID NO: 1290294 - RNA, 19 nt, Homo sapiens
  misc_RNA (1)...(19): siRNA sense strand
gaaguagaaguauuugagu

SEQ ID NO: 1290295 - RNA, 19 nt, Homo sapiens
  misc_RNA (1)...(19): siRNA sense strand
gaaacauguccauauauac

SEQ ID NO: 1290296 - RNA, 19 nt, Homo sapiens
  misc_RNA (1)...(19): siRNA sense strand
ugacgccuguuauagagaa

SEQ ID NO: 1290297 - RNA, 19 nt, Homo sapiens
  misc_RNA (1)...(19): siRNA sense strand
cgaguagauuauaagugua

SEQ ID NO: 1290298 - RNA, 19 nt, Homo sapiens
  misc_RNA (1)...(19): siRNA sense strand
gcacuuuauuuguaaugag

SEQ ID NO: 1290299 - RNA, 19 nt, Homo sapiens
  misc_RNA (1)...(19): siRNA sense strand
guagaaguauuugaguauc

SEQ ID NO: 1290300 - RNA, 19 nt, Homo sapiens
  misc_RNA (1)...(19): siRNA sense strand
guauuugaguaucuugaug

SEQ ID NO: 1290301 - RNA, 19 nt, Homo sapiens
  misc_RNA (1)...(19): siRNA sense strand
aggaauacuugacaguuug

SEQ ID NO: 1290302 - RNA, 19 nt, Homo sapiens
  misc_RNA (1)...(19): siRNA sense strand
ccaaaacccuacuaugaga

SEQ ID NO: 1290303 - RNA, 19 nt, Homo sapiens
  misc_RNA (1)...(19): siRNA sense strand
aguguaaaguggucaaaug

SEQ ID NO: 1290304 - RNA, 19 nt, Homo sapiens
  misc_RNA (1)...(19): siRNA sense strand
ccacccauacuauuuguga

SEQ ID NO: 1290305 - RNA, 19 nt, Homo sapiens
  misc_RNA (1)...(19): siRNA sense strand
uuggagagagcacgauuua

SEQ ID NO: 1290306 - RNA, 19 nt, Homo sapiens
  misc_RNA (1)...(19): siRNA sense strand
gguuaucagaugcacuuua

SEQ ID NO: 1290307 - RNA, 19 nt, Homo sapiens
  misc_RNA (1)...(19): siRNA sense strand
caccaacauuugaagcuau

SEQ ID NO: 1290308 - RNA, 19 nt, Homo sapiens
  misc_RNA (1)...(19): siRNA sense strand
ugaggagccaccaacauuu

SEQ ID NO: 1290309 - RNA, 19 nt, Homo sapiens
  misc_RNA (1)...(19): siRNA sense strand
ggaaggaauacuugacagu

SEQ ID NO: 1290310 - RNA, 19 nt, Homo sapiens
  misc_RNA (1)...(19): siRNA sense strand
gaggaaggaauacuugaca

SEQ ID NO: 1290311 - RNA, 19 nt, Homo sapiens
  misc_RNA (1)...(19): siRNA sense strand
ccaguuccaaagugucuua

SEQ ID NO: 1290312 - RNA, 19 nt, Homo sapiens
  misc_RNA (1)...(19): siRNA sense strand
ugaguaucuugaugcagua

SEQ ID NO: 1290313 - RNA, 19 nt, Homo sapiens
  misc_RNA (1)...(19): siRNA sense strand
caccuuuagugaaguagaa

SEQ ID NO: 1290314 - RNA, 19 nt, Homo sapiens
  misc_RNA (1)...(19): siRNA sense strand
acagauaucaggauuugga

SEQ ID NO: 1290315 - RNA, 19 nt, Homo sapiens
  misc_RNA (1)...(19): siRNA sense strand
ucauugcugugauuguuau

SEQ ID NO: 1290316 - RNA, 19 nt, Homo sapiens
  misc_RNA (1)...(19): siRNA sense strand
ucagaugcacuuuauuugu

SEQ ID NO: 1290317 - RNA, 19 nt, Homo sapiens
  misc_RNA (1)...(19): siRNA sense strand
gugcugcuccagaguguaa

SEQ ID NO: 1290318 - RNA, 19 nt, Homo sapiens
  misc_RNA (1)...(19): siRNA sense strand
ggaaaacacaccuuuagug

SEQ ID NO: 1290319 - RNA, 19 nt, Homo sapiens
  misc_RNA (1)...(19): siRNA sense strand
aaggaucaguagcaauuug

SEQ ID NO: 1290320 - RNA, 19 nt, Homo sapiens
  misc_RNA (1)...(19): siRNA sense strand
uauauacgggauccuuuaa

SEQ ID NO: 1290321 - RNA, 19 nt, Homo sapiens
  misc_RNA (1)...(19): siRNA sense strand
ugaaguagaaguauuugag

SEQ ID NO: 1290322 - RNA, 19 nt, Homo sapiens
  misc_RNA (1)...(19): siRNA sense strand
cuugacaguuuggauguuu

SEQ ID NO: 1290323 - RNA, 19 nt, Homo sapiens
  misc_RNA (1)...(19): siRNA sense strand
cauauauacgggauccuuu

SEQ ID NO: 1290324 - RNA, 19 nt, Homo sapiens
  misc_RNA (1)...(19): siRNA sense strand
auauauacgggauccuuua

SEQ ID NO: 1290325 - RNA, 19 nt, Homo sapiens
  misc_RNA (1)...(19): siRNA sense strand
cuuaaaggaucaguagcaa

SEQ ID NO: 1290326 - RNA, 19 nt, Homo sapiens
  misc_RNA (1)...(19): siRNA sense strand
uaaaccugaggaaggaaua

SEQ ID NO: 1290327 - RNA, 19 nt, Homo sapiens
  misc_RNA (1)...(19): siRNA sense strand
agaugacgccuguuauaga

SEQ ID NO: 1290328 - RNA, 19 nt, Homo sapiens
  misc_RNA (1)...(19): siRNA sense strand
ugugauuguuauugccaua

SEQ ID NO: 1290329 - RNA, 19 nt, Homo sapiens
  misc_RNA (1)...(19): siRNA sense strand
gagagcacgauuuauugug

SEQ ID NO: 1290330 - RNA, 19 nt, Homo sapiens
  misc_RNA (1)...(19): siRNA sense strand
gaaguauuugaguaucuug

SEQ ID NO: 1290331 - RNA, 19 nt, Homo sapiens
  misc_RNA (1)...(19): siRNA sense strand
ggcuaccugucucagauga

SEQ ID NO: 1290332 - RNA, 19 nt, Homo sapiens
  misc_RNA (1)...(19): siRNA sense strand
ccucuugccacccauacua

SEQ ID NO: 1290333 - RNA, 19 nt, Homo sapiens
  misc_RNA (1)...(19): siRNA sense strand
gauaucaggauuuggaaaa

SEQ ID NO: 1290334 - RNA, 19 nt, Homo sapiens
  misc_RNA (1)...(19): siRNA sense strand
ccaugguguugcugcugua

SEQ ID NO: 1290335 - RNA, 19 nt, Homo sapiens
  misc_RNA (1)...(19): siRNA sense strand
cagaugacgccuguuauag

SEQ ID NO: 1290336 - RNA, 19 nt, Homo sapiens
  misc_RNA (1)...(19): siRNA sense strand
cagaugguggagcugaaua

SEQ ID NO: 1290337 - RNA, 19 nt, Homo sapiens
  misc_RNA (1)...(19): siRNA sense strand
gucauugcugugauuguua

SEQ ID NO: 1290338 - RNA, 19 nt, Homo sapiens
  misc_RNA (1)...(19): siRNA sense strand
uuggugaacgaguagauua

SEQ ID NO: 1290339 - RNA, 19 nt, Homo sapiens
  misc_RNA (1)...(19): siRNA sense strand
ggagccaccaacauuugaa

SEQ ID NO: 1290340 - RNA, 19 nt, Homo sapiens
  misc_RNA (1)...(19): siRNA sense strand
gcgcuuuccuggguugcuu

SEQ ID NO: 1290341 - RNA, 19 nt, Homo sapiens
  misc_RNA (1)...(19): siRNA sense strand
uacuacaaagcaacaguua

SEQ ID NO: 1290342 - RNA, 19 nt, Homo sapiens
  misc_RNA (1)...(19): siRNA sense strand
cuugaugcaguaacuuaua

SEQ ID NO: 1290343 - RNA, 19 nt, Homo sapiens
  misc_RNA (1)...(19): siRNA sense strand
aaacauguccauauauacg

SEQ ID NO: 1290344 - RNA, 19 nt, Homo sapiens
  misc_RNA (1)...(19): siRNA sense strand
guguaaaguggucaaaugu

SEQ ID NO: 1290345 - RNA, 19 nt, Homo sapiens
  misc_RNA (1)...(19): siRNA sense strand
cuuacgaguuugguuauca

SEQ ID NO: 1290346 - RNA, 19 nt, Homo sapiens
  misc_RNA (1)...(19): siRNA sense strand
aaccaaaacccuacuauga

SEQ ID NO: 1290347 - RNA, 19 nt, Homo sapiens
  misc_RNA (1)...(19): siRNA sense strand
gcagaugguggagcugaau

SEQ ID NO: 1290348 - RNA, 19 nt, Homo sapiens
  misc_RNA (1)...(19): siRNA sense strand
uacgggauccuuuaaaugg

SEQ ID NO: 1290349 - RNA, 19 nt, Homo sapiens
  misc_RNA (1)...(19): siRNA sense strand
cgauggcagcgacacaauu

SEQ ID NO: 1290350 - RNA, 19 nt, Homo sapiens
  misc_RNA (1)...(19): siRNA sense strand
ggagcugaauaugccacuu

SEQ ID NO: 1290351 - RNA, 19 nt, Homo sapiens
  misc_RNA (1)...(19): siRNA sense strand
caacauuugaagcuaugga

SEQ ID NO: 1290352 - RNA, 19 nt, Homo sapiens
  misc_RNA (1)...(19): siRNA sense strand
ggagagagcacgauuuauu

SEQ ID NO: 1290353 - RNA, 19 nt, Homo sapiens
  misc_RNA (1)...(19): siRNA sense strand
agagaaacauguccauaua

SEQ ID NO: 1290354 - RNA, 19 nt, Homo sapiens
  misc_RNA (1)...(19): siRNA sense strand
cagaugcacuuuauuugua

SEQ ID NO: 1290355 - RNA, 19 nt, Homo sapiens
  misc_RNA (1)...(19): siRNA sense strand
ggacuuacgaguuugguua

SEQ ID NO: 1290356 - RNA, 19 nt, Homo sapiens
  misc_RNA (1)...(19): siRNA sense strand
aaacagauaucaggauuug

SEQ ID NO: 1290357 - RNA, 19 nt, Homo sapiens
  misc_RNA (1)...(19): siRNA sense strand
cuauggagcucauugguaa

SEQ ID NO: 1290358 - RNA, 19 nt, Homo sapiens
  misc_RNA (1)...(19): siRNA sense strand
aaacacaccuuuagugaag

SEQ ID NO: 1290359 - RNA, 19 nt, Homo sapiens
  misc_RNA (1)...(19): siRNA sense strand
gaacuuaaaggaucaguag

SEQ ID NO: 1290360 - RNA, 19 nt, Homo sapiens
  misc_RNA (1)...(19): siRNA sense strand
gaaaacagauaucaggauu

SEQ ID NO: 1290361 - RNA, 19 nt, Homo sapiens
  misc_RNA (1)...(19): siRNA sense strand
uaaaggaucaguagcaauu

SEQ ID NO: 1290362 - RNA, 19 nt, Homo sapiens
  misc_RNA (1)...(19): siRNA sense strand
aaaugggacuuacgaguuu

SEQ ID NO: 1290363 - RNA, 19 nt, Homo sapiens
  misc_RNA (1)...(19): siRNA sense strand
guuaucagaugcacuuuau

SEQ ID NO: 1290364 - RNA, 19 nt, Homo sapiens
  misc_RNA (1)...(19): siRNA sense strand
ugagauuggugaacgagua

SEQ ID NO: 1290365 - RNA, 19 nt, Homo sapiens
  misc_RNA (1)...(19): siRNA sense strand
gugaacgaguagauuauaa

SEQ ID NO: 1290366 - RNA, 19 nt, Homo sapiens
  misc_RNA (1)...(19): siRNA sense strand
gagagagcacgauuuauug

SEQ ID NO: 1290367 - RNA, 19 nt, Homo sapiens
  misc_RNA (1)...(19): siRNA sense strand
caaaugggacuuacgaguu

SEQ ID NO: 1290368 - RNA, 19 nt, Homo sapiens
  misc_RNA (1)...(19): siRNA sense strand
ggucauugcugugauuguu

SEQ ID NO: 1290369 - RNA, 19 nt, Homo sapiens
  misc_RNA (1)...(19): siRNA sense strand
ccagauccauuuucacuua

SEQ ID NO: 1290370 - RNA, 19 nt, Homo sapiens
  misc_RNA (1)...(19): siRNA sense strand
gaaggaauacuugacaguu

SEQ ID NO: 1290371 - RNA, 19 nt, Homo sapiens
  misc_RNA (1)...(19): siRNA sense strand
aaggaauacuugacaguuu

SEQ ID NO: 1290372 - RNA, 19 nt, Homo sapiens
  misc_RNA (1)...(19): siRNA sense strand
ucagaugacgccuguuaua

SEQ ID NO: 1290373 - RNA, 19 nt, Homo sapiens
  misc_RNA (1)...(19): siRNA sense strand
gaaaacacaccuuuaguga

SEQ ID NO: 1290374 - RNA, 19 nt, Homo sapiens
  misc_RNA (1)...(19): siRNA sense strand
gaugacgccuguuauagag

SEQ ID NO: 1290375 - RNA, 19 nt, Homo sapiens
  misc_RNA (1)...(19): siRNA sense strand
gagaaacauguccauauau

SEQ ID NO: 1290376 - RNA, 19 nt, Homo sapiens
  misc_RNA (1)...(19): siRNA sense strand
acgaguagauuauaagugu

SEQ ID NO: 1290377 - RNA, 19 nt, Homo sapiens
  misc_RNA (1)...(19): siRNA sense strand
cuacaaagcaacaguuaug

SEQ ID NO: 1290378 - RNA, 19 nt, Homo sapiens
  misc_RNA (1)...(19): siRNA sense strand
ccaccaacauuugaagcua

SEQ ID NO: 1290379 - RNA, 19 nt, Homo sapiens
  misc_RNA (1)...(19): siRNA sense strand
uauacgggauccuuuaaau

SEQ ID NO: 1290380 - RNA, 19 nt, Homo sapiens
  misc_RNA (1)...(19): siRNA sense strand
cgaguuugguuaucagaug

SEQ ID NO: 1290381 - RNA, 19 nt, Homo sapiens
  misc_RNA (1)...(19): siRNA sense strand
gaacgaguagauuauaagu

SEQ ID NO: 1290382 - RNA, 19 nt, Homo sapiens
  misc_RNA (1)...(19): siRNA sense strand
gugaggagccaccaacauu

SEQ ID NO: 1290383 - RNA, 19 nt, Homo sapiens
  misc_RNA (1)...(19): siRNA sense strand
gauggcagcgacacaauug

SEQ ID NO: 1290384 - RNA, 19 nt, Homo sapiens
  misc_RNA (1)...(19): siRNA sense strand
gcuauggagcucauuggua

SEQ ID NO: 1290385 - RNA, 19 nt, Homo sapiens
  misc_RNA (1)...(19): siRNA sense strand
gaggagccaccaacauuug

SEQ ID NO: 1290386 - RNA, 19 nt, Homo sapiens
  misc_RNA (1)...(19): siRNA sense strand
acacaccuuuagugaagua

SEQ ID NO: 1290387 - RNA, 19 nt, Homo sapiens
  misc_RNA (1)...(19): siRNA sense strand
ucucagaugacgccuguua

SEQ ID NO: 1290388 - RNA, 19 nt, Homo sapiens
  misc_RNA (1)...(19): siRNA sense strand
uagagaaacauguccauau

SEQ ID NO: 1290389 - RNA, 19 nt, Homo sapiens
  misc_RNA (1)...(19): siRNA sense strand
ggugaacgaguagauuaua

SEQ ID NO: 1290390 - RNA, 19 nt, Homo sapiens
  misc_RNA (1)...(19): siRNA sense strand
gaaguagaaguauuugagu

SEQ ID NO: 1290391 - RNA, 19 nt, Homo sapiens
  misc_RNA (1)...(19): siRNA sense strand
gaaacauguccauauauac

SEQ ID NO: 1290392 - RNA, 19 nt, Homo sapiens
  misc_RNA (1)...(19): siRNA sense strand
ugacgccuguuauagagaa

SEQ ID NO: 1290393 - RNA, 19 nt, Homo sapiens
  misc_RNA (1)...(19): siRNA sense strand
cgaguagauuauaagugua

SEQ ID NO: 1290394 - RNA, 19 nt, Homo sapiens
  misc_RNA (1)...(19): siRNA sense strand
gcacuuuauuuguaaugag

SEQ ID NO: 1290395 - RNA, 19 nt, Homo sapiens
  misc_RNA (1)...(19): siRNA sense strand
guagaaguauuugaguauc

SEQ ID NO: 1290396 - RNA, 19 nt, Homo sapiens
  misc_RNA (1)...(19): siRNA sense strand
guauuugaguaucuugaug

SEQ ID NO: 1290397 - RNA, 19 nt, Homo sapiens
  misc_RNA (1)...(19): siRNA sense strand
aggaauacuugacaguuug

SEQ ID NO: 1290398 - RNA, 19 nt, Homo sapiens
  misc_RNA (1)...(19): siRNA sense strand
aguguaaaguggucaaaug

SEQ ID NO: 1290399 - RNA, 19 nt, Homo sapiens
  misc_RNA (1)...(19): siRNA sense strand
ccaaaacccuacuaugaga

SEQ ID NO: 1290400 - RNA, 19 nt, Homo sapiens
  misc_RNA (1)...(19): siRNA sense strand
ccacccauacuauuuguga

SEQ ID NO: 1290401 - RNA, 19 nt, Homo sapiens
  misc_RNA (1)...(19): siRNA sense strand
caccaacauuugaagcuau

SEQ ID NO: 1290402 - RNA, 19 nt, Homo sapiens
  misc_RNA (1)...(19): siRNA sense strand
uuggagagagcacgauuua

SEQ ID NO: 1290403 - RNA, 19 nt, Homo sapiens
  misc_RNA (1)...(19): siRNA sense strand
gguuaucagaugcacuuua

SEQ ID NO: 1290404 - RNA, 19 nt, Homo sapiens
  misc_RNA (1)...(19): siRNA sense strand
ugaggagccaccaacauuu

SEQ ID NO: 1290405 - RNA, 19 nt, Homo sapiens
  misc_RNA (1)...(19): siRNA sense strand
ggaaggaauacuugacagu

SEQ ID NO: 1290406 - RNA, 19 nt, Homo sapiens
  misc_RNA (1)...(19): siRNA sense strand
gaggaaggaauacuugaca

SEQ ID NO: 1290407 - RNA, 19 nt, Homo sapiens
  misc_RNA (1)...(19): siRNA sense strand
ugaguaucuugaugcagua

SEQ ID NO: 1290408 - RNA, 19 nt, Homo sapiens
  misc_RNA (1)...(19): siRNA sense strand
caccuuuagugaaguagaa

SEQ ID NO: 1290409 - RNA, 19 nt, Homo sapiens
  misc_RNA (1)...(19): siRNA sense strand
acagauaucaggauuugga

SEQ ID NO: 1290410 - RNA, 19 nt, Homo sapiens
  misc_RNA (1)...(19): siRNA sense strand
ucauugcugugauuguuau

SEQ ID NO: 1290411 - RNA, 19 nt, Homo sapiens
  misc_RNA (1)...(19): siRNA sense strand
ucagaugcacuuuauuugu

SEQ ID NO: 1290412 - RNA, 19 nt, Homo sapiens
  misc_RNA (1)...(19): siRNA sense strand
gugcugcuccagaguguaa

SEQ ID NO: 1290413 - RNA, 19 nt, Homo sapiens
  misc_RNA (1)...(19): siRNA sense strand
ggaaaacacaccuuuagug

SEQ ID NO: 1290414 - RNA, 19 nt, Homo sapiens
  misc_RNA (1)...(19): siRNA sense strand
aaggaucaguagcaauuug

SEQ ID NO: 1290415 - RNA, 19 nt, Homo sapiens
  misc_RNA (1)...(19): siRNA sense strand
uauauacgggauccuuuaa

SEQ ID NO: 1290416 - RNA, 19 nt, Homo sapiens
  misc_RNA (1)...(19): siRNA sense strand
ugaaguagaaguauuugag

SEQ ID NO: 1290417 - RNA, 19 nt, Homo sapiens
  misc_RNA (1)...(19): siRNA sense strand
cuugacaguuuggauguuu

SEQ ID NO: 1290418 - RNA, 19 nt, Homo sapiens
  misc_RNA (1)...(19): siRNA sense strand
cauauauacgggauccuuu

SEQ ID NO: 1290419 - RNA, 19 nt, Homo sapiens
  misc_RNA (1)...(19): siRNA sense strand
auauauacgggauccuuua

SEQ ID NO: 1290420 - RNA, 19 nt, Homo sapiens
  misc_RNA (1)...(19): siRNA sense strand
cuuaaaggaucaguagcaa

SEQ ID NO: 1290421 - RNA, 19 nt, Homo sapiens
  misc_RNA (1)...(19): siRNA sense strand
uaaaccugaggaaggaaua

SEQ ID NO: 1290422 - RNA, 19 nt, Homo sapiens
  misc_RNA (1)...(19): siRNA sense strand
agaugacgccuguuauaga

SEQ ID NO: 1290423 - RNA, 19 nt, Homo sapiens
  misc_RNA (1)...(19): siRNA sense strand
ugugauuguuauugccaua

SEQ ID NO: 1290424 - RNA, 19 nt, Homo sapiens
  misc_RNA (1)...(19): siRNA sense strand
gagagcacgauuuauugug

SEQ ID NO: 1290425 - RNA, 19 nt, Homo sapiens
  misc_RNA (1)...(19): siRNA sense strand
gaaguauuugaguaucuug

SEQ ID NO: 1290426 - RNA, 19 nt, Homo sapiens
  misc_RNA (1)...(19): siRNA sense strand
ccucuugccacccauacua

SEQ ID NO: 1290427 - RNA, 19 nt, Homo sapiens
  misc_RNA (1)...(19): siRNA sense strand
gauaucaggauuuggaaaa

SEQ ID NO: 1290428 - RNA, 19 nt, Homo sapiens
  misc_RNA (1)...(19): siRNA sense strand
ggcuaccugucucagauga

SEQ ID NO: 1290429 - RNA, 19 nt, Homo sapiens
  misc_RNA (1)...(19): siRNA sense strand
ccaugguguugcugcugua

SEQ ID NO: 1290430 - RNA, 19 nt, Homo sapiens
  misc_RNA (1)...(19): siRNA sense strand
cagaugacgccuguuauag

SEQ ID NO: 1290431 - RNA, 19 nt, Homo sapiens
  misc_RNA (1)...(19): siRNA sense strand
gucauugcugugauuguua

SEQ ID NO: 1290432 - RNA, 19 nt, Homo sapiens
  misc_RNA (1)...(19): siRNA sense strand
uuggugaacgaguagauua

SEQ ID NO: 1290433 - RNA, 19 nt, Homo sapiens
  misc_RNA (1)...(19): siRNA sense strand
ggagccaccaacauuugaa

SEQ ID NO: 1290434 - RNA, 19 nt, Homo sapiens
  misc_RNA (1)...(19): siRNA sense strand
gcgcuuuccuggguugcuu

SEQ ID NO: 1290435 - RNA, 19 nt, Homo sapiens
  misc_RNA (1)...(19): siRNA sense strand
uacuacaaagcaacaguua

SEQ ID NO: 1290436 - RNA, 19 nt, Homo sapiens
  misc_RNA (1)...(19): siRNA sense strand
cuugaugcaguaacuuaua

SEQ ID NO: 1290437 - RNA, 19 nt, Homo sapiens
  misc_RNA (1)...(19): siRNA sense strand
aaacauguccauauauacg

SEQ ID NO: 1290438 - RNA, 19 nt, Homo sapiens
  misc_RNA (1)...(19): siRNA sense strand
guguaaaguggucaaaugu

SEQ ID NO: 1290439 - RNA, 19 nt, Homo sapiens
  misc_RNA (1)...(19): siRNA sense strand
cuuacgaguuugguuauca

SEQ ID NO: 1290440 - RNA, 19 nt, Homo sapiens
  misc_RNA (1)...(19): siRNA sense strand
uacgggauccuuuaaaugg

SEQ ID NO: 1290441 - RNA, 19 nt, Homo sapiens
  misc_RNA (1)...(19): siRNA sense strand
aaccaaaacccuacuauga

SEQ ID NO: 1290442 - RNA, 19 nt, Homo sapiens
  misc_RNA (1)...(19): siRNA sense strand
cccaauaugugaaaagguu

SEQ ID NO: 1290443 - RNA, 19 nt, Homo sapiens
  misc_RNA (1)...(19): siRNA sense strand
cgauggcagcgacacaauu

SEQ ID NO: 1290444 - RNA, 19 nt, Homo sapiens
  misc_RNA (1)...(19): siRNA sense strand
gauccauuuucacuuauug

SEQ ID NO: 1290445 - RNA, 19 nt, Homo sapiens
  misc_RNA (1)...(19): siRNA sense strand
uugaugcaguaacuuauag

SEQ ID NO: 1290446 - RNA, 19 nt, Homo sapiens
  misc_RNA (1)...(19): siRNA sense strand
guaucuugaugcaguaacu

SEQ ID NO: 1290447 - RNA, 19 nt, Homo sapiens
  misc_RNA (1)...(19): siRNA sense strand
caacauuugaagcuaugga

SEQ ID NO: 1290448 - RNA, 19 nt, Homo sapiens
  misc_RNA (1)...(19): siRNA sense strand
gagauuggugaacgaguag

SEQ ID NO: 1290449 - RNA, 19 nt, Homo sapiens
  misc_RNA (1)...(19): siRNA sense strand
ggagagagcacgauuuauu

SEQ ID NO: 1290450 - RNA, 19 nt, Homo sapiens
  misc_RNA (1)...(19): siRNA sense strand
agagaaacauguccauaua

SEQ ID NO: 1290451 - RNA, 19 nt, Homo sapiens
  misc_RNA (1)...(19): siRNA sense strand
cagaugcacuuuauuugua

SEQ ID NO: 1290452 - RNA, 19 nt, Homo sapiens
  misc_RNA (1)...(19): siRNA sense strand
ggacuuacgaguuugguua

SEQ ID NO: 1290453 - RNA, 19 nt, Homo sapiens
  misc_RNA (1)...(19): siRNA sense strand
aaacagauaucaggauuug

SEQ ID NO: 1290454 - RNA, 19 nt, Homo sapiens
  misc_RNA (1)...(19): siRNA sense strand
cuauggagcucauugguaa

SEQ ID NO: 1290455 - RNA, 19 nt, Homo sapiens
  misc_RNA (1)...(19): siRNA sense strand
aaacacaccuuuagugaag

SEQ ID NO: 1290456 - RNA, 19 nt, Homo sapiens
  misc_RNA (1)...(19): siRNA sense strand
gaacuuaaaggaucaguag

SEQ ID NO: 1290457 - RNA, 19 nt, Homo sapiens
  misc_RNA (1)...(19): siRNA sense strand
gaaaacagauaucaggauu

SEQ ID NO: 1290458 - RNA, 19 nt, Homo sapiens
  misc_RNA (1)...(19): siRNA sense strand
uaaaggaucaguagcaauu

SEQ ID NO: 1290459 - RNA, 19 nt, Homo sapiens
  misc_RNA (1)...(19): siRNA sense strand
aaaugggacuuacgaguuu

SEQ ID NO: 1290460 - RNA, 19 nt, Homo sapiens
  misc_RNA (1)...(19): siRNA sense strand
guuaucagaugcacuuuau

SEQ ID NO: 1290461 - RNA, 19 nt, Homo sapiens
  misc_RNA (1)...(19): siRNA sense strand
ugagauuggugaacgagua

SEQ ID NO: 1290462 - RNA, 19 nt, Homo sapiens
  misc_RNA (1)...(19): siRNA sense strand
gugaacgaguagauuauaa

SEQ ID NO: 1290463 - RNA, 19 nt, Homo sapiens
  misc_RNA (1)...(19): siRNA sense strand
gagagagcacgauuuauug

SEQ ID NO: 1290464 - RNA, 19 nt, Homo sapiens
  misc_RNA (1)...(19): siRNA sense strand
caaaugggacuuacgaguu

SEQ ID NO: 1290465 - RNA, 19 nt, Homo sapiens
  misc_RNA (1)...(19): siRNA sense strand
ggucauugcugugauuguu

SEQ ID NO: 1290466 - RNA, 19 nt, Homo sapiens
  misc_RNA (1)...(19): siRNA sense strand
ccagauccauuuucacuua

SEQ ID NO: 1290467 - RNA, 19 nt, Homo sapiens
  misc_RNA (1)...(19): siRNA sense strand
gaaggaauacuugacaguu

SEQ ID NO: 1290468 - RNA, 19 nt, Homo sapiens
  misc_RNA (1)...(19): siRNA sense strand
aaggaauacuugacaguuu

SEQ ID NO: 1290469 - RNA, 19 nt, Homo sapiens
  misc_RNA (1)...(19): siRNA sense strand
ucagaugacgccuguuaua

SEQ ID NO: 1290470 - RNA, 19 nt, Homo sapiens
  misc_RNA (1)...(19): siRNA sense strand
gaaaacacaccuuuaguga

SEQ ID NO: 1290471 - RNA, 19 nt, Homo sapiens
  misc_RNA (1)...(19): siRNA sense strand
gaugacgccuguuauagag

SEQ ID NO: 1290472 - RNA, 19 nt, Homo sapiens
  misc_RNA (1)...(19): siRNA sense strand
gagaaacauguccauauau

SEQ ID NO: 1290473 - RNA, 19 nt, Homo sapiens
  misc_RNA (1)...(19): siRNA sense strand
acgaguagauuauaagugu

SEQ ID NO: 1290474 - RNA, 19 nt, Homo sapiens
  misc_RNA (1)...(19): siRNA sense strand
cuacaaagcaacaguuaug

SEQ ID NO: 1290475 - RNA, 19 nt, Homo sapiens
  misc_RNA (1)...(19): siRNA sense strand
ccaccaacauuugaagcua

SEQ ID NO: 1290476 - RNA, 19 nt, Homo sapiens
  misc_RNA (1)...(19): siRNA sense strand
uauacgggauccuuuaaau

SEQ ID NO: 1290477 - RNA, 19 nt, Homo sapiens
  misc_RNA (1)...(19): siRNA sense strand
cgaguuugguuaucagaug

SEQ ID NO: 1290478 - RNA, 19 nt, Homo sapiens
  misc_RNA (1)...(19): siRNA sense strand
gaacgaguagauuauaagu

SEQ ID NO: 1290479 - RNA, 19 nt, Homo sapiens
  misc_RNA (1)...(19): siRNA sense strand
gugaggagccaccaacauu

SEQ ID NO: 1290480 - RNA, 19 nt, Homo sapiens
  misc_RNA (1)...(19): siRNA sense strand
gauggcagcgacacaauug

SEQ ID NO: 1290481 - RNA, 19 nt, Homo sapiens
  misc_RNA (1)...(19): siRNA sense strand
gcuauggagcucauuggua

SEQ ID NO: 1290482 - RNA, 19 nt, Homo sapiens
  misc_RNA (1)...(19): siRNA sense strand
gaggagccaccaacauuug

SEQ ID NO: 1290483 - RNA, 19 nt, Homo sapiens
  misc_RNA (1)...(19): siRNA sense strand
acacaccuuuagugaagua

SEQ ID NO: 1290484 - RNA, 19 nt, Homo sapiens
  misc_RNA (1)...(19): siRNA sense strand
ucucagaugacgccuguua

SEQ ID NO: 1290485 - RNA, 19 nt, Homo sapiens
  misc_RNA (1)...(19): siRNA sense strand
uagagaaacauguccauau

SEQ ID NO: 1290486 - RNA, 19 nt, Homo sapiens
  misc_RNA (1)...(19): siRNA sense strand
guuccaaagugucuuaaag

SEQ ID NO: 1290487 - RNA, 19 nt, Homo sapiens
  misc_RNA (1)...(19): siRNA sense strand
ggugaacgaguagauuaua

SEQ ID NO: 1290488 - RNA, 19 nt, Homo sapiens
  misc_RNA (1)...(19): siRNA sense strand
gaaguagaaguauuugagu

SEQ ID NO: 1290489 - RNA, 19 nt, Homo sapiens
  misc_RNA (1)...(19): siRNA sense strand
gaaacauguccauauauac

SEQ ID NO: 1290490 - RNA, 19 nt, Homo sapiens
  misc_RNA (1)...(19): siRNA sense strand
ugacgccuguuauagagaa

SEQ ID NO: 1290491 - RNA, 19 nt, Homo sapiens
  misc_RNA (1)...(19): siRNA sense strand
cgaguagauuauaagugua

SEQ ID NO: 1290492 - RNA, 19 nt, Homo sapiens
  misc_RNA (1)...(19): siRNA sense strand
gcacuuuauuuguaaugag

SEQ ID NO: 1290493 - RNA, 19 nt, Homo sapiens
  misc_RNA (1)...(19): siRNA sense strand
guagaaguauuugaguauc

SEQ ID NO: 1290494 - RNA, 19 nt, Homo sapiens
  misc_RNA (1)...(19): siRNA sense strand
guauuugaguaucuugaug

SEQ ID NO: 1290495 - RNA, 19 nt, Homo sapiens
  misc_RNA (1)...(19): siRNA sense strand
aggaauacuugacaguuug

SEQ ID NO: 1290496 - RNA, 19 nt, Homo sapiens
  misc_RNA (1)...(19): siRNA sense strand
ccaaaacccuacuaugaga

SEQ ID NO: 1290497 - RNA, 19 nt, Homo sapiens
  misc_RNA (1)...(19): siRNA sense strand
aguguaaaguggucaaaug

SEQ ID NO: 1290498 - RNA, 19 nt, Homo sapiens
  misc_RNA (1)...(19): siRNA sense strand
ccacccauacuauuuguga

SEQ ID NO: 1290499 - RNA, 19 nt, Homo sapiens
  misc_RNA (1)...(19): siRNA sense strand
caccaacauuugaagcuau

SEQ ID NO: 1290500 - RNA, 19 nt, Homo sapiens
  misc_RNA (1)...(19): siRNA sense strand
uuggagagagcacgauuua

SEQ ID NO: 1290501 - RNA, 19 nt, Homo sapiens
  misc_RNA (1)...(19): siRNA sense strand
gguuaucagaugcacuuua

SEQ ID NO: 1290502 - RNA, 19 nt, Homo sapiens
  misc_RNA (1)...(19): siRNA sense strand
ugaggagccaccaacauuu

SEQ ID NO: 1290503 - RNA, 19 nt, Homo sapiens
  misc_RNA (1)...(19): siRNA sense strand
ggaaggaauacuugacagu

SEQ ID NO: 1290504 - RNA, 19 nt, Homo sapiens
  misc_RNA (1)...(19): siRNA sense strand
gaggaaggaauacuugaca

SEQ ID NO: 1290505 - RNA, 19 nt, Homo sapiens
  misc_RNA (1)...(19): siRNA sense strand
ccaguuccaaagugucuua

SEQ ID NO: 1290506 - RNA, 19 nt, Homo sapiens
  misc_RNA (1)...(19): siRNA sense strand
ugaguaucuugaugcagua

SEQ ID NO: 1290507 - RNA, 19 nt, Homo sapiens
  misc_RNA (1)...(19): siRNA sense strand
caccuuuagugaaguagaa

SEQ ID NO: 1290508 - RNA, 19 nt, Homo sapiens
  misc_RNA (1)...(19): siRNA sense strand
acagauaucaggauuugga

SEQ ID NO: 1290509 - RNA, 19 nt, Homo sapiens
  misc_RNA (1)...(19): siRNA sense strand
ucauugcugugauuguuau

SEQ ID NO: 1290510 - RNA, 19 nt, Homo sapiens
  misc_RNA (1)...(19): siRNA sense strand
ucagaugcacuuuauuugu

SEQ ID NO: 1290511 - RNA, 19 nt, Homo sapiens
  misc_RNA (1)...(19): siRNA sense strand
gugcugcuccagaguguaa

SEQ ID NO: 1290512 - RNA, 19 nt, Homo sapiens
  misc_RNA (1)...(19): siRNA sense strand
ggaaaacacaccuuuagug

SEQ ID NO: 1290513 - RNA, 19 nt, Homo sapiens
  misc_RNA (1)...(19): siRNA sense strand
aaggaucaguagcaauuug

SEQ ID NO: 1290514 - RNA, 19 nt, Homo sapiens
  misc_RNA (1)...(19): siRNA sense strand
uauauacgggauccuuuaa

SEQ ID NO: 1290515 - RNA, 19 nt, Homo sapiens
  misc_RNA (1)...(19): siRNA sense strand
ugaaguagaaguauuugag

SEQ ID NO: 1290516 - RNA, 19 nt, Homo sapiens
  misc_RNA (1)...(19): siRNA sense strand
cuugacaguuuggauguuu

SEQ ID NO: 1290517 - RNA, 19 nt, Homo sapiens
  misc_RNA (1)...(19): siRNA sense strand
cauauauacgggauccuuu

SEQ ID NO: 1290518 - RNA, 19 nt, Homo sapiens
  misc_RNA (1)...(19): siRNA sense strand
auauauacgggauccuuua

SEQ ID NO: 1290519 - RNA, 19 nt, Homo sapiens
  misc_RNA (1)...(19): siRNA sense strand
cuuaaaggaucaguagcaa

SEQ ID NO: 1290520 - RNA, 19 nt, Homo sapiens
  misc_RNA (1)...(19): siRNA sense strand
uaaaccugaggaaggaaua

SEQ ID NO: 1290521 - RNA, 19 nt, Homo sapiens
  misc_RNA (1)...(19): siRNA sense strand
agaugacgccuguuauaga

SEQ ID NO: 1290522 - RNA, 19 nt, Homo sapiens
  misc_RNA (1)...(19): siRNA sense strand
ugugauuguuauugccaua

SEQ ID NO: 1290523 - RNA, 19 nt, Homo sapiens
  misc_RNA (1)...(19): siRNA sense strand
gagagcacgauuuauugug

SEQ ID NO: 1290524 - RNA, 19 nt, Homo sapiens
  misc_RNA (1)...(19): siRNA sense strand
gaaguauuugaguaucuug

SEQ ID NO: 1290525 - RNA, 19 nt, Homo sapiens
  misc_RNA (1)...(19): siRNA sense strand
ggcuaccugucucagauga

SEQ ID NO: 1290526 - RNA, 19 nt, Homo sapiens
  misc_RNA (1)...(19): siRNA sense strand
gauaucaggauuuggaaaa

SEQ ID NO: 1290527 - RNA, 19 nt, Homo sapiens
  misc_RNA (1)...(19): siRNA sense strand
ccucuugccacccauacua

SEQ ID NO: 1290528 - RNA, 19 nt, Homo sapiens
  misc_RNA (1)...(19): siRNA sense strand
ccaugguguugcugcugua

SEQ ID NO: 1290529 - RNA, 19 nt, Homo sapiens
  misc_RNA (1)...(19): siRNA sense strand
cagaugacgccuguuauag

SEQ ID NO: 1290530 - RNA, 19 nt, Homo sapiens
  misc_RNA (1)...(19): siRNA sense strand
uuggugaacgaguagauua

SEQ ID NO: 1290531 - RNA, 19 nt, Homo sapiens
  misc_RNA (1)...(19): siRNA sense strand
gucauugcugugauuguua

SEQ ID NO: 1290532 - RNA, 19 nt, Homo sapiens
  misc_RNA (1)...(19): siRNA sense strand
ggagccaccaacauuugaa

SEQ ID NO: 1290533 - RNA, 19 nt, Homo sapiens
  misc_RNA (1)...(19): siRNA sense strand
gcgcuuuccuggguugcuu

SEQ ID NO: 1290534 - RNA, 19 nt, Homo sapiens
  misc_RNA (1)...(19): siRNA sense strand
uacuacaaagcaacaguua

SEQ ID NO: 1290535 - RNA, 19 nt, Homo sapiens
  misc_RNA (1)...(19): siRNA sense strand
cuugaugcaguaacuuaua

SEQ ID NO: 1290536 - RNA, 19 nt, Homo sapiens
  misc_RNA (1)...(19): siRNA sense strand
aaacauguccauauauacg

SEQ ID NO: 1290537 - RNA, 19 nt, Homo sapiens
  misc_RNA (1)...(19): siRNA sense strand
guguaaaguggucaaaugu

SEQ ID NO: 1290538 - RNA, 19 nt, Homo sapiens
  misc_RNA (1)...(19): siRNA sense strand
cuuacgaguuugguuauca

SEQ ID NO: 1290539 - RNA, 19 nt, Homo sapiens
  misc_RNA (1)...(19): siRNA sense strand
uacgggauccuuuaaaugg

SEQ ID NO: 1290540 - RNA, 19 nt, Homo sapiens
  misc_RNA (1)...(19): siRNA sense strand
aaccaaaacccuacuauga

SEQ ID NO: 1290541 - RNA, 19 nt, Homo sapiens
  misc_RNA (1)...(19): siRNA sense strand
cccaauaugugaaaagguu

SEQ ID NO: 1290542 - RNA, 19 nt, Homo sapiens
  misc_RNA (1)...(19): siRNA sense strand
cgauggcagcgacacaauu

SEQ ID NO: 1290543 - RNA, 19 nt, Homo sapiens
  misc_RNA (1)...(19): siRNA sense strand
gauccauuuucacuuauug

SEQ ID NO: 1290544 - RNA, 19 nt, Homo sapiens
  misc_RNA (1)...(19): siRNA sense strand
uugaugcaguaacuuauag

SEQ ID NO: 1290545 - RNA, 19 nt, Homo sapiens
  misc_RNA (1)...(19): siRNA sense strand
guaucuugaugcaguaacu

SEQ ID NO: 1290546 - RNA, 19 nt, Homo sapiens
  misc_RNA (1)...(19): siRNA sense strand
caacauuugaagcuaugga

SEQ ID NO: 1290547 - RNA, 19 nt, Homo sapiens
  misc_RNA (1)...(19): siRNA sense strand
gagauuggugaacgaguag

SEQ ID NO: 1290548 - RNA, 19 nt, Homo sapiens
  misc_RNA (1)...(19): siRNA sense strand
ggagagagcacgauuuauu

SEQ ID NO: 1290549 - RNA, 19 nt, Homo sapiens
  misc_RNA (1)...(19): siRNA sense strand
agagaaacauguccauaua

SEQ ID NO: 1290550 - RNA, 19 nt, Homo sapiens
  misc_RNA (1)...(19): siRNA sense strand
cagaugcacuuuauuugua

SEQ ID NO: 1290551 - RNA, 19 nt, Homo sapiens
  misc_RNA (1)...(19): siRNA sense strand
ggacuuacgaguuugguua

SEQ ID NO: 1290552 - RNA, 19 nt, Homo sapiens
  misc_RNA (1)...(19): siRNA sense strand
aaacagauaucaggauuug

SEQ ID NO: 1290553 - RNA, 19 nt, Homo sapiens
  misc_RNA (1)...(19): siRNA sense strand
cuauggagcucauugguaa

SEQ ID NO: 1290554 - RNA, 19 nt, Homo sapiens
  misc_RNA (1)...(19): siRNA sense strand
aaacacaccuuuagugaag

SEQ ID NO: 1290555 - RNA, 19 nt, Homo sapiens
  misc_RNA (1)...(19): siRNA sense strand
gaacuuaaaggaucaguag

SEQ ID NO: 1290556 - RNA, 19 nt, Homo sapiens
  misc_RNA (1)...(19): siRNA sense strand
gaaaacagauaucaggauu

SEQ ID NO: 1290557 - RNA, 19 nt, Homo sapiens
  misc_RNA (1)...(19): siRNA sense strand
uaaaggaucaguagcaauu

SEQ ID NO: 1290558 - RNA, 19 nt, Homo sapiens
  misc_RNA (1)...(19): siRNA sense strand
aaaugggacuuacgaguuu

SEQ ID NO: 1290559 - RNA, 19 nt, Homo sapiens
  misc_RNA (1)...(19): siRNA sense strand
guuaucagaugcacuuuau

SEQ ID NO: 1290560 - RNA, 19 nt, Homo sapiens
  misc_RNA (1)...(19): siRNA sense strand
gagcugaauaugccacuua

SEQ ID NO: 1290561 - RNA, 19 nt, Homo sapiens
  misc_RNA (1)...(19): siRNA sense strand
ugagauuggugaacgagua

SEQ ID NO: 1290562 - RNA, 19 nt, Homo sapiens
  misc_RNA (1)...(19): siRNA sense strand
gugaacgaguagauuauaa

SEQ ID NO: 1290563 - RNA, 19 nt, Homo sapiens
  misc_RNA (1)...(19): siRNA sense strand
gagagagcacgauuuauug

SEQ ID NO: 1290564 - RNA, 19 nt, Homo sapiens
  misc_RNA (1)...(19): siRNA sense strand
caaaugggacuuacgaguu

SEQ ID NO: 1290565 - RNA, 19 nt, Homo sapiens
  misc_RNA (1)...(19): siRNA sense strand
ggucauugcugugauuguu

SEQ ID NO: 1290566 - RNA, 19 nt, Homo sapiens
  misc_RNA (1)...(19): siRNA sense strand
ccagauccauuuucacuua

SEQ ID NO: 1290567 - RNA, 19 nt, Homo sapiens
  misc_RNA (1)...(19): siRNA sense strand
gaaggaauacuugacaguu

SEQ ID NO: 1290568 - RNA, 19 nt, Homo sapiens
  misc_RNA (1)...(19): siRNA sense strand
aaggaauacuugacaguuu

SEQ ID NO: 1290569 - RNA, 19 nt, Homo sapiens
  misc_RNA (1)...(19): siRNA sense strand
ucagaugacgccuguuaua

SEQ ID NO: 1290570 - RNA, 19 nt, Homo sapiens
  misc_RNA (1)...(19): siRNA sense strand
gaaaacacaccuuuaguga

SEQ ID NO: 1290571 - RNA, 19 nt, Homo sapiens
  misc_RNA (1)...(19): siRNA sense strand
gaugacgccuguuauagag

SEQ ID NO: 1290572 - RNA, 19 nt, Homo sapiens
  misc_RNA (1)...(19): siRNA sense strand
gagaaacauguccauauau

SEQ ID NO: 1290573 - RNA, 19 nt, Homo sapiens
  misc_RNA (1)...(19): siRNA sense strand
ccacuuaccagacuaaauc

SEQ ID NO: 1290574 - RNA, 19 nt, Homo sapiens
  misc_RNA (1)...(19): siRNA sense strand
acgaguagauuauaagugu

SEQ ID NO: 1290575 - RNA, 19 nt, Homo sapiens
  misc_RNA (1)...(19): siRNA sense strand
cuacaaagcaacaguuaug

SEQ ID NO: 1290576 - RNA, 19 nt, Homo sapiens
  misc_RNA (1)...(19): siRNA sense strand
ccaccaacauuugaagcua

SEQ ID NO: 1290577 - RNA, 19 nt, Homo sapiens
  misc_RNA (1)...(19): siRNA sense strand
uauacgggauccuuuaaau

SEQ ID NO: 1290578 - RNA, 19 nt, Homo sapiens
  misc_RNA (1)...(19): siRNA sense strand
cgaguuugguuaucagaug

SEQ ID NO: 1290579 - RNA, 19 nt, Homo sapiens
  misc_RNA (1)...(19): siRNA sense strand
gaacgaguagauuauaagu

SEQ ID NO: 1290580 - RNA, 19 nt, Homo sapiens
  misc_RNA (1)...(19): siRNA sense strand
gugaggagccaccaacauu

SEQ ID NO: 1290581 - RNA, 19 nt, Homo sapiens
  misc_RNA (1)...(19): siRNA sense strand
gauggcagcgacacaauug

SEQ ID NO: 1290582 - RNA, 19 nt, Homo sapiens
  misc_RNA (1)...(19): siRNA sense strand
ucucagaugacgccuguua

SEQ ID NO: 1290583 - RNA, 19 nt, Homo sapiens
  misc_RNA (1)...(19): siRNA sense strand
gaggagccaccaacauuug

SEQ ID NO: 1290584 - RNA, 19 nt, Homo sapiens
  misc_RNA (1)...(19): siRNA sense strand
gcuauggagcucauuggua

SEQ ID NO: 1290585 - RNA, 19 nt, Homo sapiens
  misc_RNA (1)...(19): siRNA sense strand
acacaccuuuagugaagua

SEQ ID NO: 1290586 - RNA, 19 nt, Homo sapiens
  misc_RNA (1)...(19): siRNA sense strand
uagagaaacauguccauau

SEQ ID NO: 1290587 - RNA, 19 nt, Homo sapiens
  misc_RNA (1)...(19): siRNA sense strand
guuccaaagugucuuaaag

SEQ ID NO: 1290588 - RNA, 19 nt, Homo sapiens
  misc_RNA (1)...(19): siRNA sense strand
ggugaacgaguagauuaua

SEQ ID NO: 1290589 - RNA, 19 nt, Homo sapiens
  misc_RNA (1)...(19): siRNA sense strand
gaaguagaaguauuugagu

SEQ ID NO: 1290590 - RNA, 19 nt, Homo sapiens
  misc_RNA (1)...(19): siRNA sense strand
gaaacauguccauauauac

SEQ ID NO: 1290591 - RNA, 19 nt, Homo sapiens
  misc_RNA (1)...(19): siRNA sense strand
ugacgccuguuauagagaa

SEQ ID NO: 1290592 - RNA, 19 nt, Homo sapiens
  misc_RNA (1)...(19): siRNA sense strand
cgaguagauuauaagugua

SEQ ID NO: 1290593 - RNA, 19 nt, Homo sapiens
  misc_RNA (1)...(19): siRNA sense strand
gcacuuuauuuguaaugag

SEQ ID NO: 1290594 - RNA, 19 nt, Homo sapiens
  misc_RNA (1)...(19): siRNA sense strand
guagaaguauuugaguauc

SEQ ID NO: 1290595 - RNA, 19 nt, Homo sapiens
  misc_RNA (1)...(19): siRNA sense strand
guauuugaguaucuugaug

SEQ ID NO: 1290596 - RNA, 19 nt, Homo sapiens
  misc_RNA (1)...(19): siRNA sense strand
aggaauacuugacaguuug

SEQ ID NO: 1290597 - RNA, 19 nt, Homo sapiens
  misc_RNA (1)...(19): siRNA sense strand
ccaaaacccuacuaugaga

SEQ ID NO: 1290598 - RNA, 19 nt, Homo sapiens
  misc_RNA (1)...(19): siRNA sense strand
aguguaaaguggucaaaug

SEQ ID NO: 1290599 - RNA, 19 nt, Homo sapiens
  misc_RNA (1)...(19): siRNA sense strand
ccacccauacuauuuguga

SEQ ID NO: 1290600 - RNA, 19 nt, Homo sapiens
  misc_RNA (1)...(19): siRNA sense strand
uuggagagagcacgauuua

SEQ ID NO: 1290601 - RNA, 19 nt, Homo sapiens
  misc_RNA (1)...(19): siRNA sense strand
gguuaucagaugcacuuua

SEQ ID NO: 1290602 - RNA, 19 nt, Homo sapiens
  misc_RNA (1)...(19): siRNA sense strand
caccaacauuugaagcuau

SEQ ID NO: 1290603 - RNA, 19 nt, Homo sapiens
  misc_RNA (1)...(19): siRNA sense strand
ugaggagccaccaacauuu

SEQ ID NO: 1290604 - RNA, 19 nt, Homo sapiens
  misc_RNA (1)...(19): siRNA sense strand
ggaaggaauacuugacagu

SEQ ID NO: 1290605 - RNA, 19 nt, Homo sapiens
  misc_RNA (1)...(19): siRNA sense strand
gaggaaggaauacuugaca

SEQ ID NO: 1290606 - RNA, 19 nt, Homo sapiens
  misc_RNA (1)...(19): siRNA sense strand
ccaguuccaaagugucuua

SEQ ID NO: 1290607 - RNA, 19 nt, Homo sapiens
  misc_RNA (1)...(19): siRNA sense strand
ugaguaucuugaugcagua

SEQ ID NO: 1290608 - RNA, 19 nt, Homo sapiens
  misc_RNA (1)...(19): siRNA sense strand
caccuuuagugaaguagaa

SEQ ID NO: 1290609 - RNA, 19 nt, Homo sapiens
  misc_RNA (1)...(19): siRNA sense strand
acagauaucaggauuugga

SEQ ID NO: 1290610 - RNA, 19 nt, Homo sapiens
  misc_RNA (1)...(19): siRNA sense strand
ucauugcugugauuguuau

SEQ ID NO: 1290611 - RNA, 19 nt, Homo sapiens
  misc_RNA (1)...(19): siRNA sense strand
ucagaugcacuuuauuugu

SEQ ID NO: 1290612 - RNA, 19 nt, Homo sapiens
  misc_RNA (1)...(19): siRNA sense strand
gugcugcuccagaguguaa

SEQ ID NO: 1290613 - RNA, 19 nt, Homo sapiens
  misc_RNA (1)...(19): siRNA sense strand
ggaaaacacaccuuuagug

SEQ ID NO: 1290614 - RNA, 19 nt, Homo sapiens
  misc_RNA (1)...(19): siRNA sense strand
aaggaucaguagcaauuug

SEQ ID NO: 1290615 - RNA, 19 nt, Homo sapiens
  misc_RNA (1)...(19): siRNA sense strand
uauauacgggauccuuuaa

SEQ ID NO: 1290616 - RNA, 19 nt, Homo sapiens
  misc_RNA (1)...(19): siRNA sense strand
ugaaguagaaguauuugag

SEQ ID NO: 1290617 - RNA, 19 nt, Homo sapiens
  misc_RNA (1)...(19): siRNA sense strand
cuugacaguuuggauguuu

SEQ ID NO: 1290618 - RNA, 19 nt, Homo sapiens
  misc_RNA (1)...(19): siRNA sense strand
cauauauacgggauccuuu

SEQ ID NO: 1290619 - RNA, 19 nt, Homo sapiens
  misc_RNA (1)...(19): siRNA sense strand
auauauacgggauccuuua

SEQ ID NO: 1290620 - RNA, 19 nt, Homo sapiens
  misc_RNA (1)...(19): siRNA sense strand
cuuaaaggaucaguagcaa

SEQ ID NO: 1290621 - RNA, 19 nt, Homo sapiens
  misc_RNA (1)...(19): siRNA sense strand
uaaaccugaggaaggaaua

SEQ ID NO: 1290622 - RNA, 19 nt, Homo sapiens
  misc_RNA (1)...(19): siRNA sense strand
agaugacgccuguuauaga

SEQ ID NO: 1290623 - RNA, 19 nt, Homo sapiens
  misc_RNA (1)...(19): siRNA sense strand
ugugauuguuauugccaua

SEQ ID NO: 1290624 - RNA, 19 nt, Homo sapiens
  misc_RNA (1)...(19): siRNA sense strand
gagagcacgauuuauugug

SEQ ID NO: 1290625 - RNA, 19 nt, Homo sapiens
  misc_RNA (1)...(19): siRNA sense strand
gaaguauuugaguaucuug

SEQ ID NO: 1290626 - RNA, 19 nt, Homo sapiens
  misc_RNA (1)...(19): siRNA sense strand
ggcuaccugucucagauga

SEQ ID NO: 1290627 - RNA, 19 nt, Homo sapiens
  misc_RNA (1)...(19): siRNA sense strand
gauaucaggauuuggaaaa

SEQ ID NO: 1290628 - RNA, 19 nt, Homo sapiens
  misc_RNA (1)...(19): siRNA sense strand
ccucuugccacccauacua

SEQ ID NO: 1290629 - RNA, 19 nt, Homo sapiens
  misc_RNA (1)...(19): siRNA sense strand
ccaugguguugcugcugua

SEQ ID NO: 1290630 - RNA, 19 nt, Homo sapiens
  misc_RNA (1)...(19): siRNA sense strand
cagaugacgccuguuauag

SEQ ID NO: 1290631 - RNA, 19 nt, Homo sapiens
  misc_RNA (1)...(19): siRNA sense strand
cagaugguggagcugaaua

SEQ ID NO: 1290632 - RNA, 19 nt, Homo sapiens
  misc_RNA (1)...(19): siRNA sense strand
gucauugcugugauuguua

SEQ ID NO: 1290633 - RNA, 19 nt, Homo sapiens
  misc_RNA (1)...(19): siRNA sense strand
ggagccaccaacauuugaa

SEQ ID NO: 1290634 - RNA, 19 nt, Homo sapiens
  misc_RNA (1)...(19): siRNA sense strand
uuggugaacgaguagauua

SEQ ID NO: 1290635 - RNA, 19 nt, Homo sapiens
  misc_RNA (1)...(19): siRNA sense strand
gcgcuuuccuggguugcuu

SEQ ID NO: 1290636 - RNA, 19 nt, Homo sapiens
  misc_RNA (1)...(19): siRNA sense strand
uacuacaaagcaacaguua

SEQ ID NO: 1290637 - RNA, 19 nt, Homo sapiens
  misc_RNA (1)...(19): siRNA sense strand
cuugaugcaguaacuuaua

SEQ ID NO: 1290638 - RNA, 19 nt, Homo sapiens
  misc_RNA (1)...(19): siRNA sense strand
aaacauguccauauauacg

SEQ ID NO: 1290639 - RNA, 19 nt, Homo sapiens
  misc_RNA (1)...(19): siRNA sense strand
guguaaaguggucaaaugu

SEQ ID NO: 1290640 - RNA, 19 nt, Homo sapiens
  misc_RNA (1)...(19): siRNA sense strand
cuuacgaguuugguuauca

SEQ ID NO: 1290641 - RNA, 19 nt, Homo sapiens
  misc_RNA (1)...(19): siRNA sense strand
uacgggauccuuuaaaugg

SEQ ID NO: 1290642 - RNA, 19 nt, Homo sapiens
  misc_RNA (1)...(19): siRNA sense strand
gcagaugguggagcugaau

SEQ ID NO: 1290643 - RNA, 19 nt, Homo sapiens
  misc_RNA (1)...(19): siRNA sense strand
aaccaaaacccuacuauga

SEQ ID NO: 1290644 - RNA, 19 nt, Homo sapiens
  misc_RNA (1)...(19): siRNA sense strand
uugaugcaguaacuuauag

SEQ ID NO: 1290645 - RNA, 19 nt, Homo sapiens
  misc_RNA (1)...(19): siRNA sense strand
ggagcugaauaugccacuu

SEQ ID NO: 1290646 - RNA, 19 nt, Homo sapiens
  misc_RNA (1)...(19): siRNA sense strand
cgauggcagcgacacaauu

SEQ ID NO: 1290647 - RNA, 19 nt, Homo sapiens
  misc_RNA (1)...(19): siRNA sense strand
gauccauuuucacuuauug

SEQ ID NO: 1290648 - RNA, 19 nt, Homo sapiens
  misc_RNA (1)...(19): siRNA sense strand
ggagagagcacgauuuauu

SEQ ID NO: 1290649 - RNA, 19 nt, Homo sapiens
  misc_RNA (1)...(19): siRNA sense strand
agagaaacauguccauaua

SEQ ID NO: 1290650 - RNA, 19 nt, Homo sapiens
  misc_RNA (1)...(19): siRNA sense strand
cagaugcacuuuauuugua

SEQ ID NO: 1290651 - RNA, 19 nt, Homo sapiens
  misc_RNA (1)...(19): siRNA sense strand
ggacuuacgaguuugguua

SEQ ID NO: 1290652 - RNA, 19 nt, Homo sapiens
  misc_RNA (1)...(19): siRNA sense strand
aaacagauaucaggauuug

SEQ ID NO: 1290653 - RNA, 19 nt, Homo sapiens
  misc_RNA (1)...(19): siRNA sense strand
cuauggagcucauugguaa

SEQ ID NO: 1290654 - RNA, 19 nt, Homo sapiens
  misc_RNA (1)...(19): siRNA sense strand
aaacacaccuuuagugaag

SEQ ID NO: 1290655 - RNA, 19 nt, Homo sapiens
  misc_RNA (1)...(19): siRNA sense strand
gaacuuaaaggaucaguag

SEQ ID NO: 1290656 - RNA, 19 nt, Homo sapiens
  misc_RNA (1)...(19): siRNA sense strand
gaaaacagauaucaggauu

SEQ ID NO: 1290657 - RNA, 19 nt, Homo sapiens
  misc_RNA (1)...(19): siRNA sense strand
uaaaggaucaguagcaauu

SEQ ID NO: 1290658 - RNA, 19 nt, Homo sapiens
  misc_RNA (1)...(19): siRNA sense strand
aaaugggacuuacgaguuu

SEQ ID NO: 1290659 - RNA, 19 nt, Homo sapiens
  misc_RNA (1)...(19): siRNA sense strand
guuaucagaugcacuuuau

SEQ ID NO: 1290660 - RNA, 19 nt, Homo sapiens
  misc_RNA (1)...(19): siRNA sense strand
ugagauuggugaacgagua

SEQ ID NO: 1290661 - RNA, 19 nt, Homo sapiens
  misc_RNA (1)...(19): siRNA sense strand
gugaacgaguagauuauaa

SEQ ID NO: 1290662 - RNA, 19 nt, Homo sapiens
  misc_RNA (1)...(19): siRNA sense strand
gagagagcacgauuuauug

SEQ ID NO: 1290663 - RNA, 19 nt, Homo sapiens
  misc_RNA (1)...(19): siRNA sense strand
caaaugggacuuacgaguu

SEQ ID NO: 1290664 - RNA, 19 nt, Homo sapiens
  misc_RNA (1)...(19): siRNA sense strand
ggucauugcugugauuguu

SEQ ID NO: 1290665 - RNA, 19 nt, Homo sapiens
  misc_RNA (1)...(19): siRNA sense strand
ccagauccauuuucacuua

SEQ ID NO: 1290666 - RNA, 19 nt, Homo sapiens
  misc_RNA (1)...(19): siRNA sense strand
gaaggaauacuugacaguu

SEQ ID NO: 1290667 - RNA, 19 nt, Homo sapiens
  misc_RNA (1)...(19): siRNA sense strand
aaggaauacuugacaguuu

SEQ ID NO: 1290668 - RNA, 19 nt, Homo sapiens
  misc_RNA (1)...(19): siRNA sense strand
ucagaugacgccuguuaua

SEQ ID NO: 1290669 - RNA, 19 nt, Homo sapiens
  misc_RNA (1)...(19): siRNA sense strand
gaaaacacaccuuuaguga

SEQ ID NO: 1290670 - RNA, 19 nt, Homo sapiens
  misc_RNA (1)...(19): siRNA sense strand
gaugacgccuguuauagag

SEQ ID NO: 1290671 - RNA, 19 nt, Homo sapiens
  misc_RNA (1)...(19): siRNA sense strand
gagaaacauguccauauau

SEQ ID NO: 1290672 - RNA, 19 nt, Homo sapiens
  misc_RNA (1)...(19): siRNA sense strand
acgaguagauuauaagugu

SEQ ID NO: 1290673 - RNA, 19 nt, Homo sapiens
  misc_RNA (1)...(19): siRNA sense strand
cuacaaagcaacaguuaug

SEQ ID NO: 1290674 - RNA, 19 nt, Homo sapiens
  misc_RNA (1)...(19): siRNA sense strand
ccaccaacauuugaagcua

SEQ ID NO: 1290675 - RNA, 19 nt, Homo sapiens
  misc_RNA (1)...(19): siRNA sense strand
uauacgggauccuuuaaau

SEQ ID NO: 1290676 - RNA, 19 nt, Homo sapiens
  misc_RNA (1)...(19): siRNA sense strand
cgaguuugguuaucagaug

SEQ ID NO: 1290677 - RNA, 19 nt, Homo sapiens
  misc_RNA (1)...(19): siRNA sense strand
gaacgaguagauuauaagu

SEQ ID NO: 1290678 - RNA, 19 nt, Homo sapiens
  misc_RNA (1)...(19): siRNA sense strand
gugaggagccaccaacauu

SEQ ID NO: 1290679 - RNA, 19 nt, Homo sapiens
  misc_RNA (1)...(19): siRNA sense strand
gauggcagcgacacaauug

SEQ ID NO: 1290680 - RNA, 19 nt, Homo sapiens
  misc_RNA (1)...(19): siRNA sense strand
gcuauggagcucauuggua

SEQ ID NO: 1290681 - RNA, 19 nt, Homo sapiens
  misc_RNA (1)...(19): siRNA sense strand
gaggagccaccaacauuug

SEQ ID NO: 1290682 - RNA, 19 nt, Homo sapiens
  misc_RNA (1)...(19): siRNA sense strand
acacaccuuuagugaagua

SEQ ID NO: 1290683 - RNA, 19 nt, Homo sapiens
  misc_RNA (1)...(19): siRNA sense strand
ucucagaugacgccuguua

SEQ ID NO: 1290684 - RNA, 19 nt, Homo sapiens
  misc_RNA (1)...(19): siRNA sense strand
uagagaaacauguccauau

SEQ ID NO: 1290685 - RNA, 19 nt, Homo sapiens
  misc_RNA (1)...(19): siRNA sense strand
guuccaaagugucuuaaag

SEQ ID NO: 1290686 - RNA, 19 nt, Homo sapiens
  misc_RNA (1)...(19): siRNA sense strand
ggugaacgaguagauuaua

SEQ ID NO: 1290687 - RNA, 19 nt, Homo sapiens
  misc_RNA (1)...(19): siRNA sense strand
gaaguagaaguauuugagu

SEQ ID NO: 1290688 - RNA, 19 nt, Homo sapiens
  misc_RNA (1)...(19): siRNA sense strand
gaaacauguccauauauac

SEQ ID NO: 1290689 - RNA, 19 nt, Homo sapiens
  misc_RNA (1)...(19): siRNA sense strand
ugacgccuguuauagagaa

SEQ ID NO: 1290690 - RNA, 19 nt, Homo sapiens
  misc_RNA (1)...(19): siRNA sense strand
cgaguagauuauaagugua

SEQ ID NO: 1290691 - RNA, 19 nt, Homo sapiens
  misc_RNA (1)...(19): siRNA sense strand
gcacuuuauuuguaaugag

SEQ ID NO: 1290692 - RNA, 19 nt, Homo sapiens
  misc_RNA (1)...(19): siRNA sense strand
guagaaguauuugaguauc

SEQ ID NO: 1290693 - RNA, 19 nt, Homo sapiens
  misc_RNA (1)...(19): siRNA sense strand
guauuugaguaucuugaug

SEQ ID NO: 1290694 - RNA, 19 nt, Homo sapiens
  misc_RNA (1)...(19): siRNA sense strand
aggaauacuugacaguuug

SEQ ID NO: 1290695 - RNA, 19 nt, Homo sapiens
  misc_RNA (1)...(19): siRNA sense strand
ccaaaacccuacuaugaga

SEQ ID NO: 1290696 - RNA, 19 nt, Homo sapiens
  misc_RNA (1)...(19): siRNA sense strand
aguguaaaguggucaaaug

SEQ ID NO: 1290697 - RNA, 19 nt, Homo sapiens
  misc_RNA (1)...(19): siRNA sense strand
ccacccauacuauuuguga

SEQ ID NO: 1290698 - RNA, 19 nt, Homo sapiens
  misc_RNA (1)...(19): siRNA sense strand
caccaacauuugaagcuau

SEQ ID NO: 1290699 - RNA, 19 nt, Homo sapiens
  misc_RNA (1)...(19): siRNA sense strand
uuggagagagcacgauuua

SEQ ID NO: 1290700 - RNA, 19 nt, Homo sapiens
  misc_RNA (1)...(19): siRNA sense strand
gguuaucagaugcacuuua

SEQ ID NO: 1290701 - RNA, 19 nt, Homo sapiens
  misc_RNA (1)...(19): siRNA sense strand
ugaggagccaccaacauuu

SEQ ID NO: 1290702 - RNA, 19 nt, Homo sapiens
  misc_RNA (1)...(19): siRNA sense strand
ggaaggaauacuugacagu

SEQ ID NO: 1290703 - RNA, 19 nt, Homo sapiens
  misc_RNA (1)...(19): siRNA sense strand
gaggaaggaauacuugaca

SEQ ID NO: 1290704 - RNA, 19 nt, Homo sapiens
  misc_RNA (1)...(19): siRNA sense strand
ccaguuccaaagugucuua

SEQ ID NO: 1290705 - RNA, 19 nt, Homo sapiens
  misc_RNA (1)...(19): siRNA sense strand
ugaguaucuugaugcagua

SEQ ID NO: 1290706 - RNA, 19 nt, Homo sapiens
  misc_RNA (1)...(19): siRNA sense strand
caccuuuagugaaguagaa

SEQ ID NO: 1290707 - RNA, 19 nt, Homo sapiens
  misc_RNA (1)...(19): siRNA sense strand
acagauaucaggauuugga

SEQ ID NO: 1290708 - RNA, 19 nt, Homo sapiens
  misc_RNA (1)...(19): siRNA sense strand
ucauugcugugauuguuau

SEQ ID NO: 1290709 - RNA, 19 nt, Homo sapiens
  misc_RNA (1)...(19): siRNA sense strand
ucagaugcacuuuauuugu

SEQ ID NO: 1290710 - RNA, 19 nt, Homo sapiens
  misc_RNA (1)...(19): siRNA sense strand
gugcugcuccagaguguaa

SEQ ID NO: 1290711 - RNA, 19 nt, Homo sapiens
  misc_RNA (1)...(19): siRNA sense strand
ggaaaacacaccuuuagug

SEQ ID NO: 1290712 - RNA, 19 nt, Homo sapiens
  misc_RNA (1)...(19): siRNA sense strand
aaggaucaguagcaauuug

SEQ ID NO: 1290713 - RNA, 19 nt, Homo sapiens
  misc_RNA (1)...(19): siRNA sense strand
uauauacgggauccuuuaa

SEQ ID NO: 1290714 - RNA, 19 nt, Homo sapiens
  misc_RNA (1)...(19): siRNA sense strand
ugaaguagaaguauuugag

SEQ ID NO: 1290715 - RNA, 19 nt, Homo sapiens
  misc_RNA (1)...(19): siRNA sense strand
cuugacaguuuggauguuu

SEQ ID NO: 1290716 - RNA, 19 nt, Homo sapiens
  misc_RNA (1)...(19): siRNA sense strand
cauauauacgggauccuuu

SEQ ID NO: 1290717 - RNA, 19 nt, Homo sapiens
  misc_RNA (1)...(19): siRNA sense strand
auauauacgggauccuuua

SEQ ID NO: 1290718 - RNA, 19 nt, Homo sapiens
  misc_RNA (1)...(19): siRNA sense strand
cuuaaaggaucaguagcaa

SEQ ID NO: 1290719 - RNA, 19 nt, Homo sapiens
  misc_RNA (1)...(19): siRNA sense strand
uaaaccugaggaaggaaua

SEQ ID NO: 1290720 - RNA, 19 nt, Homo sapiens
  misc_RNA (1)...(19): siRNA sense strand
agaugacgccuguuauaga

SEQ ID NO: 1290721 - RNA, 19 nt, Homo sapiens
  misc_RNA (1)...(19): siRNA sense strand
ugugauuguuauugccaua

SEQ ID NO: 1290722 - RNA, 19 nt, Homo sapiens
  misc_RNA (1)...(19): siRNA sense strand
gagagcacgauuuauugug

SEQ ID NO: 1290723 - RNA, 19 nt, Homo sapiens
  misc_RNA (1)...(19): siRNA sense strand
gaaguauuugaguaucuug

SEQ ID NO: 1290724 - RNA, 19 nt, Homo sapiens
  misc_RNA (1)...(19): siRNA sense strand
ggcuaccugucucagauga

SEQ ID NO: 1290725 - RNA, 19 nt, Homo sapiens
  misc_RNA (1)...(19): siRNA sense strand
gauaucaggauuuggaaaa

SEQ ID NO: 1290726 - RNA, 19 nt, Homo sapiens
  misc_RNA (1)...(19): siRNA sense strand
ccucuugccacccauacua

SEQ ID NO: 1290727 - RNA, 19 nt, Homo sapiens
  misc_RNA (1)...(19): siRNA sense strand
ccaugguguugcugcugua

SEQ ID NO: 1290728 - RNA, 19 nt, Homo sapiens
  misc_RNA (1)...(19): siRNA sense strand
cagaugacgccuguuauag

SEQ ID NO: 1290729 - RNA, 19 nt, Homo sapiens
  misc_RNA (1)...(19): siRNA sense strand
uuggugaacgaguagauua

SEQ ID NO: 1290730 - RNA, 19 nt, Homo sapiens
  misc_RNA (1)...(19): siRNA sense strand
gucauugcugugauuguua

SEQ ID NO: 1290731 - RNA, 19 nt, Homo sapiens
  misc_RNA (1)...(19): siRNA sense strand
ggagccaccaacauuugaa

SEQ ID NO: 1290732 - RNA, 19 nt, Homo sapiens
  misc_RNA (1)...(19): siRNA sense strand
gcgcuuuccuggguugcuu

SEQ ID NO: 1290733 - RNA, 19 nt, Homo sapiens
  misc_RNA (1)...(19): siRNA sense strand
uacuacaaagcaacaguua

SEQ ID NO: 1290734 - RNA, 19 nt, Homo sapiens
  misc_RNA (1)...(19): siRNA sense strand
cuugaugcaguaacuuaua

SEQ ID NO: 1290735 - RNA, 19 nt, Homo sapiens
  misc_RNA (1)...(19): siRNA sense strand
aaacauguccauauauacg

SEQ ID NO: 1290736 - RNA, 19 nt, Homo sapiens
  misc_RNA (1)...(19): siRNA sense strand
guguaaaguggucaaaugu

SEQ ID NO: 1290737 - RNA, 19 nt, Homo sapiens
  misc_RNA (1)...(19): siRNA sense strand
cuuacgaguuugguuauca

SEQ ID NO: 1290738 - RNA, 19 nt, Homo sapiens
  misc_RNA (1)...(19): siRNA sense strand
uacgggauccuuuaaaugg

SEQ ID NO: 1290739 - RNA, 19 nt, Homo sapiens
  misc_RNA (1)...(19): siRNA sense strand
aaccaaaacccuacuauga

SEQ ID NO: 1290740 - RNA, 19 nt, Homo sapiens
  misc_RNA (1)...(19): siRNA sense strand
cccaauaugugaaaagguu

SEQ ID NO: 1290741 - RNA, 19 nt, Homo sapiens
  misc_RNA (1)...(19): siRNA sense strand
cgauggcagcgacacaauu

SEQ ID NO: 1290742 - RNA, 19 nt, Homo sapiens
  misc_RNA (1)...(19): siRNA sense strand
gauccauuuucacuuauug

SEQ ID NO: 1290743 - RNA, 19 nt, Homo sapiens
  misc_RNA (1)...(19): siRNA sense strand
uugaugcaguaacuuauag

SEQ ID NO: 1290744 - RNA, 19 nt, Homo sapiens
  misc_RNA (1)...(19): siRNA sense strand
guaucuugaugcaguaacu

SEQ ID NO: 1290745 - RNA, 19 nt, Homo sapiens
  misc_RNA (1)...(19): siRNA sense strand
caacauuugaagcuaugga

SEQ ID NO: 1290746 - RNA, 19 nt, Homo sapiens
  misc_RNA (1)...(19): siRNA sense strand
gagauuggugaacgaguag

SEQ ID NO: 1290747 - RNA, 19 nt, Homo sapiens
  misc_RNA (1)...(19): siRNA sense strand
ggagagagcacgauuuauu

SEQ ID NO: 1290748 - RNA, 19 nt, Homo sapiens
  misc_RNA (1)...(19): siRNA sense strand
agagaaacauguccauaua

SEQ ID NO: 1290749 - RNA, 19 nt, Homo sapiens
  misc_RNA (1)...(19): siRNA sense strand
cagaugcacuuuauuugua

SEQ ID NO: 1290750 - RNA, 19 nt, Homo sapiens
  misc_RNA (1)...(19): siRNA sense strand
ggacuuacgaguuugguua

SEQ ID NO: 1290751 - RNA, 19 nt, Homo sapiens
  misc_RNA (1)...(19): siRNA sense strand
aaacagauaucaggauuug

SEQ ID NO: 1290752 - RNA, 19 nt, Homo sapiens
  misc_RNA (1)...(19): siRNA sense strand
cuauggagcucauugguaa

SEQ ID NO: 1290753 - RNA, 19 nt, Homo sapiens
  misc_RNA (1)...(19): siRNA sense strand
aaacacaccuuuagugaag

SEQ ID NO: 1290754 - RNA, 19 nt, Homo sapiens
  misc_RNA (1)...(19): siRNA sense strand
gaacuuaaaggaucaguag

SEQ ID NO: 1290755 - RNA, 19 nt, Homo sapiens
  misc_RNA (1)...(19): siRNA sense strand
gaaaacagauaucaggauu

SEQ ID NO: 1290756 - RNA, 19 nt, Homo sapiens
  misc_RNA (1)...(19): siRNA sense strand
uaaaggaucaguagcaauu

SEQ ID NO: 1290757 - RNA, 19 nt, Homo sapiens
  misc_RNA (1)...(19): siRNA sense strand
aaaugggacuuacgaguuu

SEQ ID NO: 1290758 - RNA, 19 nt, Homo sapiens
  misc_RNA (1)...(19): siRNA sense strand
guuaucagaugcacuuuau

SEQ ID NO: 1290759 - RNA, 19 nt, Homo sapiens
  misc_RNA (1)...(19): siRNA sense strand
ugagauuggugaacgagua

SEQ ID NO: 1290760 - RNA, 19 nt, Homo sapiens
  misc_RNA (1)...(19): siRNA sense strand
gugaacgaguagauuauaa

SEQ ID NO: 1290761 - RNA, 19 nt, Homo sapiens
  misc_RNA (1)...(19): siRNA sense strand
gagagagcacgauuuauug

SEQ ID NO: 1290762 - RNA, 19 nt, Homo sapiens
  misc_RNA (1)...(19): siRNA sense strand
caaaugggacuuacgaguu

SEQ ID NO: 1290763 - RNA, 19 nt, Homo sapiens
  misc_RNA (1)...(19): siRNA sense strand
ggucauugcugugauuguu

SEQ ID NO: 1290764 - RNA, 19 nt, Homo sapiens
  misc_RNA (1)...(19): siRNA sense strand
ccagauccauuuucacuua

SEQ ID NO: 1290765 - RNA, 19 nt, Homo sapiens
  misc_RNA (1)...(19): siRNA sense strand
gaaggaauacuugacaguu

SEQ ID NO: 1290766 - RNA, 19 nt, Homo sapiens
  misc_RNA (1)...(19): siRNA sense strand
aaggaauacuugacaguuu

SEQ ID NO: 1290767 - RNA, 19 nt, Homo sapiens
  misc_RNA (1)...(19): siRNA sense strand
ucagaugacgccuguuaua

SEQ ID NO: 1290768 - RNA, 19 nt, Homo sapiens
  misc_RNA (1)...(19): siRNA sense strand
gaaaacacaccuuuaguga

SEQ ID NO: 1290769 - RNA, 19 nt, Homo sapiens
  misc_RNA (1)...(19): siRNA sense strand
gaugacgccuguuauagag

SEQ ID NO: 1290770 - RNA, 19 nt, Homo sapiens
  misc_RNA (1)...(19): siRNA sense strand
gagaaacauguccauauau

SEQ ID NO: 1290771 - RNA, 19 nt, Homo sapiens
  misc_RNA (1)...(19): siRNA sense strand
acgaguagauuauaagugu

SEQ ID NO: 1290772 - RNA, 19 nt, Homo sapiens
  misc_RNA (1)...(19): siRNA sense strand
cuacaaagcaacaguuaug

SEQ ID NO: 1290773 - RNA, 19 nt, Homo sapiens
  misc_RNA (1)...(19): siRNA sense strand
ccaccaacauuugaagcua

SEQ ID NO: 1290774 - RNA, 19 nt, Homo sapiens
  misc_RNA (1)...(19): siRNA sense strand
uauacgggauccuuuaaau

SEQ ID NO: 1290775 - RNA, 19 nt, Homo sapiens
  misc_RNA (1)...(19): siRNA sense strand
cgaguuugguuaucagaug

SEQ ID NO: 1290776 - RNA, 19 nt, Homo sapiens
  misc_RNA (1)...(19): siRNA sense strand
gaacgaguagauuauaagu

SEQ ID NO: 1290777 - RNA, 19 nt, Homo sapiens
  misc_RNA (1)...(19): siRNA sense strand
gugaggagccaccaacauu

SEQ ID NO: 1290778 - RNA, 19 nt, Homo sapiens
  misc_RNA (1)...(19): siRNA sense strand
gauggcagcgacacaauug

SEQ ID NO: 1290779 - RNA, 19 nt, Homo sapiens
  misc_RNA (1)...(19): siRNA sense strand
gcuauggagcucauuggua

SEQ ID NO: 1290780 - RNA, 19 nt, Homo sapiens
  misc_RNA (1)...(19): siRNA sense strand
gaggagccaccaacauuug

SEQ ID NO: 1290781 - RNA, 19 nt, Homo sapiens
  misc_RNA (1)...(19): siRNA sense strand
acacaccuuuagugaagua

SEQ ID NO: 1290782 - RNA, 19 nt, Homo sapiens
  misc_RNA (1)...(19): siRNA sense strand
ucucagaugacgccuguua

SEQ ID NO: 1290783 - RNA, 19 nt, Homo sapiens
  misc_RNA (1)...(19): siRNA sense strand
uagagaaacauguccauau

SEQ ID NO: 1290784 - RNA, 19 nt, Homo sapiens
  misc_RNA (1)...(19): siRNA sense strand
ggugaacgaguagauuaua

SEQ ID NO: 1290785 - RNA, 19 nt, Homo sapiens
  misc_RNA (1)...(19): siRNA sense strand
gaaguagaaguauuugagu

SEQ ID NO: 1290786 - RNA, 19 nt, Homo sapiens
  misc_RNA (1)...(19): siRNA sense strand
gaaacauguccauauauac

SEQ ID NO: 1290787 - RNA, 19 nt, Homo sapiens
  misc_RNA (1)...(19): siRNA sense strand
ugacgccuguuauagagaa

SEQ ID NO: 1290788 - RNA, 19 nt, Homo sapiens
  misc_RNA (1)...(19): siRNA sense strand
cgaguagauuauaagugua

SEQ ID NO: 1290789 - RNA, 19 nt, Homo sapiens
  misc_RNA (1)...(19): siRNA sense strand
gcacuuuauuuguaaugag

SEQ ID NO: 1290790 - RNA, 19 nt, Homo sapiens
  misc_RNA (1)...(19): siRNA sense strand
guagaaguauuugaguauc

SEQ ID NO: 1290791 - RNA, 19 nt, Homo sapiens
  misc_RNA (1)...(19): siRNA sense strand
guauuugaguaucuugaug

SEQ ID NO: 1290792 - RNA, 19 nt, Homo sapiens
  misc_RNA (1)...(19): siRNA sense strand
aggaauacuugacaguuug

SEQ ID NO: 1290793 - RNA, 19 nt, Homo sapiens
  misc_RNA (1)...(19): siRNA sense strand
aguguaaaguggucaaaug

SEQ ID NO: 1290794 - RNA, 19 nt, Homo sapiens
  misc_RNA (1)...(19): siRNA sense strand
ccaaaacccuacuaugaga

SEQ ID NO: 1290795 - RNA, 19 nt, Homo sapiens
  misc_RNA (1)...(19): siRNA sense strand
ccacccauacuauuuguga

SEQ ID NO: 1290796 - RNA, 19 nt, Homo sapiens
  misc_RNA (1)...(19): siRNA sense strand
caccaacauuugaagcuau

SEQ ID NO: 1290797 - RNA, 19 nt, Homo sapiens
  misc_RNA (1)...(19): siRNA sense strand
uuggagagagcacgauuua

SEQ ID NO: 1290798 - RNA, 19 nt, Homo sapiens
  misc_RNA (1)...(19): siRNA sense strand
gguuaucagaugcacuuua

SEQ ID NO: 1290799 - RNA, 19 nt, Homo sapiens
  misc_RNA (1)...(19): siRNA sense strand
ugaggagccaccaacauuu

SEQ ID NO: 1290800 - RNA, 19 nt, Homo sapiens
  misc_RNA (1)...(19): siRNA sense strand
ggaaggaauacuugacagu

SEQ ID NO: 1290801 - RNA, 19 nt, Homo sapiens
  misc_RNA (1)...(19): siRNA sense strand
gaggaaggaauacuugaca

SEQ ID NO: 1290802 - RNA, 19 nt, Homo sapiens
  misc_RNA (1)...(19): siRNA sense strand
ugaguaucuugaugcagua

SEQ ID NO: 1290803 - RNA, 19 nt, Homo sapiens
  misc_RNA (1)...(19): siRNA sense strand
caccuuuagugaaguagaa

SEQ ID NO: 1290804 - RNA, 19 nt, Homo sapiens
  misc_RNA (1)...(19): siRNA sense strand
acagauaucaggauuugga

SEQ ID NO: 1290805 - RNA, 19 nt, Homo sapiens
  misc_RNA (1)...(19): siRNA sense strand
ucauugcugugauuguuau

SEQ ID NO: 1290806 - RNA, 19 nt, Homo sapiens
  misc_RNA (1)...(19): siRNA sense strand
ucagaugcacuuuauuugu

SEQ ID NO: 1290807 - RNA, 19 nt, Homo sapiens
  misc_RNA (1)...(19): siRNA sense strand
gugcugcuccagaguguaa

SEQ ID NO: 1290808 - RNA, 19 nt, Homo sapiens
  misc_RNA (1)...(19): siRNA sense strand
ggaaaacacaccuuuagug

SEQ ID NO: 1290809 - RNA, 19 nt, Homo sapiens
  misc_RNA (1)...(19): siRNA sense strand
aaggaucaguagcaauuug

SEQ ID NO: 1290810 - RNA, 19 nt, Homo sapiens
  misc_RNA (1)...(19): siRNA sense strand
uauauacgggauccuuuaa

SEQ ID NO: 1290811 - RNA, 19 nt, Homo sapiens
  misc_RNA (1)...(19): siRNA sense strand
ugaaguagaaguauuugag

SEQ ID NO: 1290812 - RNA, 19 nt, Homo sapiens
  misc_RNA (1)...(19): siRNA sense strand
cuugacaguuuggauguuu

SEQ ID NO: 1290813 - RNA, 19 nt, Homo sapiens
  misc_RNA (1)...(19): siRNA sense strand
cauauauacgggauccuuu

SEQ ID NO: 1290814 - RNA, 19 nt, Homo sapiens
  misc_RNA (1)...(19): siRNA sense strand
auauauacgggauccuuua

SEQ ID NO: 1290815 - RNA, 19 nt, Homo sapiens
  misc_RNA (1)...(19): siRNA sense strand
cuuaaaggaucaguagcaa

SEQ ID NO: 1290816 - RNA, 19 nt, Homo sapiens
  misc_RNA (1)...(19): siRNA sense strand
uaaaccugaggaaggaaua

SEQ ID NO: 1290817 - RNA, 19 nt, Homo sapiens
  misc_RNA (1)...(19): siRNA sense strand
agaugacgccuguuauaga

SEQ ID NO: 1290818 - RNA, 19 nt, Homo sapiens
  misc_RNA (1)...(19): siRNA sense strand
ugugauuguuauugccaua

SEQ ID NO: 1290819 - RNA, 19 nt, Homo sapiens
  misc_RNA (1)...(19): siRNA sense strand
gagagcacgauuuauugug

SEQ ID NO: 1290820 - RNA, 19 nt, Homo sapiens
  misc_RNA (1)...(19): siRNA sense strand
gaaguauuugaguaucuug

SEQ ID NO: 1290821 - RNA, 19 nt, Homo sapiens
  misc_RNA (1)...(19): siRNA sense strand
ccucuugccacccauacua

SEQ ID NO: 1290822 - RNA, 19 nt, Homo sapiens
  misc_RNA (1)...(19): siRNA sense strand
gauaucaggauuuggaaaa

SEQ ID NO: 1290823 - RNA, 19 nt, Homo sapiens
  misc_RNA (1)...(19): siRNA sense strand
ggcuaccugucucagauga

SEQ ID NO: 1290824 - RNA, 19 nt, Homo sapiens
  misc_RNA (1)...(19): siRNA sense strand
ccaugguguugcugcugua

SEQ ID NO: 1290825 - RNA, 19 nt, Homo sapiens
  misc_RNA (1)...(19): siRNA sense strand
cagaugacgccuguuauag

SEQ ID NO: 1290826 - RNA, 19 nt, Homo sapiens
  misc_RNA (1)...(19): siRNA sense strand
gucauugcugugauuguua

SEQ ID NO: 1290827 - RNA, 19 nt, Homo sapiens
  misc_RNA (1)...(19): siRNA sense strand
uuggugaacgaguagauua

SEQ ID NO: 1290828 - RNA, 19 nt, Homo sapiens
  misc_RNA (1)...(19): siRNA sense strand
ggagccaccaacauuugaa

SEQ ID NO: 1290829 - RNA, 19 nt, Homo sapiens
  misc_RNA (1)...(19): siRNA sense strand
gcgcuuuccuggguugcuu

SEQ ID NO: 1290830 - RNA, 19 nt, Homo sapiens
  misc_RNA (1)...(19): siRNA sense strand
uacuacaaagcaacaguua

SEQ ID NO: 1290831 - RNA, 19 nt, Homo sapiens
  misc_RNA (1)...(19): siRNA sense strand
cuugaugcaguaacuuaua

SEQ ID NO: 1290832 - RNA, 19 nt, Homo sapiens
  misc_RNA (1)...(19): siRNA sense strand
aaacauguccauauauacg

SEQ ID NO: 1290833 - RNA, 19 nt, Homo sapiens
  misc_RNA (1)...(19): siRNA sense strand
guguaaaguggucaaaugu

SEQ ID NO: 1290834 - RNA, 19 nt, Homo sapiens
  misc_RNA (1)...(19): siRNA sense strand
cuuacgaguuugguuauca

SEQ ID NO: 1290835 - RNA, 19 nt, Homo sapiens
  misc_RNA (1)...(19): siRNA sense strand
uacgggauccuuuaaaugg

SEQ ID NO: 1290836 - RNA, 19 nt, Homo sapiens
  misc_RNA (1)...(19): siRNA sense strand
aaccaaaacccuacuauga

SEQ ID NO: 1290837 - RNA, 19 nt, Homo sapiens
  misc_RNA (1)...(19): siRNA sense strand
cccaauaugugaaaagguu

SEQ ID NO: 1290838 - RNA, 19 nt, Homo sapiens
  misc_RNA (1)...(19): siRNA sense strand
cgauggcagcgacacaauu

SEQ ID NO: 1290839 - RNA, 19 nt, Homo sapiens
  misc_RNA (1)...(19): siRNA sense strand
gauccauuuucacuuauug

SEQ ID NO: 1290840 - RNA, 19 nt, Homo sapiens
  misc_RNA (1)...(19): siRNA sense strand
uugaugcaguaacuuauag

SEQ ID NO: 1290841 - RNA, 19 nt, Homo sapiens
  misc_RNA (1)...(19): siRNA sense strand
guaucuugaugcaguaacu

SEQ ID NO: 1290842 - RNA, 19 nt, Homo sapiens
  misc_RNA (1)...(19): siRNA sense strand
caacauuugaagcuaugga

SEQ ID NO: 1290843 - RNA, 19 nt, Homo sapiens
  misc_RNA (1)...(19): siRNA sense strand
gagauuggugaacgaguag

SEQ ID NO: 1290844 - RNA, 19 nt, Homo sapiens
  misc_RNA (1)...(19): siRNA sense strand
ggagagagcacgauuuauu

SEQ ID NO: 1290845 - RNA, 19 nt, Homo sapiens
  misc_RNA (1)...(19): siRNA sense strand
agagaaacauguccauaua

SEQ ID NO: 1290846 - RNA, 19 nt, Homo sapiens
  misc_RNA (1)...(19): siRNA sense strand
cagaugcacuuuauuugua

SEQ ID NO: 1290847 - RNA, 19 nt, Homo sapiens
  misc_RNA (1)...(19): siRNA sense strand
ggacuuacgaguuugguua

SEQ ID NO: 1290848 - RNA, 19 nt, Homo sapiens
  misc_RNA (1)...(19): siRNA sense strand
aaacagauaucaggauuug

SEQ ID NO: 1290849 - RNA, 19 nt, Homo sapiens
  misc_RNA (1)...(19): siRNA sense strand
cuauggagcucauugguaa

SEQ ID NO: 1290850 - RNA, 19 nt, Homo sapiens
  misc_RNA (1)...(19): siRNA sense strand
aaacacaccuuuagugaag

SEQ ID NO: 1290851 - RNA, 19 nt, Homo sapiens
  misc_RNA (1)...(19): siRNA sense strand
gaacuuaaaggaucaguag

SEQ ID NO: 1290852 - RNA, 19 nt, Homo sapiens
  misc_RNA (1)...(19): siRNA sense strand
gaaaacagauaucaggauu

SEQ ID NO: 1290853 - RNA, 19 nt, Homo sapiens
  misc_RNA (1)...(19): siRNA sense strand
uaaaggaucaguagcaauu

SEQ ID NO: 1290854 - RNA, 19 nt, Homo sapiens
  misc_RNA (1)...(19): siRNA sense strand
aaaugggacuuacgaguuu

SEQ ID NO: 1290855 - RNA, 19 nt, Homo sapiens
  misc_RNA (1)...(19): siRNA sense strand
guuaucagaugcacuuuau

SEQ ID NO: 1290856 - RNA, 19 nt, Homo sapiens
  misc_RNA (1)...(19): siRNA sense strand
gagcugaauaugccacuua

SEQ ID NO: 1290857 - RNA, 19 nt, Homo sapiens
  misc_RNA (1)...(19): siRNA sense strand
ugagauuggugaacgagua

SEQ ID NO: 1290858 - RNA, 19 nt, Homo sapiens
  misc_RNA (1)...(19): siRNA sense strand
gugaacgaguagauuauaa

SEQ ID NO: 1290859 - RNA, 19 nt, Homo sapiens
  misc_RNA (1)...(19): siRNA sense strand
gagagagcacgauuuauug

SEQ ID NO: 1290860 - RNA, 19 nt, Homo sapiens
  misc_RNA (1)...(19): siRNA sense strand
caaaugggacuuacgaguu

SEQ ID NO: 1290861 - RNA, 19 nt, Homo sapiens
  misc_RNA (1)...(19): siRNA sense strand
ggucauugcugugauuguu

SEQ ID NO: 1290862 - RNA, 19 nt, Homo sapiens
  misc_RNA (1)...(19): siRNA sense strand
ccagauccauuuucacuua

SEQ ID NO: 1290863 - RNA, 19 nt, Homo sapiens
  misc_RNA (1)...(19): siRNA sense strand
gaaggaauacuugacaguu

SEQ ID NO: 1290864 - RNA, 19 nt, Homo sapiens
  misc_RNA (1)...(19): siRNA sense strand
aaggaauacuugacaguuu

SEQ ID NO: 1290865 - RNA, 19 nt, Homo sapiens
  misc_RNA (1)...(19): siRNA sense strand
ucagaugacgccuguuaua

SEQ ID NO: 1290866 - RNA, 19 nt, Homo sapiens
  misc_RNA (1)...(19): siRNA sense strand
gaaaacacaccuuuaguga

SEQ ID NO: 1290867 - RNA, 19 nt, Homo sapiens
  misc_RNA (1)...(19): siRNA sense strand
gaugacgccuguuauagag

SEQ ID NO: 1290868 - RNA, 19 nt, Homo sapiens
  misc_RNA (1)...(19): siRNA sense strand
gagaaacauguccauauau

SEQ ID NO: 1290869 - RNA, 19 nt, Homo sapiens
  misc_RNA (1)...(19): siRNA sense strand
ccacuuaccagacuaaauc

SEQ ID NO: 1290870 - RNA, 19 nt, Homo sapiens
  misc_RNA (1)...(19): siRNA sense strand
acgaguagauuauaagugu

SEQ ID NO: 1290871 - RNA, 19 nt, Homo sapiens
  misc_RNA (1)...(19): siRNA sense strand
cuacaaagcaacaguuaug

SEQ ID NO: 1290872 - RNA, 19 nt, Homo sapiens
  misc_RNA (1)...(19): siRNA sense strand
ccaccaacauuugaagcua

SEQ ID NO: 1290873 - RNA, 19 nt, Homo sapiens
  misc_RNA (1)...(19): siRNA sense strand
uauacgggauccuuuaaau

SEQ ID NO: 1290874 - RNA, 19 nt, Homo sapiens
  misc_RNA (1)...(19): siRNA sense strand
cgaguuugguuaucagaug

SEQ ID NO: 1290875 - RNA, 19 nt, Homo sapiens
  misc_RNA (1)...(19): siRNA sense strand
gaacgaguagauuauaagu

SEQ ID NO: 1290876 - RNA, 19 nt, Homo sapiens
  misc_RNA (1)...(19): siRNA sense strand
gugaggagccaccaacauu

SEQ ID NO: 1290877 - RNA, 19 nt, Homo sapiens
  misc_RNA (1)...(19): siRNA sense strand
gauggcagcgacacaauug

SEQ ID NO: 1290878 - RNA, 19 nt, Homo sapiens
  misc_RNA (1)...(19): siRNA sense strand
ucucagaugacgccuguua

SEQ ID NO: 1290879 - RNA, 19 nt, Homo sapiens
  misc_RNA (1)...(19): siRNA sense strand
gaggagccaccaacauuug

SEQ ID NO: 1290880 - RNA, 19 nt, Homo sapiens
  misc_RNA (1)...(19): siRNA sense strand
gcuauggagcucauuggua

SEQ ID NO: 1290881 - RNA, 19 nt, Homo sapiens
  misc_RNA (1)...(19): siRNA sense strand
acacaccuuuagugaagua

SEQ ID NO: 1290882 - RNA, 19 nt, Homo sapiens
  misc_RNA (1)...(19): siRNA sense strand
uagagaaacauguccauau

SEQ ID NO: 1290883 - RNA, 19 nt, Homo sapiens
  misc_RNA (1)...(19): siRNA sense strand
ggugaacgaguagauuaua

SEQ ID NO: 1290884 - RNA, 19 nt, Homo sapiens
  misc_RNA (1)...(19): siRNA sense strand
gaaguagaaguauuugagu

SEQ ID NO: 1290885 - RNA, 19 nt, Homo sapiens
  misc_RNA (1)...(19): siRNA sense strand
gaaacauguccauauauac

SEQ ID NO: 1290886 - RNA, 19 nt, Homo sapiens
  misc_RNA (1)...(19): siRNA sense strand
ugacgccuguuauagagaa

SEQ ID NO: 1290887 - RNA, 19 nt, Homo sapiens
  misc_RNA (1)...(19): siRNA sense strand
cgaguagauuauaagugua

SEQ ID NO: 1290888 - RNA, 19 nt, Homo sapiens
  misc_RNA (1)...(19): siRNA sense strand
gcacuuuauuuguaaugag

SEQ ID NO: 1290889 - RNA, 19 nt, Homo sapiens
  misc_RNA (1)...(19): siRNA sense strand
guagaaguauuugaguauc

SEQ ID NO: 1290890 - RNA, 19 nt, Homo sapiens
  misc_RNA (1)...(19): siRNA sense strand
guauuugaguaucuugaug

SEQ ID NO: 1290891 - RNA, 19 nt, Homo sapiens
  misc_RNA (1)...(19): siRNA sense strand
aggaauacuugacaguuug

SEQ ID NO: 1290892 - RNA, 19 nt, Homo sapiens
  misc_RNA (1)...(19): siRNA sense strand
ccaaaacccuacuaugaga

SEQ ID NO: 1290893 - RNA, 19 nt, Homo sapiens
  misc_RNA (1)...(19): siRNA sense strand
aguguaaaguggucaaaug

SEQ ID NO: 1290894 - RNA, 19 nt, Homo sapiens
  misc_RNA (1)...(19): siRNA sense strand
ccacccauacuauuuguga

SEQ ID NO: 1290895 - RNA, 19 nt, Homo sapiens
  misc_RNA (1)...(19): siRNA sense strand
uuggagagagcacgauuua

SEQ ID NO: 1290896 - RNA, 19 nt, Homo sapiens
  misc_RNA (1)...(19): siRNA sense strand
gguuaucagaugcacuuua

SEQ ID NO: 1290897 - RNA, 19 nt, Homo sapiens
  misc_RNA (1)...(19): siRNA sense strand
caccaacauuugaagcuau

SEQ ID NO: 1290898 - RNA, 19 nt, Homo sapiens
  misc_RNA (1)...(19): siRNA sense strand
ugaggagccaccaacauuu

SEQ ID NO: 1290899 - RNA, 19 nt, Homo sapiens
  misc_RNA (1)...(19): siRNA sense strand
ggaaggaauacuugacagu

SEQ ID NO: 1290900 - RNA, 19 nt, Homo sapiens
  misc_RNA (1)...(19): siRNA sense strand
gaggaaggaauacuugaca

SEQ ID NO: 1290901 - RNA, 19 nt, Homo sapiens
  misc_RNA (1)...(19): siRNA sense strand
ugaguaucuugaugcagua

SEQ ID NO: 1290902 - RNA, 19 nt, Homo sapiens
  misc_RNA (1)...(19): siRNA sense strand
caccuuuagugaaguagaa

SEQ ID NO: 1290903 - RNA, 19 nt, Homo sapiens
  misc_RNA (1)...(19): siRNA sense strand
acagauaucaggauuugga

SEQ ID NO: 1290904 - RNA, 19 nt, Homo sapiens
  misc_RNA (1)...(19): siRNA sense strand
ucauugcugugauuguuau

SEQ ID NO: 1290905 - RNA, 19 nt, Homo sapiens
  misc_RNA (1)...(19): siRNA sense strand
ucagaugcacuuuauuugu

SEQ ID NO: 1290906 - RNA, 19 nt, Homo sapiens
  misc_RNA (1)...(19): siRNA sense strand
gugcugcuccagaguguaa

SEQ ID NO: 1290907 - RNA, 19 nt, Homo sapiens
  misc_RNA (1)...(19): siRNA sense strand
ggaaaacacaccuuuagug

SEQ ID NO: 1290908 - RNA, 19 nt, Homo sapiens
  misc_RNA (1)...(19): siRNA sense strand
aaggaucaguagcaauuug

SEQ ID NO: 1290909 - RNA, 19 nt, Homo sapiens
  misc_RNA (1)...(19): siRNA sense strand
uauauacgggauccuuuaa

SEQ ID NO: 1290910 - RNA, 19 nt, Homo sapiens
  misc_RNA (1)...(19): siRNA sense strand
ugaaguagaaguauuugag

SEQ ID NO: 1290911 - RNA, 19 nt, Homo sapiens
  misc_RNA (1)...(19): siRNA sense strand
cuugacaguuuggauguuu

SEQ ID NO: 1290912 - RNA, 19 nt, Homo sapiens
  misc_RNA (1)...(19): siRNA sense strand
cauauauacgggauccuuu

SEQ ID NO: 1290913 - RNA, 19 nt, Homo sapiens
  misc_RNA (1)...(19): siRNA sense strand
auauauacgggauccuuua

SEQ ID NO: 1290914 - RNA, 19 nt, Homo sapiens
  misc_RNA (1)...(19): siRNA sense strand
cuuaaaggaucaguagcaa

SEQ ID NO: 1290915 - RNA, 19 nt, Homo sapiens
  misc_RNA (1)...(19): siRNA sense strand
uaaaccugaggaaggaaua

SEQ ID NO: 1290916 - RNA, 19 nt, Homo sapiens
  misc_RNA (1)...(19): siRNA sense strand
agaugacgccuguuauaga

SEQ ID NO: 1290917 - RNA, 19 nt, Homo sapiens
  misc_RNA (1)...(19): siRNA sense strand
ugugauuguuauugccaua

SEQ ID NO: 1290918 - RNA, 19 nt, Homo sapiens
  misc_RNA (1)...(19): siRNA sense strand
gagagcacgauuuauugug

SEQ ID NO: 1290919 - RNA, 19 nt, Homo sapiens
  misc_RNA (1)...(19): siRNA sense strand
gaaguauuugaguaucuug

SEQ ID NO: 1290920 - RNA, 19 nt, Homo sapiens
  misc_RNA (1)...(19): siRNA sense strand
ggcuaccugucucagauga

SEQ ID NO: 1290921 - RNA, 19 nt, Homo sapiens
  misc_RNA (1)...(19): siRNA sense strand
gauaucaggauuuggaaaa

SEQ ID NO: 1290922 - RNA, 19 nt, Homo sapiens
  misc_RNA (1)...(19): siRNA sense strand
ccucuugccacccauacua

SEQ ID NO: 1290923 - RNA, 19 nt, Homo sapiens
  misc_RNA (1)...(19): siRNA sense strand
ccaugguguugcugcugua

SEQ ID NO: 1290924 - RNA, 19 nt, Homo sapiens
  misc_RNA (1)...(19): siRNA sense strand
cagaugacgccuguuauag

SEQ ID NO: 1290925 - RNA, 19 nt, Homo sapiens
  misc_RNA (1)...(19): siRNA sense strand
cagaugguggagcugaaua

SEQ ID NO: 1290926 - RNA, 19 nt, Homo sapiens
  misc_RNA (1)...(19): siRNA sense strand
uuggugaacgaguagauua

SEQ ID NO: 1290927 - RNA, 19 nt, Homo sapiens
  misc_RNA (1)...(19): siRNA sense strand
gucauugcugugauuguua

SEQ ID NO: 1290928 - RNA, 19 nt, Homo sapiens
  misc_RNA (1)...(19): siRNA sense strand
ggagccaccaacauuugaa

SEQ ID NO: 1290929 - RNA, 19 nt, Homo sapiens
  misc_RNA (1)...(19): siRNA sense strand
gcgcuuuccuggguugcuu

SEQ ID NO: 1290930 - RNA, 19 nt, Homo sapiens
  misc_RNA (1)...(19): siRNA sense strand
uacuacaaagcaacaguua

SEQ ID NO: 1290931 - RNA, 19 nt, Homo sapiens
  misc_RNA (1)...(19): siRNA sense strand
cuugaugcaguaacuuaua

SEQ ID NO: 1290932 - RNA, 19 nt, Homo sapiens
  misc_RNA (1)...(19): siRNA sense strand
aaacauguccauauauacg

SEQ ID NO: 1290933 - RNA, 19 nt, Homo sapiens
  misc_RNA (1)...(19): siRNA sense strand
guguaaaguggucaaaugu

SEQ ID NO: 1290934 - RNA, 19 nt, Homo sapiens
  misc_RNA (1)...(19): siRNA sense strand
cuuacgaguuugguuauca

SEQ ID NO: 1290935 - RNA, 19 nt, Homo sapiens
  misc_RNA (1)...(19): siRNA sense strand
uacgggauccuuuaaaugg

SEQ ID NO: 1290936 - RNA, 19 nt, Homo sapiens
  misc_RNA (1)...(19): siRNA sense strand
gcagaugguggagcugaau

SEQ ID NO: 1290937 - RNA, 19 nt, Homo sapiens
  misc_RNA (1)...(19): siRNA sense strand
aaccaaaacccuacuauga

SEQ ID NO: 1290938 - RNA, 19 nt, Homo sapiens
  misc_RNA (1)...(19): siRNA sense strand
cccaauaugugaaaagguu

SEQ ID NO: 1290939 - RNA, 19 nt, Homo sapiens
  misc_RNA (1)...(19): siRNA sense strand
ggagcugaauaugccacuu

SEQ ID NO: 1290940 - RNA, 19 nt, Homo sapiens
  misc_RNA (1)...(19): siRNA sense strand
cgauggcagcgacacaauu

SEQ ID NO: 1290941 - RNA, 19 nt, Homo sapiens
  misc_RNA (1)...(19): siRNA sense strand
gauccauuuucacuuauug

SEQ ID NO: 1290942 - RNA, 19 nt, Homo sapiens
  misc_RNA (1)...(19): siRNA sense strand
uugaugcaguaacuuauag

SEQ ID NO: 1290943 - RNA, 19 nt, Homo sapiens
  misc_RNA (1)...(19): siRNA sense strand
guaucuugaugcaguaacu

SEQ ID NO: 1290944 - RNA, 19 nt, Homo sapiens
  misc_RNA (1)...(19): siRNA sense strand
ggagagagcacgauuuauu

SEQ ID NO: 1290945 - RNA, 19 nt, Homo sapiens
  misc_RNA (1)...(19): siRNA sense strand
agagaaacauguccauaua

SEQ ID NO: 1290946 - RNA, 19 nt, Homo sapiens
  misc_RNA (1)...(19): siRNA sense strand
cagaugcacuuuauuugua

SEQ ID NO: 1290947 - RNA, 19 nt, Homo sapiens
  misc_RNA (1)...(19): siRNA sense strand
ggacuuacgaguuugguua

SEQ ID NO: 1290948 - RNA, 19 nt, Homo sapiens
  misc_RNA (1)...(19): siRNA sense strand
aaacagauaucaggauuug

SEQ ID NO: 1290949 - RNA, 19 nt, Homo sapiens
  misc_RNA (1)...(19): siRNA sense strand
cuauggagcucauugguaa

SEQ ID NO: 1290950 - RNA, 19 nt, Homo sapiens
  misc_RNA (1)...(19): siRNA sense strand
aaacacaccuuuagugaag

SEQ ID NO: 1290951 - RNA, 19 nt, Homo sapiens
  misc_RNA (1)...(19): siRNA sense strand
gaacuuaaaggaucaguag

SEQ ID NO: 1290952 - RNA, 19 nt, Homo sapiens
  misc_RNA (1)...(19): siRNA sense strand
gaaaacagauaucaggauu

SEQ ID NO: 1290953 - RNA, 19 nt, Homo sapiens
  misc_RNA (1)...(19): siRNA sense strand
uaaaggaucaguagcaauu

SEQ ID NO: 1290954 - RNA, 19 nt, Homo sapiens
  misc_RNA (1)...(19): siRNA sense strand
aaaugggacuuacgaguuu

SEQ ID NO: 1290955 - RNA, 19 nt, Homo sapiens
  misc_RNA (1)...(19): siRNA sense strand
guuaucagaugcacuuuau

SEQ ID NO: 1290956 - RNA, 19 nt, Homo sapiens
  misc_RNA (1)...(19): siRNA sense strand
ugagauuggugaacgagua

SEQ ID NO: 1290957 - RNA, 19 nt, Homo sapiens
  misc_RNA (1)...(19): siRNA sense strand
gugaacgaguagauuauaa

SEQ ID NO: 1290958 - RNA, 19 nt, Homo sapiens
  misc_RNA (1)...(19): siRNA sense strand
gagagagcacgauuuauug

SEQ ID NO: 1290959 - RNA, 19 nt, Homo sapiens
  misc_RNA (1)...(19): siRNA sense strand
caaaugggacuuacgaguu

SEQ ID NO: 1290960 - RNA, 19 nt, Homo sapiens
  misc_RNA (1)...(19): siRNA sense strand
ggucauugcugugauuguu

SEQ ID NO: 1290961 - RNA, 19 nt, Homo sapiens
  misc_RNA (1)...(19): siRNA sense strand
ccagauccauuuucacuua

SEQ ID NO: 1290962 - RNA, 19 nt, Homo sapiens
  misc_RNA (1)...(19): siRNA sense strand
gaaggaauacuugacaguu

SEQ ID NO: 1290963 - RNA, 19 nt, Homo sapiens
  misc_RNA (1)...(19): siRNA sense strand
aaggaauacuugacaguuu

SEQ ID NO: 1290964 - RNA, 19 nt, Homo sapiens
  misc_RNA (1)...(19): siRNA sense strand
ucagaugacgccuguuaua

SEQ ID NO: 1290965 - RNA, 19 nt, Homo sapiens
  misc_RNA (1)...(19): siRNA sense strand
gaaaacacaccuuuaguga

SEQ ID NO: 1290966 - RNA, 19 nt, Homo sapiens
  misc_RNA (1)...(19): siRNA sense strand
gaugacgccuguuauagag

SEQ ID NO: 1290967 - RNA, 19 nt, Homo sapiens
  misc_RNA (1)...(19): siRNA sense strand
gagaaacauguccauauau

SEQ ID NO: 1290968 - RNA, 19 nt, Homo sapiens
  misc_RNA (1)...(19): siRNA sense strand
acgaguagauuauaagugu

SEQ ID NO: 1290969 - RNA, 19 nt, Homo sapiens
  misc_RNA (1)...(19): siRNA sense strand
cuacaaagcaacaguuaug

SEQ ID NO: 1290970 - RNA, 19 nt, Homo sapiens
  misc_RNA (1)...(19): siRNA sense strand
ccaccaacauuugaagcua

SEQ ID NO: 1290971 - RNA, 19 nt, Homo sapiens
  misc_RNA (1)...(19): siRNA sense strand
uauacgggauccuuuaaau

SEQ ID NO: 1290972 - RNA, 19 nt, Homo sapiens
  misc_RNA (1)...(19): siRNA sense strand
cgaguuugguuaucagaug

SEQ ID NO: 1290973 - RNA, 19 nt, Homo sapiens
  misc_RNA (1)...(19): siRNA sense strand
gaacgaguagauuauaagu

SEQ ID NO: 1290974 - RNA, 19 nt, Homo sapiens
  misc_RNA (1)...(19): siRNA sense strand
gugaggagccaccaacauu

SEQ ID NO: 1290975 - RNA, 19 nt, Homo sapiens
  misc_RNA (1)...(19): siRNA sense strand
gauggcagcgacacaauug

SEQ ID NO: 1290976 - RNA, 19 nt, Homo sapiens
  misc_RNA (1)...(19): siRNA sense strand
gcuauggagcucauuggua

SEQ ID NO: 1290977 - RNA, 19 nt, Homo sapiens
  misc_RNA (1)...(19): siRNA sense strand
gaggagccaccaacauuug

SEQ ID NO: 1290978 - RNA, 19 nt, Homo sapiens
  misc_RNA (1)...(19): siRNA sense strand
acacaccuuuagugaagua

SEQ ID NO: 1290979 - RNA, 19 nt, Homo sapiens
  misc_RNA (1)...(19): siRNA sense strand
ucucagaugacgccuguua

SEQ ID NO: 1290980 - RNA, 19 nt, Homo sapiens
  misc_RNA (1)...(19): siRNA sense strand
uagagaaacauguccauau

SEQ ID NO: 1290981 - RNA, 19 nt, Homo sapiens
  misc_RNA (1)...(19): siRNA sense strand
guuccaaagugucuuaaag

SEQ ID NO: 1290982 - RNA, 19 nt, Homo sapiens
  misc_RNA (1)...(19): siRNA sense strand
ggugaacgaguagauuaua

SEQ ID NO: 1290983 - RNA, 19 nt, Homo sapiens
  misc_RNA (1)...(19): siRNA sense strand
gaaguagaaguauuugagu

SEQ ID NO: 1290984 - RNA, 19 nt, Homo sapiens
  misc_RNA (1)...(19): siRNA sense strand
gaaacauguccauauauac

SEQ ID NO: 1290985 - RNA, 19 nt, Homo sapiens
  misc_RNA (1)...(19): siRNA sense strand
ugacgccuguuauagagaa

SEQ ID NO: 1290986 - RNA, 19 nt, Homo sapiens
  misc_RNA (1)...(19): siRNA sense strand
cgaguagauuauaagugua

SEQ ID NO: 1290987 - RNA, 19 nt, Homo sapiens
  misc_RNA (1)...(19): siRNA sense strand
gcacuuuauuuguaaugag

SEQ ID NO: 1290988 - RNA, 19 nt, Homo sapiens
  misc_RNA (1)...(19): siRNA sense strand
guagaaguauuugaguauc

SEQ ID NO: 1290989 - RNA, 19 nt, Homo sapiens
  misc_RNA (1)...(19): siRNA sense strand
guauuugaguaucuugaug

SEQ ID NO: 1290990 - RNA, 19 nt, Homo sapiens
  misc_RNA (1)...(19): siRNA sense strand
aggaauacuugacaguuug

SEQ ID NO: 1290991 - RNA, 19 nt, Homo sapiens
  misc_RNA (1)...(19): siRNA sense strand
ccaaaacccuacuaugaga

SEQ ID NO: 1290992 - RNA, 19 nt, Homo sapiens
  misc_RNA (1)...(19): siRNA sense strand
aguguaaaguggucaaaug

SEQ ID NO: 1290993 - RNA, 19 nt, Homo sapiens
  misc_RNA (1)...(19): siRNA sense strand
ccacccauacuauuuguga

SEQ ID NO: 1290994 - RNA, 19 nt, Homo sapiens
  misc_RNA (1)...(19): siRNA sense strand
caccaacauuugaagcuau

SEQ ID NO: 1290995 - RNA, 19 nt, Homo sapiens
  misc_RNA (1)...(19): siRNA sense strand
uuggagagagcacgauuua

SEQ ID NO: 1290996 - RNA, 19 nt, Homo sapiens
  misc_RNA (1)...(19): siRNA sense strand
gguuaucagaugcacuuua

SEQ ID NO: 1290997 - RNA, 19 nt, Homo sapiens
  misc_RNA (1)...(19): siRNA sense strand
ugaggagccaccaacauuu

SEQ ID NO: 1290998 - RNA, 19 nt, Homo sapiens
  misc_RNA (1)...(19): siRNA sense strand
ggaaggaauacuugacagu

SEQ ID NO: 1290999 - RNA, 19 nt, Homo sapiens
  misc_RNA (1)...(19): siRNA sense strand
gaggaaggaauacuugaca

SEQ ID NO: 1291000 - RNA, 19 nt, Homo sapiens
  misc_RNA (1)...(19): siRNA sense strand
ccaguuccaaagugucuua

SEQ ID NO: 1291001 - RNA, 19 nt, Homo sapiens
  misc_RNA (1)...(19): siRNA sense strand
ugaguaucuugaugcagua

SEQ ID NO: 1291002 - RNA, 19 nt, Homo sapiens
  misc_RNA (1)...(19): siRNA sense strand
caccuuuagugaaguagaa

SEQ ID NO: 1291003 - RNA, 19 nt, Homo sapiens
  misc_RNA (1)...(19): siRNA sense strand
acagauaucaggauuugga

SEQ ID NO: 1291004 - RNA, 19 nt, Homo sapiens
  misc_RNA (1)...(19): siRNA sense strand
ucauugcugugauuguuau

SEQ ID NO: 1291005 - RNA, 19 nt, Homo sapiens
  misc_RNA (1)...(19): siRNA sense strand
ucagaugcacuuuauuugu

SEQ ID NO: 1291006 - RNA, 19 nt, Homo sapiens
  misc_RNA (1)...(19): siRNA sense strand
gugcugcuccagaguguaa

SEQ ID NO: 1291007 - RNA, 19 nt, Homo sapiens
  misc_RNA (1)...(19): siRNA sense strand
ggaaaacacaccuuuagug

SEQ ID NO: 1291008 - RNA, 19 nt, Homo sapiens
  misc_RNA (1)...(19): siRNA sense strand
aaggaucaguagcaauuug

SEQ ID NO: 1291009 - RNA, 19 nt, Homo sapiens
  misc_RNA (1)...(19): siRNA sense strand
uauauacgggauccuuuaa

SEQ ID NO: 1291010 - RNA, 19 nt, Homo sapiens
  misc_RNA (1)...(19): siRNA sense strand
ugaaguagaaguauuugag

SEQ ID NO: 1291011 - RNA, 19 nt, Homo sapiens
  misc_RNA (1)...(19): siRNA sense strand
cuugacaguuuggauguuu

SEQ ID NO: 1291012 - RNA, 19 nt, Homo sapiens
  misc_RNA (1)...(19): siRNA sense strand
cauauauacgggauccuuu

SEQ ID NO: 1291013 - RNA, 19 nt, Homo sapiens
  misc_RNA (1)...(19): siRNA sense strand
auauauacgggauccuuua

SEQ ID NO: 1291014 - RNA, 19 nt, Homo sapiens
  misc_RNA (1)...(19): siRNA sense strand
cuuaaaggaucaguagcaa

SEQ ID NO: 1291015 - RNA, 19 nt, Homo sapiens
  misc_RNA (1)...(19): siRNA sense strand
uaaaccugaggaaggaaua

SEQ ID NO: 1291016 - RNA, 19 nt, Homo sapiens
  misc_RNA (1)...(19): siRNA sense strand
agaugacgccuguuauaga

SEQ ID NO: 1291017 - RNA, 19 nt, Homo sapiens
  misc_RNA (1)...(19): siRNA sense strand
ugugauuguuauugccaua

SEQ ID NO: 1291018 - RNA, 19 nt, Homo sapiens
  misc_RNA (1)...(19): siRNA sense strand
gagagcacgauuuauugug

SEQ ID NO: 1291019 - RNA, 19 nt, Homo sapiens
  misc_RNA (1)...(19): siRNA sense strand
gaaguauuugaguaucuug

SEQ ID NO: 1291020 - RNA, 19 nt, Homo sapiens
  misc_RNA (1)...(19): siRNA sense strand
ggcuaccugucucagauga

SEQ ID NO: 1291021 - RNA, 19 nt, Homo sapiens
  misc_RNA (1)...(19): siRNA sense strand
gauaucaggauuuggaaaa

SEQ ID NO: 1291022 - RNA, 19 nt, Homo sapiens
  misc_RNA (1)...(19): siRNA sense strand
ccucuugccacccauacua

SEQ ID NO: 1291023 - RNA, 19 nt, Homo sapiens
  misc_RNA (1)...(19): siRNA sense strand
ccaugguguugcugcugua

SEQ ID NO: 1291024 - RNA, 19 nt, Homo sapiens
  misc_RNA (1)...(19): siRNA sense strand
cagaugacgccuguuauag

SEQ ID NO: 1291025 - RNA, 19 nt, Homo sapiens
  misc_RNA (1)...(19): siRNA sense strand
uuggugaacgaguagauua

SEQ ID NO: 1291026 - RNA, 19 nt, Homo sapiens
  misc_RNA (1)...(19): siRNA sense strand
gucauugcugugauuguua

SEQ ID NO: 1291027 - RNA, 19 nt, Homo sapiens
  misc_RNA (1)...(19): siRNA sense strand
ggagccaccaacauuugaa

SEQ ID NO: 1291028 - RNA, 19 nt, Homo sapiens
  misc_RNA (1)...(19): siRNA sense strand
gcgcuuuccuggguugcuu

SEQ ID NO: 1291029 - RNA, 19 nt, Homo sapiens
  misc_RNA (1)...(19): siRNA sense strand
uacuacaaagcaacaguua

SEQ ID NO: 1291030 - RNA, 19 nt, Homo sapiens
  misc_RNA (1)...(19): siRNA sense strand
cuugaugcaguaacuuaua

SEQ ID NO: 1291031 - RNA, 19 nt, Homo sapiens
  misc_RNA (1)...(19): siRNA sense strand
aaacauguccauauauacg

SEQ ID NO: 1291032 - RNA, 19 nt, Homo sapiens
  misc_RNA (1)...(19): siRNA sense strand
guguaaaguggucaaaugu

SEQ ID NO: 1291033 - RNA, 19 nt, Homo sapiens
  misc_RNA (1)...(19): siRNA sense strand
cuuacgaguuugguuauca

SEQ ID NO: 1291034 - RNA, 19 nt, Homo sapiens
  misc_RNA (1)...(19): siRNA sense strand
uacgggauccuuuaaaugg

SEQ ID NO: 1291035 - RNA, 19 nt, Homo sapiens
  misc_RNA (1)...(19): siRNA sense strand
aaccaaaacccuacuauga

SEQ ID NO: 1291036 - RNA, 19 nt, Homo sapiens
  misc_RNA (1)...(19): siRNA sense strand
cccaauaugugaaaagguu

SEQ ID NO: 1291037 - RNA, 19 nt, Homo sapiens
  misc_RNA (1)...(19): siRNA sense strand
cgauggcagcgacacaauu

SEQ ID NO: 1291038 - RNA, 19 nt, Homo sapiens
  misc_RNA (1)...(19): siRNA sense strand
gauccauuuucacuuauug

SEQ ID NO: 1291039 - RNA, 19 nt, Homo sapiens
  misc_RNA (1)...(19): siRNA sense strand
uugaugcaguaacuuauag

SEQ ID NO: 1291040 - RNA, 19 nt, Homo sapiens
  misc_RNA (1)...(19): siRNA sense strand
guaucuugaugcaguaacu

SEQ ID NO: 1291041 - RNA, 19 nt, Homo sapiens
  misc_RNA (1)...(19): siRNA sense strand
caacauuugaagcuaugga

SEQ ID NO: 1291042 - RNA, 19 nt, Homo sapiens
  misc_RNA (1)...(19): siRNA sense strand
gagauuggugaacgaguag

SEQ ID NO: 1291043 - RNA, 19 nt, Homo sapiens
  misc_RNA (1)...(19): siRNA sense strand
ggagagagcacgauuuauu

SEQ ID NO: 1291044 - RNA, 19 nt, Homo sapiens
  misc_RNA (1)...(19): siRNA sense strand
agagaaacauguccauaua

SEQ ID NO: 1291045 - RNA, 19 nt, Homo sapiens
  misc_RNA (1)...(19): siRNA sense strand
cagaugcacuuuauuugua

SEQ ID NO: 1291046 - RNA, 19 nt, Homo sapiens
  misc_RNA (1)...(19): siRNA sense strand
ggacuuacgaguuugguua

SEQ ID NO: 1291047 - RNA, 19 nt, Homo sapiens
  misc_RNA (1)...(19): siRNA sense strand
aaacagauaucaggauuug

SEQ ID NO: 1291048 - RNA, 19 nt, Homo sapiens
  misc_RNA (1)...(19): siRNA sense strand
cuauggagcucauugguaa

SEQ ID NO: 1291049 - RNA, 19 nt, Homo sapiens
  misc_RNA (1)...(19): siRNA sense strand
aaacacaccuuuagugaag

SEQ ID NO: 1291050 - RNA, 19 nt, Homo sapiens
  misc_RNA (1)...(19): siRNA sense strand
gaacuuaaaggaucaguag

SEQ ID NO: 1291051 - RNA, 19 nt, Homo sapiens
  misc_RNA (1)...(19): siRNA sense strand
gaaaacagauaucaggauu

SEQ ID NO: 1291052 - RNA, 19 nt, Homo sapiens
  misc_RNA (1)...(19): siRNA sense strand
uaaaggaucaguagcaauu

SEQ ID NO: 1291053 - RNA, 19 nt, Homo sapiens
  misc_RNA (1)...(19): siRNA sense strand
aaaugggacuuacgaguuu

SEQ ID NO: 1291054 - RNA, 19 nt, Homo sapiens
  misc_RNA (1)...(19): siRNA sense strand
guuaucagaugcacuuuau

SEQ ID NO: 1291055 - RNA, 19 nt, Homo sapiens
  misc_RNA (1)...(19): siRNA sense strand
gagcugaauaugccacuua

SEQ ID NO: 1291056 - RNA, 19 nt, Homo sapiens
  misc_RNA (1)...(19): siRNA sense strand
gagcagagaggcugaauag

SEQ ID NO: 1291057 - RNA, 19 nt, Homo sapiens
  misc_RNA (1)...(19): siRNA sense strand
ugagauuggugaacgagua

SEQ ID NO: 1291058 - RNA, 19 nt, Homo sapiens
  misc_RNA (1)...(19): siRNA sense strand
gugaacgaguagauuauaa

SEQ ID NO: 1291059 - RNA, 19 nt, Homo sapiens
  misc_RNA (1)...(19): siRNA sense strand
gagagagcacgauuuauug

SEQ ID NO: 1291060 - RNA, 19 nt, Homo sapiens
  misc_RNA (1)...(19): siRNA sense strand
caaaugggacuuacgaguu

SEQ ID NO: 1291061 - RNA, 19 nt, Homo sapiens
  misc_RNA (1)...(19): siRNA sense strand
ggucauugcugugauuguu

SEQ ID NO: 1291062 - RNA, 19 nt, Homo sapiens
  misc_RNA (1)...(19): siRNA sense strand
ccagauccauuuucacuua

SEQ ID NO: 1291063 - RNA, 19 nt, Homo sapiens
  misc_RNA (1)...(19): siRNA sense strand
gaaggaauacuugacaguu

SEQ ID NO: 1291064 - RNA, 19 nt, Homo sapiens
  misc_RNA (1)...(19): siRNA sense strand
aaggaauacuugacaguuu

SEQ ID NO: 1291065 - RNA, 19 nt, Homo sapiens
  misc_RNA (1)...(19): siRNA sense strand
ucagaugacgccuguuaua

SEQ ID NO: 1291066 - RNA, 19 nt, Homo sapiens
  misc_RNA (1)...(19): siRNA sense strand
gaaaacacaccuuuaguga

SEQ ID NO: 1291067 - RNA, 19 nt, Homo sapiens
  misc_RNA (1)...(19): siRNA sense strand
gaugacgccuguuauagag

SEQ ID NO: 1291068 - RNA, 19 nt, Homo sapiens
  misc_RNA (1)...(19): siRNA sense strand
gagaaacauguccauauau

SEQ ID NO: 1291069 - RNA, 19 nt, Homo sapiens
  misc_RNA (1)...(19): siRNA sense strand
ccacuuaccagacuaaauc

SEQ ID NO: 1291070 - RNA, 19 nt, Homo sapiens
  misc_RNA (1)...(19): siRNA sense strand
acgaguagauuauaagugu

SEQ ID NO: 1291071 - RNA, 19 nt, Homo sapiens
  misc_RNA (1)...(19): siRNA sense strand
cuacaaagcaacaguuaug

SEQ ID NO: 1291072 - RNA, 19 nt, Homo sapiens
  misc_RNA (1)...(19): siRNA sense strand
ccaccaacauuugaagcua

SEQ ID NO: 1291073 - RNA, 19 nt, Homo sapiens
  misc_RNA (1)...(19): siRNA sense strand
uauacgggauccuuuaaau

SEQ ID NO: 1291074 - RNA, 19 nt, Homo sapiens
  misc_RNA (1)...(19): siRNA sense strand
cgaguuugguuaucagaug

SEQ ID NO: 1291075 - RNA, 19 nt, Homo sapiens
  misc_RNA (1)...(19): siRNA sense strand
gaacgaguagauuauaagu

SEQ ID NO: 1291076 - RNA, 19 nt, Homo sapiens
  misc_RNA (1)...(19): siRNA sense strand
gugaggagccaccaacauu

SEQ ID NO: 1291077 - RNA, 19 nt, Homo sapiens
  misc_RNA (1)...(19): siRNA sense strand
gauggcagcgacacaauug

SEQ ID NO: 1291078 - RNA, 19 nt, Homo sapiens
  misc_RNA (1)...(19): siRNA sense strand
ucucagaugacgccuguua

SEQ ID NO: 1291079 - RNA, 19 nt, Homo sapiens
  misc_RNA (1)...(19): siRNA sense strand
acacaccuuuagugaagua

SEQ ID NO: 1291080 - RNA, 19 nt, Homo sapiens
  misc_RNA (1)...(19): siRNA sense strand
gcuauggagcucauuggua

SEQ ID NO: 1291081 - RNA, 19 nt, Homo sapiens
  misc_RNA (1)...(19): siRNA sense strand
gaggagccaccaacauuug

SEQ ID NO: 1291082 - RNA, 19 nt, Homo sapiens
  misc_RNA (1)...(19): siRNA sense strand
uagagaaacauguccauau

SEQ ID NO: 1291083 - RNA, 19 nt, Homo sapiens
  misc_RNA (1)...(19): siRNA sense strand
ggugaacgaguagauuaua

SEQ ID NO: 1291084 - RNA, 19 nt, Homo sapiens
  misc_RNA (1)...(19): siRNA sense strand
gaaguagaaguauuugagu

SEQ ID NO: 1291085 - RNA, 19 nt, Homo sapiens
  misc_RNA (1)...(19): siRNA sense strand
gaaacauguccauauauac

SEQ ID NO: 1291086 - RNA, 19 nt, Homo sapiens
  misc_RNA (1)...(19): siRNA sense strand
ugacgccuguuauagagaa

SEQ ID NO: 1291087 - RNA, 19 nt, Homo sapiens
  misc_RNA (1)...(19): siRNA sense strand
cgaguagauuauaagugua

SEQ ID NO: 1291088 - RNA, 19 nt, Homo sapiens
  misc_RNA (1)...(19): siRNA sense strand
gcacuuuauuuguaaugag

SEQ ID NO: 1291089 - RNA, 19 nt, Homo sapiens
  misc_RNA (1)...(19): siRNA sense strand
guagaaguauuugaguauc

SEQ ID NO: 1291090 - RNA, 19 nt, Homo sapiens
  misc_RNA (1)...(19): siRNA sense strand
guauuugaguaucuugaug

SEQ ID NO: 1291091 - RNA, 19 nt, Homo sapiens
  misc_RNA (1)...(19): siRNA sense strand
aggaauacuugacaguuug

SEQ ID NO: 1291092 - RNA, 19 nt, Homo sapiens
  misc_RNA (1)...(19): siRNA sense strand
ccaaaacccuacuaugaga

SEQ ID NO: 1291093 - RNA, 19 nt, Homo sapiens
  misc_RNA (1)...(19): siRNA sense strand
aguguaaaguggucaaaug

SEQ ID NO: 1291094 - RNA, 19 nt, Homo sapiens
  misc_RNA (1)...(19): siRNA sense strand
ccacccauacuauuuguga

SEQ ID NO: 1291095 - RNA, 19 nt, Homo sapiens
  misc_RNA (1)...(19): siRNA sense strand
uuggagagagcacgauuua

SEQ ID NO: 1291096 - RNA, 19 nt, Homo sapiens
  misc_RNA (1)...(19): siRNA sense strand
gguuaucagaugcacuuua

SEQ ID NO: 1291097 - RNA, 19 nt, Homo sapiens
  misc_RNA (1)...(19): siRNA sense strand
caccaacauuugaagcuau

SEQ ID NO: 1291098 - RNA, 19 nt, Homo sapiens
  misc_RNA (1)...(19): siRNA sense strand
ugaggagccaccaacauuu

SEQ ID NO: 1291099 - RNA, 19 nt, Homo sapiens
  misc_RNA (1)...(19): siRNA sense strand
ggaaggaauacuugacagu

SEQ ID NO: 1291100 - RNA, 19 nt, Homo sapiens
  misc_RNA (1)...(19): siRNA sense strand
gaggaaggaauacuugaca

SEQ ID NO: 1291101 - RNA, 19 nt, Homo sapiens
  misc_RNA (1)...(19): siRNA sense strand
ugaguaucuugaugcagua

SEQ ID NO: 1291102 - RNA, 19 nt, Homo sapiens
  misc_RNA (1)...(19): siRNA sense strand
caccuuuagugaaguagaa

SEQ ID NO: 1291103 - RNA, 19 nt, Homo sapiens
  misc_RNA (1)...(19): siRNA sense strand
acagauaucaggauuugga

SEQ ID NO: 1291104 - RNA, 19 nt, Homo sapiens
  misc_RNA (1)...(19): siRNA sense strand
ucauugcugugauuguuau

SEQ ID NO: 1291105 - RNA, 19 nt, Homo sapiens
  misc_RNA (1)...(19): siRNA sense strand
ucagaugcacuuuauuugu

SEQ ID NO: 1291106 - RNA, 19 nt, Homo sapiens
  misc_RNA (1)...(19): siRNA sense strand
gugcugcuccagaguguaa

SEQ ID NO: 1291107 - RNA, 19 nt, Homo sapiens
  misc_RNA (1)...(19): siRNA sense strand
ggaaaacacaccuuuagug

SEQ ID NO: 1291108 - RNA, 19 nt, Homo sapiens
  misc_RNA (1)...(19): siRNA sense strand
aaggaucaguagcaauuug

SEQ ID NO: 1291109 - RNA, 19 nt, Homo sapiens
  misc_RNA (1)...(19): siRNA sense strand
uauauacgggauccuuuaa

SEQ ID NO: 1291110 - RNA, 19 nt, Homo sapiens
  misc_RNA (1)...(19): siRNA sense strand
ugaaguagaaguauuugag

SEQ ID NO: 1291111 - RNA, 19 nt, Homo sapiens
  misc_RNA (1)...(19): siRNA sense strand
cuugacaguuuggauguuu

SEQ ID NO: 1291112 - RNA, 19 nt, Homo sapiens
  misc_RNA (1)...(19): siRNA sense strand
cauauauacgggauccuuu

SEQ ID NO: 1291113 - RNA, 19 nt, Homo sapiens
  misc_RNA (1)...(19): siRNA sense strand
auauauacgggauccuuua

SEQ ID NO: 1291114 - RNA, 19 nt, Homo sapiens
  misc_RNA (1)...(19): siRNA sense strand
cuuaaaggaucaguagcaa

SEQ ID NO: 1291115 - RNA, 19 nt, Homo sapiens
  misc_RNA (1)...(19): siRNA sense strand
uaaaccugaggaaggaaua

SEQ ID NO: 1291116 - RNA, 19 nt, Homo sapiens
  misc_RNA (1)...(19): siRNA sense strand
agaugacgccuguuauaga

SEQ ID NO: 1291117 - RNA, 19 nt, Homo sapiens
  misc_RNA (1)...(19): siRNA sense strand
ugugauuguuauugccaua

SEQ ID NO: 1291118 - RNA, 19 nt, Homo sapiens
  misc_RNA (1)...(19): siRNA sense strand
gagagcacgauuuauugug

SEQ ID NO: 1291119 - RNA, 19 nt, Homo sapiens
  misc_RNA (1)...(19): siRNA sense strand
gaaguauuugaguaucuug

SEQ ID NO: 1291120 - RNA, 19 nt, Homo sapiens
  misc_RNA (1)...(19): siRNA sense strand
ggcuaccugucucagauga

SEQ ID NO: 1291121 - RNA, 19 nt, Homo sapiens
  misc_RNA (1)...(19): siRNA sense strand
gauaucaggauuuggaaaa

SEQ ID NO: 1291122 - RNA, 19 nt, Homo sapiens
  misc_RNA (1)...(19): siRNA sense strand
ccucuugccacccauacua

SEQ ID NO: 1291123 - RNA, 19 nt, Homo sapiens
  misc_RNA (1)...(19): siRNA sense strand
ccaugguguugcugcugua

SEQ ID NO: 1291124 - RNA, 19 nt, Homo sapiens
  misc_RNA (1)...(19): siRNA sense strand
cagaugacgccuguuauag

SEQ ID NO: 1291125 - RNA, 19 nt, Homo sapiens
  misc_RNA (1)...(19): siRNA sense strand
cagaugguggagcugaaua

SEQ ID NO: 1291126 - RNA, 19 nt, Homo sapiens
  misc_RNA (1)...(19): siRNA sense strand
gucauugcugugauuguua

SEQ ID NO: 1291127 - RNA, 19 nt, Homo sapiens
  misc_RNA (1)...(19): siRNA sense strand
ggagccaccaacauuugaa

SEQ ID NO: 1291128 - RNA, 19 nt, Homo sapiens
  misc_RNA (1)...(19): siRNA sense strand
uuggugaacgaguagauua

SEQ ID NO: 1291129 - RNA, 19 nt, Homo sapiens
  misc_RNA (1)...(19): siRNA sense strand
gcgcuuuccuggguugcuu

SEQ ID NO: 1291130 - RNA, 19 nt, Homo sapiens
  misc_RNA (1)...(19): siRNA sense strand
uacuacaaagcaacaguua

SEQ ID NO: 1291131 - RNA, 19 nt, Homo sapiens
  misc_RNA (1)...(19): siRNA sense strand
cuugaugcaguaacuuaua

SEQ ID NO: 1291132 - RNA, 19 nt, Homo sapiens
  misc_RNA (1)...(19): siRNA sense strand
aaacauguccauauauacg

SEQ ID NO: 1291133 - RNA, 19 nt, Homo sapiens
  misc_RNA (1)...(19): siRNA sense strand
guguaaaguggucaaaugu

SEQ ID NO: 1291134 - RNA, 19 nt, Homo sapiens
  misc_RNA (1)...(19): siRNA sense strand
cuuacgaguuugguuauca

SEQ ID NO: 1291135 - RNA, 19 nt, Homo sapiens
  misc_RNA (1)...(19): siRNA sense strand
uacgggauccuuuaaaugg

SEQ ID NO: 1291136 - RNA, 19 nt, Homo sapiens
  misc_RNA (1)...(19): siRNA sense strand
gcagaugguggagcugaau

SEQ ID NO: 1291137 - RNA, 19 nt, Homo sapiens
  misc_RNA (1)...(19): siRNA sense strand
aaccaaaacccuacuauga

SEQ ID NO: 1291138 - RNA, 19 nt, Homo sapiens
  misc_RNA (1)...(19): siRNA sense strand
uugaugcaguaacuuauag

SEQ ID NO: 1291139 - RNA, 19 nt, Homo sapiens
  misc_RNA (1)...(19): siRNA sense strand
ggagcugaauaugccacuu

SEQ ID NO: 1291140 - RNA, 19 nt, Homo sapiens
  misc_RNA (1)...(19): siRNA sense strand
caacauuugaagcuaugga

SEQ ID NO: 1291141 - RNA, 19 nt, Homo sapiens
  misc_RNA (1)...(19): siRNA sense strand
cgauggcagcgacacaauu

SEQ ID NO: 1291142 - RNA, 19 nt, Homo sapiens
  misc_RNA (1)...(19): siRNA sense strand
gauccauuuucacuuauug

SEQ ID NO: 1291143 - RNA, 19 nt, Homo sapiens
  misc_RNA (1)...(19): siRNA sense strand
ggagagagcacgauuuauu

SEQ ID NO: 1291144 - RNA, 19 nt, Homo sapiens
  misc_RNA (1)...(19): siRNA sense strand
agagaaacauguccauaua

SEQ ID NO: 1291145 - RNA, 19 nt, Homo sapiens
  misc_RNA (1)...(19): siRNA sense strand
cagaugcacuuuauuugua

SEQ ID NO: 1291146 - RNA, 19 nt, Homo sapiens
  misc_RNA (1)...(19): siRNA sense strand
ggacuuacgaguuugguua

SEQ ID NO: 1291147 - RNA, 19 nt, Homo sapiens
  misc_RNA (1)...(19): siRNA sense strand
aaacagauaucaggauuug

SEQ ID NO: 1291148 - RNA, 19 nt, Homo sapiens
  misc_RNA (1)...(19): siRNA sense strand
cuauggagcucauugguaa

SEQ ID NO: 1291149 - RNA, 19 nt, Homo sapiens
  misc_RNA (1)...(19): siRNA sense strand
aaacacaccuuuagugaag

SEQ ID NO: 1291150 - RNA, 19 nt, Homo sapiens
  misc_RNA (1)...(19): siRNA sense strand
gaacuuaaaggaucaguag

SEQ ID NO: 1291151 - RNA, 19 nt, Homo sapiens
  misc_RNA (1)...(19): siRNA sense strand
gaaaacagauaucaggauu

SEQ ID NO: 1291152 - RNA, 19 nt, Homo sapiens
  misc_RNA (1)...(19): siRNA sense strand
uaaaggaucaguagcaauu

SEQ ID NO: 1291153 - RNA, 19 nt, Homo sapiens
  misc_RNA (1)...(19): siRNA sense strand
aaaugggacuuacgaguuu

SEQ ID NO: 1291154 - RNA, 19 nt, Homo sapiens
  misc_RNA (1)...(19): siRNA sense strand
guuaucagaugcacuuuau

SEQ ID NO: 1291155 - RNA, 19 nt, Homo sapiens
  misc_RNA (1)...(19): siRNA sense strand
gagcugaauaugccacuua

SEQ ID NO: 1291156 - RNA, 19 nt, Homo sapiens
  misc_RNA (1)...(19): siRNA sense strand
ugagauuggugaacgagua

SEQ ID NO: 1291157 - RNA, 19 nt, Homo sapiens
  misc_RNA (1)...(19): siRNA sense strand
gugaacgaguagauuauaa

SEQ ID NO: 1291158 - RNA, 19 nt, Homo sapiens
  misc_RNA (1)...(19): siRNA sense strand
gagagagcacgauuuauug

SEQ ID NO: 1291159 - RNA, 19 nt, Homo sapiens
  misc_RNA (1)...(19): siRNA sense strand
caaaugggacuuacgaguu

SEQ ID NO: 1291160 - RNA, 19 nt, Homo sapiens
  misc_RNA (1)...(19): siRNA sense strand
ggucauugcugugauuguu

SEQ ID NO: 1291161 - RNA, 19 nt, Homo sapiens
  misc_RNA (1)...(19): siRNA sense strand
ccagauccauuuucacuua

SEQ ID NO: 1291162 - RNA, 19 nt, Homo sapiens
  misc_RNA (1)...(19): siRNA sense strand
gaaggaauacuugacaguu

SEQ ID NO: 1291163 - RNA, 19 nt, Homo sapiens
  misc_RNA (1)...(19): siRNA sense strand
aaggaauacuugacaguuu

SEQ ID NO: 1291164 - RNA, 19 nt, Homo sapiens
  misc_RNA (1)...(19): siRNA sense strand
ucagaugacgccuguuaua

SEQ ID NO: 1291165 - RNA, 19 nt, Homo sapiens
  misc_RNA (1)...(19): siRNA sense strand
gaaaacacaccuuuaguga

SEQ ID NO: 1291166 - RNA, 19 nt, Homo sapiens
  misc_RNA (1)...(19): siRNA sense strand
gaugacgccuguuauagag

SEQ ID NO: 1291167 - RNA, 19 nt, Homo sapiens
  misc_RNA (1)...(19): siRNA sense strand
gagaaacauguccauauau

SEQ ID NO: 1291168 - RNA, 19 nt, Homo sapiens
  misc_RNA (1)...(19): siRNA sense strand
ccacuuaccagacuaaauc

SEQ ID NO: 1291169 - RNA, 19 nt, Homo sapiens
  misc_RNA (1)...(19): siRNA sense strand
acgaguagauuauaagugu

SEQ ID NO: 1291170 - RNA, 19 nt, Homo sapiens
  misc_RNA (1)...(19): siRNA sense strand
cuacaaagcaacaguuaug

SEQ ID NO: 1291171 - RNA, 19 nt, Homo sapiens
  misc_RNA (1)...(19): siRNA sense strand
ccaccaacauuugaagcua

SEQ ID NO: 1291172 - RNA, 19 nt, Homo sapiens
  misc_RNA (1)...(19): siRNA sense strand
uauacgggauccuuuaaau

SEQ ID NO: 1291173 - RNA, 19 nt, Homo sapiens
  misc_RNA (1)...(19): siRNA sense strand
cgaguuugguuaucagaug

SEQ ID NO: 1291174 - RNA, 19 nt, Homo sapiens
  misc_RNA (1)...(19): siRNA sense strand
gaacgaguagauuauaagu

SEQ ID NO: 1291175 - RNA, 19 nt, Homo sapiens
  misc_RNA (1)...(19): siRNA sense strand
gugaggagccaccaacauu

SEQ ID NO: 1291176 - RNA, 19 nt, Homo sapiens
  misc_RNA (1)...(19): siRNA sense strand
gauggcagcgacacaauug

SEQ ID NO: 1291177 - RNA, 19 nt, Homo sapiens
  misc_RNA (1)...(19): siRNA sense strand
ucucagaugacgccuguua

SEQ ID NO: 1291178 - RNA, 19 nt, Homo sapiens
  misc_RNA (1)...(19): siRNA sense strand
gaggagccaccaacauuug

SEQ ID NO: 1291179 - RNA, 19 nt, Homo sapiens
  misc_RNA (1)...(19): siRNA sense strand
gcuauggagcucauuggua

SEQ ID NO: 1291180 - RNA, 19 nt, Homo sapiens
  misc_RNA (1)...(19): siRNA sense strand
acacaccuuuagugaagua

SEQ ID NO: 1291181 - RNA, 19 nt, Homo sapiens
  misc_RNA (1)...(19): siRNA sense strand
uagagaaacauguccauau

SEQ ID NO: 1291182 - RNA, 19 nt, Homo sapiens
  misc_RNA (1)...(19): siRNA sense strand
guuccaaagugucuuaaag

SEQ ID NO: 1291183 - RNA, 19 nt, Homo sapiens
  misc_RNA (1)...(19): siRNA sense strand
ggugaacgaguagauuaua

SEQ ID NO: 1291184 - RNA, 19 nt, Homo sapiens
  misc_RNA (1)...(19): siRNA sense strand
gaaguagaaguauuugagu

SEQ ID NO: 1291185 - RNA, 19 nt, Homo sapiens
  misc_RNA (1)...(19): siRNA sense strand
gaaacauguccauauauac

SEQ ID NO: 1291186 - RNA, 19 nt, Homo sapiens
  misc_RNA (1)...(19): siRNA sense strand
ugacgccuguuauagagaa

SEQ ID NO: 1291187 - RNA, 19 nt, Homo sapiens
  misc_RNA (1)...(19): siRNA sense strand
cgaguagauuauaagugua

SEQ ID NO: 1291188 - RNA, 19 nt, Homo sapiens
  misc_RNA (1)...(19): siRNA sense strand
gcacuuuauuuguaaugag

SEQ ID NO: 1291189 - RNA, 19 nt, Homo sapiens
  misc_RNA (1)...(19): siRNA sense strand
guagaaguauuugaguauc

SEQ ID NO: 1291190 - RNA, 19 nt, Homo sapiens
  misc_RNA (1)...(19): siRNA sense strand
guauuugaguaucuugaug

SEQ ID NO: 1291191 - RNA, 19 nt, Homo sapiens
  misc_RNA (1)...(19): siRNA sense strand
aggaauacuugacaguuug

SEQ ID NO: 1291192 - RNA, 19 nt, Homo sapiens
  misc_RNA (1)...(19): siRNA sense strand
ccaaaacccuacuaugaga

SEQ ID NO: 1291193 - RNA, 19 nt, Homo sapiens
  misc_RNA (1)...(19): siRNA sense strand
aguguaaaguggucaaaug

SEQ ID NO: 1291194 - RNA, 19 nt, Homo sapiens
  misc_RNA (1)...(19): siRNA sense strand
ccacccauacuauuuguga

SEQ ID NO: 1291195 - RNA, 19 nt, Homo sapiens
  misc_RNA (1)...(19): siRNA sense strand
uuggagagagcacgauuua

SEQ ID NO: 1291196 - RNA, 19 nt, Homo sapiens
  misc_RNA (1)...(19): siRNA sense strand
gguuaucagaugcacuuua

SEQ ID NO: 1291197 - RNA, 19 nt, Homo sapiens
  misc_RNA (1)...(19): siRNA sense strand
caccaacauuugaagcuau

SEQ ID NO: 1291198 - RNA, 19 nt, Homo sapiens
  misc_RNA (1)...(19): siRNA sense strand
ugaggagccaccaacauuu

SEQ ID NO: 1291199 - RNA, 19 nt, Homo sapiens
  misc_RNA (1)...(19): siRNA sense strand
ggaaggaauacuugacagu

SEQ ID NO: 1291200 - RNA, 19 nt, Homo sapiens
  misc_RNA (1)...(19): siRNA sense strand
gaggaaggaauacuugaca

SEQ ID NO: 1291201 - RNA, 19 nt, Homo sapiens
  misc_RNA (1)...(19): siRNA sense strand
ccaguuccaaagugucuua

SEQ ID NO: 1291202 - RNA, 19 nt, Homo sapiens
  misc_RNA (1)...(19): siRNA sense strand
ugaguaucuugaugcagua

SEQ ID NO: 1291203 - RNA, 19 nt, Homo sapiens
  misc_RNA (1)...(19): siRNA sense strand
caccuuuagugaaguagaa

SEQ ID NO: 1291204 - RNA, 19 nt, Homo sapiens
  misc_RNA (1)...(19): siRNA sense strand
acagauaucaggauuugga

SEQ ID NO: 1291205 - RNA, 19 nt, Homo sapiens
  misc_RNA (1)...(19): siRNA sense strand
ucauugcugugauuguuau

SEQ ID NO: 1291206 - RNA, 19 nt, Homo sapiens
  misc_RNA (1)...(19): siRNA sense strand
ucagaugcacuuuauuugu

SEQ ID NO: 1291207 - RNA, 19 nt, Homo sapiens
  misc_RNA (1)...(19): siRNA sense strand
gugcugcuccagaguguaa

SEQ ID NO: 1291208 - RNA, 19 nt, Homo sapiens
  misc_RNA (1)...(19): siRNA sense strand
ggaaaacacaccuuuagug

SEQ ID NO: 1291209 - RNA, 19 nt, Homo sapiens
  misc_RNA (1)...(19): siRNA sense strand
aaggaucaguagcaauuug

SEQ ID NO: 1291210 - RNA, 19 nt, Homo sapiens
  misc_RNA (1)...(19): siRNA sense strand
uauauacgggauccuuuaa

SEQ ID NO: 1291211 - RNA, 19 nt, Homo sapiens
  misc_RNA (1)...(19): siRNA sense strand
ugaaguagaaguauuugag

SEQ ID NO: 1291212 - RNA, 19 nt, Homo sapiens
  misc_RNA (1)...(19): siRNA sense strand
cuugacaguuuggauguuu

SEQ ID NO: 1291213 - RNA, 19 nt, Homo sapiens
  misc_RNA (1)...(19): siRNA sense strand
cauauauacgggauccuuu

SEQ ID NO: 1291214 - RNA, 19 nt, Homo sapiens
  misc_RNA (1)...(19): siRNA sense strand
auauauacgggauccuuua

SEQ ID NO: 1291215 - RNA, 19 nt, Homo sapiens
  misc_RNA (1)...(19): siRNA sense strand
cuuaaaggaucaguagcaa

SEQ ID NO: 1291216 - RNA, 19 nt, Homo sapiens
  misc_RNA (1)...(19): siRNA sense strand
uaaaccugaggaaggaaua

SEQ ID NO: 1291217 - RNA, 19 nt, Homo sapiens
  misc_RNA (1)...(19): siRNA sense strand
agaugacgccuguuauaga

SEQ ID NO: 1291218 - RNA, 19 nt, Homo sapiens
  misc_RNA (1)...(19): siRNA sense strand
ugugauuguuauugccaua

SEQ ID NO: 1291219 - RNA, 19 nt, Homo sapiens
  misc_RNA (1)...(19): siRNA sense strand
gagagcacgauuuauugug

SEQ ID NO: 1291220 - RNA, 19 nt, Homo sapiens
  misc_RNA (1)...(19): siRNA sense strand
gaaguauuugaguaucuug

SEQ ID NO: 1291221 - RNA, 19 nt, Homo sapiens
  misc_RNA (1)...(19): siRNA sense strand
ggcuaccugucucagauga

SEQ ID NO: 1291222 - RNA, 19 nt, Homo sapiens
  misc_RNA (1)...(19): siRNA sense strand
gauaucaggauuuggaaaa

SEQ ID NO: 1291223 - RNA, 19 nt, Homo sapiens
  misc_RNA (1)...(19): siRNA sense strand
ccucuugccacccauacua

SEQ ID NO: 1291224 - RNA, 19 nt, Homo sapiens
  misc_RNA (1)...(19): siRNA sense strand
ccaugguguugcugcugua

SEQ ID NO: 1291225 - RNA, 19 nt, Homo sapiens
  misc_RNA (1)...(19): siRNA sense strand
cagaugacgccuguuauag

SEQ ID NO: 1291226 - RNA, 19 nt, Homo sapiens
  misc_RNA (1)...(19): siRNA sense strand
cagaugguggagcugaaua

SEQ ID NO: 1291227 - RNA, 19 nt, Homo sapiens
  misc_RNA (1)...(19): siRNA sense strand
gucauugcugugauuguua

SEQ ID NO: 1291228 - RNA, 19 nt, Homo sapiens
  misc_RNA (1)...(19): siRNA sense strand
ggagccaccaacauuugaa

SEQ ID NO: 1291229 - RNA, 19 nt, Homo sapiens
  misc_RNA (1)...(19): siRNA sense strand
uuggugaacgaguagauua

SEQ ID NO: 1291230 - RNA, 19 nt, Homo sapiens
  misc_RNA (1)...(19): siRNA sense strand
gcgcuuuccuggguugcuu

SEQ ID NO: 1291231 - RNA, 19 nt, Homo sapiens
  misc_RNA (1)...(19): siRNA sense strand
uacuacaaagcaacaguua

SEQ ID NO: 1291232 - RNA, 19 nt, Homo sapiens
  misc_RNA (1)...(19): siRNA sense strand
cuugaugcaguaacuuaua

SEQ ID NO: 1291233 - RNA, 19 nt, Homo sapiens
  misc_RNA (1)...(19): siRNA sense strand
aaacauguccauauauacg

SEQ ID NO: 1291234 - RNA, 19 nt, Homo sapiens
  misc_RNA (1)...(19): siRNA sense strand
guguaaaguggucaaaugu

SEQ ID NO: 1291235 - RNA, 19 nt, Homo sapiens
  misc_RNA (1)...(19): siRNA sense strand
cuuacgaguuugguuauca

SEQ ID NO: 1291236 - RNA, 19 nt, Homo sapiens
  misc_RNA (1)...(19): siRNA sense strand
uacgggauccuuuaaaugg

SEQ ID NO: 1291237 - RNA, 19 nt, Homo sapiens
  misc_RNA (1)...(19): siRNA sense strand
gcagaugguggagcugaau

SEQ ID NO: 1291238 - RNA, 19 nt, Homo sapiens
  misc_RNA (1)...(19): siRNA sense strand
aaccaaaacccuacuauga

SEQ ID NO: 1291239 - RNA, 19 nt, Homo sapiens
  misc_RNA (1)...(19): siRNA sense strand
uugaugcaguaacuuauag

SEQ ID NO: 1291240 - RNA, 19 nt, Homo sapiens
  misc_RNA (1)...(19): siRNA sense strand
ggagcugaauaugccacuu

SEQ ID NO: 1291241 - RNA, 19 nt, Homo sapiens
  misc_RNA (1)...(19): siRNA sense strand
cgauggcagcgacacaauu

SEQ ID NO: 1291242 - RNA, 19 nt, Homo sapiens
  misc_RNA (1)...(19): siRNA sense strand
gauccauuuucacuuauug

SEQ ID NO: 1291243 - RNA, 19 nt, Homo sapiens
  misc_RNA (1)...(19): siRNA sense strand
ggagagagcacgauuuauu

SEQ ID NO: 1291244 - RNA, 19 nt, Homo sapiens
  misc_RNA (1)...(19): siRNA sense strand
agagaaacauguccauaua

SEQ ID NO: 1291245 - RNA, 19 nt, Homo sapiens
  misc_RNA (1)...(19): siRNA sense strand
cagaugcacuuuauuugua

SEQ ID NO: 1291246 - RNA, 19 nt, Homo sapiens
  misc_RNA (1)...(19): siRNA sense strand
ggacuuacgaguuugguua

SEQ ID NO: 1291247 - RNA, 19 nt, Homo sapiens
  misc_RNA (1)...(19): siRNA sense strand
aaacagauaucaggauuug

SEQ ID NO: 1291248 - RNA, 19 nt, Homo sapiens
  misc_RNA (1)...(19): siRNA sense strand
cuauggagcucauugguaa

SEQ ID NO: 1291249 - RNA, 19 nt, Homo sapiens
  misc_RNA (1)...(19): siRNA sense strand
aaacacaccuuuagugaag

SEQ ID NO: 1291250 - RNA, 19 nt, Homo sapiens
  misc_RNA (1)...(19): siRNA sense strand
gaacuuaaaggaucaguag

SEQ ID NO: 1291251 - RNA, 19 nt, Homo sapiens
  misc_RNA (1)...(19): siRNA sense strand
gaaaacagauaucaggauu

SEQ ID NO: 1291252 - RNA, 19 nt, Homo sapiens
  misc_RNA (1)...(19): siRNA sense strand
uaaaggaucaguagcaauu

SEQ ID NO: 1291253 - RNA, 19 nt, Homo sapiens
  misc_RNA (1)...(19): siRNA sense strand
aaaugggacuuacgaguuu

SEQ ID NO: 1291254 - RNA, 19 nt, Homo sapiens
  misc_RNA (1)...(19): siRNA sense strand
guuaucagaugcacuuuau

SEQ ID NO: 1291255 - RNA, 19 nt, Homo sapiens
  misc_RNA (1)...(19): siRNA sense strand
gagcugaauaugccacuua

SEQ ID NO: 1291256 - RNA, 19 nt, Homo sapiens
  misc_RNA (1)...(19): siRNA sense strand
ugagauuggugaacgagua

SEQ ID NO: 1291257 - RNA, 19 nt, Homo sapiens
  misc_RNA (1)...(19): siRNA sense strand
gugaacgaguagauuauaa

SEQ ID NO: 1291258 - RNA, 19 nt, Homo sapiens
  misc_RNA (1)...(19): siRNA sense strand
gagagagcacgauuuauug

SEQ ID NO: 1291259 - RNA, 19 nt, Homo sapiens
  misc_RNA (1)...(19): siRNA sense strand
caaaugggacuuacgaguu

SEQ ID NO: 1291260 - RNA, 19 nt, Homo sapiens
  misc_RNA (1)...(19): siRNA sense strand
ggucauugcugugauuguu

SEQ ID NO: 1291261 - RNA, 19 nt, Homo sapiens
  misc_RNA (1)...(19): siRNA sense strand
ccagauccauuuucacuua

SEQ ID NO: 1291262 - RNA, 19 nt, Homo sapiens
  misc_RNA (1)...(19): siRNA sense strand
gaaggaauacuugacaguu

SEQ ID NO: 1291263 - RNA, 19 nt, Homo sapiens
  misc_RNA (1)...(19): siRNA sense strand
aaggaauacuugacaguuu

SEQ ID NO: 1291264 - RNA, 19 nt, Homo sapiens
  misc_RNA (1)...(19): siRNA sense strand
ucagaugacgccuguuaua

SEQ ID NO: 1291265 - RNA, 19 nt, Homo sapiens
  misc_RNA (1)...(19): siRNA sense strand
gaaaacacaccuuuaguga

SEQ ID NO: 1291266 - RNA, 19 nt, Homo sapiens
  misc_RNA (1)...(19): siRNA sense strand
gaugacgccuguuauagag

SEQ ID NO: 1291267 - RNA, 19 nt, Homo sapiens
  misc_RNA (1)...(19): siRNA sense strand
gagaaacauguccauauau

SEQ ID NO: 1291268 - RNA, 19 nt, Homo sapiens
  misc_RNA (1)...(19): siRNA sense strand
ccacuuaccagacuaaauc

SEQ ID NO: 1291269 - RNA, 19 nt, Homo sapiens
  misc_RNA (1)...(19): siRNA sense strand
acgaguagauuauaagugu

SEQ ID NO: 1291270 - RNA, 19 nt, Homo sapiens
  misc_RNA (1)...(19): siRNA sense strand
cuacaaagcaacaguuaug

SEQ ID NO: 1291271 - RNA, 19 nt, Homo sapiens
  misc_RNA (1)...(19): siRNA sense strand
ccaccaacauuugaagcua

SEQ ID NO: 1291272 - RNA, 19 nt, Homo sapiens
  misc_RNA (1)...(19): siRNA sense strand
uauacgggauccuuuaaau

SEQ ID NO: 1291273 - RNA, 19 nt, Homo sapiens
  misc_RNA (1)...(19): siRNA sense strand
cgaguuugguuaucagaug

SEQ ID NO: 1291274 - RNA, 19 nt, Homo sapiens
  misc_RNA (1)...(19): siRNA sense strand
gaacgaguagauuauaagu

SEQ ID NO: 1291275 - RNA, 19 nt, Homo sapiens
  misc_RNA (1)...(19): siRNA sense strand
gugaggagccaccaacauu

SEQ ID NO: 1291276 - RNA, 19 nt, Homo sapiens
  misc_RNA (1)...(19): siRNA sense strand
gauggcagcgacacaauug

SEQ ID NO: 1291277 - RNA, 19 nt, Homo sapiens
  misc_RNA (1)...(19): siRNA sense strand
ucucagaugacgccuguua

SEQ ID NO: 1291278 - RNA, 19 nt, Homo sapiens
  misc_RNA (1)...(19): siRNA sense strand
gaggagccaccaacauuug

SEQ ID NO: 1291279 - RNA, 19 nt, Homo sapiens
  misc_RNA (1)...(19): siRNA sense strand
gcuauggagcucauuggua

SEQ ID NO: 1291280 - RNA, 19 nt, Homo sapiens
  misc_RNA (1)...(19): siRNA sense strand
acacaccuuuagugaagua

SEQ ID NO: 1291281 - RNA, 19 nt, Homo sapiens
  misc_RNA (1)...(19): siRNA sense strand
uagagaaacauguccauau

SEQ ID NO: 1291282 - RNA, 19 nt, Homo sapiens
  misc_RNA (1)...(19): siRNA sense strand
guuccaaagugucuuaaag

SEQ ID NO: 1291283 - RNA, 19 nt, Homo sapiens
  misc_RNA (1)...(19): siRNA sense strand
ggugaacgaguagauuaua

SEQ ID NO: 1291284 - RNA, 19 nt, Homo sapiens
  misc_RNA (1)...(19): siRNA sense strand
gaaguagaaguauuugagu

SEQ ID NO: 1291285 - RNA, 19 nt, Homo sapiens
  misc_RNA (1)...(19): siRNA sense strand
gaaacauguccauauauac

SEQ ID NO: 1291286 - RNA, 19 nt, Homo sapiens
  misc_RNA (1)...(19): siRNA sense strand
ugacgccuguuauagagaa

SEQ ID NO: 1291287 - RNA, 19 nt, Homo sapiens
  misc_RNA (1)...(19): siRNA sense strand
cgaguagauuauaagugua

SEQ ID NO: 1291288 - RNA, 19 nt, Homo sapiens
  misc_RNA (1)...(19): siRNA sense strand
gcacuuuauuuguaaugag

SEQ ID NO: 1291289 - RNA, 19 nt, Homo sapiens
  misc_RNA (1)...(19): siRNA sense strand
guagaaguauuugaguauc

SEQ ID NO: 1291290 - RNA, 19 nt, Homo sapiens
  misc_RNA (1)...(19): siRNA sense strand
guauuugaguaucuugaug

SEQ ID NO: 1291291 - RNA, 19 nt, Homo sapiens
  misc_RNA (1)...(19): siRNA sense strand
aggaauacuugacaguuug

SEQ ID NO: 1291292 - RNA, 19 nt, Homo sapiens
  misc_RNA (1)...(19): siRNA sense strand
ccaaaacccuacuaugaga

SEQ ID NO: 1291293 - RNA, 19 nt, Homo sapiens
  misc_RNA (1)...(19): siRNA sense strand
aguguaaaguggucaaaug

SEQ ID NO: 1291294 - RNA, 19 nt, Homo sapiens
  misc_RNA (1)...(19): siRNA sense strand
ccacccauacuauuuguga

SEQ ID NO: 1291295 - RNA, 19 nt, Homo sapiens
  misc_RNA (1)...(19): siRNA sense strand
uuggagagagcacgauuua

SEQ ID NO: 1291296 - RNA, 19 nt, Homo sapiens
  misc_RNA (1)...(19): siRNA sense strand
gguuaucagaugcacuuua

SEQ ID NO: 1291297 - RNA, 19 nt, Homo sapiens
  misc_RNA (1)...(19): siRNA sense strand
caccaacauuugaagcuau

SEQ ID NO: 1291298 - RNA, 19 nt, Homo sapiens
  misc_RNA (1)...(19): siRNA sense strand
ugaggagccaccaacauuu

SEQ ID NO: 1291299 - RNA, 19 nt, Homo sapiens
  misc_RNA (1)...(19): siRNA sense strand
ggaaggaauacuugacagu

SEQ ID NO: 1291300 - RNA, 19 nt, Homo sapiens
  misc_RNA (1)...(19): siRNA sense strand
gaggaaggaauacuugaca

SEQ ID NO: 1291301 - RNA, 19 nt, Homo sapiens
  misc_RNA (1)...(19): siRNA sense strand
ccaguuccaaagugucuua

SEQ ID NO: 1291302 - RNA, 19 nt, Homo sapiens
  misc_RNA (1)...(19): siRNA sense strand
ugaguaucuugaugcagua

SEQ ID NO: 1291303 - RNA, 19 nt, Homo sapiens
  misc_RNA (1)...(19): siRNA sense strand
caccuuuagugaaguagaa

SEQ ID NO: 1291304 - RNA, 19 nt, Homo sapiens
  misc_RNA (1)...(19): siRNA sense strand
acagauaucaggauuugga

SEQ ID NO: 1291305 - RNA, 19 nt, Homo sapiens
  misc_RNA (1)...(19): siRNA sense strand
ucauugcugugauuguuau

SEQ ID NO: 1291306 - RNA, 19 nt, Homo sapiens
  misc_RNA (1)...(19): siRNA sense strand
ucagaugcacuuuauuugu

SEQ ID NO: 1291307 - RNA, 19 nt, Homo sapiens
  misc_RNA (1)...(19): siRNA sense strand
gugcugcuccagaguguaa

SEQ ID NO: 1291308 - RNA, 19 nt, Homo sapiens
  misc_RNA (1)...(19): siRNA sense strand
ggaaaacacaccuuuagug

SEQ ID NO: 1291309 - RNA, 19 nt, Homo sapiens
  misc_RNA (1)...(19): siRNA sense strand
aaggaucaguagcaauuug

SEQ ID NO: 1291310 - RNA, 19 nt, Homo sapiens
  misc_RNA (1)...(19): siRNA sense strand
uauauacgggauccuuuaa

SEQ ID NO: 1291311 - RNA, 19 nt, Homo sapiens
  misc_RNA (1)...(19): siRNA sense strand
ugaaguagaaguauuugag

SEQ ID NO: 1291312 - RNA, 19 nt, Homo sapiens
  misc_RNA (1)...(19): siRNA sense strand
cuugacaguuuggauguuu

SEQ ID NO: 1291313 - RNA, 19 nt, Homo sapiens
  misc_RNA (1)...(19): siRNA sense strand
cauauauacgggauccuuu

SEQ ID NO: 1291314 - RNA, 19 nt, Homo sapiens
  misc_RNA (1)...(19): siRNA sense strand
auauauacgggauccuuua

SEQ ID NO: 1291315 - RNA, 19 nt, Homo sapiens
  misc_RNA (1)...(19): siRNA sense strand
cuuaaaggaucaguagcaa

SEQ ID NO: 1291316 - RNA, 19 nt, Homo sapiens
  misc_RNA (1)...(19): siRNA sense strand
uaaaccugaggaaggaaua

SEQ ID NO: 1291317 - RNA, 19 nt, Homo sapiens
  misc_RNA (1)...(19): siRNA sense strand
agaugacgccuguuauaga

SEQ ID NO: 1291318 - RNA, 19 nt, Homo sapiens
  misc_RNA (1)...(19): siRNA sense strand
ugugauuguuauugccaua

SEQ ID NO: 1291319 - RNA, 19 nt, Homo sapiens
  misc_RNA (1)...(19): siRNA sense strand
gagagcacgauuuauugug

SEQ ID NO: 1291320 - RNA, 19 nt, Homo sapiens
  misc_RNA (1)...(19): siRNA sense strand
gaaguauuugaguaucuug

SEQ ID NO: 1291321 - RNA, 19 nt, Homo sapiens
  misc_RNA (1)...(19): siRNA sense strand
ggcuaccugucucagauga

SEQ ID NO: 1291322 - RNA, 19 nt, Homo sapiens
  misc_RNA (1)...(19): siRNA sense strand
gauaucaggauuuggaaaa

SEQ ID NO: 1291323 - RNA, 19 nt, Homo sapiens
  misc_RNA (1)...(19): siRNA sense strand
ccucuugccacccauacua

SEQ ID NO: 1291324 - RNA, 19 nt, Homo sapiens
  misc_RNA (1)...(19): siRNA sense strand
ccaugguguugcugcugua

SEQ ID NO: 1291325 - RNA, 19 nt, Homo sapiens
  misc_RNA (1)...(19): siRNA sense strand
cagaugacgccuguuauag

SEQ ID NO: 1291326 - RNA, 19 nt, Homo sapiens
  misc_RNA (1)...(19): siRNA sense strand
cagaugguggagcugaaua

SEQ ID NO: 1291327 - RNA, 19 nt, Homo sapiens
  misc_RNA (1)...(19): siRNA sense strand
gucauugcugugauuguua

SEQ ID NO: 1291328 - RNA, 19 nt, Homo sapiens
  misc_RNA (1)...(19): siRNA sense strand
ggagccaccaacauuugaa

SEQ ID NO: 1291329 - RNA, 19 nt, Homo sapiens
  misc_RNA (1)...(19): siRNA sense strand
uuggugaacgaguagauua

SEQ ID NO: 1291330 - RNA, 19 nt, Homo sapiens
  misc_RNA (1)...(19): siRNA sense strand
gcgcuuuccuggguugcuu

SEQ ID NO: 1291331 - RNA, 19 nt, Homo sapiens
  misc_RNA (1)...(19): siRNA sense strand
uacuacaaagcaacaguua

SEQ ID NO: 1291332 - RNA, 19 nt, Homo sapiens
  misc_RNA (1)...(19): siRNA sense strand
cuugaugcaguaacuuaua

SEQ ID NO: 1291333 - RNA, 19 nt, Homo sapiens
  misc_RNA (1)...(19): siRNA sense strand
aaacauguccauauauacg

SEQ ID NO: 1291334 - RNA, 19 nt, Homo sapiens
  misc_RNA (1)...(19): siRNA sense strand
guguaaaguggucaaaugu

SEQ ID NO: 1291335 - RNA, 19 nt, Homo sapiens
  misc_RNA (1)...(19): siRNA sense strand
cuuacgaguuugguuauca

SEQ ID NO: 1291336 - RNA, 19 nt, Homo sapiens
  misc_RNA (1)...(19): siRNA sense strand
uacgggauccuuuaaaugg

SEQ ID NO: 1291337 - RNA, 19 nt, Homo sapiens
  misc_RNA (1)...(19): siRNA sense strand
gcagaugguggagcugaau

SEQ ID NO: 1291338 - RNA, 19 nt, Homo sapiens
  misc_RNA (1)...(19): siRNA sense strand
aaccaaaacccuacuauga

SEQ ID NO: 1291339 - RNA, 19 nt, Homo sapiens
  misc_RNA (1)...(19): siRNA sense strand
uugaugcaguaacuuauag

SEQ ID NO: 1291340 - RNA, 19 nt, Homo sapiens
  misc_RNA (1)...(19): siRNA sense strand
ggagcugaauaugccacuu

SEQ ID NO: 1291341 - RNA, 19 nt, Homo sapiens
  misc_RNA (1)...(19): siRNA sense strand
cgauggcagcgacacaauu

SEQ ID NO: 1291342 - RNA, 19 nt, Homo sapiens
  misc_RNA (1)...(19): siRNA sense strand
gauccauuuucacuuauug

SEQ ID NO: 1291343 - RNA, 19 nt, Homo sapiens
  misc_RNA (1)...(19): siRNA sense strand
ggagagagcacgauuuauu

SEQ ID NO: 1291344 - RNA, 19 nt, Homo sapiens
  misc_RNA (1)...(19): siRNA sense strand
agagaaacauguccauaua

SEQ ID NO: 1291345 - RNA, 19 nt, Homo sapiens
  misc_RNA (1)...(19): siRNA sense strand
cagaugcacuuuauuugua

SEQ ID NO: 1291346 - RNA, 19 nt, Homo sapiens
  misc_RNA (1)...(19): siRNA sense strand
ggacuuacgaguuugguua

SEQ ID NO: 1291347 - RNA, 19 nt, Homo sapiens
  misc_RNA (1)...(19): siRNA sense strand
aaacagauaucaggauuug

SEQ ID NO: 1291348 - RNA, 19 nt, Homo sapiens
  misc_RNA (1)...(19): siRNA sense strand
cuauggagcucauugguaa

SEQ ID NO: 1291349 - RNA, 19 nt, Homo sapiens
  misc_RNA (1)...(19): siRNA sense strand
aaacacaccuuuagugaag

SEQ ID NO: 1291350 - RNA, 19 nt, Homo sapiens
  misc_RNA (1)...(19): siRNA sense strand
gaacuuaaaggaucaguag

SEQ ID NO: 1291351 - RNA, 19 nt, Homo sapiens
  misc_RNA (1)...(19): siRNA sense strand
gaaaacagauaucaggauu

SEQ ID NO: 1291352 - RNA, 19 nt, Homo sapiens
  misc_RNA (1)...(19): siRNA sense strand
uaaaggaucaguagcaauu

SEQ ID NO: 1291353 - RNA, 19 nt, Homo sapiens
  misc_RNA (1)...(19): siRNA sense strand
aaaugggacuuacgaguuu

SEQ ID NO: 1291354 - RNA, 19 nt, Homo sapiens
  misc_RNA (1)...(19): siRNA sense strand
guuaucagaugcacuuuau

SEQ ID NO: 1291355 - RNA, 19 nt, Homo sapiens
  misc_RNA (1)...(19): siRNA sense strand
gagcugaauaugccacuua

SEQ ID NO: 1291356 - RNA, 19 nt, Homo sapiens
  misc_RNA (1)...(19): siRNA sense strand
ugagauuggugaacgagua

SEQ ID NO: 1291357 - RNA, 19 nt, Homo sapiens
  misc_RNA (1)...(19): siRNA sense strand
gugaacgaguagauuauaa

SEQ ID NO: 1291358 - RNA, 19 nt, Homo sapiens
  misc_RNA (1)...(19): siRNA sense strand
gagagagcacgauuuauug

SEQ ID NO: 1291359 - RNA, 19 nt, Homo sapiens
  misc_RNA (1)...(19): siRNA sense strand
caaaugggacuuacgaguu

SEQ ID NO: 1291360 - RNA, 19 nt, Homo sapiens
  misc_RNA (1)...(19): siRNA sense strand
ggucauugcugugauuguu

SEQ ID NO: 1291361 - RNA, 19 nt, Homo sapiens
  misc_RNA (1)...(19): siRNA sense strand
ccagauccauuuucacuua

SEQ ID NO: 1291362 - RNA, 19 nt, Homo sapiens
  misc_RNA (1)...(19): siRNA sense strand
gaaggaauacuugacaguu

SEQ ID NO: 1291363 - RNA, 19 nt, Homo sapiens
  misc_RNA (1)...(19): siRNA sense strand
aaggaauacuugacaguuu

SEQ ID NO: 1291364 - RNA, 19 nt, Homo sapiens
  misc_RNA (1)...(19): siRNA sense strand
ucagaugacgccuguuaua

SEQ ID NO: 1291365 - RNA, 19 nt, Homo sapiens
  misc_RNA (1)...(19): siRNA sense strand
gaaaacacaccuuuaguga

SEQ ID NO: 1291366 - RNA, 19 nt, Homo sapiens
  misc_RNA (1)...(19): siRNA sense strand
gaugacgccuguuauagag

SEQ ID NO: 1291367 - RNA, 19 nt, Homo sapiens
  misc_RNA (1)...(19): siRNA sense strand
gagaaacauguccauauau

SEQ ID NO: 1291368 - RNA, 19 nt, Homo sapiens
  misc_RNA (1)...(19): siRNA sense strand
ccacuuaccagacuaaauc

SEQ ID NO: 1291369 - RNA, 19 nt, Homo sapiens
  misc_RNA (1)...(19): siRNA sense strand
acgaguagauuauaagugu

SEQ ID NO: 1291370 - RNA, 19 nt, Homo sapiens
  misc_RNA (1)...(19): siRNA sense strand
cuacaaagcaacaguuaug

SEQ ID NO: 1291371 - RNA, 19 nt, Homo sapiens
  misc_RNA (1)...(19): siRNA sense strand
ccaccaacauuugaagcua

SEQ ID NO: 1291372 - RNA, 19 nt, Homo sapiens
  misc_RNA (1)...(19): siRNA sense strand
uauacgggauccuuuaaau

SEQ ID NO: 1291373 - RNA, 19 nt, Homo sapiens
  misc_RNA (1)...(19): siRNA sense strand
cgaguuugguuaucagaug

SEQ ID NO: 1291374 - RNA, 19 nt, Homo sapiens
  misc_RNA (1)...(19): siRNA sense strand
gaacgaguagauuauaagu

SEQ ID NO: 1291375 - RNA, 19 nt, Homo sapiens
  misc_RNA (1)...(19): siRNA sense strand
gugaggagccaccaacauu

SEQ ID NO: 1291376 - RNA, 19 nt, Homo sapiens
  misc_RNA (1)...(19): siRNA sense strand
gauggcagcgacacaauug

SEQ ID NO: 1291377 - RNA, 19 nt, Homo sapiens
  misc_RNA (1)...(19): siRNA sense strand
ucucagaugacgccuguua

SEQ ID NO: 1291378 - RNA, 19 nt, Homo sapiens
  misc_RNA (1)...(19): siRNA sense strand
gaggagccaccaacauuug

SEQ ID NO: 1291379 - RNA, 19 nt, Homo sapiens
  misc_RNA (1)...(19): siRNA sense strand
gcuauggagcucauuggua

SEQ ID NO: 1291380 - RNA, 19 nt, Homo sapiens
  misc_RNA (1)...(19): siRNA sense strand
acacaccuuuagugaagua

SEQ ID NO: 1291381 - RNA, 19 nt, Homo sapiens
  misc_RNA (1)...(19): siRNA sense strand
uagagaaacauguccauau

SEQ ID NO: 1291382 - RNA, 19 nt, Homo sapiens
  misc_RNA (1)...(19): siRNA sense strand
guuccaaagugucuuaaag

SEQ ID NO: 1291383 - RNA, 19 nt, Homo sapiens
  misc_RNA (1)...(19): siRNA sense strand
ggugaacgaguagauuaua

SEQ ID NO: 1291384 - RNA, 19 nt, Homo sapiens
  misc_RNA (1)...(19): siRNA sense strand
gaaguagaaguauuugagu

SEQ ID NO: 1291385 - RNA, 19 nt, Homo sapiens
  misc_RNA (1)...(19): siRNA sense strand
gaaacauguccauauauac

SEQ ID NO: 1291386 - RNA, 19 nt, Homo sapiens
  misc_RNA (1)...(19): siRNA sense strand
ugacgccuguuauagagaa

SEQ ID NO: 1291387 - RNA, 19 nt, Homo sapiens
  misc_RNA (1)...(19): siRNA sense strand
cgaguagauuauaagugua

SEQ ID NO: 1291388 - RNA, 19 nt, Homo sapiens
  misc_RNA (1)...(19): siRNA sense strand
gcacuuuauuuguaaugag

SEQ ID NO: 1291389 - RNA, 19 nt, Homo sapiens
  misc_RNA (1)...(19): siRNA sense strand
guagaaguauuugaguauc

SEQ ID NO: 1291390 - RNA, 19 nt, Homo sapiens
  misc_RNA (1)...(19): siRNA sense strand
guauuugaguaucuugaug

SEQ ID NO: 1291391 - RNA, 19 nt, Homo sapiens
  misc_RNA (1)...(19): siRNA sense strand
aggaauacuugacaguuug

SEQ ID NO: 1291392 - RNA, 19 nt, Homo sapiens
  misc_RNA (1)...(19): siRNA sense strand
ccaaaacccuacuaugaga

SEQ ID NO: 1291393 - RNA, 19 nt, Homo sapiens
  misc_RNA (1)...(19): siRNA sense strand
aguguaaaguggucaaaug

SEQ ID NO: 1291394 - RNA, 19 nt, Homo sapiens
  misc_RNA (1)...(19): siRNA sense strand
ccacccauacuauuuguga

SEQ ID NO: 1291395 - RNA, 19 nt, Homo sapiens
  misc_RNA (1)...(19): siRNA sense strand
uuggagagagcacgauuua

SEQ ID NO: 1291396 - RNA, 19 nt, Homo sapiens
  misc_RNA (1)...(19): siRNA sense strand
gguuaucagaugcacuuua

SEQ ID NO: 1291397 - RNA, 19 nt, Homo sapiens
  misc_RNA (1)...(19): siRNA sense strand
caccaacauuugaagcuau

SEQ ID NO: 1291398 - RNA, 19 nt, Homo sapiens
  misc_RNA (1)...(19): siRNA sense strand
ugaggagccaccaacauuu

SEQ ID NO: 1291399 - RNA, 19 nt, Homo sapiens
  misc_RNA (1)...(19): siRNA sense strand
ggaaggaauacuugacagu

SEQ ID NO: 1291400 - RNA, 19 nt, Homo sapiens
  misc_RNA (1)...(19): siRNA sense strand
gaggaaggaauacuugaca

SEQ ID NO: 1291401 - RNA, 19 nt, Homo sapiens
  misc_RNA (1)...(19): siRNA sense strand
ccaguuccaaagugucuua

SEQ ID NO: 1291402 - RNA, 19 nt, Homo sapiens
  misc_RNA (1)...(19): siRNA sense strand
ugaguaucuugaugcagua

SEQ ID NO: 1291403 - RNA, 19 nt, Homo sapiens
  misc_RNA (1)...(19): siRNA sense strand
caccuuuagugaaguagaa

SEQ ID NO: 1291404 - RNA, 19 nt, Homo sapiens
  misc_RNA (1)...(19): siRNA sense strand
acagauaucaggauuugga

SEQ ID NO: 1291405 - RNA, 19 nt, Homo sapiens
  misc_RNA (1)...(19): siRNA sense strand
ucauugcugugauuguuau

SEQ ID NO: 1291406 - RNA, 19 nt, Homo sapiens
  misc_RNA (1)...(19): siRNA sense strand
ucagaugcacuuuauuugu

SEQ ID NO: 1291407 - RNA, 19 nt, Homo sapiens
  misc_RNA (1)...(19): siRNA sense strand
gugcugcuccagaguguaa

SEQ ID NO: 1291408 - RNA, 19 nt, Homo sapiens
  misc_RNA (1)...(19): siRNA sense strand
ggaaaacacaccuuuagug

SEQ ID NO: 1291409 - RNA, 19 nt, Homo sapiens
  misc_RNA (1)...(19): siRNA sense strand
aaggaucaguagcaauuug

SEQ ID NO: 1291410 - RNA, 19 nt, Homo sapiens
  misc_RNA (1)...(19): siRNA sense strand
uauauacgggauccuuuaa

SEQ ID NO: 1291411 - RNA, 19 nt, Homo sapiens
  misc_RNA (1)...(19): siRNA sense strand
ugaaguagaaguauuugag

SEQ ID NO: 1291412 - RNA, 19 nt, Homo sapiens
  misc_RNA (1)...(19): siRNA sense strand
cuugacaguuuggauguuu

SEQ ID NO: 1291413 - RNA, 19 nt, Homo sapiens
  misc_RNA (1)...(19): siRNA sense strand
cauauauacgggauccuuu

SEQ ID NO: 1291414 - RNA, 19 nt, Homo sapiens
  misc_RNA (1)...(19): siRNA sense strand
auauauacgggauccuuua

SEQ ID NO: 1291415 - RNA, 19 nt, Homo sapiens
  misc_RNA (1)...(19): siRNA sense strand
cuuaaaggaucaguagcaa

SEQ ID NO: 1291416 - RNA, 19 nt, Homo sapiens
  misc_RNA (1)...(19): siRNA sense strand
uaaaccugaggaaggaaua

SEQ ID NO: 1291417 - RNA, 19 nt, Homo sapiens
  misc_RNA (1)...(19): siRNA sense strand
agaugacgccuguuauaga

SEQ ID NO: 1291418 - RNA, 19 nt, Homo sapiens
  misc_RNA (1)...(19): siRNA sense strand
ugugauuguuauugccaua

SEQ ID NO: 1291419 - RNA, 19 nt, Homo sapiens
  misc_RNA (1)...(19): siRNA sense strand
gagagcacgauuuauugug

SEQ ID NO: 1291420 - RNA, 19 nt, Homo sapiens
  misc_RNA (1)...(19): siRNA sense strand
gaaguauuugaguaucuug

SEQ ID NO: 1291421 - RNA, 19 nt, Homo sapiens
  misc_RNA (1)...(19): siRNA sense strand
ggcuaccugucucagauga

SEQ ID NO: 1291422 - RNA, 19 nt, Homo sapiens
  misc_RNA (1)...(19): siRNA sense strand
gauaucaggauuuggaaaa

SEQ ID NO: 1291423 - RNA, 19 nt, Homo sapiens
  misc_RNA (1)...(19): siRNA sense strand
ccucuugccacccauacua

SEQ ID NO: 1291424 - RNA, 19 nt, Homo sapiens
  misc_RNA (1)...(19): siRNA sense strand
ccaugguguugcugcugua

SEQ ID NO: 1291425 - RNA, 19 nt, Homo sapiens
  misc_RNA (1)...(19): siRNA sense strand
cagaugacgccuguuauag

SEQ ID NO: 1291426 - RNA, 19 nt, Homo sapiens
  misc_RNA (1)...(19): siRNA sense strand
cagaugguggagcugaaua

SEQ ID NO: 1291427 - RNA, 19 nt, Homo sapiens
  misc_RNA (1)...(19): siRNA sense strand
gucauugcugugauuguua

SEQ ID NO: 1291428 - RNA, 19 nt, Homo sapiens
  misc_RNA (1)...(19): siRNA sense strand
ggagccaccaacauuugaa

SEQ ID NO: 1291429 - RNA, 19 nt, Homo sapiens
  misc_RNA (1)...(19): siRNA sense strand
uuggugaacgaguagauua

SEQ ID NO: 1291430 - RNA, 19 nt, Homo sapiens
  misc_RNA (1)...(19): siRNA sense strand
gcgcuuuccuggguugcuu

SEQ ID NO: 1291431 - RNA, 19 nt, Homo sapiens
  misc_RNA (1)...(19): siRNA sense strand
uacuacaaagcaacaguua

SEQ ID NO: 1291432 - RNA, 19 nt, Homo sapiens
  misc_RNA (1)...(19): siRNA sense strand
cuugaugcaguaacuuaua

SEQ ID NO: 1291433 - RNA, 19 nt, Homo sapiens
  misc_RNA (1)...(19): siRNA sense strand
aaacauguccauauauacg

SEQ ID NO: 1291434 - RNA, 19 nt, Homo sapiens
  misc_RNA (1)...(19): siRNA sense strand
guguaaaguggucaaaugu

SEQ ID NO: 1291435 - RNA, 19 nt, Homo sapiens
  misc_RNA (1)...(19): siRNA sense strand
cuuacgaguuugguuauca

SEQ ID NO: 1291436 - RNA, 19 nt, Homo sapiens
  misc_RNA (1)...(19): siRNA sense strand
uacgggauccuuuaaaugg

SEQ ID NO: 1291437 - RNA, 19 nt, Homo sapiens
  misc_RNA (1)...(19): siRNA sense strand
gcagaugguggagcugaau

SEQ ID NO: 1291438 - RNA, 19 nt, Homo sapiens
  misc_RNA (1)...(19): siRNA sense strand
aaccaaaacccuacuauga

SEQ ID NO: 1291439 - RNA, 19 nt, Homo sapiens
  misc_RNA (1)...(19): siRNA sense strand
uugaugcaguaacuuauag

SEQ ID NO: 1291440 - RNA, 19 nt, Homo sapiens
  misc_RNA (1)...(19): siRNA sense strand
ggagcugaauaugccacuu

SEQ ID NO: 1291441 - RNA, 19 nt, Homo sapiens
  misc_RNA (1)...(19): siRNA sense strand
cgauggcagcgacacaauu

SEQ ID NO: 1291442 - RNA, 19 nt, Homo sapiens
  misc_RNA (1)...(19): siRNA sense strand
gauccauuuucacuuauug

SEQ ID NO: 1291443 - RNA, 19 nt, Homo sapiens
  misc_RNA (1)...(19): siRNA sense strand
ggagagagcacgauuuauu

SEQ ID NO: 1291444 - RNA, 19 nt, Homo sapiens
  misc_RNA (1)...(19): siRNA sense strand
agagaaacauguccauaua

SEQ ID NO: 1291445 - RNA, 19 nt, Homo sapiens
  misc_RNA (1)...(19): siRNA sense strand
cagaugcacuuuauuugua

SEQ ID NO: 1291446 - RNA, 19 nt, Homo sapiens
  misc_RNA (1)...(19): siRNA sense strand
ggacuuacgaguuugguua

SEQ ID NO: 1291447 - RNA, 19 nt, Homo sapiens
  misc_RNA (1)...(19): siRNA sense strand
aaacagauaucaggauuug

SEQ ID NO: 1291448 - RNA, 19 nt, Homo sapiens
  misc_RNA (1)...(19): siRNA sense strand
cuauggagcucauugguaa

SEQ ID NO: 1291449 - RNA, 19 nt, Homo sapiens
  misc_RNA (1)...(19): siRNA sense strand
aaacacaccuuuagugaag

SEQ ID NO: 1291450 - RNA, 19 nt, Homo sapiens
  misc_RNA (1)...(19): siRNA sense strand
gaacuuaaaggaucaguag

SEQ ID NO: 1291451 - RNA, 19 nt, Homo sapiens
  misc_RNA (1)...(19): siRNA sense strand
gaaaacagauaucaggauu

SEQ ID NO: 1291452 - RNA, 19 nt, Homo sapiens
  misc_RNA (1)...(19): siRNA sense strand
uaaaggaucaguagcaauu

SEQ ID NO: 1291453 - RNA, 19 nt, Homo sapiens
  misc_RNA (1)...(19): siRNA sense strand
aaaugggacuuacgaguuu

SEQ ID NO: 1291454 - RNA, 19 nt, Homo sapiens
  misc_RNA (1)...(19): siRNA sense strand
guuaucagaugcacuuuau

SEQ ID NO: 1291455 - RNA, 19 nt, Homo sapiens
  misc_RNA (1)...(19): siRNA sense strand
ugagauuggugaacgagua

SEQ ID NO: 1291456 - RNA, 19 nt, Homo sapiens
  misc_RNA (1)...(19): siRNA sense strand
gugaacgaguagauuauaa

SEQ ID NO: 1291457 - RNA, 19 nt, Homo sapiens
  misc_RNA (1)...(19): siRNA sense strand
gagagagcacgauuuauug

SEQ ID NO: 1291458 - RNA, 19 nt, Homo sapiens
  misc_RNA (1)...(19): siRNA sense strand
caaaugggacuuacgaguu

SEQ ID NO: 1291459 - RNA, 19 nt, Homo sapiens
  misc_RNA (1)...(19): siRNA sense strand
ggucauugcugugauuguu

SEQ ID NO: 1291460 - RNA, 19 nt, Homo sapiens
  misc_RNA (1)...(19): siRNA sense strand
ccagauccauuuucacuua

SEQ ID NO: 1291461 - RNA, 19 nt, Homo sapiens
  misc_RNA (1)...(19): siRNA sense strand
gaaggaauacuugacaguu

SEQ ID NO: 1291462 - RNA, 19 nt, Homo sapiens
  misc_RNA (1)...(19): siRNA sense strand
aaggaauacuugacaguuu

SEQ ID NO: 1291463 - RNA, 19 nt, Homo sapiens
  misc_RNA (1)...(19): siRNA sense strand
ucagaugacgccuguuaua

SEQ ID NO: 1291464 - RNA, 19 nt, Homo sapiens
  misc_RNA (1)...(19): siRNA sense strand
gaaaacacaccuuuaguga

SEQ ID NO: 1291465 - RNA, 19 nt, Homo sapiens
  misc_RNA (1)...(19): siRNA sense strand
gaugacgccuguuauagag

SEQ ID NO: 1291466 - RNA, 19 nt, Homo sapiens
  misc_RNA (1)...(19): siRNA sense strand
gagaaacauguccauauau

SEQ ID NO: 1291467 - RNA, 19 nt, Homo sapiens
  misc_RNA (1)...(19): siRNA sense strand
acgaguagauuauaagugu

SEQ ID NO: 1291468 - RNA, 19 nt, Homo sapiens
  misc_RNA (1)...(19): siRNA sense strand
cuacaaagcaacaguuaug

SEQ ID NO: 1291469 - RNA, 19 nt, Homo sapiens
  misc_RNA (1)...(19): siRNA sense strand
ccaccaacauuugaagcua

SEQ ID NO: 1291470 - RNA, 19 nt, Homo sapiens
  misc_RNA (1)...(19): siRNA sense strand
uauacgggauccuuuaaau

SEQ ID NO: 1291471 - RNA, 19 nt, Homo sapiens
  misc_RNA (1)...(19): siRNA sense strand
cgaguuugguuaucagaug

SEQ ID NO: 1291472 - RNA, 19 nt, Homo sapiens
  misc_RNA (1)...(19): siRNA sense strand
gaacgaguagauuauaagu

SEQ ID NO: 1291473 - RNA, 19 nt, Homo sapiens
  misc_RNA (1)...(19): siRNA sense strand
gugaggagccaccaacauu

SEQ ID NO: 1291474 - RNA, 19 nt, Homo sapiens
  misc_RNA (1)...(19): siRNA sense strand
gauggcagcgacacaauug

SEQ ID NO: 1291475 - RNA, 19 nt, Homo sapiens
  misc_RNA (1)...(19): siRNA sense strand
gcuauggagcucauuggua

SEQ ID NO: 1291476 - RNA, 19 nt, Homo sapiens
  misc_RNA (1)...(19): siRNA sense strand
gaggagccaccaacauuug

SEQ ID NO: 1291477 - RNA, 19 nt, Homo sapiens
  misc_RNA (1)...(19): siRNA sense strand
acacaccuuuagugaagua

SEQ ID NO: 1291478 - RNA, 19 nt, Homo sapiens
  misc_RNA (1)...(19): siRNA sense strand
ucucagaugacgccuguua

SEQ ID NO: 1291479 - RNA, 19 nt, Homo sapiens
  misc_RNA (1)...(19): siRNA sense strand
uagagaaacauguccauau

SEQ ID NO: 1291480 - RNA, 19 nt, Homo sapiens
  misc_RNA (1)...(19): siRNA sense strand
guuccaaagugucuuaaag

SEQ ID NO: 1291481 - RNA, 19 nt, Homo sapiens
  misc_RNA (1)...(19): siRNA sense strand
ggugaacgaguagauuaua

SEQ ID NO: 1291482 - RNA, 19 nt, Homo sapiens
  misc_RNA (1)...(19): siRNA sense strand
gaaguagaaguauuugagu

SEQ ID NO: 1291483 - RNA, 19 nt, Homo sapiens
  misc_RNA (1)...(19): siRNA sense strand
gaaacauguccauauauac

SEQ ID NO: 1291484 - RNA, 19 nt, Homo sapiens
  misc_RNA (1)...(19): siRNA sense strand
ugacgccuguuauagagaa

SEQ ID NO: 1291485 - RNA, 19 nt, Homo sapiens
  misc_RNA (1)...(19): siRNA sense strand
cgaguagauuauaagugua

SEQ ID NO: 1291486 - RNA, 19 nt, Homo sapiens
  misc_RNA (1)...(19): siRNA sense strand
gcacuuuauuuguaaugag

SEQ ID NO: 1291487 - RNA, 19 nt, Homo sapiens
  misc_RNA (1)...(19): siRNA sense strand
guagaaguauuugaguauc

SEQ ID NO: 1291488 - RNA, 19 nt, Homo sapiens
  misc_RNA (1)...(19): siRNA sense strand
guauuugaguaucuugaug

SEQ ID NO: 1291489 - RNA, 19 nt, Homo sapiens
  misc_RNA (1)...(19): siRNA sense strand
aggaauacuugacaguuug

SEQ ID NO: 1291490 - RNA, 19 nt, Homo sapiens
  misc_RNA (1)...(19): siRNA sense strand
ccaaaacccuacuaugaga

SEQ ID NO: 1291491 - RNA, 19 nt, Homo sapiens
  misc_RNA (1)...(19): siRNA sense strand
aguguaaaguggucaaaug

SEQ ID NO: 1291492 - RNA, 19 nt, Homo sapiens
  misc_RNA (1)...(19): siRNA sense strand
ccacccauacuauuuguga

SEQ ID NO: 1291493 - RNA, 19 nt, Homo sapiens
  misc_RNA (1)...(19): siRNA sense strand
caccaacauuugaagcuau

SEQ ID NO: 1291494 - RNA, 19 nt, Homo sapiens
  misc_RNA (1)...(19): siRNA sense strand
uuggagagagcacgauuua

SEQ ID NO: 1291495 - RNA, 19 nt, Homo sapiens
  misc_RNA (1)...(19): siRNA sense strand
gguuaucagaugcacuuua

SEQ ID NO: 1291496 - RNA, 19 nt, Homo sapiens
  misc_RNA (1)...(19): siRNA sense strand
ugaggagccaccaacauuu

SEQ ID NO: 1291497 - RNA, 19 nt, Homo sapiens
  misc_RNA (1)...(19): siRNA sense strand
ggaaggaauacuugacagu

SEQ ID NO: 1291498 - RNA, 19 nt, Homo sapiens
  misc_RNA (1)...(19): siRNA sense strand
gaggaaggaauacuugaca

SEQ ID NO: 1291499 - RNA, 19 nt, Homo sapiens
  misc_RNA (1)...(19): siRNA sense strand
ccaguuccaaagugucuua

SEQ ID NO: 1291500 - RNA, 19 nt, Homo sapiens
  misc_RNA (1)...(19): siRNA sense strand
ugaguaucuugaugcagua

SEQ ID NO: 1291501 - RNA, 19 nt, Homo sapiens
  misc_RNA (1)...(19): siRNA sense strand
caccuuuagugaaguagaa

SEQ ID NO: 1291502 - RNA, 19 nt, Homo sapiens
  misc_RNA (1)...(19): siRNA sense strand
acagauaucaggauuugga

SEQ ID NO: 1291503 - RNA, 19 nt, Homo sapiens
  misc_RNA (1)...(19): siRNA sense strand
ucauugcugugauuguuau

SEQ ID NO: 1291504 - RNA, 19 nt, Homo sapiens
  misc_RNA (1)...(19): siRNA sense strand
ucagaugcacuuuauuugu

SEQ ID NO: 1291505 - RNA, 19 nt, Homo sapiens
  misc_RNA (1)...(19): siRNA sense strand
gugcugcuccagaguguaa

SEQ ID NO: 1291506 - RNA, 19 nt, Homo sapiens
  misc_RNA (1)...(19): siRNA sense strand
ggaaaacacaccuuuagug

SEQ ID NO: 1291507 - RNA, 19 nt, Homo sapiens
  misc_RNA (1)...(19): siRNA sense strand
aaggaucaguagcaauuug

SEQ ID NO: 1291508 - RNA, 19 nt, Homo sapiens
  misc_RNA (1)...(19): siRNA sense strand
uauauacgggauccuuuaa

SEQ ID NO: 1291509 - RNA, 19 nt, Homo sapiens
  misc_RNA (1)...(19): siRNA sense strand
ugaaguagaaguauuugag

SEQ ID NO: 1291510 - RNA, 19 nt, Homo sapiens
  misc_RNA (1)...(19): siRNA sense strand
cuugacaguuuggauguuu

SEQ ID NO: 1291511 - RNA, 19 nt, Homo sapiens
  misc_RNA (1)...(19): siRNA sense strand
cauauauacgggauccuuu

SEQ ID NO: 1291512 - RNA, 19 nt, Homo sapiens
  misc_RNA (1)...(19): siRNA sense strand
auauauacgggauccuuua

SEQ ID NO: 1291513 - RNA, 19 nt, Homo sapiens
  misc_RNA (1)...(19): siRNA sense strand
cuuaaaggaucaguagcaa

SEQ ID NO: 1291514 - RNA, 19 nt, Homo sapiens
  misc_RNA (1)...(19): siRNA sense strand
uaaaccugaggaaggaaua

SEQ ID NO: 1291515 - RNA, 19 nt, Homo sapiens
  misc_RNA (1)...(19): siRNA sense strand
agaugacgccuguuauaga

SEQ ID NO: 1291516 - RNA, 19 nt, Homo sapiens
  misc_RNA (1)...(19): siRNA sense strand
ugugauuguuauugccaua

SEQ ID NO: 1291517 - RNA, 19 nt, Homo sapiens
  misc_RNA (1)...(19): siRNA sense strand
gagagcacgauuuauugug

SEQ ID NO: 1291518 - RNA, 19 nt, Homo sapiens
  misc_RNA (1)...(19): siRNA sense strand
gaaguauuugaguaucuug

SEQ ID NO: 1291519 - RNA, 19 nt, Homo sapiens
  misc_RNA (1)...(19): siRNA sense strand
ggcuaccugucucagauga

SEQ ID NO: 1291520 - RNA, 19 nt, Homo sapiens
  misc_RNA (1)...(19): siRNA sense strand
gauaucaggauuuggaaaa

SEQ ID NO: 1291521 - RNA, 19 nt, Homo sapiens
  misc_RNA (1)...(19): siRNA sense strand
ccucuugccacccauacua

SEQ ID NO: 1291522 - RNA, 19 nt, Homo sapiens
  misc_RNA (1)...(19): siRNA sense strand
ccaugguguugcugcugua

SEQ ID NO: 1291523 - RNA, 19 nt, Homo sapiens
  misc_RNA (1)...(19): siRNA sense strand
cagaugacgccuguuauag

SEQ ID NO: 1291524 - RNA, 19 nt, Homo sapiens
  misc_RNA (1)...(19): siRNA sense strand
uuggugaacgaguagauua

SEQ ID NO: 1291525 - RNA, 19 nt, Homo sapiens
  misc_RNA (1)...(19): siRNA sense strand
gucauugcugugauuguua

SEQ ID NO: 1291526 - RNA, 19 nt, Homo sapiens
  misc_RNA (1)...(19): siRNA sense strand
ggagccaccaacauuugaa

SEQ ID NO: 1291527 - RNA, 19 nt, Homo sapiens
  misc_RNA (1)...(19): siRNA sense strand
gcgcuuuccuggguugcuu

SEQ ID NO: 1291528 - RNA, 19 nt, Homo sapiens
  misc_RNA (1)...(19): siRNA sense strand
uacuacaaagcaacaguua

SEQ ID NO: 1291529 - RNA, 19 nt, Homo sapiens
  misc_RNA (1)...(19): siRNA sense strand
cuugaugcaguaacuuaua

SEQ ID NO: 1291530 - RNA, 19 nt, Homo sapiens
  misc_RNA (1)...(19): siRNA sense strand
aaacauguccauauauacg

SEQ ID NO: 1291531 - RNA, 19 nt, Homo sapiens
  misc_RNA (1)...(19): siRNA sense strand
guguaaaguggucaaaugu

SEQ ID NO: 1291532 - RNA, 19 nt, Homo sapiens
  misc_RNA (1)...(19): siRNA sense strand
cuuacgaguuugguuauca

SEQ ID NO: 1291533 - RNA, 19 nt, Homo sapiens
  misc_RNA (1)...(19): siRNA sense strand
uacgggauccuuuaaaugg

SEQ ID NO: 1291534 - RNA, 19 nt, Homo sapiens
  misc_RNA (1)...(19): siRNA sense strand
aaccaaaacccuacuauga

SEQ ID NO: 1291535 - RNA, 19 nt, Homo sapiens
  misc_RNA (1)...(19): siRNA sense strand
cccaauaugugaaaagguu

SEQ ID NO: 1291536 - RNA, 19 nt, Homo sapiens
  misc_RNA (1)...(19): siRNA sense strand
cgauggcagcgacacaauu

SEQ ID NO: 1291537 - RNA, 19 nt, Homo sapiens
  misc_RNA (1)...(19): siRNA sense strand
gauccauuuucacuuauug

SEQ ID NO: 1291538 - RNA, 19 nt, Homo sapiens
  misc_RNA (1)...(19): siRNA sense strand
uugaugcaguaacuuauag

SEQ ID NO: 1291539 - RNA, 19 nt, Homo sapiens
  misc_RNA (1)...(19): siRNA sense strand
guaucuugaugcaguaacu

SEQ ID NO: 1291540 - RNA, 19 nt, Homo sapiens
  misc_RNA (1)...(19): siRNA sense strand
caacauuugaagcuaugga

SEQ ID NO: 1291541 - RNA, 19 nt, Homo sapiens
  misc_RNA (1)...(19): siRNA sense strand
gagauuggugaacgaguag

SEQ ID NO: 1291542 - RNA, 19 nt, Homo sapiens
  misc_RNA (1)...(19): siRNA sense strand
ggagagagcacgauuuauu

SEQ ID NO: 1291543 - RNA, 19 nt, Homo sapiens
  misc_RNA (1)...(19): siRNA sense strand
agagaaacauguccauaua

SEQ ID NO: 1291544 - RNA, 19 nt, Homo sapiens
  misc_RNA (1)...(19): siRNA sense strand
cagaugcacuuuauuugua

SEQ ID NO: 1291545 - RNA, 19 nt, Homo sapiens
  misc_RNA (1)...(19): siRNA sense strand
ggacuuacgaguuugguua

SEQ ID NO: 1291546 - RNA, 19 nt, Homo sapiens
  misc_RNA (1)...(19): siRNA sense strand
aaacagauaucaggauuug

SEQ ID NO: 1291547 - RNA, 19 nt, Homo sapiens
  misc_RNA (1)...(19): siRNA sense strand
cuauggagcucauugguaa

SEQ ID NO: 1291548 - RNA, 19 nt, Homo sapiens
  misc_RNA (1)...(19): siRNA sense strand
aaacacaccuuuagugaag

SEQ ID NO: 1291549 - RNA, 19 nt, Homo sapiens
  misc_RNA (1)...(19): siRNA sense strand
gaacuuaaaggaucaguag

SEQ ID NO: 1291550 - RNA, 19 nt, Homo sapiens
  misc_RNA (1)...(19): siRNA sense strand
gaaaacagauaucaggauu

SEQ ID NO: 1291551 - RNA, 19 nt, Homo sapiens
  misc_RNA (1)...(19): siRNA sense strand
uaaaggaucaguagcaauu

SEQ ID NO: 1291552 - RNA, 19 nt, Homo sapiens
  misc_RNA (1)...(19): siRNA sense strand
aaaugggacuuacgaguuu

SEQ ID NO: 1291553 - RNA, 19 nt, Homo sapiens
  misc_RNA (1)...(19): siRNA sense strand
guuaucagaugcacuuuau

SEQ ID NO: 1291554 - RNA, 19 nt, Homo sapiens
  misc_RNA (1)...(19): siRNA sense strand
gagcugaauaugccacuua

SEQ ID NO: 1291555 - RNA, 19 nt, Homo sapiens
  misc_RNA (1)...(19): siRNA sense strand
ugagauuggugaacgagua

SEQ ID NO: 1291556 - RNA, 19 nt, Homo sapiens
  misc_RNA (1)...(19): siRNA sense strand
gugaacgaguagauuauaa

SEQ ID NO: 1291557 - RNA, 19 nt, Homo sapiens
  misc_RNA (1)...(19): siRNA sense strand
gagagagcacgauuuauug

SEQ ID NO: 1291558 - RNA, 19 nt, Homo sapiens
  misc_RNA (1)...(19): siRNA sense strand
caaaugggacuuacgaguu

SEQ ID NO: 1291559 - RNA, 19 nt, Homo sapiens
  misc_RNA (1)...(19): siRNA sense strand
ggucauugcugugauuguu

SEQ ID NO: 1291560 - RNA, 19 nt, Homo sapiens
  misc_RNA (1)...(19): siRNA sense strand
ccagauccauuuucacuua

SEQ ID NO: 1291561 - RNA, 19 nt, Homo sapiens
  misc_RNA (1)...(19): siRNA sense strand
gaaggaauacuugacaguu

SEQ ID NO: 1291562 - RNA, 19 nt, Homo sapiens
  misc_RNA (1)...(19): siRNA sense strand
aaggaauacuugacaguuu

SEQ ID NO: 1291563 - RNA, 19 nt, Homo sapiens
  misc_RNA (1)...(19): siRNA sense strand
ucagaugacgccuguuaua

SEQ ID NO: 1291564 - RNA, 19 nt, Homo sapiens
  misc_RNA (1)...(19): siRNA sense strand
gaaaacacaccuuuaguga

SEQ ID NO: 1291565 - RNA, 19 nt, Homo sapiens
  misc_RNA (1)...(19): siRNA sense strand
gaugacgccuguuauagag

SEQ ID NO: 1291566 - RNA, 19 nt, Homo sapiens
  misc_RNA (1)...(19): siRNA sense strand
gagaaacauguccauauau

SEQ ID NO: 1291567 - RNA, 19 nt, Homo sapiens
  misc_RNA (1)...(19): siRNA sense strand
ccacuuaccagacuaaauc

SEQ ID NO: 1291568 - RNA, 19 nt, Homo sapiens
  misc_RNA (1)...(19): siRNA sense strand
acgaguagauuauaagugu

SEQ ID NO: 1291569 - RNA, 19 nt, Homo sapiens
  misc_RNA (1)...(19): siRNA sense strand
cuacaaagcaacaguuaug

SEQ ID NO: 1291570 - RNA, 19 nt, Homo sapiens
  misc_RNA (1)...(19): siRNA sense strand
ccaccaacauuugaagcua

SEQ ID NO: 1291571 - RNA, 19 nt, Homo sapiens
  misc_RNA (1)...(19): siRNA sense strand
uauacgggauccuuuaaau

SEQ ID NO: 1291572 - RNA, 19 nt, Homo sapiens
  misc_RNA (1)...(19): siRNA sense strand
cgaguuugguuaucagaug

SEQ ID NO: 1291573 - RNA, 19 nt, Homo sapiens
  misc_RNA (1)...(19): siRNA sense strand
gaacgaguagauuauaagu

SEQ ID NO: 1291574 - RNA, 19 nt, Homo sapiens
  misc_RNA (1)...(19): siRNA sense strand
gugaggagccaccaacauu

SEQ ID NO: 1291575 - RNA, 19 nt, Homo sapiens
  misc_RNA (1)...(19): siRNA sense strand
gauggcagcgacacaauug

SEQ ID NO: 1291576 - RNA, 19 nt, Homo sapiens
  misc_RNA (1)...(19): siRNA sense strand
ucucagaugacgccuguua

SEQ ID NO: 1291577 - RNA, 19 nt, Homo sapiens
  misc_RNA (1)...(19): siRNA sense strand
gaggagccaccaacauuug

SEQ ID NO: 1291578 - RNA, 19 nt, Homo sapiens
  misc_RNA (1)...(19): siRNA sense strand
gcuauggagcucauuggua

SEQ ID NO: 1291579 - RNA, 19 nt, Homo sapiens
  misc_RNA (1)...(19): siRNA sense strand
acacaccuuuagugaagua

SEQ ID NO: 1291580 - RNA, 19 nt, Homo sapiens
  misc_RNA (1)...(19): siRNA sense strand
uagagaaacauguccauau

SEQ ID NO: 1291581 - RNA, 19 nt, Homo sapiens
  misc_RNA (1)...(19): siRNA sense strand
ggugaacgaguagauuaua

SEQ ID NO: 1291582 - RNA, 19 nt, Homo sapiens
  misc_RNA (1)...(19): siRNA sense strand
gaaguagaaguauuugagu

SEQ ID NO: 1291583 - RNA, 19 nt, Homo sapiens
  misc_RNA (1)...(19): siRNA sense strand
gaaacauguccauauauac

SEQ ID NO: 1291584 - RNA, 19 nt, Homo sapiens
  misc_RNA (1)...(19): siRNA sense strand
ugacgccuguuauagagaa

SEQ ID NO: 1291585 - RNA, 19 nt, Homo sapiens
  misc_RNA (1)...(19): siRNA sense strand
cgaguagauuauaagugua

SEQ ID NO: 1291586 - RNA, 19 nt, Homo sapiens
  misc_RNA (1)...(19): siRNA sense strand
gcacuuuauuuguaaugag

SEQ ID NO: 1291587 - RNA, 19 nt, Homo sapiens
  misc_RNA (1)...(19): siRNA sense strand
guagaaguauuugaguauc

SEQ ID NO: 1291588 - RNA, 19 nt, Homo sapiens
  misc_RNA (1)...(19): siRNA sense strand
guauuugaguaucuugaug

SEQ ID NO: 1291589 - RNA, 19 nt, Homo sapiens
  misc_RNA (1)...(19): siRNA sense strand
aggaauacuugacaguuug

SEQ ID NO: 1291590 - RNA, 19 nt, Homo sapiens
  misc_RNA (1)...(19): siRNA sense strand
ccaaaacccuacuaugaga

SEQ ID NO: 1291591 - RNA, 19 nt, Homo sapiens
  misc_RNA (1)...(19): siRNA sense strand
aguguaaaguggucaaaug

SEQ ID NO: 1291592 - RNA, 19 nt, Homo sapiens
  misc_RNA (1)...(19): siRNA sense strand
ccacccauacuauuuguga

SEQ ID NO: 1291593 - RNA, 19 nt, Homo sapiens
  misc_RNA (1)...(19): siRNA sense strand
uuggagagagcacgauuua

SEQ ID NO: 1291594 - RNA, 19 nt, Homo sapiens
  misc_RNA (1)...(19): siRNA sense strand
gguuaucagaugcacuuua

SEQ ID NO: 1291595 - RNA, 19 nt, Homo sapiens
  misc_RNA (1)...(19): siRNA sense strand
caccaacauuugaagcuau

SEQ ID NO: 1291596 - RNA, 19 nt, Homo sapiens
  misc_RNA (1)...(19): siRNA sense strand
ugaggagccaccaacauuu

SEQ ID NO: 1291597 - RNA, 19 nt, Homo sapiens
  misc_RNA (1)...(19): siRNA sense strand
ggaaggaauacuugacagu

SEQ ID NO: 1291598 - RNA, 19 nt, Homo sapiens
  misc_RNA (1)...(19): siRNA sense strand
gaggaaggaauacuugaca

SEQ ID NO: 1291599 - RNA, 19 nt, Homo sapiens
  misc_RNA (1)...(19): siRNA sense strand
ugaguaucuugaugcagua

SEQ ID NO: 1291600 - RNA, 19 nt, Homo sapiens
  misc_RNA (1)...(19): siRNA sense strand
caccuuuagugaaguagaa

SEQ ID NO: 1291601 - RNA, 19 nt, Homo sapiens
  misc_RNA (1)...(19): siRNA sense strand
acagauaucaggauuugga

SEQ ID NO: 1291602 - RNA, 19 nt, Homo sapiens
  misc_RNA (1)...(19): siRNA sense strand
ucauugcugugauuguuau

SEQ ID NO: 1291603 - RNA, 19 nt, Homo sapiens
  misc_RNA (1)...(19): siRNA sense strand
ucagaugcacuuuauuugu

SEQ ID NO: 1291604 - RNA, 19 nt, Homo sapiens
  misc_RNA (1)...(19): siRNA sense strand
gugcugcuccagaguguaa

SEQ ID NO: 1291605 - RNA, 19 nt, Homo sapiens
  misc_RNA (1)...(19): siRNA sense strand
ggaaaacacaccuuuagug

SEQ ID NO: 1291606 - RNA, 19 nt, Homo sapiens
  misc_RNA (1)...(19): siRNA sense strand
aaggaucaguagcaauuug

SEQ ID NO: 1291607 - RNA, 19 nt, Homo sapiens
  misc_RNA (1)...(19): siRNA sense strand
uauauacgggauccuuuaa

SEQ ID NO: 1291608 - RNA, 19 nt, Homo sapiens
  misc_RNA (1)...(19): siRNA sense strand
ugaaguagaaguauuugag

SEQ ID NO: 1291609 - RNA, 19 nt, Homo sapiens
  misc_RNA (1)...(19): siRNA sense strand
cuugacaguuuggauguuu

SEQ ID NO: 1291610 - RNA, 19 nt, Homo sapiens
  misc_RNA (1)...(19): siRNA sense strand
cauauauacgggauccuuu

SEQ ID NO: 1291611 - RNA, 19 nt, Homo sapiens
  misc_RNA (1)...(19): siRNA sense strand
auauauacgggauccuuua

SEQ ID NO: 1291612 - RNA, 19 nt, Homo sapiens
  misc_RNA (1)...(19): siRNA sense strand
cuuaaaggaucaguagcaa

SEQ ID NO: 1291613 - RNA, 19 nt, Homo sapiens
  misc_RNA (1)...(19): siRNA sense strand
uaaaccugaggaaggaaua

SEQ ID NO: 1291614 - RNA, 19 nt, Homo sapiens
  misc_RNA (1)...(19): siRNA sense strand
agaugacgccuguuauaga

SEQ ID NO: 1291615 - RNA, 19 nt, Homo sapiens
  misc_RNA (1)...(19): siRNA sense strand
ugugauuguuauugccaua

SEQ ID NO: 1291616 - RNA, 19 nt, Homo sapiens
  misc_RNA (1)...(19): siRNA sense strand
gagagcacgauuuauugug

SEQ ID NO: 1291617 - RNA, 19 nt, Homo sapiens
  misc_RNA (1)...(19): siRNA sense strand
gaaguauuugaguaucuug

SEQ ID NO: 1291618 - RNA, 19 nt, Homo sapiens
  misc_RNA (1)...(19): siRNA sense strand
ggcuaccugucucagauga

SEQ ID NO: 1291619 - RNA, 19 nt, Homo sapiens
  misc_RNA (1)...(19): siRNA sense strand
gauaucaggauuuggaaaa

SEQ ID NO: 1291620 - RNA, 19 nt, Homo sapiens
  misc_RNA (1)...(19): siRNA sense strand
ccucuugccacccauacua

SEQ ID NO: 1291621 - RNA, 19 nt, Homo sapiens
  misc_RNA (1)...(19): siRNA sense strand
ccaugguguugcugcugua

SEQ ID NO: 1291622 - RNA, 19 nt, Homo sapiens
  misc_RNA (1)...(19): siRNA sense strand
cagaugacgccuguuauag

SEQ ID NO: 1291623 - RNA, 19 nt, Homo sapiens
  misc_RNA (1)...(19): siRNA sense strand
cagaugguggagcugaaua

SEQ ID NO: 1291624 - RNA, 19 nt, Homo sapiens
  misc_RNA (1)...(19): siRNA sense strand
uuggugaacgaguagauua

SEQ ID NO: 1291625 - RNA, 19 nt, Homo sapiens
  misc_RNA (1)...(19): siRNA sense strand
gucauugcugugauuguua

SEQ ID NO: 1291626 - RNA, 19 nt, Homo sapiens
  misc_RNA (1)...(19): siRNA sense strand
ggagccaccaacauuugaa

SEQ ID NO: 1291627 - RNA, 19 nt, Homo sapiens
  misc_RNA (1)...(19): siRNA sense strand
gcgcuuuccuggguugcuu

SEQ ID NO: 1291628 - RNA, 19 nt, Homo sapiens
  misc_RNA (1)...(19): siRNA sense strand
uacuacaaagcaacaguua

SEQ ID NO: 1291629 - RNA, 19 nt, Homo sapiens
  misc_RNA (1)...(19): siRNA sense strand
cuugaugcaguaacuuaua

SEQ ID NO: 1291630 - RNA, 19 nt, Homo sapiens
  misc_RNA (1)...(19): siRNA sense strand
aaacauguccauauauacg

SEQ ID NO: 1291631 - RNA, 19 nt, Homo sapiens
  misc_RNA (1)...(19): siRNA sense strand
guguaaaguggucaaaugu

SEQ ID NO: 1291632 - RNA, 19 nt, Homo sapiens
  misc_RNA (1)...(19): siRNA sense strand
cuuacgaguuugguuauca

SEQ ID NO: 1291633 - RNA, 19 nt, Homo sapiens
  misc_RNA (1)...(19): siRNA sense strand
uacgggauccuuuaaaugg

SEQ ID NO: 1291634 - RNA, 19 nt, Homo sapiens
  misc_RNA (1)...(19): siRNA sense strand
gcagaugguggagcugaau

SEQ ID NO: 1291635 - RNA, 19 nt, Homo sapiens
  misc_RNA (1)...(19): siRNA sense strand
aaccaaaacccuacuauga

SEQ ID NO: 1291636 - RNA, 19 nt, Homo sapiens
  misc_RNA (1)...(19): siRNA sense strand
cccaauaugugaaaagguu

SEQ ID NO: 1291637 - RNA, 19 nt, Homo sapiens
  misc_RNA (1)...(19): siRNA sense strand
ggagcugaauaugccacuu

SEQ ID NO: 1291638 - RNA, 19 nt, Homo sapiens
  misc_RNA (1)...(19): siRNA sense strand
cgauggcagcgacacaauu

SEQ ID NO: 1291639 - RNA, 19 nt, Homo sapiens
  misc_RNA (1)...(19): siRNA sense strand
gauccauuuucacuuauug

SEQ ID NO: 1291640 - RNA, 19 nt, Homo sapiens
  misc_RNA (1)...(19): siRNA sense strand
uugaugcaguaacuuauag

SEQ ID NO: 1291641 - RNA, 19 nt, Homo sapiens
  misc_RNA (1)...(19): siRNA sense strand
guaucuugaugcaguaacu

SEQ ID NO: 1291642 - RNA, 19 nt, Homo sapiens
  misc_RNA (1)...(19): siRNA sense strand
ggagagagcacgauuuauu

SEQ ID NO: 1291643 - RNA, 19 nt, Homo sapiens
  misc_RNA (1)...(19): siRNA sense strand
agagaaacauguccauaua

SEQ ID NO: 1291644 - RNA, 19 nt, Homo sapiens
  misc_RNA (1)...(19): siRNA sense strand
cagaugcacuuuauuugua

SEQ ID NO: 1291645 - RNA, 19 nt, Homo sapiens
  misc_RNA (1)...(19): siRNA sense strand
ggacuuacgaguuugguua

SEQ ID NO: 1291646 - RNA, 19 nt, Homo sapiens
  misc_RNA (1)...(19): siRNA sense strand
aaacagauaucaggauuug

SEQ ID NO: 1291647 - RNA, 19 nt, Homo sapiens
  misc_RNA (1)...(19): siRNA sense strand
cuauggagcucauugguaa

SEQ ID NO: 1291648 - RNA, 19 nt, Homo sapiens
  misc_RNA (1)...(19): siRNA sense strand
aaacacaccuuuagugaag

SEQ ID NO: 1291649 - RNA, 19 nt, Homo sapiens
  misc_RNA (1)...(19): siRNA sense strand
gaacuuaaaggaucaguag

SEQ ID NO: 1291650 - RNA, 19 nt, Homo sapiens
  misc_RNA (1)...(19): siRNA sense strand
gaaaacagauaucaggauu

SEQ ID NO: 1291651 - RNA, 19 nt, Homo sapiens
  misc_RNA (1)...(19): siRNA sense strand
uaaaggaucaguagcaauu

SEQ ID NO: 1291652 - RNA, 19 nt, Homo sapiens
  misc_RNA (1)...(19): siRNA sense strand
aaaugggacuuacgaguuu

SEQ ID NO: 1291653 - RNA, 19 nt, Homo sapiens
  misc_RNA (1)...(19): siRNA sense strand
guuaucagaugcacuuuau

SEQ ID NO: 1291654 - RNA, 19 nt, Homo sapiens
  misc_RNA (1)...(19): siRNA sense strand
gagcugaauaugccacuua

SEQ ID NO: 1291655 - RNA, 19 nt, Homo sapiens
  misc_RNA (1)...(19): siRNA sense strand
gagcagagaggcugaauag

SEQ ID NO: 1291656 - RNA, 19 nt, Homo sapiens
  misc_RNA (1)...(19): siRNA sense strand
ugagauuggugaacgagua

SEQ ID NO: 1291657 - RNA, 19 nt, Homo sapiens
  misc_RNA (1)...(19): siRNA sense strand
gugaacgaguagauuauaa

SEQ ID NO: 1291658 - RNA, 19 nt, Homo sapiens
  misc_RNA (1)...(19): siRNA sense strand
gagagagcacgauuuauug

SEQ ID NO: 1291659 - RNA, 19 nt, Homo sapiens
  misc_RNA (1)...(19): siRNA sense strand
caaaugggacuuacgaguu

SEQ ID NO: 1291660 - RNA, 19 nt, Homo sapiens
  misc_RNA (1)...(19): siRNA sense strand
ggucauugcugugauuguu

SEQ ID NO: 1291661 - RNA, 19 nt, Homo sapiens
  misc_RNA (1)...(19): siRNA sense strand
ccagauccauuuucacuua

SEQ ID NO: 1291662 - RNA, 19 nt, Homo sapiens
  misc_RNA (1)...(19): siRNA sense strand
gaaggaauacuugacaguu

SEQ ID NO: 1291663 - RNA, 19 nt, Homo sapiens
  misc_RNA (1)...(19): siRNA sense strand
aaggaauacuugacaguuu

SEQ ID NO: 1291664 - RNA, 19 nt, Homo sapiens
  misc_RNA (1)...(19): siRNA sense strand
ucagaugacgccuguuaua

SEQ ID NO: 1291665 - RNA, 19 nt, Homo sapiens
  misc_RNA (1)...(19): siRNA sense strand
gaaaacacaccuuuaguga

SEQ ID NO: 1291666 - RNA, 19 nt, Homo sapiens
  misc_RNA (1)...(19): siRNA sense strand
gaugacgccuguuauagag

SEQ ID NO: 1291667 - RNA, 19 nt, Homo sapiens
  misc_RNA (1)...(19): siRNA sense strand
gagaaacauguccauauau

SEQ ID NO: 1291668 - RNA, 19 nt, Homo sapiens
  misc_RNA (1)...(19): siRNA sense strand
ccacuuaccagacuaaauc

SEQ ID NO: 1291669 - RNA, 19 nt, Homo sapiens
  misc_RNA (1)...(19): siRNA sense strand
acgaguagauuauaagugu

SEQ ID NO: 1291670 - RNA, 19 nt, Homo sapiens
  misc_RNA (1)...(19): siRNA sense strand
cuacaaagcaacaguuaug

SEQ ID NO: 1291671 - RNA, 19 nt, Homo sapiens
  misc_RNA (1)...(19): siRNA sense strand
ccaccaacauuugaagcua

SEQ ID NO: 1291672 - RNA, 19 nt, Homo sapiens
  misc_RNA (1)...(19): siRNA sense strand
uauacgggauccuuuaaau

SEQ ID NO: 1291673 - RNA, 19 nt, Homo sapiens
  misc_RNA (1)...(19): siRNA sense strand
cgaguuugguuaucagaug

SEQ ID NO: 1291674 - RNA, 19 nt, Homo sapiens
  misc_RNA (1)...(19): siRNA sense strand
gaacgaguagauuauaagu

SEQ ID NO: 1291675 - RNA, 19 nt, Homo sapiens
  misc_RNA (1)...(19): siRNA sense strand
gugaggagccaccaacauu

SEQ ID NO: 1291676 - RNA, 19 nt, Homo sapiens
  misc_RNA (1)...(19): siRNA sense strand
gauggcagcgacacaauug

SEQ ID NO: 1291677 - RNA, 19 nt, Homo sapiens
  misc_RNA (1)...(19): siRNA sense strand
ucucagaugacgccuguua

SEQ ID NO: 1291678 - RNA, 19 nt, Homo sapiens
  misc_RNA (1)...(19): siRNA sense strand
acacaccuuuagugaagua

SEQ ID NO: 1291679 - RNA, 19 nt, Homo sapiens
  misc_RNA (1)...(19): siRNA sense strand
gcuauggagcucauuggua

SEQ ID NO: 1291680 - RNA, 19 nt, Homo sapiens
  misc_RNA (1)...(19): siRNA sense strand
gaggagccaccaacauuug

SEQ ID NO: 1291681 - RNA, 19 nt, Homo sapiens
  misc_RNA (1)...(19): siRNA sense strand
uagagaaacauguccauau

SEQ ID NO: 1291682 - RNA, 19 nt, Homo sapiens
  misc_RNA (1)...(19): siRNA sense strand
guuccaaagugucuuaaag

SEQ ID NO: 1291683 - RNA, 19 nt, Homo sapiens
  misc_RNA (1)...(19): siRNA sense strand
ggugaacgaguagauuaua

SEQ ID NO: 1291684 - RNA, 19 nt, Homo sapiens
  misc_RNA (1)...(19): siRNA sense strand
gaaguagaaguauuugagu

SEQ ID NO: 1291685 - RNA, 19 nt, Homo sapiens
  misc_RNA (1)...(19): siRNA sense strand
gaaacauguccauauauac

SEQ ID NO: 1291686 - RNA, 19 nt, Homo sapiens
  misc_RNA (1)...(19): siRNA sense strand
ugacgccuguuauagagaa

SEQ ID NO: 1291687 - RNA, 19 nt, Homo sapiens
  misc_RNA (1)...(19): siRNA sense strand
cgaguagauuauaagugua

SEQ ID NO: 1291688 - RNA, 19 nt, Homo sapiens
  misc_RNA (1)...(19): siRNA sense strand
gcacuuuauuuguaaugag

SEQ ID NO: 1291689 - RNA, 19 nt, Homo sapiens
  misc_RNA (1)...(19): siRNA sense strand
guagaaguauuugaguauc

SEQ ID NO: 1291690 - RNA, 19 nt, Homo sapiens
  misc_RNA (1)...(19): siRNA sense strand
guauuugaguaucuugaug

SEQ ID NO: 1291691 - RNA, 19 nt, Homo sapiens
  misc_RNA (1)...(19): siRNA sense strand
aggaauacuugacaguuug

SEQ ID NO: 1291692 - RNA, 19 nt, Homo sapiens
  misc_RNA (1)...(19): siRNA sense strand
ccaaaacccuacuaugaga

SEQ ID NO: 1291693 - RNA, 19 nt, Homo sapiens
  misc_RNA (1)...(19): siRNA sense strand
aguguaaaguggucaaaug

SEQ ID NO: 1291694 - RNA, 19 nt, Homo sapiens
  misc_RNA (1)...(19): siRNA sense strand
ccacccauacuauuuguga

SEQ ID NO: 1291695 - RNA, 19 nt, Homo sapiens
  misc_RNA (1)...(19): siRNA sense strand
uuggagagagcacgauuua

SEQ ID NO: 1291696 - RNA, 19 nt, Homo sapiens
  misc_RNA (1)...(19): siRNA sense strand
gguuaucagaugcacuuua

SEQ ID NO: 1291697 - RNA, 19 nt, Homo sapiens
  misc_RNA (1)...(19): siRNA sense strand
caccaacauuugaagcuau

SEQ ID NO: 1291698 - RNA, 19 nt, Homo sapiens
  misc_RNA (1)...(19): siRNA sense strand
ugaggagccaccaacauuu

SEQ ID NO: 1291699 - RNA, 19 nt, Homo sapiens
  misc_RNA (1)...(19): siRNA sense strand
ggaaggaauacuugacagu

SEQ ID NO: 1291700 - RNA, 19 nt, Homo sapiens
  misc_RNA (1)...(19): siRNA sense strand
gaggaaggaauacuugaca

SEQ ID NO: 1291701 - RNA, 19 nt, Homo sapiens
  misc_RNA (1)...(19): siRNA sense strand
ccaguuccaaagugucuua

SEQ ID NO: 1291702 - RNA, 19 nt, Homo sapiens
  misc_RNA (1)...(19): siRNA sense strand
ugaguaucuugaugcagua

SEQ ID NO: 1291703 - RNA, 19 nt, Homo sapiens
  misc_RNA (1)...(19): siRNA sense strand
caccuuuagugaaguagaa

SEQ ID NO: 1291704 - RNA, 19 nt, Homo sapiens
  misc_RNA (1)...(19): siRNA sense strand
acagauaucaggauuugga

SEQ ID NO: 1291705 - RNA, 19 nt, Homo sapiens
  misc_RNA (1)...(19): siRNA sense strand
ucauugcugugauuguuau

SEQ ID NO: 1291706 - RNA, 19 nt, Homo sapiens
  misc_RNA (1)...(19): siRNA sense strand
ucagaugcacuuuauuugu

SEQ ID NO: 1291707 - RNA, 19 nt, Homo sapiens
  misc_RNA (1)...(19): siRNA sense strand
gugcugcuccagaguguaa

SEQ ID NO: 1291708 - RNA, 19 nt, Homo sapiens
  misc_RNA (1)...(19): siRNA sense strand
ggaaaacacaccuuuagug

SEQ ID NO: 1291709 - RNA, 19 nt, Homo sapiens
  misc_RNA (1)...(19): siRNA sense strand
aaggaucaguagcaauuug

SEQ ID NO: 1291710 - RNA, 19 nt, Homo sapiens
  misc_RNA (1)...(19): siRNA sense strand
uauauacgggauccuuuaa

SEQ ID NO: 1291711 - RNA, 19 nt, Homo sapiens
  misc_RNA (1)...(19): siRNA sense strand
ugaaguagaaguauuugag

SEQ ID NO: 1291712 - RNA, 19 nt, Homo sapiens
  misc_RNA (1)...(19): siRNA sense strand
cuugacaguuuggauguuu

SEQ ID NO: 1291713 - RNA, 19 nt, Homo sapiens
  misc_RNA (1)...(19): siRNA sense strand
cauauauacgggauccuuu

SEQ ID NO: 1291714 - RNA, 19 nt, Homo sapiens
  misc_RNA (1)...(19): siRNA sense strand
auauauacgggauccuuua

SEQ ID NO: 1291715 - RNA, 19 nt, Homo sapiens
  misc_RNA (1)...(19): siRNA sense strand
cuuaaaggaucaguagcaa

SEQ ID NO: 1291716 - RNA, 19 nt, Homo sapiens
  misc_RNA (1)...(19): siRNA sense strand
uaaaccugaggaaggaaua

SEQ ID NO: 1291717 - RNA, 19 nt, Homo sapiens
  misc_RNA (1)...(19): siRNA sense strand
agaugacgccuguuauaga

SEQ ID NO: 1291718 - RNA, 19 nt, Homo sapiens
  misc_RNA (1)...(19): siRNA sense strand
ugugauuguuauugccaua

SEQ ID NO: 1291719 - RNA, 19 nt, Homo sapiens
  misc_RNA (1)...(19): siRNA sense strand
gagagcacgauuuauugug

SEQ ID NO: 1291720 - RNA, 19 nt, Homo sapiens
  misc_RNA (1)...(19): siRNA sense strand
gaaguauuugaguaucuug

SEQ ID NO: 1291721 - RNA, 19 nt, Homo sapiens
  misc_RNA (1)...(19): siRNA sense strand
ggcuaccugucucagauga

SEQ ID NO: 1291722 - RNA, 19 nt, Homo sapiens
  misc_RNA (1)...(19): siRNA sense strand
ccucuugccacccauacua

SEQ ID NO: 1291723 - RNA, 19 nt, Homo sapiens
  misc_RNA (1)...(19): siRNA sense strand
gauaucaggauuuggaaaa

SEQ ID NO: 1291724 - RNA, 19 nt, Homo sapiens
  misc_RNA (1)...(19): siRNA sense strand
ccaugguguugcugcugua

SEQ ID NO: 1291725 - RNA, 19 nt, Homo sapiens
  misc_RNA (1)...(19): siRNA sense strand
cagaugacgccuguuauag

SEQ ID NO: 1291726 - RNA, 19 nt, Homo sapiens
  misc_RNA (1)...(19): siRNA sense strand
cagaugguggagcugaaua

SEQ ID NO: 1291727 - RNA, 19 nt, Homo sapiens
  misc_RNA (1)...(19): siRNA sense strand
gucauugcugugauuguua

SEQ ID NO: 1291728 - RNA, 19 nt, Homo sapiens
  misc_RNA (1)...(19): siRNA sense strand
uuggugaacgaguagauua

SEQ ID NO: 1291729 - RNA, 19 nt, Homo sapiens
  misc_RNA (1)...(19): siRNA sense strand
ggagccaccaacauuugaa

SEQ ID NO: 1291730 - RNA, 19 nt, Homo sapiens
  misc_RNA (1)...(19): siRNA sense strand
gcgcuuuccuggguugcuu

SEQ ID NO: 1291731 - RNA, 19 nt, Homo sapiens
  misc_RNA (1)...(19): siRNA sense strand
uacuacaaagcaacaguua

SEQ ID NO: 1291732 - RNA, 19 nt, Homo sapiens
  misc_RNA (1)...(19): siRNA sense strand
cuugaugcaguaacuuaua

SEQ ID NO: 1291733 - RNA, 19 nt, Homo sapiens
  misc_RNA (1)...(19): siRNA sense strand
aaacauguccauauauacg

SEQ ID NO: 1291734 - RNA, 19 nt, Homo sapiens
  misc_RNA (1)...(19): siRNA sense strand
guguaaaguggucaaaugu

SEQ ID NO: 1291735 - RNA, 19 nt, Homo sapiens
  misc_RNA (1)...(19): siRNA sense strand
cuuacgaguuugguuauca

SEQ ID NO: 1291736 - RNA, 19 nt, Homo sapiens
  misc_RNA (1)...(19): siRNA sense strand
aaccaaaacccuacuauga

SEQ ID NO: 1291737 - RNA, 19 nt, Homo sapiens
  misc_RNA (1)...(19): siRNA sense strand
gcagaugguggagcugaau

SEQ ID NO: 1291738 - RNA, 19 nt, Homo sapiens
  misc_RNA (1)...(19): siRNA sense strand
uacgggauccuuuaaaugg

SEQ ID NO: 1291739 - RNA, 19 nt, Homo sapiens
  misc_RNA (1)...(19): siRNA sense strand
cgauggcagcgacacaauu

SEQ ID NO: 1291740 - RNA, 19 nt, Homo sapiens
  misc_RNA (1)...(19): siRNA sense strand
ggagcugaauaugccacuu

SEQ ID NO: 1291741 - RNA, 19 nt, Homo sapiens
  misc_RNA (1)...(19): siRNA sense strand
caacauuugaagcuaugga

SEQ ID NO: 1291742 - RNA, 19 nt, Homo sapiens
  misc_RNA (1)...(19): siRNA sense strand
ggagagagcacgauuuauu

SEQ ID NO: 1291743 - RNA, 19 nt, Homo sapiens
  misc_RNA (1)...(19): siRNA sense strand
agagaaacauguccauaua

SEQ ID NO: 1291744 - RNA, 19 nt, Homo sapiens
  misc_RNA (1)...(19): siRNA sense strand
cagaugcacuuuauuugua

SEQ ID NO: 1291745 - RNA, 19 nt, Homo sapiens
  misc_RNA (1)...(19): siRNA sense strand
ggacuuacgaguuugguua

SEQ ID NO: 1291746 - RNA, 19 nt, Homo sapiens
  misc_RNA (1)...(19): siRNA sense strand
aaacagauaucaggauuug

SEQ ID NO: 1291747 - RNA, 19 nt, Homo sapiens
  misc_RNA (1)...(19): siRNA sense strand
cuauggagcucauugguaa

SEQ ID NO: 1291748 - RNA, 19 nt, Homo sapiens
  misc_RNA (1)...(19): siRNA sense strand
aaacacaccuuuagugaag

SEQ ID NO: 1291749 - RNA, 19 nt, Homo sapiens
  misc_RNA (1)...(19): siRNA sense strand
gaacuuaaaggaucaguag

SEQ ID NO: 1291750 - RNA, 19 nt, Homo sapiens
  misc_RNA (1)...(19): siRNA sense strand
gaaaacagauaucaggauu

SEQ ID NO: 1291751 - RNA, 19 nt, Homo sapiens
  misc_RNA (1)...(19): siRNA sense strand
uaaaggaucaguagcaauu

SEQ ID NO: 1291752 - RNA, 19 nt, Homo sapiens
  misc_RNA (1)...(19): siRNA sense strand
aaaugggacuuacgaguuu

SEQ ID NO: 1291753 - RNA, 19 nt, Homo sapiens
  misc_RNA (1)...(19): siRNA sense strand
guuaucagaugcacuuuau

SEQ ID NO: 1291754 - RNA, 19 nt, Homo sapiens
  misc_RNA (1)...(19): siRNA sense strand
ugagauuggugaacgagua

SEQ ID NO: 1291755 - RNA, 19 nt, Homo sapiens
  misc_RNA (1)...(19): siRNA sense strand
gugaacgaguagauuauaa

SEQ ID NO: 1291756 - RNA, 19 nt, Homo sapiens
  misc_RNA (1)...(19): siRNA sense strand
gagagagcacgauuuauug

SEQ ID NO: 1291757 - RNA, 19 nt, Homo sapiens
  misc_RNA (1)...(19): siRNA sense strand
caaaugggacuuacgaguu

SEQ ID NO: 1291758 - RNA, 19 nt, Homo sapiens
  misc_RNA (1)...(19): siRNA sense strand
ggucauugcugugauuguu

SEQ ID NO: 1291759 - RNA, 19 nt, Homo sapiens
  misc_RNA (1)...(19): siRNA sense strand
ccagauccauuuucacuua

SEQ ID NO: 1291760 - RNA, 19 nt, Homo sapiens
  misc_RNA (1)...(19): siRNA sense strand
gaaggaauacuugacaguu

SEQ ID NO: 1291761 - RNA, 19 nt, Homo sapiens
  misc_RNA (1)...(19): siRNA sense strand
aaggaauacuugacaguuu

SEQ ID NO: 1291762 - RNA, 19 nt, Homo sapiens
  misc_RNA (1)...(19): siRNA sense strand
ucagaugacgccuguuaua

SEQ ID NO: 1291763 - RNA, 19 nt, Homo sapiens
  misc_RNA (1)...(19): siRNA sense strand
gaaaacacaccuuuaguga

SEQ ID NO: 1291764 - RNA, 19 nt, Homo sapiens
  misc_RNA (1)...(19): siRNA sense strand
gaugacgccuguuauagag

SEQ ID NO: 1291765 - RNA, 19 nt, Homo sapiens
  misc_RNA (1)...(19): siRNA sense strand
gagaaacauguccauauau

SEQ ID NO: 1291766 - RNA, 19 nt, Homo sapiens
  misc_RNA (1)...(19): siRNA sense strand
acgaguagauuauaagugu

SEQ ID NO: 1291767 - RNA, 19 nt, Homo sapiens
  misc_RNA (1)...(19): siRNA sense strand
cuacaaagcaacaguuaug

SEQ ID NO: 1291768 - RNA, 19 nt, Homo sapiens
  misc_RNA (1)...(19): siRNA sense strand
ccaccaacauuugaagcua

SEQ ID NO: 1291769 - RNA, 19 nt, Homo sapiens
  misc_RNA (1)...(19): siRNA sense strand
uauacgggauccuuuaaau

SEQ ID NO: 1291770 - RNA, 19 nt, Homo sapiens
  misc_RNA (1)...(19): siRNA sense strand
cgaguuugguuaucagaug

SEQ ID NO: 1291771 - RNA, 19 nt, Homo sapiens
  misc_RNA (1)...(19): siRNA sense strand
gaacgaguagauuauaagu

SEQ ID NO: 1291772 - RNA, 19 nt, Homo sapiens
  misc_RNA (1)...(19): siRNA sense strand
gugaggagccaccaacauu

SEQ ID NO: 1291773 - RNA, 19 nt, Homo sapiens
  misc_RNA (1)...(19): siRNA sense strand
gauggcagcgacacaauug

SEQ ID NO: 1291774 - RNA, 19 nt, Homo sapiens
  misc_RNA (1)...(19): siRNA sense strand
gcuauggagcucauuggua

SEQ ID NO: 1291775 - RNA, 19 nt, Homo sapiens
  misc_RNA (1)...(19): siRNA sense strand
gaggagccaccaacauuug

SEQ ID NO: 1291776 - RNA, 19 nt, Homo sapiens
  misc_RNA (1)...(19): siRNA sense strand
acacaccuuuagugaagua

SEQ ID NO: 1291777 - RNA, 19 nt, Homo sapiens
  misc_RNA (1)...(19): siRNA sense strand
ucucagaugacgccuguua

SEQ ID NO: 1291778 - RNA, 19 nt, Homo sapiens
  misc_RNA (1)...(19): siRNA sense strand
uagagaaacauguccauau

SEQ ID NO: 1291779 - RNA, 19 nt, Homo sapiens
  misc_RNA (1)...(19): siRNA sense strand
ggugaacgaguagauuaua

SEQ ID NO: 1291780 - RNA, 19 nt, Homo sapiens
  misc_RNA (1)...(19): siRNA sense strand
gaaguagaaguauuugagu

SEQ ID NO: 1291781 - RNA, 19 nt, Homo sapiens
  misc_RNA (1)...(19): siRNA sense strand
gaaacauguccauauauac

SEQ ID NO: 1291782 - RNA, 19 nt, Homo sapiens
  misc_RNA (1)...(19): siRNA sense strand
ugacgccuguuauagagaa

SEQ ID NO: 1291783 - RNA, 19 nt, Homo sapiens
  misc_RNA (1)...(19): siRNA sense strand
cgaguagauuauaagugua

SEQ ID NO: 1291784 - RNA, 19 nt, Homo sapiens
  misc_RNA (1)...(19): siRNA sense strand
gcacuuuauuuguaaugag

SEQ ID NO: 1291785 - RNA, 19 nt, Homo sapiens
  misc_RNA (1)...(19): siRNA sense strand
guagaaguauuugaguauc

SEQ ID NO: 1291786 - RNA, 19 nt, Homo sapiens
  misc_RNA (1)...(19): siRNA sense strand
guauuugaguaucuugaug

SEQ ID NO: 1291787 - RNA, 19 nt, Homo sapiens
  misc_RNA (1)...(19): siRNA sense strand
aggaauacuugacaguuug

SEQ ID NO: 1291788 - RNA, 19 nt, Homo sapiens
  misc_RNA (1)...(19): siRNA sense strand
aguguaaaguggucaaaug

SEQ ID NO: 1291789 - RNA, 19 nt, Homo sapiens
  misc_RNA (1)...(19): siRNA sense strand
ccaaaacccuacuaugaga

SEQ ID NO: 1291790 - RNA, 19 nt, Homo sapiens
  misc_RNA (1)...(19): siRNA sense strand
ccacccauacuauuuguga

SEQ ID NO: 1291791 - RNA, 19 nt, Homo sapiens
  misc_RNA (1)...(19): siRNA sense strand
caccaacauuugaagcuau

SEQ ID NO: 1291792 - RNA, 19 nt, Homo sapiens
  misc_RNA (1)...(19): siRNA sense strand
uuggagagagcacgauuua

SEQ ID NO: 1291793 - RNA, 19 nt, Homo sapiens
  misc_RNA (1)...(19): siRNA sense strand
gguuaucagaugcacuuua

SEQ ID NO: 1291794 - RNA, 19 nt, Homo sapiens
  misc_RNA (1)...(19): siRNA sense strand
ugaggagccaccaacauuu

SEQ ID NO: 1291795 - RNA, 19 nt, Homo sapiens
  misc_RNA (1)...(19): siRNA sense strand
ggaaggaauacuugacagu

SEQ ID NO: 1291796 - RNA, 19 nt, Homo sapiens
  misc_RNA (1)...(19): siRNA sense strand
gaggaaggaauacuugaca

SEQ ID NO: 1291797 - RNA, 19 nt, Homo sapiens
  misc_RNA (1)...(19): siRNA sense strand
ugaguaucuugaugcagua

SEQ ID NO: 1291798 - RNA, 19 nt, Homo sapiens
  misc_RNA (1)...(19): siRNA sense strand
caccuuuagugaaguagaa

SEQ ID NO: 1291799 - RNA, 19 nt, Homo sapiens
  misc_RNA (1)...(19): siRNA sense strand
acagauaucaggauuugga

SEQ ID NO: 1291800 - RNA, 19 nt, Homo sapiens
  misc_RNA (1)...(19): siRNA sense strand
ucauugcugugauuguuau

SEQ ID NO: 1291801 - RNA, 19 nt, Homo sapiens
  misc_RNA (1)...(19): siRNA sense strand
ucagaugcacuuuauuugu

SEQ ID NO: 1291802 - RNA, 19 nt, Homo sapiens
  misc_RNA (1)...(19): siRNA sense strand
gugcugcuccagaguguaa

SEQ ID NO: 1291803 - RNA, 19 nt, Homo sapiens
  misc_RNA (1)...(19): siRNA sense strand
ggaaaacacaccuuuagug

SEQ ID NO: 1291804 - RNA, 19 nt, Homo sapiens
  misc_RNA (1)...(19): siRNA sense strand
aaggaucaguagcaauuug

SEQ ID NO: 1291805 - RNA, 19 nt, Homo sapiens
  misc_RNA (1)...(19): siRNA sense strand
uauauacgggauccuuuaa

SEQ ID NO: 1291806 - RNA, 19 nt, Homo sapiens
  misc_RNA (1)...(19): siRNA sense strand
ugaaguagaaguauuugag

SEQ ID NO: 1291807 - RNA, 19 nt, Homo sapiens
  misc_RNA (1)...(19): siRNA sense strand
cuugacaguuuggauguuu

SEQ ID NO: 1291808 - RNA, 19 nt, Homo sapiens
  misc_RNA (1)...(19): siRNA sense strand
cauauauacgggauccuuu

SEQ ID NO: 1291809 - RNA, 19 nt, Homo sapiens
  misc_RNA (1)...(19): siRNA sense strand
auauauacgggauccuuua

SEQ ID NO: 1291810 - RNA, 19 nt, Homo sapiens
  misc_RNA (1)...(19): siRNA sense strand
cuuaaaggaucaguagcaa

SEQ ID NO: 1291811 - RNA, 19 nt, Homo sapiens
  misc_RNA (1)...(19): siRNA sense strand
uaaaccugaggaaggaaua

SEQ ID NO: 1291812 - RNA, 19 nt, Homo sapiens
  misc_RNA (1)...(19): siRNA sense strand
agaugacgccuguuauaga

SEQ ID NO: 1291813 - RNA, 19 nt, Homo sapiens
  misc_RNA (1)...(19): siRNA sense strand
ugugauuguuauugccaua

SEQ ID NO: 1291814 - RNA, 19 nt, Homo sapiens
  misc_RNA (1)...(19): siRNA sense strand
gagagcacgauuuauugug

SEQ ID NO: 1291815 - RNA, 19 nt, Homo sapiens
  misc_RNA (1)...(19): siRNA sense strand
gaaguauuugaguaucuug

SEQ ID NO: 1291816 - RNA, 19 nt, Homo sapiens
  misc_RNA (1)...(19): siRNA sense strand
ccucuugccacccauacua

SEQ ID NO: 1291817 - RNA, 19 nt, Homo sapiens
  misc_RNA (1)...(19): siRNA sense strand
gauaucaggauuuggaaaa

SEQ ID NO: 1291818 - RNA, 19 nt, Homo sapiens
  misc_RNA (1)...(19): siRNA sense strand
ggcuaccugucucagauga

SEQ ID NO: 1291819 - RNA, 19 nt, Homo sapiens
  misc_RNA (1)...(19): siRNA sense strand
ccaugguguugcugcugua

SEQ ID NO: 1291820 - RNA, 19 nt, Homo sapiens
  misc_RNA (1)...(19): siRNA sense strand
cagaugacgccuguuauag

SEQ ID NO: 1291821 - RNA, 19 nt, Homo sapiens
  misc_RNA (1)...(19): siRNA sense strand
gucauugcugugauuguua

SEQ ID NO: 1291822 - RNA, 19 nt, Homo sapiens
  misc_RNA (1)...(19): siRNA sense strand
uuggugaacgaguagauua

SEQ ID NO: 1291823 - RNA, 19 nt, Homo sapiens
  misc_RNA (1)...(19): siRNA sense strand
ggagccaccaacauuugaa

SEQ ID NO: 1291824 - RNA, 19 nt, Homo sapiens
  misc_RNA (1)...(19): siRNA sense strand
gcgcuuuccuggguugcuu

SEQ ID NO: 1291825 - RNA, 19 nt, Homo sapiens
  misc_RNA (1)...(19): siRNA sense strand
uacuacaaagcaacaguua

SEQ ID NO: 1291826 - RNA, 19 nt, Homo sapiens
  misc_RNA (1)...(19): siRNA sense strand
cuugaugcaguaacuuaua

SEQ ID NO: 1291827 - RNA, 19 nt, Homo sapiens
  misc_RNA (1)...(19): siRNA sense strand
aaacauguccauauauacg

SEQ ID NO: 1291828 - RNA, 19 nt, Homo sapiens
  misc_RNA (1)...(19): siRNA sense strand
guguaaaguggucaaaugu

SEQ ID NO: 1291829 - RNA, 19 nt, Homo sapiens
  misc_RNA (1)...(19): siRNA sense strand
cuuacgaguuugguuauca

SEQ ID NO: 1291830 - RNA, 19 nt, Homo sapiens
  misc_RNA (1)...(19): siRNA sense strand
uacgggauccuuuaaaugg

SEQ ID NO: 1291831 - RNA, 19 nt, Homo sapiens
  misc_RNA (1)...(19): siRNA sense strand
aaccaaaacccuacuauga

SEQ ID NO: 1291832 - RNA, 19 nt, Homo sapiens
  misc_RNA (1)...(19): siRNA sense strand
cccaauaugugaaaagguu

SEQ ID NO: 1291833 - RNA, 19 nt, Homo sapiens
  misc_RNA (1)...(19): siRNA sense strand
cgauggcagcgacacaauu

SEQ ID NO: 1291834 - RNA, 19 nt, Homo sapiens
  misc_RNA (1)...(19): siRNA sense strand
gauccauuuucacuuauug

SEQ ID NO: 1291835 - RNA, 19 nt, Homo sapiens
  misc_RNA (1)...(19): siRNA sense strand
uugaugcaguaacuuauag

SEQ ID NO: 1291836 - RNA, 19 nt, Homo sapiens
  misc_RNA (1)...(19): siRNA sense strand
guaucuugaugcaguaacu

SEQ ID NO: 1291837 - RNA, 19 nt, Homo sapiens
  misc_RNA (1)...(19): siRNA sense strand
caacauuugaagcuaugga

SEQ ID NO: 1291838 - RNA, 19 nt, Homo sapiens
  misc_RNA (1)...(19): siRNA sense strand
gagauuggugaacgaguag

SEQ ID NO: 1291839 - RNA, 19 nt, Homo sapiens
  misc_RNA (1)...(19): siRNA sense strand
ggagagagcacgauuuauu

SEQ ID NO: 1291840 - RNA, 19 nt, Homo sapiens
  misc_RNA (1)...(19): siRNA sense strand
agagaaacauguccauaua

SEQ ID NO: 1291841 - RNA, 19 nt, Homo sapiens
  misc_RNA (1)...(19): siRNA sense strand
cagaugcacuuuauuugua

SEQ ID NO: 1291842 - RNA, 19 nt, Homo sapiens
  misc_RNA (1)...(19): siRNA sense strand
ggacuuacgaguuugguua

SEQ ID NO: 1291843 - RNA, 19 nt, Homo sapiens
  misc_RNA (1)...(19): siRNA sense strand
aaacagauaucaggauuug

SEQ ID NO: 1291844 - RNA, 19 nt, Homo sapiens
  misc_RNA (1)...(19): siRNA sense strand
cuauggagcucauugguaa

SEQ ID NO: 1291845 - RNA, 19 nt, Homo sapiens
  misc_RNA (1)...(19): siRNA sense strand
aaacacaccuuuagugaag

SEQ ID NO: 1291846 - RNA, 19 nt, Homo sapiens
  misc_RNA (1)...(19): siRNA sense strand
gaacuuaaaggaucaguag

SEQ ID NO: 1291847 - RNA, 19 nt, Homo sapiens
  misc_RNA (1)...(19): siRNA sense strand
gaaaacagauaucaggauu

SEQ ID NO: 1291848 - RNA, 19 nt, Homo sapiens
  misc_RNA (1)...(19): siRNA sense strand
uaaaggaucaguagcaauu

SEQ ID NO: 1291849 - RNA, 19 nt, Homo sapiens
  misc_RNA (1)...(19): siRNA sense strand
aaaugggacuuacgaguuu

SEQ ID NO: 1291850 - RNA, 19 nt, Homo sapiens
  misc_RNA (1)...(19): siRNA sense strand
guuaucagaugcacuuuau

SEQ ID NO: 1291851 - RNA, 19 nt, Homo sapiens
  misc_RNA (1)...(19): siRNA sense strand
ugagauuggugaacgagua

SEQ ID NO: 1291852 - RNA, 19 nt, Homo sapiens
  misc_RNA (1)...(19): siRNA sense strand
gugaacgaguagauuauaa

SEQ ID NO: 1291853 - RNA, 19 nt, Homo sapiens
  misc_RNA (1)...(19): siRNA sense strand
gagagagcacgauuuauug

SEQ ID NO: 1291854 - RNA, 19 nt, Homo sapiens
  misc_RNA (1)...(19): siRNA sense strand
caaaugggacuuacgaguu

SEQ ID NO: 1291855 - RNA, 19 nt, Homo sapiens
  misc_RNA (1)...(19): siRNA sense strand
ggucauugcugugauuguu

SEQ ID NO: 1291856 - RNA, 19 nt, Homo sapiens
  misc_RNA (1)...(19): siRNA sense strand
ccagauccauuuucacuua

SEQ ID NO: 1291857 - RNA, 19 nt, Homo sapiens
  misc_RNA (1)...(19): siRNA sense strand
gaaggaauacuugacaguu

SEQ ID NO: 1291858 - RNA, 19 nt, Homo sapiens
  misc_RNA (1)...(19): siRNA sense strand
aaggaauacuugacaguuu

SEQ ID NO: 1291859 - RNA, 19 nt, Homo sapiens
  misc_RNA (1)...(19): siRNA sense strand
ucagaugacgccuguuaua

SEQ ID NO: 1291860 - RNA, 19 nt, Homo sapiens
  misc_RNA (1)...(19): siRNA sense strand
gaaaacacaccuuuaguga

SEQ ID NO: 1291861 - RNA, 19 nt, Homo sapiens
  misc_RNA (1)...(19): siRNA sense strand
gaugacgccuguuauagag

SEQ ID NO: 1291862 - RNA, 19 nt, Homo sapiens
  misc_RNA (1)...(19): siRNA sense strand
gagaaacauguccauauau

SEQ ID NO: 1291863 - RNA, 19 nt, Homo sapiens
  misc_RNA (1)...(19): siRNA sense strand
acgaguagauuauaagugu

SEQ ID NO: 1291864 - RNA, 19 nt, Homo sapiens
  misc_RNA (1)...(19): siRNA sense strand
cuacaaagcaacaguuaug

SEQ ID NO: 1291865 - RNA, 19 nt, Homo sapiens
  misc_RNA (1)...(19): siRNA sense strand
ccaccaacauuugaagcua

SEQ ID NO: 1291866 - RNA, 19 nt, Homo sapiens
  misc_RNA (1)...(19): siRNA sense strand
uauacgggauccuuuaaau

SEQ ID NO: 1291867 - RNA, 19 nt, Homo sapiens
  misc_RNA (1)...(19): siRNA sense strand
cgaguuugguuaucagaug

SEQ ID NO: 1291868 - RNA, 19 nt, Homo sapiens
  misc_RNA (1)...(19): siRNA sense strand
gaacgaguagauuauaagu

SEQ ID NO: 1291869 - RNA, 19 nt, Homo sapiens
  misc_RNA (1)...(19): siRNA sense strand
gugaggagccaccaacauu

SEQ ID NO: 1291870 - RNA, 19 nt, Homo sapiens
  misc_RNA (1)...(19): siRNA sense strand
gauggcagcgacacaauug

SEQ ID NO: 1291871 - RNA, 19 nt, Homo sapiens
  misc_RNA (1)...(19): siRNA sense strand
gcuauggagcucauuggua

SEQ ID NO: 1291872 - RNA, 19 nt, Homo sapiens
  misc_RNA (1)...(19): siRNA sense strand
gaggagccaccaacauuug

SEQ ID NO: 1291873 - RNA, 19 nt, Homo sapiens
  misc_RNA (1)...(19): siRNA sense strand
acacaccuuuagugaagua

SEQ ID NO: 1291874 - RNA, 19 nt, Homo sapiens
  misc_RNA (1)...(19): siRNA sense strand
ucucagaugacgccuguua

SEQ ID NO: 1291875 - RNA, 19 nt, Homo sapiens
  misc_RNA (1)...(19): siRNA sense strand
uagagaaacauguccauau

SEQ ID NO: 1291876 - RNA, 19 nt, Homo sapiens
  misc_RNA (1)...(19): siRNA sense strand
guuccaaagugucuuaaag

SEQ ID NO: 1291877 - RNA, 19 nt, Homo sapiens
  misc_RNA (1)...(19): siRNA sense strand
ggugaacgaguagauuaua

SEQ ID NO: 1291878 - RNA, 19 nt, Homo sapiens
  misc_RNA (1)...(19): siRNA sense strand
gaaguagaaguauuugagu

SEQ ID NO: 1291879 - RNA, 19 nt, Homo sapiens
  misc_RNA (1)...(19): siRNA sense strand
gaaacauguccauauauac

SEQ ID NO: 1291880 - RNA, 19 nt, Homo sapiens
  misc_RNA (1)...(19): siRNA sense strand
ugacgccuguuauagagaa

SEQ ID NO: 1291881 - RNA, 19 nt, Homo sapiens
  misc_RNA (1)...(19): siRNA sense strand
cgaguagauuauaagugua

SEQ ID NO: 1291882 - RNA, 19 nt, Homo sapiens
  misc_RNA (1)...(19): siRNA sense strand
gcacuuuauuuguaaugag

SEQ ID NO: 1291883 - RNA, 19 nt, Homo sapiens
  misc_RNA (1)...(19): siRNA sense strand
guagaaguauuugaguauc

SEQ ID NO: 1291884 - RNA, 19 nt, Homo sapiens
  misc_RNA (1)...(19): siRNA sense strand
guauuugaguaucuugaug

SEQ ID NO: 1291885 - RNA, 19 nt, Homo sapiens
  misc_RNA (1)...(19): siRNA sense strand
aggaauacuugacaguuug

SEQ ID NO: 1291886 - RNA, 19 nt, Homo sapiens
  misc_RNA (1)...(19): siRNA sense strand
ccaaaacccuacuaugaga

SEQ ID NO: 1291887 - RNA, 19 nt, Homo sapiens
  misc_RNA (1)...(19): siRNA sense strand
aguguaaaguggucaaaug

SEQ ID NO: 1291888 - RNA, 19 nt, Homo sapiens
  misc_RNA (1)...(19): siRNA sense strand
ccacccauacuauuuguga

SEQ ID NO: 1291889 - RNA, 19 nt, Homo sapiens
  misc_RNA (1)...(19): siRNA sense strand
caccaacauuugaagcuau

SEQ ID NO: 1291890 - RNA, 19 nt, Homo sapiens
  misc_RNA (1)...(19): siRNA sense strand
uuggagagagcacgauuua

SEQ ID NO: 1291891 - RNA, 19 nt, Homo sapiens
  misc_RNA (1)...(19): siRNA sense strand
gguuaucagaugcacuuua

SEQ ID NO: 1291892 - RNA, 19 nt, Homo sapiens
  misc_RNA (1)...(19): siRNA sense strand
ugaggagccaccaacauuu

SEQ ID NO: 1291893 - RNA, 19 nt, Homo sapiens
  misc_RNA (1)...(19): siRNA sense strand
ggaaggaauacuugacagu

SEQ ID NO: 1291894 - RNA, 19 nt, Homo sapiens
  misc_RNA (1)...(19): siRNA sense strand
gaggaaggaauacuugaca

SEQ ID NO: 1291895 - RNA, 19 nt, Homo sapiens
  misc_RNA (1)...(19): siRNA sense strand
ccaguuccaaagugucuua

SEQ ID NO: 1291896 - RNA, 19 nt, Homo sapiens
  misc_RNA (1)...(19): siRNA sense strand
ugaguaucuugaugcagua

SEQ ID NO: 1291897 - RNA, 19 nt, Homo sapiens
  misc_RNA (1)...(19): siRNA sense strand
caccuuuagugaaguagaa

SEQ ID NO: 1291898 - RNA, 19 nt, Homo sapiens
  misc_RNA (1)...(19): siRNA sense strand
acagauaucaggauuugga

SEQ ID NO: 1291899 - RNA, 19 nt, Homo sapiens
  misc_RNA (1)...(19): siRNA sense strand
ucauugcugugauuguuau

SEQ ID NO: 1291900 - RNA, 19 nt, Homo sapiens
  misc_RNA (1)...(19): siRNA sense strand
ucagaugcacuuuauuugu

SEQ ID NO: 1291901 - RNA, 19 nt, Homo sapiens
  misc_RNA (1)...(19): siRNA sense strand
gugcugcuccagaguguaa

SEQ ID NO: 1291902 - RNA, 19 nt, Homo sapiens
  misc_RNA (1)...(19): siRNA sense strand
ggaaaacacaccuuuagug

SEQ ID NO: 1291903 - RNA, 19 nt, Homo sapiens
  misc_RNA (1)...(19): siRNA sense strand
aaggaucaguagcaauuug

SEQ ID NO: 1291904 - RNA, 19 nt, Homo sapiens
  misc_RNA (1)...(19): siRNA sense strand
uauauacgggauccuuuaa

SEQ ID NO: 1291905 - RNA, 19 nt, Homo sapiens
  misc_RNA (1)...(19): siRNA sense strand
ugaaguagaaguauuugag

SEQ ID NO: 1291906 - RNA, 19 nt, Homo sapiens
  misc_RNA (1)...(19): siRNA sense strand
cuugacaguuuggauguuu

SEQ ID NO: 1291907 - RNA, 19 nt, Homo sapiens
  misc_RNA (1)...(19): siRNA sense strand
cauauauacgggauccuuu

SEQ ID NO: 1291908 - RNA, 19 nt, Homo sapiens
  misc_RNA (1)...(19): siRNA sense strand
auauauacgggauccuuua

SEQ ID NO: 1291909 - RNA, 19 nt, Homo sapiens
  misc_RNA (1)...(19): siRNA sense strand
cuuaaaggaucaguagcaa

SEQ ID NO: 1291910 - RNA, 19 nt, Homo sapiens
  misc_RNA (1)...(19): siRNA sense strand
uaaaccugaggaaggaaua

SEQ ID NO: 1291911 - RNA, 19 nt, Homo sapiens
  misc_RNA (1)...(19): siRNA sense strand
agaugacgccuguuauaga

SEQ ID NO: 1291912 - RNA, 19 nt, Homo sapiens
  misc_RNA (1)...(19): siRNA sense strand
ugugauuguuauugccaua

SEQ ID NO: 1291913 - RNA, 19 nt, Homo sapiens
  misc_RNA (1)...(19): siRNA sense strand
gagagcacgauuuauugug

SEQ ID NO: 1291914 - RNA, 19 nt, Homo sapiens
  misc_RNA (1)...(19): siRNA sense strand
gaaguauuugaguaucuug

SEQ ID NO: 1291915 - RNA, 19 nt, Homo sapiens
  misc_RNA (1)...(19): siRNA sense strand
ggcuaccugucucagauga

SEQ ID NO: 1291916 - RNA, 19 nt, Homo sapiens
  misc_RNA (1)...(19): siRNA sense strand
gauaucaggauuuggaaaa

SEQ ID NO: 1291917 - RNA, 19 nt, Homo sapiens
  misc_RNA (1)...(19): siRNA sense strand
ccucuugccacccauacua

SEQ ID NO: 1291918 - RNA, 19 nt, Homo sapiens
  misc_RNA (1)...(19): siRNA sense strand
ccaugguguugcugcugua

SEQ ID NO: 1291919 - RNA, 19 nt, Homo sapiens
  misc_RNA (1)...(19): siRNA sense strand
cagaugacgccuguuauag

SEQ ID NO: 1291920 - RNA, 19 nt, Homo sapiens
  misc_RNA (1)...(19): siRNA sense strand
uuggugaacgaguagauua

SEQ ID NO: 1291921 - RNA, 19 nt, Homo sapiens
  misc_RNA (1)...(19): siRNA sense strand
gucauugcugugauuguua

SEQ ID NO: 1291922 - RNA, 19 nt, Homo sapiens
  misc_RNA (1)...(19): siRNA sense strand
ggagccaccaacauuugaa

SEQ ID NO: 1291923 - RNA, 19 nt, Homo sapiens
  misc_RNA (1)...(19): siRNA sense strand
gcgcuuuccuggguugcuu

SEQ ID NO: 1291924 - RNA, 19 nt, Homo sapiens
  misc_RNA (1)...(19): siRNA sense strand
uacuacaaagcaacaguua

SEQ ID NO: 1291925 - RNA, 19 nt, Homo sapiens
  misc_RNA (1)...(19): siRNA sense strand
cuugaugcaguaacuuaua

SEQ ID NO: 1291926 - RNA, 19 nt, Homo sapiens
  misc_RNA (1)...(19): siRNA sense strand
aaacauguccauauauacg

SEQ ID NO: 1291927 - RNA, 19 nt, Homo sapiens
  misc_RNA (1)...(19): siRNA sense strand
guguaaaguggucaaaugu

SEQ ID NO: 1291928 - RNA, 19 nt, Homo sapiens
  misc_RNA (1)...(19): siRNA sense strand
cuuacgaguuugguuauca

SEQ ID NO: 1291929 - RNA, 19 nt, Homo sapiens
  misc_RNA (1)...(19): siRNA sense strand
uacgggauccuuuaaaugg

SEQ ID NO: 1291930 - RNA, 19 nt, Homo sapiens
  misc_RNA (1)...(19): siRNA sense strand
aaccaaaacccuacuauga

SEQ ID NO: 1291931 - RNA, 19 nt, Homo sapiens
  misc_RNA (1)...(19): siRNA sense strand
cccaauaugugaaaagguu

SEQ ID NO: 1291932 - RNA, 19 nt, Homo sapiens
  misc_RNA (1)...(19): siRNA sense strand
cgauggcagcgacacaauu

SEQ ID NO: 1291933 - RNA, 19 nt, Homo sapiens
  misc_RNA (1)...(19): siRNA sense strand
gauccauuuucacuuauug

SEQ ID NO: 1291934 - RNA, 19 nt, Homo sapiens
  misc_RNA (1)...(19): siRNA sense strand
uugaugcaguaacuuauag

SEQ ID NO: 1291935 - RNA, 19 nt, Homo sapiens
  misc_RNA (1)...(19): siRNA sense strand
guaucuugaugcaguaacu

SEQ ID NO: 1291936 - RNA, 19 nt, Homo sapiens
  misc_RNA (1)...(19): siRNA sense strand
caacauuugaagcuaugga

SEQ ID NO: 1291937 - RNA, 19 nt, Homo sapiens
  misc_RNA (1)...(19): siRNA sense strand
gagauuggugaacgaguag

SEQ ID NO: 1291938 - RNA, 19 nt, Homo sapiens
  misc_RNA (1)...(19): siRNA sense strand
ggagagagcacgauuuauu

SEQ ID NO: 1291939 - RNA, 19 nt, Homo sapiens
  misc_RNA (1)...(19): siRNA sense strand
agagaaacauguccauaua

SEQ ID NO: 1291940 - RNA, 19 nt, Homo sapiens
  misc_RNA (1)...(19): siRNA sense strand
cagaugcacuuuauuugua

SEQ ID NO: 1291941 - RNA, 19 nt, Homo sapiens
  misc_RNA (1)...(19): siRNA sense strand
ggacuuacgaguuugguua

SEQ ID NO: 1291942 - RNA, 19 nt, Homo sapiens
  misc_RNA (1)...(19): siRNA sense strand
aaacagauaucaggauuug

SEQ ID NO: 1291943 - RNA, 19 nt, Homo sapiens
  misc_RNA (1)...(19): siRNA sense strand
cuauggagcucauugguaa

SEQ ID NO: 1291944 - RNA, 19 nt, Homo sapiens
  misc_RNA (1)...(19): siRNA sense strand
aaacacaccuuuagugaag

SEQ ID NO: 1291945 - RNA, 19 nt, Homo sapiens
  misc_RNA (1)...(19): siRNA sense strand
gaacuuaaaggaucaguag

SEQ ID NO: 1291946 - RNA, 19 nt, Homo sapiens
  misc_RNA (1)...(19): siRNA sense strand
gaaaacagauaucaggauu

SEQ ID NO: 1291947 - RNA, 19 nt, Homo sapiens
  misc_RNA (1)...(19): siRNA sense strand
uaaaggaucaguagcaauu

SEQ ID NO: 1291948 - RNA, 19 nt, Homo sapiens
  misc_RNA (1)...(19): siRNA sense strand
aaaugggacuuacgaguuu

SEQ ID NO: 1291949 - RNA, 19 nt, Homo sapiens
  misc_RNA (1)...(19): siRNA sense strand
guuaucagaugcacuuuau

SEQ ID NO: 1291950 - RNA, 19 nt, Homo sapiens
  misc_RNA (1)...(19): siRNA sense strand
gagcugaauaugccacuua

SEQ ID NO: 1291951 - RNA, 19 nt, Homo sapiens
  misc_RNA (1)...(19): siRNA sense strand
ugagauuggugaacgagua

SEQ ID NO: 1291952 - RNA, 19 nt, Homo sapiens
  misc_RNA (1)...(19): siRNA sense strand
gugaacgaguagauuauaa

SEQ ID NO: 1291953 - RNA, 19 nt, Homo sapiens
  misc_RNA (1)...(19): siRNA sense strand
gagagagcacgauuuauug

SEQ ID NO: 1291954 - RNA, 19 nt, Homo sapiens
  misc_RNA (1)...(19): siRNA sense strand
caaaugggacuuacgaguu

SEQ ID NO: 1291955 - RNA, 19 nt, Homo sapiens
  misc_RNA (1)...(19): siRNA sense strand
ggucauugcugugauuguu

SEQ ID NO: 1291956 - RNA, 19 nt, Homo sapiens
  misc_RNA (1)...(19): siRNA sense strand
ccagauccauuuucacuua

SEQ ID NO: 1291957 - RNA, 19 nt, Homo sapiens
  misc_RNA (1)...(19): siRNA sense strand
gaaggaauacuugacaguu

SEQ ID NO: 1291958 - RNA, 19 nt, Homo sapiens
  misc_RNA (1)...(19): siRNA sense strand
aaggaauacuugacaguuu

SEQ ID NO: 1291959 - RNA, 19 nt, Homo sapiens
  misc_RNA (1)...(19): siRNA sense strand
ucagaugacgccuguuaua

SEQ ID NO: 1291960 - RNA, 19 nt, Homo sapiens
  misc_RNA (1)...(19): siRNA sense strand
gaaaacacaccuuuaguga

SEQ ID NO: 1291961 - RNA, 19 nt, Homo sapiens
  misc_RNA (1)...(19): siRNA sense strand
gaugacgccuguuauagag

SEQ ID NO: 1291962 - RNA, 19 nt, Homo sapiens
  misc_RNA (1)...(19): siRNA sense strand
gagaaacauguccauauau

SEQ ID NO: 1291963 - RNA, 19 nt, Homo sapiens
  misc_RNA (1)...(19): siRNA sense strand
ccacuuaccagacuaaauc

SEQ ID NO: 1291964 - RNA, 19 nt, Homo sapiens
  misc_RNA (1)...(19): siRNA sense strand
acgaguagauuauaagugu

SEQ ID NO: 1291965 - RNA, 19 nt, Homo sapiens
  misc_RNA (1)...(19): siRNA sense strand
cuacaaagcaacaguuaug

SEQ ID NO: 1291966 - RNA, 19 nt, Homo sapiens
  misc_RNA (1)...(19): siRNA sense strand
ccaccaacauuugaagcua

SEQ ID NO: 1291967 - RNA, 19 nt, Homo sapiens
  misc_RNA (1)...(19): siRNA sense strand
uauacgggauccuuuaaau

SEQ ID NO: 1291968 - RNA, 19 nt, Homo sapiens
  misc_RNA (1)...(19): siRNA sense strand
cgaguuugguuaucagaug

SEQ ID NO: 1291969 - RNA, 19 nt, Homo sapiens
  misc_RNA (1)...(19): siRNA sense strand
gaacgaguagauuauaagu

SEQ ID NO: 1291970 - RNA, 19 nt, Homo sapiens
  misc_RNA (1)...(19): siRNA sense strand
gugaggagccaccaacauu

SEQ ID NO: 1291971 - RNA, 19 nt, Homo sapiens
  misc_RNA (1)...(19): siRNA sense strand
gauggcagcgacacaauug

SEQ ID NO: 1291972 - RNA, 19 nt, Homo sapiens
  misc_RNA (1)...(19): siRNA sense strand
ucucagaugacgccuguua

SEQ ID NO: 1291973 - RNA, 19 nt, Homo sapiens
  misc_RNA (1)...(19): siRNA sense strand
gaggagccaccaacauuug

SEQ ID NO: 1291974 - RNA, 19 nt, Homo sapiens
  misc_RNA (1)...(19): siRNA sense strand
gcuauggagcucauuggua

SEQ ID NO: 1291975 - RNA, 19 nt, Homo sapiens
  misc_RNA (1)...(19): siRNA sense strand
acacaccuuuagugaagua

SEQ ID NO: 1291976 - RNA, 19 nt, Homo sapiens
  misc_RNA (1)...(19): siRNA sense strand
uagagaaacauguccauau

SEQ ID NO: 1291977 - RNA, 19 nt, Homo sapiens
  misc_RNA (1)...(19): siRNA sense strand
guuccaaagugucuuaaag

SEQ ID NO: 1291978 - RNA, 19 nt, Homo sapiens
  misc_RNA (1)...(19): siRNA sense strand
ggugaacgaguagauuaua

SEQ ID NO: 1291979 - RNA, 19 nt, Homo sapiens
  misc_RNA (1)...(19): siRNA sense strand
gaaguagaaguauuugagu

SEQ ID NO: 1291980 - RNA, 19 nt, Homo sapiens
  misc_RNA (1)...(19): siRNA sense strand
gaaacauguccauauauac

SEQ ID NO: 1291981 - RNA, 19 nt, Homo sapiens
  misc_RNA (1)...(19): siRNA sense strand
ugacgccuguuauagagaa

SEQ ID NO: 1291982 - RNA, 19 nt, Homo sapiens
  misc_RNA (1)...(19): siRNA sense strand
cgaguagauuauaagugua

SEQ ID NO: 1291983 - RNA, 19 nt, Homo sapiens
  misc_RNA (1)...(19): siRNA sense strand
gcacuuuauuuguaaugag

SEQ ID NO: 1291984 - RNA, 19 nt, Homo sapiens
  misc_RNA (1)...(19): siRNA sense strand
guagaaguauuugaguauc

SEQ ID NO: 1291985 - RNA, 19 nt, Homo sapiens
  misc_RNA (1)...(19): siRNA sense strand
guauuugaguaucuugaug

SEQ ID NO: 1291986 - RNA, 19 nt, Homo sapiens
  misc_RNA (1)...(19): siRNA sense strand
aggaauacuugacaguuug

SEQ ID NO: 1291987 - RNA, 19 nt, Homo sapiens
  misc_RNA (1)...(19): siRNA sense strand
ccaaaacccuacuaugaga

SEQ ID NO: 1291988 - RNA, 19 nt, Homo sapiens
  misc_RNA (1)...(19): siRNA sense strand
aguguaaaguggucaaaug

SEQ ID NO: 1291989 - RNA, 19 nt, Homo sapiens
  misc_RNA (1)...(19): siRNA sense strand
ccacccauacuauuuguga

SEQ ID NO: 1291990 - RNA, 19 nt, Homo sapiens
  misc_RNA (1)...(19): siRNA sense strand
uuggagagagcacgauuua

SEQ ID NO: 1291991 - RNA, 19 nt, Homo sapiens
  misc_RNA (1)...(19): siRNA sense strand
gguuaucagaugcacuuua

SEQ ID NO: 1291992 - RNA, 19 nt, Homo sapiens
  misc_RNA (1)...(19): siRNA sense strand
caccaacauuugaagcuau

SEQ ID NO: 1291993 - RNA, 19 nt, Homo sapiens
  misc_RNA (1)...(19): siRNA sense strand
ugaggagccaccaacauuu

SEQ ID NO: 1291994 - RNA, 19 nt, Homo sapiens
  misc_RNA (1)...(19): siRNA sense strand
ggaaggaauacuugacagu

SEQ ID NO: 1291995 - RNA, 19 nt, Homo sapiens
  misc_RNA (1)...(19): siRNA sense strand
gaggaaggaauacuugaca

SEQ ID NO: 1291996 - RNA, 19 nt, Homo sapiens
  misc_RNA (1)...(19): siRNA sense strand
ccaguuccaaagugucuua

SEQ ID NO: 1291997 - RNA, 19 nt, Homo sapiens
  misc_RNA (1)...(19): siRNA sense strand
ugaguaucuugaugcagua

SEQ ID NO: 1291998 - RNA, 19 nt, Homo sapiens
  misc_RNA (1)...(19): siRNA sense strand
caccuuuagugaaguagaa

SEQ ID NO: 1291999 - RNA, 19 nt, Homo sapiens
  misc_RNA (1)...(19): siRNA sense strand
acagauaucaggauuugga

SEQ ID NO: 1292000 - RNA, 19 nt, Homo sapiens
  misc_RNA (1)...(19): siRNA sense strand
ucauugcugugauuguuau

SEQ ID NO: 1292001 - RNA, 19 nt, Homo sapiens
  misc_RNA (1)...(19): siRNA sense strand
ucagaugcacuuuauuugu

SEQ ID NO: 1292002 - RNA, 19 nt, Homo sapiens
  misc_RNA (1)...(19): siRNA sense strand
gugcugcuccagaguguaa

SEQ ID NO: 1292003 - RNA, 19 nt, Homo sapiens
  misc_RNA (1)...(19): siRNA sense strand
ggaaaacacaccuuuagug

SEQ ID NO: 1292004 - RNA, 19 nt, Homo sapiens
  misc_RNA (1)...(19): siRNA sense strand
aaggaucaguagcaauuug

SEQ ID NO: 1292005 - RNA, 19 nt, Homo sapiens
  misc_RNA (1)...(19): siRNA sense strand
uauauacgggauccuuuaa

SEQ ID NO: 1292006 - RNA, 19 nt, Homo sapiens
  misc_RNA (1)...(19): siRNA sense strand
ugaaguagaaguauuugag

SEQ ID NO: 1292007 - RNA, 19 nt, Homo sapiens
  misc_RNA (1)...(19): siRNA sense strand
cuugacaguuuggauguuu

SEQ ID NO: 1292008 - RNA, 19 nt, Homo sapiens
  misc_RNA (1)...(19): siRNA sense strand
cauauauacgggauccuuu

SEQ ID NO: 1292009 - RNA, 19 nt, Homo sapiens
  misc_RNA (1)...(19): siRNA sense strand
auauauacgggauccuuua

SEQ ID NO: 1292010 - RNA, 19 nt, Homo sapiens
  misc_RNA (1)...(19): siRNA sense strand
cuuaaaggaucaguagcaa

SEQ ID NO: 1292011 - RNA, 19 nt, Homo sapiens
  misc_RNA (1)...(19): siRNA sense strand
uaaaccugaggaaggaaua

SEQ ID NO: 1292012 - RNA, 19 nt, Homo sapiens
  misc_RNA (1)...(19): siRNA sense strand
agaugacgccuguuauaga

SEQ ID NO: 1292013 - RNA, 19 nt, Homo sapiens
  misc_RNA (1)...(19): siRNA sense strand
ugugauuguuauugccaua

SEQ ID NO: 1292014 - RNA, 19 nt, Homo sapiens
  misc_RNA (1)...(19): siRNA sense strand
gagagcacgauuuauugug

SEQ ID NO: 1292015 - RNA, 19 nt, Homo sapiens
  misc_RNA (1)...(19): siRNA sense strand
gaaguauuugaguaucuug

SEQ ID NO: 1292016 - RNA, 19 nt, Homo sapiens
  misc_RNA (1)...(19): siRNA sense strand
ggcuaccugucucagauga

SEQ ID NO: 1292017 - RNA, 19 nt, Homo sapiens
  misc_RNA (1)...(19): siRNA sense strand
gauaucaggauuuggaaaa

SEQ ID NO: 1292018 - RNA, 19 nt, Homo sapiens
  misc_RNA (1)...(19): siRNA sense strand
ccucuugccacccauacua

SEQ ID NO: 1292019 - RNA, 19 nt, Homo sapiens
  misc_RNA (1)...(19): siRNA sense strand
ccaugguguugcugcugua

SEQ ID NO: 1292020 - RNA, 19 nt, Homo sapiens
  misc_RNA (1)...(19): siRNA sense strand
cagaugacgccuguuauag

SEQ ID NO: 1292021 - RNA, 19 nt, Homo sapiens
  misc_RNA (1)...(19): siRNA sense strand
cagaugguggagcugaaua

SEQ ID NO: 1292022 - RNA, 19 nt, Homo sapiens
  misc_RNA (1)...(19): siRNA sense strand
gucauugcugugauuguua

SEQ ID NO: 1292023 - RNA, 19 nt, Homo sapiens
  misc_RNA (1)...(19): siRNA sense strand
ggagccaccaacauuugaa

SEQ ID NO: 1292024 - RNA, 19 nt, Homo sapiens
  misc_RNA (1)...(19): siRNA sense strand
uuggugaacgaguagauua

SEQ ID NO: 1292025 - RNA, 19 nt, Homo sapiens
  misc_RNA (1)...(19): siRNA sense strand
gcgcuuuccuggguugcuu

SEQ ID NO: 1292026 - RNA, 19 nt, Homo sapiens
  misc_RNA (1)...(19): siRNA sense strand
uacuacaaagcaacaguua

SEQ ID NO: 1292027 - RNA, 19 nt, Homo sapiens
  misc_RNA (1)...(19): siRNA sense strand
cuugaugcaguaacuuaua

SEQ ID NO: 1292028 - RNA, 19 nt, Homo sapiens
  misc_RNA (1)...(19): siRNA sense strand
aaacauguccauauauacg

SEQ ID NO: 1292029 - RNA, 19 nt, Homo sapiens
  misc_RNA (1)...(19): siRNA sense strand
guguaaaguggucaaaugu

SEQ ID NO: 1292030 - RNA, 19 nt, Homo sapiens
  misc_RNA (1)...(19): siRNA sense strand
cuuacgaguuugguuauca

SEQ ID NO: 1292031 - RNA, 19 nt, Homo sapiens
  misc_RNA (1)...(19): siRNA sense strand
uacgggauccuuuaaaugg

SEQ ID NO: 1292032 - RNA, 19 nt, Homo sapiens
  misc_RNA (1)...(19): siRNA sense strand
gcagaugguggagcugaau

SEQ ID NO: 1292033 - RNA, 19 nt, Homo sapiens
  misc_RNA (1)...(19): siRNA sense strand
aaccaaaacccuacuauga

SEQ ID NO: 1292034 - RNA, 19 nt, Homo sapiens
  misc_RNA (1)...(19): siRNA sense strand
uugaugcaguaacuuauag

SEQ ID NO: 1292035 - RNA, 19 nt, Homo sapiens
  misc_RNA (1)...(19): siRNA sense strand
ggagcugaauaugccacuu

SEQ ID NO: 1292036 - RNA, 19 nt, Homo sapiens
  misc_RNA (1)...(19): siRNA sense strand
cgauggcagcgacacaauu

SEQ ID NO: 1292037 - RNA, 19 nt, Homo sapiens
  misc_RNA (1)...(19): siRNA sense strand
gauccauuuucacuuauug

SEQ ID NO: 1292038 - RNA, 19 nt, Homo sapiens
  misc_RNA (1)...(19): siRNA sense strand
ggagagagcacgauuuauu

SEQ ID NO: 1292039 - RNA, 19 nt, Homo sapiens
  misc_RNA (1)...(19): siRNA sense strand
agagaaacauguccauaua

SEQ ID NO: 1292040 - RNA, 19 nt, Homo sapiens
  misc_RNA (1)...(19): siRNA sense strand
cagaugcacuuuauuugua

SEQ ID NO: 1292041 - RNA, 19 nt, Homo sapiens
  misc_RNA (1)...(19): siRNA sense strand
ggacuuacgaguuugguua

SEQ ID NO: 1292042 - RNA, 19 nt, Homo sapiens
  misc_RNA (1)...(19): siRNA sense strand
aaacagauaucaggauuug

SEQ ID NO: 1292043 - RNA, 19 nt, Homo sapiens
  misc_RNA (1)...(19): siRNA sense strand
cuauggagcucauugguaa

SEQ ID NO: 1292044 - RNA, 19 nt, Homo sapiens
  misc_RNA (1)...(19): siRNA sense strand
aaacacaccuuuagugaag

SEQ ID NO: 1292045 - RNA, 19 nt, Homo sapiens
  misc_RNA (1)...(19): siRNA sense strand
gaacuuaaaggaucaguag

SEQ ID NO: 1292046 - RNA, 19 nt, Homo sapiens
  misc_RNA (1)...(19): siRNA sense strand
gaaaacagauaucaggauu

SEQ ID NO: 1292047 - RNA, 19 nt, Homo sapiens
  misc_RNA (1)...(19): siRNA sense strand
uaaaggaucaguagcaauu

SEQ ID NO: 1292048 - RNA, 19 nt, Homo sapiens
  misc_RNA (1)...(19): siRNA sense strand
aaaugggacuuacgaguuu

SEQ ID NO: 1292049 - RNA, 19 nt, Homo sapiens
  misc_RNA (1)...(19): siRNA sense strand
guuaucagaugcacuuuau

SEQ ID NO: 1292050 - RNA, 19 nt, Homo sapiens
  misc_RNA (1)...(19): siRNA sense strand
ugagauuggugaacgagua

SEQ ID NO: 1292051 - RNA, 19 nt, Homo sapiens
  misc_RNA (1)...(19): siRNA sense strand
gugaacgaguagauuauaa

SEQ ID NO: 1292052 - RNA, 19 nt, Homo sapiens
  misc_RNA (1)...(19): siRNA sense strand
gagagagcacgauuuauug

SEQ ID NO: 1292053 - RNA, 19 nt, Homo sapiens
  misc_RNA (1)...(19): siRNA sense strand
caaaugggacuuacgaguu

SEQ ID NO: 1292054 - RNA, 19 nt, Homo sapiens
  misc_RNA (1)...(19): siRNA sense strand
ggucauugcugugauuguu

SEQ ID NO: 1292055 - RNA, 19 nt, Homo sapiens
  misc_RNA (1)...(19): siRNA sense strand
ccagauccauuuucacuua

SEQ ID NO: 1292056 - RNA, 19 nt, Homo sapiens
  misc_RNA (1)...(19): siRNA sense strand
gaaggaauacuugacaguu

SEQ ID NO: 1292057 - RNA, 19 nt, Homo sapiens
  misc_RNA (1)...(19): siRNA sense strand
aaggaauacuugacaguuu

SEQ ID NO: 1292058 - RNA, 19 nt, Homo sapiens
  misc_RNA (1)...(19): siRNA sense strand
ucagaugacgccuguuaua

SEQ ID NO: 1292059 - RNA, 19 nt, Homo sapiens
  misc_RNA (1)...(19): siRNA sense strand
gaaaacacaccuuuaguga

SEQ ID NO: 1292060 - RNA, 19 nt, Homo sapiens
  misc_RNA (1)...(19): siRNA sense strand
gaugacgccuguuauagag

SEQ ID NO: 1292061 - RNA, 19 nt, Homo sapiens
  misc_RNA (1)...(19): siRNA sense strand
gagaaacauguccauauau

SEQ ID NO: 1292062 - RNA, 19 nt, Homo sapiens
  misc_RNA (1)...(19): siRNA sense strand
acgaguagauuauaagugu

SEQ ID NO: 1292063 - RNA, 19 nt, Homo sapiens
  misc_RNA (1)...(19): siRNA sense strand
cuacaaagcaacaguuaug

SEQ ID NO: 1292064 - RNA, 19 nt, Homo sapiens
  misc_RNA (1)...(19): siRNA sense strand
ccaccaacauuugaagcua

SEQ ID NO: 1292065 - RNA, 19 nt, Homo sapiens
  misc_RNA (1)...(19): siRNA sense strand
uauacgggauccuuuaaau

SEQ ID NO: 1292066 - RNA, 19 nt, Homo sapiens
  misc_RNA (1)...(19): siRNA sense strand
cgaguuugguuaucagaug

SEQ ID NO: 1292067 - RNA, 19 nt, Homo sapiens
  misc_RNA (1)...(19): siRNA sense strand
gaacgaguagauuauaagu

SEQ ID NO: 1292068 - RNA, 19 nt, Homo sapiens
  misc_RNA (1)...(19): siRNA sense strand
gugaggagccaccaacauu

SEQ ID NO: 1292069 - RNA, 19 nt, Homo sapiens
  misc_RNA (1)...(19): siRNA sense strand
gauggcagcgacacaauug

SEQ ID NO: 1292070 - RNA, 19 nt, Homo sapiens
  misc_RNA (1)...(19): siRNA sense strand
gcuauggagcucauuggua

SEQ ID NO: 1292071 - RNA, 19 nt, Homo sapiens
  misc_RNA (1)...(19): siRNA sense strand
gaggagccaccaacauuug

SEQ ID NO: 1292072 - RNA, 19 nt, Homo sapiens
  misc_RNA (1)...(19): siRNA sense strand
acacaccuuuagugaagua

SEQ ID NO: 1292073 - RNA, 19 nt, Homo sapiens
  misc_RNA (1)...(19): siRNA sense strand
ucucagaugacgccuguua

SEQ ID NO: 1292074 - RNA, 19 nt, Homo sapiens
  misc_RNA (1)...(19): siRNA sense strand
uagagaaacauguccauau

SEQ ID NO: 1292075 - RNA, 19 nt, Homo sapiens
  misc_RNA (1)...(19): siRNA sense strand
guuccaaagugucuuaaag

SEQ ID NO: 1292076 - RNA, 19 nt, Homo sapiens
  misc_RNA (1)...(19): siRNA sense strand
ggugaacgaguagauuaua

SEQ ID NO: 1292077 - RNA, 19 nt, Homo sapiens
  misc_RNA (1)...(19): siRNA sense strand
gaaguagaaguauuugagu

SEQ ID NO: 1292078 - RNA, 19 nt, Homo sapiens
  misc_RNA (1)...(19): siRNA sense strand
gaaacauguccauauauac

SEQ ID NO: 1292079 - RNA, 19 nt, Homo sapiens
  misc_RNA (1)...(19): siRNA sense strand
ugacgccuguuauagagaa

SEQ ID NO: 1292080 - RNA, 19 nt, Homo sapiens
  misc_RNA (1)...(19): siRNA sense strand
cgaguagauuauaagugua

SEQ ID NO: 1292081 - RNA, 19 nt, Homo sapiens
  misc_RNA (1)...(19): siRNA sense strand
gcacuuuauuuguaaugag

SEQ ID NO: 1292082 - RNA, 19 nt, Homo sapiens
  misc_RNA (1)...(19): siRNA sense strand
guagaaguauuugaguauc

SEQ ID NO: 1292083 - RNA, 19 nt, Homo sapiens
  misc_RNA (1)...(19): siRNA sense strand
guauuugaguaucuugaug

SEQ ID NO: 1292084 - RNA, 19 nt, Homo sapiens
  misc_RNA (1)...(19): siRNA sense strand
aggaauacuugacaguuug

SEQ ID NO: 1292085 - RNA, 19 nt, Homo sapiens
  misc_RNA (1)...(19): siRNA sense strand
ccaaaacccuacuaugaga

SEQ ID NO: 1292086 - RNA, 19 nt, Homo sapiens
  misc_RNA (1)...(19): siRNA sense strand
aguguaaaguggucaaaug

SEQ ID NO: 1292087 - RNA, 19 nt, Homo sapiens
  misc_RNA (1)...(19): siRNA sense strand
ccacccauacuauuuguga

SEQ ID NO: 1292088 - RNA, 19 nt, Homo sapiens
  misc_RNA (1)...(19): siRNA sense strand
caccaacauuugaagcuau

SEQ ID NO: 1292089 - RNA, 19 nt, Homo sapiens
  misc_RNA (1)...(19): siRNA sense strand
uuggagagagcacgauuua

SEQ ID NO: 1292090 - RNA, 19 nt, Homo sapiens
  misc_RNA (1)...(19): siRNA sense strand
gguuaucagaugcacuuua

SEQ ID NO: 1292091 - RNA, 19 nt, Homo sapiens
  misc_RNA (1)...(19): siRNA sense strand
ugaggagccaccaacauuu

SEQ ID NO: 1292092 - RNA, 19 nt, Homo sapiens
  misc_RNA (1)...(19): siRNA sense strand
ggaaggaauacuugacagu

SEQ ID NO: 1292093 - RNA, 19 nt, Homo sapiens
  misc_RNA (1)...(19): siRNA sense strand
gaggaaggaauacuugaca

SEQ ID NO: 1292094 - RNA, 19 nt, Homo sapiens
  misc_RNA (1)...(19): siRNA sense strand
ccaguuccaaagugucuua

SEQ ID NO: 1292095 - RNA, 19 nt, Homo sapiens
  misc_RNA (1)...(19): siRNA sense strand
ugaguaucuugaugcagua

SEQ ID NO: 1292096 - RNA, 19 nt, Homo sapiens
  misc_RNA (1)...(19): siRNA sense strand
caccuuuagugaaguagaa

SEQ ID NO: 1292097 - RNA, 19 nt, Homo sapiens
  misc_RNA (1)...(19): siRNA sense strand
acagauaucaggauuugga

SEQ ID NO: 1292098 - RNA, 19 nt, Homo sapiens
  misc_RNA (1)...(19): siRNA sense strand
ucauugcugugauuguuau

SEQ ID NO: 1292099 - RNA, 19 nt, Homo sapiens
  misc_RNA (1)...(19): siRNA sense strand
ucagaugcacuuuauuugu

SEQ ID NO: 1292100 - RNA, 19 nt, Homo sapiens
  misc_RNA (1)...(19): siRNA sense strand
gugcugcuccagaguguaa

SEQ ID NO: 1292101 - RNA, 19 nt, Homo sapiens
  misc_RNA (1)...(19): siRNA sense strand
ggaaaacacaccuuuagug

SEQ ID NO: 1292102 - RNA, 19 nt, Homo sapiens
  misc_RNA (1)...(19): siRNA sense strand
aaggaucaguagcaauuug

SEQ ID NO: 1292103 - RNA, 19 nt, Homo sapiens
  misc_RNA (1)...(19): siRNA sense strand
uauauacgggauccuuuaa

SEQ ID NO: 1292104 - RNA, 19 nt, Homo sapiens
  misc_RNA (1)...(19): siRNA sense strand
ugaaguagaaguauuugag

SEQ ID NO: 1292105 - RNA, 19 nt, Homo sapiens
  misc_RNA (1)...(19): siRNA sense strand
cuugacaguuuggauguuu

SEQ ID NO: 1292106 - RNA, 19 nt, Homo sapiens
  misc_RNA (1)...(19): siRNA sense strand
cauauauacgggauccuuu

SEQ ID NO: 1292107 - RNA, 19 nt, Homo sapiens
  misc_RNA (1)...(19): siRNA sense strand
auauauacgggauccuuua

SEQ ID NO: 1292108 - RNA, 19 nt, Homo sapiens
  misc_RNA (1)...(19): siRNA sense strand
cuuaaaggaucaguagcaa

SEQ ID NO: 1292109 - RNA, 19 nt, Homo sapiens
  misc_RNA (1)...(19): siRNA sense strand
uaaaccugaggaaggaaua

SEQ ID NO: 1292110 - RNA, 19 nt, Homo sapiens
  misc_RNA (1)...(19): siRNA sense strand
agaugacgccuguuauaga

SEQ ID NO: 1292111 - RNA, 19 nt, Homo sapiens
  misc_RNA (1)...(19): siRNA sense strand
ugugauuguuauugccaua

SEQ ID NO: 1292112 - RNA, 19 nt, Homo sapiens
  misc_RNA (1)...(19): siRNA sense strand
gagagcacgauuuauugug

SEQ ID NO: 1292113 - RNA, 19 nt, Homo sapiens
  misc_RNA (1)...(19): siRNA sense strand
gaaguauuugaguaucuug

SEQ ID NO: 1292114 - RNA, 19 nt, Homo sapiens
  misc_RNA (1)...(19): siRNA sense strand
ggcuaccugucucagauga

SEQ ID NO: 1292115 - RNA, 19 nt, Homo sapiens
  misc_RNA (1)...(19): siRNA sense strand
gauaucaggauuuggaaaa

SEQ ID NO: 1292116 - RNA, 19 nt, Homo sapiens
  misc_RNA (1)...(19): siRNA sense strand
ccucuugccacccauacua

SEQ ID NO: 1292117 - RNA, 19 nt, Homo sapiens
  misc_RNA (1)...(19): siRNA sense strand
ccaugguguugcugcugua

SEQ ID NO: 1292118 - RNA, 19 nt, Homo sapiens
  misc_RNA (1)...(19): siRNA sense strand
cagaugacgccuguuauag

SEQ ID NO: 1292119 - RNA, 19 nt, Homo sapiens
  misc_RNA (1)...(19): siRNA sense strand
uuggugaacgaguagauua

SEQ ID NO: 1292120 - RNA, 19 nt, Homo sapiens
  misc_RNA (1)...(19): siRNA sense strand
gucauugcugugauuguua

SEQ ID NO: 1292121 - RNA, 19 nt, Homo sapiens
  misc_RNA (1)...(19): siRNA sense strand
ggagccaccaacauuugaa

SEQ ID NO: 1292122 - RNA, 19 nt, Homo sapiens
  misc_RNA (1)...(19): siRNA sense strand
gcgcuuuccuggguugcuu

SEQ ID NO: 1292123 - RNA, 19 nt, Homo sapiens
  misc_RNA (1)...(19): siRNA sense strand
uacuacaaagcaacaguua

SEQ ID NO: 1292124 - RNA, 19 nt, Homo sapiens
  misc_RNA (1)...(19): siRNA sense strand
cuugaugcaguaacuuaua

SEQ ID NO: 1292125 - RNA, 19 nt, Homo sapiens
  misc_RNA (1)...(19): siRNA sense strand
aaacauguccauauauacg

SEQ ID NO: 1292126 - RNA, 19 nt, Homo sapiens
  misc_RNA (1)...(19): siRNA sense strand
guguaaaguggucaaaugu

SEQ ID NO: 1292127 - RNA, 19 nt, Homo sapiens
  misc_RNA (1)...(19): siRNA sense strand
cuuacgaguuugguuauca

SEQ ID NO: 1292128 - RNA, 19 nt, Homo sapiens
  misc_RNA (1)...(19): siRNA sense strand
uacgggauccuuuaaaugg

SEQ ID NO: 1292129 - RNA, 19 nt, Homo sapiens
  misc_RNA (1)...(19): siRNA sense strand
aaccaaaacccuacuauga

SEQ ID NO: 1292130 - RNA, 19 nt, Homo sapiens
  misc_RNA (1)...(19): siRNA sense strand
cccaauaugugaaaagguu

SEQ ID NO: 1292131 - RNA, 19 nt, Homo sapiens
  misc_RNA (1)...(19): siRNA sense strand
cgauggcagcgacacaauu

SEQ ID NO: 1292132 - RNA, 19 nt, Homo sapiens
  misc_RNA (1)...(19): siRNA sense strand
gauccauuuucacuuauug

SEQ ID NO: 1292133 - RNA, 19 nt, Homo sapiens
  misc_RNA (1)...(19): siRNA sense strand
uugaugcaguaacuuauag

SEQ ID NO: 1292134 - RNA, 19 nt, Homo sapiens
  misc_RNA (1)...(19): siRNA sense strand
guaucuugaugcaguaacu

SEQ ID NO: 1292135 - RNA, 19 nt, Homo sapiens
  misc_RNA (1)...(19): siRNA sense strand
caacauuugaagcuaugga

SEQ ID NO: 1292136 - RNA, 19 nt, Homo sapiens
  misc_RNA (1)...(19): siRNA sense strand
gagauuggugaacgaguag

SEQ ID NO: 1292137 - RNA, 19 nt, Homo sapiens
  misc_RNA (1)...(19): siRNA sense strand
ggagagagcacgauuuauu

SEQ ID NO: 1292138 - RNA, 19 nt, Homo sapiens
  misc_RNA (1)...(19): siRNA sense strand
agagaaacauguccauaua

SEQ ID NO: 1292139 - RNA, 19 nt, Homo sapiens
  misc_RNA (1)...(19): siRNA sense strand
cagaugcacuuuauuugua

SEQ ID NO: 1292140 - RNA, 19 nt, Homo sapiens
  misc_RNA (1)...(19): siRNA sense strand
ggacuuacgaguuugguua

SEQ ID NO: 1292141 - RNA, 19 nt, Homo sapiens
  misc_RNA (1)...(19): siRNA sense strand
aaacagauaucaggauuug

SEQ ID NO: 1292142 - RNA, 19 nt, Homo sapiens
  misc_RNA (1)...(19): siRNA sense strand
cuauggagcucauugguaa

SEQ ID NO: 1292143 - RNA, 19 nt, Homo sapiens
  misc_RNA (1)...(19): siRNA sense strand
aaacacaccuuuagugaag

SEQ ID NO: 1292144 - RNA, 19 nt, Homo sapiens
  misc_RNA (1)...(19): siRNA sense strand
gaacuuaaaggaucaguag

SEQ ID NO: 1292145 - RNA, 19 nt, Homo sapiens
  misc_RNA (1)...(19): siRNA sense strand
gaaaacagauaucaggauu

SEQ ID NO: 1292146 - RNA, 19 nt, Homo sapiens
  misc_RNA (1)...(19): siRNA sense strand
uaaaggaucaguagcaauu

SEQ ID NO: 1292147 - RNA, 19 nt, Homo sapiens
  misc_RNA (1)...(19): siRNA sense strand
aaaugggacuuacgaguuu

SEQ ID NO: 1292148 - RNA, 19 nt, Homo sapiens
  misc_RNA (1)...(19): siRNA sense strand
guuaucagaugcacuuuau

SEQ ID NO: 1292149 - RNA, 19 nt, Homo sapiens
  misc_RNA (1)...(19): siRNA sense strand
ugagauuggugaacgagua

SEQ ID NO: 1292150 - RNA, 19 nt, Homo sapiens
  misc_RNA (1)...(19): siRNA sense strand
gugaacgaguagauuauaa

SEQ ID NO: 1292151 - RNA, 19 nt, Homo sapiens
  misc_RNA (1)...(19): siRNA sense strand
gagagagcacgauuuauug

SEQ ID NO: 1292152 - RNA, 19 nt, Homo sapiens
  misc_RNA (1)...(19): siRNA sense strand
caaaugggacuuacgaguu

SEQ ID NO: 1292153 - RNA, 19 nt, Homo sapiens
  misc_RNA (1)...(19): siRNA sense strand
ggucauugcugugauuguu

SEQ ID NO: 1292154 - RNA, 19 nt, Homo sapiens
  misc_RNA (1)...(19): siRNA sense strand
ccagauccauuuucacuua

SEQ ID NO: 1292155 - RNA, 19 nt, Homo sapiens
  misc_RNA (1)...(19): siRNA sense strand
gaaggaauacuugacaguu

SEQ ID NO: 1292156 - RNA, 19 nt, Homo sapiens
  misc_RNA (1)...(19): siRNA sense strand
aaggaauacuugacaguuu

SEQ ID NO: 1292157 - RNA, 19 nt, Homo sapiens
  misc_RNA (1)...(19): siRNA sense strand
ucagaugacgccuguuaua

SEQ ID NO: 1292158 - RNA, 19 nt, Homo sapiens
  misc_RNA (1)...(19): siRNA sense strand
gaaaacacaccuuuaguga

SEQ ID NO: 1292159 - RNA, 19 nt, Homo sapiens
  misc_RNA (1)...(19): siRNA sense strand
gaugacgccuguuauagag

SEQ ID NO: 1292160 - RNA, 19 nt, Homo sapiens
  misc_RNA (1)...(19): siRNA sense strand
gagaaacauguccauauau

SEQ ID NO: 1292161 - RNA, 19 nt, Homo sapiens
  misc_RNA (1)...(19): siRNA sense strand
acgaguagauuauaagugu

SEQ ID NO: 1292162 - RNA, 19 nt, Homo sapiens
  misc_RNA (1)...(19): siRNA sense strand
cuacaaagcaacaguuaug

SEQ ID NO: 1292163 - RNA, 19 nt, Homo sapiens
  misc_RNA (1)...(19): siRNA sense strand
ccaccaacauuugaagcua

SEQ ID NO: 1292164 - RNA, 19 nt, Homo sapiens
  misc_RNA (1)...(19): siRNA sense strand
uauacgggauccuuuaaau

SEQ ID NO: 1292165 - RNA, 19 nt, Homo sapiens
  misc_RNA (1)...(19): siRNA sense strand
cgaguuugguuaucagaug

SEQ ID NO: 1292166 - RNA, 19 nt, Homo sapiens
  misc_RNA (1)...(19): siRNA sense strand
gaacgaguagauuauaagu

SEQ ID NO: 1292167 - RNA, 19 nt, Homo sapiens
  misc_RNA (1)...(19): siRNA sense strand
gugaggagccaccaacauu

SEQ ID NO: 1292168 - RNA, 19 nt, Homo sapiens
  misc_RNA (1)...(19): siRNA sense strand
gauggcagcgacacaauug

SEQ ID NO: 1292169 - RNA, 19 nt, Homo sapiens
  misc_RNA (1)...(19): siRNA sense strand
gcuauggagcucauuggua

SEQ ID NO: 1292170 - RNA, 19 nt, Homo sapiens
  misc_RNA (1)...(19): siRNA sense strand
gaggagccaccaacauuug

SEQ ID NO: 1292171 - RNA, 19 nt, Homo sapiens
  misc_RNA (1)...(19): siRNA sense strand
acacaccuuuagugaagua

SEQ ID NO: 1292172 - RNA, 19 nt, Homo sapiens
  misc_RNA (1)...(19): siRNA sense strand
ucucagaugacgccuguua

SEQ ID NO: 1292173 - RNA, 19 nt, Homo sapiens
  misc_RNA (1)...(19): siRNA sense strand
uagagaaacauguccauau

SEQ ID NO: 1292174 - RNA, 19 nt, Homo sapiens
  misc_RNA (1)...(19): siRNA sense strand
ggugaacgaguagauuaua

SEQ ID NO: 1292175 - RNA, 19 nt, Homo sapiens
  misc_RNA (1)...(19): siRNA sense strand
gaaguagaaguauuugagu

SEQ ID NO: 1292176 - RNA, 19 nt, Homo sapiens
  misc_RNA (1)...(19): siRNA sense strand
gaaacauguccauauauac

SEQ ID NO: 1292177 - RNA, 19 nt, Homo sapiens
  misc_RNA (1)...(19): siRNA sense strand
ugacgccuguuauagagaa

SEQ ID NO: 1292178 - RNA, 19 nt, Homo sapiens
  misc_RNA (1)...(19): siRNA sense strand
cgaguagauuauaagugua

SEQ ID NO: 1292179 - RNA, 19 nt, Homo sapiens
  misc_RNA (1)...(19): siRNA sense strand
gcacuuuauuuguaaugag

SEQ ID NO: 1292180 - RNA, 19 nt, Homo sapiens
  misc_RNA (1)...(19): siRNA sense strand
guagaaguauuugaguauc

SEQ ID NO: 1292181 - RNA, 19 nt, Homo sapiens
  misc_RNA (1)...(19): siRNA sense strand
guauuugaguaucuugaug

SEQ ID NO: 1292182 - RNA, 19 nt, Homo sapiens
  misc_RNA (1)...(19): siRNA sense strand
aggaauacuugacaguuug

SEQ ID NO: 1292183 - RNA, 19 nt, Homo sapiens
  misc_RNA (1)...(19): siRNA sense strand
aguguaaaguggucaaaug

SEQ ID NO: 1292184 - RNA, 19 nt, Homo sapiens
  misc_RNA (1)...(19): siRNA sense strand
ccaaaacccuacuaugaga

SEQ ID NO: 1292185 - RNA, 19 nt, Homo sapiens
  misc_RNA (1)...(19): siRNA sense strand
ccacccauacuauuuguga

SEQ ID NO: 1292186 - RNA, 19 nt, Homo sapiens
  misc_RNA (1)...(19): siRNA sense strand
caccaacauuugaagcuau

SEQ ID NO: 1292187 - RNA, 19 nt, Homo sapiens
  misc_RNA (1)...(19): siRNA sense strand
uuggagagagcacgauuua

SEQ ID NO: 1292188 - RNA, 19 nt, Homo sapiens
  misc_RNA (1)...(19): siRNA sense strand
gguuaucagaugcacuuua

SEQ ID NO: 1292189 - RNA, 19 nt, Homo sapiens
  misc_RNA (1)...(19): siRNA sense strand
ugaggagccaccaacauuu

SEQ ID NO: 1292190 - RNA, 19 nt, Homo sapiens
  misc_RNA (1)...(19): siRNA sense strand
ggaaggaauacuugacagu

SEQ ID NO: 1292191 - RNA, 19 nt, Homo sapiens
  misc_RNA (1)...(19): siRNA sense strand
gaggaaggaauacuugaca

SEQ ID NO: 1292192 - RNA, 19 nt, Homo sapiens
  misc_RNA (1)...(19): siRNA sense strand
ugaguaucuugaugcagua

SEQ ID NO: 1292193 - RNA, 19 nt, Homo sapiens
  misc_RNA (1)...(19): siRNA sense strand
caccuuuagugaaguagaa

SEQ ID NO: 1292194 - RNA, 19 nt, Homo sapiens
  misc_RNA (1)...(19): siRNA sense strand
acagauaucaggauuugga

SEQ ID NO: 1292195 - RNA, 19 nt, Homo sapiens
  misc_RNA (1)...(19): siRNA sense strand
ucauugcugugauuguuau

SEQ ID NO: 1292196 - RNA, 19 nt, Homo sapiens
  misc_RNA (1)...(19): siRNA sense strand
ucagaugcacuuuauuugu

SEQ ID NO: 1292197 - RNA, 19 nt, Homo sapiens
  misc_RNA (1)...(19): siRNA sense strand
gugcugcuccagaguguaa

SEQ ID NO: 1292198 - RNA, 19 nt, Homo sapiens
  misc_RNA (1)...(19): siRNA sense strand
ggaaaacacaccuuuagug

SEQ ID NO: 1292199 - RNA, 19 nt, Homo sapiens
  misc_RNA (1)...(19): siRNA sense strand
aaggaucaguagcaauuug

SEQ ID NO: 1292200 - RNA, 19 nt, Homo sapiens
  misc_RNA (1)...(19): siRNA sense strand
uauauacgggauccuuuaa

SEQ ID NO: 1292201 - RNA, 19 nt, Homo sapiens
  misc_RNA (1)...(19): siRNA sense strand
ugaaguagaaguauuugag

SEQ ID NO: 1292202 - RNA, 19 nt, Homo sapiens
  misc_RNA (1)...(19): siRNA sense strand
cuugacaguuuggauguuu

SEQ ID NO: 1292203 - RNA, 19 nt, Homo sapiens
  misc_RNA (1)...(19): siRNA sense strand
cauauauacgggauccuuu

SEQ ID NO: 1292204 - RNA, 19 nt, Homo sapiens
  misc_RNA (1)...(19): siRNA sense strand
auauauacgggauccuuua

SEQ ID NO: 1292205 - RNA, 19 nt, Homo sapiens
  misc_RNA (1)...(19): siRNA sense strand
cuuaaaggaucaguagcaa

SEQ ID NO: 1292206 - RNA, 19 nt, Homo sapiens
  misc_RNA (1)...(19): siRNA sense strand
uaaaccugaggaaggaaua

SEQ ID NO: 1292207 - RNA, 19 nt, Homo sapiens
  misc_RNA (1)...(19): siRNA sense strand
agaugacgccuguuauaga

SEQ ID NO: 1292208 - RNA, 19 nt, Homo sapiens
  misc_RNA (1)...(19): siRNA sense strand
ugugauuguuauugccaua

SEQ ID NO: 1292209 - RNA, 19 nt, Homo sapiens
  misc_RNA (1)...(19): siRNA sense strand
gagagcacgauuuauugug

SEQ ID NO: 1292210 - RNA, 19 nt, Homo sapiens
  misc_RNA (1)...(19): siRNA sense strand
gaaguauuugaguaucuug

SEQ ID NO: 1292211 - RNA, 19 nt, Homo sapiens
  misc_RNA (1)...(19): siRNA sense strand
ccucuugccacccauacua

SEQ ID NO: 1292212 - RNA, 19 nt, Homo sapiens
  misc_RNA (1)...(19): siRNA sense strand
gauaucaggauuuggaaaa

SEQ ID NO: 1292213 - RNA, 19 nt, Homo sapiens
  misc_RNA (1)...(19): siRNA sense strand
ggcuaccugucucagauga

SEQ ID NO: 1292214 - RNA, 19 nt, Homo sapiens
  misc_RNA (1)...(19): siRNA sense strand
ccaugguguugcugcugua

SEQ ID NO: 1292215 - RNA, 19 nt, Homo sapiens
  misc_RNA (1)...(19): siRNA sense strand
cagaugacgccuguuauag

SEQ ID NO: 1292216 - RNA, 19 nt, Homo sapiens
  misc_RNA (1)...(19): siRNA sense strand
gucauugcugugauuguua

SEQ ID NO: 1292217 - RNA, 19 nt, Homo sapiens
  misc_RNA (1)...(19): siRNA sense strand
uuggugaacgaguagauua

SEQ ID NO: 1292218 - RNA, 19 nt, Homo sapiens
  misc_RNA (1)...(19): siRNA sense strand
ggagccaccaacauuugaa

SEQ ID NO: 1292219 - RNA, 19 nt, Homo sapiens
  misc_RNA (1)...(19): siRNA sense strand
gcgcuuuccuggguugcuu

SEQ ID NO: 1292220 - RNA, 19 nt, Homo sapiens
  misc_RNA (1)...(19): siRNA sense strand
uacuacaaagcaacaguua

SEQ ID NO: 1292221 - RNA, 19 nt, Homo sapiens
  misc_RNA (1)...(19): siRNA sense strand
cuugaugcaguaacuuaua

SEQ ID NO: 1292222 - RNA, 19 nt, Homo sapiens
  misc_RNA (1)...(19): siRNA sense strand
aaacauguccauauauacg

SEQ ID NO: 1292223 - RNA, 19 nt, Homo sapiens
  misc_RNA (1)...(19): siRNA sense strand
guguaaaguggucaaaugu

SEQ ID NO: 1292224 - RNA, 19 nt, Homo sapiens
  misc_RNA (1)...(19): siRNA sense strand
cuuacgaguuugguuauca

SEQ ID NO: 1292225 - RNA, 19 nt, Homo sapiens
  misc_RNA (1)...(19): siRNA sense strand
uacgggauccuuuaaaugg

SEQ ID NO: 1292226 - RNA, 19 nt, Homo sapiens
  misc_RNA (1)...(19): siRNA sense strand
aaccaaaacccuacuauga

SEQ ID NO: 1292227 - RNA, 19 nt, Homo sapiens
  misc_RNA (1)...(19): siRNA sense strand
cccaauaugugaaaagguu

SEQ ID NO: 1292228 - RNA, 19 nt, Homo sapiens
  misc_RNA (1)...(19): siRNA sense strand
cgauggcagcgacacaauu

SEQ ID NO: 1292229 - RNA, 19 nt, Homo sapiens
  misc_RNA (1)...(19): siRNA sense strand
gauccauuuucacuuauug

SEQ ID NO: 1292230 - RNA, 19 nt, Homo sapiens
  misc_RNA (1)...(19): siRNA sense strand
uugaugcaguaacuuauag

SEQ ID NO: 1292231 - RNA, 19 nt, Homo sapiens
  misc_RNA (1)...(19): siRNA sense strand
guaucuugaugcaguaacu

SEQ ID NO: 1292232 - RNA, 19 nt, Homo sapiens
  misc_RNA (1)...(19): siRNA sense strand
caacauuugaagcuaugga

SEQ ID NO: 1292233 - RNA, 19 nt, Homo sapiens
  misc_RNA (1)...(19): siRNA sense strand
gagauuggugaacgaguag

SEQ ID NO: 1292234 - RNA, 19 nt, Homo sapiens
  misc_RNA (1)...(19): siRNA sense strand
ggagagagcacgauuuauu

SEQ ID NO: 1292235 - RNA, 19 nt, Homo sapiens
  misc_RNA (1)...(19): siRNA sense strand
agagaaacauguccauaua

SEQ ID NO: 1292236 - RNA, 19 nt, Homo sapiens
  misc_RNA (1)...(19): siRNA sense strand
cagaugcacuuuauuugua

SEQ ID NO: 1292237 - RNA, 19 nt, Homo sapiens
  misc_RNA (1)...(19): siRNA sense strand
ggacuuacgaguuugguua

SEQ ID NO: 1292238 - RNA, 19 nt, Homo sapiens
  misc_RNA (1)...(19): siRNA sense strand
aaacagauaucaggauuug

SEQ ID NO: 1292239 - RNA, 19 nt, Homo sapiens
  misc_RNA (1)...(19): siRNA sense strand
cuauggagcucauugguaa

SEQ ID NO: 1292240 - RNA, 19 nt, Homo sapiens
  misc_RNA (1)...(19): siRNA sense strand
aaacacaccuuuagugaag

SEQ ID NO: 1292241 - RNA, 19 nt, Homo sapiens
  misc_RNA (1)...(19): siRNA sense strand
gaacuuaaaggaucaguag

SEQ ID NO: 1292242 - RNA, 19 nt, Homo sapiens
  misc_RNA (1)...(19): siRNA sense strand
gaaaacagauaucaggauu

SEQ ID NO: 1292243 - RNA, 19 nt, Homo sapiens
  misc_RNA (1)...(19): siRNA sense strand
uaaaggaucaguagcaauu

SEQ ID NO: 1292244 - RNA, 19 nt, Homo sapiens
  misc_RNA (1)...(19): siRNA sense strand
aaaugggacuuacgaguuu

SEQ ID NO: 1292245 - RNA, 19 nt, Homo sapiens
  misc_RNA (1)...(19): siRNA sense strand
guuaucagaugcacuuuau

SEQ ID NO: 1292246 - RNA, 19 nt, Homo sapiens
  misc_RNA (1)...(19): siRNA sense strand
gagcugaauaugccacuua

SEQ ID NO: 1292247 - RNA, 19 nt, Homo sapiens
  misc_RNA (1)...(19): siRNA sense strand
ugagauuggugaacgagua

SEQ ID NO: 1292248 - RNA, 19 nt, Homo sapiens
  misc_RNA (1)...(19): siRNA sense strand
gugaacgaguagauuauaa

SEQ ID NO: 1292249 - RNA, 19 nt, Homo sapiens
  misc_RNA (1)...(19): siRNA sense strand
gagagagcacgauuuauug

SEQ ID NO: 1292250 - RNA, 19 nt, Homo sapiens
  misc_RNA (1)...(19): siRNA sense strand
caaaugggacuuacgaguu

SEQ ID NO: 1292251 - RNA, 19 nt, Homo sapiens
  misc_RNA (1)...(19): siRNA sense strand
ggucauugcugugauuguu

SEQ ID NO: 1292252 - RNA, 19 nt, Homo sapiens
  misc_RNA (1)...(19): siRNA sense strand
ccagauccauuuucacuua

SEQ ID NO: 1292253 - RNA, 19 nt, Homo sapiens
  misc_RNA (1)...(19): siRNA sense strand
gaaggaauacuugacaguu

SEQ ID NO: 1292254 - RNA, 19 nt, Homo sapiens
  misc_RNA (1)...(19): siRNA sense strand
aaggaauacuugacaguuu

SEQ ID NO: 1292255 - RNA, 19 nt, Homo sapiens
  misc_RNA (1)...(19): siRNA sense strand
ucagaugacgccuguuaua

SEQ ID NO: 1292256 - RNA, 19 nt, Homo sapiens
  misc_RNA (1)...(19): siRNA sense strand
gaaaacacaccuuuaguga

SEQ ID NO: 1292257 - RNA, 19 nt, Homo sapiens
  misc_RNA (1)...(19): siRNA sense strand
gaugacgccuguuauagag

SEQ ID NO: 1292258 - RNA, 19 nt, Homo sapiens
  misc_RNA (1)...(19): siRNA sense strand
gagaaacauguccauauau

SEQ ID NO: 1292259 - RNA, 19 nt, Homo sapiens
  misc_RNA (1)...(19): siRNA sense strand
ccacuuaccagacuaaauc

SEQ ID NO: 1292260 - RNA, 19 nt, Homo sapiens
  misc_RNA (1)...(19): siRNA sense strand
acgaguagauuauaagugu

SEQ ID NO: 1292261 - RNA, 19 nt, Homo sapiens
  misc_RNA (1)...(19): siRNA sense strand
cuacaaagcaacaguuaug

SEQ ID NO: 1292262 - RNA, 19 nt, Homo sapiens
  misc_RNA (1)...(19): siRNA sense strand
ccaccaacauuugaagcua

SEQ ID NO: 1292263 - RNA, 19 nt, Homo sapiens
  misc_RNA (1)...(19): siRNA sense strand
uauacgggauccuuuaaau

SEQ ID NO: 1292264 - RNA, 19 nt, Homo sapiens
  misc_RNA (1)...(19): siRNA sense strand
cgaguuugguuaucagaug

SEQ ID NO: 1292265 - RNA, 19 nt, Homo sapiens
  misc_RNA (1)...(19): siRNA sense strand
gaacgaguagauuauaagu

SEQ ID NO: 1292266 - RNA, 19 nt, Homo sapiens
  misc_RNA (1)...(19): siRNA sense strand
gugaggagccaccaacauu

SEQ ID NO: 1292267 - RNA, 19 nt, Homo sapiens
  misc_RNA (1)...(19): siRNA sense strand
gauggcagcgacacaauug

SEQ ID NO: 1292268 - RNA, 19 nt, Homo sapiens
  misc_RNA (1)...(19): siRNA sense strand
ucucagaugacgccuguua

SEQ ID NO: 1292269 - RNA, 19 nt, Homo sapiens
  misc_RNA (1)...(19): siRNA sense strand
gaggagccaccaacauuug

SEQ ID NO: 1292270 - RNA, 19 nt, Homo sapiens
  misc_RNA (1)...(19): siRNA sense strand
gcuauggagcucauuggua

SEQ ID NO: 1292271 - RNA, 19 nt, Homo sapiens
  misc_RNA (1)...(19): siRNA sense strand
acacaccuuuagugaagua

SEQ ID NO: 1292272 - RNA, 19 nt, Homo sapiens
  misc_RNA (1)...(19): siRNA sense strand
uagagaaacauguccauau

SEQ ID NO: 1292273 - RNA, 19 nt, Homo sapiens
  misc_RNA (1)...(19): siRNA sense strand
ggugaacgaguagauuaua

SEQ ID NO: 1292274 - RNA, 19 nt, Homo sapiens
  misc_RNA (1)...(19): siRNA sense strand
gaaguagaaguauuugagu

SEQ ID NO: 1292275 - RNA, 19 nt, Homo sapiens
  misc_RNA (1)...(19): siRNA sense strand
gaaacauguccauauauac

SEQ ID NO: 1292276 - RNA, 19 nt, Homo sapiens
  misc_RNA (1)...(19): siRNA sense strand
ugacgccuguuauagagaa

SEQ ID NO: 1292277 - RNA, 19 nt, Homo sapiens
  misc_RNA (1)...(19): siRNA sense strand
cgaguagauuauaagugua

SEQ ID NO: 1292278 - RNA, 19 nt, Homo sapiens
  misc_RNA (1)...(19): siRNA sense strand
gcacuuuauuuguaaugag

SEQ ID NO: 1292279 - RNA, 19 nt, Homo sapiens
  misc_RNA (1)...(19): siRNA sense strand
guagaaguauuugaguauc

SEQ ID NO: 1292280 - RNA, 19 nt, Homo sapiens
  misc_RNA (1)...(19): siRNA sense strand
guauuugaguaucuugaug

SEQ ID NO: 1292281 - RNA, 19 nt, Homo sapiens
  misc_RNA (1)...(19): siRNA sense strand
aggaauacuugacaguuug

SEQ ID NO: 1292282 - RNA, 19 nt, Homo sapiens
  misc_RNA (1)...(19): siRNA sense strand
ccaaaacccuacuaugaga

SEQ ID NO: 1292283 - RNA, 19 nt, Homo sapiens
  misc_RNA (1)...(19): siRNA sense strand
aguguaaaguggucaaaug

SEQ ID NO: 1292284 - RNA, 19 nt, Homo sapiens
  misc_RNA (1)...(19): siRNA sense strand
ccacccauacuauuuguga

SEQ ID NO: 1292285 - RNA, 19 nt, Homo sapiens
  misc_RNA (1)...(19): siRNA sense strand
uuggagagagcacgauuua

SEQ ID NO: 1292286 - RNA, 19 nt, Homo sapiens
  misc_RNA (1)...(19): siRNA sense strand
gguuaucagaugcacuuua

SEQ ID NO: 1292287 - RNA, 19 nt, Homo sapiens
  misc_RNA (1)...(19): siRNA sense strand
caccaacauuugaagcuau

SEQ ID NO: 1292288 - RNA, 19 nt, Homo sapiens
  misc_RNA (1)...(19): siRNA sense strand
ugaggagccaccaacauuu

SEQ ID NO: 1292289 - RNA, 19 nt, Homo sapiens
  misc_RNA (1)...(19): siRNA sense strand
ggaaggaauacuugacagu

SEQ ID NO: 1292290 - RNA, 19 nt, Homo sapiens
  misc_RNA (1)...(19): siRNA sense strand
gaggaaggaauacuugaca

SEQ ID NO: 1292291 - RNA, 19 nt, Homo sapiens
  misc_RNA (1)...(19): siRNA sense strand
ugaguaucuugaugcagua

SEQ ID NO: 1292292 - RNA, 19 nt, Homo sapiens
  misc_RNA (1)...(19): siRNA sense strand
caccuuuagugaaguagaa

SEQ ID NO: 1292293 - RNA, 19 nt, Homo sapiens
  misc_RNA (1)...(19): siRNA sense strand
acagauaucaggauuugga

SEQ ID NO: 1292294 - RNA, 19 nt, Homo sapiens
  misc_RNA (1)...(19): siRNA sense strand
ucauugcugugauuguuau

SEQ ID NO: 1292295 - RNA, 19 nt, Homo sapiens
  misc_RNA (1)...(19): siRNA sense strand
ucagaugcacuuuauuugu

SEQ ID NO: 1292296 - RNA, 19 nt, Homo sapiens
  misc_RNA (1)...(19): siRNA sense strand
gugcugcuccagaguguaa

SEQ ID NO: 1292297 - RNA, 19 nt, Homo sapiens
  misc_RNA (1)...(19): siRNA sense strand
ggaaaacacaccuuuagug

SEQ ID NO: 1292298 - RNA, 19 nt, Homo sapiens
  misc_RNA (1)...(19): siRNA sense strand
aaggaucaguagcaauuug

SEQ ID NO: 1292299 - RNA, 19 nt, Homo sapiens
  misc_RNA (1)...(19): siRNA sense strand
uauauacgggauccuuuaa

SEQ ID NO: 1292300 - RNA, 19 nt, Homo sapiens
  misc_RNA (1)...(19): siRNA sense strand
ugaaguagaaguauuugag

SEQ ID NO: 1292301 - RNA, 19 nt, Homo sapiens
  misc_RNA (1)...(19): siRNA sense strand
cuugacaguuuggauguuu

SEQ ID NO: 1292302 - RNA, 19 nt, Homo sapiens
  misc_RNA (1)...(19): siRNA sense strand
cauauauacgggauccuuu

SEQ ID NO: 1292303 - RNA, 19 nt, Homo sapiens
  misc_RNA (1)...(19): siRNA sense strand
auauauacgggauccuuua

SEQ ID NO: 1292304 - RNA, 19 nt, Homo sapiens
  misc_RNA (1)...(19): siRNA sense strand
cuuaaaggaucaguagcaa

SEQ ID NO: 1292305 - RNA, 19 nt, Homo sapiens
  misc_RNA (1)...(19): siRNA sense strand
uaaaccugaggaaggaaua

SEQ ID NO: 1292306 - RNA, 19 nt, Homo sapiens
  misc_RNA (1)...(19): siRNA sense strand
agaugacgccuguuauaga

SEQ ID NO: 1292307 - RNA, 19 nt, Homo sapiens
  misc_RNA (1)...(19): siRNA sense strand
ugugauuguuauugccaua

SEQ ID NO: 1292308 - RNA, 19 nt, Homo sapiens
  misc_RNA (1)...(19): siRNA sense strand
gagagcacgauuuauugug

SEQ ID NO: 1292309 - RNA, 19 nt, Homo sapiens
  misc_RNA (1)...(19): siRNA sense strand
gaaguauuugaguaucuug

SEQ ID NO: 1292310 - RNA, 19 nt, Homo sapiens
  misc_RNA (1)...(19): siRNA sense strand
ggcuaccugucucagauga

SEQ ID NO: 1292311 - RNA, 19 nt, Homo sapiens
  misc_RNA (1)...(19): siRNA sense strand
gauaucaggauuuggaaaa

SEQ ID NO: 1292312 - RNA, 19 nt, Homo sapiens
  misc_RNA (1)...(19): siRNA sense strand
ccucuugccacccauacua

SEQ ID NO: 1292313 - RNA, 19 nt, Homo sapiens
  misc_RNA (1)...(19): siRNA sense strand
ccaugguguugcugcugua

SEQ ID NO: 1292314 - RNA, 19 nt, Homo sapiens
  misc_RNA (1)...(19): siRNA sense strand
cagaugacgccuguuauag

SEQ ID NO: 1292315 - RNA, 19 nt, Homo sapiens
  misc_RNA (1)...(19): siRNA sense strand
cagaugguggagcugaaua

SEQ ID NO: 1292316 - RNA, 19 nt, Homo sapiens
  misc_RNA (1)...(19): siRNA sense strand
uuggugaacgaguagauua

SEQ ID NO: 1292317 - RNA, 19 nt, Homo sapiens
  misc_RNA (1)...(19): siRNA sense strand
gucauugcugugauuguua

SEQ ID NO: 1292318 - RNA, 19 nt, Homo sapiens
  misc_RNA (1)...(19): siRNA sense strand
ggagccaccaacauuugaa

SEQ ID NO: 1292319 - RNA, 19 nt, Homo sapiens
  misc_RNA (1)...(19): siRNA sense strand
gcgcuuuccuggguugcuu

SEQ ID NO: 1292320 - RNA, 19 nt, Homo sapiens
  misc_RNA (1)...(19): siRNA sense strand
uacuacaaagcaacaguua

SEQ ID NO: 1292321 - RNA, 19 nt, Homo sapiens
  misc_RNA (1)...(19): siRNA sense strand
cuugaugcaguaacuuaua

SEQ ID NO: 1292322 - RNA, 19 nt, Homo sapiens
  misc_RNA (1)...(19): siRNA sense strand
aaacauguccauauauacg

SEQ ID NO: 1292323 - RNA, 19 nt, Homo sapiens
  misc_RNA (1)...(19): siRNA sense strand
guguaaaguggucaaaugu

SEQ ID NO: 1292324 - RNA, 19 nt, Homo sapiens
  misc_RNA (1)...(19): siRNA sense strand
cuuacgaguuugguuauca

SEQ ID NO: 1292325 - RNA, 19 nt, Homo sapiens
  misc_RNA (1)...(19): siRNA sense strand
uacgggauccuuuaaaugg

SEQ ID NO: 1292326 - RNA, 19 nt, Homo sapiens
  misc_RNA (1)...(19): siRNA sense strand
gcagaugguggagcugaau

SEQ ID NO: 1292327 - RNA, 19 nt, Homo sapiens
  misc_RNA (1)...(19): siRNA sense strand
aaccaaaacccuacuauga

SEQ ID NO: 1292328 - RNA, 19 nt, Homo sapiens
  misc_RNA (1)...(19): siRNA sense strand
cccaauaugugaaaagguu

SEQ ID NO: 1292329 - RNA, 19 nt, Homo sapiens
  misc_RNA (1)...(19): siRNA sense strand
ggagcugaauaugccacuu

SEQ ID NO: 1292330 - RNA, 19 nt, Homo sapiens
  misc_RNA (1)...(19): siRNA sense strand
cgauggcagcgacacaauu

SEQ ID NO: 1292331 - RNA, 19 nt, Homo sapiens
  misc_RNA (1)...(19): siRNA sense strand
gauccauuuucacuuauug

SEQ ID NO: 1292332 - RNA, 19 nt, Homo sapiens
  misc_RNA (1)...(19): siRNA sense strand
uugaugcaguaacuuauag

SEQ ID NO: 1292333 - RNA, 19 nt, Homo sapiens
  misc_RNA (1)...(19): siRNA sense strand
guaucuugaugcaguaacu

SEQ ID NO: 1292334 - RNA, 19 nt, Homo sapiens
  misc_RNA (1)...(19): siRNA sense strand
ggagagagcacgauuuauu

SEQ ID NO: 1292335 - RNA, 19 nt, Homo sapiens
  misc_RNA (1)...(19): siRNA sense strand
agagaaacauguccauaua

SEQ ID NO: 1292336 - RNA, 19 nt, Homo sapiens
  misc_RNA (1)...(19): siRNA sense strand
cagaugcacuuuauuugua

SEQ ID NO: 1292337 - RNA, 19 nt, Homo sapiens
  misc_RNA (1)...(19): siRNA sense strand
ggacuuacgaguuugguua

SEQ ID NO: 1292338 - RNA, 19 nt, Homo sapiens
  misc_RNA (1)...(19): siRNA sense strand
aaacagauaucaggauuug

SEQ ID NO: 1292339 - RNA, 19 nt, Homo sapiens
  misc_RNA (1)...(19): siRNA sense strand
cuauggagcucauugguaa

SEQ ID NO: 1292340 - RNA, 19 nt, Homo sapiens
  misc_RNA (1)...(19): siRNA sense strand
aaacacaccuuuagugaag

SEQ ID NO: 1292341 - RNA, 19 nt, Homo sapiens
  misc_RNA (1)...(19): siRNA sense strand
gaacuuaaaggaucaguag

SEQ ID NO: 1292342 - RNA, 19 nt, Homo sapiens
  misc_RNA (1)...(19): siRNA sense strand
gaaaacagauaucaggauu

SEQ ID NO: 1292343 - RNA, 19 nt, Homo sapiens
  misc_RNA (1)...(19): siRNA sense strand
uaaaggaucaguagcaauu

SEQ ID NO: 1292344 - RNA, 19 nt, Homo sapiens
  misc_RNA (1)...(19): siRNA sense strand
aaaugggacuuacgaguuu

SEQ ID NO: 1292345 - RNA, 19 nt, Homo sapiens
  misc_RNA (1)...(19): siRNA sense strand
guuaucagaugcacuuuau

SEQ ID NO: 1292346 - RNA, 19 nt, Homo sapiens
  misc_RNA (1)...(19): siRNA sense strand
ugagauuggugaacgagua

SEQ ID NO: 1292347 - RNA, 19 nt, Homo sapiens
  misc_RNA (1)...(19): siRNA sense strand
gugaacgaguagauuauaa

SEQ ID NO: 1292348 - RNA, 19 nt, Homo sapiens
  misc_RNA (1)...(19): siRNA sense strand
gagagagcacgauuuauug

SEQ ID NO: 1292349 - RNA, 19 nt, Homo sapiens
  misc_RNA (1)...(19): siRNA sense strand
caaaugggacuuacgaguu

SEQ ID NO: 1292350 - RNA, 19 nt, Homo sapiens
  misc_RNA (1)...(19): siRNA sense strand
ggucauugcugugauuguu

SEQ ID NO: 1292351 - RNA, 19 nt, Homo sapiens
  misc_RNA (1)...(19): siRNA sense strand
ccagauccauuuucacuua

SEQ ID NO: 1292352 - RNA, 19 nt, Homo sapiens
  misc_RNA (1)...(19): siRNA sense strand
gaaggaauacuugacaguu

SEQ ID NO: 1292353 - RNA, 19 nt, Homo sapiens
  misc_RNA (1)...(19): siRNA sense strand
aaggaauacuugacaguuu

SEQ ID NO: 1292354 - RNA, 19 nt, Homo sapiens
  misc_RNA (1)...(19): siRNA sense strand
ucagaugacgccuguuaua

SEQ ID NO: 1292355 - RNA, 19 nt, Homo sapiens
  misc_RNA (1)...(19): siRNA sense strand
gaaaacacaccuuuaguga

SEQ ID NO: 1292356 - RNA, 19 nt, Homo sapiens
  misc_RNA (1)...(19): siRNA sense strand
gaugacgccuguuauagag

SEQ ID NO: 1292357 - RNA, 19 nt, Homo sapiens
  misc_RNA (1)...(19): siRNA sense strand
gagaaacauguccauauau

SEQ ID NO: 1292358 - RNA, 19 nt, Homo sapiens
  misc_RNA (1)...(19): siRNA sense strand
acgaguagauuauaagugu

SEQ ID NO: 1292359 - RNA, 19 nt, Homo sapiens
  misc_RNA (1)...(19): siRNA sense strand
cuacaaagcaacaguuaug

SEQ ID NO: 1292360 - RNA, 19 nt, Homo sapiens
  misc_RNA (1)...(19): siRNA sense strand
ccaccaacauuugaagcua

SEQ ID NO: 1292361 - RNA, 19 nt, Homo sapiens
  misc_RNA (1)...(19): siRNA sense strand
uauacgggauccuuuaaau

SEQ ID NO: 1292362 - RNA, 19 nt, Homo sapiens
  misc_RNA (1)...(19): siRNA sense strand
cgaguuugguuaucagaug

SEQ ID NO: 1292363 - RNA, 19 nt, Homo sapiens
  misc_RNA (1)...(19): siRNA sense strand
gaacgaguagauuauaagu

SEQ ID NO: 1292364 - RNA, 19 nt, Homo sapiens
  misc_RNA (1)...(19): siRNA sense strand
gugaggagccaccaacauu

SEQ ID NO: 1292365 - RNA, 19 nt, Homo sapiens
  misc_RNA (1)...(19): siRNA sense strand
gauggcagcgacacaauug

SEQ ID NO: 1292366 - RNA, 19 nt, Homo sapiens
  misc_RNA (1)...(19): siRNA sense strand
gcuauggagcucauuggua

SEQ ID NO: 1292367 - RNA, 19 nt, Homo sapiens
  misc_RNA (1)...(19): siRNA sense strand
gaggagccaccaacauuug

SEQ ID NO: 1292368 - RNA, 19 nt, Homo sapiens
  misc_RNA (1)...(19): siRNA sense strand
acacaccuuuagugaagua

SEQ ID NO: 1292369 - RNA, 19 nt, Homo sapiens
  misc_RNA (1)...(19): siRNA sense strand
ucucagaugacgccuguua

SEQ ID NO: 1292370 - RNA, 19 nt, Homo sapiens
  misc_RNA (1)...(19): siRNA sense strand
uagagaaacauguccauau

SEQ ID NO: 1292371 - RNA, 19 nt, Homo sapiens
  misc_RNA (1)...(19): siRNA sense strand
guuccaaagugucuuaaag

SEQ ID NO: 1292372 - RNA, 19 nt, Homo sapiens
  misc_RNA (1)...(19): siRNA sense strand
ggugaacgaguagauuaua

SEQ ID NO: 1292373 - RNA, 19 nt, Homo sapiens
  misc_RNA (1)...(19): siRNA sense strand
gaaguagaaguauuugagu

SEQ ID NO: 1292374 - RNA, 19 nt, Homo sapiens
  misc_RNA (1)...(19): siRNA sense strand
gaaacauguccauauauac

SEQ ID NO: 1292375 - RNA, 19 nt, Homo sapiens
  misc_RNA (1)...(19): siRNA sense strand
ugacgccuguuauagagaa

SEQ ID NO: 1292376 - RNA, 19 nt, Homo sapiens
  misc_RNA (1)...(19): siRNA sense strand
cgaguagauuauaagugua

SEQ ID NO: 1292377 - RNA, 19 nt, Homo sapiens
  misc_RNA (1)...(19): siRNA sense strand
gcacuuuauuuguaaugag

SEQ ID NO: 1292378 - RNA, 19 nt, Homo sapiens
  misc_RNA (1)...(19): siRNA sense strand
guagaaguauuugaguauc

SEQ ID NO: 1292379 - RNA, 19 nt, Homo sapiens
  misc_RNA (1)...(19): siRNA sense strand
guauuugaguaucuugaug

SEQ ID NO: 1292380 - RNA, 19 nt, Homo sapiens
  misc_RNA (1)...(19): siRNA sense strand
aggaauacuugacaguuug

SEQ ID NO: 1292381 - RNA, 19 nt, Homo sapiens
  misc_RNA (1)...(19): siRNA sense strand
ccaaaacccuacuaugaga

SEQ ID NO: 1292382 - RNA, 19 nt, Homo sapiens
  misc_RNA (1)...(19): siRNA sense strand
aguguaaaguggucaaaug

SEQ ID NO: 1292383 - RNA, 19 nt, Homo sapiens
  misc_RNA (1)...(19): siRNA sense strand
ccacccauacuauuuguga

SEQ ID NO: 1292384 - RNA, 19 nt, Homo sapiens
  misc_RNA (1)...(19): siRNA sense strand
caccaacauuugaagcuau

SEQ ID NO: 1292385 - RNA, 19 nt, Homo sapiens
  misc_RNA (1)...(19): siRNA sense strand
uuggagagagcacgauuua

SEQ ID NO: 1292386 - RNA, 19 nt, Homo sapiens
  misc_RNA (1)...(19): siRNA sense strand
gguuaucagaugcacuuua

SEQ ID NO: 1292387 - RNA, 19 nt, Homo sapiens
  misc_RNA (1)...(19): siRNA sense strand
ugaggagccaccaacauuu

SEQ ID NO: 1292388 - RNA, 19 nt, Homo sapiens
  misc_RNA (1)...(19): siRNA sense strand
ggaaggaauacuugacagu

SEQ ID NO: 1292389 - RNA, 19 nt, Homo sapiens
  misc_RNA (1)...(19): siRNA sense strand
gaggaaggaauacuugaca

SEQ ID NO: 1292390 - RNA, 19 nt, Homo sapiens
  misc_RNA (1)...(19): siRNA sense strand
ccaguuccaaagugucuua

SEQ ID NO: 1292391 - RNA, 19 nt, Homo sapiens
  misc_RNA (1)...(19): siRNA sense strand
ugaguaucuugaugcagua

SEQ ID NO: 1292392 - RNA, 19 nt, Homo sapiens
  misc_RNA (1)...(19): siRNA sense strand
caccuuuagugaaguagaa

SEQ ID NO: 1292393 - RNA, 19 nt, Homo sapiens
  misc_RNA (1)...(19): siRNA sense strand
acagauaucaggauuugga

SEQ ID NO: 1292394 - RNA, 19 nt, Homo sapiens
  misc_RNA (1)...(19): siRNA sense strand
ucauugcugugauuguuau

SEQ ID NO: 1292395 - RNA, 19 nt, Homo sapiens
  misc_RNA (1)...(19): siRNA sense strand
ucagaugcacuuuauuugu

SEQ ID NO: 1292396 - RNA, 19 nt, Homo sapiens
  misc_RNA (1)...(19): siRNA sense strand
gugcugcuccagaguguaa

SEQ ID NO: 1292397 - RNA, 19 nt, Homo sapiens
  misc_RNA (1)...(19): siRNA sense strand
ggaaaacacaccuuuagug

SEQ ID NO: 1292398 - RNA, 19 nt, Homo sapiens
  misc_RNA (1)...(19): siRNA sense strand
aaggaucaguagcaauuug

SEQ ID NO: 1292399 - RNA, 19 nt, Homo sapiens
  misc_RNA (1)...(19): siRNA sense strand
uauauacgggauccuuuaa

SEQ ID NO: 1292400 - RNA, 19 nt, Homo sapiens
  misc_RNA (1)...(19): siRNA sense strand
ugaaguagaaguauuugag

SEQ ID NO: 1292401 - RNA, 19 nt, Homo sapiens
  misc_RNA (1)...(19): siRNA sense strand
cuugacaguuuggauguuu

SEQ ID NO: 1292402 - RNA, 19 nt, Homo sapiens
  misc_RNA (1)...(19): siRNA sense strand
cauauauacgggauccuuu

SEQ ID NO: 1292403 - RNA, 19 nt, Homo sapiens
  misc_RNA (1)...(19): siRNA sense strand
auauauacgggauccuuua

SEQ ID NO: 1292404 - RNA, 19 nt, Homo sapiens
  misc_RNA (1)...(19): siRNA sense strand
cuuaaaggaucaguagcaa

SEQ ID NO: 1292405 - RNA, 19 nt, Homo sapiens
  misc_RNA (1)...(19): siRNA sense strand
uaaaccugaggaaggaaua

SEQ ID NO: 1292406 - RNA, 19 nt, Homo sapiens
  misc_RNA (1)...(19): siRNA sense strand
agaugacgccuguuauaga

SEQ ID NO: 1292407 - RNA, 19 nt, Homo sapiens
  misc_RNA (1)...(19): siRNA sense strand
ugugauuguuauugccaua

SEQ ID NO: 1292408 - RNA, 19 nt, Homo sapiens
  misc_RNA (1)...(19): siRNA sense strand
gagagcacgauuuauugug

SEQ ID NO: 1292409 - RNA, 19 nt, Homo sapiens
  misc_RNA (1)...(19): siRNA sense strand
gaaguauuugaguaucuug

SEQ ID NO: 1292410 - RNA, 19 nt, Homo sapiens
  misc_RNA (1)...(19): siRNA sense strand
ggcuaccugucucagauga

SEQ ID NO: 1292411 - RNA, 19 nt, Homo sapiens
  misc_RNA (1)...(19): siRNA sense strand
gauaucaggauuuggaaaa

SEQ ID NO: 1292412 - RNA, 19 nt, Homo sapiens
  misc_RNA (1)...(19): siRNA sense strand
ccucuugccacccauacua

SEQ ID NO: 1292413 - RNA, 19 nt, Homo sapiens
  misc_RNA (1)...(19): siRNA sense strand
ccaugguguugcugcugua

SEQ ID NO: 1292414 - RNA, 19 nt, Homo sapiens
  misc_RNA (1)...(19): siRNA sense strand
cagaugacgccuguuauag

SEQ ID NO: 1292415 - RNA, 19 nt, Homo sapiens
  misc_RNA (1)...(19): siRNA sense strand
uuggugaacgaguagauua

SEQ ID NO: 1292416 - RNA, 19 nt, Homo sapiens
  misc_RNA (1)...(19): siRNA sense strand
gucauugcugugauuguua

SEQ ID NO: 1292417 - RNA, 19 nt, Homo sapiens
  misc_RNA (1)...(19): siRNA sense strand
ggagccaccaacauuugaa

SEQ ID NO: 1292418 - RNA, 19 nt, Homo sapiens
  misc_RNA (1)...(19): siRNA sense strand
gcgcuuuccuggguugcuu

SEQ ID NO: 1292419 - RNA, 19 nt, Homo sapiens
  misc_RNA (1)...(19): siRNA sense strand
uacuacaaagcaacaguua

SEQ ID NO: 1292420 - RNA, 19 nt, Homo sapiens
  misc_RNA (1)...(19): siRNA sense strand
cuugaugcaguaacuuaua

SEQ ID NO: 1292421 - RNA, 19 nt, Homo sapiens
  misc_RNA (1)...(19): siRNA sense strand
aaacauguccauauauacg

SEQ ID NO: 1292422 - RNA, 19 nt, Homo sapiens
  misc_RNA (1)...(19): siRNA sense strand
guguaaaguggucaaaugu

SEQ ID NO: 1292423 - RNA, 19 nt, Homo sapiens
  misc_RNA (1)...(19): siRNA sense strand
cuuacgaguuugguuauca

SEQ ID NO: 1292424 - RNA, 19 nt, Homo sapiens
  misc_RNA (1)...(19): siRNA sense strand
uacgggauccuuuaaaugg

SEQ ID NO: 1292425 - RNA, 19 nt, Homo sapiens
  misc_RNA (1)...(19): siRNA sense strand
aaccaaaacccuacuauga

SEQ ID NO: 1292426 - RNA, 19 nt, Homo sapiens
  misc_RNA (1)...(19): siRNA sense strand
cccaauaugugaaaagguu

SEQ ID NO: 1292427 - RNA, 19 nt, Homo sapiens
  misc_RNA (1)...(19): siRNA sense strand
cgauggcagcgacacaauu

SEQ ID NO: 1292428 - RNA, 19 nt, Homo sapiens
  misc_RNA (1)...(19): siRNA sense strand
gauccauuuucacuuauug

SEQ ID NO: 1292429 - RNA, 19 nt, Homo sapiens
  misc_RNA (1)...(19): siRNA sense strand
uugaugcaguaacuuauag

SEQ ID NO: 1292430 - RNA, 19 nt, Homo sapiens
  misc_RNA (1)...(19): siRNA sense strand
guaucuugaugcaguaacu

SEQ ID NO: 1292431 - RNA, 19 nt, Homo sapiens
  misc_RNA (1)...(19): siRNA sense strand
caacauuugaagcuaugga

SEQ ID NO: 1292432 - RNA, 19 nt, Homo sapiens
  misc_RNA (1)...(19): siRNA sense strand
gagauuggugaacgaguag

SEQ ID NO: 1292433 - RNA, 19 nt, Homo sapiens
  misc_RNA (1)...(19): siRNA sense strand
ggagagagcacgauuuauu

SEQ ID NO: 1292434 - RNA, 19 nt, Homo sapiens
  misc_RNA (1)...(19): siRNA sense strand
agagaaacauguccauaua

SEQ ID NO: 1292435 - RNA, 19 nt, Homo sapiens
  misc_RNA (1)...(19): siRNA sense strand
cagaugcacuuuauuugua

SEQ ID NO: 1292436 - RNA, 19 nt, Homo sapiens
  misc_RNA (1)...(19): siRNA sense strand
ggacuuacgaguuugguua

SEQ ID NO: 1292437 - RNA, 19 nt, Homo sapiens
  misc_RNA (1)...(19): siRNA sense strand
aaacagauaucaggauuug

SEQ ID NO: 1292438 - RNA, 19 nt, Homo sapiens
  misc_RNA (1)...(19): siRNA sense strand
cuauggagcucauugguaa

SEQ ID NO: 1292439 - RNA, 19 nt, Homo sapiens
  misc_RNA (1)...(19): siRNA sense strand
aaacacaccuuuagugaag

SEQ ID NO: 1292440 - RNA, 19 nt, Homo sapiens
  misc_RNA (1)...(19): siRNA sense strand
gaacuuaaaggaucaguag

SEQ ID NO: 1292441 - RNA, 19 nt, Homo sapiens
  misc_RNA (1)...(19): siRNA sense strand
gaaaacagauaucaggauu

SEQ ID NO: 1292442 - RNA, 19 nt, Homo sapiens
  misc_RNA (1)...(19): siRNA sense strand
uaaaggaucaguagcaauu

SEQ ID NO: 1292443 - RNA, 19 nt, Homo sapiens
  misc_RNA (1)...(19): siRNA sense strand
aaaugggacuuacgaguuu

SEQ ID NO: 1292444 - RNA, 19 nt, Homo sapiens
  misc_RNA (1)...(19): siRNA sense strand
guuaucagaugcacuuuau

SEQ ID NO: 1292445 - RNA, 19 nt, Homo sapiens
  misc_RNA (1)...(19): siRNA sense strand
gagcugaauaugccacuua

SEQ ID NO: 1292446 - RNA, 19 nt, Homo sapiens
  misc_RNA (1)...(19): siRNA sense strand
gagcagagaggcugaauag

SEQ ID NO: 1292447 - RNA, 19 nt, Homo sapiens
  misc_RNA (1)...(19): siRNA sense strand
ugagauuggugaacgagua

SEQ ID NO: 1292448 - RNA, 19 nt, Homo sapiens
  misc_RNA (1)...(19): siRNA sense strand
gugaacgaguagauuauaa

SEQ ID NO: 1292449 - RNA, 19 nt, Homo sapiens
  misc_RNA (1)...(19): siRNA sense strand
gagagagcacgauuuauug

SEQ ID NO: 1292450 - RNA, 19 nt, Homo sapiens
  misc_RNA (1)...(19): siRNA sense strand
caaaugggacuuacgaguu

SEQ ID NO: 1292451 - RNA, 19 nt, Homo sapiens
  misc_RNA (1)...(19): siRNA sense strand
ggucauugcugugauuguu

SEQ ID NO: 1292452 - RNA, 19 nt, Homo sapiens
  misc_RNA (1)...(19): siRNA sense strand
ccagauccauuuucacuua

SEQ ID NO: 1292453 - RNA, 19 nt, Homo sapiens
  misc_RNA (1)...(19): siRNA sense strand
gaaggaauacuugacaguu

SEQ ID NO: 1292454 - RNA, 19 nt, Homo sapiens
  misc_RNA (1)...(19): siRNA sense strand
aaggaauacuugacaguuu

SEQ ID NO: 1292455 - RNA, 19 nt, Homo sapiens
  misc_RNA (1)...(19): siRNA sense strand
ucagaugacgccuguuaua

SEQ ID NO: 1292456 - RNA, 19 nt, Homo sapiens
  misc_RNA (1)...(19): siRNA sense strand
gaaaacacaccuuuaguga

SEQ ID NO: 1292457 - RNA, 19 nt, Homo sapiens
  misc_RNA (1)...(19): siRNA sense strand
gaugacgccuguuauagag

SEQ ID NO: 1292458 - RNA, 19 nt, Homo sapiens
  misc_RNA (1)...(19): siRNA sense strand
gagaaacauguccauauau

SEQ ID NO: 1292459 - RNA, 19 nt, Homo sapiens
  misc_RNA (1)...(19): siRNA sense strand
ccacuuaccagacuaaauc

SEQ ID NO: 1292460 - RNA, 19 nt, Homo sapiens
  misc_RNA (1)...(19): siRNA sense strand
acgaguagauuauaagugu

SEQ ID NO: 1292461 - RNA, 19 nt, Homo sapiens
  misc_RNA (1)...(19): siRNA sense strand
cuacaaagcaacaguuaug

SEQ ID NO: 1292462 - RNA, 19 nt, Homo sapiens
  misc_RNA (1)...(19): siRNA sense strand
ccaccaacauuugaagcua

SEQ ID NO: 1292463 - RNA, 19 nt, Homo sapiens
  misc_RNA (1)...(19): siRNA sense strand
uauacgggauccuuuaaau

SEQ ID NO: 1292464 - RNA, 19 nt, Homo sapiens
  misc_RNA (1)...(19): siRNA sense strand
cgaguuugguuaucagaug

SEQ ID NO: 1292465 - RNA, 19 nt, Homo sapiens
  misc_RNA (1)...(19): siRNA sense strand
gaacgaguagauuauaagu

SEQ ID NO: 1292466 - RNA, 19 nt, Homo sapiens
  misc_RNA (1)...(19): siRNA sense strand
gugaggagccaccaacauu

SEQ ID NO: 1292467 - RNA, 19 nt, Homo sapiens
  misc_RNA (1)...(19): siRNA sense strand
gauggcagcgacacaauug

SEQ ID NO: 1292468 - RNA, 19 nt, Homo sapiens
  misc_RNA (1)...(19): siRNA sense strand
ucucagaugacgccuguua

SEQ ID NO: 1292469 - RNA, 19 nt, Homo sapiens
  misc_RNA (1)...(19): siRNA sense strand
acacaccuuuagugaagua

SEQ ID NO: 1292470 - RNA, 19 nt, Homo sapiens
  misc_RNA (1)...(19): siRNA sense strand
gcuauggagcucauuggua

SEQ ID NO: 1292471 - RNA, 19 nt, Homo sapiens
  misc_RNA (1)...(19): siRNA sense strand
gaggagccaccaacauuug

SEQ ID NO: 1292472 - RNA, 19 nt, Homo sapiens
  misc_RNA (1)...(19): siRNA sense strand
uagagaaacauguccauau

SEQ ID NO: 1292473 - RNA, 19 nt, Homo sapiens
  misc_RNA (1)...(19): siRNA sense strand
ggugaacgaguagauuaua

SEQ ID NO: 1292474 - RNA, 19 nt, Homo sapiens
  misc_RNA (1)...(19): siRNA sense strand
gaaguagaaguauuugagu

SEQ ID NO: 1292475 - RNA, 19 nt, Homo sapiens
  misc_RNA (1)...(19): siRNA sense strand
gaaacauguccauauauac

SEQ ID NO: 1292476 - RNA, 19 nt, Homo sapiens
  misc_RNA (1)...(19): siRNA sense strand
ugacgccuguuauagagaa

SEQ ID NO: 1292477 - RNA, 19 nt, Homo sapiens
  misc_RNA (1)...(19): siRNA sense strand
cgaguagauuauaagugua

SEQ ID NO: 1292478 - RNA, 19 nt, Homo sapiens
  misc_RNA (1)...(19): siRNA sense strand
gcacuuuauuuguaaugag

SEQ ID NO: 1292479 - RNA, 19 nt, Homo sapiens
  misc_RNA (1)...(19): siRNA sense strand
guagaaguauuugaguauc

SEQ ID NO: 1292480 - RNA, 19 nt, Homo sapiens
  misc_RNA (1)...(19): siRNA sense strand
guauuugaguaucuugaug

SEQ ID NO: 1292481 - RNA, 19 nt, Homo sapiens
  misc_RNA (1)...(19): siRNA sense strand
aggaauacuugacaguuug

SEQ ID NO: 1292482 - RNA, 19 nt, Homo sapiens
  misc_RNA (1)...(19): siRNA sense strand
ccaaaacccuacuaugaga

SEQ ID NO: 1292483 - RNA, 19 nt, Homo sapiens
  misc_RNA (1)...(19): siRNA sense strand
aguguaaaguggucaaaug

SEQ ID NO: 1292484 - RNA, 19 nt, Homo sapiens
  misc_RNA (1)...(19): siRNA sense strand
ccacccauacuauuuguga

SEQ ID NO: 1292485 - RNA, 19 nt, Homo sapiens
  misc_RNA (1)...(19): siRNA sense strand
uuggagagagcacgauuua

SEQ ID NO: 1292486 - RNA, 19 nt, Homo sapiens
  misc_RNA (1)...(19): siRNA sense strand
gguuaucagaugcacuuua

SEQ ID NO: 1292487 - RNA, 19 nt, Homo sapiens
  misc_RNA (1)...(19): siRNA sense strand
caccaacauuugaagcuau

SEQ ID NO: 1292488 - RNA, 19 nt, Homo sapiens
  misc_RNA (1)...(19): siRNA sense strand
ugaggagccaccaacauuu

SEQ ID NO: 1292489 - RNA, 19 nt, Homo sapiens
  misc_RNA (1)...(19): siRNA sense strand
ggaaggaauacuugacagu

SEQ ID NO: 1292490 - RNA, 19 nt, Homo sapiens
  misc_RNA (1)...(19): siRNA sense strand
gaggaaggaauacuugaca

SEQ ID NO: 1292491 - RNA, 19 nt, Homo sapiens
  misc_RNA (1)...(19): siRNA sense strand
ugaguaucuugaugcagua

SEQ ID NO: 1292492 - RNA, 19 nt, Homo sapiens
  misc_RNA (1)...(19): siRNA sense strand
caccuuuagugaaguagaa

SEQ ID NO: 1292493 - RNA, 19 nt, Homo sapiens
  misc_RNA (1)...(19): siRNA sense strand
acagauaucaggauuugga

SEQ ID NO: 1292494 - RNA, 19 nt, Homo sapiens
  misc_RNA (1)...(19): siRNA sense strand
ucauugcugugauuguuau

SEQ ID NO: 1292495 - RNA, 19 nt, Homo sapiens
  misc_RNA (1)...(19): siRNA sense strand
ucagaugcacuuuauuugu

SEQ ID NO: 1292496 - RNA, 19 nt, Homo sapiens
  misc_RNA (1)...(19): siRNA sense strand
gugcugcuccagaguguaa

SEQ ID NO: 1292497 - RNA, 19 nt, Homo sapiens
  misc_RNA (1)...(19): siRNA sense strand
ggaaaacacaccuuuagug

SEQ ID NO: 1292498 - RNA, 19 nt, Homo sapiens
  misc_RNA (1)...(19): siRNA sense strand
aaggaucaguagcaauuug

SEQ ID NO: 1292499 - RNA, 19 nt, Homo sapiens
  misc_RNA (1)...(19): siRNA sense strand
uauauacgggauccuuuaa

SEQ ID NO: 1292500 - RNA, 19 nt, Homo sapiens
  misc_RNA (1)...(19): siRNA sense strand
ugaaguagaaguauuugag

SEQ ID NO: 1292501 - RNA, 19 nt, Homo sapiens
  misc_RNA (1)...(19): siRNA sense strand
cuugacaguuuggauguuu

SEQ ID NO: 1292502 - RNA, 19 nt, Homo sapiens
  misc_RNA (1)...(19): siRNA sense strand
cauauauacgggauccuuu

SEQ ID NO: 1292503 - RNA, 19 nt, Homo sapiens
  misc_RNA (1)...(19): siRNA sense strand
auauauacgggauccuuua

SEQ ID NO: 1292504 - RNA, 19 nt, Homo sapiens
  misc_RNA (1)...(19): siRNA sense strand
cuuaaaggaucaguagcaa

SEQ ID NO: 1292505 - RNA, 19 nt, Homo sapiens
  misc_RNA (1)...(19): siRNA sense strand
uaaaccugaggaaggaaua

SEQ ID NO: 1292506 - RNA, 19 nt, Homo sapiens
  misc_RNA (1)...(19): siRNA sense strand
agaugacgccuguuauaga

SEQ ID NO: 1292507 - RNA, 19 nt, Homo sapiens
  misc_RNA (1)...(19): siRNA sense strand
ugugauuguuauugccaua

SEQ ID NO: 1292508 - RNA, 19 nt, Homo sapiens
  misc_RNA (1)...(19): siRNA sense strand
gagagcacgauuuauugug

SEQ ID NO: 1292509 - RNA, 19 nt, Homo sapiens
  misc_RNA (1)...(19): siRNA sense strand
gaaguauuugaguaucuug

SEQ ID NO: 1292510 - RNA, 19 nt, Homo sapiens
  misc_RNA (1)...(19): siRNA sense strand
ggcuaccugucucagauga

SEQ ID NO: 1292511 - RNA, 19 nt, Homo sapiens
  misc_RNA (1)...(19): siRNA sense strand
gauaucaggauuuggaaaa

SEQ ID NO: 1292512 - RNA, 19 nt, Homo sapiens
  misc_RNA (1)...(19): siRNA sense strand
ccucuugccacccauacua

SEQ ID NO: 1292513 - RNA, 19 nt, Homo sapiens
  misc_RNA (1)...(19): siRNA sense strand
ccaugguguugcugcugua

SEQ ID NO: 1292514 - RNA, 19 nt, Homo sapiens
  misc_RNA (1)...(19): siRNA sense strand
cagaugacgccuguuauag

SEQ ID NO: 1292515 - RNA, 19 nt, Homo sapiens
  misc_RNA (1)...(19): siRNA sense strand
cagaugguggagcugaaua

SEQ ID NO: 1292516 - RNA, 19 nt, Homo sapiens
  misc_RNA (1)...(19): siRNA sense strand
gucauugcugugauuguua

SEQ ID NO: 1292517 - RNA, 19 nt, Homo sapiens
  misc_RNA (1)...(19): siRNA sense strand
ggagccaccaacauuugaa

SEQ ID NO: 1292518 - RNA, 19 nt, Homo sapiens
  misc_RNA (1)...(19): siRNA sense strand
uuggugaacgaguagauua

SEQ ID NO: 1292519 - RNA, 19 nt, Homo sapiens
  misc_RNA (1)...(19): siRNA sense strand
gcgcuuuccuggguugcuu

SEQ ID NO: 1292520 - RNA, 19 nt, Homo sapiens
  misc_RNA (1)...(19): siRNA sense strand
uacuacaaagcaacaguua

SEQ ID NO: 1292521 - RNA, 19 nt, Homo sapiens
  misc_RNA (1)...(19): siRNA sense strand
cuugaugcaguaacuuaua

SEQ ID NO: 1292522 - RNA, 19 nt, Homo sapiens
  misc_RNA (1)...(19): siRNA sense strand
aaacauguccauauauacg

SEQ ID NO: 1292523 - RNA, 19 nt, Homo sapiens
  misc_RNA (1)...(19): siRNA sense strand
guguaaaguggucaaaugu

SEQ ID NO: 1292524 - RNA, 19 nt, Homo sapiens
  misc_RNA (1)...(19): siRNA sense strand
cuuacgaguuugguuauca

SEQ ID NO: 1292525 - RNA, 19 nt, Homo sapiens
  misc_RNA (1)...(19): siRNA sense strand
uacgggauccuuuaaaugg

SEQ ID NO: 1292526 - RNA, 19 nt, Homo sapiens
  misc_RNA (1)...(19): siRNA sense strand
gcagaugguggagcugaau

SEQ ID NO: 1292527 - RNA, 19 nt, Homo sapiens
  misc_RNA (1)...(19): siRNA sense strand
aaccaaaacccuacuauga

SEQ ID NO: 1292528 - RNA, 19 nt, Homo sapiens
  misc_RNA (1)...(19): siRNA sense strand
uugaugcaguaacuuauag

SEQ ID NO: 1292529 - RNA, 19 nt, Homo sapiens
  misc_RNA (1)...(19): siRNA sense strand
ggagcugaauaugccacuu

SEQ ID NO: 1292530 - RNA, 19 nt, Homo sapiens
  misc_RNA (1)...(19): siRNA sense strand
caacauuugaagcuaugga

SEQ ID NO: 1292531 - RNA, 19 nt, Homo sapiens
  misc_RNA (1)...(19): siRNA sense strand
cgauggcagcgacacaauu

SEQ ID NO: 1292532 - RNA, 19 nt, Homo sapiens
  misc_RNA (1)...(19): siRNA sense strand
gauccauuuucacuuauug

SEQ ID NO: 1292533 - RNA, 19 nt, Homo sapiens
  misc_RNA (1)...(19): siRNA sense strand
ggagagagcacgauuuauu

SEQ ID NO: 1292534 - RNA, 19 nt, Homo sapiens
  misc_RNA (1)...(19): siRNA sense strand
agagaaacauguccauaua

SEQ ID NO: 1292535 - RNA, 19 nt, Homo sapiens
  misc_RNA (1)...(19): siRNA sense strand
cagaugcacuuuauuugua

SEQ ID NO: 1292536 - RNA, 19 nt, Homo sapiens
  misc_RNA (1)...(19): siRNA sense strand
ggacuuacgaguuugguua

SEQ ID NO: 1292537 - RNA, 19 nt, Homo sapiens
  misc_RNA (1)...(19): siRNA sense strand
aaacagauaucaggauuug

SEQ ID NO: 1292538 - RNA, 19 nt, Homo sapiens
  misc_RNA (1)...(19): siRNA sense strand
cuauggagcucauugguaa

SEQ ID NO: 1292539 - RNA, 19 nt, Homo sapiens
  misc_RNA (1)...(19): siRNA sense strand
aaacacaccuuuagugaag

SEQ ID NO: 1292540 - RNA, 19 nt, Homo sapiens
  misc_RNA (1)...(19): siRNA sense strand
gaacuuaaaggaucaguag

SEQ ID NO: 1292541 - RNA, 19 nt, Homo sapiens
  misc_RNA (1)...(19): siRNA sense strand
gaaaacagauaucaggauu

SEQ ID NO: 1292542 - RNA, 19 nt, Homo sapiens
  misc_RNA (1)...(19): siRNA sense strand
uaaaggaucaguagcaauu

SEQ ID NO: 1292543 - RNA, 19 nt, Homo sapiens
  misc_RNA (1)...(19): siRNA sense strand
aaaugggacuuacgaguuu

SEQ ID NO: 1292544 - RNA, 19 nt, Homo sapiens
  misc_RNA (1)...(19): siRNA sense strand
guuaucagaugcacuuuau

SEQ ID NO: 1292545 - RNA, 19 nt, Homo sapiens
  misc_RNA (1)...(19): siRNA sense strand
gagcugaauaugccacuua

SEQ ID NO: 1292546 - RNA, 19 nt, Homo sapiens
  misc_RNA (1)...(19): siRNA sense strand
ugagauuggugaacgagua

SEQ ID NO: 1292547 - RNA, 19 nt, Homo sapiens
  misc_RNA (1)...(19): siRNA sense strand
gugaacgaguagauuauaa

SEQ ID NO: 1292548 - RNA, 19 nt, Homo sapiens
  misc_RNA (1)...(19): siRNA sense strand
gagagagcacgauuuauug

SEQ ID NO: 1292549 - RNA, 19 nt, Homo sapiens
  misc_RNA (1)...(19): siRNA sense strand
caaaugggacuuacgaguu

SEQ ID NO: 1292550 - RNA, 19 nt, Homo sapiens
  misc_RNA (1)...(19): siRNA sense strand
ggucauugcugugauuguu

SEQ ID NO: 1292551 - RNA, 19 nt, Homo sapiens
  misc_RNA (1)...(19): siRNA sense strand
ccagauccauuuucacuua

SEQ ID NO: 1292552 - RNA, 19 nt, Homo sapiens
  misc_RNA (1)...(19): siRNA sense strand
gaaggaauacuugacaguu

SEQ ID NO: 1292553 - RNA, 19 nt, Homo sapiens
  misc_RNA (1)...(19): siRNA sense strand
aaggaauacuugacaguuu

SEQ ID NO: 1292554 - RNA, 19 nt, Homo sapiens
  misc_RNA (1)...(19): siRNA sense strand
ucagaugacgccuguuaua

SEQ ID NO: 1292555 - RNA, 19 nt, Homo sapiens
  misc_RNA (1)...(19): siRNA sense strand
gaaaacacaccuuuaguga

SEQ ID NO: 1292556 - RNA, 19 nt, Homo sapiens
  misc_RNA (1)...(19): siRNA sense strand
gaugacgccuguuauagag

SEQ ID NO: 1292557 - RNA, 19 nt, Homo sapiens
  misc_RNA (1)...(19): siRNA sense strand
gagaaacauguccauauau

SEQ ID NO: 1292558 - RNA, 19 nt, Homo sapiens
  misc_RNA (1)...(19): siRNA sense strand
ccacuuaccagacuaaauc

SEQ ID NO: 1292559 - RNA, 19 nt, Homo sapiens
  misc_RNA (1)...(19): siRNA sense strand
acgaguagauuauaagugu

SEQ ID NO: 1292560 - RNA, 19 nt, Homo sapiens
  misc_RNA (1)...(19): siRNA sense strand
cuacaaagcaacaguuaug

SEQ ID NO: 1292561 - RNA, 19 nt, Homo sapiens
  misc_RNA (1)...(19): siRNA sense strand
ccaccaacauuugaagcua

SEQ ID NO: 1292562 - RNA, 19 nt, Homo sapiens
  misc_RNA (1)...(19): siRNA sense strand
uauacgggauccuuuaaau

SEQ ID NO: 1292563 - RNA, 19 nt, Homo sapiens
  misc_RNA (1)...(19): siRNA sense strand
cgaguuugguuaucagaug

SEQ ID NO: 1292564 - RNA, 19 nt, Homo sapiens
  misc_RNA (1)...(19): siRNA sense strand
gaacgaguagauuauaagu

SEQ ID NO: 1292565 - RNA, 19 nt, Homo sapiens
  misc_RNA (1)...(19): siRNA sense strand
gugaggagccaccaacauu

SEQ ID NO: 1292566 - RNA, 19 nt, Homo sapiens
  misc_RNA (1)...(19): siRNA sense strand
gauggcagcgacacaauug

SEQ ID NO: 1292567 - RNA, 19 nt, Homo sapiens
  misc_RNA (1)...(19): siRNA sense strand
ucucagaugacgccuguua

SEQ ID NO: 1292568 - RNA, 19 nt, Homo sapiens
  misc_RNA (1)...(19): siRNA sense strand
gaggagccaccaacauuug

SEQ ID NO: 1292569 - RNA, 19 nt, Homo sapiens
  misc_RNA (1)...(19): siRNA sense strand
gcuauggagcucauuggua

SEQ ID NO: 1292570 - RNA, 19 nt, Homo sapiens
  misc_RNA (1)...(19): siRNA sense strand
acacaccuuuagugaagua

SEQ ID NO: 1292571 - RNA, 19 nt, Homo sapiens
  misc_RNA (1)...(19): siRNA sense strand
uagagaaacauguccauau

SEQ ID NO: 1292572 - RNA, 19 nt, Homo sapiens
  misc_RNA (1)...(19): siRNA sense strand
guuccaaagugucuuaaag

SEQ ID NO: 1292573 - RNA, 19 nt, Homo sapiens
  misc_RNA (1)...(19): siRNA sense strand
ggugaacgaguagauuaua

SEQ ID NO: 1292574 - RNA, 19 nt, Homo sapiens
  misc_RNA (1)...(19): siRNA sense strand
gaaguagaaguauuugagu

SEQ ID NO: 1292575 - RNA, 19 nt, Homo sapiens
  misc_RNA (1)...(19): siRNA sense strand
gaaacauguccauauauac

SEQ ID NO: 1292576 - RNA, 19 nt, Homo sapiens
  misc_RNA (1)...(19): siRNA sense strand
ugacgccuguuauagagaa

SEQ ID NO: 1292577 - RNA, 19 nt, Homo sapiens
  misc_RNA (1)...(19): siRNA sense strand
cgaguagauuauaagugua

SEQ ID NO: 1292578 - RNA, 19 nt, Homo sapiens
  misc_RNA (1)...(19): siRNA sense strand
gcacuuuauuuguaaugag

SEQ ID NO: 1292579 - RNA, 19 nt, Homo sapiens
  misc_RNA (1)...(19): siRNA sense strand
guagaaguauuugaguauc

SEQ ID NO: 1292580 - RNA, 19 nt, Homo sapiens
  misc_RNA (1)...(19): siRNA sense strand
guauuugaguaucuugaug

SEQ ID NO: 1292581 - RNA, 19 nt, Homo sapiens
  misc_RNA (1)...(19): siRNA sense strand
aggaauacuugacaguuug

SEQ ID NO: 1292582 - RNA, 19 nt, Homo sapiens
  misc_RNA (1)...(19): siRNA sense strand
ccaaaacccuacuaugaga

SEQ ID NO: 1292583 - RNA, 19 nt, Homo sapiens
  misc_RNA (1)...(19): siRNA sense strand
aguguaaaguggucaaaug

SEQ ID NO: 1292584 - RNA, 19 nt, Homo sapiens
  misc_RNA (1)...(19): siRNA sense strand
ccacccauacuauuuguga

SEQ ID NO: 1292585 - RNA, 19 nt, Homo sapiens
  misc_RNA (1)...(19): siRNA sense strand
uuggagagagcacgauuua

SEQ ID NO: 1292586 - RNA, 19 nt, Homo sapiens
  misc_RNA (1)...(19): siRNA sense strand
gguuaucagaugcacuuua

SEQ ID NO: 1292587 - RNA, 19 nt, Homo sapiens
  misc_RNA (1)...(19): siRNA sense strand
caccaacauuugaagcuau

SEQ ID NO: 1292588 - RNA, 19 nt, Homo sapiens
  misc_RNA (1)...(19): siRNA sense strand
ugaggagccaccaacauuu

SEQ ID NO: 1292589 - RNA, 19 nt, Homo sapiens
  misc_RNA (1)...(19): siRNA sense strand
ggaaggaauacuugacagu

SEQ ID NO: 1292590 - RNA, 19 nt, Homo sapiens
  misc_RNA (1)...(19): siRNA sense strand
gaggaaggaauacuugaca

SEQ ID NO: 1292591 - RNA, 19 nt, Homo sapiens
  misc_RNA (1)...(19): siRNA sense strand
ccaguuccaaagugucuua

SEQ ID NO: 1292592 - RNA, 19 nt, Homo sapiens
  misc_RNA (1)...(19): siRNA sense strand
ugaguaucuugaugcagua

SEQ ID NO: 1292593 - RNA, 19 nt, Homo sapiens
  misc_RNA (1)...(19): siRNA sense strand
caccuuuagugaaguagaa

SEQ ID NO: 1292594 - RNA, 19 nt, Homo sapiens
  misc_RNA (1)...(19): siRNA sense strand
acagauaucaggauuugga

SEQ ID NO: 1292595 - RNA, 19 nt, Homo sapiens
  misc_RNA (1)...(19): siRNA sense strand
ucauugcugugauuguuau

SEQ ID NO: 1292596 - RNA, 19 nt, Homo sapiens
  misc_RNA (1)...(19): siRNA sense strand
ucagaugcacuuuauuugu

SEQ ID NO: 1292597 - RNA, 19 nt, Homo sapiens
  misc_RNA (1)...(19): siRNA sense strand
gugcugcuccagaguguaa

SEQ ID NO: 1292598 - RNA, 19 nt, Homo sapiens
  misc_RNA (1)...(19): siRNA sense strand
ggaaaacacaccuuuagug

SEQ ID NO: 1292599 - RNA, 19 nt, Homo sapiens
  misc_RNA (1)...(19): siRNA sense strand
aaggaucaguagcaauuug

SEQ ID NO: 1292600 - RNA, 19 nt, Homo sapiens
  misc_RNA (1)...(19): siRNA sense strand
uauauacgggauccuuuaa

SEQ ID NO: 1292601 - RNA, 19 nt, Homo sapiens
  misc_RNA (1)...(19): siRNA sense strand
ugaaguagaaguauuugag

SEQ ID NO: 1292602 - RNA, 19 nt, Homo sapiens
  misc_RNA (1)...(19): siRNA sense strand
cuugacaguuuggauguuu

SEQ ID NO: 1292603 - RNA, 19 nt, Homo sapiens
  misc_RNA (1)...(19): siRNA sense strand
cauauauacgggauccuuu

SEQ ID NO: 1292604 - RNA, 19 nt, Homo sapiens
  misc_RNA (1)...(19): siRNA sense strand
auauauacgggauccuuua

SEQ ID NO: 1292605 - RNA, 19 nt, Homo sapiens
  misc_RNA (1)...(19): siRNA sense strand
cuuaaaggaucaguagcaa

SEQ ID NO: 1292606 - RNA, 19 nt, Homo sapiens
  misc_RNA (1)...(19): siRNA sense strand
uaaaccugaggaaggaaua

SEQ ID NO: 1292607 - RNA, 19 nt, Homo sapiens
  misc_RNA (1)...(19): siRNA sense strand
agaugacgccuguuauaga

SEQ ID NO: 1292608 - RNA, 19 nt, Homo sapiens
  misc_RNA (1)...(19): siRNA sense strand
ugugauuguuauugccaua

SEQ ID NO: 1292609 - RNA, 19 nt, Homo sapiens
  misc_RNA (1)...(19): siRNA sense strand
gagagcacgauuuauugug

SEQ ID NO: 1292610 - RNA, 19 nt, Homo sapiens
  misc_RNA (1)...(19): siRNA sense strand
gaaguauuugaguaucuug

SEQ ID NO: 1292611 - RNA, 19 nt, Homo sapiens
  misc_RNA (1)...(19): siRNA sense strand
ggcuaccugucucagauga

SEQ ID NO: 1292612 - RNA, 19 nt, Homo sapiens
  misc_RNA (1)...(19): siRNA sense strand
gauaucaggauuuggaaaa

SEQ ID NO: 1292613 - RNA, 19 nt, Homo sapiens
  misc_RNA (1)...(19): siRNA sense strand
ccucuugccacccauacua

SEQ ID NO: 1292614 - RNA, 19 nt, Homo sapiens
  misc_RNA (1)...(19): siRNA sense strand
ccaugguguugcugcugua

SEQ ID NO: 1292615 - RNA, 19 nt, Homo sapiens
  misc_RNA (1)...(19): siRNA sense strand
cagaugacgccuguuauag

SEQ ID NO: 1292616 - RNA, 19 nt, Homo sapiens
  misc_RNA (1)...(19): siRNA sense strand
cagaugguggagcugaaua

SEQ ID NO: 1292617 - RNA, 19 nt, Homo sapiens
  misc_RNA (1)...(19): siRNA sense strand
gucauugcugugauuguua

SEQ ID NO: 1292618 - RNA, 19 nt, Homo sapiens
  misc_RNA (1)...(19): siRNA sense strand
ggagccaccaacauuugaa

SEQ ID NO: 1292619 - RNA, 19 nt, Homo sapiens
  misc_RNA (1)...(19): siRNA sense strand
uuggugaacgaguagauua

SEQ ID NO: 1292620 - RNA, 19 nt, Homo sapiens
  misc_RNA (1)...(19): siRNA sense strand
gcgcuuuccuggguugcuu

SEQ ID NO: 1292621 - RNA, 19 nt, Homo sapiens
  misc_RNA (1)...(19): siRNA sense strand
uacuacaaagcaacaguua

SEQ ID NO: 1292622 - RNA, 19 nt, Homo sapiens
  misc_RNA (1)...(19): siRNA sense strand
cuugaugcaguaacuuaua

SEQ ID NO: 1292623 - RNA, 19 nt, Homo sapiens
  misc_RNA (1)...(19): siRNA sense strand
aaacauguccauauauacg

SEQ ID NO: 1292624 - RNA, 19 nt, Homo sapiens
  misc_RNA (1)...(19): siRNA sense strand
guguaaaguggucaaaugu

SEQ ID NO: 1292625 - RNA, 19 nt, Homo sapiens
  misc_RNA (1)...(19): siRNA sense strand
cuuacgaguuugguuauca

SEQ ID NO: 1292626 - RNA, 19 nt, Homo sapiens
  misc_RNA (1)...(19): siRNA sense strand
uacgggauccuuuaaaugg

SEQ ID NO: 1292627 - RNA, 19 nt, Homo sapiens
  misc_RNA (1)...(19): siRNA sense strand
gcagaugguggagcugaau

SEQ ID NO: 1292628 - RNA, 19 nt, Homo sapiens
  misc_RNA (1)...(19): siRNA sense strand
aaccaaaacccuacuauga

SEQ ID NO: 1292629 - RNA, 19 nt, Homo sapiens
  misc_RNA (1)...(19): siRNA sense strand
uugaugcaguaacuuauag

SEQ ID NO: 1292630 - RNA, 19 nt, Homo sapiens
  misc_RNA (1)...(19): siRNA sense strand
ggagcugaauaugccacuu

SEQ ID NO: 1292631 - RNA, 19 nt, Homo sapiens
  misc_RNA (1)...(19): siRNA sense strand
cgauggcagcgacacaauu

SEQ ID NO: 1292632 - RNA, 19 nt, Homo sapiens
  misc_RNA (1)...(19): siRNA sense strand
gauccauuuucacuuauug

SEQ ID NO: 1292633 - RNA, 19 nt, Homo sapiens
  misc_RNA (1)...(19): siRNA sense strand
ggagagagcacgauuuauu

SEQ ID NO: 1292634 - RNA, 19 nt, Homo sapiens
  misc_RNA (1)...(19): siRNA sense strand
agagaaacauguccauaua

SEQ ID NO: 1292635 - RNA, 19 nt, Homo sapiens
  misc_RNA (1)...(19): siRNA sense strand
cagaugcacuuuauuugua

SEQ ID NO: 1292636 - RNA, 19 nt, Homo sapiens
  misc_RNA (1)...(19): siRNA sense strand
ggacuuacgaguuugguua

SEQ ID NO: 1292637 - RNA, 19 nt, Homo sapiens
  misc_RNA (1)...(19): siRNA sense strand
aaacagauaucaggauuug

SEQ ID NO: 1292638 - RNA, 19 nt, Homo sapiens
  misc_RNA (1)...(19): siRNA sense strand
cuauggagcucauugguaa

SEQ ID NO: 1292639 - RNA, 19 nt, Homo sapiens
  misc_RNA (1)...(19): siRNA sense strand
aaacacaccuuuagugaag

SEQ ID NO: 1292640 - RNA, 19 nt, Homo sapiens
  misc_RNA (1)...(19): siRNA sense strand
gaacuuaaaggaucaguag

SEQ ID NO: 1292641 - RNA, 19 nt, Homo sapiens
  misc_RNA (1)...(19): siRNA sense strand
gaaaacagauaucaggauu

SEQ ID NO: 1292642 - RNA, 19 nt, Homo sapiens
  misc_RNA (1)...(19): siRNA sense strand
uaaaggaucaguagcaauu

SEQ ID NO: 1292643 - RNA, 19 nt, Homo sapiens
  misc_RNA (1)...(19): siRNA sense strand
aaaugggacuuacgaguuu

SEQ ID NO: 1292644 - RNA, 19 nt, Homo sapiens
  misc_RNA (1)...(19): siRNA sense strand
guuaucagaugcacuuuau

SEQ ID NO: 1292645 - RNA, 19 nt, Homo sapiens
  misc_RNA (1)...(19): siRNA sense strand
gagcugaauaugccacuua

SEQ ID NO: 1292646 - RNA, 19 nt, Homo sapiens
  misc_RNA (1)...(19): siRNA sense strand
ugagauuggugaacgagua

SEQ ID NO: 1292647 - RNA, 19 nt, Homo sapiens
  misc_RNA (1)...(19): siRNA sense strand
gugaacgaguagauuauaa

SEQ ID NO: 1292648 - RNA, 19 nt, Homo sapiens
  misc_RNA (1)...(19): siRNA sense strand
gagagagcacgauuuauug

SEQ ID NO: 1292649 - RNA, 19 nt, Homo sapiens
  misc_RNA (1)...(19): siRNA sense strand
caaaugggacuuacgaguu

SEQ ID NO: 1292650 - RNA, 19 nt, Homo sapiens
  misc_RNA (1)...(19): siRNA sense strand
ggucauugcugugauuguu

SEQ ID NO: 1292651 - RNA, 19 nt, Homo sapiens
  misc_RNA (1)...(19): siRNA sense strand
ccagauccauuuucacuua

SEQ ID NO: 1292652 - RNA, 19 nt, Homo sapiens
  misc_RNA (1)...(19): siRNA sense strand
gaaggaauacuugacaguu

SEQ ID NO: 1292653 - RNA, 19 nt, Homo sapiens
  misc_RNA (1)...(19): siRNA sense strand
aaggaauacuugacaguuu

SEQ ID NO: 1292654 - RNA, 19 nt, Homo sapiens
  misc_RNA (1)...(19): siRNA sense strand
ucagaugacgccuguuaua

SEQ ID NO: 1292655 - RNA, 19 nt, Homo sapiens
  misc_RNA (1)...(19): siRNA sense strand
gaaaacacaccuuuaguga

SEQ ID NO: 1292656 - RNA, 19 nt, Homo sapiens
  misc_RNA (1)...(19): siRNA sense strand
gaugacgccuguuauagag

SEQ ID NO: 1292657 - RNA, 19 nt, Homo sapiens
  misc_RNA (1)...(19): siRNA sense strand
gagaaacauguccauauau

SEQ ID NO: 1292658 - RNA, 19 nt, Homo sapiens
  misc_RNA (1)...(19): siRNA sense strand
ccacuuaccagacuaaauc

SEQ ID NO: 1292659 - RNA, 19 nt, Homo sapiens
  misc_RNA (1)...(19): siRNA sense strand
acgaguagauuauaagugu

SEQ ID NO: 1292660 - RNA, 19 nt, Homo sapiens
  misc_RNA (1)...(19): siRNA sense strand
cuacaaagcaacaguuaug

SEQ ID NO: 1292661 - RNA, 19 nt, Homo sapiens
  misc_RNA (1)...(19): siRNA sense strand
ccaccaacauuugaagcua

SEQ ID NO: 1292662 - RNA, 19 nt, Homo sapiens
  misc_RNA (1)...(19): siRNA sense strand
uauacgggauccuuuaaau

SEQ ID NO: 1292663 - RNA, 19 nt, Homo sapiens
  misc_RNA (1)...(19): siRNA sense strand
cgaguuugguuaucagaug

SEQ ID NO: 1292664 - RNA, 19 nt, Homo sapiens
  misc_RNA (1)...(19): siRNA sense strand
gaacgaguagauuauaagu

SEQ ID NO: 1292665 - RNA, 19 nt, Homo sapiens
  misc_RNA (1)...(19): siRNA sense strand
gugaggagccaccaacauu

SEQ ID NO: 1292666 - RNA, 19 nt, Homo sapiens
  misc_RNA (1)...(19): siRNA sense strand
gauggcagcgacacaauug

SEQ ID NO: 1292667 - RNA, 19 nt, Homo sapiens
  misc_RNA (1)...(19): siRNA sense strand
ucucagaugacgccuguua

SEQ ID NO: 1292668 - RNA, 19 nt, Homo sapiens
  misc_RNA (1)...(19): siRNA sense strand
gaggagccaccaacauuug

SEQ ID NO: 1292669 - RNA, 19 nt, Homo sapiens
  misc_RNA (1)...(19): siRNA sense strand
gcuauggagcucauuggua

SEQ ID NO: 1292670 - RNA, 19 nt, Homo sapiens
  misc_RNA (1)...(19): siRNA sense strand
acacaccuuuagugaagua

SEQ ID NO: 1292671 - RNA, 19 nt, Homo sapiens
  misc_RNA (1)...(19): siRNA sense strand
uagagaaacauguccauau

SEQ ID NO: 1292672 - RNA, 19 nt, Homo sapiens
  misc_RNA (1)...(19): siRNA sense strand
guuccaaagugucuuaaag

SEQ ID NO: 1292673 - RNA, 19 nt, Homo sapiens
  misc_RNA (1)...(19): siRNA sense strand
ggugaacgaguagauuaua

SEQ ID NO: 1292674 - RNA, 19 nt, Homo sapiens
  misc_RNA (1)...(19): siRNA sense strand
gaaguagaaguauuugagu

SEQ ID NO: 1292675 - RNA, 19 nt, Homo sapiens
  misc_RNA (1)...(19): siRNA sense strand
gaaacauguccauauauac

SEQ ID NO: 1292676 - RNA, 19 nt, Homo sapiens
  misc_RNA (1)...(19): siRNA sense strand
ugacgccuguuauagagaa

SEQ ID NO: 1292677 - RNA, 19 nt, Homo sapiens
  misc_RNA (1)...(19): siRNA sense strand
cgaguagauuauaagugua

SEQ ID NO: 1292678 - RNA, 19 nt, Homo sapiens
  misc_RNA (1)...(19): siRNA sense strand
gcacuuuauuuguaaugag

SEQ ID NO: 1292679 - RNA, 19 nt, Homo sapiens
  misc_RNA (1)...(19): siRNA sense strand
guagaaguauuugaguauc

SEQ ID NO: 1292680 - RNA, 19 nt, Homo sapiens
  misc_RNA (1)...(19): siRNA sense strand
guauuugaguaucuugaug

SEQ ID NO: 1292681 - RNA, 19 nt, Homo sapiens
  misc_RNA (1)...(19): siRNA sense strand
aggaauacuugacaguuug

SEQ ID NO: 1292682 - RNA, 19 nt, Homo sapiens
  misc_RNA (1)...(19): siRNA sense strand
ccaaaacccuacuaugaga

SEQ ID NO: 1292683 - RNA, 19 nt, Homo sapiens
  misc_RNA (1)...(19): siRNA sense strand
aguguaaaguggucaaaug

SEQ ID NO: 1292684 - RNA, 19 nt, Homo sapiens
  misc_RNA (1)...(19): siRNA sense strand
ccacccauacuauuuguga

SEQ ID NO: 1292685 - RNA, 19 nt, Homo sapiens
  misc_RNA (1)...(19): siRNA sense strand
uuggagagagcacgauuua

SEQ ID NO: 1292686 - RNA, 19 nt, Homo sapiens
  misc_RNA (1)...(19): siRNA sense strand
gguuaucagaugcacuuua

SEQ ID NO: 1292687 - RNA, 19 nt, Homo sapiens
  misc_RNA (1)...(19): siRNA sense strand
caccaacauuugaagcuau

SEQ ID NO: 1292688 - RNA, 19 nt, Homo sapiens
  misc_RNA (1)...(19): siRNA sense strand
ugaggagccaccaacauuu

SEQ ID NO: 1292689 - RNA, 19 nt, Homo sapiens
  misc_RNA (1)...(19): siRNA sense strand
ggaaggaauacuugacagu

SEQ ID NO: 1292690 - RNA, 19 nt, Homo sapiens
  misc_RNA (1)...(19): siRNA sense strand
gaggaaggaauacuugaca

SEQ ID NO: 1292691 - RNA, 19 nt, Homo sapiens
  misc_RNA (1)...(19): siRNA sense strand
ccaguuccaaagugucuua

SEQ ID NO: 1292692 - RNA, 19 nt, Homo sapiens
  misc_RNA (1)...(19): siRNA sense strand
ugaguaucuugaugcagua

SEQ ID NO: 1292693 - RNA, 19 nt, Homo sapiens
  misc_RNA (1)...(19): siRNA sense strand
caccuuuagugaaguagaa

SEQ ID NO: 1292694 - RNA, 19 nt, Homo sapiens
  misc_RNA (1)...(19): siRNA sense strand
acagauaucaggauuugga

SEQ ID NO: 1292695 - RNA, 19 nt, Homo sapiens
  misc_RNA (1)...(19): siRNA sense strand
ucauugcugugauuguuau

SEQ ID NO: 1292696 - RNA, 19 nt, Homo sapiens
  misc_RNA (1)...(19): siRNA sense strand
ucagaugcacuuuauuugu

SEQ ID NO: 1292697 - RNA, 19 nt, Homo sapiens
  misc_RNA (1)...(19): siRNA sense strand
gugcugcuccagaguguaa

SEQ ID NO: 1292698 - RNA, 19 nt, Homo sapiens
  misc_RNA (1)...(19): siRNA sense strand
ggaaaacacaccuuuagug

SEQ ID NO: 1292699 - RNA, 19 nt, Homo sapiens
  misc_RNA (1)...(19): siRNA sense strand
aaggaucaguagcaauuug

SEQ ID NO: 1292700 - RNA, 19 nt, Homo sapiens
  misc_RNA (1)...(19): siRNA sense strand
uauauacgggauccuuuaa

SEQ ID NO: 1292701 - RNA, 19 nt, Homo sapiens
  misc_RNA (1)...(19): siRNA sense strand
ugaaguagaaguauuugag

SEQ ID NO: 1292702 - RNA, 19 nt, Homo sapiens
  misc_RNA (1)...(19): siRNA sense strand
cuugacaguuuggauguuu

SEQ ID NO: 1292703 - RNA, 19 nt, Homo sapiens
  misc_RNA (1)...(19): siRNA sense strand
cauauauacgggauccuuu

SEQ ID NO: 1292704 - RNA, 19 nt, Homo sapiens
  misc_RNA (1)...(19): siRNA sense strand
auauauacgggauccuuua

SEQ ID NO: 1292705 - RNA, 19 nt, Homo sapiens
  misc_RNA (1)...(19): siRNA sense strand
cuuaaaggaucaguagcaa

SEQ ID NO: 1292706 - RNA, 19 nt, Homo sapiens
  misc_RNA (1)...(19): siRNA sense strand
uaaaccugaggaaggaaua

SEQ ID NO: 1292707 - RNA, 19 nt, Homo sapiens
  misc_RNA (1)...(19): siRNA sense strand
agaugacgccuguuauaga

SEQ ID NO: 1292708 - RNA, 19 nt, Homo sapiens
  misc_RNA (1)...(19): siRNA sense strand
ugugauuguuauugccaua

SEQ ID NO: 1292709 - RNA, 19 nt, Homo sapiens
  misc_RNA (1)...(19): siRNA sense strand
gagagcacgauuuauugug

SEQ ID NO: 1292710 - RNA, 19 nt, Homo sapiens
  misc_RNA (1)...(19): siRNA sense strand
gaaguauuugaguaucuug

SEQ ID NO: 1292711 - RNA, 19 nt, Homo sapiens
  misc_RNA (1)...(19): siRNA sense strand
ggcuaccugucucagauga

SEQ ID NO: 1292712 - RNA, 19 nt, Homo sapiens
  misc_RNA (1)...(19): siRNA sense strand
gauaucaggauuuggaaaa

SEQ ID NO: 1292713 - RNA, 19 nt, Homo sapiens
  misc_RNA (1)...(19): siRNA sense strand
ccucuugccacccauacua

SEQ ID NO: 1292714 - RNA, 19 nt, Homo sapiens
  misc_RNA (1)...(19): siRNA sense strand
ccaugguguugcugcugua

SEQ ID NO: 1292715 - RNA, 19 nt, Homo sapiens
  misc_RNA (1)...(19): siRNA sense strand
cagaugacgccuguuauag

SEQ ID NO: 1292716 - RNA, 19 nt, Homo sapiens
  misc_RNA (1)...(19): siRNA sense strand
cagaugguggagcugaaua

SEQ ID NO: 1292717 - RNA, 19 nt, Homo sapiens
  misc_RNA (1)...(19): siRNA sense strand
gucauugcugugauuguua

SEQ ID NO: 1292718 - RNA, 19 nt, Homo sapiens
  misc_RNA (1)...(19): siRNA sense strand
ggagccaccaacauuugaa

SEQ ID NO: 1292719 - RNA, 19 nt, Homo sapiens
  misc_RNA (1)...(19): siRNA sense strand
uuggugaacgaguagauua

SEQ ID NO: 1292720 - RNA, 19 nt, Homo sapiens
  misc_RNA (1)...(19): siRNA sense strand
gcgcuuuccuggguugcuu

SEQ ID NO: 1292721 - RNA, 19 nt, Homo sapiens
  misc_RNA (1)...(19): siRNA sense strand
uacuacaaagcaacaguua

SEQ ID NO: 1292722 - RNA, 19 nt, Homo sapiens
  misc_RNA (1)...(19): siRNA sense strand
cuugaugcaguaacuuaua

SEQ ID NO: 1292723 - RNA, 19 nt, Homo sapiens
  misc_RNA (1)...(19): siRNA sense strand
aaacauguccauauauacg

SEQ ID NO: 1292724 - RNA, 19 nt, Homo sapiens
  misc_RNA (1)...(19): siRNA sense strand
guguaaaguggucaaaugu

SEQ ID NO: 1292725 - RNA, 19 nt, Homo sapiens
  misc_RNA (1)...(19): siRNA sense strand
cuuacgaguuugguuauca

SEQ ID NO: 1292726 - RNA, 19 nt, Homo sapiens
  misc_RNA (1)...(19): siRNA sense strand
uacgggauccuuuaaaugg

SEQ ID NO: 1292727 - RNA, 19 nt, Homo sapiens
  misc_RNA (1)...(19): siRNA sense strand
gcagaugguggagcugaau

SEQ ID NO: 1292728 - RNA, 19 nt, Homo sapiens
  misc_RNA (1)...(19): siRNA sense strand
aaccaaaacccuacuauga

SEQ ID NO: 1292729 - RNA, 19 nt, Homo sapiens
  misc_RNA (1)...(19): siRNA sense strand
uugaugcaguaacuuauag

SEQ ID NO: 1292730 - RNA, 19 nt, Homo sapiens
  misc_RNA (1)...(19): siRNA sense strand
ggagcugaauaugccacuu

SEQ ID NO: 1292731 - RNA, 19 nt, Homo sapiens
  misc_RNA (1)...(19): siRNA sense strand
cgauggcagcgacacaauu

SEQ ID NO: 1292732 - RNA, 19 nt, Homo sapiens
  misc_RNA (1)...(19): siRNA sense strand
gauccauuuucacuuauug

SEQ ID NO: 1292733 - RNA, 19 nt, Homo sapiens
  misc_RNA (1)...(19): siRNA sense strand
ggagagagcacgauuuauu

SEQ ID NO: 1292734 - RNA, 19 nt, Homo sapiens
  misc_RNA (1)...(19): siRNA sense strand
agagaaacauguccauaua

SEQ ID NO: 1292735 - RNA, 19 nt, Homo sapiens
  misc_RNA (1)...(19): siRNA sense strand
cagaugcacuuuauuugua

SEQ ID NO: 1292736 - RNA, 19 nt, Homo sapiens
  misc_RNA (1)...(19): siRNA sense strand
ggacuuacgaguuugguua

SEQ ID NO: 1292737 - RNA, 19 nt, Homo sapiens
  misc_RNA (1)...(19): siRNA sense strand
aaacagauaucaggauuug

SEQ ID NO: 1292738 - RNA, 19 nt, Homo sapiens
  misc_RNA (1)...(19): siRNA sense strand
cuauggagcucauugguaa

SEQ ID NO: 1292739 - RNA, 19 nt, Homo sapiens
  misc_RNA (1)...(19): siRNA sense strand
aaacacaccuuuagugaag

SEQ ID NO: 1292740 - RNA, 19 nt, Homo sapiens
  misc_RNA (1)...(19): siRNA sense strand
gaacuuaaaggaucaguag

SEQ ID NO: 1292741 - RNA, 19 nt, Homo sapiens
  misc_RNA (1)...(19): siRNA sense strand
gaaaacagauaucaggauu

SEQ ID NO: 1292742 - RNA, 19 nt, Homo sapiens
  misc_RNA (1)...(19): siRNA sense strand
uaaaggaucaguagcaauu

SEQ ID NO: 1292743 - RNA, 19 nt, Homo sapiens
  misc_RNA (1)...(19): siRNA sense strand
aaaugggacuuacgaguuu

SEQ ID NO: 1292744 - RNA, 19 nt, Homo sapiens
  misc_RNA (1)...(19): siRNA sense strand
guuaucagaugcacuuuau

SEQ ID NO: 1292745 - RNA, 19 nt, Homo sapiens
  misc_RNA (1)...(19): siRNA sense strand
gagcugaauaugccacuua

SEQ ID NO: 1292746 - RNA, 19 nt, Homo sapiens
  misc_RNA (1)...(19): siRNA sense strand
ugagauuggugaacgagua

SEQ ID NO: 1292747 - RNA, 19 nt, Homo sapiens
  misc_RNA (1)...(19): siRNA sense strand
gugaacgaguagauuauaa

SEQ ID NO: 1292748 - RNA, 19 nt, Homo sapiens
  misc_RNA (1)...(19): siRNA sense strand
gagagagcacgauuuauug

SEQ ID NO: 1292749 - RNA, 19 nt, Homo sapiens
  misc_RNA (1)...(19): siRNA sense strand
caaaugggacuuacgaguu

SEQ ID NO: 1292750 - RNA, 19 nt, Homo sapiens
  misc_RNA (1)...(19): siRNA sense strand
ggucauugcugugauuguu

SEQ ID NO: 1292751 - RNA, 19 nt, Homo sapiens
  misc_RNA (1)...(19): siRNA sense strand
ccagauccauuuucacuua

SEQ ID NO: 1292752 - RNA, 19 nt, Homo sapiens
  misc_RNA (1)...(19): siRNA sense strand
gaaggaauacuugacaguu

SEQ ID NO: 1292753 - RNA, 19 nt, Homo sapiens
  misc_RNA (1)...(19): siRNA sense strand
aaggaauacuugacaguuu

SEQ ID NO: 1292754 - RNA, 19 nt, Homo sapiens
  misc_RNA (1)...(19): siRNA sense strand
ucagaugacgccuguuaua

SEQ ID NO: 1292755 - RNA, 19 nt, Homo sapiens
  misc_RNA (1)...(19): siRNA sense strand
gaaaacacaccuuuaguga

SEQ ID NO: 1292756 - RNA, 19 nt, Homo sapiens
  misc_RNA (1)...(19): siRNA sense strand
gaugacgccuguuauagag

SEQ ID NO: 1292757 - RNA, 19 nt, Homo sapiens
  misc_RNA (1)...(19): siRNA sense strand
gagaaacauguccauauau

SEQ ID NO: 1292758 - RNA, 19 nt, Homo sapiens
  misc_RNA (1)...(19): siRNA sense strand
ccacuuaccagacuaaauc

SEQ ID NO: 1292759 - RNA, 19 nt, Homo sapiens
  misc_RNA (1)...(19): siRNA sense strand
acgaguagauuauaagugu

SEQ ID NO: 1292760 - RNA, 19 nt, Homo sapiens
  misc_RNA (1)...(19): siRNA sense strand
cuacaaagcaacaguuaug

SEQ ID NO: 1292761 - RNA, 19 nt, Homo sapiens
  misc_RNA (1)...(19): siRNA sense strand
ccaccaacauuugaagcua

SEQ ID NO: 1292762 - RNA, 19 nt, Homo sapiens
  misc_RNA (1)...(19): siRNA sense strand
uauacgggauccuuuaaau

SEQ ID NO: 1292763 - RNA, 19 nt, Homo sapiens
  misc_RNA (1)...(19): siRNA sense strand
cgaguuugguuaucagaug

SEQ ID NO: 1292764 - RNA, 19 nt, Homo sapiens
  misc_RNA (1)...(19): siRNA sense strand
gaacgaguagauuauaagu

SEQ ID NO: 1292765 - RNA, 19 nt, Homo sapiens
  misc_RNA (1)...(19): siRNA sense strand
gugaggagccaccaacauu

SEQ ID NO: 1292766 - RNA, 19 nt, Homo sapiens
  misc_RNA (1)...(19): siRNA sense strand
gauggcagcgacacaauug

SEQ ID NO: 1292767 - RNA, 19 nt, Homo sapiens
  misc_RNA (1)...(19): siRNA sense strand
ucucagaugacgccuguua

SEQ ID NO: 1292768 - RNA, 19 nt, Homo sapiens
  misc_RNA (1)...(19): siRNA sense strand
gaggagccaccaacauuug

SEQ ID NO: 1292769 - RNA, 19 nt, Homo sapiens
  misc_RNA (1)...(19): siRNA sense strand
gcuauggagcucauuggua

SEQ ID NO: 1292770 - RNA, 19 nt, Homo sapiens
  misc_RNA (1)...(19): siRNA sense strand
acacaccuuuagugaagua

SEQ ID NO: 1292771 - RNA, 19 nt, Homo sapiens
  misc_RNA (1)...(19): siRNA sense strand
uagagaaacauguccauau

SEQ ID NO: 1292772 - RNA, 19 nt, Homo sapiens
  misc_RNA (1)...(19): siRNA sense strand
guuccaaagugucuuaaag

SEQ ID NO: 1292773 - RNA, 19 nt, Homo sapiens
  misc_RNA (1)...(19): siRNA sense strand
ggugaacgaguagauuaua

SEQ ID NO: 1292774 - RNA, 19 nt, Homo sapiens
  misc_RNA (1)...(19): siRNA sense strand
gaaguagaaguauuugagu

SEQ ID NO: 1292775 - RNA, 19 nt, Homo sapiens
  misc_RNA (1)...(19): siRNA sense strand
gaaacauguccauauauac

SEQ ID NO: 1292776 - RNA, 19 nt, Homo sapiens
  misc_RNA (1)...(19): siRNA sense strand
ugacgccuguuauagagaa

SEQ ID NO: 1292777 - RNA, 19 nt, Homo sapiens
  misc_RNA (1)...(19): siRNA sense strand
cgaguagauuauaagugua

SEQ ID NO: 1292778 - RNA, 19 nt, Homo sapiens
  misc_RNA (1)...(19): siRNA sense strand
gcacuuuauuuguaaugag

SEQ ID NO: 1292779 - RNA, 19 nt, Homo sapiens
  misc_RNA (1)...(19): siRNA sense strand
guagaaguauuugaguauc

SEQ ID NO: 1292780 - RNA, 19 nt, Homo sapiens
  misc_RNA (1)...(19): siRNA sense strand
guauuugaguaucuugaug

SEQ ID NO: 1292781 - RNA, 19 nt, Homo sapiens
  misc_RNA (1)...(19): siRNA sense strand
aggaauacuugacaguuug

SEQ ID NO: 1292782 - RNA, 19 nt, Homo sapiens
  misc_RNA (1)...(19): siRNA sense strand
ccaaaacccuacuaugaga

SEQ ID NO: 1292783 - RNA, 19 nt, Homo sapiens
  misc_RNA (1)...(19): siRNA sense strand
aguguaaaguggucaaaug

SEQ ID NO: 1292784 - RNA, 19 nt, Homo sapiens
  misc_RNA (1)...(19): siRNA sense strand
ccacccauacuauuuguga

SEQ ID NO: 1292785 - RNA, 19 nt, Homo sapiens
  misc_RNA (1)...(19): siRNA sense strand
uuggagagagcacgauuua

SEQ ID NO: 1292786 - RNA, 19 nt, Homo sapiens
  misc_RNA (1)...(19): siRNA sense strand
gguuaucagaugcacuuua

SEQ ID NO: 1292787 - RNA, 19 nt, Homo sapiens
  misc_RNA (1)...(19): siRNA sense strand
caccaacauuugaagcuau

SEQ ID NO: 1292788 - RNA, 19 nt, Homo sapiens
  misc_RNA (1)...(19): siRNA sense strand
ugaggagccaccaacauuu

SEQ ID NO: 1292789 - RNA, 19 nt, Homo sapiens
  misc_RNA (1)...(19): siRNA sense strand
ggaaggaauacuugacagu

SEQ ID NO: 1292790 - RNA, 19 nt, Homo sapiens
  misc_RNA (1)...(19): siRNA sense strand
gaggaaggaauacuugaca

SEQ ID NO: 1292791 - RNA, 19 nt, Homo sapiens
  misc_RNA (1)...(19): siRNA sense strand
ccaguuccaaagugucuua

SEQ ID NO: 1292792 - RNA, 19 nt, Homo sapiens
  misc_RNA (1)...(19): siRNA sense strand
ugaguaucuugaugcagua

SEQ ID NO: 1292793 - RNA, 19 nt, Homo sapiens
  misc_RNA (1)...(19): siRNA sense strand
caccuuuagugaaguagaa

SEQ ID NO: 1292794 - RNA, 19 nt, Homo sapiens
  misc_RNA (1)...(19): siRNA sense strand
acagauaucaggauuugga

SEQ ID NO: 1292795 - RNA, 19 nt, Homo sapiens
  misc_RNA (1)...(19): siRNA sense strand
ucauugcugugauuguuau

SEQ ID NO: 1292796 - RNA, 19 nt, Homo sapiens
  misc_RNA (1)...(19): siRNA sense strand
ucagaugcacuuuauuugu

SEQ ID NO: 1292797 - RNA, 19 nt, Homo sapiens
  misc_RNA (1)...(19): siRNA sense strand
gugcugcuccagaguguaa

SEQ ID NO: 1292798 - RNA, 19 nt, Homo sapiens
  misc_RNA (1)...(19): siRNA sense strand
ggaaaacacaccuuuagug

SEQ ID NO: 1292799 - RNA, 19 nt, Homo sapiens
  misc_RNA (1)...(19): siRNA sense strand
aaggaucaguagcaauuug

SEQ ID NO: 1292800 - RNA, 19 nt, Homo sapiens
  misc_RNA (1)...(19): siRNA sense strand
uauauacgggauccuuuaa

SEQ ID NO: 1292801 - RNA, 19 nt, Homo sapiens
  misc_RNA (1)...(19): siRNA sense strand
ugaaguagaaguauuugag

SEQ ID NO: 1292802 - RNA, 19 nt, Homo sapiens
  misc_RNA (1)...(19): siRNA sense strand
cuugacaguuuggauguuu

SEQ ID NO: 1292803 - RNA, 19 nt, Homo sapiens
  misc_RNA (1)...(19): siRNA sense strand
cauauauacgggauccuuu

SEQ ID NO: 1292804 - RNA, 19 nt, Homo sapiens
  misc_RNA (1)...(19): siRNA sense strand
auauauacgggauccuuua

SEQ ID NO: 1292805 - RNA, 19 nt, Homo sapiens
  misc_RNA (1)...(19): siRNA sense strand
cuuaaaggaucaguagcaa

SEQ ID NO: 1292806 - RNA, 19 nt, Homo sapiens
  misc_RNA (1)...(19): siRNA sense strand
uaaaccugaggaaggaaua

SEQ ID NO: 1292807 - RNA, 19 nt, Homo sapiens
  misc_RNA (1)...(19): siRNA sense strand
agaugacgccuguuauaga

SEQ ID NO: 1292808 - RNA, 19 nt, Homo sapiens
  misc_RNA (1)...(19): siRNA sense strand
ugugauuguuauugccaua

SEQ ID NO: 1292809 - RNA, 19 nt, Homo sapiens
  misc_RNA (1)...(19): siRNA sense strand
gagagcacgauuuauugug

SEQ ID NO: 1292810 - RNA, 19 nt, Homo sapiens
  misc_RNA (1)...(19): siRNA sense strand
gaaguauuugaguaucuug

SEQ ID NO: 1292811 - RNA, 19 nt, Homo sapiens
  misc_RNA (1)...(19): siRNA sense strand
ggcuaccugucucagauga

SEQ ID NO: 1292812 - RNA, 19 nt, Homo sapiens
  misc_RNA (1)...(19): siRNA sense strand
gauaucaggauuuggaaaa

SEQ ID NO: 1292813 - RNA, 19 nt, Homo sapiens
  misc_RNA (1)...(19): siRNA sense strand
ccucuugccacccauacua

SEQ ID NO: 1292814 - RNA, 19 nt, Homo sapiens
  misc_RNA (1)...(19): siRNA sense strand
ccaugguguugcugcugua

SEQ ID NO: 1292815 - RNA, 19 nt, Homo sapiens
  misc_RNA (1)...(19): siRNA sense strand
cagaugacgccuguuauag

SEQ ID NO: 1292816 - RNA, 19 nt, Homo sapiens
  misc_RNA (1)...(19): siRNA sense strand
cagaugguggagcugaaua

SEQ ID NO: 1292817 - RNA, 19 nt, Homo sapiens
  misc_RNA (1)...(19): siRNA sense strand
gucauugcugugauuguua

SEQ ID NO: 1292818 - RNA, 19 nt, Homo sapiens
  misc_RNA (1)...(19): siRNA sense strand
ggagccaccaacauuugaa

SEQ ID NO: 1292819 - RNA, 19 nt, Homo sapiens
  misc_RNA (1)...(19): siRNA sense strand
uuggugaacgaguagauua

SEQ ID NO: 1292820 - RNA, 19 nt, Homo sapiens
  misc_RNA (1)...(19): siRNA sense strand
gcgcuuuccuggguugcuu

SEQ ID NO: 1292821 - RNA, 19 nt, Homo sapiens
  misc_RNA (1)...(19): siRNA sense strand
uacuacaaagcaacaguua

SEQ ID NO: 1292822 - RNA, 19 nt, Homo sapiens
  misc_RNA (1)...(19): siRNA sense strand
cuugaugcaguaacuuaua

SEQ ID NO: 1292823 - RNA, 19 nt, Homo sapiens
  misc_RNA (1)...(19): siRNA sense strand
aaacauguccauauauacg

SEQ ID NO: 1292824 - RNA, 19 nt, Homo sapiens
  misc_RNA (1)...(19): siRNA sense strand
guguaaaguggucaaaugu

SEQ ID NO: 1292825 - RNA, 19 nt, Homo sapiens
  misc_RNA (1)...(19): siRNA sense strand
cuuacgaguuugguuauca

SEQ ID NO: 1292826 - RNA, 19 nt, Homo sapiens
  misc_RNA (1)...(19): siRNA sense strand
uacgggauccuuuaaaugg

SEQ ID NO: 1292827 - RNA, 19 nt, Homo sapiens
  misc_RNA (1)...(19): siRNA sense strand
gcagaugguggagcugaau

SEQ ID NO: 1292828 - RNA, 19 nt, Homo sapiens
  misc_RNA (1)...(19): siRNA sense strand
aaccaaaacccuacuauga

SEQ ID NO: 1292829 - RNA, 19 nt, Homo sapiens
  misc_RNA (1)...(19): siRNA sense strand
uugaugcaguaacuuauag

SEQ ID NO: 1292830 - RNA, 19 nt, Homo sapiens
  misc_RNA (1)...(19): siRNA sense strand
ggagcugaauaugccacuu

SEQ ID NO: 1292831 - RNA, 19 nt, Homo sapiens
  misc_RNA (1)...(19): siRNA sense strand
cgauggcagcgacacaauu

SEQ ID NO: 1292832 - RNA, 19 nt, Homo sapiens
  misc_RNA (1)...(19): siRNA sense strand
gauccauuuucacuuauug

SEQ ID NO: 1292833 - RNA, 19 nt, Homo sapiens
  misc_RNA (1)...(19): siRNA sense strand
ggagagagcacgauuuauu

SEQ ID NO: 1292834 - RNA, 19 nt, Homo sapiens
  misc_RNA (1)...(19): siRNA sense strand
agagaaacauguccauaua

SEQ ID NO: 1292835 - RNA, 19 nt, Homo sapiens
  misc_RNA (1)...(19): siRNA sense strand
cagaugcacuuuauuugua

SEQ ID NO: 1292836 - RNA, 19 nt, Homo sapiens
  misc_RNA (1)...(19): siRNA sense strand
ggacuuacgaguuugguua

SEQ ID NO: 1292837 - RNA, 19 nt, Homo sapiens
  misc_RNA (1)...(19): siRNA sense strand
aaacagauaucaggauuug

SEQ ID NO: 1292838 - RNA, 19 nt, Homo sapiens
  misc_RNA (1)...(19): siRNA sense strand
cuauggagcucauugguaa

SEQ ID NO: 1292839 - RNA, 19 nt, Homo sapiens
  misc_RNA (1)...(19): siRNA sense strand
aaacacaccuuuagugaag

SEQ ID NO: 1292840 - RNA, 19 nt, Homo sapiens
  misc_RNA (1)...(19): siRNA sense strand
gaacuuaaaggaucaguag

SEQ ID NO: 1292841 - RNA, 19 nt, Homo sapiens
  misc_RNA (1)...(19): siRNA sense strand
gaaaacagauaucaggauu

SEQ ID NO: 1292842 - RNA, 19 nt, Homo sapiens
  misc_RNA (1)...(19): siRNA sense strand
uaaaggaucaguagcaauu

SEQ ID NO: 1292843 - RNA, 19 nt, Homo sapiens
  misc_RNA (1)...(19): siRNA sense strand
aaaugggacuuacgaguuu

SEQ ID NO: 1292844 - RNA, 19 nt, Homo sapiens
  misc_RNA (1)...(19): siRNA sense strand
guuaucagaugcacuuuau

SEQ ID NO: 1292845 - RNA, 19 nt, Homo sapiens
  misc_RNA (1)...(19): siRNA sense strand
ugagauuggugaacgagua

SEQ ID NO: 1292846 - RNA, 19 nt, Homo sapiens
  misc_RNA (1)...(19): siRNA sense strand
gugaacgaguagauuauaa

SEQ ID NO: 1292847 - RNA, 19 nt, Homo sapiens
  misc_RNA (1)...(19): siRNA sense strand
gagagagcacgauuuauug

SEQ ID NO: 1292848 - RNA, 19 nt, Homo sapiens
  misc_RNA (1)...(19): siRNA sense strand
caaaugggacuuacgaguu

SEQ ID NO: 1292849 - RNA, 19 nt, Homo sapiens
  misc_RNA (1)...(19): siRNA sense strand
ggucauugcugugauuguu

SEQ ID NO: 1292850 - RNA, 19 nt, Homo sapiens
  misc_RNA (1)...(19): siRNA sense strand
ccagauccauuuucacuua

SEQ ID NO: 1292851 - RNA, 19 nt, Homo sapiens
  misc_RNA (1)...(19): siRNA sense strand
gaaggaauacuugacaguu

SEQ ID NO: 1292852 - RNA, 19 nt, Homo sapiens
  misc_RNA (1)...(19): siRNA sense strand
aaggaauacuugacaguuu

SEQ ID NO: 1292853 - RNA, 19 nt, Homo sapiens
  misc_RNA (1)...(19): siRNA sense strand
ucagaugacgccuguuaua

SEQ ID NO: 1292854 - RNA, 19 nt, Homo sapiens
  misc_RNA (1)...(19): siRNA sense strand
gaaaacacaccuuuaguga

SEQ ID NO: 1292855 - RNA, 19 nt, Homo sapiens
  misc_RNA (1)...(19): siRNA sense strand
gaugacgccuguuauagag

SEQ ID NO: 1292856 - RNA, 19 nt, Homo sapiens
  misc_RNA (1)...(19): siRNA sense strand
gagaaacauguccauauau

SEQ ID NO: 1292857 - RNA, 19 nt, Homo sapiens
  misc_RNA (1)...(19): siRNA sense strand
acgaguagauuauaagugu

SEQ ID NO: 1292858 - RNA, 19 nt, Homo sapiens
  misc_RNA (1)...(19): siRNA sense strand
cuacaaagcaacaguuaug

SEQ ID NO: 1292859 - RNA, 19 nt, Homo sapiens
  misc_RNA (1)...(19): siRNA sense strand
ccaccaacauuugaagcua

SEQ ID NO: 1292860 - RNA, 19 nt, Homo sapiens
  misc_RNA (1)...(19): siRNA sense strand
uauacgggauccuuuaaau

SEQ ID NO: 1292861 - RNA, 19 nt, Homo sapiens
  misc_RNA (1)...(19): siRNA sense strand
cgaguuugguuaucagaug

SEQ ID NO: 1292862 - RNA, 19 nt, Homo sapiens
  misc_RNA (1)...(19): siRNA sense strand
gaacgaguagauuauaagu

SEQ ID NO: 1292863 - RNA, 19 nt, Homo sapiens
  misc_RNA (1)...(19): siRNA sense strand
gugaggagccaccaacauu

SEQ ID NO: 1292864 - RNA, 19 nt, Homo sapiens
  misc_RNA (1)...(19): siRNA sense strand
gauggcagcgacacaauug

SEQ ID NO: 1292865 - RNA, 19 nt, Homo sapiens
  misc_RNA (1)...(19): siRNA sense strand
gcuauggagcucauuggua

SEQ ID NO: 1292866 - RNA, 19 nt, Homo sapiens
  misc_RNA (1)...(19): siRNA sense strand
gaggagccaccaacauuug

SEQ ID NO: 1292867 - RNA, 19 nt, Homo sapiens
  misc_RNA (1)...(19): siRNA sense strand
acacaccuuuagugaagua

SEQ ID NO: 1292868 - RNA, 19 nt, Homo sapiens
  misc_RNA (1)...(19): siRNA sense strand
ucucagaugacgccuguua

SEQ ID NO: 1292869 - RNA, 19 nt, Homo sapiens
  misc_RNA (1)...(19): siRNA sense strand
uagagaaacauguccauau

SEQ ID NO: 1292870 - RNA, 19 nt, Homo sapiens
  misc_RNA (1)...(19): siRNA sense strand
guuccaaagugucuuaaag

SEQ ID NO: 1292871 - RNA, 19 nt, Homo sapiens
  misc_RNA (1)...(19): siRNA sense strand
ggugaacgaguagauuaua

SEQ ID NO: 1292872 - RNA, 19 nt, Homo sapiens
  misc_RNA (1)...(19): siRNA sense strand
gaaguagaaguauuugagu

SEQ ID NO: 1292873 - RNA, 19 nt, Homo sapiens
  misc_RNA (1)...(19): siRNA sense strand
gaaacauguccauauauac

SEQ ID NO: 1292874 - RNA, 19 nt, Homo sapiens
  misc_RNA (1)...(19): siRNA sense strand
ugacgccuguuauagagaa

SEQ ID NO: 1292875 - RNA, 19 nt, Homo sapiens
  misc_RNA (1)...(19): siRNA sense strand
cgaguagauuauaagugua

SEQ ID NO: 1292876 - RNA, 19 nt, Homo sapiens
  misc_RNA (1)...(19): siRNA sense strand
gcacuuuauuuguaaugag

SEQ ID NO: 1292877 - RNA, 19 nt, Homo sapiens
  misc_RNA (1)...(19): siRNA sense strand
guagaaguauuugaguauc

SEQ ID NO: 1292878 - RNA, 19 nt, Homo sapiens
  misc_RNA (1)...(19): siRNA sense strand
guauuugaguaucuugaug

SEQ ID NO: 1292879 - RNA, 19 nt, Homo sapiens
  misc_RNA (1)...(19): siRNA sense strand
aggaauacuugacaguuug

SEQ ID NO: 1292880 - RNA, 19 nt, Homo sapiens
  misc_RNA (1)...(19): siRNA sense strand
ccaaaacccuacuaugaga

SEQ ID NO: 1292881 - RNA, 19 nt, Homo sapiens
  misc_RNA (1)...(19): siRNA sense strand
aguguaaaguggucaaaug

SEQ ID NO: 1292882 - RNA, 19 nt, Homo sapiens
  misc_RNA (1)...(19): siRNA sense strand
ccacccauacuauuuguga

SEQ ID NO: 1292883 - RNA, 19 nt, Homo sapiens
  misc_RNA (1)...(19): siRNA sense strand
caccaacauuugaagcuau

SEQ ID NO: 1292884 - RNA, 19 nt, Homo sapiens
  misc_RNA (1)...(19): siRNA sense strand
uuggagagagcacgauuua

SEQ ID NO: 1292885 - RNA, 19 nt, Homo sapiens
  misc_RNA (1)...(19): siRNA sense strand
gguuaucagaugcacuuua

SEQ ID NO: 1292886 - RNA, 19 nt, Homo sapiens
  misc_RNA (1)...(19): siRNA sense strand
ugaggagccaccaacauuu

SEQ ID NO: 1292887 - RNA, 19 nt, Homo sapiens
  misc_RNA (1)...(19): siRNA sense strand
ggaaggaauacuugacagu

SEQ ID NO: 1292888 - RNA, 19 nt, Homo sapiens
  misc_RNA (1)...(19): siRNA sense strand
gaggaaggaauacuugaca

SEQ ID NO: 1292889 - RNA, 19 nt, Homo sapiens
  misc_RNA (1)...(19): siRNA sense strand
ccaguuccaaagugucuua

SEQ ID NO: 1292890 - RNA, 19 nt, Homo sapiens
  misc_RNA (1)...(19): siRNA sense strand
ugaguaucuugaugcagua

SEQ ID NO: 1292891 - RNA, 19 nt, Homo sapiens
  misc_RNA (1)...(19): siRNA sense strand
caccuuuagugaaguagaa

SEQ ID NO: 1292892 - RNA, 19 nt, Homo sapiens
  misc_RNA (1)...(19): siRNA sense strand
acagauaucaggauuugga

SEQ ID NO: 1292893 - RNA, 19 nt, Homo sapiens
  misc_RNA (1)...(19): siRNA sense strand
ucauugcugugauuguuau

SEQ ID NO: 1292894 - RNA, 19 nt, Homo sapiens
  misc_RNA (1)...(19): siRNA sense strand
ucagaugcacuuuauuugu

SEQ ID NO: 1292895 - RNA, 19 nt, Homo sapiens
  misc_RNA (1)...(19): siRNA sense strand
gugcugcuccagaguguaa

SEQ ID NO: 1292896 - RNA, 19 nt, Homo sapiens
  misc_RNA (1)...(19): siRNA sense strand
ggaaaacacaccuuuagug

SEQ ID NO: 1292897 - RNA, 19 nt, Homo sapiens
  misc_RNA (1)...(19): siRNA sense strand
aaggaucaguagcaauuug

SEQ ID NO: 1292898 - RNA, 19 nt, Homo sapiens
  misc_RNA (1)...(19): siRNA sense strand
uauauacgggauccuuuaa

SEQ ID NO: 1292899 - RNA, 19 nt, Homo sapiens
  misc_RNA (1)...(19): siRNA sense strand
ugaaguagaaguauuugag

SEQ ID NO: 1292900 - RNA, 19 nt, Homo sapiens
  misc_RNA (1)...(19): siRNA sense strand
cuugacaguuuggauguuu

SEQ ID NO: 1292901 - RNA, 19 nt, Homo sapiens
  misc_RNA (1)...(19): siRNA sense strand
cauauauacgggauccuuu

SEQ ID NO: 1292902 - RNA, 19 nt, Homo sapiens
  misc_RNA (1)...(19): siRNA sense strand
auauauacgggauccuuua

SEQ ID NO: 1292903 - RNA, 19 nt, Homo sapiens
  misc_RNA (1)...(19): siRNA sense strand
cuuaaaggaucaguagcaa

SEQ ID NO: 1292904 - RNA, 19 nt, Homo sapiens
  misc_RNA (1)...(19): siRNA sense strand
uaaaccugaggaaggaaua

SEQ ID NO: 1292905 - RNA, 19 nt, Homo sapiens
  misc_RNA (1)...(19): siRNA sense strand
agaugacgccuguuauaga

SEQ ID NO: 1292906 - RNA, 19 nt, Homo sapiens
  misc_RNA (1)...(19): siRNA sense strand
ugugauuguuauugccaua

SEQ ID NO: 1292907 - RNA, 19 nt, Homo sapiens
  misc_RNA (1)...(19): siRNA sense strand
gagagcacgauuuauugug

SEQ ID NO: 1292908 - RNA, 19 nt, Homo sapiens
  misc_RNA (1)...(19): siRNA sense strand
gaaguauuugaguaucuug

SEQ ID NO: 1292909 - RNA, 19 nt, Homo sapiens
  misc_RNA (1)...(19): siRNA sense strand
ggcuaccugucucagauga

SEQ ID NO: 1292910 - RNA, 19 nt, Homo sapiens
  misc_RNA (1)...(19): siRNA sense strand
gauaucaggauuuggaaaa

SEQ ID NO: 1292911 - RNA, 19 nt, Homo sapiens
  misc_RNA (1)...(19): siRNA sense strand
ccucuugccacccauacua

SEQ ID NO: 1292912 - RNA, 19 nt, Homo sapiens
  misc_RNA (1)...(19): siRNA sense strand
ccaugguguugcugcugua

SEQ ID NO: 1292913 - RNA, 19 nt, Homo sapiens
  misc_RNA (1)...(19): siRNA sense strand
cagaugacgccuguuauag

SEQ ID NO: 1292914 - RNA, 19 nt, Homo sapiens
  misc_RNA (1)...(19): siRNA sense strand
uuggugaacgaguagauua

SEQ ID NO: 1292915 - RNA, 19 nt, Homo sapiens
  misc_RNA (1)...(19): siRNA sense strand
gucauugcugugauuguua

SEQ ID NO: 1292916 - RNA, 19 nt, Homo sapiens
  misc_RNA (1)...(19): siRNA sense strand
ggagccaccaacauuugaa

SEQ ID NO: 1292917 - RNA, 19 nt, Homo sapiens
  misc_RNA (1)...(19): siRNA sense strand
gcgcuuuccuggguugcuu

SEQ ID NO: 1292918 - RNA, 19 nt, Homo sapiens
  misc_RNA (1)...(19): siRNA sense strand
uacuacaaagcaacaguua

SEQ ID NO: 1292919 - RNA, 19 nt, Homo sapiens
  misc_RNA (1)...(19): siRNA sense strand
cuugaugcaguaacuuaua

SEQ ID NO: 1292920 - RNA, 19 nt, Homo sapiens
  misc_RNA (1)...(19): siRNA sense strand
aaacauguccauauauacg

SEQ ID NO: 1292921 - RNA, 19 nt, Homo sapiens
  misc_RNA (1)...(19): siRNA sense strand
guguaaaguggucaaaugu

SEQ ID NO: 1292922 - RNA, 19 nt, Homo sapiens
  misc_RNA (1)...(19): siRNA sense strand
cuuacgaguuugguuauca

SEQ ID NO: 1292923 - RNA, 19 nt, Homo sapiens
  misc_RNA (1)...(19): siRNA sense strand
uacgggauccuuuaaaugg

SEQ ID NO: 1292924 - RNA, 19 nt, Homo sapiens
  misc_RNA (1)...(19): siRNA sense strand
aaccaaaacccuacuauga

SEQ ID NO: 1292925 - RNA, 19 nt, Homo sapiens
  misc_RNA (1)...(19): siRNA sense strand
cccaauaugugaaaagguu

SEQ ID NO: 1292926 - RNA, 19 nt, Homo sapiens
  misc_RNA (1)...(19): siRNA sense strand
cgauggcagcgacacaauu

SEQ ID NO: 1292927 - RNA, 19 nt, Homo sapiens
  misc_RNA (1)...(19): siRNA sense strand
gauccauuuucacuuauug

SEQ ID NO: 1292928 - RNA, 19 nt, Homo sapiens
  misc_RNA (1)...(19): siRNA sense strand
uugaugcaguaacuuauag

SEQ ID NO: 1292929 - RNA, 19 nt, Homo sapiens
  misc_RNA (1)...(19): siRNA sense strand
guaucuugaugcaguaacu

SEQ ID NO: 1292930 - RNA, 19 nt, Homo sapiens
  misc_RNA (1)...(19): siRNA sense strand
caacauuugaagcuaugga

SEQ ID NO: 1292931 - RNA, 19 nt, Homo sapiens
  misc_RNA (1)...(19): siRNA sense strand
gagauuggugaacgaguag

SEQ ID NO: 1292932 - RNA, 19 nt, Homo sapiens
  misc_RNA (1)...(19): siRNA sense strand
ggagagagcacgauuuauu

SEQ ID NO: 1292933 - RNA, 19 nt, Homo sapiens
  misc_RNA (1)...(19): siRNA sense strand
agagaaacauguccauaua

SEQ ID NO: 1292934 - RNA, 19 nt, Homo sapiens
  misc_RNA (1)...(19): siRNA sense strand
cagaugcacuuuauuugua

SEQ ID NO: 1292935 - RNA, 19 nt, Homo sapiens
  misc_RNA (1)...(19): siRNA sense strand
ggacuuacgaguuugguua

SEQ ID NO: 1292936 - RNA, 19 nt, Homo sapiens
  misc_RNA (1)...(19): siRNA sense strand
aaacagauaucaggauuug

SEQ ID NO: 1292937 - RNA, 19 nt, Homo sapiens
  misc_RNA (1)...(19): siRNA sense strand
cuauggagcucauugguaa

SEQ ID NO: 1292938 - RNA, 19 nt, Homo sapiens
  misc_RNA (1)...(19): siRNA sense strand
aaacacaccuuuagugaag

SEQ ID NO: 1292939 - RNA, 19 nt, Homo sapiens
  misc_RNA (1)...(19): siRNA sense strand
gaacuuaaaggaucaguag

SEQ ID NO: 1292940 - RNA, 19 nt, Homo sapiens
  misc_RNA (1)...(19): siRNA sense strand
gaaaacagauaucaggauu

SEQ ID NO: 1292941 - RNA, 19 nt, Homo sapiens
  misc_RNA (1)...(19): siRNA sense strand
uaaaggaucaguagcaauu

SEQ ID NO: 1292942 - RNA, 19 nt, Homo sapiens
  misc_RNA (1)...(19): siRNA sense strand
aaaugggacuuacgaguuu

SEQ ID NO: 1292943 - RNA, 19 nt, Homo sapiens
  misc_RNA (1)...(19): siRNA sense strand
guuaucagaugcacuuuau

SEQ ID NO: 1292944 - RNA, 19 nt, Homo sapiens
  misc_RNA (1)...(19): siRNA sense strand
gagcugaauaugccacuua

SEQ ID NO: 1292945 - RNA, 19 nt, Homo sapiens
  misc_RNA (1)...(19): siRNA sense strand
ugagauuggugaacgagua

SEQ ID NO: 1292946 - RNA, 19 nt, Homo sapiens
  misc_RNA (1)...(19): siRNA sense strand
gugaacgaguagauuauaa

SEQ ID NO: 1292947 - RNA, 19 nt, Homo sapiens
  misc_RNA (1)...(19): siRNA sense strand
gagagagcacgauuuauug

SEQ ID NO: 1292948 - RNA, 19 nt, Homo sapiens
  misc_RNA (1)...(19): siRNA sense strand
caaaugggacuuacgaguu

SEQ ID NO: 1292949 - RNA, 19 nt, Homo sapiens
  misc_RNA (1)...(19): siRNA sense strand
ggucauugcugugauuguu

SEQ ID NO: 1292950 - RNA, 19 nt, Homo sapiens
  misc_RNA (1)...(19): siRNA sense strand
ccagauccauuuucacuua

SEQ ID NO: 1292951 - RNA, 19 nt, Homo sapiens
  misc_RNA (1)...(19): siRNA sense strand
gaaggaauacuugacaguu

SEQ ID NO: 1292952 - RNA, 19 nt, Homo sapiens
  misc_RNA (1)...(19): siRNA sense strand
aaggaauacuugacaguuu

SEQ ID NO: 1292953 - RNA, 19 nt, Homo sapiens
  misc_RNA (1)...(19): siRNA sense strand
ucagaugacgccuguuaua

SEQ ID NO: 1292954 - RNA, 19 nt, Homo sapiens
  misc_RNA (1)...(19): siRNA sense strand
gaaaacacaccuuuaguga

SEQ ID NO: 1292955 - RNA, 19 nt, Homo sapiens
  misc_RNA (1)...(19): siRNA sense strand
gaugacgccuguuauagag

SEQ ID NO: 1292956 - RNA, 19 nt, Homo sapiens
  misc_RNA (1)...(19): siRNA sense strand
gagaaacauguccauauau

SEQ ID NO: 1292957 - RNA, 19 nt, Homo sapiens
  misc_RNA (1)...(19): siRNA sense strand
ccacuuaccagacuaaauc

SEQ ID NO: 1292958 - RNA, 19 nt, Homo sapiens
  misc_RNA (1)...(19): siRNA sense strand
acgaguagauuauaagugu

SEQ ID NO: 1292959 - RNA, 19 nt, Homo sapiens
  misc_RNA (1)...(19): siRNA sense strand
cuacaaagcaacaguuaug

SEQ ID NO: 1292960 - RNA, 19 nt, Homo sapiens
  misc_RNA (1)...(19): siRNA sense strand
ccaccaacauuugaagcua

SEQ ID NO: 1292961 - RNA, 19 nt, Homo sapiens
  misc_RNA (1)...(19): siRNA sense strand
uauacgggauccuuuaaau

SEQ ID NO: 1292962 - RNA, 19 nt, Homo sapiens
  misc_RNA (1)...(19): siRNA sense strand
cgaguuugguuaucagaug

SEQ ID NO: 1292963 - RNA, 19 nt, Homo sapiens
  misc_RNA (1)...(19): siRNA sense strand
gaacgaguagauuauaagu

SEQ ID NO: 1292964 - RNA, 19 nt, Homo sapiens
  misc_RNA (1)...(19): siRNA sense strand
gugaggagccaccaacauu

SEQ ID NO: 1292965 - RNA, 19 nt, Homo sapiens
  misc_RNA (1)...(19): siRNA sense strand
gauggcagcgacacaauug

SEQ ID NO: 1292966 - RNA, 19 nt, Homo sapiens
  misc_RNA (1)...(19): siRNA sense strand
ucucagaugacgccuguua

SEQ ID NO: 1292967 - RNA, 19 nt, Homo sapiens
  misc_RNA (1)...(19): siRNA sense strand
gaggagccaccaacauuug

SEQ ID NO: 1292968 - RNA, 19 nt, Homo sapiens
  misc_RNA (1)...(19): siRNA sense strand
gcuauggagcucauuggua

SEQ ID NO: 1292969 - RNA, 19 nt, Homo sapiens
  misc_RNA (1)...(19): siRNA sense strand
acacaccuuuagugaagua

SEQ ID NO: 1292970 - RNA, 19 nt, Homo sapiens
  misc_RNA (1)...(19): siRNA sense strand
uagagaaacauguccauau

SEQ ID NO: 1292971 - RNA, 19 nt, Homo sapiens
  misc_RNA (1)...(19): siRNA sense strand
ggugaacgaguagauuaua

SEQ ID NO: 1292972 - RNA, 19 nt, Homo sapiens
  misc_RNA (1)...(19): siRNA sense strand
gaaguagaaguauuugagu

SEQ ID NO: 1292973 - RNA, 19 nt, Homo sapiens
  misc_RNA (1)...(19): siRNA sense strand
gaaacauguccauauauac

SEQ ID NO: 1292974 - RNA, 19 nt, Homo sapiens
  misc_RNA (1)...(19): siRNA sense strand
ugacgccuguuauagagaa

SEQ ID NO: 1292975 - RNA, 19 nt, Homo sapiens
  misc_RNA (1)...(19): siRNA sense strand
cgaguagauuauaagugua

SEQ ID NO: 1292976 - RNA, 19 nt, Homo sapiens
  misc_RNA (1)...(19): siRNA sense strand
gcacuuuauuuguaaugag

SEQ ID NO: 1292977 - RNA, 19 nt, Homo sapiens
  misc_RNA (1)...(19): siRNA sense strand
guagaaguauuugaguauc

SEQ ID NO: 1292978 - RNA, 19 nt, Homo sapiens
  misc_RNA (1)...(19): siRNA sense strand
guauuugaguaucuugaug

SEQ ID NO: 1292979 - RNA, 19 nt, Homo sapiens
  misc_RNA (1)...(19): siRNA sense strand
aggaauacuugacaguuug

SEQ ID NO: 1292980 - RNA, 19 nt, Homo sapiens
  misc_RNA (1)...(19): siRNA sense strand
ccaaaacccuacuaugaga

SEQ ID NO: 1292981 - RNA, 19 nt, Homo sapiens
  misc_RNA (1)...(19): siRNA sense strand
aguguaaaguggucaaaug

SEQ ID NO: 1292982 - RNA, 19 nt, Homo sapiens
  misc_RNA (1)...(19): siRNA sense strand
ccacccauacuauuuguga

SEQ ID NO: 1292983 - RNA, 19 nt, Homo sapiens
  misc_RNA (1)...(19): siRNA sense strand
uuggagagagcacgauuua

SEQ ID NO: 1292984 - RNA, 19 nt, Homo sapiens
  misc_RNA (1)...(19): siRNA sense strand
gguuaucagaugcacuuua

SEQ ID NO: 1292985 - RNA, 19 nt, Homo sapiens
  misc_RNA (1)...(19): siRNA sense strand
caccaacauuugaagcuau

SEQ ID NO: 1292986 - RNA, 19 nt, Homo sapiens
  misc_RNA (1)...(19): siRNA sense strand
ugaggagccaccaacauuu

SEQ ID NO: 1292987 - RNA, 19 nt, Homo sapiens
  misc_RNA (1)...(19): siRNA sense strand
ggaaggaauacuugacagu

SEQ ID NO: 1292988 - RNA, 19 nt, Homo sapiens
  misc_RNA (1)...(19): siRNA sense strand
gaggaaggaauacuugaca

SEQ ID NO: 1292989 - RNA, 19 nt, Homo sapiens
  misc_RNA (1)...(19): siRNA sense strand
ugaguaucuugaugcagua

SEQ ID NO: 1292990 - RNA, 19 nt, Homo sapiens
  misc_RNA (1)...(19): siRNA sense strand
caccuuuagugaaguagaa

SEQ ID NO: 1292991 - RNA, 19 nt, Homo sapiens
  misc_RNA (1)...(19): siRNA sense strand
acagauaucaggauuugga

SEQ ID NO: 1292992 - RNA, 19 nt, Homo sapiens
  misc_RNA (1)...(19): siRNA sense strand
ucauugcugugauuguuau

SEQ ID NO: 1292993 - RNA, 19 nt, Homo sapiens
  misc_RNA (1)...(19): siRNA sense strand
ucagaugcacuuuauuugu

SEQ ID NO: 1292994 - RNA, 19 nt, Homo sapiens
  misc_RNA (1)...(19): siRNA sense strand
gugcugcuccagaguguaa

SEQ ID NO: 1292995 - RNA, 19 nt, Homo sapiens
  misc_RNA (1)...(19): siRNA sense strand
ggaaaacacaccuuuagug

SEQ ID NO: 1292996 - RNA, 19 nt, Homo sapiens
  misc_RNA (1)...(19): siRNA sense strand
aaggaucaguagcaauuug

SEQ ID NO: 1292997 - RNA, 19 nt, Homo sapiens
  misc_RNA (1)...(19): siRNA sense strand
uauauacgggauccuuuaa

SEQ ID NO: 1292998 - RNA, 19 nt, Homo sapiens
  misc_RNA (1)...(19): siRNA sense strand
ugaaguagaaguauuugag

SEQ ID NO: 1292999 - RNA, 19 nt, Homo sapiens
  misc_RNA (1)...(19): siRNA sense strand
cuugacaguuuggauguuu

SEQ ID NO: 1293000 - RNA, 19 nt, Homo sapiens
  misc_RNA (1)...(19): siRNA sense strand
cauauauacgggauccuuu

SEQ ID NO: 1293001 - RNA, 19 nt, Homo sapiens
  misc_RNA (1)...(19): siRNA sense strand
auauauacgggauccuuua

SEQ ID NO: 1293002 - RNA, 19 nt, Homo sapiens
  misc_RNA (1)...(19): siRNA sense strand
cuuaaaggaucaguagcaa

SEQ ID NO: 1293003 - RNA, 19 nt, Homo sapiens
  misc_RNA (1)...(19): siRNA sense strand
uaaaccugaggaaggaaua

SEQ ID NO: 1293004 - RNA, 19 nt, Homo sapiens
  misc_RNA (1)...(19): siRNA sense strand
agaugacgccuguuauaga

SEQ ID NO: 1293005 - RNA, 19 nt, Homo sapiens
  misc_RNA (1)...(19): siRNA sense strand
ugugauuguuauugccaua

SEQ ID NO: 1293006 - RNA, 19 nt, Homo sapiens
  misc_RNA (1)...(19): siRNA sense strand
gagagcacgauuuauugug

SEQ ID NO: 1293007 - RNA, 19 nt, Homo sapiens
  misc_RNA (1)...(19): siRNA sense strand
gaaguauuugaguaucuug

SEQ ID NO: 1293008 - RNA, 19 nt, Homo sapiens
  misc_RNA (1)...(19): siRNA sense strand
ggcuaccugucucagauga

SEQ ID NO: 1293009 - RNA, 19 nt, Homo sapiens
  misc_RNA (1)...(19): siRNA sense strand
gauaucaggauuuggaaaa

SEQ ID NO: 1293010 - RNA, 19 nt, Homo sapiens
  misc_RNA (1)...(19): siRNA sense strand
ccucuugccacccauacua

SEQ ID NO: 1293011 - RNA, 19 nt, Homo sapiens
  misc_RNA (1)...(19): siRNA sense strand
ccaugguguugcugcugua

SEQ ID NO: 1293012 - RNA, 19 nt, Homo sapiens
  misc_RNA (1)...(19): siRNA sense strand
cagaugacgccuguuauag

SEQ ID NO: 1293013 - RNA, 19 nt, Homo sapiens
  misc_RNA (1)...(19): siRNA sense strand
cagaugguggagcugaaua

SEQ ID NO: 1293014 - RNA, 19 nt, Homo sapiens
  misc_RNA (1)...(19): siRNA sense strand
uuggugaacgaguagauua

SEQ ID NO: 1293015 - RNA, 19 nt, Homo sapiens
  misc_RNA (1)...(19): siRNA sense strand
gucauugcugugauuguua

SEQ ID NO: 1293016 - RNA, 19 nt, Homo sapiens
  misc_RNA (1)...(19): siRNA sense strand
ggagccaccaacauuugaa

SEQ ID NO: 1293017 - RNA, 19 nt, Homo sapiens
  misc_RNA (1)...(19): siRNA sense strand
gcgcuuuccuggguugcuu

SEQ ID NO: 1293018 - RNA, 19 nt, Homo sapiens
  misc_RNA (1)...(19): siRNA sense strand
uacuacaaagcaacaguua

SEQ ID NO: 1293019 - RNA, 19 nt, Homo sapiens
  misc_RNA (1)...(19): siRNA sense strand
cuugaugcaguaacuuaua

SEQ ID NO: 1293020 - RNA, 19 nt, Homo sapiens
  misc_RNA (1)...(19): siRNA sense strand
aaacauguccauauauacg

SEQ ID NO: 1293021 - RNA, 19 nt, Homo sapiens
  misc_RNA (1)...(19): siRNA sense strand
guguaaaguggucaaaugu

SEQ ID NO: 1293022 - RNA, 19 nt, Homo sapiens
  misc_RNA (1)...(19): siRNA sense strand
cuuacgaguuugguuauca

SEQ ID NO: 1293023 - RNA, 19 nt, Homo sapiens
  misc_RNA (1)...(19): siRNA sense strand
uacgggauccuuuaaaugg

SEQ ID NO: 1293024 - RNA, 19 nt, Homo sapiens
  misc_RNA (1)...(19): siRNA sense strand
gcagaugguggagcugaau

SEQ ID NO: 1293025 - RNA, 19 nt, Homo sapiens
  misc_RNA (1)...(19): siRNA sense strand
aaccaaaacccuacuauga

SEQ ID NO: 1293026 - RNA, 19 nt, Homo sapiens
  misc_RNA (1)...(19): siRNA sense strand
cccaauaugugaaaagguu

SEQ ID NO: 1293027 - RNA, 19 nt, Homo sapiens
  misc_RNA (1)...(19): siRNA sense strand
ggagcugaauaugccacuu

SEQ ID NO: 1293028 - RNA, 19 nt, Homo sapiens
  misc_RNA (1)...(19): siRNA sense strand
cgauggcagcgacacaauu

SEQ ID NO: 1293029 - RNA, 19 nt, Homo sapiens
  misc_RNA (1)...(19): siRNA sense strand
gauccauuuucacuuauug

SEQ ID NO: 1293030 - RNA, 19 nt, Homo sapiens
  misc_RNA (1)...(19): siRNA sense strand
uugaugcaguaacuuauag

SEQ ID NO: 1293031 - RNA, 19 nt, Homo sapiens
  misc_RNA (1)...(19): siRNA sense strand
guaucuugaugcaguaacu

SEQ ID NO: 1293032 - RNA, 19 nt, Homo sapiens
  misc_RNA (1)...(19): siRNA sense strand
ggagagagcacgauuuauu

SEQ ID NO: 1293033 - RNA, 19 nt, Homo sapiens
  misc_RNA (1)...(19): siRNA sense strand
agagaaacauguccauaua

SEQ ID NO: 1293034 - RNA, 19 nt, Homo sapiens
  misc_RNA (1)...(19): siRNA sense strand
cagaugcacuuuauuugua

SEQ ID NO: 1293035 - RNA, 19 nt, Homo sapiens
  misc_RNA (1)...(19): siRNA sense strand
ggacuuacgaguuugguua

SEQ ID NO: 1293036 - RNA, 19 nt, Homo sapiens
  misc_RNA (1)...(19): siRNA sense strand
aaacagauaucaggauuug

SEQ ID NO: 1293037 - RNA, 19 nt, Homo sapiens
  misc_RNA (1)...(19): siRNA sense strand
cuauggagcucauugguaa

SEQ ID NO: 1293038 - RNA, 19 nt, Homo sapiens
  misc_RNA (1)...(19): siRNA sense strand
aaacacaccuuuagugaag

SEQ ID NO: 1293039 - RNA, 19 nt, Homo sapiens
  misc_RNA (1)...(19): siRNA sense strand
gaacuuaaaggaucaguag

SEQ ID NO: 1293040 - RNA, 19 nt, Homo sapiens
  misc_RNA (1)...(19): siRNA sense strand
gaaaacagauaucaggauu

SEQ ID NO: 1293041 - RNA, 19 nt, Homo sapiens
  misc_RNA (1)...(19): siRNA sense strand
uaaaggaucaguagcaauu

SEQ ID NO: 1293042 - RNA, 19 nt, Homo sapiens
  misc_RNA (1)...(19): siRNA sense strand
aaaugggacuuacgaguuu

SEQ ID NO: 1293043 - RNA, 19 nt, Homo sapiens
  misc_RNA (1)...(19): siRNA sense strand
guuaucagaugcacuuuau

SEQ ID NO: 1293044 - RNA, 19 nt, Homo sapiens
  misc_RNA (1)...(19): siRNA sense strand
gagcugaauaugccacuua

SEQ ID NO: 1293045 - RNA, 19 nt, Homo sapiens
  misc_RNA (1)...(19): siRNA sense strand
gagcagagaggcugaauag

SEQ ID NO: 1293046 - RNA, 19 nt, Homo sapiens
  misc_RNA (1)...(19): siRNA sense strand
ugagauuggugaacgagua

SEQ ID NO: 1293047 - RNA, 19 nt, Homo sapiens
  misc_RNA (1)...(19): siRNA sense strand
gugaacgaguagauuauaa

SEQ ID NO: 1293048 - RNA, 19 nt, Homo sapiens
  misc_RNA (1)...(19): siRNA sense strand
gagagagcacgauuuauug

SEQ ID NO: 1293049 - RNA, 19 nt, Homo sapiens
  misc_RNA (1)...(19): siRNA sense strand
caaaugggacuuacgaguu

SEQ ID NO: 1293050 - RNA, 19 nt, Homo sapiens
  misc_RNA (1)...(19): siRNA sense strand
ggucauugcugugauuguu

SEQ ID NO: 1293051 - RNA, 19 nt, Homo sapiens
  misc_RNA (1)...(19): siRNA sense strand
ccagauccauuuucacuua

SEQ ID NO: 1293052 - RNA, 19 nt, Homo sapiens
  misc_RNA (1)...(19): siRNA sense strand
gaaggaauacuugacaguu

SEQ ID NO: 1293053 - RNA, 19 nt, Homo sapiens
  misc_RNA (1)...(19): siRNA sense strand
aaggaauacuugacaguuu

SEQ ID NO: 1293054 - RNA, 19 nt, Homo sapiens
  misc_RNA (1)...(19): siRNA sense strand
ucagaugacgccuguuaua

SEQ ID NO: 1293055 - RNA, 19 nt, Homo sapiens
  misc_RNA (1)...(19): siRNA sense strand
gaaaacacaccuuuaguga

SEQ ID NO: 1293056 - RNA, 19 nt, Homo sapiens
  misc_RNA (1)...(19): siRNA sense strand
gaugacgccuguuauagag

SEQ ID NO: 1293057 - RNA, 19 nt, Homo sapiens
  misc_RNA (1)...(19): siRNA sense strand
gagaaacauguccauauau

SEQ ID NO: 1293058 - RNA, 19 nt, Homo sapiens
  misc_RNA (1)...(19): siRNA sense strand
ccacuuaccagacuaaauc

SEQ ID NO: 1293059 - RNA, 19 nt, Homo sapiens
  misc_RNA (1)...(19): siRNA sense strand
acgaguagauuauaagugu

SEQ ID NO: 1293060 - RNA, 19 nt, Homo sapiens
  misc_RNA (1)...(19): siRNA sense strand
cuacaaagcaacaguuaug

SEQ ID NO: 1293061 - RNA, 19 nt, Homo sapiens
  misc_RNA (1)...(19): siRNA sense strand
ccaccaacauuugaagcua

SEQ ID NO: 1293062 - RNA, 19 nt, Homo sapiens
  misc_RNA (1)...(19): siRNA sense strand
uauacgggauccuuuaaau

SEQ ID NO: 1293063 - RNA, 19 nt, Homo sapiens
  misc_RNA (1)...(19): siRNA sense strand
cgaguuugguuaucagaug

SEQ ID NO: 1293064 - RNA, 19 nt, Homo sapiens
  misc_RNA (1)...(19): siRNA sense strand
gaacgaguagauuauaagu

SEQ ID NO: 1293065 - RNA, 19 nt, Homo sapiens
  misc_RNA (1)...(19): siRNA sense strand
gugaggagccaccaacauu

SEQ ID NO: 1293066 - RNA, 19 nt, Homo sapiens
  misc_RNA (1)...(19): siRNA sense strand
gauggcagcgacacaauug

SEQ ID NO: 1293067 - RNA, 19 nt, Homo sapiens
  misc_RNA (1)...(19): siRNA sense strand
ucucagaugacgccuguua

SEQ ID NO: 1293068 - RNA, 19 nt, Homo sapiens
  misc_RNA (1)...(19): siRNA sense strand
acacaccuuuagugaagua

SEQ ID NO: 1293069 - RNA, 19 nt, Homo sapiens
  misc_RNA (1)...(19): siRNA sense strand
gcuauggagcucauuggua

SEQ ID NO: 1293070 - RNA, 19 nt, Homo sapiens
  misc_RNA (1)...(19): siRNA sense strand
gaggagccaccaacauuug

SEQ ID NO: 1293071 - RNA, 19 nt, Homo sapiens
  misc_RNA (1)...(19): siRNA sense strand
uagagaaacauguccauau

SEQ ID NO: 1293072 - RNA, 19 nt, Homo sapiens
  misc_RNA (1)...(19): siRNA sense strand
guuccaaagugucuuaaag

SEQ ID NO: 1293073 - RNA, 19 nt, Homo sapiens
  misc_RNA (1)...(19): siRNA sense strand
ggugaacgaguagauuaua

SEQ ID NO: 1293074 - RNA, 19 nt, Homo sapiens
  misc_RNA (1)...(19): siRNA sense strand
gaaguagaaguauuugagu

SEQ ID NO: 1293075 - RNA, 19 nt, Homo sapiens
  misc_RNA (1)...(19): siRNA sense strand
gaaacauguccauauauac

SEQ ID NO: 1293076 - RNA, 19 nt, Homo sapiens
  misc_RNA (1)...(19): siRNA sense strand
ugacgccuguuauagagaa

SEQ ID NO: 1293077 - RNA, 19 nt, Homo sapiens
  misc_RNA (1)...(19): siRNA sense strand
cgaguagauuauaagugua

SEQ ID NO: 1293078 - RNA, 19 nt, Homo sapiens
  misc_RNA (1)...(19): siRNA sense strand
gcacuuuauuuguaaugag

SEQ ID NO: 1293079 - RNA, 19 nt, Homo sapiens
  misc_RNA (1)...(19): siRNA sense strand
guagaaguauuugaguauc

SEQ ID NO: 1293080 - RNA, 19 nt, Homo sapiens
  misc_RNA (1)...(19): siRNA sense strand
guauuugaguaucuugaug

SEQ ID NO: 1293081 - RNA, 19 nt, Homo sapiens
  misc_RNA (1)...(19): siRNA sense strand
aggaauacuugacaguuug

SEQ ID NO: 1293082 - RNA, 19 nt, Homo sapiens
  misc_RNA (1)...(19): siRNA sense strand
ccaaaacccuacuaugaga

SEQ ID NO: 1293083 - RNA, 19 nt, Homo sapiens
  misc_RNA (1)...(19): siRNA sense strand
aguguaaaguggucaaaug

SEQ ID NO: 1293084 - RNA, 19 nt, Homo sapiens
  misc_RNA (1)...(19): siRNA sense strand
ccacccauacuauuuguga

SEQ ID NO: 1293085 - RNA, 19 nt, Homo sapiens
  misc_RNA (1)...(19): siRNA sense strand
uuggagagagcacgauuua

SEQ ID NO: 1293086 - RNA, 19 nt, Homo sapiens
  misc_RNA (1)...(19): siRNA sense strand
gguuaucagaugcacuuua

SEQ ID NO: 1293087 - RNA, 19 nt, Homo sapiens
  misc_RNA (1)...(19): siRNA sense strand
caccaacauuugaagcuau

SEQ ID NO: 1293088 - RNA, 19 nt, Homo sapiens
  misc_RNA (1)...(19): siRNA sense strand
ugaggagccaccaacauuu

SEQ ID NO: 1293089 - RNA, 19 nt, Homo sapiens
  misc_RNA (1)...(19): siRNA sense strand
ggaaggaauacuugacagu

SEQ ID NO: 1293090 - RNA, 19 nt, Homo sapiens
  misc_RNA (1)...(19): siRNA sense strand
gaggaaggaauacuugaca

SEQ ID NO: 1293091 - RNA, 19 nt, Homo sapiens
  misc_RNA (1)...(19): siRNA sense strand
ccaguuccaaagugucuua

SEQ ID NO: 1293092 - RNA, 19 nt, Homo sapiens
  misc_RNA (1)...(19): siRNA sense strand
ugaguaucuugaugcagua

SEQ ID NO: 1293093 - RNA, 19 nt, Homo sapiens
  misc_RNA (1)...(19): siRNA sense strand
caccuuuagugaaguagaa

SEQ ID NO: 1293094 - RNA, 19 nt, Homo sapiens
  misc_RNA (1)...(19): siRNA sense strand
acagauaucaggauuugga

SEQ ID NO: 1293095 - RNA, 19 nt, Homo sapiens
  misc_RNA (1)...(19): siRNA sense strand
ucauugcugugauuguuau

SEQ ID NO: 1293096 - RNA, 19 nt, Homo sapiens
  misc_RNA (1)...(19): siRNA sense strand
ucagaugcacuuuauuugu

SEQ ID NO: 1293097 - RNA, 19 nt, Homo sapiens
  misc_RNA (1)...(19): siRNA sense strand
gugcugcuccagaguguaa

SEQ ID NO: 1293098 - RNA, 19 nt, Homo sapiens
  misc_RNA (1)...(19): siRNA sense strand
ggaaaacacaccuuuagug

SEQ ID NO: 1293099 - RNA, 19 nt, Homo sapiens
  misc_RNA (1)...(19): siRNA sense strand
aaggaucaguagcaauuug

SEQ ID NO: 1293100 - RNA, 19 nt, Homo sapiens
  misc_RNA (1)...(19): siRNA sense strand
uauauacgggauccuuuaa

SEQ ID NO: 1293101 - RNA, 19 nt, Homo sapiens
  misc_RNA (1)...(19): siRNA sense strand
ugaaguagaaguauuugag

SEQ ID NO: 1293102 - RNA, 19 nt, Homo sapiens
  misc_RNA (1)...(19): siRNA sense strand
cuugacaguuuggauguuu

SEQ ID NO: 1293103 - RNA, 19 nt, Homo sapiens
  misc_RNA (1)...(19): siRNA sense strand
cauauauacgggauccuuu

SEQ ID NO: 1293104 - RNA, 19 nt, Homo sapiens
  misc_RNA (1)...(19): siRNA sense strand
auauauacgggauccuuua

SEQ ID NO: 1293105 - RNA, 19 nt, Homo sapiens
  misc_RNA (1)...(19): siRNA sense strand
cuuaaaggaucaguagcaa

SEQ ID NO: 1293106 - RNA, 19 nt, Homo sapiens
  misc_RNA (1)...(19): siRNA sense strand
uaaaccugaggaaggaaua

SEQ ID NO: 1293107 - RNA, 19 nt, Homo sapiens
  misc_RNA (1)...(19): siRNA sense strand
agaugacgccuguuauaga

SEQ ID NO: 1293108 - RNA, 19 nt, Homo sapiens
  misc_RNA (1)...(19): siRNA sense strand
ugugauuguuauugccaua

SEQ ID NO: 1293109 - RNA, 19 nt, Homo sapiens
  misc_RNA (1)...(19): siRNA sense strand
gagagcacgauuuauugug

SEQ ID NO: 1293110 - RNA, 19 nt, Homo sapiens
  misc_RNA (1)...(19): siRNA sense strand
gaaguauuugaguaucuug

SEQ ID NO: 1293111 - RNA, 19 nt, Homo sapiens
  misc_RNA (1)...(19): siRNA sense strand
ggcuaccugucucagauga

SEQ ID NO: 1293112 - RNA, 19 nt, Homo sapiens
  misc_RNA (1)...(19): siRNA sense strand
ccucuugccacccauacua

SEQ ID NO: 1293113 - RNA, 19 nt, Homo sapiens
  misc_RNA (1)...(19): siRNA sense strand
gauaucaggauuuggaaaa

SEQ ID NO: 1293114 - RNA, 19 nt, Homo sapiens
  misc_RNA (1)...(19): siRNA sense strand
ccaugguguugcugcugua

SEQ ID NO: 1293115 - RNA, 19 nt, Homo sapiens
  misc_RNA (1)...(19): siRNA sense strand
cagaugacgccuguuauag

SEQ ID NO: 1293116 - RNA, 19 nt, Homo sapiens
  misc_RNA (1)...(19): siRNA sense strand
cagaugguggagcugaaua

SEQ ID NO: 1293117 - RNA, 19 nt, Homo sapiens
  misc_RNA (1)...(19): siRNA sense strand
gucauugcugugauuguua

SEQ ID NO: 1293118 - RNA, 19 nt, Homo sapiens
  misc_RNA (1)...(19): siRNA sense strand
uuggugaacgaguagauua

SEQ ID NO: 1293119 - RNA, 19 nt, Homo sapiens
  misc_RNA (1)...(19): siRNA sense strand
ggagccaccaacauuugaa

SEQ ID NO: 1293120 - RNA, 19 nt, Homo sapiens
  misc_RNA (1)...(19): siRNA sense strand
gcgcuuuccuggguugcuu

SEQ ID NO: 1293121 - RNA, 19 nt, Homo sapiens
  misc_RNA (1)...(19): siRNA sense strand
uacuacaaagcaacaguua

SEQ ID NO: 1293122 - RNA, 19 nt, Homo sapiens
  misc_RNA (1)...(19): siRNA sense strand
cuugaugcaguaacuuaua

SEQ ID NO: 1293123 - RNA, 19 nt, Homo sapiens
  misc_RNA (1)...(19): siRNA sense strand
aaacauguccauauauacg

SEQ ID NO: 1293124 - RNA, 19 nt, Homo sapiens
  misc_RNA (1)...(19): siRNA sense strand
guguaaaguggucaaaugu

SEQ ID NO: 1293125 - RNA, 19 nt, Homo sapiens
  misc_RNA (1)...(19): siRNA sense strand
cuuacgaguuugguuauca

SEQ ID NO: 1293126 - RNA, 19 nt, Homo sapiens
  misc_RNA (1)...(19): siRNA sense strand
aaccaaaacccuacuauga

SEQ ID NO: 1293127 - RNA, 19 nt, Homo sapiens
  misc_RNA (1)...(19): siRNA sense strand
gcagaugguggagcugaau

SEQ ID NO: 1293128 - RNA, 19 nt, Homo sapiens
  misc_RNA (1)...(19): siRNA sense strand
uacgggauccuuuaaaugg

SEQ ID NO: 1293129 - RNA, 19 nt, Homo sapiens
  misc_RNA (1)...(19): siRNA sense strand
cgauggcagcgacacaauu

SEQ ID NO: 1293130 - RNA, 19 nt, Homo sapiens
  misc_RNA (1)...(19): siRNA sense strand
ggagcugaauaugccacuu

SEQ ID NO: 1293131 - RNA, 19 nt, Homo sapiens
  misc_RNA (1)...(19): siRNA sense strand
caacauuugaagcuaugga

SEQ ID NO: 1293132 - RNA, 19 nt, Homo sapiens
  misc_RNA (1)...(19): siRNA sense strand
ggagagagcacgauuuauu

SEQ ID NO: 1293133 - RNA, 19 nt, Homo sapiens
  misc_RNA (1)...(19): siRNA sense strand
agagaaacauguccauaua

SEQ ID NO: 1293134 - RNA, 19 nt, Homo sapiens
  misc_RNA (1)...(19): siRNA sense strand
cagaugcacuuuauuugua

SEQ ID NO: 1293135 - RNA, 19 nt, Homo sapiens
  misc_RNA (1)...(19): siRNA sense strand
ggacuuacgaguuugguua

SEQ ID NO: 1293136 - RNA, 19 nt, Homo sapiens
  misc_RNA (1)...(19): siRNA sense strand
aaacagauaucaggauuug

SEQ ID NO: 1293137 - RNA, 19 nt, Homo sapiens
  misc_RNA (1)...(19): siRNA sense strand
cuauggagcucauugguaa

SEQ ID NO: 1293138 - RNA, 19 nt, Homo sapiens
  misc_RNA (1)...(19): siRNA sense strand
aaacacaccuuuagugaag

SEQ ID NO: 1293139 - RNA, 19 nt, Homo sapiens
  misc_RNA (1)...(19): siRNA sense strand
gaacuuaaaggaucaguag

SEQ ID NO: 1293140 - RNA, 19 nt, Homo sapiens
  misc_RNA (1)...(19): siRNA sense strand
gaaaacagauaucaggauu

SEQ ID NO: 1293141 - RNA, 19 nt, Homo sapiens
  misc_RNA (1)...(19): siRNA sense strand
uaaaggaucaguagcaauu

SEQ ID NO: 1293142 - RNA, 19 nt, Homo sapiens
  misc_RNA (1)...(19): siRNA sense strand
aaaugggacuuacgaguuu

SEQ ID NO: 1293143 - RNA, 19 nt, Homo sapiens
  misc_RNA (1)...(19): siRNA sense strand
guuaucagaugcacuuuau

SEQ ID NO: 1293144 - RNA, 19 nt, Homo sapiens
  misc_RNA (1)...(19): siRNA sense strand
ugagauuggugaacgagua

SEQ ID NO: 1293145 - RNA, 19 nt, Homo sapiens
  misc_RNA (1)...(19): siRNA sense strand
gugaacgaguagauuauaa

SEQ ID NO: 1293146 - RNA, 19 nt, Homo sapiens
  misc_RNA (1)...(19): siRNA sense strand
gagagagcacgauuuauug

SEQ ID NO: 1293147 - RNA, 19 nt, Homo sapiens
  misc_RNA (1)...(19): siRNA sense strand
caaaugggacuuacgaguu

SEQ ID NO: 1293148 - RNA, 19 nt, Homo sapiens
  misc_RNA (1)...(19): siRNA sense strand
ggucauugcugugauuguu

SEQ ID NO: 1293149 - RNA, 19 nt, Homo sapiens
  misc_RNA (1)...(19): siRNA sense strand
ccagauccauuuucacuua

SEQ ID NO: 1293150 - RNA, 19 nt, Homo sapiens
  misc_RNA (1)...(19): siRNA sense strand
gaaggaauacuugacaguu

SEQ ID NO: 1293151 - RNA, 19 nt, Homo sapiens
  misc_RNA (1)...(19): siRNA sense strand
aaggaauacuugacaguuu

SEQ ID NO: 1293152 - RNA, 19 nt, Homo sapiens
  misc_RNA (1)...(19): siRNA sense strand
ucagaugacgccuguuaua

SEQ ID NO: 1293153 - RNA, 19 nt, Homo sapiens
  misc_RNA (1)...(19): siRNA sense strand
gaaaacacaccuuuaguga

SEQ ID NO: 1293154 - RNA, 19 nt, Homo sapiens
  misc_RNA (1)...(19): siRNA sense strand
gaugacgccuguuauagag

SEQ ID NO: 1293155 - RNA, 19 nt, Homo sapiens
  misc_RNA (1)...(19): siRNA sense strand
gagaaacauguccauauau

SEQ ID NO: 1293156 - RNA, 19 nt, Homo sapiens
  misc_RNA (1)...(19): siRNA sense strand
acgaguagauuauaagugu

SEQ ID NO: 1293157 - RNA, 19 nt, Homo sapiens
  misc_RNA (1)...(19): siRNA sense strand
cuacaaagcaacaguuaug

SEQ ID NO: 1293158 - RNA, 19 nt, Homo sapiens
  misc_RNA (1)...(19): siRNA sense strand
ccaccaacauuugaagcua

SEQ ID NO: 1293159 - RNA, 19 nt, Homo sapiens
  misc_RNA (1)...(19): siRNA sense strand
uauacgggauccuuuaaau

SEQ ID NO: 1293160 - RNA, 19 nt, Homo sapiens
  misc_RNA (1)...(19): siRNA sense strand
cgaguuugguuaucagaug

SEQ ID NO: 1293161 - RNA, 19 nt, Homo sapiens
  misc_RNA (1)...(19): siRNA sense strand
gaacgaguagauuauaagu

SEQ ID NO: 1293162 - RNA, 19 nt, Homo sapiens
  misc_RNA (1)...(19): siRNA sense strand
gugaggagccaccaacauu

SEQ ID NO: 1293163 - RNA, 19 nt, Homo sapiens
  misc_RNA (1)...(19): siRNA sense strand
gauggcagcgacacaauug

SEQ ID NO: 1293164 - RNA, 19 nt, Homo sapiens
  misc_RNA (1)...(19): siRNA sense strand
gcuauggagcucauuggua

SEQ ID NO: 1293165 - RNA, 19 nt, Homo sapiens
  misc_RNA (1)...(19): siRNA sense strand
gaggagccaccaacauuug

SEQ ID NO: 1293166 - RNA, 19 nt, Homo sapiens
  misc_RNA (1)...(19): siRNA sense strand
acacaccuuuagugaagua

SEQ ID NO: 1293167 - RNA, 19 nt, Homo sapiens
  misc_RNA (1)...(19): siRNA sense strand
ucucagaugacgccuguua

SEQ ID NO: 1293168 - RNA, 19 nt, Homo sapiens
  misc_RNA (1)...(19): siRNA sense strand
uagagaaacauguccauau

SEQ ID NO: 1293169 - RNA, 19 nt, Homo sapiens
  misc_RNA (1)...(19): siRNA sense strand
ggugaacgaguagauuaua

SEQ ID NO: 1293170 - RNA, 19 nt, Homo sapiens
  misc_RNA (1)...(19): siRNA sense strand
gaaguagaaguauuugagu

SEQ ID NO: 1293171 - RNA, 19 nt, Homo sapiens
  misc_RNA (1)...(19): siRNA sense strand
gaaacauguccauauauac

SEQ ID NO: 1293172 - RNA, 19 nt, Homo sapiens
  misc_RNA (1)...(19): siRNA sense strand
ugacgccuguuauagagaa

SEQ ID NO: 1293173 - RNA, 19 nt, Homo sapiens
  misc_RNA (1)...(19): siRNA sense strand
cgaguagauuauaagugua

SEQ ID NO: 1293174 - RNA, 19 nt, Homo sapiens
  misc_RNA (1)...(19): siRNA sense strand
gcacuuuauuuguaaugag

SEQ ID NO: 1293175 - RNA, 19 nt, Homo sapiens
  misc_RNA (1)...(19): siRNA sense strand
guagaaguauuugaguauc

SEQ ID NO: 1293176 - RNA, 19 nt, Homo sapiens
  misc_RNA (1)...(19): siRNA sense strand
guauuugaguaucuugaug

SEQ ID NO: 1293177 - RNA, 19 nt, Homo sapiens
  misc_RNA (1)...(19): siRNA sense strand
aggaauacuugacaguuug

SEQ ID NO: 1293178 - RNA, 19 nt, Homo sapiens
  misc_RNA (1)...(19): siRNA sense strand
aguguaaaguggucaaaug

SEQ ID NO: 1293179 - RNA, 19 nt, Homo sapiens
  misc_RNA (1)...(19): siRNA sense strand
ccaaaacccuacuaugaga

SEQ ID NO: 1293180 - RNA, 19 nt, Homo sapiens
  misc_RNA (1)...(19): siRNA sense strand
ccacccauacuauuuguga

SEQ ID NO: 1293181 - RNA, 19 nt, Homo sapiens
  misc_RNA (1)...(19): siRNA sense strand
caccaacauuugaagcuau

SEQ ID NO: 1293182 - RNA, 19 nt, Homo sapiens
  misc_RNA (1)...(19): siRNA sense strand
uuggagagagcacgauuua

SEQ ID NO: 1293183 - RNA, 19 nt, Homo sapiens
  misc_RNA (1)...(19): siRNA sense strand
gguuaucagaugcacuuua

SEQ ID NO: 1293184 - RNA, 19 nt, Homo sapiens
  misc_RNA (1)...(19): siRNA sense strand
ugaggagccaccaacauuu

SEQ ID NO: 1293185 - RNA, 19 nt, Homo sapiens
  misc_RNA (1)...(19): siRNA sense strand
ggaaggaauacuugacagu

SEQ ID NO: 1293186 - RNA, 19 nt, Homo sapiens
  misc_RNA (1)...(19): siRNA sense strand
gaggaaggaauacuugaca

SEQ ID NO: 1293187 - RNA, 19 nt, Homo sapiens
  misc_RNA (1)...(19): siRNA sense strand
ugaguaucuugaugcagua

SEQ ID NO: 1293188 - RNA, 19 nt, Homo sapiens
  misc_RNA (1)...(19): siRNA sense strand
caccuuuagugaaguagaa

SEQ ID NO: 1293189 - RNA, 19 nt, Homo sapiens
  misc_RNA (1)...(19): siRNA sense strand
acagauaucaggauuugga

SEQ ID NO: 1293190 - RNA, 19 nt, Homo sapiens
  misc_RNA (1)...(19): siRNA sense strand
ucauugcugugauuguuau

SEQ ID NO: 1293191 - RNA, 19 nt, Homo sapiens
  misc_RNA (1)...(19): siRNA sense strand
ucagaugcacuuuauuugu

SEQ ID NO: 1293192 - RNA, 19 nt, Homo sapiens
  misc_RNA (1)...(19): siRNA sense strand
gugcugcuccagaguguaa

SEQ ID NO: 1293193 - RNA, 19 nt, Homo sapiens
  misc_RNA (1)...(19): siRNA sense strand
ggaaaacacaccuuuagug

SEQ ID NO: 1293194 - RNA, 19 nt, Homo sapiens
  misc_RNA (1)...(19): siRNA sense strand
aaggaucaguagcaauuug

SEQ ID NO: 1293195 - RNA, 19 nt, Homo sapiens
  misc_RNA (1)...(19): siRNA sense strand
uauauacgggauccuuuaa

SEQ ID NO: 1293196 - RNA, 19 nt, Homo sapiens
  misc_RNA (1)...(19): siRNA sense strand
ugaaguagaaguauuugag

SEQ ID NO: 1293197 - RNA, 19 nt, Homo sapiens
  misc_RNA (1)...(19): siRNA sense strand
cuugacaguuuggauguuu

SEQ ID NO: 1293198 - RNA, 19 nt, Homo sapiens
  misc_RNA (1)...(19): siRNA sense strand
cauauauacgggauccuuu

SEQ ID NO: 1293199 - RNA, 19 nt, Homo sapiens
  misc_RNA (1)...(19): siRNA sense strand
auauauacgggauccuuua

SEQ ID NO: 1293200 - RNA, 19 nt, Homo sapiens
  misc_RNA (1)...(19): siRNA sense strand
cuuaaaggaucaguagcaa

SEQ ID NO: 1293201 - RNA, 19 nt, Homo sapiens
  misc_RNA (1)...(19): siRNA sense strand
uaaaccugaggaaggaaua

SEQ ID NO: 1293202 - RNA, 19 nt, Homo sapiens
  misc_RNA (1)...(19): siRNA sense strand
agaugacgccuguuauaga

SEQ ID NO: 1293203 - RNA, 19 nt, Homo sapiens
  misc_RNA (1)...(19): siRNA sense strand
ugugauuguuauugccaua

SEQ ID NO: 1293204 - RNA, 19 nt, Homo sapiens
  misc_RNA (1)...(19): siRNA sense strand
gagagcacgauuuauugug

SEQ ID NO: 1293205 - RNA, 19 nt, Homo sapiens
  misc_RNA (1)...(19): siRNA sense strand
gaaguauuugaguaucuug

SEQ ID NO: 1293206 - RNA, 19 nt, Homo sapiens
  misc_RNA (1)...(19): siRNA sense strand
ccucuugccacccauacua

SEQ ID NO: 1293207 - RNA, 19 nt, Homo sapiens
  misc_RNA (1)...(19): siRNA sense strand
gauaucaggauuuggaaaa

SEQ ID NO: 1293208 - RNA, 19 nt, Homo sapiens
  misc_RNA (1)...(19): siRNA sense strand
ggcuaccugucucagauga

SEQ ID NO: 1293209 - RNA, 19 nt, Homo sapiens
  misc_RNA (1)...(19): siRNA sense strand
ccaugguguugcugcugua

SEQ ID NO: 1293210 - RNA, 19 nt, Homo sapiens
  misc_RNA (1)...(19): siRNA sense strand
cagaugacgccuguuauag

SEQ ID NO: 1293211 - RNA, 19 nt, Homo sapiens
  misc_RNA (1)...(19): siRNA sense strand
gucauugcugugauuguua

SEQ ID NO: 1293212 - RNA, 19 nt, Homo sapiens
  misc_RNA (1)...(19): siRNA sense strand
uuggugaacgaguagauua

SEQ ID NO: 1293213 - RNA, 19 nt, Homo sapiens
  misc_RNA (1)...(19): siRNA sense strand
ggagccaccaacauuugaa

SEQ ID NO: 1293214 - RNA, 19 nt, Homo sapiens
  misc_RNA (1)...(19): siRNA sense strand
gcgcuuuccuggguugcuu

SEQ ID NO: 1293215 - RNA, 19 nt, Homo sapiens
  misc_RNA (1)...(19): siRNA sense strand
uacuacaaagcaacaguua

SEQ ID NO: 1293216 - RNA, 19 nt, Homo sapiens
  misc_RNA (1)...(19): siRNA sense strand
cuugaugcaguaacuuaua

SEQ ID NO: 1293217 - RNA, 19 nt, Homo sapiens
  misc_RNA (1)...(19): siRNA sense strand
aaacauguccauauauacg

SEQ ID NO: 1293218 - RNA, 19 nt, Homo sapiens
  misc_RNA (1)...(19): siRNA sense strand
guguaaaguggucaaaugu

SEQ ID NO: 1293219 - RNA, 19 nt, Homo sapiens
  misc_RNA (1)...(19): siRNA sense strand
cuuacgaguuugguuauca

SEQ ID NO: 1293220 - RNA, 19 nt, Homo sapiens
  misc_RNA (1)...(19): siRNA sense strand
uacgggauccuuuaaaugg

SEQ ID NO: 1293221 - RNA, 19 nt, Homo sapiens
  misc_RNA (1)...(19): siRNA sense strand
aaccaaaacccuacuauga

SEQ ID NO: 1293222 - RNA, 19 nt, Homo sapiens
  misc_RNA (1)...(19): siRNA sense strand
cccaauaugugaaaagguu

SEQ ID NO: 1293223 - RNA, 19 nt, Homo sapiens
  misc_RNA (1)...(19): siRNA sense strand
cgauggcagcgacacaauu

SEQ ID NO: 1293224 - RNA, 19 nt, Homo sapiens
  misc_RNA (1)...(19): siRNA sense strand
gauccauuuucacuuauug

SEQ ID NO: 1293225 - RNA, 19 nt, Homo sapiens
  misc_RNA (1)...(19): siRNA sense strand
uugaugcaguaacuuauag

SEQ ID NO: 1293226 - RNA, 19 nt, Homo sapiens
  misc_RNA (1)...(19): siRNA sense strand
guaucuugaugcaguaacu

SEQ ID NO: 1293227 - RNA, 19 nt, Homo sapiens
  misc_RNA (1)...(19): siRNA sense strand
caacauuugaagcuaugga

SEQ ID NO: 1293228 - RNA, 19 nt, Homo sapiens
  misc_RNA (1)...(19): siRNA sense strand
gagauuggugaacgaguag

SEQ ID NO: 1293229 - RNA, 19 nt, Homo sapiens
  misc_RNA (1)...(19): siRNA sense strand
ggagagagcacgauuuauu

SEQ ID NO: 1293230 - RNA, 19 nt, Homo sapiens
  misc_RNA (1)...(19): siRNA sense strand
agagaaacauguccauaua

SEQ ID NO: 1293231 - RNA, 19 nt, Homo sapiens
  misc_RNA (1)...(19): siRNA sense strand
cagaugcacuuuauuugua

SEQ ID NO: 1293232 - RNA, 19 nt, Homo sapiens
  misc_RNA (1)...(19): siRNA sense strand
ggacuuacgaguuugguua

SEQ ID NO: 1293233 - RNA, 19 nt, Homo sapiens
  misc_RNA (1)...(19): siRNA sense strand
aaacagauaucaggauuug

SEQ ID NO: 1293234 - RNA, 19 nt, Homo sapiens
  misc_RNA (1)...(19): siRNA sense strand
cuauggagcucauugguaa

SEQ ID NO: 1293235 - RNA, 19 nt, Homo sapiens
  misc_RNA (1)...(19): siRNA sense strand
aaacacaccuuuagugaag

SEQ ID NO: 1293236 - RNA, 19 nt, Homo sapiens
  misc_RNA (1)...(19): siRNA sense strand
gaacuuaaaggaucaguag

SEQ ID NO: 1293237 - RNA, 19 nt, Homo sapiens
  misc_RNA (1)...(19): siRNA sense strand
gaaaacagauaucaggauu

SEQ ID NO: 1293238 - RNA, 19 nt, Homo sapiens
  misc_RNA (1)...(19): siRNA sense strand
uaaaggaucaguagcaauu

SEQ ID NO: 1293239 - RNA, 19 nt, Homo sapiens
  misc_RNA (1)...(19): siRNA sense strand
aaaugggacuuacgaguuu

SEQ ID NO: 1293240 - RNA, 19 nt, Homo sapiens
  misc_RNA (1)...(19): siRNA sense strand
guuaucagaugcacuuuau

SEQ ID NO: 1293241 - RNA, 19 nt, Homo sapiens
  misc_RNA (1)...(19): siRNA sense strand
ugagauuggugaacgagua

SEQ ID NO: 1293242 - RNA, 19 nt, Homo sapiens
  misc_RNA (1)...(19): siRNA sense strand
gugaacgaguagauuauaa

SEQ ID NO: 1293243 - RNA, 19 nt, Homo sapiens
  misc_RNA (1)...(19): siRNA sense strand
gagagagcacgauuuauug

SEQ ID NO: 1293244 - RNA, 19 nt, Homo sapiens
  misc_RNA (1)...(19): siRNA sense strand
caaaugggacuuacgaguu

SEQ ID NO: 1293245 - RNA, 19 nt, Homo sapiens
  misc_RNA (1)...(19): siRNA sense strand
ggucauugcugugauuguu

SEQ ID NO: 1293246 - RNA, 19 nt, Homo sapiens
  misc_RNA (1)...(19): siRNA sense strand
ccagauccauuuucacuua

SEQ ID NO: 1293247 - RNA, 19 nt, Homo sapiens
  misc_RNA (1)...(19): siRNA sense strand
gaaggaauacuugacaguu

SEQ ID NO: 1293248 - RNA, 19 nt, Homo sapiens
  misc_RNA (1)...(19): siRNA sense strand
aaggaauacuugacaguuu

SEQ ID NO: 1293249 - RNA, 19 nt, Homo sapiens
  misc_RNA (1)...(19): siRNA sense strand
ucagaugacgccuguuaua

SEQ ID NO: 1293250 - RNA, 19 nt, Homo sapiens
  misc_RNA (1)...(19): siRNA sense strand
gaaaacacaccuuuaguga

SEQ ID NO: 1293251 - RNA, 19 nt, Homo sapiens
  misc_RNA (1)...(19): siRNA sense strand
gaugacgccuguuauagag

SEQ ID NO: 1293252 - RNA, 19 nt, Homo sapiens
  misc_RNA (1)...(19): siRNA sense strand
gagaaacauguccauauau

SEQ ID NO: 1293253 - RNA, 19 nt, Homo sapiens
  misc_RNA (1)...(19): siRNA sense strand
acgaguagauuauaagugu

SEQ ID NO: 1293254 - RNA, 19 nt, Homo sapiens
  misc_RNA (1)...(19): siRNA sense strand
cuacaaagcaacaguuaug

SEQ ID NO: 1293255 - RNA, 19 nt, Homo sapiens
  misc_RNA (1)...(19): siRNA sense strand
ccaccaacauuugaagcua

SEQ ID NO: 1293256 - RNA, 19 nt, Homo sapiens
  misc_RNA (1)...(19): siRNA sense strand
uauacgggauccuuuaaau

SEQ ID NO: 1293257 - RNA, 19 nt, Homo sapiens
  misc_RNA (1)...(19): siRNA sense strand
cgaguuugguuaucagaug

SEQ ID NO: 1293258 - RNA, 19 nt, Homo sapiens
  misc_RNA (1)...(19): siRNA sense strand
gaacgaguagauuauaagu

SEQ ID NO: 1293259 - RNA, 19 nt, Homo sapiens
  misc_RNA (1)...(19): siRNA sense strand
gugaggagccaccaacauu

SEQ ID NO: 1293260 - RNA, 19 nt, Homo sapiens
  misc_RNA (1)...(19): siRNA sense strand
gauggcagcgacacaauug

SEQ ID NO: 1293261 - RNA, 19 nt, Homo sapiens
  misc_RNA (1)...(19): siRNA sense strand
gcuauggagcucauuggua

SEQ ID NO: 1293262 - RNA, 19 nt, Homo sapiens
  misc_RNA (1)...(19): siRNA sense strand
gaggagccaccaacauuug

SEQ ID NO: 1293263 - RNA, 19 nt, Homo sapiens
  misc_RNA (1)...(19): siRNA sense strand
acacaccuuuagugaagua

SEQ ID NO: 1293264 - RNA, 19 nt, Homo sapiens
  misc_RNA (1)...(19): siRNA sense strand
ucucagaugacgccuguua

SEQ ID NO: 1293265 - RNA, 19 nt, Homo sapiens
  misc_RNA (1)...(19): siRNA sense strand
uagagaaacauguccauau

SEQ ID NO: 1293266 - RNA, 19 nt, Homo sapiens
  misc_RNA (1)...(19): siRNA sense strand
guuccaaagugucuuaaag

SEQ ID NO: 1293267 - RNA, 19 nt, Homo sapiens
  misc_RNA (1)...(19): siRNA sense strand
ggugaacgaguagauuaua

SEQ ID NO: 1293268 - RNA, 19 nt, Homo sapiens
  misc_RNA (1)...(19): siRNA sense strand
gaaguagaaguauuugagu

SEQ ID NO: 1293269 - RNA, 19 nt, Homo sapiens
  misc_RNA (1)...(19): siRNA sense strand
gaaacauguccauauauac

SEQ ID NO: 1293270 - RNA, 19 nt, Homo sapiens
  misc_RNA (1)...(19): siRNA sense strand
ugacgccuguuauagagaa

SEQ ID NO: 1293271 - RNA, 19 nt, Homo sapiens
  misc_RNA (1)...(19): siRNA sense strand
cgaguagauuauaagugua

SEQ ID NO: 1293272 - RNA, 19 nt, Homo sapiens
  misc_RNA (1)...(19): siRNA sense strand
gcacuuuauuuguaaugag

SEQ ID NO: 1293273 - RNA, 19 nt, Homo sapiens
  misc_RNA (1)...(19): siRNA sense strand
guagaaguauuugaguauc

SEQ ID NO: 1293274 - RNA, 19 nt, Homo sapiens
  misc_RNA (1)...(19): siRNA sense strand
guauuugaguaucuugaug

SEQ ID NO: 1293275 - RNA, 19 nt, Homo sapiens
  misc_RNA (1)...(19): siRNA sense strand
aggaauacuugacaguuug

SEQ ID NO: 1293276 - RNA, 19 nt, Homo sapiens
  misc_RNA (1)...(19): siRNA sense strand
ccaaaacccuacuaugaga

SEQ ID NO: 1293277 - RNA, 19 nt, Homo sapiens
  misc_RNA (1)...(19): siRNA sense strand
aguguaaaguggucaaaug

SEQ ID NO: 1293278 - RNA, 19 nt, Homo sapiens
  misc_RNA (1)...(19): siRNA sense strand
ccacccauacuauuuguga

SEQ ID NO: 1293279 - RNA, 19 nt, Homo sapiens
  misc_RNA (1)...(19): siRNA sense strand
caccaacauuugaagcuau

SEQ ID NO: 1293280 - RNA, 19 nt, Homo sapiens
  misc_RNA (1)...(19): siRNA sense strand
uuggagagagcacgauuua

SEQ ID NO: 1293281 - RNA, 19 nt, Homo sapiens
  misc_RNA (1)...(19): siRNA sense strand
gguuaucagaugcacuuua

SEQ ID NO: 1293282 - RNA, 19 nt, Homo sapiens
  misc_RNA (1)...(19): siRNA sense strand
ugaggagccaccaacauuu

SEQ ID NO: 1293283 - RNA, 19 nt, Homo sapiens
  misc_RNA (1)...(19): siRNA sense strand
ggaaggaauacuugacagu

SEQ ID NO: 1293284 - RNA, 19 nt, Homo sapiens
  misc_RNA (1)...(19): siRNA sense strand
gaggaaggaauacuugaca

SEQ ID NO: 1293285 - RNA, 19 nt, Homo sapiens
  misc_RNA (1)...(19): siRNA sense strand
ccaguuccaaagugucuua

SEQ ID NO: 1293286 - RNA, 19 nt, Homo sapiens
  misc_RNA (1)...(19): siRNA sense strand
ugaguaucuugaugcagua

SEQ ID NO: 1293287 - RNA, 19 nt, Homo sapiens
  misc_RNA (1)...(19): siRNA sense strand
caccuuuagugaaguagaa

SEQ ID NO: 1293288 - RNA, 19 nt, Homo sapiens
  misc_RNA (1)...(19): siRNA sense strand
acagauaucaggauuugga

SEQ ID NO: 1293289 - RNA, 19 nt, Homo sapiens
  misc_RNA (1)...(19): siRNA sense strand
ucauugcugugauuguuau

SEQ ID NO: 1293290 - RNA, 19 nt, Homo sapiens
  misc_RNA (1)...(19): siRNA sense strand
ucagaugcacuuuauuugu

SEQ ID NO: 1293291 - RNA, 19 nt, Homo sapiens
  misc_RNA (1)...(19): siRNA sense strand
gugcugcuccagaguguaa

SEQ ID NO: 1293292 - RNA, 19 nt, Homo sapiens
  misc_RNA (1)...(19): siRNA sense strand
ggaaaacacaccuuuagug

SEQ ID NO: 1293293 - RNA, 19 nt, Homo sapiens
  misc_RNA (1)...(19): siRNA sense strand
aaggaucaguagcaauuug

SEQ ID NO: 1293294 - RNA, 19 nt, Homo sapiens
  misc_RNA (1)...(19): siRNA sense strand
uauauacgggauccuuuaa

SEQ ID NO: 1293295 - RNA, 19 nt, Homo sapiens
  misc_RNA (1)...(19): siRNA sense strand
ugaaguagaaguauuugag

SEQ ID NO: 1293296 - RNA, 19 nt, Homo sapiens
  misc_RNA (1)...(19): siRNA sense strand
cuugacaguuuggauguuu

SEQ ID NO: 1293297 - RNA, 19 nt, Homo sapiens
  misc_RNA (1)...(19): siRNA sense strand
cauauauacgggauccuuu

SEQ ID NO: 1293298 - RNA, 19 nt, Homo sapiens
  misc_RNA (1)...(19): siRNA sense strand
auauauacgggauccuuua

SEQ ID NO: 1293299 - RNA, 19 nt, Homo sapiens
  misc_RNA (1)...(19): siRNA sense strand
cuuaaaggaucaguagcaa

SEQ ID NO: 1293300 - RNA, 19 nt, Homo sapiens
  misc_RNA (1)...(19): siRNA sense strand
uaaaccugaggaaggaaua

SEQ ID NO: 1293301 - RNA, 19 nt, Homo sapiens
  misc_RNA (1)...(19): siRNA sense strand
agaugacgccuguuauaga

SEQ ID NO: 1293302 - RNA, 19 nt, Homo sapiens
  misc_RNA (1)...(19): siRNA sense strand
ugugauuguuauugccaua

SEQ ID NO: 1293303 - RNA, 19 nt, Homo sapiens
  misc_RNA (1)...(19): siRNA sense strand
gagagcacgauuuauugug

SEQ ID NO: 1293304 - RNA, 19 nt, Homo sapiens
  misc_RNA (1)...(19): siRNA sense strand
gaaguauuugaguaucuug

SEQ ID NO: 1293305 - RNA, 19 nt, Homo sapiens
  misc_RNA (1)...(19): siRNA sense strand
ggcuaccugucucagauga

SEQ ID NO: 1293306 - RNA, 19 nt, Homo sapiens
  misc_RNA (1)...(19): siRNA sense strand
gauaucaggauuuggaaaa

SEQ ID NO: 1293307 - RNA, 19 nt, Homo sapiens
  misc_RNA (1)...(19): siRNA sense strand
ccucuugccacccauacua

SEQ ID NO: 1293308 - RNA, 19 nt, Homo sapiens
  misc_RNA (1)...(19): siRNA sense strand
ccaugguguugcugcugua

SEQ ID NO: 1293309 - RNA, 19 nt, Homo sapiens
  misc_RNA (1)...(19): siRNA sense strand
cagaugacgccuguuauag

SEQ ID NO: 1293310 - RNA, 19 nt, Homo sapiens
  misc_RNA (1)...(19): siRNA sense strand
uuggugaacgaguagauua

SEQ ID NO: 1293311 - RNA, 19 nt, Homo sapiens
  misc_RNA (1)...(19): siRNA sense strand
gucauugcugugauuguua

SEQ ID NO: 1293312 - RNA, 19 nt, Homo sapiens
  misc_RNA (1)...(19): siRNA sense strand
ggagccaccaacauuugaa

SEQ ID NO: 1293313 - RNA, 19 nt, Homo sapiens
  misc_RNA (1)...(19): siRNA sense strand
gcgcuuuccuggguugcuu

SEQ ID NO: 1293314 - RNA, 19 nt, Homo sapiens
  misc_RNA (1)...(19): siRNA sense strand
uacuacaaagcaacaguua

SEQ ID NO: 1293315 - RNA, 19 nt, Homo sapiens
  misc_RNA (1)...(19): siRNA sense strand
cuugaugcaguaacuuaua

SEQ ID NO: 1293316 - RNA, 19 nt, Homo sapiens
  misc_RNA (1)...(19): siRNA sense strand
aaacauguccauauauacg

SEQ ID NO: 1293317 - RNA, 19 nt, Homo sapiens
  misc_RNA (1)...(19): siRNA sense strand
guguaaaguggucaaaugu

SEQ ID NO: 1293318 - RNA, 19 nt, Homo sapiens
  misc_RNA (1)...(19): siRNA sense strand
cuuacgaguuugguuauca

SEQ ID NO: 1293319 - RNA, 19 nt, Homo sapiens
  misc_RNA (1)...(19): siRNA sense strand
uacgggauccuuuaaaugg

SEQ ID NO: 1293320 - RNA, 19 nt, Homo sapiens
  misc_RNA (1)...(19): siRNA sense strand
aaccaaaacccuacuauga

SEQ ID NO: 1293321 - RNA, 19 nt, Homo sapiens
  misc_RNA (1)...(19): siRNA sense strand
cccaauaugugaaaagguu

SEQ ID NO: 1293322 - RNA, 19 nt, Homo sapiens
  misc_RNA (1)...(19): siRNA sense strand
cgauggcagcgacacaauu

SEQ ID NO: 1293323 - RNA, 19 nt, Homo sapiens
  misc_RNA (1)...(19): siRNA sense strand
gauccauuuucacuuauug

SEQ ID NO: 1293324 - RNA, 19 nt, Homo sapiens
  misc_RNA (1)...(19): siRNA sense strand
uugaugcaguaacuuauag

SEQ ID NO: 1293325 - RNA, 19 nt, Homo sapiens
  misc_RNA (1)...(19): siRNA sense strand
guaucuugaugcaguaacu

SEQ ID NO: 1293326 - RNA, 19 nt, Homo sapiens
  misc_RNA (1)...(19): siRNA sense strand
caacauuugaagcuaugga

SEQ ID NO: 1293327 - RNA, 19 nt, Homo sapiens
  misc_RNA (1)...(19): siRNA sense strand
gagauuggugaacgaguag

SEQ ID NO: 1293328 - RNA, 19 nt, Homo sapiens
  misc_RNA (1)...(19): siRNA sense strand
ggagagagcacgauuuauu

SEQ ID NO: 1293329 - RNA, 19 nt, Homo sapiens
  misc_RNA (1)...(19): siRNA sense strand
agagaaacauguccauaua

SEQ ID NO: 1293330 - RNA, 19 nt, Homo sapiens
  misc_RNA (1)...(19): siRNA sense strand
cagaugcacuuuauuugua

SEQ ID NO: 1293331 - RNA, 19 nt, Homo sapiens
  misc_RNA (1)...(19): siRNA sense strand
ggacuuacgaguuugguua

SEQ ID NO: 1293332 - RNA, 19 nt, Homo sapiens
  misc_RNA (1)...(19): siRNA sense strand
aaacagauaucaggauuug

SEQ ID NO: 1293333 - RNA, 19 nt, Homo sapiens
  misc_RNA (1)...(19): siRNA sense strand
cuauggagcucauugguaa

SEQ ID NO: 1293334 - RNA, 19 nt, Homo sapiens
  misc_RNA (1)...(19): siRNA sense strand
aaacacaccuuuagugaag

SEQ ID NO: 1293335 - RNA, 19 nt, Homo sapiens
  misc_RNA (1)...(19): siRNA sense strand
gaacuuaaaggaucaguag

SEQ ID NO: 1293336 - RNA, 19 nt, Homo sapiens
  misc_RNA (1)...(19): siRNA sense strand
gaaaacagauaucaggauu

SEQ ID NO: 1293337 - RNA, 19 nt, Homo sapiens
  misc_RNA (1)...(19): siRNA sense strand
uaaaggaucaguagcaauu

SEQ ID NO: 1293338 - RNA, 19 nt, Homo sapiens
  misc_RNA (1)...(19): siRNA sense strand
aaaugggacuuacgaguuu

SEQ ID NO: 1293339 - RNA, 19 nt, Homo sapiens
  misc_RNA (1)...(19): siRNA sense strand
guuaucagaugcacuuuau

SEQ ID NO: 1293340 - RNA, 19 nt, Homo sapiens
  misc_RNA (1)...(19): siRNA sense strand
gagcugaauaugccacuua

SEQ ID NO: 1293341 - RNA, 19 nt, Homo sapiens
  misc_RNA (1)...(19): siRNA sense strand
ugagauuggugaacgagua

SEQ ID NO: 1293342 - RNA, 19 nt, Homo sapiens
  misc_RNA (1)...(19): siRNA sense strand
gugaacgaguagauuauaa

SEQ ID NO: 1293343 - RNA, 19 nt, Homo sapiens
  misc_RNA (1)...(19): siRNA sense strand
gagagagcacgauuuauug

SEQ ID NO: 1293344 - RNA, 19 nt, Homo sapiens
  misc_RNA (1)...(19): siRNA sense strand
caaaugggacuuacgaguu

SEQ ID NO: 1293345 - RNA, 19 nt, Homo sapiens
  misc_RNA (1)...(19): siRNA sense strand
ggucauugcugugauuguu

SEQ ID NO: 1293346 - RNA, 19 nt, Homo sapiens
  misc_RNA (1)...(19): siRNA sense strand
ccagauccauuuucacuua

SEQ ID NO: 1293347 - RNA, 19 nt, Homo sapiens
  misc_RNA (1)...(19): siRNA sense strand
gaaggaauacuugacaguu

SEQ ID NO: 1293348 - RNA, 19 nt, Homo sapiens
  misc_RNA (1)...(19): siRNA sense strand
aaggaauacuugacaguuu

SEQ ID NO: 1293349 - RNA, 19 nt, Homo sapiens
  misc_RNA (1)...(19): siRNA sense strand
ucagaugacgccuguuaua

SEQ ID NO: 1293350 - RNA, 19 nt, Homo sapiens
  misc_RNA (1)...(19): siRNA sense strand
gaaaacacaccuuuaguga

SEQ ID NO: 1293351 - RNA, 19 nt, Homo sapiens
  misc_RNA (1)...(19): siRNA sense strand
gaugacgccuguuauagag

SEQ ID NO: 1293352 - RNA, 19 nt, Homo sapiens
  misc_RNA (1)...(19): siRNA sense strand
gagaaacauguccauauau

SEQ ID NO: 1293353 - RNA, 19 nt, Homo sapiens
  misc_RNA (1)...(19): siRNA sense strand
ccacuuaccagacuaaauc

SEQ ID NO: 1293354 - RNA, 19 nt, Homo sapiens
  misc_RNA (1)...(19): siRNA sense strand
acgaguagauuauaagugu

SEQ ID NO: 1293355 - RNA, 19 nt, Homo sapiens
  misc_RNA (1)...(19): siRNA sense strand
cuacaaagcaacaguuaug

SEQ ID NO: 1293356 - RNA, 19 nt, Homo sapiens
  misc_RNA (1)...(19): siRNA sense strand
ccaccaacauuugaagcua

SEQ ID NO: 1293357 - RNA, 19 nt, Homo sapiens
  misc_RNA (1)...(19): siRNA sense strand
uauacgggauccuuuaaau

SEQ ID NO: 1293358 - RNA, 19 nt, Homo sapiens
  misc_RNA (1)...(19): siRNA sense strand
cgaguuugguuaucagaug

SEQ ID NO: 1293359 - RNA, 19 nt, Homo sapiens
  misc_RNA (1)...(19): siRNA sense strand
gaacgaguagauuauaagu

SEQ ID NO: 1293360 - RNA, 19 nt, Homo sapiens
  misc_RNA (1)...(19): siRNA sense strand
gugaggagccaccaacauu

SEQ ID NO: 1293361 - RNA, 19 nt, Homo sapiens
  misc_RNA (1)...(19): siRNA sense strand
gauggcagcgacacaauug

SEQ ID NO: 1293362 - RNA, 19 nt, Homo sapiens
  misc_RNA (1)...(19): siRNA sense strand
ucucagaugacgccuguua

SEQ ID NO: 1293363 - RNA, 19 nt, Homo sapiens
  misc_RNA (1)...(19): siRNA sense strand
gaggagccaccaacauuug

SEQ ID NO: 1293364 - RNA, 19 nt, Homo sapiens
  misc_RNA (1)...(19): siRNA sense strand
gcuauggagcucauuggua

SEQ ID NO: 1293365 - RNA, 19 nt, Homo sapiens
  misc_RNA (1)...(19): siRNA sense strand
acacaccuuuagugaagua

SEQ ID NO: 1293366 - RNA, 19 nt, Homo sapiens
  misc_RNA (1)...(19): siRNA sense strand
uagagaaacauguccauau

SEQ ID NO: 1293367 - RNA, 19 nt, Homo sapiens
  misc_RNA (1)...(19): siRNA sense strand
guuccaaagugucuuaaag

SEQ ID NO: 1293368 - RNA, 19 nt, Homo sapiens
  misc_RNA (1)...(19): siRNA sense strand
ggugaacgaguagauuaua

SEQ ID NO: 1293369 - RNA, 19 nt, Homo sapiens
  misc_RNA (1)...(19): siRNA sense strand
gaaguagaaguauuugagu

SEQ ID NO: 1293370 - RNA, 19 nt, Homo sapiens
  misc_RNA (1)...(19): siRNA sense strand
gaaacauguccauauauac

SEQ ID NO: 1293371 - RNA, 19 nt, Homo sapiens
  misc_RNA (1)...(19): siRNA sense strand
ugacgccuguuauagagaa

SEQ ID NO: 1293372 - RNA, 19 nt, Homo sapiens
  misc_RNA (1)...(19): siRNA sense strand
cgaguagauuauaagugua

SEQ ID NO: 1293373 - RNA, 19 nt, Homo sapiens
  misc_RNA (1)...(19): siRNA sense strand
gcacuuuauuuguaaugag

SEQ ID NO: 1293374 - RNA, 19 nt, Homo sapiens
  misc_RNA (1)...(19): siRNA sense strand
guagaaguauuugaguauc

SEQ ID NO: 1293375 - RNA, 19 nt, Homo sapiens
  misc_RNA (1)...(19): siRNA sense strand
guauuugaguaucuugaug

SEQ ID NO: 1293376 - RNA, 19 nt, Homo sapiens
  misc_RNA (1)...(19): siRNA sense strand
aggaauacuugacaguuug

SEQ ID NO: 1293377 - RNA, 19 nt, Homo sapiens
  misc_RNA (1)...(19): siRNA sense strand
ccaaaacccuacuaugaga

SEQ ID NO: 1293378 - RNA, 19 nt, Homo sapiens
  misc_RNA (1)...(19): siRNA sense strand
aguguaaaguggucaaaug

SEQ ID NO: 1293379 - RNA, 19 nt, Homo sapiens
  misc_RNA (1)...(19): siRNA sense strand
ccacccauacuauuuguga

SEQ ID NO: 1293380 - RNA, 19 nt, Homo sapiens
  misc_RNA (1)...(19): siRNA sense strand
uuggagagagcacgauuua

SEQ ID NO: 1293381 - RNA, 19 nt, Homo sapiens
  misc_RNA (1)...(19): siRNA sense strand
gguuaucagaugcacuuua

SEQ ID NO: 1293382 - RNA, 19 nt, Homo sapiens
  misc_RNA (1)...(19): siRNA sense strand
caccaacauuugaagcuau

SEQ ID NO: 1293383 - RNA, 19 nt, Homo sapiens
  misc_RNA (1)...(19): siRNA sense strand
ugaggagccaccaacauuu

SEQ ID NO: 1293384 - RNA, 19 nt, Homo sapiens
  misc_RNA (1)...(19): siRNA sense strand
ggaaggaauacuugacagu

SEQ ID NO: 1293385 - RNA, 19 nt, Homo sapiens
  misc_RNA (1)...(19): siRNA sense strand
gaggaaggaauacuugaca

SEQ ID NO: 1293386 - RNA, 19 nt, Homo sapiens
  misc_RNA (1)...(19): siRNA sense strand
ccaguuccaaagugucuua

SEQ ID NO: 1293387 - RNA, 19 nt, Homo sapiens
  misc_RNA (1)...(19): siRNA sense strand
ugaguaucuugaugcagua

SEQ ID NO: 1293388 - RNA, 19 nt, Homo sapiens
  misc_RNA (1)...(19): siRNA sense strand
caccuuuagugaaguagaa

SEQ ID NO: 1293389 - RNA, 19 nt, Homo sapiens
  misc_RNA (1)...(19): siRNA sense strand
acagauaucaggauuugga

SEQ ID NO: 1293390 - RNA, 19 nt, Homo sapiens
  misc_RNA (1)...(19): siRNA sense strand
ucauugcugugauuguuau

SEQ ID NO: 1293391 - RNA, 19 nt, Homo sapiens
  misc_RNA (1)...(19): siRNA sense strand
ucagaugcacuuuauuugu

SEQ ID NO: 1293392 - RNA, 19 nt, Homo sapiens
  misc_RNA (1)...(19): siRNA sense strand
gugcugcuccagaguguaa

SEQ ID NO: 1293393 - RNA, 19 nt, Homo sapiens
  misc_RNA (1)...(19): siRNA sense strand
ggaaaacacaccuuuagug

SEQ ID NO: 1293394 - RNA, 19 nt, Homo sapiens
  misc_RNA (1)...(19): siRNA sense strand
aaggaucaguagcaauuug

SEQ ID NO: 1293395 - RNA, 19 nt, Homo sapiens
  misc_RNA (1)...(19): siRNA sense strand
uauauacgggauccuuuaa

SEQ ID NO: 1293396 - RNA, 19 nt, Homo sapiens
  misc_RNA (1)...(19): siRNA sense strand
ugaaguagaaguauuugag

SEQ ID NO: 1293397 - RNA, 19 nt, Homo sapiens
  misc_RNA (1)...(19): siRNA sense strand
cuugacaguuuggauguuu

SEQ ID NO: 1293398 - RNA, 19 nt, Homo sapiens
  misc_RNA (1)...(19): siRNA sense strand
cauauauacgggauccuuu

SEQ ID NO: 1293399 - RNA, 19 nt, Homo sapiens
  misc_RNA (1)...(19): siRNA sense strand
auauauacgggauccuuua

SEQ ID NO: 1293400 - RNA, 19 nt, Homo sapiens
  misc_RNA (1)...(19): siRNA sense strand
cuuaaaggaucaguagcaa

SEQ ID NO: 1293401 - RNA, 19 nt, Homo sapiens
  misc_RNA (1)...(19): siRNA sense strand
uaaaccugaggaaggaaua

SEQ ID NO: 1293402 - RNA, 19 nt, Homo sapiens
  misc_RNA (1)...(19): siRNA sense strand
agaugacgccuguuauaga

SEQ ID NO: 1293403 - RNA, 19 nt, Homo sapiens
  misc_RNA (1)...(19): siRNA sense strand
ugugauuguuauugccaua

SEQ ID NO: 1293404 - RNA, 19 nt, Homo sapiens
  misc_RNA (1)...(19): siRNA sense strand
gagagcacgauuuauugug

SEQ ID NO: 1293405 - RNA, 19 nt, Homo sapiens
  misc_RNA (1)...(19): siRNA sense strand
gaaguauuugaguaucuug

SEQ ID NO: 1293406 - RNA, 19 nt, Homo sapiens
  misc_RNA (1)...(19): siRNA sense strand
ggcuaccugucucagauga

SEQ ID NO: 1293407 - RNA, 19 nt, Homo sapiens
  misc_RNA (1)...(19): siRNA sense strand
gauaucaggauuuggaaaa

SEQ ID NO: 1293408 - RNA, 19 nt, Homo sapiens
  misc_RNA (1)...(19): siRNA sense strand
ccucuugccacccauacua

SEQ ID NO: 1293409 - RNA, 19 nt, Homo sapiens
  misc_RNA (1)...(19): siRNA sense strand
ccaugguguugcugcugua

SEQ ID NO: 1293410 - RNA, 19 nt, Homo sapiens
  misc_RNA (1)...(19): siRNA sense strand
cagaugacgccuguuauag

SEQ ID NO: 1293411 - RNA, 19 nt, Homo sapiens
  misc_RNA (1)...(19): siRNA sense strand
cagaugguggagcugaaua

SEQ ID NO: 1293412 - RNA, 19 nt, Homo sapiens
  misc_RNA (1)...(19): siRNA sense strand
gucauugcugugauuguua

SEQ ID NO: 1293413 - RNA, 19 nt, Homo sapiens
  misc_RNA (1)...(19): siRNA sense strand
ggagccaccaacauuugaa

SEQ ID NO: 1293414 - RNA, 19 nt, Homo sapiens
  misc_RNA (1)...(19): siRNA sense strand
uuggugaacgaguagauua

SEQ ID NO: 1293415 - RNA, 19 nt, Homo sapiens
  misc_RNA (1)...(19): siRNA sense strand
gcgcuuuccuggguugcuu

SEQ ID NO: 1293416 - RNA, 19 nt, Homo sapiens
  misc_RNA (1)...(19): siRNA sense strand
uacuacaaagcaacaguua

SEQ ID NO: 1293417 - RNA, 19 nt, Homo sapiens
  misc_RNA (1)...(19): siRNA sense strand
cuugaugcaguaacuuaua

SEQ ID NO: 1293418 - RNA, 19 nt, Homo sapiens
  misc_RNA (1)...(19): siRNA sense strand
aaacauguccauauauacg

SEQ ID NO: 1293419 - RNA, 19 nt, Homo sapiens
  misc_RNA (1)...(19): siRNA sense strand
guguaaaguggucaaaugu

SEQ ID NO: 1293420 - RNA, 19 nt, Homo sapiens
  misc_RNA (1)...(19): siRNA sense strand
cuuacgaguuugguuauca

SEQ ID NO: 1293421 - RNA, 19 nt, Homo sapiens
  misc_RNA (1)...(19): siRNA sense strand
uacgggauccuuuaaaugg

SEQ ID NO: 1293422 - RNA, 19 nt, Homo sapiens
  misc_RNA (1)...(19): siRNA sense strand
gcagaugguggagcugaau

SEQ ID NO: 1293423 - RNA, 19 nt, Homo sapiens
  misc_RNA (1)...(19): siRNA sense strand
aaccaaaacccuacuauga

SEQ ID NO: 1293424 - RNA, 19 nt, Homo sapiens
  misc_RNA (1)...(19): siRNA sense strand
uugaugcaguaacuuauag

SEQ ID NO: 1293425 - RNA, 19 nt, Homo sapiens
  misc_RNA (1)...(19): siRNA sense strand
ggagcugaauaugccacuu

SEQ ID NO: 1293426 - RNA, 19 nt, Homo sapiens
  misc_RNA (1)...(19): siRNA sense strand
cgauggcagcgacacaauu

SEQ ID NO: 1293427 - RNA, 19 nt, Homo sapiens
  misc_RNA (1)...(19): siRNA sense strand
gauccauuuucacuuauug

SEQ ID NO: 1293428 - RNA, 19 nt, Homo sapiens
  misc_RNA (1)...(19): siRNA sense strand
ggagagagcacgauuuauu

SEQ ID NO: 1293429 - RNA, 19 nt, Homo sapiens
  misc_RNA (1)...(19): siRNA sense strand
agagaaacauguccauaua

SEQ ID NO: 1293430 - RNA, 19 nt, Homo sapiens
  misc_RNA (1)...(19): siRNA sense strand
cagaugcacuuuauuugua

SEQ ID NO: 1293431 - RNA, 19 nt, Homo sapiens
  misc_RNA (1)...(19): siRNA sense strand
ggacuuacgaguuugguua

SEQ ID NO: 1293432 - RNA, 19 nt, Homo sapiens
  misc_RNA (1)...(19): siRNA sense strand
aaacagauaucaggauuug

SEQ ID NO: 1293433 - RNA, 19 nt, Homo sapiens
  misc_RNA (1)...(19): siRNA sense strand
cuauggagcucauugguaa

SEQ ID NO: 1293434 - RNA, 19 nt, Homo sapiens
  misc_RNA (1)...(19): siRNA sense strand
aaacacaccuuuagugaag

SEQ ID NO: 1293435 - RNA, 19 nt, Homo sapiens
  misc_RNA (1)...(19): siRNA sense strand
gaacuuaaaggaucaguag

SEQ ID NO: 1293436 - RNA, 19 nt, Homo sapiens
  misc_RNA (1)...(19): siRNA sense strand
gaaaacagauaucaggauu

SEQ ID NO: 1293437 - RNA, 19 nt, Homo sapiens
  misc_RNA (1)...(19): siRNA sense strand
uaaaggaucaguagcaauu

SEQ ID NO: 1293438 - RNA, 19 nt, Homo sapiens
  misc_RNA (1)...(19): siRNA sense strand
aaaugggacuuacgaguuu

SEQ ID NO: 1293439 - RNA, 19 nt, Homo sapiens
  misc_RNA (1)...(19): siRNA sense strand
guuaucagaugcacuuuau

SEQ ID NO: 1293440 - RNA, 19 nt, Homo sapiens
  misc_RNA (1)...(19): siRNA sense strand
ugagauuggugaacgagua

SEQ ID NO: 1293441 - RNA, 19 nt, Homo sapiens
  misc_RNA (1)...(19): siRNA sense strand
gugaacgaguagauuauaa

SEQ ID NO: 1293442 - RNA, 19 nt, Homo sapiens
  misc_RNA (1)...(19): siRNA sense strand
gagagagcacgauuuauug

SEQ ID NO: 1293443 - RNA, 19 nt, Homo sapiens
  misc_RNA (1)...(19): siRNA sense strand
caaaugggacuuacgaguu

SEQ ID NO: 1293444 - RNA, 19 nt, Homo sapiens
  misc_RNA (1)...(19): siRNA sense strand
ggucauugcugugauuguu

SEQ ID NO: 1293445 - RNA, 19 nt, Homo sapiens
  misc_RNA (1)...(19): siRNA sense strand
ccagauccauuuucacuua

SEQ ID NO: 1293446 - RNA, 19 nt, Homo sapiens
  misc_RNA (1)...(19): siRNA sense strand
gaaggaauacuugacaguu

SEQ ID NO: 1293447 - RNA, 19 nt, Homo sapiens
  misc_RNA (1)...(19): siRNA sense strand
aaggaauacuugacaguuu

SEQ ID NO: 1293448 - RNA, 19 nt, Homo sapiens
  misc_RNA (1)...(19): siRNA sense strand
ucagaugacgccuguuaua

SEQ ID NO: 1293449 - RNA, 19 nt, Homo sapiens
  misc_RNA (1)...(19): siRNA sense strand
gaaaacacaccuuuaguga

SEQ ID NO: 1293450 - RNA, 19 nt, Homo sapiens
  misc_RNA (1)...(19): siRNA sense strand
gaugacgccuguuauagag

SEQ ID NO: 1293451 - RNA, 19 nt, Homo sapiens
  misc_RNA (1)...(19): siRNA sense strand
gagaaacauguccauauau

SEQ ID NO: 1293452 - RNA, 19 nt, Homo sapiens
  misc_RNA (1)...(19): siRNA sense strand
acgaguagauuauaagugu

SEQ ID NO: 1293453 - RNA, 19 nt, Homo sapiens
  misc_RNA (1)...(19): siRNA sense strand
cuacaaagcaacaguuaug

SEQ ID NO: 1293454 - RNA, 19 nt, Homo sapiens
  misc_RNA (1)...(19): siRNA sense strand
ccaccaacauuugaagcua

SEQ ID NO: 1293455 - RNA, 19 nt, Homo sapiens
  misc_RNA (1)...(19): siRNA sense strand
uauacgggauccuuuaaau

SEQ ID NO: 1293456 - RNA, 19 nt, Homo sapiens
  misc_RNA (1)...(19): siRNA sense strand
cgaguuugguuaucagaug

SEQ ID NO: 1293457 - RNA, 19 nt, Homo sapiens
  misc_RNA (1)...(19): siRNA sense strand
gaacgaguagauuauaagu

SEQ ID NO: 1293458 - RNA, 19 nt, Homo sapiens
  misc_RNA (1)...(19): siRNA sense strand
gugaggagccaccaacauu

SEQ ID NO: 1293459 - RNA, 19 nt, Homo sapiens
  misc_RNA (1)...(19): siRNA sense strand
gauggcagcgacacaauug

SEQ ID NO: 1293460 - RNA, 19 nt, Homo sapiens
  misc_RNA (1)...(19): siRNA sense strand
gcuauggagcucauuggua

SEQ ID NO: 1293461 - RNA, 19 nt, Homo sapiens
  misc_RNA (1)...(19): siRNA sense strand
gaggagccaccaacauuug

SEQ ID NO: 1293462 - RNA, 19 nt, Homo sapiens
  misc_RNA (1)...(19): siRNA sense strand
acacaccuuuagugaagua

SEQ ID NO: 1293463 - RNA, 19 nt, Homo sapiens
  misc_RNA (1)...(19): siRNA sense strand
ucucagaugacgccuguua

SEQ ID NO: 1293464 - RNA, 19 nt, Homo sapiens
  misc_RNA (1)...(19): siRNA sense strand
uagagaaacauguccauau

SEQ ID NO: 1293465 - RNA, 19 nt, Homo sapiens
  misc_RNA (1)...(19): siRNA sense strand
guuccaaagugucuuaaag

SEQ ID NO: 1293466 - RNA, 19 nt, Homo sapiens
  misc_RNA (1)...(19): siRNA sense strand
ggugaacgaguagauuaua

SEQ ID NO: 1293467 - RNA, 19 nt, Homo sapiens
  misc_RNA (1)...(19): siRNA sense strand
gaaguagaaguauuugagu

SEQ ID NO: 1293468 - RNA, 19 nt, Homo sapiens
  misc_RNA (1)...(19): siRNA sense strand
gaaacauguccauauauac

SEQ ID NO: 1293469 - RNA, 19 nt, Homo sapiens
  misc_RNA (1)...(19): siRNA sense strand
ugacgccuguuauagagaa

SEQ ID NO: 1293470 - RNA, 19 nt, Homo sapiens
  misc_RNA (1)...(19): siRNA sense strand
cgaguagauuauaagugua

SEQ ID NO: 1293471 - RNA, 19 nt, Homo sapiens
  misc_RNA (1)...(19): siRNA sense strand
gcacuuuauuuguaaugag

SEQ ID NO: 1293472 - RNA, 19 nt, Homo sapiens
  misc_RNA (1)...(19): siRNA sense strand
guagaaguauuugaguauc

SEQ ID NO: 1293473 - RNA, 19 nt, Homo sapiens
  misc_RNA (1)...(19): siRNA sense strand
guauuugaguaucuugaug

SEQ ID NO: 1293474 - RNA, 19 nt, Homo sapiens
  misc_RNA (1)...(19): siRNA sense strand
aggaauacuugacaguuug

SEQ ID NO: 1293475 - RNA, 19 nt, Homo sapiens
  misc_RNA (1)...(19): siRNA sense strand
ccaaaacccuacuaugaga

SEQ ID NO: 1293476 - RNA, 19 nt, Homo sapiens
  misc_RNA (1)...(19): siRNA sense strand
aguguaaaguggucaaaug

SEQ ID NO: 1293477 - RNA, 19 nt, Homo sapiens
  misc_RNA (1)...(19): siRNA sense strand
ccacccauacuauuuguga

SEQ ID NO: 1293478 - RNA, 19 nt, Homo sapiens
  misc_RNA (1)...(19): siRNA sense strand
caccaacauuugaagcuau

SEQ ID NO: 1293479 - RNA, 19 nt, Homo sapiens
  misc_RNA (1)...(19): siRNA sense strand
uuggagagagcacgauuua

SEQ ID NO: 1293480 - RNA, 19 nt, Homo sapiens
  misc_RNA (1)...(19): siRNA sense strand
gguuaucagaugcacuuua

SEQ ID NO: 1293481 - RNA, 19 nt, Homo sapiens
  misc_RNA (1)...(19): siRNA sense strand
ugaggagccaccaacauuu

SEQ ID NO: 1293482 - RNA, 19 nt, Homo sapiens
  misc_RNA (1)...(19): siRNA sense strand
ggaaggaauacuugacagu

SEQ ID NO: 1293483 - RNA, 19 nt, Homo sapiens
  misc_RNA (1)...(19): siRNA sense strand
gaggaaggaauacuugaca

SEQ ID NO: 1293484 - RNA, 19 nt, Homo sapiens
  misc_RNA (1)...(19): siRNA sense strand
ccaguuccaaagugucuua

SEQ ID NO: 1293485 - RNA, 19 nt, Homo sapiens
  misc_RNA (1)...(19): siRNA sense strand
ugaguaucuugaugcagua

SEQ ID NO: 1293486 - RNA, 19 nt, Homo sapiens
  misc_RNA (1)...(19): siRNA sense strand
caccuuuagugaaguagaa

SEQ ID NO: 1293487 - RNA, 19 nt, Homo sapiens
  misc_RNA (1)...(19): siRNA sense strand
acagauaucaggauuugga

SEQ ID NO: 1293488 - RNA, 19 nt, Homo sapiens
  misc_RNA (1)...(19): siRNA sense strand
ucauugcugugauuguuau

SEQ ID NO: 1293489 - RNA, 19 nt, Homo sapiens
  misc_RNA (1)...(19): siRNA sense strand
ucagaugcacuuuauuugu

SEQ ID NO: 1293490 - RNA, 19 nt, Homo sapiens
  misc_RNA (1)...(19): siRNA sense strand
gugcugcuccagaguguaa

SEQ ID NO: 1293491 - RNA, 19 nt, Homo sapiens
  misc_RNA (1)...(19): siRNA sense strand
ggaaaacacaccuuuagug

SEQ ID NO: 1293492 - RNA, 19 nt, Homo sapiens
  misc_RNA (1)...(19): siRNA sense strand
aaggaucaguagcaauuug

SEQ ID NO: 1293493 - RNA, 19 nt, Homo sapiens
  misc_RNA (1)...(19): siRNA sense strand
uauauacgggauccuuuaa

SEQ ID NO: 1293494 - RNA, 19 nt, Homo sapiens
  misc_RNA (1)...(19): siRNA sense strand
ugaaguagaaguauuugag

SEQ ID NO: 1293495 - RNA, 19 nt, Homo sapiens
  misc_RNA (1)...(19): siRNA sense strand
cuugacaguuuggauguuu

SEQ ID NO: 1293496 - RNA, 19 nt, Homo sapiens
  misc_RNA (1)...(19): siRNA sense strand
cauauauacgggauccuuu

SEQ ID NO: 1293497 - RNA, 19 nt, Homo sapiens
  misc_RNA (1)...(19): siRNA sense strand
auauauacgggauccuuua

SEQ ID NO: 1293498 - RNA, 19 nt, Homo sapiens
  misc_RNA (1)...(19): siRNA sense strand
cuuaaaggaucaguagcaa

SEQ ID NO: 1293499 - RNA, 19 nt, Homo sapiens
  misc_RNA (1)...(19): siRNA sense strand
uaaaccugaggaaggaaua

SEQ ID NO: 1293500 - RNA, 19 nt, Homo sapiens
  misc_RNA (1)...(19): siRNA sense strand
agaugacgccuguuauaga

SEQ ID NO: 1293501 - RNA, 19 nt, Homo sapiens
  misc_RNA (1)...(19): siRNA sense strand
ugugauuguuauugccaua

SEQ ID NO: 1293502 - RNA, 19 nt, Homo sapiens
  misc_RNA (1)...(19): siRNA sense strand
gagagcacgauuuauugug

SEQ ID NO: 1293503 - RNA, 19 nt, Homo sapiens
  misc_RNA (1)...(19): siRNA sense strand
gaaguauuugaguaucuug

SEQ ID NO: 1293504 - RNA, 19 nt, Homo sapiens
  misc_RNA (1)...(19): siRNA sense strand
ggcuaccugucucagauga

SEQ ID NO: 1293505 - RNA, 19 nt, Homo sapiens
  misc_RNA (1)...(19): siRNA sense strand
gauaucaggauuuggaaaa

SEQ ID NO: 1293506 - RNA, 19 nt, Homo sapiens
  misc_RNA (1)...(19): siRNA sense strand
ccucuugccacccauacua

SEQ ID NO: 1293507 - RNA, 19 nt, Homo sapiens
  misc_RNA (1)...(19): siRNA sense strand
ccaugguguugcugcugua

SEQ ID NO: 1293508 - RNA, 19 nt, Homo sapiens
  misc_RNA (1)...(19): siRNA sense strand
cagaugacgccuguuauag

SEQ ID NO: 1293509 - RNA, 19 nt, Homo sapiens
  misc_RNA (1)...(19): siRNA sense strand
uuggugaacgaguagauua

SEQ ID NO: 1293510 - RNA, 19 nt, Homo sapiens
  misc_RNA (1)...(19): siRNA sense strand
gucauugcugugauuguua

SEQ ID NO: 1293511 - RNA, 19 nt, Homo sapiens
  misc_RNA (1)...(19): siRNA sense strand
ggagccaccaacauuugaa

SEQ ID NO: 1293512 - RNA, 19 nt, Homo sapiens
  misc_RNA (1)...(19): siRNA sense strand
gcgcuuuccuggguugcuu

SEQ ID NO: 1293513 - RNA, 19 nt, Homo sapiens
  misc_RNA (1)...(19): siRNA sense strand
uacuacaaagcaacaguua

SEQ ID NO: 1293514 - RNA, 19 nt, Homo sapiens
  misc_RNA (1)...(19): siRNA sense strand
cuugaugcaguaacuuaua

SEQ ID NO: 1293515 - RNA, 19 nt, Homo sapiens
  misc_RNA (1)...(19): siRNA sense strand
aaacauguccauauauacg

SEQ ID NO: 1293516 - RNA, 19 nt, Homo sapiens
  misc_RNA (1)...(19): siRNA sense strand
guguaaaguggucaaaugu

SEQ ID NO: 1293517 - RNA, 19 nt, Homo sapiens
  misc_RNA (1)...(19): siRNA sense strand
cuuacgaguuugguuauca

SEQ ID NO: 1293518 - RNA, 19 nt, Homo sapiens
  misc_RNA (1)...(19): siRNA sense strand
uacgggauccuuuaaaugg

SEQ ID NO: 1293519 - RNA, 19 nt, Homo sapiens
  misc_RNA (1)...(19): siRNA sense strand
aaccaaaacccuacuauga

SEQ ID NO: 1293520 - RNA, 19 nt, Homo sapiens
  misc_RNA (1)...(19): siRNA sense strand
cccaauaugugaaaagguu

SEQ ID NO: 1293521 - RNA, 19 nt, Homo sapiens
  misc_RNA (1)...(19): siRNA sense strand
cgauggcagcgacacaauu

SEQ ID NO: 1293522 - RNA, 19 nt, Homo sapiens
  misc_RNA (1)...(19): siRNA sense strand
gauccauuuucacuuauug

SEQ ID NO: 1293523 - RNA, 19 nt, Homo sapiens
  misc_RNA (1)...(19): siRNA sense strand
uugaugcaguaacuuauag

SEQ ID NO: 1293524 - RNA, 19 nt, Homo sapiens
  misc_RNA (1)...(19): siRNA sense strand
guaucuugaugcaguaacu

SEQ ID NO: 1293525 - RNA, 19 nt, Homo sapiens
  misc_RNA (1)...(19): siRNA sense strand
caacauuugaagcuaugga

SEQ ID NO: 1293526 - RNA, 19 nt, Homo sapiens
  misc_RNA (1)...(19): siRNA sense strand
gagauuggugaacgaguag

SEQ ID NO: 1293527 - RNA, 19 nt, Homo sapiens
  misc_RNA (1)...(19): siRNA sense strand
ggagagagcacgauuuauu

SEQ ID NO: 1293528 - RNA, 19 nt, Homo sapiens
  misc_RNA (1)...(19): siRNA sense strand
agagaaacauguccauaua

SEQ ID NO: 1293529 - RNA, 19 nt, Homo sapiens
  misc_RNA (1)...(19): siRNA sense strand
cagaugcacuuuauuugua

SEQ ID NO: 1293530 - RNA, 19 nt, Homo sapiens
  misc_RNA (1)...(19): siRNA sense strand
ggacuuacgaguuugguua

SEQ ID NO: 1293531 - RNA, 19 nt, Homo sapiens
  misc_RNA (1)...(19): siRNA sense strand
aaacagauaucaggauuug

SEQ ID NO: 1293532 - RNA, 19 nt, Homo sapiens
  misc_RNA (1)...(19): siRNA sense strand
cuauggagcucauugguaa

SEQ ID NO: 1293533 - RNA, 19 nt, Homo sapiens
  misc_RNA (1)...(19): siRNA sense strand
aaacacaccuuuagugaag

SEQ ID NO: 1293534 - RNA, 19 nt, Homo sapiens
  misc_RNA (1)...(19): siRNA sense strand
gaacuuaaaggaucaguag

SEQ ID NO: 1293535 - RNA, 19 nt, Homo sapiens
  misc_RNA (1)...(19): siRNA sense strand
gaaaacagauaucaggauu

SEQ ID NO: 1293536 - RNA, 19 nt, Homo sapiens
  misc_RNA (1)...(19): siRNA sense strand
uaaaggaucaguagcaauu

SEQ ID NO: 1293537 - RNA, 19 nt, Homo sapiens
  misc_RNA (1)...(19): siRNA sense strand
aaaugggacuuacgaguuu

SEQ ID NO: 1293538 - RNA, 19 nt, Homo sapiens
  misc_RNA (1)...(19): siRNA sense strand
guuaucagaugcacuuuau

SEQ ID NO: 1293539 - RNA, 19 nt, Homo sapiens
  misc_RNA (1)...(19): siRNA sense strand
ugagauuggugaacgagua

SEQ ID NO: 1293540 - RNA, 19 nt, Homo sapiens
  misc_RNA (1)...(19): siRNA sense strand
gugaacgaguagauuauaa

SEQ ID NO: 1293541 - RNA, 19 nt, Homo sapiens
  misc_RNA (1)...(19): siRNA sense strand
gagagagcacgauuuauug

SEQ ID NO: 1293542 - RNA, 19 nt, Homo sapiens
  misc_RNA (1)...(19): siRNA sense strand
caaaugggacuuacgaguu

SEQ ID NO: 1293543 - RNA, 19 nt, Homo sapiens
  misc_RNA (1)...(19): siRNA sense strand
ggucauugcugugauuguu

SEQ ID NO: 1293544 - RNA, 19 nt, Homo sapiens
  misc_RNA (1)...(19): siRNA sense strand
ccagauccauuuucacuua

SEQ ID NO: 1293545 - RNA, 19 nt, Homo sapiens
  misc_RNA (1)...(19): siRNA sense strand
gaaggaauacuugacaguu

SEQ ID NO: 1293546 - RNA, 19 nt, Homo sapiens
  misc_RNA (1)...(19): siRNA sense strand
aaggaauacuugacaguuu

SEQ ID NO: 1293547 - RNA, 19 nt, Homo sapiens
  misc_RNA (1)...(19): siRNA sense strand
ucagaugacgccuguuaua

SEQ ID NO: 1293548 - RNA, 19 nt, Homo sapiens
  misc_RNA (1)...(19): siRNA sense strand
gaaaacacaccuuuaguga

SEQ ID NO: 1293549 - RNA, 19 nt, Homo sapiens
  misc_RNA (1)...(19): siRNA sense strand
gaugacgccuguuauagag

SEQ ID NO: 1293550 - RNA, 19 nt, Homo sapiens
  misc_RNA (1)...(19): siRNA sense strand
gagaaacauguccauauau

SEQ ID NO: 1293551 - RNA, 19 nt, Homo sapiens
  misc_RNA (1)...(19): siRNA sense strand
acgaguagauuauaagugu

SEQ ID NO: 1293552 - RNA, 19 nt, Homo sapiens
  misc_RNA (1)...(19): siRNA sense strand
cuacaaagcaacaguuaug

SEQ ID NO: 1293553 - RNA, 19 nt, Homo sapiens
  misc_RNA (1)...(19): siRNA sense strand
ccaccaacauuugaagcua

SEQ ID NO: 1293554 - RNA, 19 nt, Homo sapiens
  misc_RNA (1)...(19): siRNA sense strand
uauacgggauccuuuaaau

SEQ ID NO: 1293555 - RNA, 19 nt, Homo sapiens
  misc_RNA (1)...(19): siRNA sense strand
cgaguuugguuaucagaug

SEQ ID NO: 1293556 - RNA, 19 nt, Homo sapiens
  misc_RNA (1)...(19): siRNA sense strand
gaacgaguagauuauaagu

SEQ ID NO: 1293557 - RNA, 19 nt, Homo sapiens
  misc_RNA (1)...(19): siRNA sense strand
gugaggagccaccaacauu

SEQ ID NO: 1293558 - RNA, 19 nt, Homo sapiens
  misc_RNA (1)...(19): siRNA sense strand
gauggcagcgacacaauug

SEQ ID NO: 1293559 - RNA, 19 nt, Homo sapiens
  misc_RNA (1)...(19): siRNA sense strand
gcuauggagcucauuggua

SEQ ID NO: 1293560 - RNA, 19 nt, Homo sapiens
  misc_RNA (1)...(19): siRNA sense strand
gaggagccaccaacauuug

SEQ ID NO: 1293561 - RNA, 19 nt, Homo sapiens
  misc_RNA (1)...(19): siRNA sense strand
acacaccuuuagugaagua

SEQ ID NO: 1293562 - RNA, 19 nt, Homo sapiens
  misc_RNA (1)...(19): siRNA sense strand
ucucagaugacgccuguua

SEQ ID NO: 1293563 - RNA, 19 nt, Homo sapiens
  misc_RNA (1)...(19): siRNA sense strand
uagagaaacauguccauau

SEQ ID NO: 1293564 - RNA, 19 nt, Homo sapiens
  misc_RNA (1)...(19): siRNA sense strand
ggugaacgaguagauuaua

SEQ ID NO: 1293565 - RNA, 19 nt, Homo sapiens
  misc_RNA (1)...(19): siRNA sense strand
gaaguagaaguauuugagu

SEQ ID NO: 1293566 - RNA, 19 nt, Homo sapiens
  misc_RNA (1)...(19): siRNA sense strand
gaaacauguccauauauac

SEQ ID NO: 1293567 - RNA, 19 nt, Homo sapiens
  misc_RNA (1)...(19): siRNA sense strand
ugacgccuguuauagagaa

SEQ ID NO: 1293568 - RNA, 19 nt, Homo sapiens
  misc_RNA (1)...(19): siRNA sense strand
cgaguagauuauaagugua

SEQ ID NO: 1293569 - RNA, 19 nt, Homo sapiens
  misc_RNA (1)...(19): siRNA sense strand
gcacuuuauuuguaaugag

SEQ ID NO: 1293570 - RNA, 19 nt, Homo sapiens
  misc_RNA (1)...(19): siRNA sense strand
guagaaguauuugaguauc

SEQ ID NO: 1293571 - RNA, 19 nt, Homo sapiens
  misc_RNA (1)...(19): siRNA sense strand
guauuugaguaucuugaug

SEQ ID NO: 1293572 - RNA, 19 nt, Homo sapiens
  misc_RNA (1)...(19): siRNA sense strand
aggaauacuugacaguuug

SEQ ID NO: 1293573 - RNA, 19 nt, Homo sapiens
  misc_RNA (1)...(19): siRNA sense strand
aguguaaaguggucaaaug

SEQ ID NO: 1293574 - RNA, 19 nt, Homo sapiens
  misc_RNA (1)...(19): siRNA sense strand
ccaaaacccuacuaugaga

SEQ ID NO: 1293575 - RNA, 19 nt, Homo sapiens
  misc_RNA (1)...(19): siRNA sense strand
ccacccauacuauuuguga

SEQ ID NO: 1293576 - RNA, 19 nt, Homo sapiens
  misc_RNA (1)...(19): siRNA sense strand
caccaacauuugaagcuau

SEQ ID NO: 1293577 - RNA, 19 nt, Homo sapiens
  misc_RNA (1)...(19): siRNA sense strand
uuggagagagcacgauuua

SEQ ID NO: 1293578 - RNA, 19 nt, Homo sapiens
  misc_RNA (1)...(19): siRNA sense strand
gguuaucagaugcacuuua

SEQ ID NO: 1293579 - RNA, 19 nt, Homo sapiens
  misc_RNA (1)...(19): siRNA sense strand
ugaggagccaccaacauuu

SEQ ID NO: 1293580 - RNA, 19 nt, Homo sapiens
  misc_RNA (1)...(19): siRNA sense strand
ggaaggaauacuugacagu

SEQ ID NO: 1293581 - RNA, 19 nt, Homo sapiens
  misc_RNA (1)...(19): siRNA sense strand
gaggaaggaauacuugaca

SEQ ID NO: 1293582 - RNA, 19 nt, Homo sapiens
  misc_RNA (1)...(19): siRNA sense strand
ugaguaucuugaugcagua

SEQ ID NO: 1293583 - RNA, 19 nt, Homo sapiens
  misc_RNA (1)...(19): siRNA sense strand
caccuuuagugaaguagaa

SEQ ID NO: 1293584 - RNA, 19 nt, Homo sapiens
  misc_RNA (1)...(19): siRNA sense strand
acagauaucaggauuugga

SEQ ID NO: 1293585 - RNA, 19 nt, Homo sapiens
  misc_RNA (1)...(19): siRNA sense strand
ucauugcugugauuguuau

SEQ ID NO: 1293586 - RNA, 19 nt, Homo sapiens
  misc_RNA (1)...(19): siRNA sense strand
ucagaugcacuuuauuugu

SEQ ID NO: 1293587 - RNA, 19 nt, Homo sapiens
  misc_RNA (1)...(19): siRNA sense strand
gugcugcuccagaguguaa

SEQ ID NO: 1293588 - RNA, 19 nt, Homo sapiens
  misc_RNA (1)...(19): siRNA sense strand
ggaaaacacaccuuuagug

SEQ ID NO: 1293589 - RNA, 19 nt, Homo sapiens
  misc_RNA (1)...(19): siRNA sense strand
aaggaucaguagcaauuug

SEQ ID NO: 1293590 - RNA, 19 nt, Homo sapiens
  misc_RNA (1)...(19): siRNA sense strand
uauauacgggauccuuuaa

SEQ ID NO: 1293591 - RNA, 19 nt, Homo sapiens
  misc_RNA (1)...(19): siRNA sense strand
ugaaguagaaguauuugag

SEQ ID NO: 1293592 - RNA, 19 nt, Homo sapiens
  misc_RNA (1)...(19): siRNA sense strand
cuugacaguuuggauguuu

SEQ ID NO: 1293593 - RNA, 19 nt, Homo sapiens
  misc_RNA (1)...(19): siRNA sense strand
cauauauacgggauccuuu

SEQ ID NO: 1293594 - RNA, 19 nt, Homo sapiens
  misc_RNA (1)...(19): siRNA sense strand
auauauacgggauccuuua

SEQ ID NO: 1293595 - RNA, 19 nt, Homo sapiens
  misc_RNA (1)...(19): siRNA sense strand
cuuaaaggaucaguagcaa

SEQ ID NO: 1293596 - RNA, 19 nt, Homo sapiens
  misc_RNA (1)...(19): siRNA sense strand
uaaaccugaggaaggaaua

SEQ ID NO: 1293597 - RNA, 19 nt, Homo sapiens
  misc_RNA (1)...(19): siRNA sense strand
agaugacgccuguuauaga

SEQ ID NO: 1293598 - RNA, 19 nt, Homo sapiens
  misc_RNA (1)...(19): siRNA sense strand
ugugauuguuauugccaua

SEQ ID NO: 1293599 - RNA, 19 nt, Homo sapiens
  misc_RNA (1)...(19): siRNA sense strand
gagagcacgauuuauugug

SEQ ID NO: 1293600 - RNA, 19 nt, Homo sapiens
  misc_RNA (1)...(19): siRNA sense strand
gaaguauuugaguaucuug

SEQ ID NO: 1293601 - RNA, 19 nt, Homo sapiens
  misc_RNA (1)...(19): siRNA sense strand
ccucuugccacccauacua

SEQ ID NO: 1293602 - RNA, 19 nt, Homo sapiens
  misc_RNA (1)...(19): siRNA sense strand
gauaucaggauuuggaaaa

SEQ ID NO: 1293603 - RNA, 19 nt, Homo sapiens
  misc_RNA (1)...(19): siRNA sense strand
ggcuaccugucucagauga

SEQ ID NO: 1293604 - RNA, 19 nt, Homo sapiens
  misc_RNA (1)...(19): siRNA sense strand
ccaugguguugcugcugua

SEQ ID NO: 1293605 - RNA, 19 nt, Homo sapiens
  misc_RNA (1)...(19): siRNA sense strand
cagaugacgccuguuauag

SEQ ID NO: 1293606 - RNA, 19 nt, Homo sapiens
  misc_RNA (1)...(19): siRNA sense strand
gucauugcugugauuguua

SEQ ID NO: 1293607 - RNA, 19 nt, Homo sapiens
  misc_RNA (1)...(19): siRNA sense strand
uuggugaacgaguagauua

SEQ ID NO: 1293608 - RNA, 19 nt, Homo sapiens
  misc_RNA (1)...(19): siRNA sense strand
ggagccaccaacauuugaa

SEQ ID NO: 1293609 - RNA, 19 nt, Homo sapiens
  misc_RNA (1)...(19): siRNA sense strand
gcgcuuuccuggguugcuu

SEQ ID NO: 1293610 - RNA, 19 nt, Homo sapiens
  misc_RNA (1)...(19): siRNA sense strand
uacuacaaagcaacaguua

SEQ ID NO: 1293611 - RNA, 19 nt, Homo sapiens
  misc_RNA (1)...(19): siRNA sense strand
cuugaugcaguaacuuaua

SEQ ID NO: 1293612 - RNA, 19 nt, Homo sapiens
  misc_RNA (1)...(19): siRNA sense strand
aaacauguccauauauacg

SEQ ID NO: 1293613 - RNA, 19 nt, Homo sapiens
  misc_RNA (1)...(19): siRNA sense strand
guguaaaguggucaaaugu

SEQ ID NO: 1293614 - RNA, 19 nt, Homo sapiens
  misc_RNA (1)...(19): siRNA sense strand
cuuacgaguuugguuauca

SEQ ID NO: 1293615 - RNA, 19 nt, Homo sapiens
  misc_RNA (1)...(19): siRNA sense strand
uacgggauccuuuaaaugg

SEQ ID NO: 1293616 - RNA, 19 nt, Homo sapiens
  misc_RNA (1)...(19): siRNA sense strand
aaccaaaacccuacuauga

SEQ ID NO: 1293617 - RNA, 19 nt, Homo sapiens
  misc_RNA (1)...(19): siRNA sense strand
cccaauaugugaaaagguu

SEQ ID NO: 1293618 - RNA, 19 nt, Homo sapiens
  misc_RNA (1)...(19): siRNA sense strand
cgauggcagcgacacaauu

SEQ ID NO: 1293619 - RNA, 19 nt, Homo sapiens
  misc_RNA (1)...(19): siRNA sense strand
gauccauuuucacuuauug

SEQ ID NO: 1293620 - RNA, 19 nt, Homo sapiens
  misc_RNA (1)...(19): siRNA sense strand
uugaugcaguaacuuauag

SEQ ID NO: 1293621 - RNA, 19 nt, Homo sapiens
  misc_RNA (1)...(19): siRNA sense strand
guaucuugaugcaguaacu

SEQ ID NO: 1293622 - RNA, 19 nt, Homo sapiens
  misc_RNA (1)...(19): siRNA sense strand
caacauuugaagcuaugga

SEQ ID NO: 1293623 - RNA, 19 nt, Homo sapiens
  misc_RNA (1)...(19): siRNA sense strand
gagauuggugaacgaguag

SEQ ID NO: 1293624 - RNA, 19 nt, Homo sapiens
  misc_RNA (1)...(19): siRNA sense strand
ggagagagcacgauuuauu

SEQ ID NO: 1293625 - RNA, 19 nt, Homo sapiens
  misc_RNA (1)...(19): siRNA sense strand
agagaaacauguccauaua

SEQ ID NO: 1293626 - RNA, 19 nt, Homo sapiens
  misc_RNA (1)...(19): siRNA sense strand
cagaugcacuuuauuugua

SEQ ID NO: 1293627 - RNA, 19 nt, Homo sapiens
  misc_RNA (1)...(19): siRNA sense strand
ggacuuacgaguuugguua

SEQ ID NO: 1293628 - RNA, 19 nt, Homo sapiens
  misc_RNA (1)...(19): siRNA sense strand
aaacagauaucaggauuug

SEQ ID NO: 1293629 - RNA, 19 nt, Homo sapiens
  misc_RNA (1)...(19): siRNA sense strand
cuauggagcucauugguaa

SEQ ID NO: 1293630 - RNA, 19 nt, Homo sapiens
  misc_RNA (1)...(19): siRNA sense strand
aaacacaccuuuagugaag

SEQ ID NO: 1293631 - RNA, 19 nt, Homo sapiens
  misc_RNA (1)...(19): siRNA sense strand
gaacuuaaaggaucaguag

SEQ ID NO: 1293632 - RNA, 19 nt, Homo sapiens
  misc_RNA (1)...(19): siRNA sense strand
gaaaacagauaucaggauu

SEQ ID NO: 1293633 - RNA, 19 nt, Homo sapiens
  misc_RNA (1)...(19): siRNA sense strand
uaaaggaucaguagcaauu

SEQ ID NO: 1293634 - RNA, 19 nt, Homo sapiens
  misc_RNA (1)...(19): siRNA sense strand
aaaugggacuuacgaguuu

SEQ ID NO: 1293635 - RNA, 19 nt, Homo sapiens
  misc_RNA (1)...(19): siRNA sense strand
guuaucagaugcacuuuau

SEQ ID NO: 1293636 - RNA, 19 nt, Homo sapiens
  misc_RNA (1)...(19): siRNA sense strand
gagcugaauaugccacuua

SEQ ID NO: 1293637 - RNA, 19 nt, Homo sapiens
  misc_RNA (1)...(19): siRNA sense strand
ugagauuggugaacgagua

SEQ ID NO: 1293638 - RNA, 19 nt, Homo sapiens
  misc_RNA (1)...(19): siRNA sense strand
gugaacgaguagauuauaa

SEQ ID NO: 1293639 - RNA, 19 nt, Homo sapiens
  misc_RNA (1)...(19): siRNA sense strand
gagagagcacgauuuauug

SEQ ID NO: 1293640 - RNA, 19 nt, Homo sapiens
  misc_RNA (1)...(19): siRNA sense strand
caaaugggacuuacgaguu

SEQ ID NO: 1293641 - RNA, 19 nt, Homo sapiens
  misc_RNA (1)...(19): siRNA sense strand
ggucauugcugugauuguu

SEQ ID NO: 1293642 - RNA, 19 nt, Homo sapiens
  misc_RNA (1)...(19): siRNA sense strand
ccagauccauuuucacuua

SEQ ID NO: 1293643 - RNA, 19 nt, Homo sapiens
  misc_RNA (1)...(19): siRNA sense strand
gaaggaauacuugacaguu

SEQ ID NO: 1293644 - RNA, 19 nt, Homo sapiens
  misc_RNA (1)...(19): siRNA sense strand
aaggaauacuugacaguuu

SEQ ID NO: 1293645 - RNA, 19 nt, Homo sapiens
  misc_RNA (1)...(19): siRNA sense strand
ucagaugacgccuguuaua

SEQ ID NO: 1293646 - RNA, 19 nt, Homo sapiens
  misc_RNA (1)...(19): siRNA sense strand
gaaaacacaccuuuaguga

SEQ ID NO: 1293647 - RNA, 19 nt, Homo sapiens
  misc_RNA (1)...(19): siRNA sense strand
gaugacgccuguuauagag

SEQ ID NO: 1293648 - RNA, 19 nt, Homo sapiens
  misc_RNA (1)...(19): siRNA sense strand
gagaaacauguccauauau

SEQ ID NO: 1293649 - RNA, 19 nt, Homo sapiens
  misc_RNA (1)...(19): siRNA sense strand
ccacuuaccagacuaaauc

SEQ ID NO: 1293650 - RNA, 19 nt, Homo sapiens
  misc_RNA (1)...(19): siRNA sense strand
acgaguagauuauaagugu

SEQ ID NO: 1293651 - RNA, 19 nt, Homo sapiens
  misc_RNA (1)...(19): siRNA sense strand
cuacaaagcaacaguuaug

SEQ ID NO: 1293652 - RNA, 19 nt, Homo sapiens
  misc_RNA (1)...(19): siRNA sense strand
ccaccaacauuugaagcua

SEQ ID NO: 1293653 - RNA, 19 nt, Homo sapiens
  misc_RNA (1)...(19): siRNA sense strand
uauacgggauccuuuaaau

SEQ ID NO: 1293654 - RNA, 19 nt, Homo sapiens
  misc_RNA (1)...(19): siRNA sense strand
cgaguuugguuaucagaug

SEQ ID NO: 1293655 - RNA, 19 nt, Homo sapiens
  misc_RNA (1)...(19): siRNA sense strand
gaacgaguagauuauaagu

SEQ ID NO: 1293656 - RNA, 19 nt, Homo sapiens
  misc_RNA (1)...(19): siRNA sense strand
gugaggagccaccaacauu

SEQ ID NO: 1293657 - RNA, 19 nt, Homo sapiens
  misc_RNA (1)...(19): siRNA sense strand
gauggcagcgacacaauug

SEQ ID NO: 1293658 - RNA, 19 nt, Homo sapiens
  misc_RNA (1)...(19): siRNA sense strand
ucucagaugacgccuguua

SEQ ID NO: 1293659 - RNA, 19 nt, Homo sapiens
  misc_RNA (1)...(19): siRNA sense strand
gaggagccaccaacauuug

SEQ ID NO: 1293660 - RNA, 19 nt, Homo sapiens
  misc_RNA (1)...(19): siRNA sense strand
gcuauggagcucauuggua

SEQ ID NO: 1293661 - RNA, 19 nt, Homo sapiens
  misc_RNA (1)...(19): siRNA sense strand
acacaccuuuagugaagua

SEQ ID NO: 1293662 - RNA, 19 nt, Homo sapiens
  misc_RNA (1)...(19): siRNA sense strand
uagagaaacauguccauau

SEQ ID NO: 1293663 - RNA, 19 nt, Homo sapiens
  misc_RNA (1)...(19): siRNA sense strand
ggugaacgaguagauuaua

SEQ ID NO: 1293664 - RNA, 19 nt, Homo sapiens
  misc_RNA (1)...(19): siRNA sense strand
gaaguagaaguauuugagu

SEQ ID NO: 1293665 - RNA, 19 nt, Homo sapiens
  misc_RNA (1)...(19): siRNA sense strand
gaaacauguccauauauac

SEQ ID NO: 1293666 - RNA, 19 nt, Homo sapiens
  misc_RNA (1)...(19): siRNA sense strand
ugacgccuguuauagagaa

SEQ ID NO: 1293667 - RNA, 19 nt, Homo sapiens
  misc_RNA (1)...(19): siRNA sense strand
cgaguagauuauaagugua

SEQ ID NO: 1293668 - RNA, 19 nt, Homo sapiens
  misc_RNA (1)...(19): siRNA sense strand
gcacuuuauuuguaaugag

SEQ ID NO: 1293669 - RNA, 19 nt, Homo sapiens
  misc_RNA (1)...(19): siRNA sense strand
guagaaguauuugaguauc

SEQ ID NO: 1293670 - RNA, 19 nt, Homo sapiens
  misc_RNA (1)...(19): siRNA sense strand
guauuugaguaucuugaug

SEQ ID NO: 1293671 - RNA, 19 nt, Homo sapiens
  misc_RNA (1)...(19): siRNA sense strand
aggaauacuugacaguuug

SEQ ID NO: 1293672 - RNA, 19 nt, Homo sapiens
  misc_RNA (1)...(19): siRNA sense strand
ccaaaacccuacuaugaga

SEQ ID NO: 1293673 - RNA, 19 nt, Homo sapiens
  misc_RNA (1)...(19): siRNA sense strand
aguguaaaguggucaaaug

SEQ ID NO: 1293674 - RNA, 19 nt, Homo sapiens
  misc_RNA (1)...(19): siRNA sense strand
ccacccauacuauuuguga

SEQ ID NO: 1293675 - RNA, 19 nt, Homo sapiens
  misc_RNA (1)...(19): siRNA sense strand
uuggagagagcacgauuua

SEQ ID NO: 1293676 - RNA, 19 nt, Homo sapiens
  misc_RNA (1)...(19): siRNA sense strand
gguuaucagaugcacuuua

SEQ ID NO: 1293677 - RNA, 19 nt, Homo sapiens
  misc_RNA (1)...(19): siRNA sense strand
caccaacauuugaagcuau

SEQ ID NO: 1293678 - RNA, 19 nt, Homo sapiens
  misc_RNA (1)...(19): siRNA sense strand
ugaggagccaccaacauuu

SEQ ID NO: 1293679 - RNA, 19 nt, Homo sapiens
  misc_RNA (1)...(19): siRNA sense strand
ggaaggaauacuugacagu

SEQ ID NO: 1293680 - RNA, 19 nt, Homo sapiens
  misc_RNA (1)...(19): siRNA sense strand
gaggaaggaauacuugaca

SEQ ID NO: 1293681 - RNA, 19 nt, Homo sapiens
  misc_RNA (1)...(19): siRNA sense strand
ugaguaucuugaugcagua

SEQ ID NO: 1293682 - RNA, 19 nt, Homo sapiens
  misc_RNA (1)...(19): siRNA sense strand
caccuuuagugaaguagaa

SEQ ID NO: 1293683 - RNA, 19 nt, Homo sapiens
  misc_RNA (1)...(19): siRNA sense strand
acagauaucaggauuugga

SEQ ID NO: 1293684 - RNA, 19 nt, Homo sapiens
  misc_RNA (1)...(19): siRNA sense strand
ucauugcugugauuguuau

SEQ ID NO: 1293685 - RNA, 19 nt, Homo sapiens
  misc_RNA (1)...(19): siRNA sense strand
ucagaugcacuuuauuugu

SEQ ID NO: 1293686 - RNA, 19 nt, Homo sapiens
  misc_RNA (1)...(19): siRNA sense strand
gugcugcuccagaguguaa

SEQ ID NO: 1293687 - RNA, 19 nt, Homo sapiens
  misc_RNA (1)...(19): siRNA sense strand
ggaaaacacaccuuuagug

SEQ ID NO: 1293688 - RNA, 19 nt, Homo sapiens
  misc_RNA (1)...(19): siRNA sense strand
aaggaucaguagcaauuug

SEQ ID NO: 1293689 - RNA, 19 nt, Homo sapiens
  misc_RNA (1)...(19): siRNA sense strand
uauauacgggauccuuuaa

SEQ ID NO: 1293690 - RNA, 19 nt, Homo sapiens
  misc_RNA (1)...(19): siRNA sense strand
ugaaguagaaguauuugag

SEQ ID NO: 1293691 - RNA, 19 nt, Homo sapiens
  misc_RNA (1)...(19): siRNA sense strand
cuugacaguuuggauguuu

SEQ ID NO: 1293692 - RNA, 19 nt, Homo sapiens
  misc_RNA (1)...(19): siRNA sense strand
cauauauacgggauccuuu

SEQ ID NO: 1293693 - RNA, 19 nt, Homo sapiens
  misc_RNA (1)...(19): siRNA sense strand
auauauacgggauccuuua

SEQ ID NO: 1293694 - RNA, 19 nt, Homo sapiens
  misc_RNA (1)...(19): siRNA sense strand
cuuaaaggaucaguagcaa

SEQ ID NO: 1293695 - RNA, 19 nt, Homo sapiens
  misc_RNA (1)...(19): siRNA sense strand
uaaaccugaggaaggaaua

SEQ ID NO: 1293696 - RNA, 19 nt, Homo sapiens
  misc_RNA (1)...(19): siRNA sense strand
agaugacgccuguuauaga

SEQ ID NO: 1293697 - RNA, 19 nt, Homo sapiens
  misc_RNA (1)...(19): siRNA sense strand
ugugauuguuauugccaua

SEQ ID NO: 1293698 - RNA, 19 nt, Homo sapiens
  misc_RNA (1)...(19): siRNA sense strand
gagagcacgauuuauugug

SEQ ID NO: 1293699 - RNA, 19 nt, Homo sapiens
  misc_RNA (1)...(19): siRNA sense strand
gaaguauuugaguaucuug

SEQ ID NO: 1293700 - RNA, 19 nt, Homo sapiens
  misc_RNA (1)...(19): siRNA sense strand
ggcuaccugucucagauga

SEQ ID NO: 1293701 - RNA, 19 nt, Homo sapiens
  misc_RNA (1)...(19): siRNA sense strand
gauaucaggauuuggaaaa

SEQ ID NO: 1293702 - RNA, 19 nt, Homo sapiens
  misc_RNA (1)...(19): siRNA sense strand
ccucuugccacccauacua

SEQ ID NO: 1293703 - RNA, 19 nt, Homo sapiens
  misc_RNA (1)...(19): siRNA sense strand
ccaugguguugcugcugua

SEQ ID NO: 1293704 - RNA, 19 nt, Homo sapiens
  misc_RNA (1)...(19): siRNA sense strand
cagaugacgccuguuauag

SEQ ID NO: 1293705 - RNA, 19 nt, Homo sapiens
  misc_RNA (1)...(19): siRNA sense strand
cagaugguggagcugaaua

SEQ ID NO: 1293706 - RNA, 19 nt, Homo sapiens
  misc_RNA (1)...(19): siRNA sense strand
uuggugaacgaguagauua

SEQ ID NO: 1293707 - RNA, 19 nt, Homo sapiens
  misc_RNA (1)...(19): siRNA sense strand
gucauugcugugauuguua

SEQ ID NO: 1293708 - RNA, 19 nt, Homo sapiens
  misc_RNA (1)...(19): siRNA sense strand
ggagccaccaacauuugaa

SEQ ID NO: 1293709 - RNA, 19 nt, Homo sapiens
  misc_RNA (1)...(19): siRNA sense strand
gcgcuuuccuggguugcuu

SEQ ID NO: 1293710 - RNA, 19 nt, Homo sapiens
  misc_RNA (1)...(19): siRNA sense strand
uacuacaaagcaacaguua

SEQ ID NO: 1293711 - RNA, 19 nt, Homo sapiens
  misc_RNA (1)...(19): siRNA sense strand
cuugaugcaguaacuuaua

SEQ ID NO: 1293712 - RNA, 19 nt, Homo sapiens
  misc_RNA (1)...(19): siRNA sense strand
aaacauguccauauauacg

SEQ ID NO: 1293713 - RNA, 19 nt, Homo sapiens
  misc_RNA (1)...(19): siRNA sense strand
guguaaaguggucaaaugu

SEQ ID NO: 1293714 - RNA, 19 nt, Homo sapiens
  misc_RNA (1)...(19): siRNA sense strand
cuuacgaguuugguuauca

SEQ ID NO: 1293715 - RNA, 19 nt, Homo sapiens
  misc_RNA (1)...(19): siRNA sense strand
uacgggauccuuuaaaugg

SEQ ID NO: 1293716 - RNA, 19 nt, Homo sapiens
  misc_RNA (1)...(19): siRNA sense strand
gcagaugguggagcugaau

SEQ ID NO: 1293717 - RNA, 19 nt, Homo sapiens
  misc_RNA (1)...(19): siRNA sense strand
aaccaaaacccuacuauga

SEQ ID NO: 1293718 - RNA, 19 nt, Homo sapiens
  misc_RNA (1)...(19): siRNA sense strand
cccaauaugugaaaagguu

SEQ ID NO: 1293719 - RNA, 19 nt, Homo sapiens
  misc_RNA (1)...(19): siRNA sense strand
ggagcugaauaugccacuu

SEQ ID NO: 1293720 - RNA, 19 nt, Homo sapiens
  misc_RNA (1)...(19): siRNA sense strand
cgauggcagcgacacaauu

SEQ ID NO: 1293721 - RNA, 19 nt, Homo sapiens
  misc_RNA (1)...(19): siRNA sense strand
gauccauuuucacuuauug

SEQ ID NO: 1293722 - RNA, 19 nt, Homo sapiens
  misc_RNA (1)...(19): siRNA sense strand
uugaugcaguaacuuauag

SEQ ID NO: 1293723 - RNA, 19 nt, Homo sapiens
  misc_RNA (1)...(19): siRNA sense strand
guaucuugaugcaguaacu

SEQ ID NO: 1293724 - RNA, 19 nt, Homo sapiens
  misc_RNA (1)...(19): siRNA sense strand
ggagagagcacgauuuauu

SEQ ID NO: 1293725 - RNA, 19 nt, Homo sapiens
  misc_RNA (1)...(19): siRNA sense strand
agagaaacauguccauaua

SEQ ID NO: 1293726 - RNA, 19 nt, Homo sapiens
  misc_RNA (1)...(19): siRNA sense strand
cagaugcacuuuauuugua

SEQ ID NO: 1293727 - RNA, 19 nt, Homo sapiens
  misc_RNA (1)...(19): siRNA sense strand
ggacuuacgaguuugguua

SEQ ID NO: 1293728 - RNA, 19 nt, Homo sapiens
  misc_RNA (1)...(19): siRNA sense strand
aaacagauaucaggauuug

SEQ ID NO: 1293729 - RNA, 19 nt, Homo sapiens
  misc_RNA (1)...(19): siRNA sense strand
cuauggagcucauugguaa

SEQ ID NO: 1293730 - RNA, 19 nt, Homo sapiens
  misc_RNA (1)...(19): siRNA sense strand
aaacacaccuuuagugaag

SEQ ID NO: 1293731 - RNA, 19 nt, Homo sapiens
  misc_RNA (1)...(19): siRNA sense strand
gaacuuaaaggaucaguag

SEQ ID NO: 1293732 - RNA, 19 nt, Homo sapiens
  misc_RNA (1)...(19): siRNA sense strand
gaaaacagauaucaggauu

SEQ ID NO: 1293733 - RNA, 19 nt, Homo sapiens
  misc_RNA (1)...(19): siRNA sense strand
uaaaggaucaguagcaauu

SEQ ID NO: 1293734 - RNA, 19 nt, Homo sapiens
  misc_RNA (1)...(19): siRNA sense strand
aaaugggacuuacgaguuu

SEQ ID NO: 1293735 - RNA, 19 nt, Homo sapiens
  misc_RNA (1)...(19): siRNA sense strand
guuaucagaugcacuuuau

SEQ ID NO: 1293736 - RNA, 19 nt, Homo sapiens
  misc_RNA (1)...(19): siRNA sense strand
ugagauuggugaacgagua

SEQ ID NO: 1293737 - RNA, 19 nt, Homo sapiens
  misc_RNA (1)...(19): siRNA sense strand
gugaacgaguagauuauaa

SEQ ID NO: 1293738 - RNA, 19 nt, Homo sapiens
  misc_RNA (1)...(19): siRNA sense strand
gagagagcacgauuuauug

SEQ ID NO: 1293739 - RNA, 19 nt, Homo sapiens
  misc_RNA (1)...(19): siRNA sense strand
caaaugggacuuacgaguu

SEQ ID NO: 1293740 - RNA, 19 nt, Homo sapiens
  misc_RNA (1)...(19): siRNA sense strand
ggucauugcugugauuguu

SEQ ID NO: 1293741 - RNA, 19 nt, Homo sapiens
  misc_RNA (1)...(19): siRNA sense strand
ccagauccauuuucacuua

SEQ ID NO: 1293742 - RNA, 19 nt, Homo sapiens
  misc_RNA (1)...(19): siRNA sense strand
gaaggaauacuugacaguu

SEQ ID NO: 1293743 - RNA, 19 nt, Homo sapiens
  misc_RNA (1)...(19): siRNA sense strand
aaggaauacuugacaguuu

SEQ ID NO: 1293744 - RNA, 19 nt, Homo sapiens
  misc_RNA (1)...(19): siRNA sense strand
ucagaugacgccuguuaua

SEQ ID NO: 1293745 - RNA, 19 nt, Homo sapiens
  misc_RNA (1)...(19): siRNA sense strand
gaaaacacaccuuuaguga

SEQ ID NO: 1293746 - RNA, 19 nt, Homo sapiens
  misc_RNA (1)...(19): siRNA sense strand
gaugacgccuguuauagag

SEQ ID NO: 1293747 - RNA, 19 nt, Homo sapiens
  misc_RNA (1)...(19): siRNA sense strand
gagaaacauguccauauau

SEQ ID NO: 1293748 - RNA, 19 nt, Homo sapiens
  misc_RNA (1)...(19): siRNA sense strand
acgaguagauuauaagugu

SEQ ID NO: 1293749 - RNA, 19 nt, Homo sapiens
  misc_RNA (1)...(19): siRNA sense strand
cuacaaagcaacaguuaug

SEQ ID NO: 1293750 - RNA, 19 nt, Homo sapiens
  misc_RNA (1)...(19): siRNA sense strand
ccaccaacauuugaagcua

SEQ ID NO: 1293751 - RNA, 19 nt, Homo sapiens
  misc_RNA (1)...(19): siRNA sense strand
uauacgggauccuuuaaau

SEQ ID NO: 1293752 - RNA, 19 nt, Homo sapiens
  misc_RNA (1)...(19): siRNA sense strand
cgaguuugguuaucagaug

SEQ ID NO: 1293753 - RNA, 19 nt, Homo sapiens
  misc_RNA (1)...(19): siRNA sense strand
gaacgaguagauuauaagu

SEQ ID NO: 1293754 - RNA, 19 nt, Homo sapiens
  misc_RNA (1)...(19): siRNA sense strand
gugaggagccaccaacauu

SEQ ID NO: 1293755 - RNA, 19 nt, Homo sapiens
  misc_RNA (1)...(19): siRNA sense strand
gauggcagcgacacaauug

SEQ ID NO: 1293756 - RNA, 19 nt, Homo sapiens
  misc_RNA (1)...(19): siRNA sense strand
gcuauggagcucauuggua

SEQ ID NO: 1293757 - RNA, 19 nt, Homo sapiens
  misc_RNA (1)...(19): siRNA sense strand
gaggagccaccaacauuug

SEQ ID NO: 1293758 - RNA, 19 nt, Homo sapiens
  misc_RNA (1)...(19): siRNA sense strand
acacaccuuuagugaagua

SEQ ID NO: 1293759 - RNA, 19 nt, Homo sapiens
  misc_RNA (1)...(19): siRNA sense strand
ucucagaugacgccuguua

SEQ ID NO: 1293760 - RNA, 19 nt, Homo sapiens
  misc_RNA (1)...(19): siRNA sense strand
uagagaaacauguccauau

SEQ ID NO: 1293761 - RNA, 19 nt, Homo sapiens
  misc_RNA (1)...(19): siRNA sense strand
guuccaaagugucuuaaag

SEQ ID NO: 1293762 - RNA, 19 nt, Homo sapiens
  misc_RNA (1)...(19): siRNA sense strand
ggugaacgaguagauuaua

SEQ ID NO: 1293763 - RNA, 19 nt, Homo sapiens
  misc_RNA (1)...(19): siRNA sense strand
gaaguagaaguauuugagu

SEQ ID NO: 1293764 - RNA, 19 nt, Homo sapiens
  misc_RNA (1)...(19): siRNA sense strand
gaaacauguccauauauac

SEQ ID NO: 1293765 - RNA, 19 nt, Homo sapiens
  misc_RNA (1)...(19): siRNA sense strand
ugacgccuguuauagagaa

SEQ ID NO: 1293766 - RNA, 19 nt, Homo sapiens
  misc_RNA (1)...(19): siRNA sense strand
cgaguagauuauaagugua

SEQ ID NO: 1293767 - RNA, 19 nt, Homo sapiens
  misc_RNA (1)...(19): siRNA sense strand
gcacuuuauuuguaaugag

SEQ ID NO: 1293768 - RNA, 19 nt, Homo sapiens
  misc_RNA (1)...(19): siRNA sense strand
guagaaguauuugaguauc

SEQ ID NO: 1293769 - RNA, 19 nt, Homo sapiens
  misc_RNA (1)...(19): siRNA sense strand
guauuugaguaucuugaug

SEQ ID NO: 1293770 - RNA, 19 nt, Homo sapiens
  misc_RNA (1)...(19): siRNA sense strand
aggaauacuugacaguuug

SEQ ID NO: 1293771 - RNA, 19 nt, Homo sapiens
  misc_RNA (1)...(19): siRNA sense strand
ccaaaacccuacuaugaga

SEQ ID NO: 1293772 - RNA, 19 nt, Homo sapiens
  misc_RNA (1)...(19): siRNA sense strand
aguguaaaguggucaaaug

SEQ ID NO: 1293773 - RNA, 19 nt, Homo sapiens
  misc_RNA (1)...(19): siRNA sense strand
ccacccauacuauuuguga

SEQ ID NO: 1293774 - RNA, 19 nt, Homo sapiens
  misc_RNA (1)...(19): siRNA sense strand
caccaacauuugaagcuau

SEQ ID NO: 1293775 - RNA, 19 nt, Homo sapiens
  misc_RNA (1)...(19): siRNA sense strand
uuggagagagcacgauuua

SEQ ID NO: 1293776 - RNA, 19 nt, Homo sapiens
  misc_RNA (1)...(19): siRNA sense strand
gguuaucagaugcacuuua

SEQ ID NO: 1293777 - RNA, 19 nt, Homo sapiens
  misc_RNA (1)...(19): siRNA sense strand
ugaggagccaccaacauuu

SEQ ID NO: 1293778 - RNA, 19 nt, Homo sapiens
  misc_RNA (1)...(19): siRNA sense strand
ggaaggaauacuugacagu

SEQ ID NO: 1293779 - RNA, 19 nt, Homo sapiens
  misc_RNA (1)...(19): siRNA sense strand
gaggaaggaauacuugaca

SEQ ID NO: 1293780 - RNA, 19 nt, Homo sapiens
  misc_RNA (1)...(19): siRNA sense strand
ccaguuccaaagugucuua

SEQ ID NO: 1293781 - RNA, 19 nt, Homo sapiens
  misc_RNA (1)...(19): siRNA sense strand
ugaguaucuugaugcagua

SEQ ID NO: 1293782 - RNA, 19 nt, Homo sapiens
  misc_RNA (1)...(19): siRNA sense strand
caccuuuagugaaguagaa

SEQ ID NO: 1293783 - RNA, 19 nt, Homo sapiens
  misc_RNA (1)...(19): siRNA sense strand
acagauaucaggauuugga

SEQ ID NO: 1293784 - RNA, 19 nt, Homo sapiens
  misc_RNA (1)...(19): siRNA sense strand
ucauugcugugauuguuau

SEQ ID NO: 1293785 - RNA, 19 nt, Homo sapiens
  misc_RNA (1)...(19): siRNA sense strand
ucagaugcacuuuauuugu

SEQ ID NO: 1293786 - RNA, 19 nt, Homo sapiens
  misc_RNA (1)...(19): siRNA sense strand
gugcugcuccagaguguaa

SEQ ID NO: 1293787 - RNA, 19 nt, Homo sapiens
  misc_RNA (1)...(19): siRNA sense strand
ggaaaacacaccuuuagug

SEQ ID NO: 1293788 - RNA, 19 nt, Homo sapiens
  misc_RNA (1)...(19): siRNA sense strand
aaggaucaguagcaauuug

SEQ ID NO: 1293789 - RNA, 19 nt, Homo sapiens
  misc_RNA (1)...(19): siRNA sense strand
uauauacgggauccuuuaa

SEQ ID NO: 1293790 - RNA, 19 nt, Homo sapiens
  misc_RNA (1)...(19): siRNA sense strand
ugaaguagaaguauuugag

SEQ ID NO: 1293791 - RNA, 19 nt, Homo sapiens
  misc_RNA (1)...(19): siRNA sense strand
cuugacaguuuggauguuu

SEQ ID NO: 1293792 - RNA, 19 nt, Homo sapiens
  misc_RNA (1)...(19): siRNA sense strand
cauauauacgggauccuuu

SEQ ID NO: 1293793 - RNA, 19 nt, Homo sapiens
  misc_RNA (1)...(19): siRNA sense strand
auauauacgggauccuuua

SEQ ID NO: 1293794 - RNA, 19 nt, Homo sapiens
  misc_RNA (1)...(19): siRNA sense strand
cuuaaaggaucaguagcaa

SEQ ID NO: 1293795 - RNA, 19 nt, Homo sapiens
  misc_RNA (1)...(19): siRNA sense strand
uaaaccugaggaaggaaua

SEQ ID NO: 1293796 - RNA, 19 nt, Homo sapiens
  misc_RNA (1)...(19): siRNA sense strand
agaugacgccuguuauaga

SEQ ID NO: 1293797 - RNA, 19 nt, Homo sapiens
  misc_RNA (1)...(19): siRNA sense strand
ugugauuguuauugccaua

SEQ ID NO: 1293798 - RNA, 19 nt, Homo sapiens
  misc_RNA (1)...(19): siRNA sense strand
gagagcacgauuuauugug

SEQ ID NO: 1293799 - RNA, 19 nt, Homo sapiens
  misc_RNA (1)...(19): siRNA sense strand
gaaguauuugaguaucuug

SEQ ID NO: 1293800 - RNA, 19 nt, Homo sapiens
  misc_RNA (1)...(19): siRNA sense strand
ggcuaccugucucagauga

SEQ ID NO: 1293801 - RNA, 19 nt, Homo sapiens
  misc_RNA (1)...(19): siRNA sense strand
gauaucaggauuuggaaaa

SEQ ID NO: 1293802 - RNA, 19 nt, Homo sapiens
  misc_RNA (1)...(19): siRNA sense strand
ccucuugccacccauacua

SEQ ID NO: 1293803 - RNA, 19 nt, Homo sapiens
  misc_RNA (1)...(19): siRNA sense strand
ccaugguguugcugcugua

SEQ ID NO: 1293804 - RNA, 19 nt, Homo sapiens
  misc_RNA (1)...(19): siRNA sense strand
cagaugacgccuguuauag

SEQ ID NO: 1293805 - RNA, 19 nt, Homo sapiens
  misc_RNA (1)...(19): siRNA sense strand
uuggugaacgaguagauua

SEQ ID NO: 1293806 - RNA, 19 nt, Homo sapiens
  misc_RNA (1)...(19): siRNA sense strand
gucauugcugugauuguua

SEQ ID NO: 1293807 - RNA, 19 nt, Homo sapiens
  misc_RNA (1)...(19): siRNA sense strand
ggagccaccaacauuugaa

SEQ ID NO: 1293808 - RNA, 19 nt, Homo sapiens
  misc_RNA (1)...(19): siRNA sense strand
gcgcuuuccuggguugcuu

SEQ ID NO: 1293809 - RNA, 19 nt, Homo sapiens
  misc_RNA (1)...(19): siRNA sense strand
uacuacaaagcaacaguua

SEQ ID NO: 1293810 - RNA, 19 nt, Homo sapiens
  misc_RNA (1)...(19): siRNA sense strand
cuugaugcaguaacuuaua

SEQ ID NO: 1293811 - RNA, 19 nt, Homo sapiens
  misc_RNA (1)...(19): siRNA sense strand
aaacauguccauauauacg

SEQ ID NO: 1293812 - RNA, 19 nt, Homo sapiens
  misc_RNA (1)...(19): siRNA sense strand
guguaaaguggucaaaugu

SEQ ID NO: 1293813 - RNA, 19 nt, Homo sapiens
  misc_RNA (1)...(19): siRNA sense strand
cuuacgaguuugguuauca

SEQ ID NO: 1293814 - RNA, 19 nt, Homo sapiens
  misc_RNA (1)...(19): siRNA sense strand
uacgggauccuuuaaaugg

SEQ ID NO: 1293815 - RNA, 19 nt, Homo sapiens
  misc_RNA (1)...(19): siRNA sense strand
aaccaaaacccuacuauga

SEQ ID NO: 1293816 - RNA, 19 nt, Homo sapiens
  misc_RNA (1)...(19): siRNA sense strand
cccaauaugugaaaagguu

SEQ ID NO: 1293817 - RNA, 19 nt, Homo sapiens
  misc_RNA (1)...(19): siRNA sense strand
cgauggcagcgacacaauu

SEQ ID NO: 1293818 - RNA, 19 nt, Homo sapiens
  misc_RNA (1)...(19): siRNA sense strand
gauccauuuucacuuauug

SEQ ID NO: 1293819 - RNA, 19 nt, Homo sapiens
  misc_RNA (1)...(19): siRNA sense strand
uugaugcaguaacuuauag

SEQ ID NO: 1293820 - RNA, 19 nt, Homo sapiens
  misc_RNA (1)...(19): siRNA sense strand
guaucuugaugcaguaacu

SEQ ID NO: 1293821 - RNA, 19 nt, Homo sapiens
  misc_RNA (1)...(19): siRNA sense strand
caacauuugaagcuaugga

SEQ ID NO: 1293822 - RNA, 19 nt, Homo sapiens
  misc_RNA (1)...(19): siRNA sense strand
gagauuggugaacgaguag

SEQ ID NO: 1293823 - RNA, 19 nt, Homo sapiens
  misc_RNA (1)...(19): siRNA sense strand
ggagagagcacgauuuauu

SEQ ID NO: 1293824 - RNA, 19 nt, Homo sapiens
  misc_RNA (1)...(19): siRNA sense strand
agagaaacauguccauaua

SEQ ID NO: 1293825 - RNA, 19 nt, Homo sapiens
  misc_RNA (1)...(19): siRNA sense strand
cagaugcacuuuauuugua

SEQ ID NO: 1293826 - RNA, 19 nt, Homo sapiens
  misc_RNA (1)...(19): siRNA sense strand
ggacuuacgaguuugguua

SEQ ID NO: 1293827 - RNA, 19 nt, Homo sapiens
  misc_RNA (1)...(19): siRNA sense strand
aaacagauaucaggauuug

SEQ ID NO: 1293828 - RNA, 19 nt, Homo sapiens
  misc_RNA (1)...(19): siRNA sense strand
cuauggagcucauugguaa

SEQ ID NO: 1293829 - RNA, 19 nt, Homo sapiens
  misc_RNA (1)...(19): siRNA sense strand
aaacacaccuuuagugaag

SEQ ID NO: 1293830 - RNA, 19 nt, Homo sapiens
  misc_RNA (1)...(19): siRNA sense strand
gaacuuaaaggaucaguag

SEQ ID NO: 1293831 - RNA, 19 nt, Homo sapiens
  misc_RNA (1)...(19): siRNA sense strand
gaaaacagauaucaggauu

SEQ ID NO: 1293832 - RNA, 19 nt, Homo sapiens
  misc_RNA (1)...(19): siRNA sense strand
uaaaggaucaguagcaauu

SEQ ID NO: 1293833 - RNA, 19 nt, Homo sapiens
  misc_RNA (1)...(19): siRNA sense strand
aaaugggacuuacgaguuu

SEQ ID NO: 1293834 - RNA, 19 nt, Homo sapiens
  misc_RNA (1)...(19): siRNA sense strand
guuaucagaugcacuuuau

SEQ ID NO: 1293835 - RNA, 19 nt, Homo sapiens
  misc_RNA (1)...(19): siRNA sense strand
gagcugaauaugccacuua

SEQ ID NO: 1293836 - RNA, 19 nt, Homo sapiens
  misc_RNA (1)...(19): siRNA sense strand
gagcagagaggcugaauag

SEQ ID NO: 1293837 - RNA, 19 nt, Homo sapiens
  misc_RNA (1)...(19): siRNA sense strand
ugagauuggugaacgagua

SEQ ID NO: 1293838 - RNA, 19 nt, Homo sapiens
  misc_RNA (1)...(19): siRNA sense strand
gugaacgaguagauuauaa

SEQ ID NO: 1293839 - RNA, 19 nt, Homo sapiens
  misc_RNA (1)...(19): siRNA sense strand
gagagagcacgauuuauug

SEQ ID NO: 1293840 - RNA, 19 nt, Homo sapiens
  misc_RNA (1)...(19): siRNA sense strand
caaaugggacuuacgaguu

SEQ ID NO: 1293841 - RNA, 19 nt, Homo sapiens
  misc_RNA (1)...(19): siRNA sense strand
ggucauugcugugauuguu

SEQ ID NO: 1293842 - RNA, 19 nt, Homo sapiens
  misc_RNA (1)...(19): siRNA sense strand
ccagauccauuuucacuua

SEQ ID NO: 1293843 - RNA, 19 nt, Homo sapiens
  misc_RNA (1)...(19): siRNA sense strand
gaaggaauacuugacaguu

SEQ ID NO: 1293844 - RNA, 19 nt, Homo sapiens
  misc_RNA (1)...(19): siRNA sense strand
aaggaauacuugacaguuu

SEQ ID NO: 1293845 - RNA, 19 nt, Homo sapiens
  misc_RNA (1)...(19): siRNA sense strand
ucagaugacgccuguuaua

SEQ ID NO: 1293846 - RNA, 19 nt, Homo sapiens
  misc_RNA (1)...(19): siRNA sense strand
gaaaacacaccuuuaguga

SEQ ID NO: 1293847 - RNA, 19 nt, Homo sapiens
  misc_RNA (1)...(19): siRNA sense strand
gaugacgccuguuauagag

SEQ ID NO: 1293848 - RNA, 19 nt, Homo sapiens
  misc_RNA (1)...(19): siRNA sense strand
gagaaacauguccauauau

SEQ ID NO: 1293849 - RNA, 19 nt, Homo sapiens
  misc_RNA (1)...(19): siRNA sense strand
ccacuuaccagacuaaauc

SEQ ID NO: 1293850 - RNA, 19 nt, Homo sapiens
  misc_RNA (1)...(19): siRNA sense strand
acgaguagauuauaagugu

SEQ ID NO: 1293851 - RNA, 19 nt, Homo sapiens
  misc_RNA (1)...(19): siRNA sense strand
cuacaaagcaacaguuaug

SEQ ID NO: 1293852 - RNA, 19 nt, Homo sapiens
  misc_RNA (1)...(19): siRNA sense strand
ccaccaacauuugaagcua

SEQ ID NO: 1293853 - RNA, 19 nt, Homo sapiens
  misc_RNA (1)...(19): siRNA sense strand
uauacgggauccuuuaaau

SEQ ID NO: 1293854 - RNA, 19 nt, Homo sapiens
  misc_RNA (1)...(19): siRNA sense strand
cgaguuugguuaucagaug

SEQ ID NO: 1293855 - RNA, 19 nt, Homo sapiens
  misc_RNA (1)...(19): siRNA sense strand
gaacgaguagauuauaagu

SEQ ID NO: 1293856 - RNA, 19 nt, Homo sapiens
  misc_RNA (1)...(19): siRNA sense strand
gugaggagccaccaacauu

SEQ ID NO: 1293857 - RNA, 19 nt, Homo sapiens
  misc_RNA (1)...(19): siRNA sense strand
gauggcagcgacacaauug

SEQ ID NO: 1293858 - RNA, 19 nt, Homo sapiens
  misc_RNA (1)...(19): siRNA sense strand
ucucagaugacgccuguua

SEQ ID NO: 1293859 - RNA, 19 nt, Homo sapiens
  misc_RNA (1)...(19): siRNA sense strand
acacaccuuuagugaagua

SEQ ID NO: 1293860 - RNA, 19 nt, Homo sapiens
  misc_RNA (1)...(19): siRNA sense strand
gcuauggagcucauuggua

SEQ ID NO: 1293861 - RNA, 19 nt, Homo sapiens
  misc_RNA (1)...(19): siRNA sense strand
gaggagccaccaacauuug

SEQ ID NO: 1293862 - RNA, 19 nt, Homo sapiens
  misc_RNA (1)...(19): siRNA sense strand
uagagaaacauguccauau

SEQ ID NO: 1293863 - RNA, 19 nt, Homo sapiens
  misc_RNA (1)...(19): siRNA sense strand
ggugaacgaguagauuaua

SEQ ID NO: 1293864 - RNA, 19 nt, Homo sapiens
  misc_RNA (1)...(19): siRNA sense strand
gaaguagaaguauuugagu

SEQ ID NO: 1293865 - RNA, 19 nt, Homo sapiens
  misc_RNA (1)...(19): siRNA sense strand
gaaacauguccauauauac

SEQ ID NO: 1293866 - RNA, 19 nt, Homo sapiens
  misc_RNA (1)...(19): siRNA sense strand
ugacgccuguuauagagaa

SEQ ID NO: 1293867 - RNA, 19 nt, Homo sapiens
  misc_RNA (1)...(19): siRNA sense strand
cgaguagauuauaagugua

SEQ ID NO: 1293868 - RNA, 19 nt, Homo sapiens
  misc_RNA (1)...(19): siRNA sense strand
gcacuuuauuuguaaugag

SEQ ID NO: 1293869 - RNA, 19 nt, Homo sapiens
  misc_RNA (1)...(19): siRNA sense strand
guagaaguauuugaguauc

SEQ ID NO: 1293870 - RNA, 19 nt, Homo sapiens
  misc_RNA (1)...(19): siRNA sense strand
guauuugaguaucuugaug

SEQ ID NO: 1293871 - RNA, 19 nt, Homo sapiens
  misc_RNA (1)...(19): siRNA sense strand
aggaauacuugacaguuug

SEQ ID NO: 1293872 - RNA, 19 nt, Homo sapiens
  misc_RNA (1)...(19): siRNA sense strand
ccaaaacccuacuaugaga

SEQ ID NO: 1293873 - RNA, 19 nt, Homo sapiens
  misc_RNA (1)...(19): siRNA sense strand
aguguaaaguggucaaaug

SEQ ID NO: 1293874 - RNA, 19 nt, Homo sapiens
  misc_RNA (1)...(19): siRNA sense strand
ccacccauacuauuuguga

SEQ ID NO: 1293875 - RNA, 19 nt, Homo sapiens
  misc_RNA (1)...(19): siRNA sense strand
uuggagagagcacgauuua

SEQ ID NO: 1293876 - RNA, 19 nt, Homo sapiens
  misc_RNA (1)...(19): siRNA sense strand
gguuaucagaugcacuuua

SEQ ID NO: 1293877 - RNA, 19 nt, Homo sapiens
  misc_RNA (1)...(19): siRNA sense strand
caccaacauuugaagcuau

SEQ ID NO: 1293878 - RNA, 19 nt, Homo sapiens
  misc_RNA (1)...(19): siRNA sense strand
ugaggagccaccaacauuu

SEQ ID NO: 1293879 - RNA, 19 nt, Homo sapiens
  misc_RNA (1)...(19): siRNA sense strand
ggaaggaauacuugacagu

SEQ ID NO: 1293880 - RNA, 19 nt, Homo sapiens
  misc_RNA (1)...(19): siRNA sense strand
gaggaaggaauacuugaca

SEQ ID NO: 1293881 - RNA, 19 nt, Homo sapiens
  misc_RNA (1)...(19): siRNA sense strand
ugaguaucuugaugcagua

SEQ ID NO: 1293882 - RNA, 19 nt, Homo sapiens
  misc_RNA (1)...(19): siRNA sense strand
caccuuuagugaaguagaa

SEQ ID NO: 1293883 - RNA, 19 nt, Homo sapiens
  misc_RNA (1)...(19): siRNA sense strand
acagauaucaggauuugga

SEQ ID NO: 1293884 - RNA, 19 nt, Homo sapiens
  misc_RNA (1)...(19): siRNA sense strand
ucauugcugugauuguuau

SEQ ID NO: 1293885 - RNA, 19 nt, Homo sapiens
  misc_RNA (1)...(19): siRNA sense strand
ucagaugcacuuuauuugu

SEQ ID NO: 1293886 - RNA, 19 nt, Homo sapiens
  misc_RNA (1)...(19): siRNA sense strand
gugcugcuccagaguguaa

SEQ ID NO: 1293887 - RNA, 19 nt, Homo sapiens
  misc_RNA (1)...(19): siRNA sense strand
ggaaaacacaccuuuagug

SEQ ID NO: 1293888 - RNA, 19 nt, Homo sapiens
  misc_RNA (1)...(19): siRNA sense strand
aaggaucaguagcaauuug

SEQ ID NO: 1293889 - RNA, 19 nt, Homo sapiens
  misc_RNA (1)...(19): siRNA sense strand
uauauacgggauccuuuaa

SEQ ID NO: 1293890 - RNA, 19 nt, Homo sapiens
  misc_RNA (1)...(19): siRNA sense strand
ugaaguagaaguauuugag

SEQ ID NO: 1293891 - RNA, 19 nt, Homo sapiens
  misc_RNA (1)...(19): siRNA sense strand
cuugacaguuuggauguuu

SEQ ID NO: 1293892 - RNA, 19 nt, Homo sapiens
  misc_RNA (1)...(19): siRNA sense strand
cauauauacgggauccuuu

SEQ ID NO: 1293893 - RNA, 19 nt, Homo sapiens
  misc_RNA (1)...(19): siRNA sense strand
auauauacgggauccuuua

SEQ ID NO: 1293894 - RNA, 19 nt, Homo sapiens
  misc_RNA (1)...(19): siRNA sense strand
cuuaaaggaucaguagcaa

SEQ ID NO: 1293895 - RNA, 19 nt, Homo sapiens
  misc_RNA (1)...(19): siRNA sense strand
uaaaccugaggaaggaaua

SEQ ID NO: 1293896 - RNA, 19 nt, Homo sapiens
  misc_RNA (1)...(19): siRNA sense strand
agaugacgccuguuauaga

SEQ ID NO: 1293897 - RNA, 19 nt, Homo sapiens
  misc_RNA (1)...(19): siRNA sense strand
ugugauuguuauugccaua

SEQ ID NO: 1293898 - RNA, 19 nt, Homo sapiens
  misc_RNA (1)...(19): siRNA sense strand
gagagcacgauuuauugug

SEQ ID NO: 1293899 - RNA, 19 nt, Homo sapiens
  misc_RNA (1)...(19): siRNA sense strand
gaaguauuugaguaucuug

SEQ ID NO: 1293900 - RNA, 19 nt, Homo sapiens
  misc_RNA (1)...(19): siRNA sense strand
ggcuaccugucucagauga

SEQ ID NO: 1293901 - RNA, 19 nt, Homo sapiens
  misc_RNA (1)...(19): siRNA sense strand
gauaucaggauuuggaaaa

SEQ ID NO: 1293902 - RNA, 19 nt, Homo sapiens
  misc_RNA (1)...(19): siRNA sense strand
ccucuugccacccauacua

SEQ ID NO: 1293903 - RNA, 19 nt, Homo sapiens
  misc_RNA (1)...(19): siRNA sense strand
ccaugguguugcugcugua

SEQ ID NO: 1293904 - RNA, 19 nt, Homo sapiens
  misc_RNA (1)...(19): siRNA sense strand
cagaugacgccuguuauag

SEQ ID NO: 1293905 - RNA, 19 nt, Homo sapiens
  misc_RNA (1)...(19): siRNA sense strand
cagaugguggagcugaaua

SEQ ID NO: 1293906 - RNA, 19 nt, Homo sapiens
  misc_RNA (1)...(19): siRNA sense strand
gucauugcugugauuguua

SEQ ID NO: 1293907 - RNA, 19 nt, Homo sapiens
  misc_RNA (1)...(19): siRNA sense strand
ggagccaccaacauuugaa

SEQ ID NO: 1293908 - RNA, 19 nt, Homo sapiens
  misc_RNA (1)...(19): siRNA sense strand
uuggugaacgaguagauua

SEQ ID NO: 1293909 - RNA, 19 nt, Homo sapiens
  misc_RNA (1)...(19): siRNA sense strand
gcgcuuuccuggguugcuu

SEQ ID NO: 1293910 - RNA, 19 nt, Homo sapiens
  misc_RNA (1)...(19): siRNA sense strand
uacuacaaagcaacaguua

SEQ ID NO: 1293911 - RNA, 19 nt, Homo sapiens
  misc_RNA (1)...(19): siRNA sense strand
cuugaugcaguaacuuaua

SEQ ID NO: 1293912 - RNA, 19 nt, Homo sapiens
  misc_RNA (1)...(19): siRNA sense strand
aaacauguccauauauacg

SEQ ID NO: 1293913 - RNA, 19 nt, Homo sapiens
  misc_RNA (1)...(19): siRNA sense strand
guguaaaguggucaaaugu

SEQ ID NO: 1293914 - RNA, 19 nt, Homo sapiens
  misc_RNA (1)...(19): siRNA sense strand
cuuacgaguuugguuauca

SEQ ID NO: 1293915 - RNA, 19 nt, Homo sapiens
  misc_RNA (1)...(19): siRNA sense strand
uacgggauccuuuaaaugg

SEQ ID NO: 1293916 - RNA, 19 nt, Homo sapiens
  misc_RNA (1)...(19): siRNA sense strand
gcagaugguggagcugaau

SEQ ID NO: 1293917 - RNA, 19 nt, Homo sapiens
  misc_RNA (1)...(19): siRNA sense strand
aaccaaaacccuacuauga

SEQ ID NO: 1293918 - RNA, 19 nt, Homo sapiens
  misc_RNA (1)...(19): siRNA sense strand
uugaugcaguaacuuauag

SEQ ID NO: 1293919 - RNA, 19 nt, Homo sapiens
  misc_RNA (1)...(19): siRNA sense strand
ggagcugaauaugccacuu

SEQ ID NO: 1293920 - RNA, 19 nt, Homo sapiens
  misc_RNA (1)...(19): siRNA sense strand
caacauuugaagcuaugga

SEQ ID NO: 1293921 - RNA, 19 nt, Homo sapiens
  misc_RNA (1)...(19): siRNA sense strand
cgauggcagcgacacaauu

SEQ ID NO: 1293922 - RNA, 19 nt, Homo sapiens
  misc_RNA (1)...(19): siRNA sense strand
gauccauuuucacuuauug

SEQ ID NO: 1293923 - RNA, 19 nt, Homo sapiens
  misc_RNA (1)...(19): siRNA sense strand
ggagagagcacgauuuauu

SEQ ID NO: 1293924 - RNA, 19 nt, Homo sapiens
  misc_RNA (1)...(19): siRNA sense strand
agagaaacauguccauaua

SEQ ID NO: 1293925 - RNA, 19 nt, Homo sapiens
  misc_RNA (1)...(19): siRNA sense strand
cagaugcacuuuauuugua

SEQ ID NO: 1293926 - RNA, 19 nt, Homo sapiens
  misc_RNA (1)...(19): siRNA sense strand
ggacuuacgaguuugguua

SEQ ID NO: 1293927 - RNA, 19 nt, Homo sapiens
  misc_RNA (1)...(19): siRNA sense strand
aaacagauaucaggauuug

SEQ ID NO: 1293928 - RNA, 19 nt, Homo sapiens
  misc_RNA (1)...(19): siRNA sense strand
cuauggagcucauugguaa

SEQ ID NO: 1293929 - RNA, 19 nt, Homo sapiens
  misc_RNA (1)...(19): siRNA sense strand
aaacacaccuuuagugaag

SEQ ID NO: 1293930 - RNA, 19 nt, Homo sapiens
  misc_RNA (1)...(19): siRNA sense strand
gaacuuaaaggaucaguag

SEQ ID NO: 1293931 - RNA, 19 nt, Homo sapiens
  misc_RNA (1)...(19): siRNA sense strand
gaaaacagauaucaggauu

SEQ ID NO: 1293932 - RNA, 19 nt, Homo sapiens
  misc_RNA (1)...(19): siRNA sense strand
uaaaggaucaguagcaauu

SEQ ID NO: 1293933 - RNA, 19 nt, Homo sapiens
  misc_RNA (1)...(19): siRNA sense strand
aaaugggacuuacgaguuu

SEQ ID NO: 1293934 - RNA, 19 nt, Homo sapiens
  misc_RNA (1)...(19): siRNA sense strand
guuaucagaugcacuuuau

SEQ ID NO: 1293935 - RNA, 19 nt, Homo sapiens
  misc_RNA (1)...(19): siRNA sense strand
gagcugaauaugccacuua

SEQ ID NO: 1293936 - RNA, 19 nt, Homo sapiens
  misc_RNA (1)...(19): siRNA sense strand
ugagauuggugaacgagua

SEQ ID NO: 1293937 - RNA, 19 nt, Homo sapiens
  misc_RNA (1)...(19): siRNA sense strand
gugaacgaguagauuauaa

SEQ ID NO: 1293938 - RNA, 19 nt, Homo sapiens
  misc_RNA (1)...(19): siRNA sense strand
gagagagcacgauuuauug

SEQ ID NO: 1293939 - RNA, 19 nt, Homo sapiens
  misc_RNA (1)...(19): siRNA sense strand
caaaugggacuuacgaguu

SEQ ID NO: 1293940 - RNA, 19 nt, Homo sapiens
  misc_RNA (1)...(19): siRNA sense strand
ggucauugcugugauuguu

SEQ ID NO: 1293941 - RNA, 19 nt, Homo sapiens
  misc_RNA (1)...(19): siRNA sense strand
ccagauccauuuucacuua

SEQ ID NO: 1293942 - RNA, 19 nt, Homo sapiens
  misc_RNA (1)...(19): siRNA sense strand
gaaggaauacuugacaguu

SEQ ID NO: 1293943 - RNA, 19 nt, Homo sapiens
  misc_RNA (1)...(19): siRNA sense strand
aaggaauacuugacaguuu

SEQ ID NO: 1293944 - RNA, 19 nt, Homo sapiens
  misc_RNA (1)...(19): siRNA sense strand
ucagaugacgccuguuaua

SEQ ID NO: 1293945 - RNA, 19 nt, Homo sapiens
  misc_RNA (1)...(19): siRNA sense strand
gaaaacacaccuuuaguga

SEQ ID NO: 1293946 - RNA, 19 nt, Homo sapiens
  misc_RNA (1)...(19): siRNA sense strand
gaugacgccuguuauagag

SEQ ID NO: 1293947 - RNA, 19 nt, Homo sapiens
  misc_RNA (1)...(19): siRNA sense strand
gagaaacauguccauauau

SEQ ID NO: 1293948 - RNA, 19 nt, Homo sapiens
  misc_RNA (1)...(19): siRNA sense strand
ccacuuaccagacuaaauc

SEQ ID NO: 1293949 - RNA, 19 nt, Homo sapiens
  misc_RNA (1)...(19): siRNA sense strand
acgaguagauuauaagugu

SEQ ID NO: 1293950 - RNA, 19 nt, Homo sapiens
  misc_RNA (1)...(19): siRNA sense strand
cuacaaagcaacaguuaug

SEQ ID NO: 1293951 - RNA, 19 nt, Homo sapiens
  misc_RNA (1)...(19): siRNA sense strand
ccaccaacauuugaagcua

SEQ ID NO: 1293952 - RNA, 19 nt, Homo sapiens
  misc_RNA (1)...(19): siRNA sense strand
uauacgggauccuuuaaau

SEQ ID NO: 1293953 - RNA, 19 nt, Homo sapiens
  misc_RNA (1)...(19): siRNA sense strand
cgaguuugguuaucagaug

SEQ ID NO: 1293954 - RNA, 19 nt, Homo sapiens
  misc_RNA (1)...(19): siRNA sense strand
gaacgaguagauuauaagu

SEQ ID NO: 1293955 - RNA, 19 nt, Homo sapiens
  misc_RNA (1)...(19): siRNA sense strand
gugaggagccaccaacauu

SEQ ID NO: 1293956 - RNA, 19 nt, Homo sapiens
  misc_RNA (1)...(19): siRNA sense strand
gauggcagcgacacaauug

SEQ ID NO: 1293957 - RNA, 19 nt, Homo sapiens
  misc_RNA (1)...(19): siRNA sense strand
ucucagaugacgccuguua

SEQ ID NO: 1293958 - RNA, 19 nt, Homo sapiens
  misc_RNA (1)...(19): siRNA sense strand
gaggagccaccaacauuug

SEQ ID NO: 1293959 - RNA, 19 nt, Homo sapiens
  misc_RNA (1)...(19): siRNA sense strand
gcuauggagcucauuggua

SEQ ID NO: 1293960 - RNA, 19 nt, Homo sapiens
  misc_RNA (1)...(19): siRNA sense strand
acacaccuuuagugaagua

SEQ ID NO: 1293961 - RNA, 19 nt, Homo sapiens
  misc_RNA (1)...(19): siRNA sense strand
uagagaaacauguccauau

SEQ ID NO: 1293962 - RNA, 19 nt, Homo sapiens
  misc_RNA (1)...(19): siRNA sense strand
guuccaaagugucuuaaag

SEQ ID NO: 1293963 - RNA, 19 nt, Homo sapiens
  misc_RNA (1)...(19): siRNA sense strand
ggugaacgaguagauuaua

SEQ ID NO: 1293964 - RNA, 19 nt, Homo sapiens
  misc_RNA (1)...(19): siRNA sense strand
gaaguagaaguauuugagu

SEQ ID NO: 1293965 - RNA, 19 nt, Homo sapiens
  misc_RNA (1)...(19): siRNA sense strand
gaaacauguccauauauac

SEQ ID NO: 1293966 - RNA, 19 nt, Homo sapiens
  misc_RNA (1)...(19): siRNA sense strand
ugacgccuguuauagagaa

SEQ ID NO: 1293967 - RNA, 19 nt, Homo sapiens
  misc_RNA (1)...(19): siRNA sense strand
cgaguagauuauaagugua

SEQ ID NO: 1293968 - RNA, 19 nt, Homo sapiens
  misc_RNA (1)...(19): siRNA sense strand
gcacuuuauuuguaaugag

SEQ ID NO: 1293969 - RNA, 19 nt, Homo sapiens
  misc_RNA (1)...(19): siRNA sense strand
guagaaguauuugaguauc

SEQ ID NO: 1293970 - RNA, 19 nt, Homo sapiens
  misc_RNA (1)...(19): siRNA sense strand
guauuugaguaucuugaug

SEQ ID NO: 1293971 - RNA, 19 nt, Homo sapiens
  misc_RNA (1)...(19): siRNA sense strand
aggaauacuugacaguuug

SEQ ID NO: 1293972 - RNA, 19 nt, Homo sapiens
  misc_RNA (1)...(19): siRNA sense strand
ccaaaacccuacuaugaga

SEQ ID NO: 1293973 - RNA, 19 nt, Homo sapiens
  misc_RNA (1)...(19): siRNA sense strand
aguguaaaguggucaaaug

SEQ ID NO: 1293974 - RNA, 19 nt, Homo sapiens
  misc_RNA (1)...(19): siRNA sense strand
ccacccauacuauuuguga

SEQ ID NO: 1293975 - RNA, 19 nt, Homo sapiens
  misc_RNA (1)...(19): siRNA sense strand
uuggagagagcacgauuua

SEQ ID NO: 1293976 - RNA, 19 nt, Homo sapiens
  misc_RNA (1)...(19): siRNA sense strand
gguuaucagaugcacuuua

SEQ ID NO: 1293977 - RNA, 19 nt, Homo sapiens
  misc_RNA (1)...(19): siRNA sense strand
caccaacauuugaagcuau

SEQ ID NO: 1293978 - RNA, 19 nt, Homo sapiens
  misc_RNA (1)...(19): siRNA sense strand
ugaggagccaccaacauuu

SEQ ID NO: 1293979 - RNA, 19 nt, Homo sapiens
  misc_RNA (1)...(19): siRNA sense strand
ggaaggaauacuugacagu

SEQ ID NO: 1293980 - RNA, 19 nt, Homo sapiens
  misc_RNA (1)...(19): siRNA sense strand
gaggaaggaauacuugaca

SEQ ID NO: 1293981 - RNA, 19 nt, Homo sapiens
  misc_RNA (1)...(19): siRNA sense strand
ccaguuccaaagugucuua

SEQ ID NO: 1293982 - RNA, 19 nt, Homo sapiens
  misc_RNA (1)...(19): siRNA sense strand
ugaguaucuugaugcagua

SEQ ID NO: 1293983 - RNA, 19 nt, Homo sapiens
  misc_RNA (1)...(19): siRNA sense strand
caccuuuagugaaguagaa

SEQ ID NO: 1293984 - RNA, 19 nt, Homo sapiens
  misc_RNA (1)...(19): siRNA sense strand
acagauaucaggauuugga

SEQ ID NO: 1293985 - RNA, 19 nt, Homo sapiens
  misc_RNA (1)...(19): siRNA sense strand
ucauugcugugauuguuau

SEQ ID NO: 1293986 - RNA, 19 nt, Homo sapiens
  misc_RNA (1)...(19): siRNA sense strand
ucagaugcacuuuauuugu

SEQ ID NO: 1293987 - RNA, 19 nt, Homo sapiens
  misc_RNA (1)...(19): siRNA sense strand
gugcugcuccagaguguaa

SEQ ID NO: 1293988 - RNA, 19 nt, Homo sapiens
  misc_RNA (1)...(19): siRNA sense strand
ggaaaacacaccuuuagug

SEQ ID NO: 1293989 - RNA, 19 nt, Homo sapiens
  misc_RNA (1)...(19): siRNA sense strand
aaggaucaguagcaauuug

SEQ ID NO: 1293990 - RNA, 19 nt, Homo sapiens
  misc_RNA (1)...(19): siRNA sense strand
uauauacgggauccuuuaa

SEQ ID NO: 1293991 - RNA, 19 nt, Homo sapiens
  misc_RNA (1)...(19): siRNA sense strand
ugaaguagaaguauuugag

SEQ ID NO: 1293992 - RNA, 19 nt, Homo sapiens
  misc_RNA (1)...(19): siRNA sense strand
cuugacaguuuggauguuu

SEQ ID NO: 1293993 - RNA, 19 nt, Homo sapiens
  misc_RNA (1)...(19): siRNA sense strand
cauauauacgggauccuuu

SEQ ID NO: 1293994 - RNA, 19 nt, Homo sapiens
  misc_RNA (1)...(19): siRNA sense strand
auauauacgggauccuuua

SEQ ID NO: 1293995 - RNA, 19 nt, Homo sapiens
  misc_RNA (1)...(19): siRNA sense strand
cuuaaaggaucaguagcaa

SEQ ID NO: 1293996 - RNA, 19 nt, Homo sapiens
  misc_RNA (1)...(19): siRNA sense strand
uaaaccugaggaaggaaua

SEQ ID NO: 1293997 - RNA, 19 nt, Homo sapiens
  misc_RNA (1)...(19): siRNA sense strand
agaugacgccuguuauaga

SEQ ID NO: 1293998 - RNA, 19 nt, Homo sapiens
  misc_RNA (1)...(19): siRNA sense strand
ugugauuguuauugccaua

SEQ ID NO: 1293999 - RNA, 19 nt, Homo sapiens
  misc_RNA (1)...(19): siRNA sense strand
gagagcacgauuuauugug

SEQ ID NO: 1294000 - RNA, 19 nt, Homo sapiens
  misc_RNA (1)...(19): siRNA sense strand
gaaguauuugaguaucuug

SEQ ID NO: 1294001 - RNA, 19 nt, Homo sapiens
  misc_RNA (1)...(19): siRNA sense strand
ggcuaccugucucagauga

SEQ ID NO: 1294002 - RNA, 19 nt, Homo sapiens
  misc_RNA (1)...(19): siRNA sense strand
gauaucaggauuuggaaaa

SEQ ID NO: 1294003 - RNA, 19 nt, Homo sapiens
  misc_RNA (1)...(19): siRNA sense strand
ccucuugccacccauacua

SEQ ID NO: 1294004 - RNA, 19 nt, Homo sapiens
  misc_RNA (1)...(19): siRNA sense strand
ccaugguguugcugcugua

SEQ ID NO: 1294005 - RNA, 19 nt, Homo sapiens
  misc_RNA (1)...(19): siRNA sense strand
cagaugacgccuguuauag

SEQ ID NO: 1294006 - RNA, 19 nt, Homo sapiens
  misc_RNA (1)...(19): siRNA sense strand
cagaugguggagcugaaua

SEQ ID NO: 1294007 - RNA, 19 nt, Homo sapiens
  misc_RNA (1)...(19): siRNA sense strand
gucauugcugugauuguua

SEQ ID NO: 1294008 - RNA, 19 nt, Homo sapiens
  misc_RNA (1)...(19): siRNA sense strand
ggagccaccaacauuugaa

SEQ ID NO: 1294009 - RNA, 19 nt, Homo sapiens
  misc_RNA (1)...(19): siRNA sense strand
uuggugaacgaguagauua

SEQ ID NO: 1294010 - RNA, 19 nt, Homo sapiens
  misc_RNA (1)...(19): siRNA sense strand
gcgcuuuccuggguugcuu

SEQ ID NO: 1294011 - RNA, 19 nt, Homo sapiens
  misc_RNA (1)...(19): siRNA sense strand
uacuacaaagcaacaguua

SEQ ID NO: 1294012 - RNA, 19 nt, Homo sapiens
  misc_RNA (1)...(19): siRNA sense strand
cuugaugcaguaacuuaua

SEQ ID NO: 1294013 - RNA, 19 nt, Homo sapiens
  misc_RNA (1)...(19): siRNA sense strand
aaacauguccauauauacg

SEQ ID NO: 1294014 - RNA, 19 nt, Homo sapiens
  misc_RNA (1)...(19): siRNA sense strand
guguaaaguggucaaaugu

SEQ ID NO: 1294015 - RNA, 19 nt, Homo sapiens
  misc_RNA (1)...(19): siRNA sense strand
cuuacgaguuugguuauca

SEQ ID NO: 1294016 - RNA, 19 nt, Homo sapiens
  misc_RNA (1)...(19): siRNA sense strand
uacgggauccuuuaaaugg

SEQ ID NO: 1294017 - RNA, 19 nt, Homo sapiens
  misc_RNA (1)...(19): siRNA sense strand
gcagaugguggagcugaau

SEQ ID NO: 1294018 - RNA, 19 nt, Homo sapiens
  misc_RNA (1)...(19): siRNA sense strand
aaccaaaacccuacuauga

SEQ ID NO: 1294019 - RNA, 19 nt, Homo sapiens
  misc_RNA (1)...(19): siRNA sense strand
uugaugcaguaacuuauag

SEQ ID NO: 1294020 - RNA, 19 nt, Homo sapiens
  misc_RNA (1)...(19): siRNA sense strand
ggagcugaauaugccacuu

SEQ ID NO: 1294021 - RNA, 19 nt, Homo sapiens
  misc_RNA (1)...(19): siRNA sense strand
cgauggcagcgacacaauu

SEQ ID NO: 1294022 - RNA, 19 nt, Homo sapiens
  misc_RNA (1)...(19): siRNA sense strand
gauccauuuucacuuauug

SEQ ID NO: 1294023 - RNA, 19 nt, Homo sapiens
  misc_RNA (1)...(19): siRNA sense strand
ggagagagcacgauuuauu

SEQ ID NO: 1294024 - RNA, 19 nt, Homo sapiens
  misc_RNA (1)...(19): siRNA sense strand
agagaaacauguccauaua

SEQ ID NO: 1294025 - RNA, 19 nt, Homo sapiens
  misc_RNA (1)...(19): siRNA sense strand
cagaugcacuuuauuugua

SEQ ID NO: 1294026 - RNA, 19 nt, Homo sapiens
  misc_RNA (1)...(19): siRNA sense strand
ggacuuacgaguuugguua

SEQ ID NO: 1294027 - RNA, 19 nt, Homo sapiens
  misc_RNA (1)...(19): siRNA sense strand
aaacagauaucaggauuug

SEQ ID NO: 1294028 - RNA, 19 nt, Homo sapiens
  misc_RNA (1)...(19): siRNA sense strand
cuauggagcucauugguaa

SEQ ID NO: 1294029 - RNA, 19 nt, Homo sapiens
  misc_RNA (1)...(19): siRNA sense strand
aaacacaccuuuagugaag

SEQ ID NO: 1294030 - RNA, 19 nt, Homo sapiens
  misc_RNA (1)...(19): siRNA sense strand
gaacuuaaaggaucaguag

SEQ ID NO: 1294031 - RNA, 19 nt, Homo sapiens
  misc_RNA (1)...(19): siRNA sense strand
gaaaacagauaucaggauu

SEQ ID NO: 1294032 - RNA, 19 nt, Homo sapiens
  misc_RNA (1)...(19): siRNA sense strand
uaaaggaucaguagcaauu

SEQ ID NO: 1294033 - RNA, 19 nt, Homo sapiens
  misc_RNA (1)...(19): siRNA sense strand
aaaugggacuuacgaguuu

SEQ ID NO: 1294034 - RNA, 19 nt, Homo sapiens
  misc_RNA (1)...(19): siRNA sense strand
guuaucagaugcacuuuau

SEQ ID NO: 1294035 - RNA, 19 nt, Homo sapiens
  misc_RNA (1)...(19): siRNA sense strand
gagcugaauaugccacuua

SEQ ID NO: 1294036 - RNA, 19 nt, Homo sapiens
  misc_RNA (1)...(19): siRNA sense strand
ugagauuggugaacgagua

SEQ ID NO: 1294037 - RNA, 19 nt, Homo sapiens
  misc_RNA (1)...(19): siRNA sense strand
gugaacgaguagauuauaa

SEQ ID NO: 1294038 - RNA, 19 nt, Homo sapiens
  misc_RNA (1)...(19): siRNA sense strand
gagagagcacgauuuauug

SEQ ID NO: 1294039 - RNA, 19 nt, Homo sapiens
  misc_RNA (1)...(19): siRNA sense strand
caaaugggacuuacgaguu

SEQ ID NO: 1294040 - RNA, 19 nt, Homo sapiens
  misc_RNA (1)...(19): siRNA sense strand
ggucauugcugugauuguu

SEQ ID NO: 1294041 - RNA, 19 nt, Homo sapiens
  misc_RNA (1)...(19): siRNA sense strand
ccagauccauuuucacuua

SEQ ID NO: 1294042 - RNA, 19 nt, Homo sapiens
  misc_RNA (1)...(19): siRNA sense strand
gaaggaauacuugacaguu

SEQ ID NO: 1294043 - RNA, 19 nt, Homo sapiens
  misc_RNA (1)...(19): siRNA sense strand
aaggaauacuugacaguuu

SEQ ID NO: 1294044 - RNA, 19 nt, Homo sapiens
  misc_RNA (1)...(19): siRNA sense strand
ucagaugacgccuguuaua

SEQ ID NO: 1294045 - RNA, 19 nt, Homo sapiens
  misc_RNA (1)...(19): siRNA sense strand
gaaaacacaccuuuaguga

SEQ ID NO: 1294046 - RNA, 19 nt, Homo sapiens
  misc_RNA (1)...(19): siRNA sense strand
gaugacgccuguuauagag

SEQ ID NO: 1294047 - RNA, 19 nt, Homo sapiens
  misc_RNA (1)...(19): siRNA sense strand
gagaaacauguccauauau

SEQ ID NO: 1294048 - RNA, 19 nt, Homo sapiens
  misc_RNA (1)...(19): siRNA sense strand
ccacuuaccagacuaaauc

SEQ ID NO: 1294049 - RNA, 19 nt, Homo sapiens
  misc_RNA (1)...(19): siRNA sense strand
acgaguagauuauaagugu

SEQ ID NO: 1294050 - RNA, 19 nt, Homo sapiens
  misc_RNA (1)...(19): siRNA sense strand
cuacaaagcaacaguuaug

SEQ ID NO: 1294051 - RNA, 19 nt, Homo sapiens
  misc_RNA (1)...(19): siRNA sense strand
ccaccaacauuugaagcua

SEQ ID NO: 1294052 - RNA, 19 nt, Homo sapiens
  misc_RNA (1)...(19): siRNA sense strand
uauacgggauccuuuaaau

SEQ ID NO: 1294053 - RNA, 19 nt, Homo sapiens
  misc_RNA (1)...(19): siRNA sense strand
cgaguuugguuaucagaug

SEQ ID NO: 1294054 - RNA, 19 nt, Homo sapiens
  misc_RNA (1)...(19): siRNA sense strand
gaacgaguagauuauaagu

SEQ ID NO: 1294055 - RNA, 19 nt, Homo sapiens
  misc_RNA (1)...(19): siRNA sense strand
gugaggagccaccaacauu

SEQ ID NO: 1294056 - RNA, 19 nt, Homo sapiens
  misc_RNA (1)...(19): siRNA sense strand
gauggcagcgacacaauug

SEQ ID NO: 1294057 - RNA, 19 nt, Homo sapiens
  misc_RNA (1)...(19): siRNA sense strand
ucucagaugacgccuguua

SEQ ID NO: 1294058 - RNA, 19 nt, Homo sapiens
  misc_RNA (1)...(19): siRNA sense strand
gaggagccaccaacauuug

SEQ ID NO: 1294059 - RNA, 19 nt, Homo sapiens
  misc_RNA (1)...(19): siRNA sense strand
gcuauggagcucauuggua

SEQ ID NO: 1294060 - RNA, 19 nt, Homo sapiens
  misc_RNA (1)...(19): siRNA sense strand
acacaccuuuagugaagua

SEQ ID NO: 1294061 - RNA, 19 nt, Homo sapiens
  misc_RNA (1)...(19): siRNA sense strand
uagagaaacauguccauau

SEQ ID NO: 1294062 - RNA, 19 nt, Homo sapiens
  misc_RNA (1)...(19): siRNA sense strand
guuccaaagugucuuaaag

SEQ ID NO: 1294063 - RNA, 19 nt, Homo sapiens
  misc_RNA (1)...(19): siRNA sense strand
ggugaacgaguagauuaua

SEQ ID NO: 1294064 - RNA, 19 nt, Homo sapiens
  misc_RNA (1)...(19): siRNA sense strand
gaaguagaaguauuugagu

SEQ ID NO: 1294065 - RNA, 19 nt, Homo sapiens
  misc_RNA (1)...(19): siRNA sense strand
gaaacauguccauauauac

SEQ ID NO: 1294066 - RNA, 19 nt, Homo sapiens
  misc_RNA (1)...(19): siRNA sense strand
ugacgccuguuauagagaa

SEQ ID NO: 1294067 - RNA, 19 nt, Homo sapiens
  misc_RNA (1)...(19): siRNA sense strand
cgaguagauuauaagugua

SEQ ID NO: 1294068 - RNA, 19 nt, Homo sapiens
  misc_RNA (1)...(19): siRNA sense strand
gcacuuuauuuguaaugag

SEQ ID NO: 1294069 - RNA, 19 nt, Homo sapiens
  misc_RNA (1)...(19): siRNA sense strand
guagaaguauuugaguauc

SEQ ID NO: 1294070 - RNA, 19 nt, Homo sapiens
  misc_RNA (1)...(19): siRNA sense strand
guauuugaguaucuugaug

SEQ ID NO: 1294071 - RNA, 19 nt, Homo sapiens
  misc_RNA (1)...(19): siRNA sense strand
aggaauacuugacaguuug

SEQ ID NO: 1294072 - RNA, 19 nt, Homo sapiens
  misc_RNA (1)...(19): siRNA sense strand
ccaaaacccuacuaugaga

SEQ ID NO: 1294073 - RNA, 19 nt, Homo sapiens
  misc_RNA (1)...(19): siRNA sense strand
aguguaaaguggucaaaug

SEQ ID NO: 1294074 - RNA, 19 nt, Homo sapiens
  misc_RNA (1)...(19): siRNA sense strand
ccacccauacuauuuguga

SEQ ID NO: 1294075 - RNA, 19 nt, Homo sapiens
  misc_RNA (1)...(19): siRNA sense strand
uuggagagagcacgauuua

SEQ ID NO: 1294076 - RNA, 19 nt, Homo sapiens
  misc_RNA (1)...(19): siRNA sense strand
gguuaucagaugcacuuua

SEQ ID NO: 1294077 - RNA, 19 nt, Homo sapiens
  misc_RNA (1)...(19): siRNA sense strand
caccaacauuugaagcuau

SEQ ID NO: 1294078 - RNA, 19 nt, Homo sapiens
  misc_RNA (1)...(19): siRNA sense strand
ugaggagccaccaacauuu

SEQ ID NO: 1294079 - RNA, 19 nt, Homo sapiens
  misc_RNA (1)...(19): siRNA sense strand
ggaaggaauacuugacagu

SEQ ID NO: 1294080 - RNA, 19 nt, Homo sapiens
  misc_RNA (1)...(19): siRNA sense strand
gaggaaggaauacuugaca

SEQ ID NO: 1294081 - RNA, 19 nt, Homo sapiens
  misc_RNA (1)...(19): siRNA sense strand
ccaguuccaaagugucuua

SEQ ID NO: 1294082 - RNA, 19 nt, Homo sapiens
  misc_RNA (1)...(19): siRNA sense strand
ugaguaucuugaugcagua

SEQ ID NO: 1294083 - RNA, 19 nt, Homo sapiens
  misc_RNA (1)...(19): siRNA sense strand
caccuuuagugaaguagaa

SEQ ID NO: 1294084 - RNA, 19 nt, Homo sapiens
  misc_RNA (1)...(19): siRNA sense strand
acagauaucaggauuugga

SEQ ID NO: 1294085 - RNA, 19 nt, Homo sapiens
  misc_RNA (1)...(19): siRNA sense strand
ucauugcugugauuguuau

SEQ ID NO: 1294086 - RNA, 19 nt, Homo sapiens
  misc_RNA (1)...(19): siRNA sense strand
ucagaugcacuuuauuugu

SEQ ID NO: 1294087 - RNA, 19 nt, Homo sapiens
  misc_RNA (1)...(19): siRNA sense strand
gugcugcuccagaguguaa

SEQ ID NO: 1294088 - RNA, 19 nt, Homo sapiens
  misc_RNA (1)...(19): siRNA sense strand
ggaaaacacaccuuuagug

SEQ ID NO: 1294089 - RNA, 19 nt, Homo sapiens
  misc_RNA (1)...(19): siRNA sense strand
aaggaucaguagcaauuug

SEQ ID NO: 1294090 - RNA, 19 nt, Homo sapiens
  misc_RNA (1)...(19): siRNA sense strand
uauauacgggauccuuuaa

SEQ ID NO: 1294091 - RNA, 19 nt, Homo sapiens
  misc_RNA (1)...(19): siRNA sense strand
ugaaguagaaguauuugag

SEQ ID NO: 1294092 - RNA, 19 nt, Homo sapiens
  misc_RNA (1)...(19): siRNA sense strand
cuugacaguuuggauguuu

SEQ ID NO: 1294093 - RNA, 19 nt, Homo sapiens
  misc_RNA (1)...(19): siRNA sense strand
cauauauacgggauccuuu

SEQ ID NO: 1294094 - RNA, 19 nt, Homo sapiens
  misc_RNA (1)...(19): siRNA sense strand
auauauacgggauccuuua

SEQ ID NO: 1294095 - RNA, 19 nt, Homo sapiens
  misc_RNA (1)...(19): siRNA sense strand
cuuaaaggaucaguagcaa

SEQ ID NO: 1294096 - RNA, 19 nt, Homo sapiens
  misc_RNA (1)...(19): siRNA sense strand
uaaaccugaggaaggaaua

SEQ ID NO: 1294097 - RNA, 19 nt, Homo sapiens
  misc_RNA (1)...(19): siRNA sense strand
agaugacgccuguuauaga

SEQ ID NO: 1294098 - RNA, 19 nt, Homo sapiens
  misc_RNA (1)...(19): siRNA sense strand
ugugauuguuauugccaua

SEQ ID NO: 1294099 - RNA, 19 nt, Homo sapiens
  misc_RNA (1)...(19): siRNA sense strand
gagagcacgauuuauugug

SEQ ID NO: 1294100 - RNA, 19 nt, Homo sapiens
  misc_RNA (1)...(19): siRNA sense strand
gaaguauuugaguaucuug

SEQ ID NO: 1294101 - RNA, 19 nt, Homo sapiens
  misc_RNA (1)...(19): siRNA sense strand
ggcuaccugucucagauga

SEQ ID NO: 1294102 - RNA, 19 nt, Homo sapiens
  misc_RNA (1)...(19): siRNA sense strand
gauaucaggauuuggaaaa

SEQ ID NO: 1294103 - RNA, 19 nt, Homo sapiens
  misc_RNA (1)...(19): siRNA sense strand
ccucuugccacccauacua

SEQ ID NO: 1294104 - RNA, 19 nt, Homo sapiens
  misc_RNA (1)...(19): siRNA sense strand
ccaugguguugcugcugua

SEQ ID NO: 1294105 - RNA, 19 nt, Homo sapiens
  misc_RNA (1)...(19): siRNA sense strand
cagaugacgccuguuauag

SEQ ID NO: 1294106 - RNA, 19 nt, Homo sapiens
  misc_RNA (1)...(19): siRNA sense strand
cagaugguggagcugaaua

SEQ ID NO: 1294107 - RNA, 19 nt, Homo sapiens
  misc_RNA (1)...(19): siRNA sense strand
gucauugcugugauuguua

SEQ ID NO: 1294108 - RNA, 19 nt, Homo sapiens
  misc_RNA (1)...(19): siRNA sense strand
ggagccaccaacauuugaa

SEQ ID NO: 1294109 - RNA, 19 nt, Homo sapiens
  misc_RNA (1)...(19): siRNA sense strand
uuggugaacgaguagauua

SEQ ID NO: 1294110 - RNA, 19 nt, Homo sapiens
  misc_RNA (1)...(19): siRNA sense strand
gcgcuuuccuggguugcuu

SEQ ID NO: 1294111 - RNA, 19 nt, Homo sapiens
  misc_RNA (1)...(19): siRNA sense strand
uacuacaaagcaacaguua

SEQ ID NO: 1294112 - RNA, 19 nt, Homo sapiens
  misc_RNA (1)...(19): siRNA sense strand
cuugaugcaguaacuuaua

SEQ ID NO: 1294113 - RNA, 19 nt, Homo sapiens
  misc_RNA (1)...(19): siRNA sense strand
aaacauguccauauauacg

SEQ ID NO: 1294114 - RNA, 19 nt, Homo sapiens
  misc_RNA (1)...(19): siRNA sense strand
guguaaaguggucaaaugu

SEQ ID NO: 1294115 - RNA, 19 nt, Homo sapiens
  misc_RNA (1)...(19): siRNA sense strand
cuuacgaguuugguuauca

SEQ ID NO: 1294116 - RNA, 19 nt, Homo sapiens
  misc_RNA (1)...(19): siRNA sense strand
uacgggauccuuuaaaugg

SEQ ID NO: 1294117 - RNA, 19 nt, Homo sapiens
  misc_RNA (1)...(19): siRNA sense strand
gcagaugguggagcugaau

SEQ ID NO: 1294118 - RNA, 19 nt, Homo sapiens
  misc_RNA (1)...(19): siRNA sense strand
aaccaaaacccuacuauga

SEQ ID NO: 1294119 - RNA, 19 nt, Homo sapiens
  misc_RNA (1)...(19): siRNA sense strand
uugaugcaguaacuuauag

SEQ ID NO: 1294120 - RNA, 19 nt, Homo sapiens
  misc_RNA (1)...(19): siRNA sense strand
ggagcugaauaugccacuu

SEQ ID NO: 1294121 - RNA, 19 nt, Homo sapiens
  misc_RNA (1)...(19): siRNA sense strand
cgauggcagcgacacaauu

SEQ ID NO: 1294122 - RNA, 19 nt, Homo sapiens
  misc_RNA (1)...(19): siRNA sense strand
gauccauuuucacuuauug

SEQ ID NO: 1294123 - RNA, 19 nt, Homo sapiens
  misc_RNA (1)...(19): siRNA sense strand
ggagagagcacgauuuauu

SEQ ID NO: 1294124 - RNA, 19 nt, Homo sapiens
  misc_RNA (1)...(19): siRNA sense strand
agagaaacauguccauaua

SEQ ID NO: 1294125 - RNA, 19 nt, Homo sapiens
  misc_RNA (1)...(19): siRNA sense strand
cagaugcacuuuauuugua

SEQ ID NO: 1294126 - RNA, 19 nt, Homo sapiens
  misc_RNA (1)...(19): siRNA sense strand
ggacuuacgaguuugguua

SEQ ID NO: 1294127 - RNA, 19 nt, Homo sapiens
  misc_RNA (1)...(19): siRNA sense strand
aaacagauaucaggauuug

SEQ ID NO: 1294128 - RNA, 19 nt, Homo sapiens
  misc_RNA (1)...(19): siRNA sense strand
cuauggagcucauugguaa

SEQ ID NO: 1294129 - RNA, 19 nt, Homo sapiens
  misc_RNA (1)...(19): siRNA sense strand
aaacacaccuuuagugaag

SEQ ID NO: 1294130 - RNA, 19 nt, Homo sapiens
  misc_RNA (1)...(19): siRNA sense strand
gaacuuaaaggaucaguag

SEQ ID NO: 1294131 - RNA, 19 nt, Homo sapiens
  misc_RNA (1)...(19): siRNA sense strand
gaaaacagauaucaggauu

SEQ ID NO: 1294132 - RNA, 19 nt, Homo sapiens
  misc_RNA (1)...(19): siRNA sense strand
uaaaggaucaguagcaauu

SEQ ID NO: 1294133 - RNA, 19 nt, Homo sapiens
  misc_RNA (1)...(19): siRNA sense strand
aaaugggacuuacgaguuu

SEQ ID NO: 1294134 - RNA, 19 nt, Homo sapiens
  misc_RNA (1)...(19): siRNA sense strand
guuaucagaugcacuuuau

SEQ ID NO: 1294135 - RNA, 19 nt, Homo sapiens
  misc_RNA (1)...(19): siRNA sense strand
gagcugaauaugccacuua

SEQ ID NO: 1294136 - RNA, 19 nt, Homo sapiens
  misc_RNA (1)...(19): siRNA sense strand
ugagauuggugaacgagua

SEQ ID NO: 1294137 - RNA, 19 nt, Homo sapiens
  misc_RNA (1)...(19): siRNA sense strand
gugaacgaguagauuauaa

SEQ ID NO: 1294138 - RNA, 19 nt, Homo sapiens
  misc_RNA (1)...(19): siRNA sense strand
gagagagcacgauuuauug

SEQ ID NO: 1294139 - RNA, 19 nt, Homo sapiens
  misc_RNA (1)...(19): siRNA sense strand
caaaugggacuuacgaguu

SEQ ID NO: 1294140 - RNA, 19 nt, Homo sapiens
  misc_RNA (1)...(19): siRNA sense strand
ggucauugcugugauuguu

SEQ ID NO: 1294141 - RNA, 19 nt, Homo sapiens
  misc_RNA (1)...(19): siRNA sense strand
ccagauccauuuucacuua

SEQ ID NO: 1294142 - RNA, 19 nt, Homo sapiens
  misc_RNA (1)...(19): siRNA sense strand
gaaggaauacuugacaguu

SEQ ID NO: 1294143 - RNA, 19 nt, Homo sapiens
  misc_RNA (1)...(19): siRNA sense strand
aaggaauacuugacaguuu

SEQ ID NO: 1294144 - RNA, 19 nt, Homo sapiens
  misc_RNA (1)...(19): siRNA sense strand
ucagaugacgccuguuaua

SEQ ID NO: 1294145 - RNA, 19 nt, Homo sapiens
  misc_RNA (1)...(19): siRNA sense strand
gaaaacacaccuuuaguga

SEQ ID NO: 1294146 - RNA, 19 nt, Homo sapiens
  misc_RNA (1)...(19): siRNA sense strand
gaugacgccuguuauagag

SEQ ID NO: 1294147 - RNA, 19 nt, Homo sapiens
  misc_RNA (1)...(19): siRNA sense strand
gagaaacauguccauauau

SEQ ID NO: 1294148 - RNA, 19 nt, Homo sapiens
  misc_RNA (1)...(19): siRNA sense strand
ccacuuaccagacuaaauc

SEQ ID NO: 1294149 - RNA, 19 nt, Homo sapiens
  misc_RNA (1)...(19): siRNA sense strand
acgaguagauuauaagugu

SEQ ID NO: 1294150 - RNA, 19 nt, Homo sapiens
  misc_RNA (1)...(19): siRNA sense strand
cuacaaagcaacaguuaug

SEQ ID NO: 1294151 - RNA, 19 nt, Homo sapiens
  misc_RNA (1)...(19): siRNA sense strand
ccaccaacauuugaagcua

SEQ ID NO: 1294152 - RNA, 19 nt, Homo sapiens
  misc_RNA (1)...(19): siRNA sense strand
uauacgggauccuuuaaau

SEQ ID NO: 1294153 - RNA, 19 nt, Homo sapiens
  misc_RNA (1)...(19): siRNA sense strand
cgaguuugguuaucagaug

SEQ ID NO: 1294154 - RNA, 19 nt, Homo sapiens
  misc_RNA (1)...(19): siRNA sense strand
gaacgaguagauuauaagu

SEQ ID NO: 1294155 - RNA, 19 nt, Homo sapiens
  misc_RNA (1)...(19): siRNA sense strand
gugaggagccaccaacauu

SEQ ID NO: 1294156 - RNA, 19 nt, Homo sapiens
  misc_RNA (1)...(19): siRNA sense strand
gauggcagcgacacaauug

SEQ ID NO: 1294157 - RNA, 19 nt, Homo sapiens
  misc_RNA (1)...(19): siRNA sense strand
ucucagaugacgccuguua

SEQ ID NO: 1294158 - RNA, 19 nt, Homo sapiens
  misc_RNA (1)...(19): siRNA sense strand
gaggagccaccaacauuug

SEQ ID NO: 1294159 - RNA, 19 nt, Homo sapiens
  misc_RNA (1)...(19): siRNA sense strand
gcuauggagcucauuggua

SEQ ID NO: 1294160 - RNA, 19 nt, Homo sapiens
  misc_RNA (1)...(19): siRNA sense strand
acacaccuuuagugaagua

SEQ ID NO: 1294161 - RNA, 19 nt, Homo sapiens
  misc_RNA (1)...(19): siRNA sense strand
uagagaaacauguccauau

SEQ ID NO: 1294162 - RNA, 19 nt, Homo sapiens
  misc_RNA (1)...(19): siRNA sense strand
guuccaaagugucuuaaag

SEQ ID NO: 1294163 - RNA, 19 nt, Homo sapiens
  misc_RNA (1)...(19): siRNA sense strand
ggugaacgaguagauuaua

SEQ ID NO: 1294164 - RNA, 19 nt, Homo sapiens
  misc_RNA (1)...(19): siRNA sense strand
gaaguagaaguauuugagu

SEQ ID NO: 1294165 - RNA, 19 nt, Homo sapiens
  misc_RNA (1)...(19): siRNA sense strand
gaaacauguccauauauac

SEQ ID NO: 1294166 - RNA, 19 nt, Homo sapiens
  misc_RNA (1)...(19): siRNA sense strand
ugacgccuguuauagagaa

SEQ ID NO: 1294167 - RNA, 19 nt, Homo sapiens
  misc_RNA (1)...(19): siRNA sense strand
cgaguagauuauaagugua

SEQ ID NO: 1294168 - RNA, 19 nt, Homo sapiens
  misc_RNA (1)...(19): siRNA sense strand
gcacuuuauuuguaaugag

SEQ ID NO: 1294169 - RNA, 19 nt, Homo sapiens
  misc_RNA (1)...(19): siRNA sense strand
guagaaguauuugaguauc

SEQ ID NO: 1294170 - RNA, 19 nt, Homo sapiens
  misc_RNA (1)...(19): siRNA sense strand
guauuugaguaucuugaug

SEQ ID NO: 1294171 - RNA, 19 nt, Homo sapiens
  misc_RNA (1)...(19): siRNA sense strand
aggaauacuugacaguuug

SEQ ID NO: 1294172 - RNA, 19 nt, Homo sapiens
  misc_RNA (1)...(19): siRNA sense strand
ccaaaacccuacuaugaga

SEQ ID NO: 1294173 - RNA, 19 nt, Homo sapiens
  misc_RNA (1)...(19): siRNA sense strand
aguguaaaguggucaaaug

SEQ ID NO: 1294174 - RNA, 19 nt, Homo sapiens
  misc_RNA (1)...(19): siRNA sense strand
ccacccauacuauuuguga

SEQ ID NO: 1294175 - RNA, 19 nt, Homo sapiens
  misc_RNA (1)...(19): siRNA sense strand
uuggagagagcacgauuua

SEQ ID NO: 1294176 - RNA, 19 nt, Homo sapiens
  misc_RNA (1)...(19): siRNA sense strand
gguuaucagaugcacuuua

SEQ ID NO: 1294177 - RNA, 19 nt, Homo sapiens
  misc_RNA (1)...(19): siRNA sense strand
caccaacauuugaagcuau

SEQ ID NO: 1294178 - RNA, 19 nt, Homo sapiens
  misc_RNA (1)...(19): siRNA sense strand
ugaggagccaccaacauuu

SEQ ID NO: 1294179 - RNA, 19 nt, Homo sapiens
  misc_RNA (1)...(19): siRNA sense strand
ggaaggaauacuugacagu

SEQ ID NO: 1294180 - RNA, 19 nt, Homo sapiens
  misc_RNA (1)...(19): siRNA sense strand
gaggaaggaauacuugaca

SEQ ID NO: 1294181 - RNA, 19 nt, Homo sapiens
  misc_RNA (1)...(19): siRNA sense strand
ccaguuccaaagugucuua

SEQ ID NO: 1294182 - RNA, 19 nt, Homo sapiens
  misc_RNA (1)...(19): siRNA sense strand
ugaguaucuugaugcagua

SEQ ID NO: 1294183 - RNA, 19 nt, Homo sapiens
  misc_RNA (1)...(19): siRNA sense strand
caccuuuagugaaguagaa

SEQ ID NO: 1294184 - RNA, 19 nt, Homo sapiens
  misc_RNA (1)...(19): siRNA sense strand
acagauaucaggauuugga

SEQ ID NO: 1294185 - RNA, 19 nt, Homo sapiens
  misc_RNA (1)...(19): siRNA sense strand
ucauugcugugauuguuau

SEQ ID NO: 1294186 - RNA, 19 nt, Homo sapiens
  misc_RNA (1)...(19): siRNA sense strand
ucagaugcacuuuauuugu

SEQ ID NO: 1294187 - RNA, 19 nt, Homo sapiens
  misc_RNA (1)...(19): siRNA sense strand
gugcugcuccagaguguaa

SEQ ID NO: 1294188 - RNA, 19 nt, Homo sapiens
  misc_RNA (1)...(19): siRNA sense strand
ggaaaacacaccuuuagug

SEQ ID NO: 1294189 - RNA, 19 nt, Homo sapiens
  misc_RNA (1)...(19): siRNA sense strand
aaggaucaguagcaauuug

SEQ ID NO: 1294190 - RNA, 19 nt, Homo sapiens
  misc_RNA (1)...(19): siRNA sense strand
uauauacgggauccuuuaa

SEQ ID NO: 1294191 - RNA, 19 nt, Homo sapiens
  misc_RNA (1)...(19): siRNA sense strand
ugaaguagaaguauuugag

SEQ ID NO: 1294192 - RNA, 19 nt, Homo sapiens
  misc_RNA (1)...(19): siRNA sense strand
cuugacaguuuggauguuu

SEQ ID NO: 1294193 - RNA, 19 nt, Homo sapiens
  misc_RNA (1)...(19): siRNA sense strand
cauauauacgggauccuuu

SEQ ID NO: 1294194 - RNA, 19 nt, Homo sapiens
  misc_RNA (1)...(19): siRNA sense strand
auauauacgggauccuuua

SEQ ID NO: 1294195 - RNA, 19 nt, Homo sapiens
  misc_RNA (1)...(19): siRNA sense strand
cuuaaaggaucaguagcaa

SEQ ID NO: 1294196 - RNA, 19 nt, Homo sapiens
  misc_RNA (1)...(19): siRNA sense strand
uaaaccugaggaaggaaua

SEQ ID NO: 1294197 - RNA, 19 nt, Homo sapiens
  misc_RNA (1)...(19): siRNA sense strand
agaugacgccuguuauaga

SEQ ID NO: 1294198 - RNA, 19 nt, Homo sapiens
  misc_RNA (1)...(19): siRNA sense strand
ugugauuguuauugccaua

SEQ ID NO: 1294199 - RNA, 19 nt, Homo sapiens
  misc_RNA (1)...(19): siRNA sense strand
gagagcacgauuuauugug

SEQ ID NO: 1294200 - RNA, 19 nt, Homo sapiens
  misc_RNA (1)...(19): siRNA sense strand
gaaguauuugaguaucuug

SEQ ID NO: 1294201 - RNA, 19 nt, Homo sapiens
  misc_RNA (1)...(19): siRNA sense strand
ggcuaccugucucagauga

SEQ ID NO: 1294202 - RNA, 19 nt, Homo sapiens
  misc_RNA (1)...(19): siRNA sense strand
gauaucaggauuuggaaaa

SEQ ID NO: 1294203 - RNA, 19 nt, Homo sapiens
  misc_RNA (1)...(19): siRNA sense strand
ccucuugccacccauacua

SEQ ID NO: 1294204 - RNA, 19 nt, Homo sapiens
  misc_RNA (1)...(19): siRNA sense strand
ccaugguguugcugcugua

SEQ ID NO: 1294205 - RNA, 19 nt, Homo sapiens
  misc_RNA (1)...(19): siRNA sense strand
cagaugacgccuguuauag

SEQ ID NO: 1294206 - RNA, 19 nt, Homo sapiens
  misc_RNA (1)...(19): siRNA sense strand
cagaugguggagcugaaua

SEQ ID NO: 1294207 - RNA, 19 nt, Homo sapiens
  misc_RNA (1)...(19): siRNA sense strand
gucauugcugugauuguua

SEQ ID NO: 1294208 - RNA, 19 nt, Homo sapiens
  misc_RNA (1)...(19): siRNA sense strand
ggagccaccaacauuugaa

SEQ ID NO: 1294209 - RNA, 19 nt, Homo sapiens
  misc_RNA (1)...(19): siRNA sense strand
uuggugaacgaguagauua

SEQ ID NO: 1294210 - RNA, 19 nt, Homo sapiens
  misc_RNA (1)...(19): siRNA sense strand
gcgcuuuccuggguugcuu

SEQ ID NO: 1294211 - RNA, 19 nt, Homo sapiens
  misc_RNA (1)...(19): siRNA sense strand
uacuacaaagcaacaguua

SEQ ID NO: 1294212 - RNA, 19 nt, Homo sapiens
  misc_RNA (1)...(19): siRNA sense strand
cuugaugcaguaacuuaua

SEQ ID NO: 1294213 - RNA, 19 nt, Homo sapiens
  misc_RNA (1)...(19): siRNA sense strand
aaacauguccauauauacg

SEQ ID NO: 1294214 - RNA, 19 nt, Homo sapiens
  misc_RNA (1)...(19): siRNA sense strand
guguaaaguggucaaaugu

SEQ ID NO: 1294215 - RNA, 19 nt, Homo sapiens
  misc_RNA (1)...(19): siRNA sense strand
cuuacgaguuugguuauca

SEQ ID NO: 1294216 - RNA, 19 nt, Homo sapiens
  misc_RNA (1)...(19): siRNA sense strand
uacgggauccuuuaaaugg

SEQ ID NO: 1294217 - RNA, 19 nt, Homo sapiens
  misc_RNA (1)...(19): siRNA sense strand
gcagaugguggagcugaau

SEQ ID NO: 1294218 - RNA, 19 nt, Homo sapiens
  misc_RNA (1)...(19): siRNA sense strand
aaccaaaacccuacuauga

SEQ ID NO: 1294219 - RNA, 19 nt, Homo sapiens
  misc_RNA (1)...(19): siRNA sense strand
uugaugcaguaacuuauag

SEQ ID NO: 1294220 - RNA, 19 nt, Homo sapiens
  misc_RNA (1)...(19): siRNA sense strand
ggagcugaauaugccacuu

SEQ ID NO: 1294221 - RNA, 19 nt, Homo sapiens
  misc_RNA (1)...(19): siRNA sense strand
cgauggcagcgacacaauu

SEQ ID NO: 1294222 - RNA, 19 nt, Homo sapiens
  misc_RNA (1)...(19): siRNA sense strand
gauccauuuucacuuauug

SEQ ID NO: 1294223 - RNA, 19 nt, Homo sapiens
  misc_RNA (1)...(19): siRNA sense strand
ggagagagcacgauuuauu

SEQ ID NO: 1294224 - RNA, 19 nt, Homo sapiens
  misc_RNA (1)...(19): siRNA sense strand
agagaaacauguccauaua

SEQ ID NO: 1294225 - RNA, 19 nt, Homo sapiens
  misc_RNA (1)...(19): siRNA sense strand
cagaugcacuuuauuugua

SEQ ID NO: 1294226 - RNA, 19 nt, Homo sapiens
  misc_RNA (1)...(19): siRNA sense strand
ggacuuacgaguuugguua

SEQ ID NO: 1294227 - RNA, 19 nt, Homo sapiens
  misc_RNA (1)...(19): siRNA sense strand
aaacagauaucaggauuug

SEQ ID NO: 1294228 - RNA, 19 nt, Homo sapiens
  misc_RNA (1)...(19): siRNA sense strand
cuauggagcucauugguaa

SEQ ID NO: 1294229 - RNA, 19 nt, Homo sapiens
  misc_RNA (1)...(19): siRNA sense strand
aaacacaccuuuagugaag

SEQ ID NO: 1294230 - RNA, 19 nt, Homo sapiens
  misc_RNA (1)...(19): siRNA sense strand
gaacuuaaaggaucaguag

SEQ ID NO: 1294231 - RNA, 19 nt, Homo sapiens
  misc_RNA (1)...(19): siRNA sense strand
gaaaacagauaucaggauu

SEQ ID NO: 1294232 - RNA, 19 nt, Homo sapiens
  misc_RNA (1)...(19): siRNA sense strand
uaaaggaucaguagcaauu

SEQ ID NO: 1294233 - RNA, 19 nt, Homo sapiens
  misc_RNA (1)...(19): siRNA sense strand
aaaugggacuuacgaguuu

SEQ ID NO: 1294234 - RNA, 19 nt, Homo sapiens
  misc_RNA (1)...(19): siRNA sense strand
guuaucagaugcacuuuau

SEQ ID NO: 1294235 - RNA, 19 nt, Homo sapiens
  misc_RNA (1)...(19): siRNA sense strand
ugagauuggugaacgagua

SEQ ID NO: 1294236 - RNA, 19 nt, Homo sapiens
  misc_RNA (1)...(19): siRNA sense strand
gugaacgaguagauuauaa

SEQ ID NO: 1294237 - RNA, 19 nt, Homo sapiens
  misc_RNA (1)...(19): siRNA sense strand
gagagagcacgauuuauug

SEQ ID NO: 1294238 - RNA, 19 nt, Homo sapiens
  misc_RNA (1)...(19): siRNA sense strand
caaaugggacuuacgaguu

SEQ ID NO: 1294239 - RNA, 19 nt, Homo sapiens
  misc_RNA (1)...(19): siRNA sense strand
ggucauugcugugauuguu

SEQ ID NO: 1294240 - RNA, 19 nt, Homo sapiens
  misc_RNA (1)...(19): siRNA sense strand
ccagauccauuuucacuua

SEQ ID NO: 1294241 - RNA, 19 nt, Homo sapiens
  misc_RNA (1)...(19): siRNA sense strand
gaaggaauacuugacaguu

SEQ ID NO: 1294242 - RNA, 19 nt, Homo sapiens
  misc_RNA (1)...(19): siRNA sense strand
aaggaauacuugacaguuu

SEQ ID NO: 1294243 - RNA, 19 nt, Homo sapiens
  misc_RNA (1)...(19): siRNA sense strand
ucagaugacgccuguuaua

SEQ ID NO: 1294244 - RNA, 19 nt, Homo sapiens
  misc_RNA (1)...(19): siRNA sense strand
gaaaacacaccuuuaguga

SEQ ID NO: 1294245 - RNA, 19 nt, Homo sapiens
  misc_RNA (1)...(19): siRNA sense strand
gaugacgccuguuauagag

SEQ ID NO: 1294246 - RNA, 19 nt, Homo sapiens
  misc_RNA (1)...(19): siRNA sense strand
gagaaacauguccauauau

SEQ ID NO: 1294247 - RNA, 19 nt, Homo sapiens
  misc_RNA (1)...(19): siRNA sense strand
acgaguagauuauaagugu

SEQ ID NO: 1294248 - RNA, 19 nt, Homo sapiens
  misc_RNA (1)...(19): siRNA sense strand
cuacaaagcaacaguuaug

SEQ ID NO: 1294249 - RNA, 19 nt, Homo sapiens
  misc_RNA (1)...(19): siRNA sense strand
ccaccaacauuugaagcua

SEQ ID NO: 1294250 - RNA, 19 nt, Homo sapiens
  misc_RNA (1)...(19): siRNA sense strand
uauacgggauccuuuaaau

SEQ ID NO: 1294251 - RNA, 19 nt, Homo sapiens
  misc_RNA (1)...(19): siRNA sense strand
cgaguuugguuaucagaug

SEQ ID NO: 1294252 - RNA, 19 nt, Homo sapiens
  misc_RNA (1)...(19): siRNA sense strand
gaacgaguagauuauaagu

SEQ ID NO: 1294253 - RNA, 19 nt, Homo sapiens
  misc_RNA (1)...(19): siRNA sense strand
gugaggagccaccaacauu

SEQ ID NO: 1294254 - RNA, 19 nt, Homo sapiens
  misc_RNA (1)...(19): siRNA sense strand
gauggcagcgacacaauug

SEQ ID NO: 1294255 - RNA, 19 nt, Homo sapiens
  misc_RNA (1)...(19): siRNA sense strand
gcuauggagcucauuggua

SEQ ID NO: 1294256 - RNA, 19 nt, Homo sapiens
  misc_RNA (1)...(19): siRNA sense strand
gaggagccaccaacauuug

SEQ ID NO: 1294257 - RNA, 19 nt, Homo sapiens
  misc_RNA (1)...(19): siRNA sense strand
acacaccuuuagugaagua

SEQ ID NO: 1294258 - RNA, 19 nt, Homo sapiens
  misc_RNA (1)...(19): siRNA sense strand
ucucagaugacgccuguua

SEQ ID NO: 1294259 - RNA, 19 nt, Homo sapiens
  misc_RNA (1)...(19): siRNA sense strand
uagagaaacauguccauau

SEQ ID NO: 1294260 - RNA, 19 nt, Homo sapiens
  misc_RNA (1)...(19): siRNA sense strand
guuccaaagugucuuaaag

SEQ ID NO: 1294261 - RNA, 19 nt, Homo sapiens
  misc_RNA (1)...(19): siRNA sense strand
ggugaacgaguagauuaua

SEQ ID NO: 1294262 - RNA, 19 nt, Homo sapiens
  misc_RNA (1)...(19): siRNA sense strand
gaaguagaaguauuugagu

SEQ ID NO: 1294263 - RNA, 19 nt, Homo sapiens
  misc_RNA (1)...(19): siRNA sense strand
gaaacauguccauauauac

SEQ ID NO: 1294264 - RNA, 19 nt, Homo sapiens
  misc_RNA (1)...(19): siRNA sense strand
ugacgccuguuauagagaa

SEQ ID NO: 1294265 - RNA, 19 nt, Homo sapiens
  misc_RNA (1)...(19): siRNA sense strand
cgaguagauuauaagugua

SEQ ID NO: 1294266 - RNA, 19 nt, Homo sapiens
  misc_RNA (1)...(19): siRNA sense strand
gcacuuuauuuguaaugag

SEQ ID NO: 1294267 - RNA, 19 nt, Homo sapiens
  misc_RNA (1)...(19): siRNA sense strand
guagaaguauuugaguauc

SEQ ID NO: 1294268 - RNA, 19 nt, Homo sapiens
  misc_RNA (1)...(19): siRNA sense strand
guauuugaguaucuugaug

SEQ ID NO: 1294269 - RNA, 19 nt, Homo sapiens
  misc_RNA (1)...(19): siRNA sense strand
aggaauacuugacaguuug

SEQ ID NO: 1294270 - RNA, 19 nt, Homo sapiens
  misc_RNA (1)...(19): siRNA sense strand
ccaaaacccuacuaugaga

SEQ ID NO: 1294271 - RNA, 19 nt, Homo sapiens
  misc_RNA (1)...(19): siRNA sense strand
aguguaaaguggucaaaug

SEQ ID NO: 1294272 - RNA, 19 nt, Homo sapiens
  misc_RNA (1)...(19): siRNA sense strand
ccacccauacuauuuguga

SEQ ID NO: 1294273 - RNA, 19 nt, Homo sapiens
  misc_RNA (1)...(19): siRNA sense strand
caccaacauuugaagcuau

SEQ ID NO: 1294274 - RNA, 19 nt, Homo sapiens
  misc_RNA (1)...(19): siRNA sense strand
uuggagagagcacgauuua

SEQ ID NO: 1294275 - RNA, 19 nt, Homo sapiens
  misc_RNA (1)...(19): siRNA sense strand
gguuaucagaugcacuuua

SEQ ID NO: 1294276 - RNA, 19 nt, Homo sapiens
  misc_RNA (1)...(19): siRNA sense strand
ugaggagccaccaacauuu

SEQ ID NO: 1294277 - RNA, 19 nt, Homo sapiens
  misc_RNA (1)...(19): siRNA sense strand
ggaaggaauacuugacagu

SEQ ID NO: 1294278 - RNA, 19 nt, Homo sapiens
  misc_RNA (1)...(19): siRNA sense strand
gaggaaggaauacuugaca

SEQ ID NO: 1294279 - RNA, 19 nt, Homo sapiens
  misc_RNA (1)...(19): siRNA sense strand
ccaguuccaaagugucuua

SEQ ID NO: 1294280 - RNA, 19 nt, Homo sapiens
  misc_RNA (1)...(19): siRNA sense strand
ugaguaucuugaugcagua

SEQ ID NO: 1294281 - RNA, 19 nt, Homo sapiens
  misc_RNA (1)...(19): siRNA sense strand
caccuuuagugaaguagaa

SEQ ID NO: 1294282 - RNA, 19 nt, Homo sapiens
  misc_RNA (1)...(19): siRNA sense strand
acagauaucaggauuugga

SEQ ID NO: 1294283 - RNA, 19 nt, Homo sapiens
  misc_RNA (1)...(19): siRNA sense strand
ucauugcugugauuguuau

SEQ ID NO: 1294284 - RNA, 19 nt, Homo sapiens
  misc_RNA (1)...(19): siRNA sense strand
ucagaugcacuuuauuugu

SEQ ID NO: 1294285 - RNA, 19 nt, Homo sapiens
  misc_RNA (1)...(19): siRNA sense strand
gugcugcuccagaguguaa

SEQ ID NO: 1294286 - RNA, 19 nt, Homo sapiens
  misc_RNA (1)...(19): siRNA sense strand
ggaaaacacaccuuuagug

SEQ ID NO: 1294287 - RNA, 19 nt, Homo sapiens
  misc_RNA (1)...(19): siRNA sense strand
aaggaucaguagcaauuug

SEQ ID NO: 1294288 - RNA, 19 nt, Homo sapiens
  misc_RNA (1)...(19): siRNA sense strand
uauauacgggauccuuuaa

SEQ ID NO: 1294289 - RNA, 19 nt, Homo sapiens
  misc_RNA (1)...(19): siRNA sense strand
ugaaguagaaguauuugag

SEQ ID NO: 1294290 - RNA, 19 nt, Homo sapiens
  misc_RNA (1)...(19): siRNA sense strand
cuugacaguuuggauguuu

SEQ ID NO: 1294291 - RNA, 19 nt, Homo sapiens
  misc_RNA (1)...(19): siRNA sense strand
cauauauacgggauccuuu

SEQ ID NO: 1294292 - RNA, 19 nt, Homo sapiens
  misc_RNA (1)...(19): siRNA sense strand
auauauacgggauccuuua

SEQ ID NO: 1294293 - RNA, 19 nt, Homo sapiens
  misc_RNA (1)...(19): siRNA sense strand
cuuaaaggaucaguagcaa

SEQ ID NO: 1294294 - RNA, 19 nt, Homo sapiens
  misc_RNA (1)...(19): siRNA sense strand
uaaaccugaggaaggaaua

SEQ ID NO: 1294295 - RNA, 19 nt, Homo sapiens
  misc_RNA (1)...(19): siRNA sense strand
agaugacgccuguuauaga

SEQ ID NO: 1294296 - RNA, 19 nt, Homo sapiens
  misc_RNA (1)...(19): siRNA sense strand
ugugauuguuauugccaua

SEQ ID NO: 1294297 - RNA, 19 nt, Homo sapiens
  misc_RNA (1)...(19): siRNA sense strand
gagagcacgauuuauugug

SEQ ID NO: 1294298 - RNA, 19 nt, Homo sapiens
  misc_RNA (1)...(19): siRNA sense strand
gaaguauuugaguaucuug

SEQ ID NO: 1294299 - RNA, 19 nt, Homo sapiens
  misc_RNA (1)...(19): siRNA sense strand
ggcuaccugucucagauga

SEQ ID NO: 1294300 - RNA, 19 nt, Homo sapiens
  misc_RNA (1)...(19): siRNA sense strand
gauaucaggauuuggaaaa

SEQ ID NO: 1294301 - RNA, 19 nt, Homo sapiens
  misc_RNA (1)...(19): siRNA sense strand
ccucuugccacccauacua

SEQ ID NO: 1294302 - RNA, 19 nt, Homo sapiens
  misc_RNA (1)...(19): siRNA sense strand
ccaugguguugcugcugua

SEQ ID NO: 1294303 - RNA, 19 nt, Homo sapiens
  misc_RNA (1)...(19): siRNA sense strand
cagaugacgccuguuauag

SEQ ID NO: 1294304 - RNA, 19 nt, Homo sapiens
  misc_RNA (1)...(19): siRNA sense strand
uuggugaacgaguagauua

SEQ ID NO: 1294305 - RNA, 19 nt, Homo sapiens
  misc_RNA (1)...(19): siRNA sense strand
gucauugcugugauuguua

SEQ ID NO: 1294306 - RNA, 19 nt, Homo sapiens
  misc_RNA (1)...(19): siRNA sense strand
ggagccaccaacauuugaa

SEQ ID NO: 1294307 - RNA, 19 nt, Homo sapiens
  misc_RNA (1)...(19): siRNA sense strand
gcgcuuuccuggguugcuu

SEQ ID NO: 1294308 - RNA, 19 nt, Homo sapiens
  misc_RNA (1)...(19): siRNA sense strand
uacuacaaagcaacaguua

SEQ ID NO: 1294309 - RNA, 19 nt, Homo sapiens
  misc_RNA (1)...(19): siRNA sense strand
cuugaugcaguaacuuaua

SEQ ID NO: 1294310 - RNA, 19 nt, Homo sapiens
  misc_RNA (1)...(19): siRNA sense strand
aaacauguccauauauacg

SEQ ID NO: 1294311 - RNA, 19 nt, Homo sapiens
  misc_RNA (1)...(19): siRNA sense strand
guguaaaguggucaaaugu

SEQ ID NO: 1294312 - RNA, 19 nt, Homo sapiens
  misc_RNA (1)...(19): siRNA sense strand
cuuacgaguuugguuauca

SEQ ID NO: 1294313 - RNA, 19 nt, Homo sapiens
  misc_RNA (1)...(19): siRNA sense strand
uacgggauccuuuaaaugg

SEQ ID NO: 1294314 - RNA, 19 nt, Homo sapiens
  misc_RNA (1)...(19): siRNA sense strand
aaccaaaacccuacuauga

SEQ ID NO: 1294315 - RNA, 19 nt, Homo sapiens
  misc_RNA (1)...(19): siRNA sense strand
cccaauaugugaaaagguu

SEQ ID NO: 1294316 - RNA, 19 nt, Homo sapiens
  misc_RNA (1)...(19): siRNA sense strand
cgauggcagcgacacaauu

SEQ ID NO: 1294317 - RNA, 19 nt, Homo sapiens
  misc_RNA (1)...(19): siRNA sense strand
gauccauuuucacuuauug

SEQ ID NO: 1294318 - RNA, 19 nt, Homo sapiens
  misc_RNA (1)...(19): siRNA sense strand
uugaugcaguaacuuauag

SEQ ID NO: 1294319 - RNA, 19 nt, Homo sapiens
  misc_RNA (1)...(19): siRNA sense strand
guaucuugaugcaguaacu

SEQ ID NO: 1294320 - RNA, 19 nt, Homo sapiens
  misc_RNA (1)...(19): siRNA sense strand
caacauuugaagcuaugga

SEQ ID NO: 1294321 - RNA, 19 nt, Homo sapiens
  misc_RNA (1)...(19): siRNA sense strand
gagauuggugaacgaguag

SEQ ID NO: 1294322 - RNA, 19 nt, Homo sapiens
  misc_RNA (1)...(19): siRNA sense strand
ggagagagcacgauuuauu

SEQ ID NO: 1294323 - RNA, 19 nt, Homo sapiens
  misc_RNA (1)...(19): siRNA sense strand
agagaaacauguccauaua

SEQ ID NO: 1294324 - RNA, 19 nt, Homo sapiens
  misc_RNA (1)...(19): siRNA sense strand
cagaugcacuuuauuugua

SEQ ID NO: 1294325 - RNA, 19 nt, Homo sapiens
  misc_RNA (1)...(19): siRNA sense strand
ggacuuacgaguuugguua

SEQ ID NO: 1294326 - RNA, 19 nt, Homo sapiens
  misc_RNA (1)...(19): siRNA sense strand
aaacagauaucaggauuug

SEQ ID NO: 1294327 - RNA, 19 nt, Homo sapiens
  misc_RNA (1)...(19): siRNA sense strand
cuauggagcucauugguaa

SEQ ID NO: 1294328 - RNA, 19 nt, Homo sapiens
  misc_RNA (1)...(19): siRNA sense strand
aaacacaccuuuagugaag

SEQ ID NO: 1294329 - RNA, 19 nt, Homo sapiens
  misc_RNA (1)...(19): siRNA sense strand
gaacuuaaaggaucaguag

SEQ ID NO: 1294330 - RNA, 19 nt, Homo sapiens
  misc_RNA (1)...(19): siRNA sense strand
gaaaacagauaucaggauu

SEQ ID NO: 1294331 - RNA, 19 nt, Homo sapiens
  misc_RNA (1)...(19): siRNA sense strand
uaaaggaucaguagcaauu

SEQ ID NO: 1294332 - RNA, 19 nt, Homo sapiens
  misc_RNA (1)...(19): siRNA sense strand
aaaugggacuuacgaguuu

SEQ ID NO: 1294333 - RNA, 19 nt, Homo sapiens
  misc_RNA (1)...(19): siRNA sense strand
guuaucagaugcacuuuau

SEQ ID NO: 1294334 - RNA, 19 nt, Homo sapiens
  misc_RNA (1)...(19): siRNA sense strand
gagcugaauaugccacuua

SEQ ID NO: 1294335 - RNA, 19 nt, Homo sapiens
  misc_RNA (1)...(19): siRNA sense strand
ugagauuggugaacgagua

SEQ ID NO: 1294336 - RNA, 19 nt, Homo sapiens
  misc_RNA (1)...(19): siRNA sense strand
gugaacgaguagauuauaa

SEQ ID NO: 1294337 - RNA, 19 nt, Homo sapiens
  misc_RNA (1)...(19): siRNA sense strand
gagagagcacgauuuauug

SEQ ID NO: 1294338 - RNA, 19 nt, Homo sapiens
  misc_RNA (1)...(19): siRNA sense strand
caaaugggacuuacgaguu

SEQ ID NO: 1294339 - RNA, 19 nt, Homo sapiens
  misc_RNA (1)...(19): siRNA sense strand
ggucauugcugugauuguu

SEQ ID NO: 1294340 - RNA, 19 nt, Homo sapiens
  misc_RNA (1)...(19): siRNA sense strand
ccagauccauuuucacuua

SEQ ID NO: 1294341 - RNA, 19 nt, Homo sapiens
  misc_RNA (1)...(19): siRNA sense strand
gaaggaauacuugacaguu

SEQ ID NO: 1294342 - RNA, 19 nt, Homo sapiens
  misc_RNA (1)...(19): siRNA sense strand
aaggaauacuugacaguuu

SEQ ID NO: 1294343 - RNA, 19 nt, Homo sapiens
  misc_RNA (1)...(19): siRNA sense strand
ucagaugacgccuguuaua

SEQ ID NO: 1294344 - RNA, 19 nt, Homo sapiens
  misc_RNA (1)...(19): siRNA sense strand
gaaaacacaccuuuaguga

SEQ ID NO: 1294345 - RNA, 19 nt, Homo sapiens
  misc_RNA (1)...(19): siRNA sense strand
gaugacgccuguuauagag

SEQ ID NO: 1294346 - RNA, 19 nt, Homo sapiens
  misc_RNA (1)...(19): siRNA sense strand
gagaaacauguccauauau

SEQ ID NO: 1294347 - RNA, 19 nt, Homo sapiens
  misc_RNA (1)...(19): siRNA sense strand
ccacuuaccagacuaaauc

SEQ ID NO: 1294348 - RNA, 19 nt, Homo sapiens
  misc_RNA (1)...(19): siRNA sense strand
acgaguagauuauaagugu

SEQ ID NO: 1294349 - RNA, 19 nt, Homo sapiens
  misc_RNA (1)...(19): siRNA sense strand
cuacaaagcaacaguuaug

SEQ ID NO: 1294350 - RNA, 19 nt, Homo sapiens
  misc_RNA (1)...(19): siRNA sense strand
ccaccaacauuugaagcua

SEQ ID NO: 1294351 - RNA, 19 nt, Homo sapiens
  misc_RNA (1)...(19): siRNA sense strand
uauacgggauccuuuaaau

SEQ ID NO: 1294352 - RNA, 19 nt, Homo sapiens
  misc_RNA (1)...(19): siRNA sense strand
cgaguuugguuaucagaug

SEQ ID NO: 1294353 - RNA, 19 nt, Homo sapiens
  misc_RNA (1)...(19): siRNA sense strand
gaacgaguagauuauaagu

SEQ ID NO: 1294354 - RNA, 19 nt, Homo sapiens
  misc_RNA (1)...(19): siRNA sense strand
gugaggagccaccaacauu

SEQ ID NO: 1294355 - RNA, 19 nt, Homo sapiens
  misc_RNA (1)...(19): siRNA sense strand
gauggcagcgacacaauug

SEQ ID NO: 1294356 - RNA, 19 nt, Homo sapiens
  misc_RNA (1)...(19): siRNA sense strand
ucucagaugacgccuguua

SEQ ID NO: 1294357 - RNA, 19 nt, Homo sapiens
  misc_RNA (1)...(19): siRNA sense strand
gaggagccaccaacauuug

SEQ ID NO: 1294358 - RNA, 19 nt, Homo sapiens
  misc_RNA (1)...(19): siRNA sense strand
gcuauggagcucauuggua

SEQ ID NO: 1294359 - RNA, 19 nt, Homo sapiens
  misc_RNA (1)...(19): siRNA sense strand
acacaccuuuagugaagua

SEQ ID NO: 1294360 - RNA, 19 nt, Homo sapiens
  misc_RNA (1)...(19): siRNA sense strand
uagagaaacauguccauau

SEQ ID NO: 1294361 - RNA, 19 nt, Homo sapiens
  misc_RNA (1)...(19): siRNA sense strand
ggugaacgaguagauuaua

SEQ ID NO: 1294362 - RNA, 19 nt, Homo sapiens
  misc_RNA (1)...(19): siRNA sense strand
gaaguagaaguauuugagu

SEQ ID NO: 1294363 - RNA, 19 nt, Homo sapiens
  misc_RNA (1)...(19): siRNA sense strand
gaaacauguccauauauac

SEQ ID NO: 1294364 - RNA, 19 nt, Homo sapiens
  misc_RNA (1)...(19): siRNA sense strand
ugacgccuguuauagagaa

SEQ ID NO: 1294365 - RNA, 19 nt, Homo sapiens
  misc_RNA (1)...(19): siRNA sense strand
cgaguagauuauaagugua

SEQ ID NO: 1294366 - RNA, 19 nt, Homo sapiens
  misc_RNA (1)...(19): siRNA sense strand
gcacuuuauuuguaaugag

SEQ ID NO: 1294367 - RNA, 19 nt, Homo sapiens
  misc_RNA (1)...(19): siRNA sense strand
guagaaguauuugaguauc

SEQ ID NO: 1294368 - RNA, 19 nt, Homo sapiens
  misc_RNA (1)...(19): siRNA sense strand
guauuugaguaucuugaug

SEQ ID NO: 1294369 - RNA, 19 nt, Homo sapiens
  misc_RNA (1)...(19): siRNA sense strand
aggaauacuugacaguuug

SEQ ID NO: 1294370 - RNA, 19 nt, Homo sapiens
  misc_RNA (1)...(19): siRNA sense strand
ccaaaacccuacuaugaga

SEQ ID NO: 1294371 - RNA, 19 nt, Homo sapiens
  misc_RNA (1)...(19): siRNA sense strand
aguguaaaguggucaaaug

SEQ ID NO: 1294372 - RNA, 19 nt, Homo sapiens
  misc_RNA (1)...(19): siRNA sense strand
ccacccauacuauuuguga

SEQ ID NO: 1294373 - RNA, 19 nt, Homo sapiens
  misc_RNA (1)...(19): siRNA sense strand
uuggagagagcacgauuua

SEQ ID NO: 1294374 - RNA, 19 nt, Homo sapiens
  misc_RNA (1)...(19): siRNA sense strand
gguuaucagaugcacuuua

SEQ ID NO: 1294375 - RNA, 19 nt, Homo sapiens
  misc_RNA (1)...(19): siRNA sense strand
caccaacauuugaagcuau

SEQ ID NO: 1294376 - RNA, 19 nt, Homo sapiens
  misc_RNA (1)...(19): siRNA sense strand
ugaggagccaccaacauuu

SEQ ID NO: 1294377 - RNA, 19 nt, Homo sapiens
  misc_RNA (1)...(19): siRNA sense strand
ggaaggaauacuugacagu

SEQ ID NO: 1294378 - RNA, 19 nt, Homo sapiens
  misc_RNA (1)...(19): siRNA sense strand
gaggaaggaauacuugaca

SEQ ID NO: 1294379 - RNA, 19 nt, Homo sapiens
  misc_RNA (1)...(19): siRNA sense strand
ugaguaucuugaugcagua

SEQ ID NO: 1294380 - RNA, 19 nt, Homo sapiens
  misc_RNA (1)...(19): siRNA sense strand
caccuuuagugaaguagaa

SEQ ID NO: 1294381 - RNA, 19 nt, Homo sapiens
  misc_RNA (1)...(19): siRNA sense strand
acagauaucaggauuugga

SEQ ID NO: 1294382 - RNA, 19 nt, Homo sapiens
  misc_RNA (1)...(19): siRNA sense strand
ucauugcugugauuguuau

SEQ ID NO: 1294383 - RNA, 19 nt, Homo sapiens
  misc_RNA (1)...(19): siRNA sense strand
ucagaugcacuuuauuugu

SEQ ID NO: 1294384 - RNA, 19 nt, Homo sapiens
  misc_RNA (1)...(19): siRNA sense strand
gugcugcuccagaguguaa

SEQ ID NO: 1294385 - RNA, 19 nt, Homo sapiens
  misc_RNA (1)...(19): siRNA sense strand
ggaaaacacaccuuuagug

SEQ ID NO: 1294386 - RNA, 19 nt, Homo sapiens
  misc_RNA (1)...(19): siRNA sense strand
aaggaucaguagcaauuug

SEQ ID NO: 1294387 - RNA, 19 nt, Homo sapiens
  misc_RNA (1)...(19): siRNA sense strand
uauauacgggauccuuuaa

SEQ ID NO: 1294388 - RNA, 19 nt, Homo sapiens
  misc_RNA (1)...(19): siRNA sense strand
ugaaguagaaguauuugag

SEQ ID NO: 1294389 - RNA, 19 nt, Homo sapiens
  misc_RNA (1)...(19): siRNA sense strand
cuugacaguuuggauguuu

SEQ ID NO: 1294390 - RNA, 19 nt, Homo sapiens
  misc_RNA (1)...(19): siRNA sense strand
cauauauacgggauccuuu

SEQ ID NO: 1294391 - RNA, 19 nt, Homo sapiens
  misc_RNA (1)...(19): siRNA sense strand
auauauacgggauccuuua

SEQ ID NO: 1294392 - RNA, 19 nt, Homo sapiens
  misc_RNA (1)...(19): siRNA sense strand
cuuaaaggaucaguagcaa

SEQ ID NO: 1294393 - RNA, 19 nt, Homo sapiens
  misc_RNA (1)...(19): siRNA sense strand
uaaaccugaggaaggaaua

SEQ ID NO: 1294394 - RNA, 19 nt, Homo sapiens
  misc_RNA (1)...(19): siRNA sense strand
agaugacgccuguuauaga

SEQ ID NO: 1294395 - RNA, 19 nt, Homo sapiens
  misc_RNA (1)...(19): siRNA sense strand
ugugauuguuauugccaua

SEQ ID NO: 1294396 - RNA, 19 nt, Homo sapiens
  misc_RNA (1)...(19): siRNA sense strand
gagagcacgauuuauugug

SEQ ID NO: 1294397 - RNA, 19 nt, Homo sapiens
  misc_RNA (1)...(19): siRNA sense strand
gaaguauuugaguaucuug

SEQ ID NO: 1294398 - RNA, 19 nt, Homo sapiens
  misc_RNA (1)...(19): siRNA sense strand
ggcuaccugucucagauga

SEQ ID NO: 1294399 - RNA, 19 nt, Homo sapiens
  misc_RNA (1)...(19): siRNA sense strand
gauaucaggauuuggaaaa

SEQ ID NO: 1294400 - RNA, 19 nt, Homo sapiens
  misc_RNA (1)...(19): siRNA sense strand
ccucuugccacccauacua

SEQ ID NO: 1294401 - RNA, 19 nt, Homo sapiens
  misc_RNA (1)...(19): siRNA sense strand
ccaugguguugcugcugua

SEQ ID NO: 1294402 - RNA, 19 nt, Homo sapiens
  misc_RNA (1)...(19): siRNA sense strand
cagaugacgccuguuauag

SEQ ID NO: 1294403 - RNA, 19 nt, Homo sapiens
  misc_RNA (1)...(19): siRNA sense strand
cagaugguggagcugaaua

SEQ ID NO: 1294404 - RNA, 19 nt, Homo sapiens
  misc_RNA (1)...(19): siRNA sense strand
uuggugaacgaguagauua

SEQ ID NO: 1294405 - RNA, 19 nt, Homo sapiens
  misc_RNA (1)...(19): siRNA sense strand
gucauugcugugauuguua

SEQ ID NO: 1294406 - RNA, 19 nt, Homo sapiens
  misc_RNA (1)...(19): siRNA sense strand
ggagccaccaacauuugaa

SEQ ID NO: 1294407 - RNA, 19 nt, Homo sapiens
  misc_RNA (1)...(19): siRNA sense strand
gcgcuuuccuggguugcuu

SEQ ID NO: 1294408 - RNA, 19 nt, Homo sapiens
  misc_RNA (1)...(19): siRNA sense strand
uacuacaaagcaacaguua

SEQ ID NO: 1294409 - RNA, 19 nt, Homo sapiens
  misc_RNA (1)...(19): siRNA sense strand
cuugaugcaguaacuuaua

SEQ ID NO: 1294410 - RNA, 19 nt, Homo sapiens
  misc_RNA (1)...(19): siRNA sense strand
aaacauguccauauauacg

SEQ ID NO: 1294411 - RNA, 19 nt, Homo sapiens
  misc_RNA (1)...(19): siRNA sense strand
guguaaaguggucaaaugu

SEQ ID NO: 1294412 - RNA, 19 nt, Homo sapiens
  misc_RNA (1)...(19): siRNA sense strand
cuuacgaguuugguuauca

SEQ ID NO: 1294413 - RNA, 19 nt, Homo sapiens
  misc_RNA (1)...(19): siRNA sense strand
uacgggauccuuuaaaugg

SEQ ID NO: 1294414 - RNA, 19 nt, Homo sapiens
  misc_RNA (1)...(19): siRNA sense strand
gcagaugguggagcugaau

SEQ ID NO: 1294415 - RNA, 19 nt, Homo sapiens
  misc_RNA (1)...(19): siRNA sense strand
aaccaaaacccuacuauga

SEQ ID NO: 1294416 - RNA, 19 nt, Homo sapiens
  misc_RNA (1)...(19): siRNA sense strand
cccaauaugugaaaagguu

SEQ ID NO: 1294417 - RNA, 19 nt, Homo sapiens
  misc_RNA (1)...(19): siRNA sense strand
ggagcugaauaugccacuu

SEQ ID NO: 1294418 - RNA, 19 nt, Homo sapiens
  misc_RNA (1)...(19): siRNA sense strand
cgauggcagcgacacaauu

SEQ ID NO: 1294419 - RNA, 19 nt, Homo sapiens
  misc_RNA (1)...(19): siRNA sense strand
gauccauuuucacuuauug

SEQ ID NO: 1294420 - RNA, 19 nt, Homo sapiens
  misc_RNA (1)...(19): siRNA sense strand
uugaugcaguaacuuauag

SEQ ID NO: 1294421 - RNA, 19 nt, Homo sapiens
  misc_RNA (1)...(19): siRNA sense strand
guaucuugaugcaguaacu

SEQ ID NO: 1294422 - RNA, 19 nt, Homo sapiens
  misc_RNA (1)...(19): siRNA sense strand
ggagagagcacgauuuauu

SEQ ID NO: 1294423 - RNA, 19 nt, Homo sapiens
  misc_RNA (1)...(19): siRNA sense strand
agagaaacauguccauaua

SEQ ID NO: 1294424 - RNA, 19 nt, Homo sapiens
  misc_RNA (1)...(19): siRNA sense strand
cagaugcacuuuauuugua

SEQ ID NO: 1294425 - RNA, 19 nt, Homo sapiens
  misc_RNA (1)...(19): siRNA sense strand
ggacuuacgaguuugguua

SEQ ID NO: 1294426 - RNA, 19 nt, Homo sapiens
  misc_RNA (1)...(19): siRNA sense strand
aaacagauaucaggauuug

SEQ ID NO: 1294427 - RNA, 19 nt, Homo sapiens
  misc_RNA (1)...(19): siRNA sense strand
cuauggagcucauugguaa

SEQ ID NO: 1294428 - RNA, 19 nt, Homo sapiens
  misc_RNA (1)...(19): siRNA sense strand
aaacacaccuuuagugaag

SEQ ID NO: 1294429 - RNA, 19 nt, Homo sapiens
  misc_RNA (1)...(19): siRNA sense strand
gaacuuaaaggaucaguag

SEQ ID NO: 1294430 - RNA, 19 nt, Homo sapiens
  misc_RNA (1)...(19): siRNA sense strand
gaaaacagauaucaggauu

SEQ ID NO: 1294431 - RNA, 19 nt, Homo sapiens
  misc_RNA (1)...(19): siRNA sense strand
uaaaggaucaguagcaauu

SEQ ID NO: 1294432 - RNA, 19 nt, Homo sapiens
  misc_RNA (1)...(19): siRNA sense strand
aaaugggacuuacgaguuu

SEQ ID NO: 1294433 - RNA, 19 nt, Homo sapiens
  misc_RNA (1)...(19): siRNA sense strand
guuaucagaugcacuuuau

SEQ ID NO: 1294434 - RNA, 19 nt, Homo sapiens
  misc_RNA (1)...(19): siRNA sense strand
gagcugaauaugccacuua

SEQ ID NO: 1294435 - RNA, 19 nt, Homo sapiens
  misc_RNA (1)...(19): siRNA sense strand
gagcagagaggcugaauag

SEQ ID NO: 1294436 - RNA, 19 nt, Homo sapiens
  misc_RNA (1)...(19): siRNA sense strand
ugagauuggugaacgagua

SEQ ID NO: 1294437 - RNA, 19 nt, Homo sapiens
  misc_RNA (1)...(19): siRNA sense strand
gugaacgaguagauuauaa

SEQ ID NO: 1294438 - RNA, 19 nt, Homo sapiens
  misc_RNA (1)...(19): siRNA sense strand
gagagagcacgauuuauug

SEQ ID NO: 1294439 - RNA, 19 nt, Homo sapiens
  misc_RNA (1)...(19): siRNA sense strand
caaaugggacuuacgaguu

SEQ ID NO: 1294440 - RNA, 19 nt, Homo sapiens
  misc_RNA (1)...(19): siRNA sense strand
ggucauugcugugauuguu

SEQ ID NO: 1294441 - RNA, 19 nt, Homo sapiens
  misc_RNA (1)...(19): siRNA sense strand
ccagauccauuuucacuua

SEQ ID NO: 1294442 - RNA, 19 nt, Homo sapiens
  misc_RNA (1)...(19): siRNA sense strand
gaaggaauacuugacaguu

SEQ ID NO: 1294443 - RNA, 19 nt, Homo sapiens
  misc_RNA (1)...(19): siRNA sense strand
aaggaauacuugacaguuu

SEQ ID NO: 1294444 - RNA, 19 nt, Homo sapiens
  misc_RNA (1)...(19): siRNA sense strand
ucagaugacgccuguuaua

SEQ ID NO: 1294445 - RNA, 19 nt, Homo sapiens
  misc_RNA (1)...(19): siRNA sense strand
gaaaacacaccuuuaguga

SEQ ID NO: 1294446 - RNA, 19 nt, Homo sapiens
  misc_RNA (1)...(19): siRNA sense strand
gaugacgccuguuauagag

SEQ ID NO: 1294447 - RNA, 19 nt, Homo sapiens
  misc_RNA (1)...(19): siRNA sense strand
gagaaacauguccauauau

SEQ ID NO: 1294448 - RNA, 19 nt, Homo sapiens
  misc_RNA (1)...(19): siRNA sense strand
ccacuuaccagacuaaauc

SEQ ID NO: 1294449 - RNA, 19 nt, Homo sapiens
  misc_RNA (1)...(19): siRNA sense strand
acgaguagauuauaagugu

SEQ ID NO: 1294450 - RNA, 19 nt, Homo sapiens
  misc_RNA (1)...(19): siRNA sense strand
cuacaaagcaacaguuaug

SEQ ID NO: 1294451 - RNA, 19 nt, Homo sapiens
  misc_RNA (1)...(19): siRNA sense strand
ccaccaacauuugaagcua

SEQ ID NO: 1294452 - RNA, 19 nt, Homo sapiens
  misc_RNA (1)...(19): siRNA sense strand
uauacgggauccuuuaaau

SEQ ID NO: 1294453 - RNA, 19 nt, Homo sapiens
  misc_RNA (1)...(19): siRNA sense strand
cgaguuugguuaucagaug

SEQ ID NO: 1294454 - RNA, 19 nt, Homo sapiens
  misc_RNA (1)...(19): siRNA sense strand
gaacgaguagauuauaagu

SEQ ID NO: 1294455 - RNA, 19 nt, Homo sapiens
  misc_RNA (1)...(19): siRNA sense strand
gugaggagccaccaacauu

SEQ ID NO: 1294456 - RNA, 19 nt, Homo sapiens
  misc_RNA (1)...(19): siRNA sense strand
gauggcagcgacacaauug

SEQ ID NO: 1294457 - RNA, 19 nt, Homo sapiens
  misc_RNA (1)...(19): siRNA sense strand
ucucagaugacgccuguua

SEQ ID NO: 1294458 - RNA, 19 nt, Homo sapiens
  misc_RNA (1)...(19): siRNA sense strand
acacaccuuuagugaagua

SEQ ID NO: 1294459 - RNA, 19 nt, Homo sapiens
  misc_RNA (1)...(19): siRNA sense strand
gcuauggagcucauuggua

SEQ ID NO: 1294460 - RNA, 19 nt, Homo sapiens
  misc_RNA (1)...(19): siRNA sense strand
gaggagccaccaacauuug

SEQ ID NO: 1294461 - RNA, 19 nt, Homo sapiens
  misc_RNA (1)...(19): siRNA sense strand
uagagaaacauguccauau

SEQ ID NO: 1294462 - RNA, 19 nt, Homo sapiens
  misc_RNA (1)...(19): siRNA sense strand
guuccaaagugucuuaaag

SEQ ID NO: 1294463 - RNA, 19 nt, Homo sapiens
  misc_RNA (1)...(19): siRNA sense strand
ggugaacgaguagauuaua

SEQ ID NO: 1294464 - RNA, 19 nt, Homo sapiens
  misc_RNA (1)...(19): siRNA sense strand
gaaguagaaguauuugagu

SEQ ID NO: 1294465 - RNA, 19 nt, Homo sapiens
  misc_RNA (1)...(19): siRNA sense strand
gaaacauguccauauauac

SEQ ID NO: 1294466 - RNA, 19 nt, Homo sapiens
  misc_RNA (1)...(19): siRNA sense strand
ugacgccuguuauagagaa

SEQ ID NO: 1294467 - RNA, 19 nt, Homo sapiens
  misc_RNA (1)...(19): siRNA sense strand
cgaguagauuauaagugua

SEQ ID NO: 1294468 - RNA, 19 nt, Homo sapiens
  misc_RNA (1)...(19): siRNA sense strand
gcacuuuauuuguaaugag

SEQ ID NO: 1294469 - RNA, 19 nt, Homo sapiens
  misc_RNA (1)...(19): siRNA sense strand
guagaaguauuugaguauc

SEQ ID NO: 1294470 - RNA, 19 nt, Homo sapiens
  misc_RNA (1)...(19): siRNA sense strand
guauuugaguaucuugaug

SEQ ID NO: 1294471 - RNA, 19 nt, Homo sapiens
  misc_RNA (1)...(19): siRNA sense strand
aggaauacuugacaguuug

SEQ ID NO: 1294472 - RNA, 19 nt, Homo sapiens
  misc_RNA (1)...(19): siRNA sense strand
ccaaaacccuacuaugaga

SEQ ID NO: 1294473 - RNA, 19 nt, Homo sapiens
  misc_RNA (1)...(19): siRNA sense strand
aguguaaaguggucaaaug

SEQ ID NO: 1294474 - RNA, 19 nt, Homo sapiens
  misc_RNA (1)...(19): siRNA sense strand
ccacccauacuauuuguga

SEQ ID NO: 1294475 - RNA, 19 nt, Homo sapiens
  misc_RNA (1)...(19): siRNA sense strand
uuggagagagcacgauuua

SEQ ID NO: 1294476 - RNA, 19 nt, Homo sapiens
  misc_RNA (1)...(19): siRNA sense strand
gguuaucagaugcacuuua

SEQ ID NO: 1294477 - RNA, 19 nt, Homo sapiens
  misc_RNA (1)...(19): siRNA sense strand
caccaacauuugaagcuau

SEQ ID NO: 1294478 - RNA, 19 nt, Homo sapiens
  misc_RNA (1)...(19): siRNA sense strand
ugaggagccaccaacauuu

SEQ ID NO: 1294479 - RNA, 19 nt, Homo sapiens
  misc_RNA (1)...(19): siRNA sense strand
ggaaggaauacuugacagu

SEQ ID NO: 1294480 - RNA, 19 nt, Homo sapiens
  misc_RNA (1)...(19): siRNA sense strand
gaggaaggaauacuugaca

SEQ ID NO: 1294481 - RNA, 19 nt, Homo sapiens
  misc_RNA (1)...(19): siRNA sense strand
ccaguuccaaagugucuua

SEQ ID NO: 1294482 - RNA, 19 nt, Homo sapiens
  misc_RNA (1)...(19): siRNA sense strand
ugaguaucuugaugcagua

SEQ ID NO: 1294483 - RNA, 19 nt, Homo sapiens
  misc_RNA (1)...(19): siRNA sense strand
caccuuuagugaaguagaa

SEQ ID NO: 1294484 - RNA, 19 nt, Homo sapiens
  misc_RNA (1)...(19): siRNA sense strand
acagauaucaggauuugga

SEQ ID NO: 1294485 - RNA, 19 nt, Homo sapiens
  misc_RNA (1)...(19): siRNA sense strand
ucauugcugugauuguuau

SEQ ID NO: 1294486 - RNA, 19 nt, Homo sapiens
  misc_RNA (1)...(19): siRNA sense strand
ucagaugcacuuuauuugu

SEQ ID NO: 1294487 - RNA, 19 nt, Homo sapiens
  misc_RNA (1)...(19): siRNA sense strand
gugcugcuccagaguguaa

SEQ ID NO: 1294488 - RNA, 19 nt, Homo sapiens
  misc_RNA (1)...(19): siRNA sense strand
ggaaaacacaccuuuagug

SEQ ID NO: 1294489 - RNA, 19 nt, Homo sapiens
  misc_RNA (1)...(19): siRNA sense strand
aaggaucaguagcaauuug

SEQ ID NO: 1294490 - RNA, 19 nt, Homo sapiens
  misc_RNA (1)...(19): siRNA sense strand
uauauacgggauccuuuaa

SEQ ID NO: 1294491 - RNA, 19 nt, Homo sapiens
  misc_RNA (1)...(19): siRNA sense strand
ugaaguagaaguauuugag

SEQ ID NO: 1294492 - RNA, 19 nt, Homo sapiens
  misc_RNA (1)...(19): siRNA sense strand
cuugacaguuuggauguuu

SEQ ID NO: 1294493 - RNA, 19 nt, Homo sapiens
  misc_RNA (1)...(19): siRNA sense strand
cauauauacgggauccuuu

SEQ ID NO: 1294494 - RNA, 19 nt, Homo sapiens
  misc_RNA (1)...(19): siRNA sense strand
auauauacgggauccuuua

SEQ ID NO: 1294495 - RNA, 19 nt, Homo sapiens
  misc_RNA (1)...(19): siRNA sense strand
cuuaaaggaucaguagcaa

SEQ ID NO: 1294496 - RNA, 19 nt, Homo sapiens
  misc_RNA (1)...(19): siRNA sense strand
uaaaccugaggaaggaaua

SEQ ID NO: 1294497 - RNA, 19 nt, Homo sapiens
  misc_RNA (1)...(19): siRNA sense strand
agaugacgccuguuauaga

SEQ ID NO: 1294498 - RNA, 19 nt, Homo sapiens
  misc_RNA (1)...(19): siRNA sense strand
ugugauuguuauugccaua

SEQ ID NO: 1294499 - RNA, 19 nt, Homo sapiens
  misc_RNA (1)...(19): siRNA sense strand
gagagcacgauuuauugug

SEQ ID NO: 1294500 - RNA, 19 nt, Homo sapiens
  misc_RNA (1)...(19): siRNA sense strand
gaaguauuugaguaucuug

SEQ ID NO: 1294501 - RNA, 19 nt, Homo sapiens
  misc_RNA (1)...(19): siRNA sense strand
ggcuaccugucucagauga

SEQ ID NO: 1294502 - RNA, 19 nt, Homo sapiens
  misc_RNA (1)...(19): siRNA sense strand
ccucuugccacccauacua

SEQ ID NO: 1294503 - RNA, 19 nt, Homo sapiens
  misc_RNA (1)...(19): siRNA sense strand
gauaucaggauuuggaaaa

SEQ ID NO: 1294504 - RNA, 19 nt, Homo sapiens
  misc_RNA (1)...(19): siRNA sense strand
ccaugguguugcugcugua

SEQ ID NO: 1294505 - RNA, 19 nt, Homo sapiens
  misc_RNA (1)...(19): siRNA sense strand
cagaugacgccuguuauag

SEQ ID NO: 1294506 - RNA, 19 nt, Homo sapiens
  misc_RNA (1)...(19): siRNA sense strand
cagaugguggagcugaaua

SEQ ID NO: 1294507 - RNA, 19 nt, Homo sapiens
  misc_RNA (1)...(19): siRNA sense strand
gucauugcugugauuguua

SEQ ID NO: 1294508 - RNA, 19 nt, Homo sapiens
  misc_RNA (1)...(19): siRNA sense strand
uuggugaacgaguagauua

SEQ ID NO: 1294509 - RNA, 19 nt, Homo sapiens
  misc_RNA (1)...(19): siRNA sense strand
ggagccaccaacauuugaa

SEQ ID NO: 1294510 - RNA, 19 nt, Homo sapiens
  misc_RNA (1)...(19): siRNA sense strand
gcgcuuuccuggguugcuu

SEQ ID NO: 1294511 - RNA, 19 nt, Homo sapiens
  misc_RNA (1)...(19): siRNA sense strand
uacuacaaagcaacaguua

SEQ ID NO: 1294512 - RNA, 19 nt, Homo sapiens
  misc_RNA (1)...(19): siRNA sense strand
cuugaugcaguaacuuaua

SEQ ID NO: 1294513 - RNA, 19 nt, Homo sapiens
  misc_RNA (1)...(19): siRNA sense strand
aaacauguccauauauacg

SEQ ID NO: 1294514 - RNA, 19 nt, Homo sapiens
  misc_RNA (1)...(19): siRNA sense strand
guguaaaguggucaaaugu

SEQ ID NO: 1294515 - RNA, 19 nt, Homo sapiens
  misc_RNA (1)...(19): siRNA sense strand
cuuacgaguuugguuauca

SEQ ID NO: 1294516 - RNA, 19 nt, Homo sapiens
  misc_RNA (1)...(19): siRNA sense strand
aaccaaaacccuacuauga

SEQ ID NO: 1294517 - RNA, 19 nt, Homo sapiens
  misc_RNA (1)...(19): siRNA sense strand
gcagaugguggagcugaau

SEQ ID NO: 1294518 - RNA, 19 nt, Homo sapiens
  misc_RNA (1)...(19): siRNA sense strand
uacgggauccuuuaaaugg

SEQ ID NO: 1294519 - RNA, 19 nt, Homo sapiens
  misc_RNA (1)...(19): siRNA sense strand
cgauggcagcgacacaauu

SEQ ID NO: 1294520 - RNA, 19 nt, Homo sapiens
  misc_RNA (1)...(19): siRNA sense strand
ggagcugaauaugccacuu

SEQ ID NO: 1294521 - RNA, 19 nt, Homo sapiens
  misc_RNA (1)...(19): siRNA sense strand
caacauuugaagcuaugga

SEQ ID NO: 1294522 - RNA, 19 nt, Homo sapiens
  misc_RNA (1)...(19): siRNA sense strand
ggagagagcacgauuuauu

SEQ ID NO: 1294523 - RNA, 19 nt, Homo sapiens
  misc_RNA (1)...(19): siRNA sense strand
agagaaacauguccauaua

SEQ ID NO: 1294524 - RNA, 19 nt, Homo sapiens
  misc_RNA (1)...(19): siRNA sense strand
cagaugcacuuuauuugua

SEQ ID NO: 1294525 - RNA, 19 nt, Homo sapiens
  misc_RNA (1)...(19): siRNA sense strand
ggacuuacgaguuugguua

SEQ ID NO: 1294526 - RNA, 19 nt, Homo sapiens
  misc_RNA (1)...(19): siRNA sense strand
aaacagauaucaggauuug

SEQ ID NO: 1294527 - RNA, 19 nt, Homo sapiens
  misc_RNA (1)...(19): siRNA sense strand
cuauggagcucauugguaa

SEQ ID NO: 1294528 - RNA, 19 nt, Homo sapiens
  misc_RNA (1)...(19): siRNA sense strand
aaacacaccuuuagugaag

SEQ ID NO: 1294529 - RNA, 19 nt, Homo sapiens
  misc_RNA (1)...(19): siRNA sense strand
gaacuuaaaggaucaguag

SEQ ID NO: 1294530 - RNA, 19 nt, Homo sapiens
  misc_RNA (1)...(19): siRNA sense strand
gaaaacagauaucaggauu

SEQ ID NO: 1294531 - RNA, 19 nt, Homo sapiens
  misc_RNA (1)...(19): siRNA sense strand
uaaaggaucaguagcaauu

SEQ ID NO: 1294532 - RNA, 19 nt, Homo sapiens
  misc_RNA (1)...(19): siRNA sense strand
aaaugggacuuacgaguuu

SEQ ID NO: 1294533 - RNA, 19 nt, Homo sapiens
  misc_RNA (1)...(19): siRNA sense strand
guuaucagaugcacuuuau

SEQ ID NO: 1294534 - RNA, 19 nt, Homo sapiens
  misc_RNA (1)...(19): siRNA sense strand
ugagauuggugaacgagua

SEQ ID NO: 1294535 - RNA, 19 nt, Homo sapiens
  misc_RNA (1)...(19): siRNA sense strand
gugaacgaguagauuauaa

SEQ ID NO: 1294536 - RNA, 19 nt, Homo sapiens
  misc_RNA (1)...(19): siRNA sense strand
gagagagcacgauuuauug

SEQ ID NO: 1294537 - RNA, 19 nt, Homo sapiens
  misc_RNA (1)...(19): siRNA sense strand
caaaugggacuuacgaguu

SEQ ID NO: 1294538 - RNA, 19 nt, Homo sapiens
  misc_RNA (1)...(19): siRNA sense strand
ggucauugcugugauuguu

SEQ ID NO: 1294539 - RNA, 19 nt, Homo sapiens
  misc_RNA (1)...(19): siRNA sense strand
ccagauccauuuucacuua

SEQ ID NO: 1294540 - RNA, 19 nt, Homo sapiens
  misc_RNA (1)...(19): siRNA sense strand
gaaggaauacuugacaguu

SEQ ID NO: 1294541 - RNA, 19 nt, Homo sapiens
  misc_RNA (1)...(19): siRNA sense strand
aaggaauacuugacaguuu

SEQ ID NO: 1294542 - RNA, 19 nt, Homo sapiens
  misc_RNA (1)...(19): siRNA sense strand
ucagaugacgccuguuaua

SEQ ID NO: 1294543 - RNA, 19 nt, Homo sapiens
  misc_RNA (1)...(19): siRNA sense strand
gaaaacacaccuuuaguga

SEQ ID NO: 1294544 - RNA, 19 nt, Homo sapiens
  misc_RNA (1)...(19): siRNA sense strand
gaugacgccuguuauagag

SEQ ID NO: 1294545 - RNA, 19 nt, Homo sapiens
  misc_RNA (1)...(19): siRNA sense strand
gagaaacauguccauauau

SEQ ID NO: 1294546 - RNA, 19 nt, Homo sapiens
  misc_RNA (1)...(19): siRNA sense strand
acgaguagauuauaagugu

SEQ ID NO: 1294547 - RNA, 19 nt, Homo sapiens
  misc_RNA (1)...(19): siRNA sense strand
cuacaaagcaacaguuaug

SEQ ID NO: 1294548 - RNA, 19 nt, Homo sapiens
  misc_RNA (1)...(19): siRNA sense strand
ccaccaacauuugaagcua

SEQ ID NO: 1294549 - RNA, 19 nt, Homo sapiens
  misc_RNA (1)...(19): siRNA sense strand
uauacgggauccuuuaaau

SEQ ID NO: 1294550 - RNA, 19 nt, Homo sapiens
  misc_RNA (1)...(19): siRNA sense strand
cgaguuugguuaucagaug

SEQ ID NO: 1294551 - RNA, 19 nt, Homo sapiens
  misc_RNA (1)...(19): siRNA sense strand
gaacgaguagauuauaagu

SEQ ID NO: 1294552 - RNA, 19 nt, Homo sapiens
  misc_RNA (1)...(19): siRNA sense strand
gugaggagccaccaacauu

SEQ ID NO: 1294553 - RNA, 19 nt, Homo sapiens
  misc_RNA (1)...(19): siRNA sense strand
gauggcagcgacacaauug

SEQ ID NO: 1294554 - RNA, 19 nt, Homo sapiens
  misc_RNA (1)...(19): siRNA sense strand
gcuauggagcucauuggua

SEQ ID NO: 1294555 - RNA, 19 nt, Homo sapiens
  misc_RNA (1)...(19): siRNA sense strand
gaggagccaccaacauuug

SEQ ID NO: 1294556 - RNA, 19 nt, Homo sapiens
  misc_RNA (1)...(19): siRNA sense strand
acacaccuuuagugaagua

SEQ ID NO: 1294557 - RNA, 19 nt, Homo sapiens
  misc_RNA (1)...(19): siRNA sense strand
ucucagaugacgccuguua

SEQ ID NO: 1294558 - RNA, 19 nt, Homo sapiens
  misc_RNA (1)...(19): siRNA sense strand
uagagaaacauguccauau

SEQ ID NO: 1294559 - RNA, 19 nt, Homo sapiens
  misc_RNA (1)...(19): siRNA sense strand
ggugaacgaguagauuaua

SEQ ID NO: 1294560 - RNA, 19 nt, Homo sapiens
  misc_RNA (1)...(19): siRNA sense strand
gaaguagaaguauuugagu

SEQ ID NO: 1294561 - RNA, 19 nt, Homo sapiens
  misc_RNA (1)...(19): siRNA sense strand
gaaacauguccauauauac

SEQ ID NO: 1294562 - RNA, 19 nt, Homo sapiens
  misc_RNA (1)...(19): siRNA sense strand
ugacgccuguuauagagaa

SEQ ID NO: 1294563 - RNA, 19 nt, Homo sapiens
  misc_RNA (1)...(19): siRNA sense strand
cgaguagauuauaagugua

SEQ ID NO: 1294564 - RNA, 19 nt, Homo sapiens
  misc_RNA (1)...(19): siRNA sense strand
gcacuuuauuuguaaugag

SEQ ID NO: 1294565 - RNA, 19 nt, Homo sapiens
  misc_RNA (1)...(19): siRNA sense strand
guagaaguauuugaguauc

SEQ ID NO: 1294566 - RNA, 19 nt, Homo sapiens
  misc_RNA (1)...(19): siRNA sense strand
guauuugaguaucuugaug

SEQ ID NO: 1294567 - RNA, 19 nt, Homo sapiens
  misc_RNA (1)...(19): siRNA sense strand
aggaauacuugacaguuug

SEQ ID NO: 1294568 - RNA, 19 nt, Homo sapiens
  misc_RNA (1)...(19): siRNA sense strand
aguguaaaguggucaaaug

SEQ ID NO: 1294569 - RNA, 19 nt, Homo sapiens
  misc_RNA (1)...(19): siRNA sense strand
ccaaaacccuacuaugaga

SEQ ID NO: 1294570 - RNA, 19 nt, Homo sapiens
  misc_RNA (1)...(19): siRNA sense strand
ccacccauacuauuuguga

SEQ ID NO: 1294571 - RNA, 19 nt, Homo sapiens
  misc_RNA (1)...(19): siRNA sense strand
caccaacauuugaagcuau

SEQ ID NO: 1294572 - RNA, 19 nt, Homo sapiens
  misc_RNA (1)...(19): siRNA sense strand
uuggagagagcacgauuua

SEQ ID NO: 1294573 - RNA, 19 nt, Homo sapiens
  misc_RNA (1)...(19): siRNA sense strand
gguuaucagaugcacuuua

SEQ ID NO: 1294574 - RNA, 19 nt, Homo sapiens
  misc_RNA (1)...(19): siRNA sense strand
ugaggagccaccaacauuu

SEQ ID NO: 1294575 - RNA, 19 nt, Homo sapiens
  misc_RNA (1)...(19): siRNA sense strand
ggaaggaauacuugacagu

SEQ ID NO: 1294576 - RNA, 19 nt, Homo sapiens
  misc_RNA (1)...(19): siRNA sense strand
gaggaaggaauacuugaca

SEQ ID NO: 1294577 - RNA, 19 nt, Homo sapiens
  misc_RNA (1)...(19): siRNA sense strand
ugaguaucuugaugcagua

SEQ ID NO: 1294578 - RNA, 19 nt, Homo sapiens
  misc_RNA (1)...(19): siRNA sense strand
caccuuuagugaaguagaa

SEQ ID NO: 1294579 - RNA, 19 nt, Homo sapiens
  misc_RNA (1)...(19): siRNA sense strand
acagauaucaggauuugga

SEQ ID NO: 1294580 - RNA, 19 nt, Homo sapiens
  misc_RNA (1)...(19): siRNA sense strand
ucauugcugugauuguuau

SEQ ID NO: 1294581 - RNA, 19 nt, Homo sapiens
  misc_RNA (1)...(19): siRNA sense strand
ucagaugcacuuuauuugu

SEQ ID NO: 1294582 - RNA, 19 nt, Homo sapiens
  misc_RNA (1)...(19): siRNA sense strand
gugcugcuccagaguguaa

SEQ ID NO: 1294583 - RNA, 19 nt, Homo sapiens
  misc_RNA (1)...(19): siRNA sense strand
ggaaaacacaccuuuagug

SEQ ID NO: 1294584 - RNA, 19 nt, Homo sapiens
  misc_RNA (1)...(19): siRNA sense strand
aaggaucaguagcaauuug

SEQ ID NO: 1294585 - RNA, 19 nt, Homo sapiens
  misc_RNA (1)...(19): siRNA sense strand
uauauacgggauccuuuaa

SEQ ID NO: 1294586 - RNA, 19 nt, Homo sapiens
  misc_RNA (1)...(19): siRNA sense strand
ugaaguagaaguauuugag

SEQ ID NO: 1294587 - RNA, 19 nt, Homo sapiens
  misc_RNA (1)...(19): siRNA sense strand
cuugacaguuuggauguuu

SEQ ID NO: 1294588 - RNA, 19 nt, Homo sapiens
  misc_RNA (1)...(19): siRNA sense strand
cauauauacgggauccuuu

SEQ ID NO: 1294589 - RNA, 19 nt, Homo sapiens
  misc_RNA (1)...(19): siRNA sense strand
auauauacgggauccuuua

SEQ ID NO: 1294590 - RNA, 19 nt, Homo sapiens
  misc_RNA (1)...(19): siRNA sense strand
cuuaaaggaucaguagcaa

SEQ ID NO: 1294591 - RNA, 19 nt, Homo sapiens
  misc_RNA (1)...(19): siRNA sense strand
uaaaccugaggaaggaaua

SEQ ID NO: 1294592 - RNA, 19 nt, Homo sapiens
  misc_RNA (1)...(19): siRNA sense strand
agaugacgccuguuauaga

SEQ ID NO: 1294593 - RNA, 19 nt, Homo sapiens
  misc_RNA (1)...(19): siRNA sense strand
ugugauuguuauugccaua

SEQ ID NO: 1294594 - RNA, 19 nt, Homo sapiens
  misc_RNA (1)...(19): siRNA sense strand
gagagcacgauuuauugug

SEQ ID NO: 1294595 - RNA, 19 nt, Homo sapiens
  misc_RNA (1)...(19): siRNA sense strand
gaaguauuugaguaucuug

SEQ ID NO: 1294596 - RNA, 19 nt, Homo sapiens
  misc_RNA (1)...(19): siRNA sense strand
ccucuugccacccauacua

SEQ ID NO: 1294597 - RNA, 19 nt, Homo sapiens
  misc_RNA (1)...(19): siRNA sense strand
gauaucaggauuuggaaaa

SEQ ID NO: 1294598 - RNA, 19 nt, Homo sapiens
  misc_RNA (1)...(19): siRNA sense strand
ggcuaccugucucagauga

SEQ ID NO: 1294599 - RNA, 19 nt, Homo sapiens
  misc_RNA (1)...(19): siRNA sense strand
ccaugguguugcugcugua

SEQ ID NO: 1294600 - RNA, 19 nt, Homo sapiens
  misc_RNA (1)...(19): siRNA sense strand
cagaugacgccuguuauag

SEQ ID NO: 1294601 - RNA, 19 nt, Homo sapiens
  misc_RNA (1)...(19): siRNA sense strand
gucauugcugugauuguua

SEQ ID NO: 1294602 - RNA, 19 nt, Homo sapiens
  misc_RNA (1)...(19): siRNA sense strand
uuggugaacgaguagauua

SEQ ID NO: 1294603 - RNA, 19 nt, Homo sapiens
  misc_RNA (1)...(19): siRNA sense strand
ggagccaccaacauuugaa

SEQ ID NO: 1294604 - RNA, 19 nt, Homo sapiens
  misc_RNA (1)...(19): siRNA sense strand
gcgcuuuccuggguugcuu

SEQ ID NO: 1294605 - RNA, 19 nt, Homo sapiens
  misc_RNA (1)...(19): siRNA sense strand
uacuacaaagcaacaguua

SEQ ID NO: 1294606 - RNA, 19 nt, Homo sapiens
  misc_RNA (1)...(19): siRNA sense strand
cuugaugcaguaacuuaua

SEQ ID NO: 1294607 - RNA, 19 nt, Homo sapiens
  misc_RNA (1)...(19): siRNA sense strand
aaacauguccauauauacg

SEQ ID NO: 1294608 - RNA, 19 nt, Homo sapiens
  misc_RNA (1)...(19): siRNA sense strand
guguaaaguggucaaaugu

SEQ ID NO: 1294609 - RNA, 19 nt, Homo sapiens
  misc_RNA (1)...(19): siRNA sense strand
cuuacgaguuugguuauca

SEQ ID NO: 1294610 - RNA, 19 nt, Homo sapiens
  misc_RNA (1)...(19): siRNA sense strand
uacgggauccuuuaaaugg

SEQ ID NO: 1294611 - RNA, 19 nt, Homo sapiens
  misc_RNA (1)...(19): siRNA sense strand
aaccaaaacccuacuauga

SEQ ID NO: 1294612 - RNA, 19 nt, Homo sapiens
  misc_RNA (1)...(19): siRNA sense strand
cccaauaugugaaaagguu

SEQ ID NO: 1294613 - RNA, 19 nt, Homo sapiens
  misc_RNA (1)...(19): siRNA sense strand
cgauggcagcgacacaauu

SEQ ID NO: 1294614 - RNA, 19 nt, Homo sapiens
  misc_RNA (1)...(19): siRNA sense strand
gauccauuuucacuuauug

SEQ ID NO: 1294615 - RNA, 19 nt, Homo sapiens
  misc_RNA (1)...(19): siRNA sense strand
uugaugcaguaacuuauag

SEQ ID NO: 1294616 - RNA, 19 nt, Homo sapiens
  misc_RNA (1)...(19): siRNA sense strand
guaucuugaugcaguaacu

SEQ ID NO: 1294617 - RNA, 19 nt, Homo sapiens
  misc_RNA (1)...(19): siRNA sense strand
caacauuugaagcuaugga

SEQ ID NO: 1294618 - RNA, 19 nt, Homo sapiens
  misc_RNA (1)...(19): siRNA sense strand
gagauuggugaacgaguag

SEQ ID NO: 1294619 - RNA, 19 nt, Homo sapiens
  misc_RNA (1)...(19): siRNA sense strand
ggagagagcacgauuuauu

SEQ ID NO: 1294620 - RNA, 19 nt, Homo sapiens
  misc_RNA (1)...(19): siRNA sense strand
agagaaacauguccauaua

SEQ ID NO: 1294621 - RNA, 19 nt, Homo sapiens
  misc_RNA (1)...(19): siRNA sense strand
cagaugcacuuuauuugua

SEQ ID NO: 1294622 - RNA, 19 nt, Homo sapiens
  misc_RNA (1)...(19): siRNA sense strand
ggacuuacgaguuugguua

SEQ ID NO: 1294623 - RNA, 19 nt, Homo sapiens
  misc_RNA (1)...(19): siRNA sense strand
aaacagauaucaggauuug

SEQ ID NO: 1294624 - RNA, 19 nt, Homo sapiens
  misc_RNA (1)...(19): siRNA sense strand
cuauggagcucauugguaa

SEQ ID NO: 1294625 - RNA, 19 nt, Homo sapiens
  misc_RNA (1)...(19): siRNA sense strand
aaacacaccuuuagugaag

SEQ ID NO: 1294626 - RNA, 19 nt, Homo sapiens
  misc_RNA (1)...(19): siRNA sense strand
gaacuuaaaggaucaguag

SEQ ID NO: 1294627 - RNA, 19 nt, Homo sapiens
  misc_RNA (1)...(19): siRNA sense strand
gaaaacagauaucaggauu

SEQ ID NO: 1294628 - RNA, 19 nt, Homo sapiens
  misc_RNA (1)...(19): siRNA sense strand
uaaaggaucaguagcaauu

SEQ ID NO: 1294629 - RNA, 19 nt, Homo sapiens
  misc_RNA (1)...(19): siRNA sense strand
aaaugggacuuacgaguuu

SEQ ID NO: 1294630 - RNA, 19 nt, Homo sapiens
  misc_RNA (1)...(19): siRNA sense strand
guuaucagaugcacuuuau

SEQ ID NO: 1294631 - RNA, 19 nt, Homo sapiens
  misc_RNA (1)...(19): siRNA sense strand
ugagauuggugaacgagua

SEQ ID NO: 1294632 - RNA, 19 nt, Homo sapiens
  misc_RNA (1)...(19): siRNA sense strand
gugaacgaguagauuauaa

SEQ ID NO: 1294633 - RNA, 19 nt, Homo sapiens
  misc_RNA (1)...(19): siRNA sense strand
gagagagcacgauuuauug

SEQ ID NO: 1294634 - RNA, 19 nt, Homo sapiens
  misc_RNA (1)...(19): siRNA sense strand
caaaugggacuuacgaguu

SEQ ID NO: 1294635 - RNA, 19 nt, Homo sapiens
  misc_RNA (1)...(19): siRNA sense strand
ggucauugcugugauuguu

SEQ ID NO: 1294636 - RNA, 19 nt, Homo sapiens
  misc_RNA (1)...(19): siRNA sense strand
ccagauccauuuucacuua

SEQ ID NO: 1294637 - RNA, 19 nt, Homo sapiens
  misc_RNA (1)...(19): siRNA sense strand
gaaggaauacuugacaguu

SEQ ID NO: 1294638 - RNA, 19 nt, Homo sapiens
  misc_RNA (1)...(19): siRNA sense strand
aaggaauacuugacaguuu

SEQ ID NO: 1294639 - RNA, 19 nt, Homo sapiens
  misc_RNA (1)...(19): siRNA sense strand
ucagaugacgccuguuaua

SEQ ID NO: 1294640 - RNA, 19 nt, Homo sapiens
  misc_RNA (1)...(19): siRNA sense strand
gaaaacacaccuuuaguga

SEQ ID NO: 1294641 - RNA, 19 nt, Homo sapiens
  misc_RNA (1)...(19): siRNA sense strand
gaugacgccuguuauagag

SEQ ID NO: 1294642 - RNA, 19 nt, Homo sapiens
  misc_RNA (1)...(19): siRNA sense strand
gagaaacauguccauauau

SEQ ID NO: 1294643 - RNA, 19 nt, Homo sapiens
  misc_RNA (1)...(19): siRNA sense strand
acgaguagauuauaagugu

SEQ ID NO: 1294644 - RNA, 19 nt, Homo sapiens
  misc_RNA (1)...(19): siRNA sense strand
cuacaaagcaacaguuaug

SEQ ID NO: 1294645 - RNA, 19 nt, Homo sapiens
  misc_RNA (1)...(19): siRNA sense strand
ccaccaacauuugaagcua

SEQ ID NO: 1294646 - RNA, 19 nt, Homo sapiens
  misc_RNA (1)...(19): siRNA sense strand
uauacgggauccuuuaaau

SEQ ID NO: 1294647 - RNA, 19 nt, Homo sapiens
  misc_RNA (1)...(19): siRNA sense strand
cgaguuugguuaucagaug

SEQ ID NO: 1294648 - RNA, 19 nt, Homo sapiens
  misc_RNA (1)...(19): siRNA sense strand
gaacgaguagauuauaagu

SEQ ID NO: 1294649 - RNA, 19 nt, Homo sapiens
  misc_RNA (1)...(19): siRNA sense strand
gugaggagccaccaacauu

SEQ ID NO: 1294650 - RNA, 19 nt, Homo sapiens
  misc_RNA (1)...(19): siRNA sense strand
gauggcagcgacacaauug

SEQ ID NO: 1294651 - RNA, 19 nt, Homo sapiens
  misc_RNA (1)...(19): siRNA sense strand
gcuauggagcucauuggua

SEQ ID NO: 1294652 - RNA, 19 nt, Homo sapiens
  misc_RNA (1)...(19): siRNA sense strand
gaggagccaccaacauuug

SEQ ID NO: 1294653 - RNA, 19 nt, Homo sapiens
  misc_RNA (1)...(19): siRNA sense strand
acacaccuuuagugaagua

SEQ ID NO: 1294654 - RNA, 19 nt, Homo sapiens
  misc_RNA (1)...(19): siRNA sense strand
ucucagaugacgccuguua

SEQ ID NO: 1294655 - RNA, 19 nt, Homo sapiens
  misc_RNA (1)...(19): siRNA sense strand
uagagaaacauguccauau

SEQ ID NO: 1294656 - RNA, 19 nt, Homo sapiens
  misc_RNA (1)...(19): siRNA sense strand
guuccaaagugucuuaaag

SEQ ID NO: 1294657 - RNA, 19 nt, Homo sapiens
  misc_RNA (1)...(19): siRNA sense strand
ggugaacgaguagauuaua

SEQ ID NO: 1294658 - RNA, 19 nt, Homo sapiens
  misc_RNA (1)...(19): siRNA sense strand
gaaguagaaguauuugagu

SEQ ID NO: 1294659 - RNA, 19 nt, Homo sapiens
  misc_RNA (1)...(19): siRNA sense strand
gaaacauguccauauauac

SEQ ID NO: 1294660 - RNA, 19 nt, Homo sapiens
  misc_RNA (1)...(19): siRNA sense strand
ugacgccuguuauagagaa

SEQ ID NO: 1294661 - RNA, 19 nt, Homo sapiens
  misc_RNA (1)...(19): siRNA sense strand
cgaguagauuauaagugua

SEQ ID NO: 1294662 - RNA, 19 nt, Homo sapiens
  misc_RNA (1)...(19): siRNA sense strand
gcacuuuauuuguaaugag

SEQ ID NO: 1294663 - RNA, 19 nt, Homo sapiens
  misc_RNA (1)...(19): siRNA sense strand
guagaaguauuugaguauc

SEQ ID NO: 1294664 - RNA, 19 nt, Homo sapiens
  misc_RNA (1)...(19): siRNA sense strand
guauuugaguaucuugaug

SEQ ID NO: 1294665 - RNA, 19 nt, Homo sapiens
  misc_RNA (1)...(19): siRNA sense strand
aggaauacuugacaguuug

SEQ ID NO: 1294666 - RNA, 19 nt, Homo sapiens
  misc_RNA (1)...(19): siRNA sense strand
ccaaaacccuacuaugaga

SEQ ID NO: 1294667 - RNA, 19 nt, Homo sapiens
  misc_RNA (1)...(19): siRNA sense strand
aguguaaaguggucaaaug

SEQ ID NO: 1294668 - RNA, 19 nt, Homo sapiens
  misc_RNA (1)...(19): siRNA sense strand
ccacccauacuauuuguga

SEQ ID NO: 1294669 - RNA, 19 nt, Homo sapiens
  misc_RNA (1)...(19): siRNA sense strand
caccaacauuugaagcuau

SEQ ID NO: 1294670 - RNA, 19 nt, Homo sapiens
  misc_RNA (1)...(19): siRNA sense strand
uuggagagagcacgauuua

SEQ ID NO: 1294671 - RNA, 19 nt, Homo sapiens
  misc_RNA (1)...(19): siRNA sense strand
gguuaucagaugcacuuua

SEQ ID NO: 1294672 - RNA, 19 nt, Homo sapiens
  misc_RNA (1)...(19): siRNA sense strand
ugaggagccaccaacauuu

SEQ ID NO: 1294673 - RNA, 19 nt, Homo sapiens
  misc_RNA (1)...(19): siRNA sense strand
ggaaggaauacuugacagu

SEQ ID NO: 1294674 - RNA, 19 nt, Homo sapiens
  misc_RNA (1)...(19): siRNA sense strand
gaggaaggaauacuugaca

SEQ ID NO: 1294675 - RNA, 19 nt, Homo sapiens
  misc_RNA (1)...(19): siRNA sense strand
ccaguuccaaagugucuua

SEQ ID NO: 1294676 - RNA, 19 nt, Homo sapiens
  misc_RNA (1)...(19): siRNA sense strand
ugaguaucuugaugcagua

SEQ ID NO: 1294677 - RNA, 19 nt, Homo sapiens
  misc_RNA (1)...(19): siRNA sense strand
caccuuuagugaaguagaa

SEQ ID NO: 1294678 - RNA, 19 nt, Homo sapiens
  misc_RNA (1)...(19): siRNA sense strand
acagauaucaggauuugga

SEQ ID NO: 1294679 - RNA, 19 nt, Homo sapiens
  misc_RNA (1)...(19): siRNA sense strand
ucauugcugugauuguuau

SEQ ID NO: 1294680 - RNA, 19 nt, Homo sapiens
  misc_RNA (1)...(19): siRNA sense strand
ucagaugcacuuuauuugu

SEQ ID NO: 1294681 - RNA, 19 nt, Homo sapiens
  misc_RNA (1)...(19): siRNA sense strand
gugcugcuccagaguguaa

SEQ ID NO: 1294682 - RNA, 19 nt, Homo sapiens
  misc_RNA (1)...(19): siRNA sense strand
ggaaaacacaccuuuagug

SEQ ID NO: 1294683 - RNA, 19 nt, Homo sapiens
  misc_RNA (1)...(19): siRNA sense strand
aaggaucaguagcaauuug

SEQ ID NO: 1294684 - RNA, 19 nt, Homo sapiens
  misc_RNA (1)...(19): siRNA sense strand
uauauacgggauccuuuaa

SEQ ID NO: 1294685 - RNA, 19 nt, Homo sapiens
  misc_RNA (1)...(19): siRNA sense strand
ugaaguagaaguauuugag

SEQ ID NO: 1294686 - RNA, 19 nt, Homo sapiens
  misc_RNA (1)...(19): siRNA sense strand
cuugacaguuuggauguuu

SEQ ID NO: 1294687 - RNA, 19 nt, Homo sapiens
  misc_RNA (1)...(19): siRNA sense strand
cauauauacgggauccuuu

SEQ ID NO: 1294688 - RNA, 19 nt, Homo sapiens
  misc_RNA (1)...(19): siRNA sense strand
auauauacgggauccuuua

SEQ ID NO: 1294689 - RNA, 19 nt, Homo sapiens
  misc_RNA (1)...(19): siRNA sense strand
cuuaaaggaucaguagcaa

SEQ ID NO: 1294690 - RNA, 19 nt, Homo sapiens
  misc_RNA (1)...(19): siRNA sense strand
uaaaccugaggaaggaaua

SEQ ID NO: 1294691 - RNA, 19 nt, Homo sapiens
  misc_RNA (1)...(19): siRNA sense strand
agaugacgccuguuauaga

SEQ ID NO: 1294692 - RNA, 19 nt, Homo sapiens
  misc_RNA (1)...(19): siRNA sense strand
ugugauuguuauugccaua

SEQ ID NO: 1294693 - RNA, 19 nt, Homo sapiens
  misc_RNA (1)...(19): siRNA sense strand
gagagcacgauuuauugug

SEQ ID NO: 1294694 - RNA, 19 nt, Homo sapiens
  misc_RNA (1)...(19): siRNA sense strand
gaaguauuugaguaucuug

SEQ ID NO: 1294695 - RNA, 19 nt, Homo sapiens
  misc_RNA (1)...(19): siRNA sense strand
ggcuaccugucucagauga

SEQ ID NO: 1294696 - RNA, 19 nt, Homo sapiens
  misc_RNA (1)...(19): siRNA sense strand
gauaucaggauuuggaaaa

SEQ ID NO: 1294697 - RNA, 19 nt, Homo sapiens
  misc_RNA (1)...(19): siRNA sense strand
ccucuugccacccauacua

SEQ ID NO: 1294698 - RNA, 19 nt, Homo sapiens
  misc_RNA (1)...(19): siRNA sense strand
ccaugguguugcugcugua

SEQ ID NO: 1294699 - RNA, 19 nt, Homo sapiens
  misc_RNA (1)...(19): siRNA sense strand
cagaugacgccuguuauag

SEQ ID NO: 1294700 - RNA, 19 nt, Homo sapiens
  misc_RNA (1)...(19): siRNA sense strand
uuggugaacgaguagauua

SEQ ID NO: 1294701 - RNA, 19 nt, Homo sapiens
  misc_RNA (1)...(19): siRNA sense strand
gucauugcugugauuguua

SEQ ID NO: 1294702 - RNA, 19 nt, Homo sapiens
  misc_RNA (1)...(19): siRNA sense strand
ggagccaccaacauuugaa

SEQ ID NO: 1294703 - RNA, 19 nt, Homo sapiens
  misc_RNA (1)...(19): siRNA sense strand
gcgcuuuccuggguugcuu

SEQ ID NO: 1294704 - RNA, 19 nt, Homo sapiens
  misc_RNA (1)...(19): siRNA sense strand
uacuacaaagcaacaguua

SEQ ID NO: 1294705 - RNA, 19 nt, Homo sapiens
  misc_RNA (1)...(19): siRNA sense strand
cuugaugcaguaacuuaua

SEQ ID NO: 1294706 - RNA, 19 nt, Homo sapiens
  misc_RNA (1)...(19): siRNA sense strand
aaacauguccauauauacg

SEQ ID NO: 1294707 - RNA, 19 nt, Homo sapiens
  misc_RNA (1)...(19): siRNA sense strand
guguaaaguggucaaaugu

SEQ ID NO: 1294708 - RNA, 19 nt, Homo sapiens
  misc_RNA (1)...(19): siRNA sense strand
cuuacgaguuugguuauca

SEQ ID NO: 1294709 - RNA, 19 nt, Homo sapiens
  misc_RNA (1)...(19): siRNA sense strand
uacgggauccuuuaaaugg

SEQ ID NO: 1294710 - RNA, 19 nt, Homo sapiens
  misc_RNA (1)...(19): siRNA sense strand
aaccaaaacccuacuauga

SEQ ID NO: 1294711 - RNA, 19 nt, Homo sapiens
  misc_RNA (1)...(19): siRNA sense strand
cccaauaugugaaaagguu

SEQ ID NO: 1294712 - RNA, 19 nt, Homo sapiens
  misc_RNA (1)...(19): siRNA sense strand
cgauggcagcgacacaauu

SEQ ID NO: 1294713 - RNA, 19 nt, Homo sapiens
  misc_RNA (1)...(19): siRNA sense strand
gauccauuuucacuuauug

SEQ ID NO: 1294714 - RNA, 19 nt, Homo sapiens
  misc_RNA (1)...(19): siRNA sense strand
uugaugcaguaacuuauag

SEQ ID NO: 1294715 - RNA, 19 nt, Homo sapiens
  misc_RNA (1)...(19): siRNA sense strand
guaucuugaugcaguaacu

SEQ ID NO: 1294716 - RNA, 19 nt, Homo sapiens
  misc_RNA (1)...(19): siRNA sense strand
caacauuugaagcuaugga

SEQ ID NO: 1294717 - RNA, 19 nt, Homo sapiens
  misc_RNA (1)...(19): siRNA sense strand
gagauuggugaacgaguag

SEQ ID NO: 1294718 - RNA, 19 nt, Homo sapiens
  misc_RNA (1)...(19): siRNA sense strand
ggagagagcacgauuuauu

SEQ ID NO: 1294719 - RNA, 19 nt, Homo sapiens
  misc_RNA (1)...(19): siRNA sense strand
agagaaacauguccauaua

SEQ ID NO: 1294720 - RNA, 19 nt, Homo sapiens
  misc_RNA (1)...(19): siRNA sense strand
cagaugcacuuuauuugua

SEQ ID NO: 1294721 - RNA, 19 nt, Homo sapiens
  misc_RNA (1)...(19): siRNA sense strand
ggacuuacgaguuugguua

SEQ ID NO: 1294722 - RNA, 19 nt, Homo sapiens
  misc_RNA (1)...(19): siRNA sense strand
aaacagauaucaggauuug

SEQ ID NO: 1294723 - RNA, 19 nt, Homo sapiens
  misc_RNA (1)...(19): siRNA sense strand
cuauggagcucauugguaa

SEQ ID NO: 1294724 - RNA, 19 nt, Homo sapiens
  misc_RNA (1)...(19): siRNA sense strand
aaacacaccuuuagugaag

SEQ ID NO: 1294725 - RNA, 19 nt, Homo sapiens
  misc_RNA (1)...(19): siRNA sense strand
gaacuuaaaggaucaguag

SEQ ID NO: 1294726 - RNA, 19 nt, Homo sapiens
  misc_RNA (1)...(19): siRNA sense strand
gaaaacagauaucaggauu

SEQ ID NO: 1294727 - RNA, 19 nt, Homo sapiens
  misc_RNA (1)...(19): siRNA sense strand
uaaaggaucaguagcaauu

SEQ ID NO: 1294728 - RNA, 19 nt, Homo sapiens
  misc_RNA (1)...(19): siRNA sense strand
aaaugggacuuacgaguuu

SEQ ID NO: 1294729 - RNA, 19 nt, Homo sapiens
  misc_RNA (1)...(19): siRNA sense strand
guuaucagaugcacuuuau

SEQ ID NO: 1294730 - RNA, 19 nt, Homo sapiens
  misc_RNA (1)...(19): siRNA sense strand
gagcugaauaugccacuua

SEQ ID NO: 1294731 - RNA, 19 nt, Homo sapiens
  misc_RNA (1)...(19): siRNA sense strand
ugagauuggugaacgagua

SEQ ID NO: 1294732 - RNA, 19 nt, Homo sapiens
  misc_RNA (1)...(19): siRNA sense strand
gugaacgaguagauuauaa

SEQ ID NO: 1294733 - RNA, 19 nt, Homo sapiens
  misc_RNA (1)...(19): siRNA sense strand
gagagagcacgauuuauug

SEQ ID NO: 1294734 - RNA, 19 nt, Homo sapiens
  misc_RNA (1)...(19): siRNA sense strand
caaaugggacuuacgaguu

SEQ ID NO: 1294735 - RNA, 19 nt, Homo sapiens
  misc_RNA (1)...(19): siRNA sense strand
ggucauugcugugauuguu

SEQ ID NO: 1294736 - RNA, 19 nt, Homo sapiens
  misc_RNA (1)...(19): siRNA sense strand
ccagauccauuuucacuua

SEQ ID NO: 1294737 - RNA, 19 nt, Homo sapiens
  misc_RNA (1)...(19): siRNA sense strand
gaaggaauacuugacaguu

SEQ ID NO: 1294738 - RNA, 19 nt, Homo sapiens
  misc_RNA (1)...(19): siRNA sense strand
aaggaauacuugacaguuu

SEQ ID NO: 1294739 - RNA, 19 nt, Homo sapiens
  misc_RNA (1)...(19): siRNA sense strand
ucagaugacgccuguuaua

SEQ ID NO: 1294740 - RNA, 19 nt, Homo sapiens
  misc_RNA (1)...(19): siRNA sense strand
gaaaacacaccuuuaguga

SEQ ID NO: 1294741 - RNA, 19 nt, Homo sapiens
  misc_RNA (1)...(19): siRNA sense strand
gaugacgccuguuauagag

SEQ ID NO: 1294742 - RNA, 19 nt, Homo sapiens
  misc_RNA (1)...(19): siRNA sense strand
gagaaacauguccauauau

SEQ ID NO: 1294743 - RNA, 19 nt, Homo sapiens
  misc_RNA (1)...(19): siRNA sense strand
ccacuuaccagacuaaauc

SEQ ID NO: 1294744 - RNA, 19 nt, Homo sapiens
  misc_RNA (1)...(19): siRNA sense strand
acgaguagauuauaagugu

SEQ ID NO: 1294745 - RNA, 19 nt, Homo sapiens
  misc_RNA (1)...(19): siRNA sense strand
cuacaaagcaacaguuaug

SEQ ID NO: 1294746 - RNA, 19 nt, Homo sapiens
  misc_RNA (1)...(19): siRNA sense strand
ccaccaacauuugaagcua

SEQ ID NO: 1294747 - RNA, 19 nt, Homo sapiens
  misc_RNA (1)...(19): siRNA sense strand
uauacgggauccuuuaaau

SEQ ID NO: 1294748 - RNA, 19 nt, Homo sapiens
  misc_RNA (1)...(19): siRNA sense strand
cgaguuugguuaucagaug

SEQ ID NO: 1294749 - RNA, 19 nt, Homo sapiens
  misc_RNA (1)...(19): siRNA sense strand
gaacgaguagauuauaagu

SEQ ID NO: 1294750 - RNA, 19 nt, Homo sapiens
  misc_RNA (1)...(19): siRNA sense strand
gugaggagccaccaacauu

SEQ ID NO: 1294751 - RNA, 19 nt, Homo sapiens
  misc_RNA (1)...(19): siRNA sense strand
gauggcagcgacacaauug

SEQ ID NO: 1294752 - RNA, 19 nt, Homo sapiens
  misc_RNA (1)...(19): siRNA sense strand
ucucagaugacgccuguua

SEQ ID NO: 1294753 - RNA, 19 nt, Homo sapiens
  misc_RNA (1)...(19): siRNA sense strand
gaggagccaccaacauuug

SEQ ID NO: 1294754 - RNA, 19 nt, Homo sapiens
  misc_RNA (1)...(19): siRNA sense strand
gcuauggagcucauuggua

SEQ ID NO: 1294755 - RNA, 19 nt, Homo sapiens
  misc_RNA (1)...(19): siRNA sense strand
acacaccuuuagugaagua

SEQ ID NO: 1294756 - RNA, 19 nt, Homo sapiens
  misc_RNA (1)...(19): siRNA sense strand
uagagaaacauguccauau

SEQ ID NO: 1294757 - RNA, 19 nt, Homo sapiens
  misc_RNA (1)...(19): siRNA sense strand
guuccaaagugucuuaaag

SEQ ID NO: 1294758 - RNA, 19 nt, Homo sapiens
  misc_RNA (1)...(19): siRNA sense strand
ggugaacgaguagauuaua

SEQ ID NO: 1294759 - RNA, 19 nt, Homo sapiens
  misc_RNA (1)...(19): siRNA sense strand
gaaguagaaguauuugagu

SEQ ID NO: 1294760 - RNA, 19 nt, Homo sapiens
  misc_RNA (1)...(19): siRNA sense strand
gaaacauguccauauauac

SEQ ID NO: 1294761 - RNA, 19 nt, Homo sapiens
  misc_RNA (1)...(19): siRNA sense strand
ugacgccuguuauagagaa

SEQ ID NO: 1294762 - RNA, 19 nt, Homo sapiens
  misc_RNA (1)...(19): siRNA sense strand
cgaguagauuauaagugua

SEQ ID NO: 1294763 - RNA, 19 nt, Homo sapiens
  misc_RNA (1)...(19): siRNA sense strand
gcacuuuauuuguaaugag

SEQ ID NO: 1294764 - RNA, 19 nt, Homo sapiens
  misc_RNA (1)...(19): siRNA sense strand
guagaaguauuugaguauc

SEQ ID NO: 1294765 - RNA, 19 nt, Homo sapiens
  misc_RNA (1)...(19): siRNA sense strand
guauuugaguaucuugaug

SEQ ID NO: 1294766 - RNA, 19 nt, Homo sapiens
  misc_RNA (1)...(19): siRNA sense strand
aggaauacuugacaguuug

SEQ ID NO: 1294767 - RNA, 19 nt, Homo sapiens
  misc_RNA (1)...(19): siRNA sense strand
ccaaaacccuacuaugaga

SEQ ID NO: 1294768 - RNA, 19 nt, Homo sapiens
  misc_RNA (1)...(19): siRNA sense strand
aguguaaaguggucaaaug

SEQ ID NO: 1294769 - RNA, 19 nt, Homo sapiens
  misc_RNA (1)...(19): siRNA sense strand
ccacccauacuauuuguga

SEQ ID NO: 1294770 - RNA, 19 nt, Homo sapiens
  misc_RNA (1)...(19): siRNA sense strand
uuggagagagcacgauuua

SEQ ID NO: 1294771 - RNA, 19 nt, Homo sapiens
  misc_RNA (1)...(19): siRNA sense strand
gguuaucagaugcacuuua

SEQ ID NO: 1294772 - RNA, 19 nt, Homo sapiens
  misc_RNA (1)...(19): siRNA sense strand
caccaacauuugaagcuau

SEQ ID NO: 1294773 - RNA, 19 nt, Homo sapiens
  misc_RNA (1)...(19): siRNA sense strand
ugaggagccaccaacauuu

SEQ ID NO: 1294774 - RNA, 19 nt, Homo sapiens
  misc_RNA (1)...(19): siRNA sense strand
ggaaggaauacuugacagu

SEQ ID NO: 1294775 - RNA, 19 nt, Homo sapiens
  misc_RNA (1)...(19): siRNA sense strand
gaggaaggaauacuugaca

SEQ ID NO: 1294776 - RNA, 19 nt, Homo sapiens
  misc_RNA (1)...(19): siRNA sense strand
ccaguuccaaagugucuua

SEQ ID NO: 1294777 - RNA, 19 nt, Homo sapiens
  misc_RNA (1)...(19): siRNA sense strand
ugaguaucuugaugcagua

SEQ ID NO: 1294778 - RNA, 19 nt, Homo sapiens
  misc_RNA (1)...(19): siRNA sense strand
caccuuuagugaaguagaa

SEQ ID NO: 1294779 - RNA, 19 nt, Homo sapiens
  misc_RNA (1)...(19): siRNA sense strand
acagauaucaggauuugga

SEQ ID NO: 1294780 - RNA, 19 nt, Homo sapiens
  misc_RNA (1)...(19): siRNA sense strand
ucauugcugugauuguuau

SEQ ID NO: 1294781 - RNA, 19 nt, Homo sapiens
  misc_RNA (1)...(19): siRNA sense strand
ucagaugcacuuuauuugu

SEQ ID NO: 1294782 - RNA, 19 nt, Homo sapiens
  misc_RNA (1)...(19): siRNA sense strand
gugcugcuccagaguguaa

SEQ ID NO: 1294783 - RNA, 19 nt, Homo sapiens
  misc_RNA (1)...(19): siRNA sense strand
ggaaaacacaccuuuagug

SEQ ID NO: 1294784 - RNA, 19 nt, Homo sapiens
  misc_RNA (1)...(19): siRNA sense strand
aaggaucaguagcaauuug

SEQ ID NO: 1294785 - RNA, 19 nt, Homo sapiens
  misc_RNA (1)...(19): siRNA sense strand
uauauacgggauccuuuaa

SEQ ID NO: 1294786 - RNA, 19 nt, Homo sapiens
  misc_RNA (1)...(19): siRNA sense strand
ugaaguagaaguauuugag

SEQ ID NO: 1294787 - RNA, 19 nt, Homo sapiens
  misc_RNA (1)...(19): siRNA sense strand
cuugacaguuuggauguuu

SEQ ID NO: 1294788 - RNA, 19 nt, Homo sapiens
  misc_RNA (1)...(19): siRNA sense strand
cauauauacgggauccuuu

SEQ ID NO: 1294789 - RNA, 19 nt, Homo sapiens
  misc_RNA (1)...(19): siRNA sense strand
auauauacgggauccuuua

SEQ ID NO: 1294790 - RNA, 19 nt, Homo sapiens
  misc_RNA (1)...(19): siRNA sense strand
cuuaaaggaucaguagcaa

SEQ ID NO: 1294791 - RNA, 19 nt, Homo sapiens
  misc_RNA (1)...(19): siRNA sense strand
uaaaccugaggaaggaaua

SEQ ID NO: 1294792 - RNA, 19 nt, Homo sapiens
  misc_RNA (1)...(19): siRNA sense strand
agaugacgccuguuauaga

SEQ ID NO: 1294793 - RNA, 19 nt, Homo sapiens
  misc_RNA (1)...(19): siRNA sense strand
ugugauuguuauugccaua

SEQ ID NO: 1294794 - RNA, 19 nt, Homo sapiens
  misc_RNA (1)...(19): siRNA sense strand
gagagcacgauuuauugug

SEQ ID NO: 1294795 - RNA, 19 nt, Homo sapiens
  misc_RNA (1)...(19): siRNA sense strand
gaaguauuugaguaucuug

SEQ ID NO: 1294796 - RNA, 19 nt, Homo sapiens
  misc_RNA (1)...(19): siRNA sense strand
ggcuaccugucucagauga

SEQ ID NO: 1294797 - RNA, 19 nt, Homo sapiens
  misc_RNA (1)...(19): siRNA sense strand
gauaucaggauuuggaaaa

SEQ ID NO: 1294798 - RNA, 19 nt, Homo sapiens
  misc_RNA (1)...(19): siRNA sense strand
ccucuugccacccauacua

SEQ ID NO: 1294799 - RNA, 19 nt, Homo sapiens
  misc_RNA (1)...(19): siRNA sense strand
ccaugguguugcugcugua

SEQ ID NO: 1294800 - RNA, 19 nt, Homo sapiens
  misc_RNA (1)...(19): siRNA sense strand
cagaugacgccuguuauag

SEQ ID NO: 1294801 - RNA, 19 nt, Homo sapiens
  misc_RNA (1)...(19): siRNA sense strand
cagaugguggagcugaaua

SEQ ID NO: 1294802 - RNA, 19 nt, Homo sapiens
  misc_RNA (1)...(19): siRNA sense strand
gucauugcugugauuguua

SEQ ID NO: 1294803 - RNA, 19 nt, Homo sapiens
  misc_RNA (1)...(19): siRNA sense strand
ggagccaccaacauuugaa

SEQ ID NO: 1294804 - RNA, 19 nt, Homo sapiens
  misc_RNA (1)...(19): siRNA sense strand
uuggugaacgaguagauua

SEQ ID NO: 1294805 - RNA, 19 nt, Homo sapiens
  misc_RNA (1)...(19): siRNA sense strand
gcgcuuuccuggguugcuu

SEQ ID NO: 1294806 - RNA, 19 nt, Homo sapiens
  misc_RNA (1)...(19): siRNA sense strand
uacuacaaagcaacaguua

SEQ ID NO: 1294807 - RNA, 19 nt, Homo sapiens
  misc_RNA (1)...(19): siRNA sense strand
cuugaugcaguaacuuaua

SEQ ID NO: 1294808 - RNA, 19 nt, Homo sapiens
  misc_RNA (1)...(19): siRNA sense strand
aaacauguccauauauacg

SEQ ID NO: 1294809 - RNA, 19 nt, Homo sapiens
  misc_RNA (1)...(19): siRNA sense strand
guguaaaguggucaaaugu

SEQ ID NO: 1294810 - RNA, 19 nt, Homo sapiens
  misc_RNA (1)...(19): siRNA sense strand
cuuacgaguuugguuauca

SEQ ID NO: 1294811 - RNA, 19 nt, Homo sapiens
  misc_RNA (1)...(19): siRNA sense strand
uacgggauccuuuaaaugg

SEQ ID NO: 1294812 - RNA, 19 nt, Homo sapiens
  misc_RNA (1)...(19): siRNA sense strand
gcagaugguggagcugaau

SEQ ID NO: 1294813 - RNA, 19 nt, Homo sapiens
  misc_RNA (1)...(19): siRNA sense strand
aaccaaaacccuacuauga

SEQ ID NO: 1294814 - RNA, 19 nt, Homo sapiens
  misc_RNA (1)...(19): siRNA sense strand
uugaugcaguaacuuauag

SEQ ID NO: 1294815 - RNA, 19 nt, Homo sapiens
  misc_RNA (1)...(19): siRNA sense strand
ggagcugaauaugccacuu

SEQ ID NO: 1294816 - RNA, 19 nt, Homo sapiens
  misc_RNA (1)...(19): siRNA sense strand
cgauggcagcgacacaauu

SEQ ID NO: 1294817 - RNA, 19 nt, Homo sapiens
  misc_RNA (1)...(19): siRNA sense strand
gauccauuuucacuuauug

SEQ ID NO: 1294818 - RNA, 19 nt, Homo sapiens
  misc_RNA (1)...(19): siRNA sense strand
ggagagagcacgauuuauu

SEQ ID NO: 1294819 - RNA, 19 nt, Homo sapiens
  misc_RNA (1)...(19): siRNA sense strand
agagaaacauguccauaua

SEQ ID NO: 1294820 - RNA, 19 nt, Homo sapiens
  misc_RNA (1)...(19): siRNA sense strand
cagaugcacuuuauuugua

SEQ ID NO: 1294821 - RNA, 19 nt, Homo sapiens
  misc_RNA (1)...(19): siRNA sense strand
ggacuuacgaguuugguua

SEQ ID NO: 1294822 - RNA, 19 nt, Homo sapiens
  misc_RNA (1)...(19): siRNA sense strand
aaacagauaucaggauuug

SEQ ID NO: 1294823 - RNA, 19 nt, Homo sapiens
  misc_RNA (1)...(19): siRNA sense strand
cuauggagcucauugguaa

SEQ ID NO: 1294824 - RNA, 19 nt, Homo sapiens
  misc_RNA (1)...(19): siRNA sense strand
aaacacaccuuuagugaag

SEQ ID NO: 1294825 - RNA, 19 nt, Homo sapiens
  misc_RNA (1)...(19): siRNA sense strand
gaacuuaaaggaucaguag

SEQ ID NO: 1294826 - RNA, 19 nt, Homo sapiens
  misc_RNA (1)...(19): siRNA sense strand
gaaaacagauaucaggauu

SEQ ID NO: 1294827 - RNA, 19 nt, Homo sapiens
  misc_RNA (1)...(19): siRNA sense strand
uaaaggaucaguagcaauu

SEQ ID NO: 1294828 - RNA, 19 nt, Homo sapiens
  misc_RNA (1)...(19): siRNA sense strand
aaaugggacuuacgaguuu

SEQ ID NO: 1294829 - RNA, 19 nt, Homo sapiens
  misc_RNA (1)...(19): siRNA sense strand
guuaucagaugcacuuuau

SEQ ID NO: 1294830 - RNA, 19 nt, Homo sapiens
  misc_RNA (1)...(19): siRNA sense strand
ugagauuggugaacgagua

SEQ ID NO: 1294831 - RNA, 19 nt, Homo sapiens
  misc_RNA (1)...(19): siRNA sense strand
gugaacgaguagauuauaa

SEQ ID NO: 1294832 - RNA, 19 nt, Homo sapiens
  misc_RNA (1)...(19): siRNA sense strand
gagagagcacgauuuauug

SEQ ID NO: 1294833 - RNA, 19 nt, Homo sapiens
  misc_RNA (1)...(19): siRNA sense strand
caaaugggacuuacgaguu

SEQ ID NO: 1294834 - RNA, 19 nt, Homo sapiens
  misc_RNA (1)...(19): siRNA sense strand
ggucauugcugugauuguu

SEQ ID NO: 1294835 - RNA, 19 nt, Homo sapiens
  misc_RNA (1)...(19): siRNA sense strand
ccagauccauuuucacuua

SEQ ID NO: 1294836 - RNA, 19 nt, Homo sapiens
  misc_RNA (1)...(19): siRNA sense strand
gaaggaauacuugacaguu

SEQ ID NO: 1294837 - RNA, 19 nt, Homo sapiens
  misc_RNA (1)...(19): siRNA sense strand
aaggaauacuugacaguuu

SEQ ID NO: 1294838 - RNA, 19 nt, Homo sapiens
  misc_RNA (1)...(19): siRNA sense strand
ucagaugacgccuguuaua

SEQ ID NO: 1294839 - RNA, 19 nt, Homo sapiens
  misc_RNA (1)...(19): siRNA sense strand
gaaaacacaccuuuaguga

SEQ ID NO: 1294840 - RNA, 19 nt, Homo sapiens
  misc_RNA (1)...(19): siRNA sense strand
gaugacgccuguuauagag

SEQ ID NO: 1294841 - RNA, 19 nt, Homo sapiens
  misc_RNA (1)...(19): siRNA sense strand
gagaaacauguccauauau

SEQ ID NO: 1294842 - RNA, 19 nt, Homo sapiens
  misc_RNA (1)...(19): siRNA sense strand
acgaguagauuauaagugu

SEQ ID NO: 1294843 - RNA, 19 nt, Homo sapiens
  misc_RNA (1)...(19): siRNA sense strand
cuacaaagcaacaguuaug

SEQ ID NO: 1294844 - RNA, 19 nt, Homo sapiens
  misc_RNA (1)...(19): siRNA sense strand
ccaccaacauuugaagcua

SEQ ID NO: 1294845 - RNA, 19 nt, Homo sapiens
  misc_RNA (1)...(19): siRNA sense strand
uauacgggauccuuuaaau

SEQ ID NO: 1294846 - RNA, 19 nt, Homo sapiens
  misc_RNA (1)...(19): siRNA sense strand
cgaguuugguuaucagaug

SEQ ID NO: 1294847 - RNA, 19 nt, Homo sapiens
  misc_RNA (1)...(19): siRNA sense strand
gaacgaguagauuauaagu

SEQ ID NO: 1294848 - RNA, 19 nt, Homo sapiens
  misc_RNA (1)...(19): siRNA sense strand
gugaggagccaccaacauu

SEQ ID NO: 1294849 - RNA, 19 nt, Homo sapiens
  misc_RNA (1)...(19): siRNA sense strand
gauggcagcgacacaauug

SEQ ID NO: 1294850 - RNA, 19 nt, Homo sapiens
  misc_RNA (1)...(19): siRNA sense strand
gcuauggagcucauuggua

SEQ ID NO: 1294851 - RNA, 19 nt, Homo sapiens
  misc_RNA (1)...(19): siRNA sense strand
gaggagccaccaacauuug

SEQ ID NO: 1294852 - RNA, 19 nt, Homo sapiens
  misc_RNA (1)...(19): siRNA sense strand
acacaccuuuagugaagua

SEQ ID NO: 1294853 - RNA, 19 nt, Homo sapiens
  misc_RNA (1)...(19): siRNA sense strand
ucucagaugacgccuguua

SEQ ID NO: 1294854 - RNA, 19 nt, Homo sapiens
  misc_RNA (1)...(19): siRNA sense strand
uagagaaacauguccauau

SEQ ID NO: 1294855 - RNA, 19 nt, Homo sapiens
  misc_RNA (1)...(19): siRNA sense strand
guuccaaagugucuuaaag

SEQ ID NO: 1294856 - RNA, 19 nt, Homo sapiens
  misc_RNA (1)...(19): siRNA sense strand
ggugaacgaguagauuaua

SEQ ID NO: 1294857 - RNA, 19 nt, Homo sapiens
  misc_RNA (1)...(19): siRNA sense strand
gaaguagaaguauuugagu

SEQ ID NO: 1294858 - RNA, 19 nt, Homo sapiens
  misc_RNA (1)...(19): siRNA sense strand
gaaacauguccauauauac

SEQ ID NO: 1294859 - RNA, 19 nt, Homo sapiens
  misc_RNA (1)...(19): siRNA sense strand
ugacgccuguuauagagaa

SEQ ID NO: 1294860 - RNA, 19 nt, Homo sapiens
  misc_RNA (1)...(19): siRNA sense strand
cgaguagauuauaagugua

SEQ ID NO: 1294861 - RNA, 19 nt, Homo sapiens
  misc_RNA (1)...(19): siRNA sense strand
gcacuuuauuuguaaugag

SEQ ID NO: 1294862 - RNA, 19 nt, Homo sapiens
  misc_RNA (1)...(19): siRNA sense strand
guagaaguauuugaguauc

SEQ ID NO: 1294863 - RNA, 19 nt, Homo sapiens
  misc_RNA (1)...(19): siRNA sense strand
guauuugaguaucuugaug

SEQ ID NO: 1294864 - RNA, 19 nt, Homo sapiens
  misc_RNA (1)...(19): siRNA sense strand
aggaauacuugacaguuug

SEQ ID NO: 1294865 - RNA, 19 nt, Homo sapiens
  misc_RNA (1)...(19): siRNA sense strand
ccaaaacccuacuaugaga

SEQ ID NO: 1294866 - RNA, 19 nt, Homo sapiens
  misc_RNA (1)...(19): siRNA sense strand
aguguaaaguggucaaaug

SEQ ID NO: 1294867 - RNA, 19 nt, Homo sapiens
  misc_RNA (1)...(19): siRNA sense strand
ccacccauacuauuuguga

SEQ ID NO: 1294868 - RNA, 19 nt, Homo sapiens
  misc_RNA (1)...(19): siRNA sense strand
caccaacauuugaagcuau

SEQ ID NO: 1294869 - RNA, 19 nt, Homo sapiens
  misc_RNA (1)...(19): siRNA sense strand
uuggagagagcacgauuua

SEQ ID NO: 1294870 - RNA, 19 nt, Homo sapiens
  misc_RNA (1)...(19): siRNA sense strand
gguuaucagaugcacuuua

SEQ ID NO: 1294871 - RNA, 19 nt, Homo sapiens
  misc_RNA (1)...(19): siRNA sense strand
ugaggagccaccaacauuu

SEQ ID NO: 1294872 - RNA, 19 nt, Homo sapiens
  misc_RNA (1)...(19): siRNA sense strand
ggaaggaauacuugacagu

SEQ ID NO: 1294873 - RNA, 19 nt, Homo sapiens
  misc_RNA (1)...(19): siRNA sense strand
gaggaaggaauacuugaca

SEQ ID NO: 1294874 - RNA, 19 nt, Homo sapiens
  misc_RNA (1)...(19): siRNA sense strand
ccaguuccaaagugucuua

SEQ ID NO: 1294875 - RNA, 19 nt, Homo sapiens
  misc_RNA (1)...(19): siRNA sense strand
ugaguaucuugaugcagua

SEQ ID NO: 1294876 - RNA, 19 nt, Homo sapiens
  misc_RNA (1)...(19): siRNA sense strand
caccuuuagugaaguagaa

SEQ ID NO: 1294877 - RNA, 19 nt, Homo sapiens
  misc_RNA (1)...(19): siRNA sense strand
acagauaucaggauuugga

SEQ ID NO: 1294878 - RNA, 19 nt, Homo sapiens
  misc_RNA (1)...(19): siRNA sense strand
ucauugcugugauuguuau

SEQ ID NO: 1294879 - RNA, 19 nt, Homo sapiens
  misc_RNA (1)...(19): siRNA sense strand
ucagaugcacuuuauuugu

SEQ ID NO: 1294880 - RNA, 19 nt, Homo sapiens
  misc_RNA (1)...(19): siRNA sense strand
gugcugcuccagaguguaa

SEQ ID NO: 1294881 - RNA, 19 nt, Homo sapiens
  misc_RNA (1)...(19): siRNA sense strand
ggaaaacacaccuuuagug

SEQ ID NO: 1294882 - RNA, 19 nt, Homo sapiens
  misc_RNA (1)...(19): siRNA sense strand
aaggaucaguagcaauuug

SEQ ID NO: 1294883 - RNA, 19 nt, Homo sapiens
  misc_RNA (1)...(19): siRNA sense strand
uauauacgggauccuuuaa

SEQ ID NO: 1294884 - RNA, 19 nt, Homo sapiens
  misc_RNA (1)...(19): siRNA sense strand
ugaaguagaaguauuugag

SEQ ID NO: 1294885 - RNA, 19 nt, Homo sapiens
  misc_RNA (1)...(19): siRNA sense strand
cuugacaguuuggauguuu

SEQ ID NO: 1294886 - RNA, 19 nt, Homo sapiens
  misc_RNA (1)...(19): siRNA sense strand
cauauauacgggauccuuu

SEQ ID NO: 1294887 - RNA, 19 nt, Homo sapiens
  misc_RNA (1)...(19): siRNA sense strand
auauauacgggauccuuua

SEQ ID NO: 1294888 - RNA, 19 nt, Homo sapiens
  misc_RNA (1)...(19): siRNA sense strand
cuuaaaggaucaguagcaa

SEQ ID NO: 1294889 - RNA, 19 nt, Homo sapiens
  misc_RNA (1)...(19): siRNA sense strand
uaaaccugaggaaggaaua

SEQ ID NO: 1294890 - RNA, 19 nt, Homo sapiens
  misc_RNA (1)...(19): siRNA sense strand
agaugacgccuguuauaga

SEQ ID NO: 1294891 - RNA, 19 nt, Homo sapiens
  misc_RNA (1)...(19): siRNA sense strand
ugugauuguuauugccaua

SEQ ID NO: 1294892 - RNA, 19 nt, Homo sapiens
  misc_RNA (1)...(19): siRNA sense strand
gagagcacgauuuauugug

SEQ ID NO: 1294893 - RNA, 19 nt, Homo sapiens
  misc_RNA (1)...(19): siRNA sense strand
gaaguauuugaguaucuug

SEQ ID NO: 1294894 - RNA, 19 nt, Homo sapiens
  misc_RNA (1)...(19): siRNA sense strand
ggcuaccugucucagauga

SEQ ID NO: 1294895 - RNA, 19 nt, Homo sapiens
  misc_RNA (1)...(19): siRNA sense strand
gauaucaggauuuggaaaa

SEQ ID NO: 1294896 - RNA, 19 nt, Homo sapiens
  misc_RNA (1)...(19): siRNA sense strand
ccucuugccacccauacua

SEQ ID NO: 1294897 - RNA, 19 nt, Homo sapiens
  misc_RNA (1)...(19): siRNA sense strand
ccaugguguugcugcugua

SEQ ID NO: 1294898 - RNA, 19 nt, Homo sapiens
  misc_RNA (1)...(19): siRNA sense strand
cagaugacgccuguuauag

SEQ ID NO: 1294899 - RNA, 19 nt, Homo sapiens
  misc_RNA (1)...(19): siRNA sense strand
uuggugaacgaguagauua

SEQ ID NO: 1294900 - RNA, 19 nt, Homo sapiens
  misc_RNA (1)...(19): siRNA sense strand
gucauugcugugauuguua

SEQ ID NO: 1294901 - RNA, 19 nt, Homo sapiens
  misc_RNA (1)...(19): siRNA sense strand
ggagccaccaacauuugaa

SEQ ID NO: 1294902 - RNA, 19 nt, Homo sapiens
  misc_RNA (1)...(19): siRNA sense strand
gcgcuuuccuggguugcuu

SEQ ID NO: 1294903 - RNA, 19 nt, Homo sapiens
  misc_RNA (1)...(19): siRNA sense strand
uacuacaaagcaacaguua

SEQ ID NO: 1294904 - RNA, 19 nt, Homo sapiens
  misc_RNA (1)...(19): siRNA sense strand
cuugaugcaguaacuuaua

SEQ ID NO: 1294905 - RNA, 19 nt, Homo sapiens
  misc_RNA (1)...(19): siRNA sense strand
aaacauguccauauauacg

SEQ ID NO: 1294906 - RNA, 19 nt, Homo sapiens
  misc_RNA (1)...(19): siRNA sense strand
guguaaaguggucaaaugu

SEQ ID NO: 1294907 - RNA, 19 nt, Homo sapiens
  misc_RNA (1)...(19): siRNA sense strand
cuuacgaguuugguuauca

SEQ ID NO: 1294908 - RNA, 19 nt, Homo sapiens
  misc_RNA (1)...(19): siRNA sense strand
uacgggauccuuuaaaugg

SEQ ID NO: 1294909 - RNA, 19 nt, Homo sapiens
  misc_RNA (1)...(19): siRNA sense strand
aaccaaaacccuacuauga

SEQ ID NO: 1294910 - RNA, 19 nt, Homo sapiens
  misc_RNA (1)...(19): siRNA sense strand
cccaauaugugaaaagguu

SEQ ID NO: 1294911 - RNA, 19 nt, Homo sapiens
  misc_RNA (1)...(19): siRNA sense strand
cgauggcagcgacacaauu

SEQ ID NO: 1294912 - RNA, 19 nt, Homo sapiens
  misc_RNA (1)...(19): siRNA sense strand
gauccauuuucacuuauug

SEQ ID NO: 1294913 - RNA, 19 nt, Homo sapiens
  misc_RNA (1)...(19): siRNA sense strand
uugaugcaguaacuuauag

SEQ ID NO: 1294914 - RNA, 19 nt, Homo sapiens
  misc_RNA (1)...(19): siRNA sense strand
guaucuugaugcaguaacu

SEQ ID NO: 1294915 - RNA, 19 nt, Homo sapiens
  misc_RNA (1)...(19): siRNA sense strand
caacauuugaagcuaugga

SEQ ID NO: 1294916 - RNA, 19 nt, Homo sapiens
  misc_RNA (1)...(19): siRNA sense strand
gagauuggugaacgaguag

SEQ ID NO: 1294917 - RNA, 19 nt, Homo sapiens
  misc_RNA (1)...(19): siRNA sense strand
ggagagagcacgauuuauu

SEQ ID NO: 1294918 - RNA, 19 nt, Homo sapiens
  misc_RNA (1)...(19): siRNA sense strand
agagaaacauguccauaua

SEQ ID NO: 1294919 - RNA, 19 nt, Homo sapiens
  misc_RNA (1)...(19): siRNA sense strand
cagaugcacuuuauuugua

SEQ ID NO: 1294920 - RNA, 19 nt, Homo sapiens
  misc_RNA (1)...(19): siRNA sense strand
ggacuuacgaguuugguua

SEQ ID NO: 1294921 - RNA, 19 nt, Homo sapiens
  misc_RNA (1)...(19): siRNA sense strand
aaacagauaucaggauuug

SEQ ID NO: 1294922 - RNA, 19 nt, Homo sapiens
  misc_RNA (1)...(19): siRNA sense strand
cuauggagcucauugguaa

SEQ ID NO: 1294923 - RNA, 19 nt, Homo sapiens
  misc_RNA (1)...(19): siRNA sense strand
aaacacaccuuuagugaag

SEQ ID NO: 1294924 - RNA, 19 nt, Homo sapiens
  misc_RNA (1)...(19): siRNA sense strand
gaacuuaaaggaucaguag

SEQ ID NO: 1294925 - RNA, 19 nt, Homo sapiens
  misc_RNA (1)...(19): siRNA sense strand
gaaaacagauaucaggauu

SEQ ID NO: 1294926 - RNA, 19 nt, Homo sapiens
  misc_RNA (1)...(19): siRNA sense strand
uaaaggaucaguagcaauu

SEQ ID NO: 1294927 - RNA, 19 nt, Homo sapiens
  misc_RNA (1)...(19): siRNA sense strand
aaaugggacuuacgaguuu

SEQ ID NO: 1294928 - RNA, 19 nt, Homo sapiens
  misc_RNA (1)...(19): siRNA sense strand
guuaucagaugcacuuuau

SEQ ID NO: 1294929 - RNA, 19 nt, Homo sapiens
  misc_RNA (1)...(19): siRNA sense strand
ugagauuggugaacgagua

SEQ ID NO: 1294930 - RNA, 19 nt, Homo sapiens
  misc_RNA (1)...(19): siRNA sense strand
gugaacgaguagauuauaa

SEQ ID NO: 1294931 - RNA, 19 nt, Homo sapiens
  misc_RNA (1)...(19): siRNA sense strand
gagagagcacgauuuauug

SEQ ID NO: 1294932 - RNA, 19 nt, Homo sapiens
  misc_RNA (1)...(19): siRNA sense strand
caaaugggacuuacgaguu

SEQ ID NO: 1294933 - RNA, 19 nt, Homo sapiens
  misc_RNA (1)...(19): siRNA sense strand
ggucauugcugugauuguu

SEQ ID NO: 1294934 - RNA, 19 nt, Homo sapiens
  misc_RNA (1)...(19): siRNA sense strand
ccagauccauuuucacuua

SEQ ID NO: 1294935 - RNA, 19 nt, Homo sapiens
  misc_RNA (1)...(19): siRNA sense strand
gaaggaauacuugacaguu

SEQ ID NO: 1294936 - RNA, 19 nt, Homo sapiens
  misc_RNA (1)...(19): siRNA sense strand
aaggaauacuugacaguuu

SEQ ID NO: 1294937 - RNA, 19 nt, Homo sapiens
  misc_RNA (1)...(19): siRNA sense strand
ucagaugacgccuguuaua

SEQ ID NO: 1294938 - RNA, 19 nt, Homo sapiens
  misc_RNA (1)...(19): siRNA sense strand
gaaaacacaccuuuaguga

SEQ ID NO: 1294939 - RNA, 19 nt, Homo sapiens
  misc_RNA (1)...(19): siRNA sense strand
gaugacgccuguuauagag

SEQ ID NO: 1294940 - RNA, 19 nt, Homo sapiens
  misc_RNA (1)...(19): siRNA sense strand
gagaaacauguccauauau

SEQ ID NO: 1294941 - RNA, 19 nt, Homo sapiens
  misc_RNA (1)...(19): siRNA sense strand
acgaguagauuauaagugu

SEQ ID NO: 1294942 - RNA, 19 nt, Homo sapiens
  misc_RNA (1)...(19): siRNA sense strand
cuacaaagcaacaguuaug

SEQ ID NO: 1294943 - RNA, 19 nt, Homo sapiens
  misc_RNA (1)...(19): siRNA sense strand
ccaccaacauuugaagcua

SEQ ID NO: 1294944 - RNA, 19 nt, Homo sapiens
  misc_RNA (1)...(19): siRNA sense strand
uauacgggauccuuuaaau

SEQ ID NO: 1294945 - RNA, 19 nt, Homo sapiens
  misc_RNA (1)...(19): siRNA sense strand
cgaguuugguuaucagaug

SEQ ID NO: 1294946 - RNA, 19 nt, Homo sapiens
  misc_RNA (1)...(19): siRNA sense strand
gaacgaguagauuauaagu

SEQ ID NO: 1294947 - RNA, 19 nt, Homo sapiens
  misc_RNA (1)...(19): siRNA sense strand
gugaggagccaccaacauu

SEQ ID NO: 1294948 - RNA, 19 nt, Homo sapiens
  misc_RNA (1)...(19): siRNA sense strand
gauggcagcgacacaauug

SEQ ID NO: 1294949 - RNA, 19 nt, Homo sapiens
  misc_RNA (1)...(19): siRNA sense strand
gcuauggagcucauuggua

SEQ ID NO: 1294950 - RNA, 19 nt, Homo sapiens
  misc_RNA (1)...(19): siRNA sense strand
gaggagccaccaacauuug

SEQ ID NO: 1294951 - RNA, 19 nt, Homo sapiens
  misc_RNA (1)...(19): siRNA sense strand
acacaccuuuagugaagua

SEQ ID NO: 1294952 - RNA, 19 nt, Homo sapiens
  misc_RNA (1)...(19): siRNA sense strand
ucucagaugacgccuguua

SEQ ID NO: 1294953 - RNA, 19 nt, Homo sapiens
  misc_RNA (1)...(19): siRNA sense strand
uagagaaacauguccauau

SEQ ID NO: 1294954 - RNA, 19 nt, Homo sapiens
  misc_RNA (1)...(19): siRNA sense strand
ggugaacgaguagauuaua

SEQ ID NO: 1294955 - RNA, 19 nt, Homo sapiens
  misc_RNA (1)...(19): siRNA sense strand
gaaguagaaguauuugagu

SEQ ID NO: 1294956 - RNA, 19 nt, Homo sapiens
  misc_RNA (1)...(19): siRNA sense strand
gaaacauguccauauauac

SEQ ID NO: 1294957 - RNA, 19 nt, Homo sapiens
  misc_RNA (1)...(19): siRNA sense strand
ugacgccuguuauagagaa

SEQ ID NO: 1294958 - RNA, 19 nt, Homo sapiens
  misc_RNA (1)...(19): siRNA sense strand
cgaguagauuauaagugua

SEQ ID NO: 1294959 - RNA, 19 nt, Homo sapiens
  misc_RNA (1)...(19): siRNA sense strand
gcacuuuauuuguaaugag

SEQ ID NO: 1294960 - RNA, 19 nt, Homo sapiens
  misc_RNA (1)...(19): siRNA sense strand
guagaaguauuugaguauc

SEQ ID NO: 1294961 - RNA, 19 nt, Homo sapiens
  misc_RNA (1)...(19): siRNA sense strand
guauuugaguaucuugaug

SEQ ID NO: 1294962 - RNA, 19 nt, Homo sapiens
  misc_RNA (1)...(19): siRNA sense strand
aggaauacuugacaguuug

SEQ ID NO: 1294963 - RNA, 19 nt, Homo sapiens
  misc_RNA (1)...(19): siRNA sense strand
aguguaaaguggucaaaug

SEQ ID NO: 1294964 - RNA, 19 nt, Homo sapiens
  misc_RNA (1)...(19): siRNA sense strand
ccaaaacccuacuaugaga

SEQ ID NO: 1294965 - RNA, 19 nt, Homo sapiens
  misc_RNA (1)...(19): siRNA sense strand
ccacccauacuauuuguga

SEQ ID NO: 1294966 - RNA, 19 nt, Homo sapiens
  misc_RNA (1)...(19): siRNA sense strand
caccaacauuugaagcuau

SEQ ID NO: 1294967 - RNA, 19 nt, Homo sapiens
  misc_RNA (1)...(19): siRNA sense strand
uuggagagagcacgauuua

SEQ ID NO: 1294968 - RNA, 19 nt, Homo sapiens
  misc_RNA (1)...(19): siRNA sense strand
gguuaucagaugcacuuua

SEQ ID NO: 1294969 - RNA, 19 nt, Homo sapiens
  misc_RNA (1)...(19): siRNA sense strand
ugaggagccaccaacauuu

SEQ ID NO: 1294970 - RNA, 19 nt, Homo sapiens
  misc_RNA (1)...(19): siRNA sense strand
ggaaggaauacuugacagu

SEQ ID NO: 1294971 - RNA, 19 nt, Homo sapiens
  misc_RNA (1)...(19): siRNA sense strand
gaggaaggaauacuugaca

SEQ ID NO: 1294972 - RNA, 19 nt, Homo sapiens
  misc_RNA (1)...(19): siRNA sense strand
ugaguaucuugaugcagua

SEQ ID NO: 1294973 - RNA, 19 nt, Homo sapiens
  misc_RNA (1)...(19): siRNA sense strand
caccuuuagugaaguagaa

SEQ ID NO: 1294974 - RNA, 19 nt, Homo sapiens
  misc_RNA (1)...(19): siRNA sense strand
acagauaucaggauuugga

SEQ ID NO: 1294975 - RNA, 19 nt, Homo sapiens
  misc_RNA (1)...(19): siRNA sense strand
ucauugcugugauuguuau

SEQ ID NO: 1294976 - RNA, 19 nt, Homo sapiens
  misc_RNA (1)...(19): siRNA sense strand
ucagaugcacuuuauuugu

SEQ ID NO: 1294977 - RNA, 19 nt, Homo sapiens
  misc_RNA (1)...(19): siRNA sense strand
gugcugcuccagaguguaa

SEQ ID NO: 1294978 - RNA, 19 nt, Homo sapiens
  misc_RNA (1)...(19): siRNA sense strand
ggaaaacacaccuuuagug

SEQ ID NO: 1294979 - RNA, 19 nt, Homo sapiens
  misc_RNA (1)...(19): siRNA sense strand
aaggaucaguagcaauuug

SEQ ID NO: 1294980 - RNA, 19 nt, Homo sapiens
  misc_RNA (1)...(19): siRNA sense strand
uauauacgggauccuuuaa

SEQ ID NO: 1294981 - RNA, 19 nt, Homo sapiens
  misc_RNA (1)...(19): siRNA sense strand
ugaaguagaaguauuugag

SEQ ID NO: 1294982 - RNA, 19 nt, Homo sapiens
  misc_RNA (1)...(19): siRNA sense strand
cuugacaguuuggauguuu

SEQ ID NO: 1294983 - RNA, 19 nt, Homo sapiens
  misc_RNA (1)...(19): siRNA sense strand
cauauauacgggauccuuu

SEQ ID NO: 1294984 - RNA, 19 nt, Homo sapiens
  misc_RNA (1)...(19): siRNA sense strand
auauauacgggauccuuua

SEQ ID NO: 1294985 - RNA, 19 nt, Homo sapiens
  misc_RNA (1)...(19): siRNA sense strand
cuuaaaggaucaguagcaa

SEQ ID NO: 1294986 - RNA, 19 nt, Homo sapiens
  misc_RNA (1)...(19): siRNA sense strand
uaaaccugaggaaggaaua

SEQ ID NO: 1294987 - RNA, 19 nt, Homo sapiens
  misc_RNA (1)...(19): siRNA sense strand
agaugacgccuguuauaga

SEQ ID NO: 1294988 - RNA, 19 nt, Homo sapiens
  misc_RNA (1)...(19): siRNA sense strand
ugugauuguuauugccaua

SEQ ID NO: 1294989 - RNA, 19 nt, Homo sapiens
  misc_RNA (1)...(19): siRNA sense strand
gagagcacgauuuauugug

SEQ ID NO: 1294990 - RNA, 19 nt, Homo sapiens
  misc_RNA (1)...(19): siRNA sense strand
gaaguauuugaguaucuug

SEQ ID NO: 1294991 - RNA, 19 nt, Homo sapiens
  misc_RNA (1)...(19): siRNA sense strand
ccucuugccacccauacua

SEQ ID NO: 1294992 - RNA, 19 nt, Homo sapiens
  misc_RNA (1)...(19): siRNA sense strand
gauaucaggauuuggaaaa

SEQ ID NO: 1294993 - RNA, 19 nt, Homo sapiens
  misc_RNA (1)...(19): siRNA sense strand
ggcuaccugucucagauga

SEQ ID NO: 1294994 - RNA, 19 nt, Homo sapiens
  misc_RNA (1)...(19): siRNA sense strand
ccaugguguugcugcugua

SEQ ID NO: 1294995 - RNA, 19 nt, Homo sapiens
  misc_RNA (1)...(19): siRNA sense strand
cagaugacgccuguuauag

SEQ ID NO: 1294996 - RNA, 19 nt, Homo sapiens
  misc_RNA (1)...(19): siRNA sense strand
gucauugcugugauuguua

SEQ ID NO: 1294997 - RNA, 19 nt, Homo sapiens
  misc_RNA (1)...(19): siRNA sense strand
uuggugaacgaguagauua

SEQ ID NO: 1294998 - RNA, 19 nt, Homo sapiens
  misc_RNA (1)...(19): siRNA sense strand
ggagccaccaacauuugaa

SEQ ID NO: 1294999 - RNA, 19 nt, Homo sapiens
  misc_RNA (1)...(19): siRNA sense strand
gcgcuuuccuggguugcuu

SEQ ID NO: 1295000 - RNA, 19 nt, Homo sapiens
  misc_RNA (1)...(19): siRNA sense strand
uacuacaaagcaacaguua

SEQ ID NO: 1295001 - RNA, 19 nt, Homo sapiens
  misc_RNA (1)...(19): siRNA sense strand
cuugaugcaguaacuuaua

SEQ ID NO: 1295002 - RNA, 19 nt, Homo sapiens
  misc_RNA (1)...(19): siRNA sense strand
aaacauguccauauauacg

SEQ ID NO: 1295003 - RNA, 19 nt, Homo sapiens
  misc_RNA (1)...(19): siRNA sense strand
guguaaaguggucaaaugu

SEQ ID NO: 1295004 - RNA, 19 nt, Homo sapiens
  misc_RNA (1)...(19): siRNA sense strand
cuuacgaguuugguuauca

SEQ ID NO: 1295005 - RNA, 19 nt, Homo sapiens
  misc_RNA (1)...(19): siRNA sense strand
uacgggauccuuuaaaugg

SEQ ID NO: 1295006 - RNA, 19 nt, Homo sapiens
  misc_RNA (1)...(19): siRNA sense strand
aaccaaaacccuacuauga

SEQ ID NO: 1295007 - RNA, 19 nt, Homo sapiens
  misc_RNA (1)...(19): siRNA sense strand
cccaauaugugaaaagguu

SEQ ID NO: 1295008 - RNA, 19 nt, Homo sapiens
  misc_RNA (1)...(19): siRNA sense strand
cgauggcagcgacacaauu

SEQ ID NO: 1295009 - RNA, 19 nt, Homo sapiens
  misc_RNA (1)...(19): siRNA sense strand
gauccauuuucacuuauug

SEQ ID NO: 1295010 - RNA, 19 nt, Homo sapiens
  misc_RNA (1)...(19): siRNA sense strand
uugaugcaguaacuuauag

SEQ ID NO: 1295011 - RNA, 19 nt, Homo sapiens
  misc_RNA (1)...(19): siRNA sense strand
guaucuugaugcaguaacu

SEQ ID NO: 1295012 - RNA, 19 nt, Homo sapiens
  misc_RNA (1)...(19): siRNA sense strand
caacauuugaagcuaugga

SEQ ID NO: 1295013 - RNA, 19 nt, Homo sapiens
  misc_RNA (1)...(19): siRNA sense strand
gagauuggugaacgaguag

SEQ ID NO: 1295014 - RNA, 19 nt, Homo sapiens
  misc_RNA (1)...(19): siRNA sense strand
ggagagagcacgauuuauu

SEQ ID NO: 1295015 - RNA, 19 nt, Homo sapiens
  misc_RNA (1)...(19): siRNA sense strand
agagaaacauguccauaua

SEQ ID NO: 1295016 - RNA, 19 nt, Homo sapiens
  misc_RNA (1)...(19): siRNA sense strand
cagaugcacuuuauuugua

SEQ ID NO: 1295017 - RNA, 19 nt, Homo sapiens
  misc_RNA (1)...(19): siRNA sense strand
ggacuuacgaguuugguua

SEQ ID NO: 1295018 - RNA, 19 nt, Homo sapiens
  misc_RNA (1)...(19): siRNA sense strand
aaacagauaucaggauuug

SEQ ID NO: 1295019 - RNA, 19 nt, Homo sapiens
  misc_RNA (1)...(19): siRNA sense strand
cuauggagcucauugguaa

SEQ ID NO: 1295020 - RNA, 19 nt, Homo sapiens
  misc_RNA (1)...(19): siRNA sense strand
aaacacaccuuuagugaag

SEQ ID NO: 1295021 - RNA, 19 nt, Homo sapiens
  misc_RNA (1)...(19): siRNA sense strand
gaacuuaaaggaucaguag

SEQ ID NO: 1295022 - RNA, 19 nt, Homo sapiens
  misc_RNA (1)...(19): siRNA sense strand
gaaaacagauaucaggauu

SEQ ID NO: 1295023 - RNA, 19 nt, Homo sapiens
  misc_RNA (1)...(19): siRNA sense strand
uaaaggaucaguagcaauu

SEQ ID NO: 1295024 - RNA, 19 nt, Homo sapiens
  misc_RNA (1)...(19): siRNA sense strand
aaaugggacuuacgaguuu

SEQ ID NO: 1295025 - RNA, 19 nt, Homo sapiens
  misc_RNA (1)...(19): siRNA sense strand
guuaucagaugcacuuuau

SEQ ID NO: 1295026 - RNA, 19 nt, Homo sapiens
  misc_RNA (1)...(19): siRNA sense strand
gagcugaauaugccacuua

SEQ ID NO: 1295027 - RNA, 19 nt, Homo sapiens
  misc_RNA (1)...(19): siRNA sense strand
ugagauuggugaacgagua

SEQ ID NO: 1295028 - RNA, 19 nt, Homo sapiens
  misc_RNA (1)...(19): siRNA sense strand
gugaacgaguagauuauaa

SEQ ID NO: 1295029 - RNA, 19 nt, Homo sapiens
  misc_RNA (1)...(19): siRNA sense strand
gagagagcacgauuuauug

SEQ ID NO: 1295030 - RNA, 19 nt, Homo sapiens
  misc_RNA (1)...(19): siRNA sense strand
caaaugggacuuacgaguu

SEQ ID NO: 1295031 - RNA, 19 nt, Homo sapiens
  misc_RNA (1)...(19): siRNA sense strand
ggucauugcugugauuguu

SEQ ID NO: 1295032 - RNA, 19 nt, Homo sapiens
  misc_RNA (1)...(19): siRNA sense strand
ccagauccauuuucacuua

SEQ ID NO: 1295033 - RNA, 19 nt, Homo sapiens
  misc_RNA (1)...(19): siRNA sense strand
gaaggaauacuugacaguu

SEQ ID NO: 1295034 - RNA, 19 nt, Homo sapiens
  misc_RNA (1)...(19): siRNA sense strand
aaggaauacuugacaguuu

SEQ ID NO: 1295035 - RNA, 19 nt, Homo sapiens
  misc_RNA (1)...(19): siRNA sense strand
ucagaugacgccuguuaua

SEQ ID NO: 1295036 - RNA, 19 nt, Homo sapiens
  misc_RNA (1)...(19): siRNA sense strand
gaaaacacaccuuuaguga

SEQ ID NO: 1295037 - RNA, 19 nt, Homo sapiens
  misc_RNA (1)...(19): siRNA sense strand
gaugacgccuguuauagag

SEQ ID NO: 1295038 - RNA, 19 nt, Homo sapiens
  misc_RNA (1)...(19): siRNA sense strand
gagaaacauguccauauau

SEQ ID NO: 1295039 - RNA, 19 nt, Homo sapiens
  misc_RNA (1)...(19): siRNA sense strand
ccacuuaccagacuaaauc

SEQ ID NO: 1295040 - RNA, 19 nt, Homo sapiens
  misc_RNA (1)...(19): siRNA sense strand
acgaguagauuauaagugu

SEQ ID NO: 1295041 - RNA, 19 nt, Homo sapiens
  misc_RNA (1)...(19): siRNA sense strand
cuacaaagcaacaguuaug

SEQ ID NO: 1295042 - RNA, 19 nt, Homo sapiens
  misc_RNA (1)...(19): siRNA sense strand
ccaccaacauuugaagcua

SEQ ID NO: 1295043 - RNA, 19 nt, Homo sapiens
  misc_RNA (1)...(19): siRNA sense strand
uauacgggauccuuuaaau

SEQ ID NO: 1295044 - RNA, 19 nt, Homo sapiens
  misc_RNA (1)...(19): siRNA sense strand
cgaguuugguuaucagaug

SEQ ID NO: 1295045 - RNA, 19 nt, Homo sapiens
  misc_RNA (1)...(19): siRNA sense strand
gaacgaguagauuauaagu

SEQ ID NO: 1295046 - RNA, 19 nt, Homo sapiens
  misc_RNA (1)...(19): siRNA sense strand
gugaggagccaccaacauu

SEQ ID NO: 1295047 - RNA, 19 nt, Homo sapiens
  misc_RNA (1)...(19): siRNA sense strand
gauggcagcgacacaauug

SEQ ID NO: 1295048 - RNA, 19 nt, Homo sapiens
  misc_RNA (1)...(19): siRNA sense strand
ucucagaugacgccuguua

SEQ ID NO: 1295049 - RNA, 19 nt, Homo sapiens
  misc_RNA (1)...(19): siRNA sense strand
gaggagccaccaacauuug

SEQ ID NO: 1295050 - RNA, 19 nt, Homo sapiens
  misc_RNA (1)...(19): siRNA sense strand
gcuauggagcucauuggua

SEQ ID NO: 1295051 - RNA, 19 nt, Homo sapiens
  misc_RNA (1)...(19): siRNA sense strand
acacaccuuuagugaagua

SEQ ID NO: 1295052 - RNA, 19 nt, Homo sapiens
  misc_RNA (1)...(19): siRNA sense strand
uagagaaacauguccauau

SEQ ID NO: 1295053 - RNA, 19 nt, Homo sapiens
  misc_RNA (1)...(19): siRNA sense strand
ggugaacgaguagauuaua

SEQ ID NO: 1295054 - RNA, 19 nt, Homo sapiens
  misc_RNA (1)...(19): siRNA sense strand
gaaguagaaguauuugagu

SEQ ID NO: 1295055 - RNA, 19 nt, Homo sapiens
  misc_RNA (1)...(19): siRNA sense strand
gaaacauguccauauauac

SEQ ID NO: 1295056 - RNA, 19 nt, Homo sapiens
  misc_RNA (1)...(19): siRNA sense strand
ugacgccuguuauagagaa

SEQ ID NO: 1295057 - RNA, 19 nt, Homo sapiens
  misc_RNA (1)...(19): siRNA sense strand
cgaguagauuauaagugua

SEQ ID NO: 1295058 - RNA, 19 nt, Homo sapiens
  misc_RNA (1)...(19): siRNA sense strand
gcacuuuauuuguaaugag

SEQ ID NO: 1295059 - RNA, 19 nt, Homo sapiens
  misc_RNA (1)...(19): siRNA sense strand
guagaaguauuugaguauc

SEQ ID NO: 1295060 - RNA, 19 nt, Homo sapiens
  misc_RNA (1)...(19): siRNA sense strand
guauuugaguaucuugaug

SEQ ID NO: 1295061 - RNA, 19 nt, Homo sapiens
  misc_RNA (1)...(19): siRNA sense strand
aggaauacuugacaguuug

SEQ ID NO: 1295062 - RNA, 19 nt, Homo sapiens
  misc_RNA (1)...(19): siRNA sense strand
ccaaaacccuacuaugaga

SEQ ID NO: 1295063 - RNA, 19 nt, Homo sapiens
  misc_RNA (1)...(19): siRNA sense strand
aguguaaaguggucaaaug

SEQ ID NO: 1295064 - RNA, 19 nt, Homo sapiens
  misc_RNA (1)...(19): siRNA sense strand
ccacccauacuauuuguga

SEQ ID NO: 1295065 - RNA, 19 nt, Homo sapiens
  misc_RNA (1)...(19): siRNA sense strand
uuggagagagcacgauuua

SEQ ID NO: 1295066 - RNA, 19 nt, Homo sapiens
  misc_RNA (1)...(19): siRNA sense strand
gguuaucagaugcacuuua

SEQ ID NO: 1295067 - RNA, 19 nt, Homo sapiens
  misc_RNA (1)...(19): siRNA sense strand
caccaacauuugaagcuau

SEQ ID NO: 1295068 - RNA, 19 nt, Homo sapiens
  misc_RNA (1)...(19): siRNA sense strand
ugaggagccaccaacauuu

SEQ ID NO: 1295069 - RNA, 19 nt, Homo sapiens
  misc_RNA (1)...(19): siRNA sense strand
ggaaggaauacuugacagu

SEQ ID NO: 1295070 - RNA, 19 nt, Homo sapiens
  misc_RNA (1)...(19): siRNA sense strand
gaggaaggaauacuugaca

SEQ ID NO: 1295071 - RNA, 19 nt, Homo sapiens
  misc_RNA (1)...(19): siRNA sense strand
ugaguaucuugaugcagua

SEQ ID NO: 1295072 - RNA, 19 nt, Homo sapiens
  misc_RNA (1)...(19): siRNA sense strand
caccuuuagugaaguagaa

SEQ ID NO: 1295073 - RNA, 19 nt, Homo sapiens
  misc_RNA (1)...(19): siRNA sense strand
acagauaucaggauuugga

SEQ ID NO: 1295074 - RNA, 19 nt, Homo sapiens
  misc_RNA (1)...(19): siRNA sense strand
ucauugcugugauuguuau

SEQ ID NO: 1295075 - RNA, 19 nt, Homo sapiens
  misc_RNA (1)...(19): siRNA sense strand
ucagaugcacuuuauuugu

SEQ ID NO: 1295076 - RNA, 19 nt, Homo sapiens
  misc_RNA (1)...(19): siRNA sense strand
gugcugcuccagaguguaa

SEQ ID NO: 1295077 - RNA, 19 nt, Homo sapiens
  misc_RNA (1)...(19): siRNA sense strand
ggaaaacacaccuuuagug

SEQ ID NO: 1295078 - RNA, 19 nt, Homo sapiens
  misc_RNA (1)...(19): siRNA sense strand
aaggaucaguagcaauuug

SEQ ID NO: 1295079 - RNA, 19 nt, Homo sapiens
  misc_RNA (1)...(19): siRNA sense strand
uauauacgggauccuuuaa

SEQ ID NO: 1295080 - RNA, 19 nt, Homo sapiens
  misc_RNA (1)...(19): siRNA sense strand
ugaaguagaaguauuugag

SEQ ID NO: 1295081 - RNA, 19 nt, Homo sapiens
  misc_RNA (1)...(19): siRNA sense strand
cuugacaguuuggauguuu

SEQ ID NO: 1295082 - RNA, 19 nt, Homo sapiens
  misc_RNA (1)...(19): siRNA sense strand
cauauauacgggauccuuu

SEQ ID NO: 1295083 - RNA, 19 nt, Homo sapiens
  misc_RNA (1)...(19): siRNA sense strand
auauauacgggauccuuua

SEQ ID NO: 1295084 - RNA, 19 nt, Homo sapiens
  misc_RNA (1)...(19): siRNA sense strand
cuuaaaggaucaguagcaa

SEQ ID NO: 1295085 - RNA, 19 nt, Homo sapiens
  misc_RNA (1)...(19): siRNA sense strand
uaaaccugaggaaggaaua

SEQ ID NO: 1295086 - RNA, 19 nt, Homo sapiens
  misc_RNA (1)...(19): siRNA sense strand
agaugacgccuguuauaga

SEQ ID NO: 1295087 - RNA, 19 nt, Homo sapiens
  misc_RNA (1)...(19): siRNA sense strand
ugugauuguuauugccaua

SEQ ID NO: 1295088 - RNA, 19 nt, Homo sapiens
  misc_RNA (1)...(19): siRNA sense strand
gagagcacgauuuauugug

SEQ ID NO: 1295089 - RNA, 19 nt, Homo sapiens
  misc_RNA (1)...(19): siRNA sense strand
gaaguauuugaguaucuug

SEQ ID NO: 1295090 - RNA, 19 nt, Homo sapiens
  misc_RNA (1)...(19): siRNA sense strand
ggcuaccugucucagauga

SEQ ID NO: 1295091 - RNA, 19 nt, Homo sapiens
  misc_RNA (1)...(19): siRNA sense strand
gauaucaggauuuggaaaa

SEQ ID NO: 1295092 - RNA, 19 nt, Homo sapiens
  misc_RNA (1)...(19): siRNA sense strand
ccucuugccacccauacua

SEQ ID NO: 1295093 - RNA, 19 nt, Homo sapiens
  misc_RNA (1)...(19): siRNA sense strand
ccaugguguugcugcugua

SEQ ID NO: 1295094 - RNA, 19 nt, Homo sapiens
  misc_RNA (1)...(19): siRNA sense strand
cagaugacgccuguuauag

SEQ ID NO: 1295095 - RNA, 19 nt, Homo sapiens
  misc_RNA (1)...(19): siRNA sense strand
cagaugguggagcugaaua

SEQ ID NO: 1295096 - RNA, 19 nt, Homo sapiens
  misc_RNA (1)...(19): siRNA sense strand
uuggugaacgaguagauua

SEQ ID NO: 1295097 - RNA, 19 nt, Homo sapiens
  misc_RNA (1)...(19): siRNA sense strand
gucauugcugugauuguua

SEQ ID NO: 1295098 - RNA, 19 nt, Homo sapiens
  misc_RNA (1)...(19): siRNA sense strand
ggagccaccaacauuugaa

SEQ ID NO: 1295099 - RNA, 19 nt, Homo sapiens
  misc_RNA (1)...(19): siRNA sense strand
gcgcuuuccuggguugcuu

SEQ ID NO: 1295100 - RNA, 19 nt, Homo sapiens
  misc_RNA (1)...(19): siRNA sense strand
uacuacaaagcaacaguua

SEQ ID NO: 1295101 - RNA, 19 nt, Homo sapiens
  misc_RNA (1)...(19): siRNA sense strand
cuugaugcaguaacuuaua

SEQ ID NO: 1295102 - RNA, 19 nt, Homo sapiens
  misc_RNA (1)...(19): siRNA sense strand
aaacauguccauauauacg

SEQ ID NO: 1295103 - RNA, 19 nt, Homo sapiens
  misc_RNA (1)...(19): siRNA sense strand
guguaaaguggucaaaugu

SEQ ID NO: 1295104 - RNA, 19 nt, Homo sapiens
  misc_RNA (1)...(19): siRNA sense strand
cuuacgaguuugguuauca

SEQ ID NO: 1295105 - RNA, 19 nt, Homo sapiens
  misc_RNA (1)...(19): siRNA sense strand
uacgggauccuuuaaaugg

SEQ ID NO: 1295106 - RNA, 19 nt, Homo sapiens
  misc_RNA (1)...(19): siRNA sense strand
gcagaugguggagcugaau

SEQ ID NO: 1295107 - RNA, 19 nt, Homo sapiens
  misc_RNA (1)...(19): siRNA sense strand
aaccaaaacccuacuauga

SEQ ID NO: 1295108 - RNA, 19 nt, Homo sapiens
  misc_RNA (1)...(19): siRNA sense strand
cccaauaugugaaaagguu

SEQ ID NO: 1295109 - RNA, 19 nt, Homo sapiens
  misc_RNA (1)...(19): siRNA sense strand
ggagcugaauaugccacuu

SEQ ID NO: 1295110 - RNA, 19 nt, Homo sapiens
  misc_RNA (1)...(19): siRNA sense strand
cgauggcagcgacacaauu

SEQ ID NO: 1295111 - RNA, 19 nt, Homo sapiens
  misc_RNA (1)...(19): siRNA sense strand
gauccauuuucacuuauug

SEQ ID NO: 1295112 - RNA, 19 nt, Homo sapiens
  misc_RNA (1)...(19): siRNA sense strand
uugaugcaguaacuuauag

SEQ ID NO: 1295113 - RNA, 19 nt, Homo sapiens
  misc_RNA (1)...(19): siRNA sense strand
guaucuugaugcaguaacu

SEQ ID NO: 1295114 - RNA, 19 nt, Homo sapiens
  misc_RNA (1)...(19): siRNA sense strand
ggagagagcacgauuuauu

SEQ ID NO: 1295115 - RNA, 19 nt, Homo sapiens
  misc_RNA (1)...(19): siRNA sense strand
agagaaacauguccauaua

SEQ ID NO: 1295116 - RNA, 19 nt, Homo sapiens
  misc_RNA (1)...(19): siRNA sense strand
cagaugcacuuuauuugua

SEQ ID NO: 1295117 - RNA, 19 nt, Homo sapiens
  misc_RNA (1)...(19): siRNA sense strand
ggacuuacgaguuugguua

SEQ ID NO: 1295118 - RNA, 19 nt, Homo sapiens
  misc_RNA (1)...(19): siRNA sense strand
aaacagauaucaggauuug

SEQ ID NO: 1295119 - RNA, 19 nt, Homo sapiens
  misc_RNA (1)...(19): siRNA sense strand
cuauggagcucauugguaa

SEQ ID NO: 1295120 - RNA, 19 nt, Homo sapiens
  misc_RNA (1)...(19): siRNA sense strand
aaacacaccuuuagugaag

SEQ ID NO: 1295121 - RNA, 19 nt, Homo sapiens
  misc_RNA (1)...(19): siRNA sense strand
gaacuuaaaggaucaguag

SEQ ID NO: 1295122 - RNA, 19 nt, Homo sapiens
  misc_RNA (1)...(19): siRNA sense strand
gaaaacagauaucaggauu

SEQ ID NO: 1295123 - RNA, 19 nt, Homo sapiens
  misc_RNA (1)...(19): siRNA sense strand
uaaaggaucaguagcaauu

SEQ ID NO: 1295124 - RNA, 19 nt, Homo sapiens
  misc_RNA (1)...(19): siRNA sense strand
aaaugggacuuacgaguuu

SEQ ID NO: 1295125 - RNA, 19 nt, Homo sapiens
  misc_RNA (1)...(19): siRNA sense strand
guuaucagaugcacuuuau

SEQ ID NO: 1295126 - RNA, 19 nt, Homo sapiens
  misc_RNA (1)...(19): siRNA sense strand
ugagauuggugaacgagua

SEQ ID NO: 1295127 - RNA, 19 nt, Homo sapiens
  misc_RNA (1)...(19): siRNA sense strand
gugaacgaguagauuauaa

SEQ ID NO: 1295128 - RNA, 19 nt, Homo sapiens
  misc_RNA (1)...(19): siRNA sense strand
gagagagcacgauuuauug

SEQ ID NO: 1295129 - RNA, 19 nt, Homo sapiens
  misc_RNA (1)...(19): siRNA sense strand
caaaugggacuuacgaguu

SEQ ID NO: 1295130 - RNA, 19 nt, Homo sapiens
  misc_RNA (1)...(19): siRNA sense strand
ggucauugcugugauuguu

SEQ ID NO: 1295131 - RNA, 19 nt, Homo sapiens
  misc_RNA (1)...(19): siRNA sense strand
ccagauccauuuucacuua

SEQ ID NO: 1295132 - RNA, 19 nt, Homo sapiens
  misc_RNA (1)...(19): siRNA sense strand
gaaggaauacuugacaguu

SEQ ID NO: 1295133 - RNA, 19 nt, Homo sapiens
  misc_RNA (1)...(19): siRNA sense strand
aaggaauacuugacaguuu

SEQ ID NO: 1295134 - RNA, 19 nt, Homo sapiens
  misc_RNA (1)...(19): siRNA sense strand
ucagaugacgccuguuaua

SEQ ID NO: 1295135 - RNA, 19 nt, Homo sapiens
  misc_RNA (1)...(19): siRNA sense strand
gaaaacacaccuuuaguga

SEQ ID NO: 1295136 - RNA, 19 nt, Homo sapiens
  misc_RNA (1)...(19): siRNA sense strand
gaugacgccuguuauagag

SEQ ID NO: 1295137 - RNA, 19 nt, Homo sapiens
  misc_RNA (1)...(19): siRNA sense strand
gagaaacauguccauauau

SEQ ID NO: 1295138 - RNA, 19 nt, Homo sapiens
  misc_RNA (1)...(19): siRNA sense strand
acgaguagauuauaagugu

SEQ ID NO: 1295139 - RNA, 19 nt, Homo sapiens
  misc_RNA (1)...(19): siRNA sense strand
cuacaaagcaacaguuaug

SEQ ID NO: 1295140 - RNA, 19 nt, Homo sapiens
  misc_RNA (1)...(19): siRNA sense strand
ccaccaacauuugaagcua

SEQ ID NO: 1295141 - RNA, 19 nt, Homo sapiens
  misc_RNA (1)...(19): siRNA sense strand
uauacgggauccuuuaaau

SEQ ID NO: 1295142 - RNA, 19 nt, Homo sapiens
  misc_RNA (1)...(19): siRNA sense strand
cgaguuugguuaucagaug

SEQ ID NO: 1295143 - RNA, 19 nt, Homo sapiens
  misc_RNA (1)...(19): siRNA sense strand
gaacgaguagauuauaagu

SEQ ID NO: 1295144 - RNA, 19 nt, Homo sapiens
  misc_RNA (1)...(19): siRNA sense strand
gugaggagccaccaacauu

SEQ ID NO: 1295145 - RNA, 19 nt, Homo sapiens
  misc_RNA (1)...(19): siRNA sense strand
gauggcagcgacacaauug

SEQ ID NO: 1295146 - RNA, 19 nt, Homo sapiens
  misc_RNA (1)...(19): siRNA sense strand
gcuauggagcucauuggua

SEQ ID NO: 1295147 - RNA, 19 nt, Homo sapiens
  misc_RNA (1)...(19): siRNA sense strand
gaggagccaccaacauuug

SEQ ID NO: 1295148 - RNA, 19 nt, Homo sapiens
  misc_RNA (1)...(19): siRNA sense strand
acacaccuuuagugaagua

SEQ ID NO: 1295149 - RNA, 19 nt, Homo sapiens
  misc_RNA (1)...(19): siRNA sense strand
ucucagaugacgccuguua

SEQ ID NO: 1295150 - RNA, 19 nt, Homo sapiens
  misc_RNA (1)...(19): siRNA sense strand
uagagaaacauguccauau

SEQ ID NO: 1295151 - RNA, 19 nt, Homo sapiens
  misc_RNA (1)...(19): siRNA sense strand
guuccaaagugucuuaaag

SEQ ID NO: 1295152 - RNA, 19 nt, Homo sapiens
  misc_RNA (1)...(19): siRNA sense strand
ggugaacgaguagauuaua

SEQ ID NO: 1295153 - RNA, 19 nt, Homo sapiens
  misc_RNA (1)...(19): siRNA sense strand
gaaguagaaguauuugagu

SEQ ID NO: 1295154 - RNA, 19 nt, Homo sapiens
  misc_RNA (1)...(19): siRNA sense strand
gaaacauguccauauauac

SEQ ID NO: 1295155 - RNA, 19 nt, Homo sapiens
  misc_RNA (1)...(19): siRNA sense strand
ugacgccuguuauagagaa

SEQ ID NO: 1295156 - RNA, 19 nt, Homo sapiens
  misc_RNA (1)...(19): siRNA sense strand
cgaguagauuauaagugua

SEQ ID NO: 1295157 - RNA, 19 nt, Homo sapiens
  misc_RNA (1)...(19): siRNA sense strand
gcacuuuauuuguaaugag

SEQ ID NO: 1295158 - RNA, 19 nt, Homo sapiens
  misc_RNA (1)...(19): siRNA sense strand
guagaaguauuugaguauc

SEQ ID NO: 1295159 - RNA, 19 nt, Homo sapiens
  misc_RNA (1)...(19): siRNA sense strand
guauuugaguaucuugaug

SEQ ID NO: 1295160 - RNA, 19 nt, Homo sapiens
  misc_RNA (1)...(19): siRNA sense strand
aggaauacuugacaguuug

SEQ ID NO: 1295161 - RNA, 19 nt, Homo sapiens
  misc_RNA (1)...(19): siRNA sense strand
ccaaaacccuacuaugaga

SEQ ID NO: 1295162 - RNA, 19 nt, Homo sapiens
  misc_RNA (1)...(19): siRNA sense strand
aguguaaaguggucaaaug

SEQ ID NO: 1295163 - RNA, 19 nt, Homo sapiens
  misc_RNA (1)...(19): siRNA sense strand
ccacccauacuauuuguga

SEQ ID NO: 1295164 - RNA, 19 nt, Homo sapiens
  misc_RNA (1)...(19): siRNA sense strand
caccaacauuugaagcuau

SEQ ID NO: 1295165 - RNA, 19 nt, Homo sapiens
  misc_RNA (1)...(19): siRNA sense strand
uuggagagagcacgauuua

SEQ ID NO: 1295166 - RNA, 19 nt, Homo sapiens
  misc_RNA (1)...(19): siRNA sense strand
gguuaucagaugcacuuua

SEQ ID NO: 1295167 - RNA, 19 nt, Homo sapiens
  misc_RNA (1)...(19): siRNA sense strand
ugaggagccaccaacauuu

SEQ ID NO: 1295168 - RNA, 19 nt, Homo sapiens
  misc_RNA (1)...(19): siRNA sense strand
ggaaggaauacuugacagu

SEQ ID NO: 1295169 - RNA, 19 nt, Homo sapiens
  misc_RNA (1)...(19): siRNA sense strand
gaggaaggaauacuugaca

SEQ ID NO: 1295170 - RNA, 19 nt, Homo sapiens
  misc_RNA (1)...(19): siRNA sense strand
ccaguuccaaagugucuua

SEQ ID NO: 1295171 - RNA, 19 nt, Homo sapiens
  misc_RNA (1)...(19): siRNA sense strand
ugaguaucuugaugcagua

SEQ ID NO: 1295172 - RNA, 19 nt, Homo sapiens
  misc_RNA (1)...(19): siRNA sense strand
caccuuuagugaaguagaa

SEQ ID NO: 1295173 - RNA, 19 nt, Homo sapiens
  misc_RNA (1)...(19): siRNA sense strand
acagauaucaggauuugga

SEQ ID NO: 1295174 - RNA, 19 nt, Homo sapiens
  misc_RNA (1)...(19): siRNA sense strand
ucauugcugugauuguuau

SEQ ID NO: 1295175 - RNA, 19 nt, Homo sapiens
  misc_RNA (1)...(19): siRNA sense strand
ucagaugcacuuuauuugu

SEQ ID NO: 1295176 - RNA, 19 nt, Homo sapiens
  misc_RNA (1)...(19): siRNA sense strand
gugcugcuccagaguguaa

SEQ ID NO: 1295177 - RNA, 19 nt, Homo sapiens
  misc_RNA (1)...(19): siRNA sense strand
ggaaaacacaccuuuagug

SEQ ID NO: 1295178 - RNA, 19 nt, Homo sapiens
  misc_RNA (1)...(19): siRNA sense strand
aaggaucaguagcaauuug

SEQ ID NO: 1295179 - RNA, 19 nt, Homo sapiens
  misc_RNA (1)...(19): siRNA sense strand
uauauacgggauccuuuaa

SEQ ID NO: 1295180 - RNA, 19 nt, Homo sapiens
  misc_RNA (1)...(19): siRNA sense strand
ugaaguagaaguauuugag

SEQ ID NO: 1295181 - RNA, 19 nt, Homo sapiens
  misc_RNA (1)...(19): siRNA sense strand
cuugacaguuuggauguuu

SEQ ID NO: 1295182 - RNA, 19 nt, Homo sapiens
  misc_RNA (1)...(19): siRNA sense strand
cauauauacgggauccuuu

SEQ ID NO: 1295183 - RNA, 19 nt, Homo sapiens
  misc_RNA (1)...(19): siRNA sense strand
auauauacgggauccuuua

SEQ ID NO: 1295184 - RNA, 19 nt, Homo sapiens
  misc_RNA (1)...(19): siRNA sense strand
cuuaaaggaucaguagcaa

SEQ ID NO: 1295185 - RNA, 19 nt, Homo sapiens
  misc_RNA (1)...(19): siRNA sense strand
uaaaccugaggaaggaaua

SEQ ID NO: 1295186 - RNA, 19 nt, Homo sapiens
  misc_RNA (1)...(19): siRNA sense strand
agaugacgccuguuauaga

SEQ ID NO: 1295187 - RNA, 19 nt, Homo sapiens
  misc_RNA (1)...(19): siRNA sense strand
ugugauuguuauugccaua

SEQ ID NO: 1295188 - RNA, 19 nt, Homo sapiens
  misc_RNA (1)...(19): siRNA sense strand
gagagcacgauuuauugug

SEQ ID NO: 1295189 - RNA, 19 nt, Homo sapiens
  misc_RNA (1)...(19): siRNA sense strand
gaaguauuugaguaucuug

SEQ ID NO: 1295190 - RNA, 19 nt, Homo sapiens
  misc_RNA (1)...(19): siRNA sense strand
ggcuaccugucucagauga

SEQ ID NO: 1295191 - RNA, 19 nt, Homo sapiens
  misc_RNA (1)...(19): siRNA sense strand
gauaucaggauuuggaaaa

SEQ ID NO: 1295192 - RNA, 19 nt, Homo sapiens
  misc_RNA (1)...(19): siRNA sense strand
ccucuugccacccauacua

SEQ ID NO: 1295193 - RNA, 19 nt, Homo sapiens
  misc_RNA (1)...(19): siRNA sense strand
ccaugguguugcugcugua

SEQ ID NO: 1295194 - RNA, 19 nt, Homo sapiens
  misc_RNA (1)...(19): siRNA sense strand
cagaugacgccuguuauag

SEQ ID NO: 1295195 - RNA, 19 nt, Homo sapiens
  misc_RNA (1)...(19): siRNA sense strand
uuggugaacgaguagauua

SEQ ID NO: 1295196 - RNA, 19 nt, Homo sapiens
  misc_RNA (1)...(19): siRNA sense strand
gucauugcugugauuguua

SEQ ID NO: 1295197 - RNA, 19 nt, Homo sapiens
  misc_RNA (1)...(19): siRNA sense strand
ggagccaccaacauuugaa

SEQ ID NO: 1295198 - RNA, 19 nt, Homo sapiens
  misc_RNA (1)...(19): siRNA sense strand
gcgcuuuccuggguugcuu

SEQ ID NO: 1295199 - RNA, 19 nt, Homo sapiens
  misc_RNA (1)...(19): siRNA sense strand
uacuacaaagcaacaguua

SEQ ID NO: 1295200 - RNA, 19 nt, Homo sapiens
  misc_RNA (1)...(19): siRNA sense strand
cuugaugcaguaacuuaua

SEQ ID NO: 1295201 - RNA, 19 nt, Homo sapiens
  misc_RNA (1)...(19): siRNA sense strand
aaacauguccauauauacg

SEQ ID NO: 1295202 - RNA, 19 nt, Homo sapiens
  misc_RNA (1)...(19): siRNA sense strand
guguaaaguggucaaaugu

SEQ ID NO: 1295203 - RNA, 19 nt, Homo sapiens
  misc_RNA (1)...(19): siRNA sense strand
cuuacgaguuugguuauca

SEQ ID NO: 1295204 - RNA, 19 nt, Homo sapiens
  misc_RNA (1)...(19): siRNA sense strand
uacgggauccuuuaaaugg

SEQ ID NO: 1295205 - RNA, 19 nt, Homo sapiens
  misc_RNA (1)...(19): siRNA sense strand
aaccaaaacccuacuauga

SEQ ID NO: 1295206 - RNA, 19 nt, Homo sapiens
  misc_RNA (1)...(19): siRNA sense strand
cccaauaugugaaaagguu

SEQ ID NO: 1295207 - RNA, 19 nt, Homo sapiens
  misc_RNA (1)...(19): siRNA sense strand
cgauggcagcgacacaauu

SEQ ID NO: 1295208 - RNA, 19 nt, Homo sapiens
  misc_RNA (1)...(19): siRNA sense strand
gauccauuuucacuuauug

SEQ ID NO: 1295209 - RNA, 19 nt, Homo sapiens
  misc_RNA (1)...(19): siRNA sense strand
uugaugcaguaacuuauag

SEQ ID NO: 1295210 - RNA, 19 nt, Homo sapiens
  misc_RNA (1)...(19): siRNA sense strand
guaucuugaugcaguaacu

SEQ ID NO: 1295211 - RNA, 19 nt, Homo sapiens
  misc_RNA (1)...(19): siRNA sense strand
caacauuugaagcuaugga

SEQ ID NO: 1295212 - RNA, 19 nt, Homo sapiens
  misc_RNA (1)...(19): siRNA sense strand
gagauuggugaacgaguag

SEQ ID NO: 1295213 - RNA, 19 nt, Homo sapiens
  misc_RNA (1)...(19): siRNA sense strand
ggagagagcacgauuuauu

SEQ ID NO: 1295214 - RNA, 19 nt, Homo sapiens
  misc_RNA (1)...(19): siRNA sense strand
agagaaacauguccauaua

SEQ ID NO: 1295215 - RNA, 19 nt, Homo sapiens
  misc_RNA (1)...(19): siRNA sense strand
cagaugcacuuuauuugua

SEQ ID NO: 1295216 - RNA, 19 nt, Homo sapiens
  misc_RNA (1)...(19): siRNA sense strand
ggacuuacgaguuugguua

SEQ ID NO: 1295217 - RNA, 19 nt, Homo sapiens
  misc_RNA (1)...(19): siRNA sense strand
aaacagauaucaggauuug

SEQ ID NO: 1295218 - RNA, 19 nt, Homo sapiens
  misc_RNA (1)...(19): siRNA sense strand
cuauggagcucauugguaa

SEQ ID NO: 1295219 - RNA, 19 nt, Homo sapiens
  misc_RNA (1)...(19): siRNA sense strand
aaacacaccuuuagugaag

SEQ ID NO: 1295220 - RNA, 19 nt, Homo sapiens
  misc_RNA (1)...(19): siRNA sense strand
gaacuuaaaggaucaguag

SEQ ID NO: 1295221 - RNA, 19 nt, Homo sapiens
  misc_RNA (1)...(19): siRNA sense strand
gaaaacagauaucaggauu

SEQ ID NO: 1295222 - RNA, 19 nt, Homo sapiens
  misc_RNA (1)...(19): siRNA sense strand
uaaaggaucaguagcaauu

SEQ ID NO: 1295223 - RNA, 19 nt, Homo sapiens
  misc_RNA (1)...(19): siRNA sense strand
aaaugggacuuacgaguuu

SEQ ID NO: 1295224 - RNA, 19 nt, Homo sapiens
  misc_RNA (1)...(19): siRNA sense strand
guuaucagaugcacuuuau

SEQ ID NO: 1295225 - RNA, 19 nt, Homo sapiens
  misc_RNA (1)...(19): siRNA sense strand
gagcugaauaugccacuua

SEQ ID NO: 1295226 - RNA, 19 nt, Homo sapiens
  misc_RNA (1)...(19): siRNA sense strand
gagcagagaggcugaauag

SEQ ID NO: 1295227 - RNA, 19 nt, Homo sapiens
  misc_RNA (1)...(19): siRNA sense strand
ugagauuggugaacgagua

SEQ ID NO: 1295228 - RNA, 19 nt, Homo sapiens
  misc_RNA (1)...(19): siRNA sense strand
gugaacgaguagauuauaa

SEQ ID NO: 1295229 - RNA, 19 nt, Homo sapiens
  misc_RNA (1)...(19): siRNA sense strand
gagagagcacgauuuauug

SEQ ID NO: 1295230 - RNA, 19 nt, Homo sapiens
  misc_RNA (1)...(19): siRNA sense strand
caaaugggacuuacgaguu

SEQ ID NO: 1295231 - RNA, 19 nt, Homo sapiens
  misc_RNA (1)...(19): siRNA sense strand
ggucauugcugugauuguu

SEQ ID NO: 1295232 - RNA, 19 nt, Homo sapiens
  misc_RNA (1)...(19): siRNA sense strand
ccagauccauuuucacuua

SEQ ID NO: 1295233 - RNA, 19 nt, Homo sapiens
  misc_RNA (1)...(19): siRNA sense strand
gaaggaauacuugacaguu

SEQ ID NO: 1295234 - RNA, 19 nt, Homo sapiens
  misc_RNA (1)...(19): siRNA sense strand
aaggaauacuugacaguuu

SEQ ID NO: 1295235 - RNA, 19 nt, Homo sapiens
  misc_RNA (1)...(19): siRNA sense strand
ucagaugacgccuguuaua

SEQ ID NO: 1295236 - RNA, 19 nt, Homo sapiens
  misc_RNA (1)...(19): siRNA sense strand
gaaaacacaccuuuaguga

SEQ ID NO: 1295237 - RNA, 19 nt, Homo sapiens
  misc_RNA (1)...(19): siRNA sense strand
gaugacgccuguuauagag

SEQ ID NO: 1295238 - RNA, 19 nt, Homo sapiens
  misc_RNA (1)...(19): siRNA sense strand
gagaaacauguccauauau

SEQ ID NO: 1295239 - RNA, 19 nt, Homo sapiens
  misc_RNA (1)...(19): siRNA sense strand
ccacuuaccagacuaaauc

SEQ ID NO: 1295240 - RNA, 19 nt, Homo sapiens
  misc_RNA (1)...(19): siRNA sense strand
acgaguagauuauaagugu

SEQ ID NO: 1295241 - RNA, 19 nt, Homo sapiens
  misc_RNA (1)...(19): siRNA sense strand
cuacaaagcaacaguuaug

SEQ ID NO: 1295242 - RNA, 19 nt, Homo sapiens
  misc_RNA (1)...(19): siRNA sense strand
ccaccaacauuugaagcua

SEQ ID NO: 1295243 - RNA, 19 nt, Homo sapiens
  misc_RNA (1)...(19): siRNA sense strand
uauacgggauccuuuaaau

SEQ ID NO: 1295244 - RNA, 19 nt, Homo sapiens
  misc_RNA (1)...(19): siRNA sense strand
cgaguuugguuaucagaug

SEQ ID NO: 1295245 - RNA, 19 nt, Homo sapiens
  misc_RNA (1)...(19): siRNA sense strand
gaacgaguagauuauaagu

SEQ ID NO: 1295246 - RNA, 19 nt, Homo sapiens
  misc_RNA (1)...(19): siRNA sense strand
gugaggagccaccaacauu

SEQ ID NO: 1295247 - RNA, 19 nt, Homo sapiens
  misc_RNA (1)...(19): siRNA sense strand
gauggcagcgacacaauug

SEQ ID NO: 1295248 - RNA, 19 nt, Homo sapiens
  misc_RNA (1)...(19): siRNA sense strand
ucucagaugacgccuguua

SEQ ID NO: 1295249 - RNA, 19 nt, Homo sapiens
  misc_RNA (1)...(19): siRNA sense strand
acacaccuuuagugaagua

SEQ ID NO: 1295250 - RNA, 19 nt, Homo sapiens
  misc_RNA (1)...(19): siRNA sense strand
gcuauggagcucauuggua

SEQ ID NO: 1295251 - RNA, 19 nt, Homo sapiens
  misc_RNA (1)...(19): siRNA sense strand
gaggagccaccaacauuug

SEQ ID NO: 1295252 - RNA, 19 nt, Homo sapiens
  misc_RNA (1)...(19): siRNA sense strand
uagagaaacauguccauau

SEQ ID NO: 1295253 - RNA, 19 nt, Homo sapiens
  misc_RNA (1)...(19): siRNA sense strand
ggugaacgaguagauuaua

SEQ ID NO: 1295254 - RNA, 19 nt, Homo sapiens
  misc_RNA (1)...(19): siRNA sense strand
gaaguagaaguauuugagu

SEQ ID NO: 1295255 - RNA, 19 nt, Homo sapiens
  misc_RNA (1)...(19): siRNA sense strand
gaaacauguccauauauac

SEQ ID NO: 1295256 - RNA, 19 nt, Homo sapiens
  misc_RNA (1)...(19): siRNA sense strand
ugacgccuguuauagagaa

SEQ ID NO: 1295257 - RNA, 19 nt, Homo sapiens
  misc_RNA (1)...(19): siRNA sense strand
cgaguagauuauaagugua

SEQ ID NO: 1295258 - RNA, 19 nt, Homo sapiens
  misc_RNA (1)...(19): siRNA sense strand
gcacuuuauuuguaaugag

SEQ ID NO: 1295259 - RNA, 19 nt, Homo sapiens
  misc_RNA (1)...(19): siRNA sense strand
guagaaguauuugaguauc

SEQ ID NO: 1295260 - RNA, 19 nt, Homo sapiens
  misc_RNA (1)...(19): siRNA sense strand
guauuugaguaucuugaug

SEQ ID NO: 1295261 - RNA, 19 nt, Homo sapiens
  misc_RNA (1)...(19): siRNA sense strand
aggaauacuugacaguuug

SEQ ID NO: 1295262 - RNA, 19 nt, Homo sapiens
  misc_RNA (1)...(19): siRNA sense strand
ccaaaacccuacuaugaga

SEQ ID NO: 1295263 - RNA, 19 nt, Homo sapiens
  misc_RNA (1)...(19): siRNA sense strand
aguguaaaguggucaaaug

SEQ ID NO: 1295264 - RNA, 19 nt, Homo sapiens
  misc_RNA (1)...(19): siRNA sense strand
ccacccauacuauuuguga

SEQ ID NO: 1295265 - RNA, 19 nt, Homo sapiens
  misc_RNA (1)...(19): siRNA sense strand
uuggagagagcacgauuua

SEQ ID NO: 1295266 - RNA, 19 nt, Homo sapiens
  misc_RNA (1)...(19): siRNA sense strand
gguuaucagaugcacuuua

SEQ ID NO: 1295267 - RNA, 19 nt, Homo sapiens
  misc_RNA (1)...(19): siRNA sense strand
caccaacauuugaagcuau

SEQ ID NO: 1295268 - RNA, 19 nt, Homo sapiens
  misc_RNA (1)...(19): siRNA sense strand
ugaggagccaccaacauuu

SEQ ID NO: 1295269 - RNA, 19 nt, Homo sapiens
  misc_RNA (1)...(19): siRNA sense strand
ggaaggaauacuugacagu

SEQ ID NO: 1295270 - RNA, 19 nt, Homo sapiens
  misc_RNA (1)...(19): siRNA sense strand
gaggaaggaauacuugaca

SEQ ID NO: 1295271 - RNA, 19 nt, Homo sapiens
  misc_RNA (1)...(19): siRNA sense strand
ugaguaucuugaugcagua

SEQ ID NO: 1295272 - RNA, 19 nt, Homo sapiens
  misc_RNA (1)...(19): siRNA sense strand
caccuuuagugaaguagaa

SEQ ID NO: 1295273 - RNA, 19 nt, Homo sapiens
  misc_RNA (1)...(19): siRNA sense strand
acagauaucaggauuugga

SEQ ID NO: 1295274 - RNA, 19 nt, Homo sapiens
  misc_RNA (1)...(19): siRNA sense strand
ucauugcugugauuguuau

SEQ ID NO: 1295275 - RNA, 19 nt, Homo sapiens
  misc_RNA (1)...(19): siRNA sense strand
ucagaugcacuuuauuugu

SEQ ID NO: 1295276 - RNA, 19 nt, Homo sapiens
  misc_RNA (1)...(19): siRNA sense strand
gugcugcuccagaguguaa

SEQ ID NO: 1295277 - RNA, 19 nt, Homo sapiens
  misc_RNA (1)...(19): siRNA sense strand
ggaaaacacaccuuuagug

SEQ ID NO: 1295278 - RNA, 19 nt, Homo sapiens
  misc_RNA (1)...(19): siRNA sense strand
aaggaucaguagcaauuug

SEQ ID NO: 1295279 - RNA, 19 nt, Homo sapiens
  misc_RNA (1)...(19): siRNA sense strand
uauauacgggauccuuuaa

SEQ ID NO: 1295280 - RNA, 19 nt, Homo sapiens
  misc_RNA (1)...(19): siRNA sense strand
ugaaguagaaguauuugag

SEQ ID NO: 1295281 - RNA, 19 nt, Homo sapiens
  misc_RNA (1)...(19): siRNA sense strand
cuugacaguuuggauguuu

SEQ ID NO: 1295282 - RNA, 19 nt, Homo sapiens
  misc_RNA (1)...(19): siRNA sense strand
cauauauacgggauccuuu

SEQ ID NO: 1295283 - RNA, 19 nt, Homo sapiens
  misc_RNA (1)...(19): siRNA sense strand
auauauacgggauccuuua

SEQ ID NO: 1295284 - RNA, 19 nt, Homo sapiens
  misc_RNA (1)...(19): siRNA sense strand
cuuaaaggaucaguagcaa

SEQ ID NO: 1295285 - RNA, 19 nt, Homo sapiens
  misc_RNA (1)...(19): siRNA sense strand
uaaaccugaggaaggaaua

SEQ ID NO: 1295286 - RNA, 19 nt, Homo sapiens
  misc_RNA (1)...(19): siRNA sense strand
agaugacgccuguuauaga

SEQ ID NO: 1295287 - RNA, 19 nt, Homo sapiens
  misc_RNA (1)...(19): siRNA sense strand
ugugauuguuauugccaua

SEQ ID NO: 1295288 - RNA, 19 nt, Homo sapiens
  misc_RNA (1)...(19): siRNA sense strand
gagagcacgauuuauugug

SEQ ID NO: 1295289 - RNA, 19 nt, Homo sapiens
  misc_RNA (1)...(19): siRNA sense strand
gaaguauuugaguaucuug

SEQ ID NO: 1295290 - RNA, 19 nt, Homo sapiens
  misc_RNA (1)...(19): siRNA sense strand
ggcuaccugucucagauga

SEQ ID NO: 1295291 - RNA, 19 nt, Homo sapiens
  misc_RNA (1)...(19): siRNA sense strand
gauaucaggauuuggaaaa

SEQ ID NO: 1295292 - RNA, 19 nt, Homo sapiens
  misc_RNA (1)...(19): siRNA sense strand
ccucuugccacccauacua

SEQ ID NO: 1295293 - RNA, 19 nt, Homo sapiens
  misc_RNA (1)...(19): siRNA sense strand
ccaugguguugcugcugua

SEQ ID NO: 1295294 - RNA, 19 nt, Homo sapiens
  misc_RNA (1)...(19): siRNA sense strand
cagaugacgccuguuauag

SEQ ID NO: 1295295 - RNA, 19 nt, Homo sapiens
  misc_RNA (1)...(19): siRNA sense strand
cagaugguggagcugaaua

SEQ ID NO: 1295296 - RNA, 19 nt, Homo sapiens
  misc_RNA (1)...(19): siRNA sense strand
gucauugcugugauuguua

SEQ ID NO: 1295297 - RNA, 19 nt, Homo sapiens
  misc_RNA (1)...(19): siRNA sense strand
ggagccaccaacauuugaa

SEQ ID NO: 1295298 - RNA, 19 nt, Homo sapiens
  misc_RNA (1)...(19): siRNA sense strand
uuggugaacgaguagauua

SEQ ID NO: 1295299 - RNA, 19 nt, Homo sapiens
  misc_RNA (1)...(19): siRNA sense strand
gcgcuuuccuggguugcuu

SEQ ID NO: 1295300 - RNA, 19 nt, Homo sapiens
  misc_RNA (1)...(19): siRNA sense strand
uacuacaaagcaacaguua

SEQ ID NO: 1295301 - RNA, 19 nt, Homo sapiens
  misc_RNA (1)...(19): siRNA sense strand
cuugaugcaguaacuuaua

SEQ ID NO: 1295302 - RNA, 19 nt, Homo sapiens
  misc_RNA (1)...(19): siRNA sense strand
aaacauguccauauauacg

SEQ ID NO: 1295303 - RNA, 19 nt, Homo sapiens
  misc_RNA (1)...(19): siRNA sense strand
guguaaaguggucaaaugu

SEQ ID NO: 1295304 - RNA, 19 nt, Homo sapiens
  misc_RNA (1)...(19): siRNA sense strand
cuuacgaguuugguuauca

SEQ ID NO: 1295305 - RNA, 19 nt, Homo sapiens
  misc_RNA (1)...(19): siRNA sense strand
uacgggauccuuuaaaugg

SEQ ID NO: 1295306 - RNA, 19 nt, Homo sapiens
  misc_RNA (1)...(19): siRNA sense strand
gcagaugguggagcugaau

SEQ ID NO: 1295307 - RNA, 19 nt, Homo sapiens
  misc_RNA (1)...(19): siRNA sense strand
aaccaaaacccuacuauga

SEQ ID NO: 1295308 - RNA, 19 nt, Homo sapiens
  misc_RNA (1)...(19): siRNA sense strand
uugaugcaguaacuuauag

SEQ ID NO: 1295309 - RNA, 19 nt, Homo sapiens
  misc_RNA (1)...(19): siRNA sense strand
ggagcugaauaugccacuu

SEQ ID NO: 1295310 - RNA, 19 nt, Homo sapiens
  misc_RNA (1)...(19): siRNA sense strand
caacauuugaagcuaugga

SEQ ID NO: 1295311 - RNA, 19 nt, Homo sapiens
  misc_RNA (1)...(19): siRNA sense strand
cgauggcagcgacacaauu

SEQ ID NO: 1295312 - RNA, 19 nt, Homo sapiens
  misc_RNA (1)...(19): siRNA sense strand
gauccauuuucacuuauug

SEQ ID NO: 1295313 - RNA, 19 nt, Homo sapiens
  misc_RNA (1)...(19): siRNA sense strand
ggagagagcacgauuuauu

SEQ ID NO: 1295314 - RNA, 19 nt, Homo sapiens
  misc_RNA (1)...(19): siRNA sense strand
agagaaacauguccauaua

SEQ ID NO: 1295315 - RNA, 19 nt, Homo sapiens
  misc_RNA (1)...(19): siRNA sense strand
cagaugcacuuuauuugua

SEQ ID NO: 1295316 - RNA, 19 nt, Homo sapiens
  misc_RNA (1)...(19): siRNA sense strand
ggacuuacgaguuugguua

SEQ ID NO: 1295317 - RNA, 19 nt, Homo sapiens
  misc_RNA (1)...(19): siRNA sense strand
aaacagauaucaggauuug

SEQ ID NO: 1295318 - RNA, 19 nt, Homo sapiens
  misc_RNA (1)...(19): siRNA sense strand
cuauggagcucauugguaa

SEQ ID NO: 1295319 - RNA, 19 nt, Homo sapiens
  misc_RNA (1)...(19): siRNA sense strand
aaacacaccuuuagugaag

SEQ ID NO: 1295320 - RNA, 19 nt, Homo sapiens
  misc_RNA (1)...(19): siRNA sense strand
gaacuuaaaggaucaguag

SEQ ID NO: 1295321 - RNA, 19 nt, Homo sapiens
  misc_RNA (1)...(19): siRNA sense strand
gaaaacagauaucaggauu

SEQ ID NO: 1295322 - RNA, 19 nt, Homo sapiens
  misc_RNA (1)...(19): siRNA sense strand
uaaaggaucaguagcaauu

SEQ ID NO: 1295323 - RNA, 19 nt, Homo sapiens
  misc_RNA (1)...(19): siRNA sense strand
aaaugggacuuacgaguuu

SEQ ID NO: 1295324 - RNA, 19 nt, Homo sapiens
  misc_RNA (1)...(19): siRNA sense strand
guuaucagaugcacuuuau

SEQ ID NO: 1295325 - RNA, 19 nt, Homo sapiens
  misc_RNA (1)...(19): siRNA sense strand
gagcugaauaugccacuua

SEQ ID NO: 1295326 - RNA, 19 nt, Homo sapiens
  misc_RNA (1)...(19): siRNA sense strand
ugagauuggugaacgagua

SEQ ID NO: 1295327 - RNA, 19 nt, Homo sapiens
  misc_RNA (1)...(19): siRNA sense strand
gugaacgaguagauuauaa

SEQ ID NO: 1295328 - RNA, 19 nt, Homo sapiens
  misc_RNA (1)...(19): siRNA sense strand
gagagagcacgauuuauug

SEQ ID NO: 1295329 - RNA, 19 nt, Homo sapiens
  misc_RNA (1)...(19): siRNA sense strand
caaaugggacuuacgaguu

SEQ ID NO: 1295330 - RNA, 19 nt, Homo sapiens
  misc_RNA (1)...(19): siRNA sense strand
ggucauugcugugauuguu

SEQ ID NO: 1295331 - RNA, 19 nt, Homo sapiens
  misc_RNA (1)...(19): siRNA sense strand
ccagauccauuuucacuua

SEQ ID NO: 1295332 - RNA, 19 nt, Homo sapiens
  misc_RNA (1)...(19): siRNA sense strand
gaaggaauacuugacaguu

SEQ ID NO: 1295333 - RNA, 19 nt, Homo sapiens
  misc_RNA (1)...(19): siRNA sense strand
aaggaauacuugacaguuu

SEQ ID NO: 1295334 - RNA, 19 nt, Homo sapiens
  misc_RNA (1)...(19): siRNA sense strand
ucagaugacgccuguuaua

SEQ ID NO: 1295335 - RNA, 19 nt, Homo sapiens
  misc_RNA (1)...(19): siRNA sense strand
gaaaacacaccuuuaguga

SEQ ID NO: 1295336 - RNA, 19 nt, Homo sapiens
  misc_RNA (1)...(19): siRNA sense strand
gaugacgccuguuauagag

SEQ ID NO: 1295337 - RNA, 19 nt, Homo sapiens
  misc_RNA (1)...(19): siRNA sense strand
gagaaacauguccauauau

SEQ ID NO: 1295338 - RNA, 19 nt, Homo sapiens
  misc_RNA (1)...(19): siRNA sense strand
ccacuuaccagacuaaauc

SEQ ID NO: 1295339 - RNA, 19 nt, Homo sapiens
  misc_RNA (1)...(19): siRNA sense strand
acgaguagauuauaagugu

SEQ ID NO: 1295340 - RNA, 19 nt, Homo sapiens
  misc_RNA (1)...(19): siRNA sense strand
cuacaaagcaacaguuaug

SEQ ID NO: 1295341 - RNA, 19 nt, Homo sapiens
  misc_RNA (1)...(19): siRNA sense strand
ccaccaacauuugaagcua

SEQ ID NO: 1295342 - RNA, 19 nt, Homo sapiens
  misc_RNA (1)...(19): siRNA sense strand
uauacgggauccuuuaaau

SEQ ID NO: 1295343 - RNA, 19 nt, Homo sapiens
  misc_RNA (1)...(19): siRNA sense strand
cgaguuugguuaucagaug

SEQ ID NO: 1295344 - RNA, 19 nt, Homo sapiens
  misc_RNA (1)...(19): siRNA sense strand
gaacgaguagauuauaagu

SEQ ID NO: 1295345 - RNA, 19 nt, Homo sapiens
  misc_RNA (1)...(19): siRNA sense strand
gugaggagccaccaacauu

SEQ ID NO: 1295346 - RNA, 19 nt, Homo sapiens
  misc_RNA (1)...(19): siRNA sense strand
gauggcagcgacacaauug

SEQ ID NO: 1295347 - RNA, 19 nt, Homo sapiens
  misc_RNA (1)...(19): siRNA sense strand
ucucagaugacgccuguua

SEQ ID NO: 1295348 - RNA, 19 nt, Homo sapiens
  misc_RNA (1)...(19): siRNA sense strand
gaggagccaccaacauuug

SEQ ID NO: 1295349 - RNA, 19 nt, Homo sapiens
  misc_RNA (1)...(19): siRNA sense strand
gcuauggagcucauuggua

SEQ ID NO: 1295350 - RNA, 19 nt, Homo sapiens
  misc_RNA (1)...(19): siRNA sense strand
acacaccuuuagugaagua

SEQ ID NO: 1295351 - RNA, 19 nt, Homo sapiens
  misc_RNA (1)...(19): siRNA sense strand
uagagaaacauguccauau

SEQ ID NO: 1295352 - RNA, 19 nt, Homo sapiens
  misc_RNA (1)...(19): siRNA sense strand
guuccaaagugucuuaaag

SEQ ID NO: 1295353 - RNA, 19 nt, Homo sapiens
  misc_RNA (1)...(19): siRNA sense strand
ggugaacgaguagauuaua

SEQ ID NO: 1295354 - RNA, 19 nt, Homo sapiens
  misc_RNA (1)...(19): siRNA sense strand
gaaguagaaguauuugagu

SEQ ID NO: 1295355 - RNA, 19 nt, Homo sapiens
  misc_RNA (1)...(19): siRNA sense strand
gaaacauguccauauauac

SEQ ID NO: 1295356 - RNA, 19 nt, Homo sapiens
  misc_RNA (1)...(19): siRNA sense strand
ugacgccuguuauagagaa

SEQ ID NO: 1295357 - RNA, 19 nt, Homo sapiens
  misc_RNA (1)...(19): siRNA sense strand
cgaguagauuauaagugua

SEQ ID NO: 1295358 - RNA, 19 nt, Homo sapiens
  misc_RNA (1)...(19): siRNA sense strand
gcacuuuauuuguaaugag

SEQ ID NO: 1295359 - RNA, 19 nt, Homo sapiens
  misc_RNA (1)...(19): siRNA sense strand
guagaaguauuugaguauc

SEQ ID NO: 1295360 - RNA, 19 nt, Homo sapiens
  misc_RNA (1)...(19): siRNA sense strand
guauuugaguaucuugaug

SEQ ID NO: 1295361 - RNA, 19 nt, Homo sapiens
  misc_RNA (1)...(19): siRNA sense strand
aggaauacuugacaguuug

SEQ ID NO: 1295362 - RNA, 19 nt, Homo sapiens
  misc_RNA (1)...(19): siRNA sense strand
ccaaaacccuacuaugaga

SEQ ID NO: 1295363 - RNA, 19 nt, Homo sapiens
  misc_RNA (1)...(19): siRNA sense strand
aguguaaaguggucaaaug

SEQ ID NO: 1295364 - RNA, 19 nt, Homo sapiens
  misc_RNA (1)...(19): siRNA sense strand
ccacccauacuauuuguga

SEQ ID NO: 1295365 - RNA, 19 nt, Homo sapiens
  misc_RNA (1)...(19): siRNA sense strand
uuggagagagcacgauuua

SEQ ID NO: 1295366 - RNA, 19 nt, Homo sapiens
  misc_RNA (1)...(19): siRNA sense strand
gguuaucagaugcacuuua

SEQ ID NO: 1295367 - RNA, 19 nt, Homo sapiens
  misc_RNA (1)...(19): siRNA sense strand
caccaacauuugaagcuau

SEQ ID NO: 1295368 - RNA, 19 nt, Homo sapiens
  misc_RNA (1)...(19): siRNA sense strand
ugaggagccaccaacauuu

SEQ ID NO: 1295369 - RNA, 19 nt, Homo sapiens
  misc_RNA (1)...(19): siRNA sense strand
ggaaggaauacuugacagu

SEQ ID NO: 1295370 - RNA, 19 nt, Homo sapiens
  misc_RNA (1)...(19): siRNA sense strand
gaggaaggaauacuugaca

SEQ ID NO: 1295371 - RNA, 19 nt, Homo sapiens
  misc_RNA (1)...(19): siRNA sense strand
ccaguuccaaagugucuua

SEQ ID NO: 1295372 - RNA, 19 nt, Homo sapiens
  misc_RNA (1)...(19): siRNA sense strand
ugaguaucuugaugcagua

SEQ ID NO: 1295373 - RNA, 19 nt, Homo sapiens
  misc_RNA (1)...(19): siRNA sense strand
caccuuuagugaaguagaa

SEQ ID NO: 1295374 - RNA, 19 nt, Homo sapiens
  misc_RNA (1)...(19): siRNA sense strand
acagauaucaggauuugga

SEQ ID NO: 1295375 - RNA, 19 nt, Homo sapiens
  misc_RNA (1)...(19): siRNA sense strand
ucauugcugugauuguuau

SEQ ID NO: 1295376 - RNA, 19 nt, Homo sapiens
  misc_RNA (1)...(19): siRNA sense strand
ucagaugcacuuuauuugu

SEQ ID NO: 1295377 - RNA, 19 nt, Homo sapiens
  misc_RNA (1)...(19): siRNA sense strand
gugcugcuccagaguguaa

SEQ ID NO: 1295378 - RNA, 19 nt, Homo sapiens
  misc_RNA (1)...(19): siRNA sense strand
ggaaaacacaccuuuagug

SEQ ID NO: 1295379 - RNA, 19 nt, Homo sapiens
  misc_RNA (1)...(19): siRNA sense strand
aaggaucaguagcaauuug

SEQ ID NO: 1295380 - RNA, 19 nt, Homo sapiens
  misc_RNA (1)...(19): siRNA sense strand
uauauacgggauccuuuaa

SEQ ID NO: 1295381 - RNA, 19 nt, Homo sapiens
  misc_RNA (1)...(19): siRNA sense strand
ugaaguagaaguauuugag

SEQ ID NO: 1295382 - RNA, 19 nt, Homo sapiens
  misc_RNA (1)...(19): siRNA sense strand
cuugacaguuuggauguuu

SEQ ID NO: 1295383 - RNA, 19 nt, Homo sapiens
  misc_RNA (1)...(19): siRNA sense strand
cauauauacgggauccuuu

SEQ ID NO: 1295384 - RNA, 19 nt, Homo sapiens
  misc_RNA (1)...(19): siRNA sense strand
auauauacgggauccuuua

SEQ ID NO: 1295385 - RNA, 19 nt, Homo sapiens
  misc_RNA (1)...(19): siRNA sense strand
cuuaaaggaucaguagcaa

SEQ ID NO: 1295386 - RNA, 19 nt, Homo sapiens
  misc_RNA (1)...(19): siRNA sense strand
uaaaccugaggaaggaaua

SEQ ID NO: 1295387 - RNA, 19 nt, Homo sapiens
  misc_RNA (1)...(19): siRNA sense strand
agaugacgccuguuauaga

SEQ ID NO: 1295388 - RNA, 19 nt, Homo sapiens
  misc_RNA (1)...(19): siRNA sense strand
ugugauuguuauugccaua

SEQ ID NO: 1295389 - RNA, 19 nt, Homo sapiens
  misc_RNA (1)...(19): siRNA sense strand
gagagcacgauuuauugug

SEQ ID NO: 1295390 - RNA, 19 nt, Homo sapiens
  misc_RNA (1)...(19): siRNA sense strand
gaaguauuugaguaucuug

SEQ ID NO: 1295391 - RNA, 19 nt, Homo sapiens
  misc_RNA (1)...(19): siRNA sense strand
ggcuaccugucucagauga

SEQ ID NO: 1295392 - RNA, 19 nt, Homo sapiens
  misc_RNA (1)...(19): siRNA sense strand
gauaucaggauuuggaaaa

SEQ ID NO: 1295393 - RNA, 19 nt, Homo sapiens
  misc_RNA (1)...(19): siRNA sense strand
ccucuugccacccauacua

SEQ ID NO: 1295394 - RNA, 19 nt, Homo sapiens
  misc_RNA (1)...(19): siRNA sense strand
ccaugguguugcugcugua

SEQ ID NO: 1295395 - RNA, 19 nt, Homo sapiens
  misc_RNA (1)...(19): siRNA sense strand
cagaugacgccuguuauag

SEQ ID NO: 1295396 - RNA, 19 nt, Homo sapiens
  misc_RNA (1)...(19): siRNA sense strand
cagaugguggagcugaaua

SEQ ID NO: 1295397 - RNA, 19 nt, Homo sapiens
  misc_RNA (1)...(19): siRNA sense strand
gucauugcugugauuguua

SEQ ID NO: 1295398 - RNA, 19 nt, Homo sapiens
  misc_RNA (1)...(19): siRNA sense strand
ggagccaccaacauuugaa

SEQ ID NO: 1295399 - RNA, 19 nt, Homo sapiens
  misc_RNA (1)...(19): siRNA sense strand
uuggugaacgaguagauua

SEQ ID NO: 1295400 - RNA, 19 nt, Homo sapiens
  misc_RNA (1)...(19): siRNA sense strand
gcgcuuuccuggguugcuu

SEQ ID NO: 1295401 - RNA, 19 nt, Homo sapiens
  misc_RNA (1)...(19): siRNA sense strand
uacuacaaagcaacaguua

SEQ ID NO: 1295402 - RNA, 19 nt, Homo sapiens
  misc_RNA (1)...(19): siRNA sense strand
cuugaugcaguaacuuaua

SEQ ID NO: 1295403 - RNA, 19 nt, Homo sapiens
  misc_RNA (1)...(19): siRNA sense strand
aaacauguccauauauacg

SEQ ID NO: 1295404 - RNA, 19 nt, Homo sapiens
  misc_RNA (1)...(19): siRNA sense strand
guguaaaguggucaaaugu

SEQ ID NO: 1295405 - RNA, 19 nt, Homo sapiens
  misc_RNA (1)...(19): siRNA sense strand
cuuacgaguuugguuauca

SEQ ID NO: 1295406 - RNA, 19 nt, Homo sapiens
  misc_RNA (1)...(19): siRNA sense strand
uacgggauccuuuaaaugg

SEQ ID NO: 1295407 - RNA, 19 nt, Homo sapiens
  misc_RNA (1)...(19): siRNA sense strand
gcagaugguggagcugaau

SEQ ID NO: 1295408 - RNA, 19 nt, Homo sapiens
  misc_RNA (1)...(19): siRNA sense strand
aaccaaaacccuacuauga

SEQ ID NO: 1295409 - RNA, 19 nt, Homo sapiens
  misc_RNA (1)...(19): siRNA sense strand
uugaugcaguaacuuauag

SEQ ID NO: 1295410 - RNA, 19 nt, Homo sapiens
  misc_RNA (1)...(19): siRNA sense strand
ggagcugaauaugccacuu

SEQ ID NO: 1295411 - RNA, 19 nt, Homo sapiens
  misc_RNA (1)...(19): siRNA sense strand
cgauggcagcgacacaauu

SEQ ID NO: 1295412 - RNA, 19 nt, Homo sapiens
  misc_RNA (1)...(19): siRNA sense strand
gauccauuuucacuuauug

SEQ ID NO: 1295413 - RNA, 19 nt, Homo sapiens
  misc_RNA (1)...(19): siRNA sense strand
ggagagagcacgauuuauu

SEQ ID NO: 1295414 - RNA, 19 nt, Homo sapiens
  misc_RNA (1)...(19): siRNA sense strand
agagaaacauguccauaua

SEQ ID NO: 1295415 - RNA, 19 nt, Homo sapiens
  misc_RNA (1)...(19): siRNA sense strand
cagaugcacuuuauuugua

SEQ ID NO: 1295416 - RNA, 19 nt, Homo sapiens
  misc_RNA (1)...(19): siRNA sense strand
ggacuuacgaguuugguua

SEQ ID NO: 1295417 - RNA, 19 nt, Homo sapiens
  misc_RNA (1)...(19): siRNA sense strand
aaacagauaucaggauuug

SEQ ID NO: 1295418 - RNA, 19 nt, Homo sapiens
  misc_RNA (1)...(19): siRNA sense strand
cuauggagcucauugguaa

SEQ ID NO: 1295419 - RNA, 19 nt, Homo sapiens
  misc_RNA (1)...(19): siRNA sense strand
aaacacaccuuuagugaag

SEQ ID NO: 1295420 - RNA, 19 nt, Homo sapiens
  misc_RNA (1)...(19): siRNA sense strand
gaacuuaaaggaucaguag

SEQ ID NO: 1295421 - RNA, 19 nt, Homo sapiens
  misc_RNA (1)...(19): siRNA sense strand
gaaaacagauaucaggauu

SEQ ID NO: 1295422 - RNA, 19 nt, Homo sapiens
  misc_RNA (1)...(19): siRNA sense strand
uaaaggaucaguagcaauu

SEQ ID NO: 1295423 - RNA, 19 nt, Homo sapiens
  misc_RNA (1)...(19): siRNA sense strand
aaaugggacuuacgaguuu

SEQ ID NO: 1295424 - RNA, 19 nt, Homo sapiens
  misc_RNA (1)...(19): siRNA sense strand
guuaucagaugcacuuuau

SEQ ID NO: 1295425 - RNA, 19 nt, Homo sapiens
  misc_RNA (1)...(19): siRNA sense strand
gagcugaauaugccacuua

SEQ ID NO: 1295426 - RNA, 19 nt, Homo sapiens
  misc_RNA (1)...(19): siRNA sense strand
ugagauuggugaacgagua

SEQ ID NO: 1295427 - RNA, 19 nt, Homo sapiens
  misc_RNA (1)...(19): siRNA sense strand
gugaacgaguagauuauaa

SEQ ID NO: 1295428 - RNA, 19 nt, Homo sapiens
  misc_RNA (1)...(19): siRNA sense strand
gagagagcacgauuuauug

SEQ ID NO: 1295429 - RNA, 19 nt, Homo sapiens
  misc_RNA (1)...(19): siRNA sense strand
caaaugggacuuacgaguu

SEQ ID NO: 1295430 - RNA, 19 nt, Homo sapiens
  misc_RNA (1)...(19): siRNA sense strand
ggucauugcugugauuguu

SEQ ID NO: 1295431 - RNA, 19 nt, Homo sapiens
  misc_RNA (1)...(19): siRNA sense strand
ccagauccauuuucacuua

SEQ ID NO: 1295432 - RNA, 19 nt, Homo sapiens
  misc_RNA (1)...(19): siRNA sense strand
gaaggaauacuugacaguu

SEQ ID NO: 1295433 - RNA, 19 nt, Homo sapiens
  misc_RNA (1)...(19): siRNA sense strand
aaggaauacuugacaguuu

SEQ ID NO: 1295434 - RNA, 19 nt, Homo sapiens
  misc_RNA (1)...(19): siRNA sense strand
ucagaugacgccuguuaua

SEQ ID NO: 1295435 - RNA, 19 nt, Homo sapiens
  misc_RNA (1)...(19): siRNA sense strand
gaaaacacaccuuuaguga

SEQ ID NO: 1295436 - RNA, 19 nt, Homo sapiens
  misc_RNA (1)...(19): siRNA sense strand
gaugacgccuguuauagag

SEQ ID NO: 1295437 - RNA, 19 nt, Homo sapiens
  misc_RNA (1)...(19): siRNA sense strand
gagaaacauguccauauau

SEQ ID NO: 1295438 - RNA, 19 nt, Homo sapiens
  misc_RNA (1)...(19): siRNA sense strand
ccacuuaccagacuaaauc

SEQ ID NO: 1295439 - RNA, 19 nt, Homo sapiens
  misc_RNA (1)...(19): siRNA sense strand
acgaguagauuauaagugu

SEQ ID NO: 1295440 - RNA, 19 nt, Homo sapiens
  misc_RNA (1)...(19): siRNA sense strand
cuacaaagcaacaguuaug

SEQ ID NO: 1295441 - RNA, 19 nt, Homo sapiens
  misc_RNA (1)...(19): siRNA sense strand
ccaccaacauuugaagcua

SEQ ID NO: 1295442 - RNA, 19 nt, Homo sapiens
  misc_RNA (1)...(19): siRNA sense strand
uauacgggauccuuuaaau

SEQ ID NO: 1295443 - RNA, 19 nt, Homo sapiens
  misc_RNA (1)...(19): siRNA sense strand
cgaguuugguuaucagaug

SEQ ID NO: 1295444 - RNA, 19 nt, Homo sapiens
  misc_RNA (1)...(19): siRNA sense strand
gaacgaguagauuauaagu

SEQ ID NO: 1295445 - RNA, 19 nt, Homo sapiens
  misc_RNA (1)...(19): siRNA sense strand
gugaggagccaccaacauu

SEQ ID NO: 1295446 - RNA, 19 nt, Homo sapiens
  misc_RNA (1)...(19): siRNA sense strand
gauggcagcgacacaauug

SEQ ID NO: 1295447 - RNA, 19 nt, Homo sapiens
  misc_RNA (1)...(19): siRNA sense strand
ucucagaugacgccuguua

SEQ ID NO: 1295448 - RNA, 19 nt, Homo sapiens
  misc_RNA (1)...(19): siRNA sense strand
gaggagccaccaacauuug

SEQ ID NO: 1295449 - RNA, 19 nt, Homo sapiens
  misc_RNA (1)...(19): siRNA sense strand
gcuauggagcucauuggua

SEQ ID NO: 1295450 - RNA, 19 nt, Homo sapiens
  misc_RNA (1)...(19): siRNA sense strand
acacaccuuuagugaagua

SEQ ID NO: 1295451 - RNA, 19 nt, Homo sapiens
  misc_RNA (1)...(19): siRNA sense strand
uagagaaacauguccauau

SEQ ID NO: 1295452 - RNA, 19 nt, Homo sapiens
  misc_RNA (1)...(19): siRNA sense strand
guuccaaagugucuuaaag

SEQ ID NO: 1295453 - RNA, 19 nt, Homo sapiens
  misc_RNA (1)...(19): siRNA sense strand
ggugaacgaguagauuaua

SEQ ID NO: 1295454 - RNA, 19 nt, Homo sapiens
  misc_RNA (1)...(19): siRNA sense strand
gaaguagaaguauuugagu

SEQ ID NO: 1295455 - RNA, 19 nt, Homo sapiens
  misc_RNA (1)...(19): siRNA sense strand
gaaacauguccauauauac

SEQ ID NO: 1295456 - RNA, 19 nt, Homo sapiens
  misc_RNA (1)...(19): siRNA sense strand
ugacgccuguuauagagaa

SEQ ID NO: 1295457 - RNA, 19 nt, Homo sapiens
  misc_RNA (1)...(19): siRNA sense strand
cgaguagauuauaagugua

SEQ ID NO: 1295458 - RNA, 19 nt, Homo sapiens
  misc_RNA (1)...(19): siRNA sense strand
gcacuuuauuuguaaugag

SEQ ID NO: 1295459 - RNA, 19 nt, Homo sapiens
  misc_RNA (1)...(19): siRNA sense strand
guagaaguauuugaguauc

SEQ ID NO: 1295460 - RNA, 19 nt, Homo sapiens
  misc_RNA (1)...(19): siRNA sense strand
guauuugaguaucuugaug

SEQ ID NO: 1295461 - RNA, 19 nt, Homo sapiens
  misc_RNA (1)...(19): siRNA sense strand
aggaauacuugacaguuug

SEQ ID NO: 1295462 - RNA, 19 nt, Homo sapiens
  misc_RNA (1)...(19): siRNA sense strand
ccaaaacccuacuaugaga

SEQ ID NO: 1295463 - RNA, 19 nt, Homo sapiens
  misc_RNA (1)...(19): siRNA sense strand
aguguaaaguggucaaaug

SEQ ID NO: 1295464 - RNA, 19 nt, Homo sapiens
  misc_RNA (1)...(19): siRNA sense strand
ccacccauacuauuuguga

SEQ ID NO: 1295465 - RNA, 19 nt, Homo sapiens
  misc_RNA (1)...(19): siRNA sense strand
uuggagagagcacgauuua

SEQ ID NO: 1295466 - RNA, 19 nt, Homo sapiens
  misc_RNA (1)...(19): siRNA sense strand
gguuaucagaugcacuuua

SEQ ID NO: 1295467 - RNA, 19 nt, Homo sapiens
  misc_RNA (1)...(19): siRNA sense strand
caccaacauuugaagcuau

SEQ ID NO: 1295468 - RNA, 19 nt, Homo sapiens
  misc_RNA (1)...(19): siRNA sense strand
ugaggagccaccaacauuu

SEQ ID NO: 1295469 - RNA, 19 nt, Homo sapiens
  misc_RNA (1)...(19): siRNA sense strand
ggaaggaauacuugacagu

SEQ ID NO: 1295470 - RNA, 19 nt, Homo sapiens
  misc_RNA (1)...(19): siRNA sense strand
gaggaaggaauacuugaca

SEQ ID NO: 1295471 - RNA, 19 nt, Homo sapiens
  misc_RNA (1)...(19): siRNA sense strand
ccaguuccaaagugucuua

SEQ ID NO: 1295472 - RNA, 19 nt, Homo sapiens
  misc_RNA (1)...(19): siRNA sense strand
ugaguaucuugaugcagua

SEQ ID NO: 1295473 - RNA, 19 nt, Homo sapiens
  misc_RNA (1)...(19): siRNA sense strand
caccuuuagugaaguagaa

SEQ ID NO: 1295474 - RNA, 19 nt, Homo sapiens
  misc_RNA (1)...(19): siRNA sense strand
acagauaucaggauuugga

SEQ ID NO: 1295475 - RNA, 19 nt, Homo sapiens
  misc_RNA (1)...(19): siRNA sense strand
ucauugcugugauuguuau

SEQ ID NO: 1295476 - RNA, 19 nt, Homo sapiens
  misc_RNA (1)...(19): siRNA sense strand
ucagaugcacuuuauuugu

SEQ ID NO: 1295477 - RNA, 19 nt, Homo sapiens
  misc_RNA (1)...(19): siRNA sense strand
gugcugcuccagaguguaa

SEQ ID NO: 1295478 - RNA, 19 nt, Homo sapiens
  misc_RNA (1)...(19): siRNA sense strand
ggaaaacacaccuuuagug

SEQ ID NO: 1295479 - RNA, 19 nt, Homo sapiens
  misc_RNA (1)...(19): siRNA sense strand
aaggaucaguagcaauuug

SEQ ID NO: 1295480 - RNA, 19 nt, Homo sapiens
  misc_RNA (1)...(19): siRNA sense strand
uauauacgggauccuuuaa

SEQ ID NO: 1295481 - RNA, 19 nt, Homo sapiens
  misc_RNA (1)...(19): siRNA sense strand
ugaaguagaaguauuugag

SEQ ID NO: 1295482 - RNA, 19 nt, Homo sapiens
  misc_RNA (1)...(19): siRNA sense strand
cuugacaguuuggauguuu

SEQ ID NO: 1295483 - RNA, 19 nt, Homo sapiens
  misc_RNA (1)...(19): siRNA sense strand
cauauauacgggauccuuu

SEQ ID NO: 1295484 - RNA, 19 nt, Homo sapiens
  misc_RNA (1)...(19): siRNA sense strand
auauauacgggauccuuua

SEQ ID NO: 1295485 - RNA, 19 nt, Homo sapiens
  misc_RNA (1)...(19): siRNA sense strand
cuuaaaggaucaguagcaa

SEQ ID NO: 1295486 - RNA, 19 nt, Homo sapiens
  misc_RNA (1)...(19): siRNA sense strand
uaaaccugaggaaggaaua

SEQ ID NO: 1295487 - RNA, 19 nt, Homo sapiens
  misc_RNA (1)...(19): siRNA sense strand
agaugacgccuguuauaga

SEQ ID NO: 1295488 - RNA, 19 nt, Homo sapiens
  misc_RNA (1)...(19): siRNA sense strand
ugugauuguuauugccaua

SEQ ID NO: 1295489 - RNA, 19 nt, Homo sapiens
  misc_RNA (1)...(19): siRNA sense strand
gagagcacgauuuauugug

SEQ ID NO: 1295490 - RNA, 19 nt, Homo sapiens
  misc_RNA (1)...(19): siRNA sense strand
gaaguauuugaguaucuug

SEQ ID NO: 1295491 - RNA, 19 nt, Homo sapiens
  misc_RNA (1)...(19): siRNA sense strand
ggcuaccugucucagauga

SEQ ID NO: 1295492 - RNA, 19 nt, Homo sapiens
  misc_RNA (1)...(19): siRNA sense strand
gauaucaggauuuggaaaa

SEQ ID NO: 1295493 - RNA, 19 nt, Homo sapiens
  misc_RNA (1)...(19): siRNA sense strand
ccucuugccacccauacua

SEQ ID NO: 1295494 - RNA, 19 nt, Homo sapiens
  misc_RNA (1)...(19): siRNA sense strand
ccaugguguugcugcugua

SEQ ID NO: 1295495 - RNA, 19 nt, Homo sapiens
  misc_RNA (1)...(19): siRNA sense strand
cagaugacgccuguuauag

SEQ ID NO: 1295496 - RNA, 19 nt, Homo sapiens
  misc_RNA (1)...(19): siRNA sense strand
cagaugguggagcugaaua

SEQ ID NO: 1295497 - RNA, 19 nt, Homo sapiens
  misc_RNA (1)...(19): siRNA sense strand
gucauugcugugauuguua

SEQ ID NO: 1295498 - RNA, 19 nt, Homo sapiens
  misc_RNA (1)...(19): siRNA sense strand
ggagccaccaacauuugaa

SEQ ID NO: 1295499 - RNA, 19 nt, Homo sapiens
  misc_RNA (1)...(19): siRNA sense strand
uuggugaacgaguagauua

SEQ ID NO: 1295500 - RNA, 19 nt, Homo sapiens
  misc_RNA (1)...(19): siRNA sense strand
gcgcuuuccuggguugcuu

SEQ ID NO: 1295501 - RNA, 19 nt, Homo sapiens
  misc_RNA (1)...(19): siRNA sense strand
uacuacaaagcaacaguua

SEQ ID NO: 1295502 - RNA, 19 nt, Homo sapiens
  misc_RNA (1)...(19): siRNA sense strand
cuugaugcaguaacuuaua

SEQ ID NO: 1295503 - RNA, 19 nt, Homo sapiens
  misc_RNA (1)...(19): siRNA sense strand
aaacauguccauauauacg

SEQ ID NO: 1295504 - RNA, 19 nt, Homo sapiens
  misc_RNA (1)...(19): siRNA sense strand
guguaaaguggucaaaugu

SEQ ID NO: 1295505 - RNA, 19 nt, Homo sapiens
  misc_RNA (1)...(19): siRNA sense strand
cuuacgaguuugguuauca

SEQ ID NO: 1295506 - RNA, 19 nt, Homo sapiens
  misc_RNA (1)...(19): siRNA sense strand
uacgggauccuuuaaaugg

SEQ ID NO: 1295507 - RNA, 19 nt, Homo sapiens
  misc_RNA (1)...(19): siRNA sense strand
gcagaugguggagcugaau

SEQ ID NO: 1295508 - RNA, 19 nt, Homo sapiens
  misc_RNA (1)...(19): siRNA sense strand
aaccaaaacccuacuauga

SEQ ID NO: 1295509 - RNA, 19 nt, Homo sapiens
  misc_RNA (1)...(19): siRNA sense strand
uugaugcaguaacuuauag

SEQ ID NO: 1295510 - RNA, 19 nt, Homo sapiens
  misc_RNA (1)...(19): siRNA sense strand
ggagcugaauaugccacuu

SEQ ID NO: 1295511 - RNA, 19 nt, Homo sapiens
  misc_RNA (1)...(19): siRNA sense strand
cgauggcagcgacacaauu

SEQ ID NO: 1295512 - RNA, 19 nt, Homo sapiens
  misc_RNA (1)...(19): siRNA sense strand
gauccauuuucacuuauug

SEQ ID NO: 1295513 - RNA, 19 nt, Homo sapiens
  misc_RNA (1)...(19): siRNA sense strand
ggagagagcacgauuuauu

SEQ ID NO: 1295514 - RNA, 19 nt, Homo sapiens
  misc_RNA (1)...(19): siRNA sense strand
agagaaacauguccauaua

SEQ ID NO: 1295515 - RNA, 19 nt, Homo sapiens
  misc_RNA (1)...(19): siRNA sense strand
cagaugcacuuuauuugua

SEQ ID NO: 1295516 - RNA, 19 nt, Homo sapiens
  misc_RNA (1)...(19): siRNA sense strand
ggacuuacgaguuugguua

SEQ ID NO: 1295517 - RNA, 19 nt, Homo sapiens
  misc_RNA (1)...(19): siRNA sense strand
aaacagauaucaggauuug

SEQ ID NO: 1295518 - RNA, 19 nt, Homo sapiens
  misc_RNA (1)...(19): siRNA sense strand
cuauggagcucauugguaa

SEQ ID NO: 1295519 - RNA, 19 nt, Homo sapiens
  misc_RNA (1)...(19): siRNA sense strand
aaacacaccuuuagugaag

SEQ ID NO: 1295520 - RNA, 19 nt, Homo sapiens
  misc_RNA (1)...(19): siRNA sense strand
gaacuuaaaggaucaguag

SEQ ID NO: 1295521 - RNA, 19 nt, Homo sapiens
  misc_RNA (1)...(19): siRNA sense strand
gaaaacagauaucaggauu

SEQ ID NO: 1295522 - RNA, 19 nt, Homo sapiens
  misc_RNA (1)...(19): siRNA sense strand
uaaaggaucaguagcaauu

SEQ ID NO: 1295523 - RNA, 19 nt, Homo sapiens
  misc_RNA (1)...(19): siRNA sense strand
aaaugggacuuacgaguuu

SEQ ID NO: 1295524 - RNA, 19 nt, Homo sapiens
  misc_RNA (1)...(19): siRNA sense strand
guuaucagaugcacuuuau

SEQ ID NO: 1295525 - RNA, 19 nt, Homo sapiens
  misc_RNA (1)...(19): siRNA sense strand
gagcugaauaugccacuua

SEQ ID NO: 1295526 - RNA, 19 nt, Homo sapiens
  misc_RNA (1)...(19): siRNA sense strand
ugagauuggugaacgagua

SEQ ID NO: 1295527 - RNA, 19 nt, Homo sapiens
  misc_RNA (1)...(19): siRNA sense strand
gugaacgaguagauuauaa

SEQ ID NO: 1295528 - RNA, 19 nt, Homo sapiens
  misc_RNA (1)...(19): siRNA sense strand
gagagagcacgauuuauug

SEQ ID NO: 1295529 - RNA, 19 nt, Homo sapiens
  misc_RNA (1)...(19): siRNA sense strand
caaaugggacuuacgaguu

SEQ ID NO: 1295530 - RNA, 19 nt, Homo sapiens
  misc_RNA (1)...(19): siRNA sense strand
ggucauugcugugauuguu

SEQ ID NO: 1295531 - RNA, 19 nt, Homo sapiens
  misc_RNA (1)...(19): siRNA sense strand
ccagauccauuuucacuua

SEQ ID NO: 1295532 - RNA, 19 nt, Homo sapiens
  misc_RNA (1)...(19): siRNA sense strand
gaaggaauacuugacaguu

SEQ ID NO: 1295533 - RNA, 19 nt, Homo sapiens
  misc_RNA (1)...(19): siRNA sense strand
aaggaauacuugacaguuu

SEQ ID NO: 1295534 - RNA, 19 nt, Homo sapiens
  misc_RNA (1)...(19): siRNA sense strand
ucagaugacgccuguuaua

SEQ ID NO: 1295535 - RNA, 19 nt, Homo sapiens
  misc_RNA (1)...(19): siRNA sense strand
gaaaacacaccuuuaguga

SEQ ID NO: 1295536 - RNA, 19 nt, Homo sapiens
  misc_RNA (1)...(19): siRNA sense strand
gaugacgccuguuauagag

SEQ ID NO: 1295537 - RNA, 19 nt, Homo sapiens
  misc_RNA (1)...(19): siRNA sense strand
gagaaacauguccauauau

SEQ ID NO: 1295538 - RNA, 19 nt, Homo sapiens
  misc_RNA (1)...(19): siRNA sense strand
ccacuuaccagacuaaauc

SEQ ID NO: 1295539 - RNA, 19 nt, Homo sapiens
  misc_RNA (1)...(19): siRNA sense strand
acgaguagauuauaagugu

SEQ ID NO: 1295540 - RNA, 19 nt, Homo sapiens
  misc_RNA (1)...(19): siRNA sense strand
cuacaaagcaacaguuaug

SEQ ID NO: 1295541 - RNA, 19 nt, Homo sapiens
  misc_RNA (1)...(19): siRNA sense strand
ccaccaacauuugaagcua

SEQ ID NO: 1295542 - RNA, 19 nt, Homo sapiens
  misc_RNA (1)...(19): siRNA sense strand
uauacgggauccuuuaaau

SEQ ID NO: 1295543 - RNA, 19 nt, Homo sapiens
  misc_RNA (1)...(19): siRNA sense strand
cgaguuugguuaucagaug

SEQ ID NO: 1295544 - RNA, 19 nt, Homo sapiens
  misc_RNA (1)...(19): siRNA sense strand
gaacgaguagauuauaagu

SEQ ID NO: 1295545 - RNA, 19 nt, Homo sapiens
  misc_RNA (1)...(19): siRNA sense strand
gugaggagccaccaacauu

SEQ ID NO: 1295546 - RNA, 19 nt, Homo sapiens
  misc_RNA (1)...(19): siRNA sense strand
gauggcagcgacacaauug

SEQ ID NO: 1295547 - RNA, 19 nt, Homo sapiens
  misc_RNA (1)...(19): siRNA sense strand
ucucagaugacgccuguua

SEQ ID NO: 1295548 - RNA, 19 nt, Homo sapiens
  misc_RNA (1)...(19): siRNA sense strand
gaggagccaccaacauuug

SEQ ID NO: 1295549 - RNA, 19 nt, Homo sapiens
  misc_RNA (1)...(19): siRNA sense strand
gcuauggagcucauuggua

SEQ ID NO: 1295550 - RNA, 19 nt, Homo sapiens
  misc_RNA (1)...(19): siRNA sense strand
acacaccuuuagugaagua

SEQ ID NO: 1295551 - RNA, 19 nt, Homo sapiens
  misc_RNA (1)...(19): siRNA sense strand
uagagaaacauguccauau

SEQ ID NO: 1295552 - RNA, 19 nt, Homo sapiens
  misc_RNA (1)...(19): siRNA sense strand
guuccaaagugucuuaaag

SEQ ID NO: 1295553 - RNA, 19 nt, Homo sapiens
  misc_RNA (1)...(19): siRNA sense strand
ggugaacgaguagauuaua

SEQ ID NO: 1295554 - RNA, 19 nt, Homo sapiens
  misc_RNA (1)...(19): siRNA sense strand
gaaguagaaguauuugagu

SEQ ID NO: 1295555 - RNA, 19 nt, Homo sapiens
  misc_RNA (1)...(19): siRNA sense strand
gaaacauguccauauauac

SEQ ID NO: 1295556 - RNA, 19 nt, Homo sapiens
  misc_RNA (1)...(19): siRNA sense strand
ugacgccuguuauagagaa

SEQ ID NO: 1295557 - RNA, 19 nt, Homo sapiens
  misc_RNA (1)...(19): siRNA sense strand
cgaguagauuauaagugua

SEQ ID NO: 1295558 - RNA, 19 nt, Homo sapiens
  misc_RNA (1)...(19): siRNA sense strand
gcacuuuauuuguaaugag

SEQ ID NO: 1295559 - RNA, 19 nt, Homo sapiens
  misc_RNA (1)...(19): siRNA sense strand
guagaaguauuugaguauc

SEQ ID NO: 1295560 - RNA, 19 nt, Homo sapiens
  misc_RNA (1)...(19): siRNA sense strand
guauuugaguaucuugaug

SEQ ID NO: 1295561 - RNA, 19 nt, Homo sapiens
  misc_RNA (1)...(19): siRNA sense strand
aggaauacuugacaguuug

SEQ ID NO: 1295562 - RNA, 19 nt, Homo sapiens
  misc_RNA (1)...(19): siRNA sense strand
ccaaaacccuacuaugaga

SEQ ID NO: 1295563 - RNA, 19 nt, Homo sapiens
  misc_RNA (1)...(19): siRNA sense strand
aguguaaaguggucaaaug

SEQ ID NO: 1295564 - RNA, 19 nt, Homo sapiens
  misc_RNA (1)...(19): siRNA sense strand
ccacccauacuauuuguga

SEQ ID NO: 1295565 - RNA, 19 nt, Homo sapiens
  misc_RNA (1)...(19): siRNA sense strand
uuggagagagcacgauuua

SEQ ID NO: 1295566 - RNA, 19 nt, Homo sapiens
  misc_RNA (1)...(19): siRNA sense strand
gguuaucagaugcacuuua

SEQ ID NO: 1295567 - RNA, 19 nt, Homo sapiens
  misc_RNA (1)...(19): siRNA sense strand
caccaacauuugaagcuau

SEQ ID NO: 1295568 - RNA, 19 nt, Homo sapiens
  misc_RNA (1)...(19): siRNA sense strand
ugaggagccaccaacauuu

SEQ ID NO: 1295569 - RNA, 19 nt, Homo sapiens
  misc_RNA (1)...(19): siRNA sense strand
ggaaggaauacuugacagu

SEQ ID NO: 1295570 - RNA, 19 nt, Homo sapiens
  misc_RNA (1)...(19): siRNA sense strand
gaggaaggaauacuugaca

SEQ ID NO: 1295571 - RNA, 19 nt, Homo sapiens
  misc_RNA (1)...(19): siRNA sense strand
ccaguuccaaagugucuua

SEQ ID NO: 1295572 - RNA, 19 nt, Homo sapiens
  misc_RNA (1)...(19): siRNA sense strand
ugaguaucuugaugcagua

SEQ ID NO: 1295573 - RNA, 19 nt, Homo sapiens
  misc_RNA (1)...(19): siRNA sense strand
caccuuuagugaaguagaa

SEQ ID NO: 1295574 - RNA, 19 nt, Homo sapiens
  misc_RNA (1)...(19): siRNA sense strand
acagauaucaggauuugga

SEQ ID NO: 1295575 - RNA, 19 nt, Homo sapiens
  misc_RNA (1)...(19): siRNA sense strand
ucauugcugugauuguuau

SEQ ID NO: 1295576 - RNA, 19 nt, Homo sapiens
  misc_RNA (1)...(19): siRNA sense strand
ucagaugcacuuuauuugu

SEQ ID NO: 1295577 - RNA, 19 nt, Homo sapiens
  misc_RNA (1)...(19): siRNA sense strand
gugcugcuccagaguguaa

SEQ ID NO: 1295578 - RNA, 19 nt, Homo sapiens
  misc_RNA (1)...(19): siRNA sense strand
ggaaaacacaccuuuagug

SEQ ID NO: 1295579 - RNA, 19 nt, Homo sapiens
  misc_RNA (1)...(19): siRNA sense strand
aaggaucaguagcaauuug

SEQ ID NO: 1295580 - RNA, 19 nt, Homo sapiens
  misc_RNA (1)...(19): siRNA sense strand
uauauacgggauccuuuaa

SEQ ID NO: 1295581 - RNA, 19 nt, Homo sapiens
  misc_RNA (1)...(19): siRNA sense strand
ugaaguagaaguauuugag

SEQ ID NO: 1295582 - RNA, 19 nt, Homo sapiens
  misc_RNA (1)...(19): siRNA sense strand
cuugacaguuuggauguuu

SEQ ID NO: 1295583 - RNA, 19 nt, Homo sapiens
  misc_RNA (1)...(19): siRNA sense strand
cauauauacgggauccuuu

SEQ ID NO: 1295584 - RNA, 19 nt, Homo sapiens
  misc_RNA (1)...(19): siRNA sense strand
auauauacgggauccuuua

SEQ ID NO: 1295585 - RNA, 19 nt, Homo sapiens
  misc_RNA (1)...(19): siRNA sense strand
cuuaaaggaucaguagcaa

SEQ ID NO: 1295586 - RNA, 19 nt, Homo sapiens
  misc_RNA (1)...(19): siRNA sense strand
uaaaccugaggaaggaaua

SEQ ID NO: 1295587 - RNA, 19 nt, Homo sapiens
  misc_RNA (1)...(19): siRNA sense strand
agaugacgccuguuauaga

SEQ ID NO: 1295588 - RNA, 19 nt, Homo sapiens
  misc_RNA (1)...(19): siRNA sense strand
ugugauuguuauugccaua

SEQ ID NO: 1295589 - RNA, 19 nt, Homo sapiens
  misc_RNA (1)...(19): siRNA sense strand
gagagcacgauuuauugug

SEQ ID NO: 1295590 - RNA, 19 nt, Homo sapiens
  misc_RNA (1)...(19): siRNA sense strand
gaaguauuugaguaucuug

SEQ ID NO: 1295591 - RNA, 19 nt, Homo sapiens
  misc_RNA (1)...(19): siRNA sense strand
ggcuaccugucucagauga

SEQ ID NO: 1295592 - RNA, 19 nt, Homo sapiens
  misc_RNA (1)...(19): siRNA sense strand
gauaucaggauuuggaaaa

SEQ ID NO: 1295593 - RNA, 19 nt, Homo sapiens
  misc_RNA (1)...(19): siRNA sense strand
ccucuugccacccauacua

SEQ ID NO: 1295594 - RNA, 19 nt, Homo sapiens
  misc_RNA (1)...(19): siRNA sense strand
ccaugguguugcugcugua

SEQ ID NO: 1295595 - RNA, 19 nt, Homo sapiens
  misc_RNA (1)...(19): siRNA sense strand
cagaugacgccuguuauag

SEQ ID NO: 1295596 - RNA, 19 nt, Homo sapiens
  misc_RNA (1)...(19): siRNA sense strand
cagaugguggagcugaaua

SEQ ID NO: 1295597 - RNA, 19 nt, Homo sapiens
  misc_RNA (1)...(19): siRNA sense strand
gucauugcugugauuguua

SEQ ID NO: 1295598 - RNA, 19 nt, Homo sapiens
  misc_RNA (1)...(19): siRNA sense strand
ggagccaccaacauuugaa

SEQ ID NO: 1295599 - RNA, 19 nt, Homo sapiens
  misc_RNA (1)...(19): siRNA sense strand
uuggugaacgaguagauua

SEQ ID NO: 1295600 - RNA, 19 nt, Homo sapiens
  misc_RNA (1)...(19): siRNA sense strand
gcgcuuuccuggguugcuu

SEQ ID NO: 1295601 - RNA, 19 nt, Homo sapiens
  misc_RNA (1)...(19): siRNA sense strand
uacuacaaagcaacaguua

SEQ ID NO: 1295602 - RNA, 19 nt, Homo sapiens
  misc_RNA (1)...(19): siRNA sense strand
cuugaugcaguaacuuaua

SEQ ID NO: 1295603 - RNA, 19 nt, Homo sapiens
  misc_RNA (1)...(19): siRNA sense strand
aaacauguccauauauacg

SEQ ID NO: 1295604 - RNA, 19 nt, Homo sapiens
  misc_RNA (1)...(19): siRNA sense strand
guguaaaguggucaaaugu

SEQ ID NO: 1295605 - RNA, 19 nt, Homo sapiens
  misc_RNA (1)...(19): siRNA sense strand
cuuacgaguuugguuauca

SEQ ID NO: 1295606 - RNA, 19 nt, Homo sapiens
  misc_RNA (1)...(19): siRNA sense strand
uacgggauccuuuaaaugg

SEQ ID NO: 1295607 - RNA, 19 nt, Homo sapiens
  misc_RNA (1)...(19): siRNA sense strand
gcagaugguggagcugaau

SEQ ID NO: 1295608 - RNA, 19 nt, Homo sapiens
  misc_RNA (1)...(19): siRNA sense strand
aaccaaaacccuacuauga

SEQ ID NO: 1295609 - RNA, 19 nt, Homo sapiens
  misc_RNA (1)...(19): siRNA sense strand
uugaugcaguaacuuauag

SEQ ID NO: 1295610 - RNA, 19 nt, Homo sapiens
  misc_RNA (1)...(19): siRNA sense strand
ggagcugaauaugccacuu

SEQ ID NO: 1295611 - RNA, 19 nt, Homo sapiens
  misc_RNA (1)...(19): siRNA sense strand
cgauggcagcgacacaauu

SEQ ID NO: 1295612 - RNA, 19 nt, Homo sapiens
  misc_RNA (1)...(19): siRNA sense strand
gauccauuuucacuuauug

SEQ ID NO: 1295613 - RNA, 19 nt, Homo sapiens
  misc_RNA (1)...(19): siRNA sense strand
gaacaagcauguggaguuu

SEQ ID NO: 1295614 - RNA, 19 nt, Homo sapiens
  misc_RNA (1)...(19): siRNA sense strand
caaaguggcucauaucaug

SEQ ID NO: 1295615 - RNA, 19 nt, Homo sapiens
  misc_RNA (1)...(19): siRNA sense strand
ggaacaaaguggcucauau

SEQ ID NO: 1295616 - RNA, 19 nt, Homo sapiens
  misc_RNA (1)...(19): siRNA sense strand
aaacauuacucugggauuu

SEQ ID NO: 1295617 - RNA, 19 nt, Homo sapiens
  misc_RNA (1)...(19): siRNA sense strand
uguaugggcucuaugagua

SEQ ID NO: 1295618 - RNA, 19 nt, Homo sapiens
  misc_RNA (1)...(19): siRNA sense strand
gaacaaaguggcucauauc

SEQ ID NO: 1295619 - RNA, 19 nt, Homo sapiens
  misc_RNA (1)...(19): siRNA sense strand
ccucugcacuuccaccuua

SEQ ID NO: 1295620 - RNA, 19 nt, Homo sapiens
  misc_RNA (1)...(19): siRNA sense strand
gagcucaagucugaaguuu

SEQ ID NO: 1295621 - RNA, 19 nt, Homo sapiens
  misc_RNA (1)...(19): siRNA sense strand
caucagcacucccuacaug

SEQ ID NO: 1295622 - RNA, 19 nt, Homo sapiens
  misc_RNA (1)...(19): siRNA sense strand
ggucaaauccguccuguuc

SEQ ID NO: 1295623 - RNA, 19 nt, Homo sapiens
  misc_RNA (1)...(19): siRNA sense strand
ccaagaagcuccgggugaa

SEQ ID NO: 1295624 - RNA, 19 nt, Homo sapiens
  misc_RNA (1)...(19): siRNA sense strand
gauaagcugcggaagauga

SEQ ID NO: 1295625 - RNA, 19 nt, Homo sapiens
  misc_RNA (1)...(19): siRNA sense strand
ugacacggauaucaccuuu

SEQ ID NO: 1295626 - RNA, 19 nt, Homo sapiens
  misc_RNA (1)...(19): siRNA sense strand
ggaaagcccgugucucugu

SEQ ID NO: 1295627 - RNA, 19 nt, Homo sapiens
  misc_RNA (1)...(19): siRNA sense strand
uaaaggucauucacuggaa

SEQ ID NO: 1295628 - RNA, 19 nt, Homo sapiens
  misc_RNA (1)...(19): siRNA sense strand
gcucugaggugcuuaugag

SEQ ID NO: 1295629 - RNA, 19 nt, Homo sapiens
  misc_RNA (1)...(19): siRNA sense strand
ugaccuuccuggaguauga

SEQ ID NO: 1295630 - RNA, 19 nt, Homo sapiens
  misc_RNA (1)...(19): siRNA sense strand
caugcucucuacauccuua

SEQ ID NO: 1295631 - RNA, 19 nt, Homo sapiens
  misc_RNA (1)...(19): siRNA sense strand
ucaaugccgucaucaaaca

SEQ ID NO: 1295632 - RNA, 19 nt, Homo sapiens
  misc_RNA (1)...(19): siRNA sense strand
ggaaugugcagcugucaga

SEQ ID NO: 1295633 - RNA, 19 nt, Homo sapiens
  misc_RNA (1)...(19): siRNA sense strand
guucaaaggucagcaaguc

SEQ ID NO: 1295634 - RNA, 19 nt, Homo sapiens
  misc_RNA (1)...(19): siRNA sense strand
cggcuuugcugcccugaaa

SEQ ID NO: 1295635 - RNA, 19 nt, Homo sapiens
  misc_RNA (1)...(19): siRNA sense strand
gcucaagucugaaguuucc

SEQ ID NO: 1295636 - RNA, 19 nt, Homo sapiens
  misc_RNA (1)...(19): siRNA sense strand
caaguuccguuccaacaag

SEQ ID NO: 1295637 - RNA, 19 nt, Homo sapiens
  misc_RNA (1)...(19): siRNA sense strand
gcagagcugugggcugugu

SEQ ID NO: 1295638 - RNA, 19 nt, Homo sapiens
  misc_RNA (1)...(19): siRNA sense strand
ucaccuggauuuaccuguu

SEQ ID NO: 1295639 - RNA, 19 nt, Homo sapiens
  misc_RNA (1)...(19): siRNA sense strand
gcuucgacauuaccaaguu

SEQ ID NO: 1295640 - RNA, 19 nt, Homo sapiens
  misc_RNA (1)...(19): siRNA sense strand
guacaaggagggccaguuc

SEQ ID NO: 1295641 - RNA, 19 nt, Homo sapiens
  misc_RNA (1)...(19): siRNA sense strand
uggauaagcugcggaagau

SEQ ID NO: 1295642 - RNA, 19 nt, Homo sapiens
  misc_RNA (1)...(19): siRNA sense strand
gcuaccacaucguguacaa

SEQ ID NO: 1295643 - RNA, 19 nt, Homo sapiens
  misc_RNA (1)...(19): siRNA sense strand
aggcugaugucaacaguga

SEQ ID NO: 1295644 - RNA, 19 nt, Homo sapiens
  misc_RNA (1)...(19): siRNA sense strand
caccuggauuuaccuguuu

SEQ ID NO: 1295645 - RNA, 19 nt, Homo sapiens
  misc_RNA (1)...(19): siRNA sense strand
gacaauccacguugcuauu

SEQ ID NO: 1295646 - RNA, 19 nt, Homo sapiens
  misc_RNA (1)...(19): siRNA sense strand
ucaaaacccucaaggaaga

SEQ ID NO: 1295647 - RNA, 19 nt, Homo sapiens
  misc_RNA (1)...(19): siRNA sense strand
ggagagagucaucguccuu

SEQ ID NO: 1295648 - RNA, 19 nt, Homo sapiens
  misc_RNA (1)...(19): siRNA sense strand
ggauuuauggucugaugaa

SEQ ID NO: 1295649 - RNA, 19 nt, Homo sapiens
  misc_RNA (1)...(19): siRNA sense strand
ggagaaaugcgagacaauc

SEQ ID NO: 1295650 - RNA, 19 nt, Homo sapiens
  misc_RNA (1)...(19): siRNA sense strand
cguguggacuucuacaaug

SEQ ID NO: 1295651 - RNA, 19 nt, Homo sapiens
  misc_RNA (1)...(19): siRNA sense strand
caaaaccccuuccuugugu

SEQ ID NO: 1295652 - RNA, 19 nt, Homo sapiens
  misc_RNA (1)...(19): siRNA sense strand
ggaguacgaccggagguuu

SEQ ID NO: 1295653 - RNA, 19 nt, Homo sapiens
  misc_RNA (1)...(19): siRNA sense strand
ccuuauugcugacuccauu

SEQ ID NO: 1295654 - RNA, 19 nt, Homo sapiens
  misc_RNA (1)...(19): siRNA sense strand
gcuuugcugcccugaaaua

SEQ ID NO: 1295655 - RNA, 19 nt, Homo sapiens
  misc_RNA (1)...(19): siRNA sense strand
gcccaacgccuacaugauc

SEQ ID NO: 1295656 - RNA, 19 nt, Homo sapiens
  misc_RNA (1)...(19): siRNA sense strand
gggacccucuucacauuca

SEQ ID NO: 1295657 - RNA, 19 nt, Homo sapiens
  misc_RNA (1)...(19): siRNA sense strand
aagcggaguugcugucaau

SEQ ID NO: 1295658 - RNA, 19 nt, Homo sapiens
  misc_RNA (1)...(19): siRNA sense strand
ucgcucagcuguccaugga

SEQ ID NO: 1295659 - RNA, 19 nt, Homo sapiens
  misc_RNA (1)...(19): siRNA sense strand
agaacaagcauguggaguu

SEQ ID NO: 1295660 - RNA, 19 nt, Homo sapiens
  misc_RNA (1)...(19): siRNA sense strand
acacggauaucaccuuugc

SEQ ID NO: 1295661 - RNA, 19 nt, Homo sapiens
  misc_RNA (1)...(19): siRNA sense strand
gcugaugucaacagugaaa

SEQ ID NO: 1295662 - RNA, 19 nt, Homo sapiens
  misc_RNA (1)...(19): siRNA sense strand
ucugggagcuucgaagaug

SEQ ID NO: 1295663 - RNA, 19 nt, Homo sapiens
  misc_RNA (1)...(19): siRNA sense strand
ucaaauccguccuguucca

SEQ ID NO: 1295664 - RNA, 19 nt, Homo sapiens
  misc_RNA (1)...(19): siRNA sense strand
caauaccgcaucugucuca

SEQ ID NO: 1295665 - RNA, 19 nt, Homo sapiens
  misc_RNA (1)...(19): siRNA sense strand
acaaggagggccaguucua

SEQ ID NO: 1295666 - RNA, 19 nt, Homo sapiens
  misc_RNA (1)...(19): siRNA sense strand
gaguaugacggcaaucuuc

SEQ ID NO: 1295667 - RNA, 19 nt, Homo sapiens
  misc_RNA (1)...(19): siRNA sense strand
gcaaccacuccaagaccua

SEQ ID NO: 1295668 - RNA, 19 nt, Homo sapiens
  misc_RNA (1)...(19): siRNA sense strand
caagcaauaccgcaucugu

SEQ ID NO: 1295669 - RNA, 19 nt, Homo sapiens
  misc_RNA (1)...(19): siRNA sense strand
ggcgagagcgcuucacugu

SEQ ID NO: 1295670 - RNA, 19 nt, Homo sapiens
  misc_RNA (1)...(19): siRNA sense strand
gagacaauccacguugcua

SEQ ID NO: 1295671 - RNA, 19 nt, Homo sapiens
  misc_RNA (1)...(19): siRNA sense strand
ccggagguuuguaggcuuu

SEQ ID NO: 1295672 - RNA, 19 nt, Homo sapiens
  misc_RNA (1)...(19): siRNA sense strand
gcacccaccuguacuuccu

SEQ ID NO: 1295673 - RNA, 19 nt, Homo sapiens
  misc_RNA (1)...(19): siRNA sense strand
aggacgaccugugcuauga

SEQ ID NO: 1295674 - RNA, 19 nt, Homo sapiens
  misc_RNA (1)...(19): siRNA sense strand
gugaaaaccuccagaagca

SEQ ID NO: 1295675 - RNA, 19 nt, Homo sapiens
  misc_RNA (1)...(19): siRNA sense strand
ggaguaugacggcaaucuu

SEQ ID NO: 1295676 - RNA, 19 nt, Homo sapiens
  misc_RNA (1)...(19): siRNA sense strand
acauuacucugggauuuau

SEQ ID NO: 1295677 - RNA, 19 nt, Homo sapiens
  misc_RNA (1)...(19): siRNA sense strand
gacggaacccucugcacuu

SEQ ID NO: 1295678 - RNA, 19 nt, Homo sapiens
  misc_RNA (1)...(19): siRNA sense strand
ccacgcacccacaaacuuc

SEQ ID NO: 1295679 - RNA, 19 nt, Homo sapiens
  misc_RNA (1)...(19): siRNA sense strand
ccagugaggcugaugucaa

SEQ ID NO: 1295680 - RNA, 19 nt, Homo sapiens
  misc_RNA (1)...(19): siRNA sense strand
agagagucaucguccuuga

SEQ ID NO: 1295681 - RNA, 19 nt, Homo sapiens
  misc_RNA (1)...(19): siRNA sense strand
guggagaaaugcgagacaa

SEQ ID NO: 1295682 - RNA, 19 nt, Homo sapiens
  misc_RNA (1)...(19): siRNA sense strand
gagcuucgaagauggaaag

SEQ ID NO: 1295683 - RNA, 19 nt, Homo sapiens
  misc_RNA (1)...(19): siRNA sense strand
uggaagaggcuacaacaca

SEQ ID NO: 1295684 - RNA, 19 nt, Homo sapiens
  misc_RNA (1)...(19): siRNA sense strand
gaucuaaaggucauucacu

SEQ ID NO: 1295685 - RNA, 19 nt, Homo sapiens
  misc_RNA (1)...(19): siRNA sense strand
ugaaaugggagcagaugug

SEQ ID NO: 1295686 - RNA, 19 nt, Homo sapiens
  misc_RNA (1)...(19): siRNA sense strand
gaugaaaugggagcagaug

SEQ ID NO: 1295687 - RNA, 19 nt, Homo sapiens
  misc_RNA (1)...(19): siRNA sense strand
gaggacgaccugugcuaug

SEQ ID NO: 1295688 - RNA, 19 nt, Homo sapiens
  misc_RNA (1)...(19): siRNA sense strand
uuucaaugccgucaucaaa

SEQ ID NO: 1295689 - RNA, 19 nt, Homo sapiens
  misc_RNA (1)...(19): siRNA sense strand
agucugaaguuuccuggau

SEQ ID NO: 1295690 - RNA, 19 nt, Homo sapiens
  misc_RNA (1)...(19): siRNA sense strand
cagccgagaacaacagcua

SEQ ID NO: 1295691 - RNA, 19 nt, Homo sapiens
  misc_RNA (1)...(19): siRNA sense strand
uugcugcccugaaauaucu

SEQ ID NO: 1295692 - RNA, 19 nt, Homo sapiens
  misc_RNA (1)...(19): siRNA sense strand
ccaaguuccguuccaacaa

SEQ ID NO: 1295693 - RNA, 19 nt, Homo sapiens
  misc_RNA (1)...(19): siRNA sense strand
caccaagaaagcaaugauu

SEQ ID NO: 1295694 - RNA, 19 nt, Homo sapiens
  misc_RNA (1)...(19): siRNA sense strand
caacaccaagaaagcaaug

SEQ ID NO: 1295695 - RNA, 19 nt, Homo sapiens
  misc_RNA (1)...(19): siRNA sense strand
gacgaccugugcuaugagu

SEQ ID NO: 1295696 - RNA, 19 nt, Homo sapiens
  misc_RNA (1)...(19): siRNA sense strand
cagugaggcugaugucaac

SEQ ID NO: 1295697 - RNA, 19 nt, Homo sapiens
  misc_RNA (1)...(19): siRNA sense strand
ccaucagccuggcccucua

SEQ ID NO: 1295698 - RNA, 19 nt, Homo sapiens
  misc_RNA (1)...(19): siRNA sense strand
gaguacgaccggagguuug

SEQ ID NO: 1295699 - RNA, 19 nt, Homo sapiens
  misc_RNA (1)...(19): siRNA sense strand
gcacuuccaccuuauugcu

SEQ ID NO: 1295700 - RNA, 19 nt, Homo sapiens
  misc_RNA (1)...(19): siRNA sense strand
gcacacagccccagguaca

SEQ ID NO: 1295701 - RNA, 19 nt, Homo sapiens
  misc_RNA (1)...(19): siRNA sense strand
uaaacauuacucugggauu

SEQ ID NO: 1295702 - RNA, 19 nt, Homo sapiens
  misc_RNA (1)...(19): siRNA sense strand
uggaugugcaggaguauga

SEQ ID NO: 1295703 - RNA, 19 nt, Homo sapiens
  misc_RNA (1)...(19): siRNA sense strand
gcaacguggccaugaagca

SEQ ID NO: 1295704 - RNA, 19 nt, Homo sapiens
  misc_RNA (1)...(19): siRNA sense strand
cgaggcaaccacuccaaga

SEQ ID NO: 1295705 - RNA, 19 nt, Homo sapiens
  misc_RNA (1)...(19): siRNA sense strand
caaguucaaaggucagcaa

SEQ ID NO: 1295706 - RNA, 19 nt, Homo sapiens
  misc_RNA (1)...(19): siRNA sense strand
ugucugaucuaaaggucau

SEQ ID NO: 1295707 - RNA, 19 nt, Homo sapiens
  misc_RNA (1)...(19): siRNA sense strand
gccguauguuguugugaga

SEQ ID NO: 1295708 - RNA, 19 nt, Homo sapiens
  misc_RNA (1)...(19): siRNA sense strand
ccuacauguuccugucuga

SEQ ID NO: 1295709 - RNA, 19 nt, Homo sapiens
  misc_RNA (1)...(19): siRNA sense strand
cgaccugugcuaugaguuc

SEQ ID NO: 1295710 - RNA, 19 nt, Homo sapiens
  misc_RNA (1)...(19): siRNA sense strand
gcacuggagacagcgagaa

SEQ ID NO: 1295711 - RNA, 19 nt, Homo sapiens
  misc_RNA (1)...(19): siRNA sense strand
aacauuacucugggauuua

SEQ ID NO: 1295712 - RNA, 19 nt, Homo sapiens
  misc_RNA (1)...(19): siRNA sense strand
gggugaagaacaagcaugu

SEQ ID NO: 1295713 - RNA, 19 nt, Homo sapiens
  misc_RNA (1)...(19): siRNA sense strand
gaacaagcauguggaguuu

SEQ ID NO: 1295714 - RNA, 19 nt, Homo sapiens
  misc_RNA (1)...(19): siRNA sense strand
caaaguggcucauaucaug

SEQ ID NO: 1295715 - RNA, 19 nt, Homo sapiens
  misc_RNA (1)...(19): siRNA sense strand
ggaacaaaguggcucauau

SEQ ID NO: 1295716 - RNA, 19 nt, Homo sapiens
  misc_RNA (1)...(19): siRNA sense strand
aaacauuacucugggauuu

SEQ ID NO: 1295717 - RNA, 19 nt, Homo sapiens
  misc_RNA (1)...(19): siRNA sense strand
uguaugggcucuaugagua

SEQ ID NO: 1295718 - RNA, 19 nt, Homo sapiens
  misc_RNA (1)...(19): siRNA sense strand
gaacaaaguggcucauauc

SEQ ID NO: 1295719 - RNA, 19 nt, Homo sapiens
  misc_RNA (1)...(19): siRNA sense strand
ccucugcacuuccaccuua

SEQ ID NO: 1295720 - RNA, 19 nt, Homo sapiens
  misc_RNA (1)...(19): siRNA sense strand
gagcucaagucugaaguuu

SEQ ID NO: 1295721 - RNA, 19 nt, Homo sapiens
  misc_RNA (1)...(19): siRNA sense strand
caucagcacucccuacaug

SEQ ID NO: 1295722 - RNA, 19 nt, Homo sapiens
  misc_RNA (1)...(19): siRNA sense strand
ggucaaauccguccuguuc

SEQ ID NO: 1295723 - RNA, 19 nt, Homo sapiens
  misc_RNA (1)...(19): siRNA sense strand
ccaagaagcuccgggugaa

SEQ ID NO: 1295724 - RNA, 19 nt, Homo sapiens
  misc_RNA (1)...(19): siRNA sense strand
gauaagcugcggaagauga

SEQ ID NO: 1295725 - RNA, 19 nt, Homo sapiens
  misc_RNA (1)...(19): siRNA sense strand
ugacacggauaucaccuuu

SEQ ID NO: 1295726 - RNA, 19 nt, Homo sapiens
  misc_RNA (1)...(19): siRNA sense strand
ggaaagcccgugucucugu

SEQ ID NO: 1295727 - RNA, 19 nt, Homo sapiens
  misc_RNA (1)...(19): siRNA sense strand
uaaaggucauucacuggaa

SEQ ID NO: 1295728 - RNA, 19 nt, Homo sapiens
  misc_RNA (1)...(19): siRNA sense strand
gcucugaggugcuuaugag

SEQ ID NO: 1295729 - RNA, 19 nt, Homo sapiens
  misc_RNA (1)...(19): siRNA sense strand
ugaccuuccuggaguauga

SEQ ID NO: 1295730 - RNA, 19 nt, Homo sapiens
  misc_RNA (1)...(19): siRNA sense strand
caugcucucuacauccuua

SEQ ID NO: 1295731 - RNA, 19 nt, Homo sapiens
  misc_RNA (1)...(19): siRNA sense strand
ucaaugccgucaucaaaca

SEQ ID NO: 1295732 - RNA, 19 nt, Homo sapiens
  misc_RNA (1)...(19): siRNA sense strand
ggaaugugcagcugucaga

SEQ ID NO: 1295733 - RNA, 19 nt, Homo sapiens
  misc_RNA (1)...(19): siRNA sense strand
guucaaaggucagcaaguc

SEQ ID NO: 1295734 - RNA, 19 nt, Homo sapiens
  misc_RNA (1)...(19): siRNA sense strand
cggcuuugcugcccugaaa

SEQ ID NO: 1295735 - RNA, 19 nt, Homo sapiens
  misc_RNA (1)...(19): siRNA sense strand
gcucaagucugaaguuucc

SEQ ID NO: 1295736 - RNA, 19 nt, Homo sapiens
  misc_RNA (1)...(19): siRNA sense strand
caaguuccguuccaacaag

SEQ ID NO: 1295737 - RNA, 19 nt, Homo sapiens
  misc_RNA (1)...(19): siRNA sense strand
gcagagcugugggcugugu

SEQ ID NO: 1295738 - RNA, 19 nt, Homo sapiens
  misc_RNA (1)...(19): siRNA sense strand
ucaccuggauuuaccuguu

SEQ ID NO: 1295739 - RNA, 19 nt, Homo sapiens
  misc_RNA (1)...(19): siRNA sense strand
gcuucgacauuaccaaguu

SEQ ID NO: 1295740 - RNA, 19 nt, Homo sapiens
  misc_RNA (1)...(19): siRNA sense strand
guacaaggagggccaguuc

SEQ ID NO: 1295741 - RNA, 19 nt, Homo sapiens
  misc_RNA (1)...(19): siRNA sense strand
uggauaagcugcggaagau

SEQ ID NO: 1295742 - RNA, 19 nt, Homo sapiens
  misc_RNA (1)...(19): siRNA sense strand
gcuaccacaucguguacaa

SEQ ID NO: 1295743 - RNA, 19 nt, Homo sapiens
  misc_RNA (1)...(19): siRNA sense strand
aggcugaugucaacaguga

SEQ ID NO: 1295744 - RNA, 19 nt, Homo sapiens
  misc_RNA (1)...(19): siRNA sense strand
caccuggauuuaccuguuu

SEQ ID NO: 1295745 - RNA, 19 nt, Homo sapiens
  misc_RNA (1)...(19): siRNA sense strand
gacaauccacguugcuauu

SEQ ID NO: 1295746 - RNA, 19 nt, Homo sapiens
  misc_RNA (1)...(19): siRNA sense strand
ucaaaacccucaaggaaga

SEQ ID NO: 1295747 - RNA, 19 nt, Homo sapiens
  misc_RNA (1)...(19): siRNA sense strand
ggagagagucaucguccuu

SEQ ID NO: 1295748 - RNA, 19 nt, Homo sapiens
  misc_RNA (1)...(19): siRNA sense strand
ggauuuauggucugaugaa

SEQ ID NO: 1295749 - RNA, 19 nt, Homo sapiens
  misc_RNA (1)...(19): siRNA sense strand
ggagaaaugcgagacaauc

SEQ ID NO: 1295750 - RNA, 19 nt, Homo sapiens
  misc_RNA (1)...(19): siRNA sense strand
cguguggacuucuacaaug

SEQ ID NO: 1295751 - RNA, 19 nt, Homo sapiens
  misc_RNA (1)...(19): siRNA sense strand
caaaaccccuuccuugugu

SEQ ID NO: 1295752 - RNA, 19 nt, Homo sapiens
  misc_RNA (1)...(19): siRNA sense strand
ggaguacgaccggagguuu

SEQ ID NO: 1295753 - RNA, 19 nt, Homo sapiens
  misc_RNA (1)...(19): siRNA sense strand
ccuuauugcugacuccauu

SEQ ID NO: 1295754 - RNA, 19 nt, Homo sapiens
  misc_RNA (1)...(19): siRNA sense strand
gcuuugcugcccugaaaua

SEQ ID NO: 1295755 - RNA, 19 nt, Homo sapiens
  misc_RNA (1)...(19): siRNA sense strand
gcccaacgccuacaugauc

SEQ ID NO: 1295756 - RNA, 19 nt, Homo sapiens
  misc_RNA (1)...(19): siRNA sense strand
gggacccucuucacauuca

SEQ ID NO: 1295757 - RNA, 19 nt, Homo sapiens
  misc_RNA (1)...(19): siRNA sense strand
aagcggaguugcugucaau

SEQ ID NO: 1295758 - RNA, 19 nt, Homo sapiens
  misc_RNA (1)...(19): siRNA sense strand
ucgcucagcuguccaugga

SEQ ID NO: 1295759 - RNA, 19 nt, Homo sapiens
  misc_RNA (1)...(19): siRNA sense strand
agaacaagcauguggaguu

SEQ ID NO: 1295760 - RNA, 19 nt, Homo sapiens
  misc_RNA (1)...(19): siRNA sense strand
acacggauaucaccuuugc

SEQ ID NO: 1295761 - RNA, 19 nt, Homo sapiens
  misc_RNA (1)...(19): siRNA sense strand
gcugaugucaacagugaaa

SEQ ID NO: 1295762 - RNA, 19 nt, Homo sapiens
  misc_RNA (1)...(19): siRNA sense strand
ucugggagcuucgaagaug

SEQ ID NO: 1295763 - RNA, 19 nt, Homo sapiens
  misc_RNA (1)...(19): siRNA sense strand
ucaaauccguccuguucca

SEQ ID NO: 1295764 - RNA, 19 nt, Homo sapiens
  misc_RNA (1)...(19): siRNA sense strand
caauaccgcaucugucuca

SEQ ID NO: 1295765 - RNA, 19 nt, Homo sapiens
  misc_RNA (1)...(19): siRNA sense strand
acaaggagggccaguucua

SEQ ID NO: 1295766 - RNA, 19 nt, Homo sapiens
  misc_RNA (1)...(19): siRNA sense strand
gaguaugacggcaaucuuc

SEQ ID NO: 1295767 - RNA, 19 nt, Homo sapiens
  misc_RNA (1)...(19): siRNA sense strand
gcaaccacuccaagaccua

SEQ ID NO: 1295768 - RNA, 19 nt, Homo sapiens
  misc_RNA (1)...(19): siRNA sense strand
caagcaauaccgcaucugu

SEQ ID NO: 1295769 - RNA, 19 nt, Homo sapiens
  misc_RNA (1)...(19): siRNA sense strand
ggcgagagcgcuucacugu

SEQ ID NO: 1295770 - RNA, 19 nt, Homo sapiens
  misc_RNA (1)...(19): siRNA sense strand
gagacaauccacguugcua

SEQ ID NO: 1295771 - RNA, 19 nt, Homo sapiens
  misc_RNA (1)...(19): siRNA sense strand
ccggagguuuguaggcuuu

SEQ ID NO: 1295772 - RNA, 19 nt, Homo sapiens
  misc_RNA (1)...(19): siRNA sense strand
gcacccaccuguacuuccu

SEQ ID NO: 1295773 - RNA, 19 nt, Homo sapiens
  misc_RNA (1)...(19): siRNA sense strand
aggacgaccugugcuauga

SEQ ID NO: 1295774 - RNA, 19 nt, Homo sapiens
  misc_RNA (1)...(19): siRNA sense strand
gugaaaaccuccagaagca

SEQ ID NO: 1295775 - RNA, 19 nt, Homo sapiens
  misc_RNA (1)...(19): siRNA sense strand
ggaguaugacggcaaucuu

SEQ ID NO: 1295776 - RNA, 19 nt, Homo sapiens
  misc_RNA (1)...(19): siRNA sense strand
acauuacucugggauuuau

SEQ ID NO: 1295777 - RNA, 19 nt, Homo sapiens
  misc_RNA (1)...(19): siRNA sense strand
gacggaacccucugcacuu

SEQ ID NO: 1295778 - RNA, 19 nt, Homo sapiens
  misc_RNA (1)...(19): siRNA sense strand
ccacgcacccacaaacuuc

SEQ ID NO: 1295779 - RNA, 19 nt, Homo sapiens
  misc_RNA (1)...(19): siRNA sense strand
ccagugaggcugaugucaa

SEQ ID NO: 1295780 - RNA, 19 nt, Homo sapiens
  misc_RNA (1)...(19): siRNA sense strand
agagagucaucguccuuga

SEQ ID NO: 1295781 - RNA, 19 nt, Homo sapiens
  misc_RNA (1)...(19): siRNA sense strand
guggagaaaugcgagacaa

SEQ ID NO: 1295782 - RNA, 19 nt, Homo sapiens
  misc_RNA (1)...(19): siRNA sense strand
gagcuucgaagauggaaag

SEQ ID NO: 1295783 - RNA, 19 nt, Homo sapiens
  misc_RNA (1)...(19): siRNA sense strand
uggaagaggcuacaacaca

SEQ ID NO: 1295784 - RNA, 19 nt, Homo sapiens
  misc_RNA (1)...(19): siRNA sense strand
gaucuaaaggucauucacu

SEQ ID NO: 1295785 - RNA, 19 nt, Homo sapiens
  misc_RNA (1)...(19): siRNA sense strand
ugaaaugggagcagaugug

SEQ ID NO: 1295786 - RNA, 19 nt, Homo sapiens
  misc_RNA (1)...(19): siRNA sense strand
gaugaaaugggagcagaug

SEQ ID NO: 1295787 - RNA, 19 nt, Homo sapiens
  misc_RNA (1)...(19): siRNA sense strand
gaggacgaccugugcuaug

SEQ ID NO: 1295788 - RNA, 19 nt, Homo sapiens
  misc_RNA (1)...(19): siRNA sense strand
uuucaaugccgucaucaaa

SEQ ID NO: 1295789 - RNA, 19 nt, Homo sapiens
  misc_RNA (1)...(19): siRNA sense strand
agucugaaguuuccuggau

SEQ ID NO: 1295790 - RNA, 19 nt, Homo sapiens
  misc_RNA (1)...(19): siRNA sense strand
cagccgagaacaacagcua

SEQ ID NO: 1295791 - RNA, 19 nt, Homo sapiens
  misc_RNA (1)...(19): siRNA sense strand
uugcugcccugaaauaucu

SEQ ID NO: 1295792 - RNA, 19 nt, Homo sapiens
  misc_RNA (1)...(19): siRNA sense strand
ccaaguuccguuccaacaa

SEQ ID NO: 1295793 - RNA, 19 nt, Homo sapiens
  misc_RNA (1)...(19): siRNA sense strand
caccaagaaagcaaugauu

SEQ ID NO: 1295794 - RNA, 19 nt, Homo sapiens
  misc_RNA (1)...(19): siRNA sense strand
caacaccaagaaagcaaug

SEQ ID NO: 1295795 - RNA, 19 nt, Homo sapiens
  misc_RNA (1)...(19): siRNA sense strand
gacgaccugugcuaugagu

SEQ ID NO: 1295796 - RNA, 19 nt, Homo sapiens
  misc_RNA (1)...(19): siRNA sense strand
cagugaggcugaugucaac

SEQ ID NO: 1295797 - RNA, 19 nt, Homo sapiens
  misc_RNA (1)...(19): siRNA sense strand
ccaucagccuggcccucua

SEQ ID NO: 1295798 - RNA, 19 nt, Homo sapiens
  misc_RNA (1)...(19): siRNA sense strand
gaguacgaccggagguuug

SEQ ID NO: 1295799 - RNA, 19 nt, Homo sapiens
  misc_RNA (1)...(19): siRNA sense strand
gcacuuccaccuuauugcu

SEQ ID NO: 1295800 - RNA, 19 nt, Homo sapiens
  misc_RNA (1)...(19): siRNA sense strand
gcacacagccccagguaca

SEQ ID NO: 1295801 - RNA, 19 nt, Homo sapiens
  misc_RNA (1)...(19): siRNA sense strand
uaaacauuacucugggauu

SEQ ID NO: 1295802 - RNA, 19 nt, Homo sapiens
  misc_RNA (1)...(19): siRNA sense strand
uggaugugcaggaguauga

SEQ ID NO: 1295803 - RNA, 19 nt, Homo sapiens
  misc_RNA (1)...(19): siRNA sense strand
gcaacguggccaugaagca

SEQ ID NO: 1295804 - RNA, 19 nt, Homo sapiens
  misc_RNA (1)...(19): siRNA sense strand
cgaggcaaccacuccaaga

SEQ ID NO: 1295805 - RNA, 19 nt, Homo sapiens
  misc_RNA (1)...(19): siRNA sense strand
caaguucaaaggucagcaa

SEQ ID NO: 1295806 - RNA, 19 nt, Homo sapiens
  misc_RNA (1)...(19): siRNA sense strand
ugucugaucuaaaggucau

SEQ ID NO: 1295807 - RNA, 19 nt, Homo sapiens
  misc_RNA (1)...(19): siRNA sense strand
gccguauguuguugugaga

SEQ ID NO: 1295808 - RNA, 19 nt, Homo sapiens
  misc_RNA (1)...(19): siRNA sense strand
ccuacauguuccugucuga

SEQ ID NO: 1295809 - RNA, 19 nt, Homo sapiens
  misc_RNA (1)...(19): siRNA sense strand
cgaccugugcuaugaguuc

SEQ ID NO: 1295810 - RNA, 19 nt, Homo sapiens
  misc_RNA (1)...(19): siRNA sense strand
gcacuggagacagcgagaa

SEQ ID NO: 1295811 - RNA, 19 nt, Homo sapiens
  misc_RNA (1)...(19): siRNA sense strand
aacauuacucugggauuua

SEQ ID NO: 1295812 - RNA, 19 nt, Homo sapiens
  misc_RNA (1)...(19): siRNA sense strand
gggugaagaacaagcaugu

SEQ ID NO: 1295813 - RNA, 19 nt, Homo sapiens
  misc_RNA (1)...(19): siRNA sense strand
ggaccaaccuccucuacaa

SEQ ID NO: 1295814 - RNA, 19 nt, Homo sapiens
  misc_RNA (1)...(19): siRNA sense strand
gaagauccgugacgacgaa

SEQ ID NO: 1295815 - RNA, 19 nt, Homo sapiens
  misc_RNA (1)...(19): siRNA sense strand
gaacgggaccggaagaaga

SEQ ID NO: 1295816 - RNA, 19 nt, Homo sapiens
  misc_RNA (1)...(19): siRNA sense strand
aagaagaucugcucccauu

SEQ ID NO: 1295817 - RNA, 19 nt, Homo sapiens
  misc_RNA (1)...(19): siRNA sense strand
ggaagaagaggaagcgaaa

SEQ ID NO: 1295818 - RNA, 19 nt, Homo sapiens
  misc_RNA (1)...(19): siRNA sense strand
gggcugaucuucaauaagg

SEQ ID NO: 1295819 - RNA, 19 nt, Homo sapiens
  misc_RNA (1)...(19): siRNA sense strand
ccacugagccugagucugu

SEQ ID NO: 1295820 - RNA, 19 nt, Homo sapiens
  misc_RNA (1)...(19): siRNA sense strand
cgaaagagaaggccaggaa

SEQ ID NO: 1295821 - RNA, 19 nt, Homo sapiens
  misc_RNA (1)...(19): siRNA sense strand
gacagcgacugcaugagaa

SEQ ID NO: 1295822 - RNA, 19 nt, Homo sapiens
  misc_RNA (1)...(19): siRNA sense strand
cgacagcgacugcaugaga

SEQ ID NO: 1295823 - RNA, 19 nt, Homo sapiens
  misc_RNA (1)...(19): siRNA sense strand
gaagaucugcucccauucg

SEQ ID NO: 1295824 - RNA, 19 nt, Homo sapiens
  misc_RNA (1)...(19): siRNA sense strand
ggaagaaaacacaaaagaa

SEQ ID NO: 1295825 - RNA, 19 nt, Homo sapiens
  misc_RNA (1)...(19): siRNA sense strand
ccgggcugaucuucaauaa

SEQ ID NO: 1295826 - RNA, 19 nt, Homo sapiens
  misc_RNA (1)...(19): siRNA sense strand
gagcuggaggcgaagauga

SEQ ID NO: 1295827 - RNA, 19 nt, Homo sapiens
  misc_RNA (1)...(19): siRNA sense strand
gagccugagucugucuuug

SEQ ID NO: 1295828 - RNA, 19 nt, Homo sapiens
  misc_RNA (1)...(19): siRNA sense strand
ugcagagccuggccaagaa

SEQ ID NO: 1295829 - RNA, 19 nt, Homo sapiens
  misc_RNA (1)...(19): siRNA sense strand
acucaaggcucagaaacug

SEQ ID NO: 1295830 - RNA, 19 nt, Homo sapiens
  misc_RNA (1)...(19): siRNA sense strand
ugaggcagccaaagaggaa

SEQ ID NO: 1295831 - RNA, 19 nt, Homo sapiens
  misc_RNA (1)...(19): siRNA sense strand
gaaauuccggaagcgagaa

SEQ ID NO: 1295832 - RNA, 19 nt, Homo sapiens
  misc_RNA (1)...(19): siRNA sense strand
ugucuuugcucuggauguu

SEQ ID NO: 1295833 - RNA, 19 nt, Homo sapiens
  misc_RNA (1)...(19): siRNA sense strand
cugcagagccuggccaaga

SEQ ID NO: 1295834 - RNA, 19 nt, Homo sapiens
  misc_RNA (1)...(19): siRNA sense strand
gaaaaggaagaaaacacaa

SEQ ID NO: 1295835 - RNA, 19 nt, Homo sapiens
  misc_RNA (1)...(19): siRNA sense strand
ccucucuacucgccaagga

SEQ ID NO: 1295836 - RNA, 19 nt, Homo sapiens
  misc_RNA (1)...(19): siRNA sense strand
gaaauucgguccagucuaa

SEQ ID NO: 1295837 - RNA, 19 nt, Homo sapiens
  misc_RNA (1)...(19): siRNA sense strand
ccagaagccuacauaauua

SEQ ID NO: 1295838 - RNA, 19 nt, Homo sapiens
  misc_RNA (1)...(19): siRNA sense strand
gaggaaagguugcucauug

SEQ ID NO: 1295839 - RNA, 19 nt, Homo sapiens
  misc_RNA (1)...(19): siRNA sense strand
gaagauugccuagaaauau

SEQ ID NO: 1295840 - RNA, 19 nt, Homo sapiens
  misc_RNA (1)...(19): siRNA sense strand
cuagaaagcuugagcauac

SEQ ID NO: 1295841 - RNA, 19 nt, Homo sapiens
  misc_RNA (1)...(19): siRNA sense strand
gaaauauggagcccagaua

SEQ ID NO: 1295842 - RNA, 19 nt, Homo sapiens
  misc_RNA (1)...(19): siRNA sense strand
gugcaaaugucaauuguca

SEQ ID NO: 1295843 - RNA, 19 nt, Homo sapiens
  misc_RNA (1)...(19): siRNA sense strand
gcaacuacuuuagaagaaa

SEQ ID NO: 1295844 - RNA, 19 nt, Homo sapiens
  misc_RNA (1)...(19): siRNA sense strand
ggaaucacaccuuuauuug

SEQ ID NO: 1295845 - RNA, 19 nt, Homo sapiens
  misc_RNA (1)...(19): siRNA sense strand
gcaguuaccuauucaugca

SEQ ID NO: 1295846 - RNA, 19 nt, Homo sapiens
  misc_RNA (1)...(19): siRNA sense strand
gcuacacccuuguucauug

SEQ ID NO: 1295847 - RNA, 19 nt, Homo sapiens
  misc_RNA (1)...(19): siRNA sense strand
gaagaaacgacaccauugu

SEQ ID NO: 1295848 - RNA, 19 nt, Homo sapiens
  misc_RNA (1)...(19): siRNA sense strand
gaaagcuugagcauacuua

SEQ ID NO: 1295849 - RNA, 19 nt, Homo sapiens
  misc_RNA (1)...(19): siRNA sense strand
uaucuucacuuuggaguuu

SEQ ID NO: 1295850 - RNA, 19 nt, Homo sapiens
  misc_RNA (1)...(19): siRNA sense strand
ggaaugccaggaugacuuu

SEQ ID NO: 1295851 - RNA, 19 nt, Homo sapiens
  misc_RNA (1)...(19): siRNA sense strand
acaugaagauugccuagaa

SEQ ID NO: 1295852 - RNA, 19 nt, Homo sapiens
  misc_RNA (1)...(19): siRNA sense strand
gaaauauuacuccggaaug

SEQ ID NO: 1295853 - RNA, 19 nt, Homo sapiens
  misc_RNA (1)...(19): siRNA sense strand
cccagaagccuacauaauu

SEQ ID NO: 1295854 - RNA, 19 nt, Homo sapiens
  misc_RNA (1)...(19): siRNA sense strand
gcaauuaaagcacaagcaa

SEQ ID NO: 1295855 - RNA, 19 nt, Homo sapiens
  misc_RNA (1)...(19): siRNA sense strand
acacugggcuaaacaaagu

SEQ ID NO: 1295856 - RNA, 19 nt, Homo sapiens
  misc_RNA (1)...(19): siRNA sense strand
ggacagauagauguguuaa

SEQ ID NO: 1295857 - RNA, 19 nt, Homo sapiens
  misc_RNA (1)...(19): siRNA sense strand
ugaggacaguuggcaguua

SEQ ID NO: 1295858 - RNA, 19 nt, Homo sapiens
  misc_RNA (1)...(19): siRNA sense strand
caggaugacuuuggaauca

SEQ ID NO: 1295859 - RNA, 19 nt, Homo sapiens
  misc_RNA (1)...(19): siRNA sense strand
uggaaucacaccuuuauuu

SEQ ID NO: 1295860 - RNA, 19 nt, Homo sapiens
  misc_RNA (1)...(19): siRNA sense strand
ggauucaguucuccugugu

SEQ ID NO: 1295861 - RNA, 19 nt, Homo sapiens
  misc_RNA (1)...(19): siRNA sense strand
ugaagauugccuagaaaua

SEQ ID NO: 1295862 - RNA, 19 nt, Homo sapiens
  misc_RNA (1)...(19): siRNA sense strand
caugaagauugccuagaaa

SEQ ID NO: 1295863 - RNA, 19 nt, Homo sapiens
  misc_RNA (1)...(19): siRNA sense strand
gaacgucuacggucugaca

SEQ ID NO: 1295864 - RNA, 19 nt, Homo sapiens
  misc_RNA (1)...(19): siRNA sense strand
gaaucacaccuuuauuugu

SEQ ID NO: 1295865 - RNA, 19 nt, Homo sapiens
  misc_RNA (1)...(19): siRNA sense strand
guucauugcugcucaagag

SEQ ID NO: 1295866 - RNA, 19 nt, Homo sapiens
  misc_RNA (1)...(19): siRNA sense strand
gcaaaugucaauugucaag

SEQ ID NO: 1295867 - RNA, 19 nt, Homo sapiens
  misc_RNA (1)...(19): siRNA sense strand
gcaucucgcugcaagucaa

SEQ ID NO: 1295868 - RNA, 19 nt, Homo sapiens
  misc_RNA (1)...(19): siRNA sense strand
ugacccaucuuugucguuu

SEQ ID NO: 1295869 - RNA, 19 nt, Homo sapiens
  misc_RNA (1)...(19): siRNA sense strand
acauuaagaugaagaccuu

SEQ ID NO: 1295870 - RNA, 19 nt, Homo sapiens
  misc_RNA (1)...(19): siRNA sense strand
ggauuugacccacugauuc

SEQ ID NO: 1295871 - RNA, 19 nt, Homo sapiens
  misc_RNA (1)...(19): siRNA sense strand
uagaagaaacgacaccauu

SEQ ID NO: 1295872 - RNA, 19 nt, Homo sapiens
  misc_RNA (1)...(19): siRNA sense strand
gcuagaaagcuugagcaua

SEQ ID NO: 1295873 - RNA, 19 nt, Homo sapiens
  misc_RNA (1)...(19): siRNA sense strand
acagauagauguguuaagg

SEQ ID NO: 1295874 - RNA, 19 nt, Homo sapiens
  misc_RNA (1)...(19): siRNA sense strand
gaaaauggacagauagaug

SEQ ID NO: 1295875 - RNA, 19 nt, Homo sapiens
  misc_RNA (1)...(19): siRNA sense strand
aaauauggagcccagauaa

SEQ ID NO: 1295876 - RNA, 19 nt, Homo sapiens
  misc_RNA (1)...(19): siRNA sense strand
gaacuucauuuggcauacu

SEQ ID NO: 1295877 - RNA, 19 nt, Homo sapiens
  misc_RNA (1)...(19): siRNA sense strand
gaacuggcagcuauucaag

SEQ ID NO: 1295878 - RNA, 19 nt, Homo sapiens
  misc_RNA (1)...(19): siRNA sense strand
gaggauguaugaaguucca

SEQ ID NO: 1295879 - RNA, 19 nt, Homo sapiens
  misc_RNA (1)...(19): siRNA sense strand
gaggacaguuggcaguuac

SEQ ID NO: 1295880 - RNA, 19 nt, Homo sapiens
  misc_RNA (1)...(19): siRNA sense strand
cuuuggaguuuacuaauug

SEQ ID NO: 1295881 - RNA, 19 nt, Homo sapiens
  misc_RNA (1)...(19): siRNA sense strand
ucacuuuggaguuuacuaa

SEQ ID NO: 1295882 - RNA, 19 nt, Homo sapiens
  misc_RNA (1)...(19): siRNA sense strand
ggaugacuuuggaaucaca

SEQ ID NO: 1295883 - RNA, 19 nt, Homo sapiens
  misc_RNA (1)...(19): siRNA sense strand
gcauugacacccuuaucuu

SEQ ID NO: 1295884 - RNA, 19 nt, Homo sapiens
  misc_RNA (1)...(19): siRNA sense strand
gaagguuucugugcuuugc

SEQ ID NO: 1295885 - RNA, 19 nt, Homo sapiens
  misc_RNA (1)...(19): siRNA sense strand
gcaagucaaggacauugga

SEQ ID NO: 1295886 - RNA, 19 nt, Homo sapiens
  misc_RNA (1)...(19): siRNA sense strand
gaagacguucugaggaugu

SEQ ID NO: 1295887 - RNA, 19 nt, Homo sapiens
  misc_RNA (1)...(19): siRNA sense strand
ggucugacaguuauauuag

SEQ ID NO: 1295888 - RNA, 19 nt, Homo sapiens
  misc_RNA (1)...(19): siRNA sense strand
caacuacuuuagaagaaac

SEQ ID NO: 1295889 - RNA, 19 nt, Homo sapiens
  misc_RNA (1)...(19): siRNA sense strand
ggaaauucgguccagucua

SEQ ID NO: 1295890 - RNA, 19 nt, Homo sapiens
  misc_RNA (1)...(19): siRNA sense strand
cucaaacgcuuggauucua

SEQ ID NO: 1295891 - RNA, 19 nt, Homo sapiens
  misc_RNA (1)...(19): siRNA sense strand
caauuaaagcacaagcaaa

SEQ ID NO: 1295892 - RNA, 19 nt, Homo sapiens
  misc_RNA (1)...(19): siRNA sense strand
gacugugaguucuuuggaa

SEQ ID NO: 1295893 - RNA, 19 nt, Homo sapiens
  misc_RNA (1)...(19): siRNA sense strand
agaagaaacgacaccauug

SEQ ID NO: 1295894 - RNA, 19 nt, Homo sapiens
  misc_RNA (1)...(19): siRNA sense strand
uguuaaggcuguugcuuca

SEQ ID NO: 1295895 - RNA, 19 nt, Homo sapiens
  misc_RNA (1)...(19): siRNA sense strand
acacggagcaaauguuaau

SEQ ID NO: 1295896 - RNA, 19 nt, Homo sapiens
  misc_RNA (1)...(19): siRNA sense strand
cggagcaaauguuaaugga

SEQ ID NO: 1295897 - RNA, 19 nt, Homo sapiens
  misc_RNA (1)...(19): siRNA sense strand
ugugaguucuuuggaauug

SEQ ID NO: 1295898 - RNA, 19 nt, Homo sapiens
  misc_RNA (1)...(19): siRNA sense strand
ggacugugaguucuuugga

SEQ ID NO: 1295899 - RNA, 19 nt, Homo sapiens
  misc_RNA (1)...(19): siRNA sense strand
acaaaguaagcccuguuua

SEQ ID NO: 1295900 - RNA, 19 nt, Homo sapiens
  misc_RNA (1)...(19): siRNA sense strand
ugcaacuacuuuagaagaa

SEQ ID NO: 1295901 - RNA, 19 nt, Homo sapiens
  misc_RNA (1)...(19): siRNA sense strand
caccagcuguugaaaggau

SEQ ID NO: 1295902 - RNA, 19 nt, Homo sapiens
  misc_RNA (1)...(19): siRNA sense strand
gagcccagauaaaugaacu

SEQ ID NO: 1295903 - RNA, 19 nt, Homo sapiens
  misc_RNA (1)...(19): siRNA sense strand
gggugcaaaugucaauugu

SEQ ID NO: 1295904 - RNA, 19 nt, Homo sapiens
  misc_RNA (1)...(19): siRNA sense strand
aaacaaggaaugccaggau

SEQ ID NO: 1295905 - RNA, 19 nt, Homo sapiens
  misc_RNA (1)...(19): siRNA sense strand
caaaauauaaggagugguu

SEQ ID NO: 1295906 - RNA, 19 nt, Homo sapiens
  misc_RNA (1)...(19): siRNA sense strand
uucgauauuucgcuacuuu

SEQ ID NO: 1295907 - RNA, 19 nt, Homo sapiens
  misc_RNA (1)...(19): siRNA sense strand
gaaaaggagcaaacaagga

SEQ ID NO: 1295908 - RNA, 19 nt, Homo sapiens
  misc_RNA (1)...(19): siRNA sense strand
ugagcauacuuauuucauc

SEQ ID NO: 1295909 - RNA, 19 nt, Homo sapiens
  misc_RNA (1)...(19): siRNA sense strand
ugaguucuuuggaauugug

SEQ ID NO: 1295910 - RNA, 19 nt, Homo sapiens
  misc_RNA (1)...(19): siRNA sense strand
ucuacggucugacaguuau

SEQ ID NO: 1295911 - RNA, 19 nt, Homo sapiens
  misc_RNA (1)...(19): siRNA sense strand
ucaaacgcuuggauucuac

SEQ ID NO: 1295912 - RNA, 19 nt, Homo sapiens
  misc_RNA (1)...(19): siRNA sense strand
cgagaaguuuucgauauuu

SEQ ID NO: 1295913 - RNA, 19 nt, Homo sapiens
  misc_RNA (1)...(19): siRNA sense strand
gcuugagcauacuuauuuc

SEQ ID NO: 1295914 - RNA, 19 nt, Homo sapiens
  misc_RNA (1)...(19): siRNA sense strand
cgucuacggucugacaguu

SEQ ID NO: 1295915 - RNA, 19 nt, Homo sapiens
  misc_RNA (1)...(19): siRNA sense strand
gauccuaaugcaacuacuu

SEQ ID NO: 1295916 - RNA, 19 nt, Homo sapiens
  misc_RNA (1)...(19): siRNA sense strand
gauucuacagcaacauauu

SEQ ID NO: 1295917 - RNA, 19 nt, Homo sapiens
  misc_RNA (1)...(19): siRNA sense strand
acacccuuaucuucacuuu

SEQ ID NO: 1295918 - RNA, 19 nt, Homo sapiens
  misc_RNA (1)...(19): siRNA sense strand
uaagaugaagaccuuugaa

SEQ ID NO: 1295919 - RNA, 19 nt, Homo sapiens
  misc_RNA (1)...(19): siRNA sense strand
gauguaugaaguuccagaa

SEQ ID NO: 1295920 - RNA, 19 nt, Homo sapiens
  misc_RNA (1)...(19): siRNA sense strand
cggucugacaguuauauua

SEQ ID NO: 1295921 - RNA, 19 nt, Homo sapiens
  misc_RNA (1)...(19): siRNA sense strand
acccuuaucuucacuuugg

SEQ ID NO: 1295922 - RNA, 19 nt, Homo sapiens
  misc_RNA (1)...(19): siRNA sense strand
aaauauuacuccggaaugg

SEQ ID NO: 1295923 - RNA, 19 nt, Homo sapiens
  misc_RNA (1)...(19): siRNA sense strand
caguauggcaagcuagaaa

SEQ ID NO: 1295924 - RNA, 19 nt, Homo sapiens
  misc_RNA (1)...(19): siRNA sense strand
cagaagccuacauaauuau

SEQ ID NO: 1295925 - RNA, 19 nt, Homo sapiens
  misc_RNA (1)...(19): siRNA sense strand
agcuugagcauacuuauuu

SEQ ID NO: 1295926 - RNA, 19 nt, Homo sapiens
  misc_RNA (1)...(19): siRNA sense strand
ugacacugggcuaaacaaa

SEQ ID NO: 1295927 - RNA, 19 nt, Homo sapiens
  misc_RNA (1)...(19): siRNA sense strand
acaguuggcaguuaccuau

SEQ ID NO: 1295928 - RNA, 19 nt, Homo sapiens
  misc_RNA (1)...(19): siRNA sense strand
gacuuguuaauaccacuua

SEQ ID NO: 1295929 - RNA, 19 nt, Homo sapiens
  misc_RNA (1)...(19): siRNA sense strand
acuggcagcuauucaagau

SEQ ID NO: 1295930 - RNA, 19 nt, Homo sapiens
  misc_RNA (1)...(19): siRNA sense strand
guucugaggauguaugaag

SEQ ID NO: 1295931 - RNA, 19 nt, Homo sapiens
  misc_RNA (1)...(19): siRNA sense strand
gagaaguuuucgauauuuc

SEQ ID NO: 1295932 - RNA, 19 nt, Homo sapiens
  misc_RNA (1)...(19): siRNA sense strand
aagaaacgacaccauuguu

SEQ ID NO: 1295933 - RNA, 19 nt, Homo sapiens
  misc_RNA (1)...(19): siRNA sense strand
aauauggagcccagauaaa

SEQ ID NO: 1295934 - RNA, 19 nt, Homo sapiens
  misc_RNA (1)...(19): siRNA sense strand
uggauucuacagcaacaua

SEQ ID NO: 1295935 - RNA, 19 nt, Homo sapiens
  misc_RNA (1)...(19): siRNA sense strand
augaagacguucugaggau

SEQ ID NO: 1295936 - RNA, 19 nt, Homo sapiens
  misc_RNA (1)...(19): siRNA sense strand
gaaauucgguccagucuaa

SEQ ID NO: 1295937 - RNA, 19 nt, Homo sapiens
  misc_RNA (1)...(19): siRNA sense strand
ccagaagccuacauaauua

SEQ ID NO: 1295938 - RNA, 19 nt, Homo sapiens
  misc_RNA (1)...(19): siRNA sense strand
gaggaaagguugcucauug

SEQ ID NO: 1295939 - RNA, 19 nt, Homo sapiens
  misc_RNA (1)...(19): siRNA sense strand
gaagauugccuagaaauau

SEQ ID NO: 1295940 - RNA, 19 nt, Homo sapiens
  misc_RNA (1)...(19): siRNA sense strand
cuagaaagcuugagcauac

SEQ ID NO: 1295941 - RNA, 19 nt, Homo sapiens
  misc_RNA (1)...(19): siRNA sense strand
gaaauauggagcccagaua

SEQ ID NO: 1295942 - RNA, 19 nt, Homo sapiens
  misc_RNA (1)...(19): siRNA sense strand
gugcaaaugucaauuguca

SEQ ID NO: 1295943 - RNA, 19 nt, Homo sapiens
  misc_RNA (1)...(19): siRNA sense strand
gcaacuacuuuagaagaaa

SEQ ID NO: 1295944 - RNA, 19 nt, Homo sapiens
  misc_RNA (1)...(19): siRNA sense strand
ggaaucacaccuuuauuug

SEQ ID NO: 1295945 - RNA, 19 nt, Homo sapiens
  misc_RNA (1)...(19): siRNA sense strand
gcaguuaccuauucaugca

SEQ ID NO: 1295946 - RNA, 19 nt, Homo sapiens
  misc_RNA (1)...(19): siRNA sense strand
gcuacacccuuguucauug

SEQ ID NO: 1295947 - RNA, 19 nt, Homo sapiens
  misc_RNA (1)...(19): siRNA sense strand
gaagaaacgacaccauugu

SEQ ID NO: 1295948 - RNA, 19 nt, Homo sapiens
  misc_RNA (1)...(19): siRNA sense strand
gaaagcuugagcauacuua

SEQ ID NO: 1295949 - RNA, 19 nt, Homo sapiens
  misc_RNA (1)...(19): siRNA sense strand
uaucuucacuuuggaguuu

SEQ ID NO: 1295950 - RNA, 19 nt, Homo sapiens
  misc_RNA (1)...(19): siRNA sense strand
ggaaugccaggaugacuuu

SEQ ID NO: 1295951 - RNA, 19 nt, Homo sapiens
  misc_RNA (1)...(19): siRNA sense strand
acaugaagauugccuagaa

SEQ ID NO: 1295952 - RNA, 19 nt, Homo sapiens
  misc_RNA (1)...(19): siRNA sense strand
gaaauauuacuccggaaug

SEQ ID NO: 1295953 - RNA, 19 nt, Homo sapiens
  misc_RNA (1)...(19): siRNA sense strand
cccagaagccuacauaauu

SEQ ID NO: 1295954 - RNA, 19 nt, Homo sapiens
  misc_RNA (1)...(19): siRNA sense strand
gcaauuaaagcacaagcaa

SEQ ID NO: 1295955 - RNA, 19 nt, Homo sapiens
  misc_RNA (1)...(19): siRNA sense strand
acacugggcuaaacaaagu

SEQ ID NO: 1295956 - RNA, 19 nt, Homo sapiens
  misc_RNA (1)...(19): siRNA sense strand
ggacagauagauguguuaa

SEQ ID NO: 1295957 - RNA, 19 nt, Homo sapiens
  misc_RNA (1)...(19): siRNA sense strand
ugaggacaguuggcaguua

SEQ ID NO: 1295958 - RNA, 19 nt, Homo sapiens
  misc_RNA (1)...(19): siRNA sense strand
caggaugacuuuggaauca

SEQ ID NO: 1295959 - RNA, 19 nt, Homo sapiens
  misc_RNA (1)...(19): siRNA sense strand
uggaaucacaccuuuauuu

SEQ ID NO: 1295960 - RNA, 19 nt, Homo sapiens
  misc_RNA (1)...(19): siRNA sense strand
ggauucaguucuccugugu

SEQ ID NO: 1295961 - RNA, 19 nt, Homo sapiens
  misc_RNA (1)...(19): siRNA sense strand
ugaagauugccuagaaaua

SEQ ID NO: 1295962 - RNA, 19 nt, Homo sapiens
  misc_RNA (1)...(19): siRNA sense strand
caugaagauugccuagaaa

SEQ ID NO: 1295963 - RNA, 19 nt, Homo sapiens
  misc_RNA (1)...(19): siRNA sense strand
gaacgucuacggucugaca

SEQ ID NO: 1295964 - RNA, 19 nt, Homo sapiens
  misc_RNA (1)...(19): siRNA sense strand
gaaucacaccuuuauuugu

SEQ ID NO: 1295965 - RNA, 19 nt, Homo sapiens
  misc_RNA (1)...(19): siRNA sense strand
guucauugcugcucaagag

SEQ ID NO: 1295966 - RNA, 19 nt, Homo sapiens
  misc_RNA (1)...(19): siRNA sense strand
gcaaaugucaauugucaag

SEQ ID NO: 1295967 - RNA, 19 nt, Homo sapiens
  misc_RNA (1)...(19): siRNA sense strand
gcaucucgcugcaagucaa

SEQ ID NO: 1295968 - RNA, 19 nt, Homo sapiens
  misc_RNA (1)...(19): siRNA sense strand
ugacccaucuuugucguuu

SEQ ID NO: 1295969 - RNA, 19 nt, Homo sapiens
  misc_RNA (1)...(19): siRNA sense strand
ggauuugacccacugauuc

SEQ ID NO: 1295970 - RNA, 19 nt, Homo sapiens
  misc_RNA (1)...(19): siRNA sense strand
uagaagaaacgacaccauu

SEQ ID NO: 1295971 - RNA, 19 nt, Homo sapiens
  misc_RNA (1)...(19): siRNA sense strand
gcuagaaagcuugagcaua

SEQ ID NO: 1295972 - RNA, 19 nt, Homo sapiens
  misc_RNA (1)...(19): siRNA sense strand
acagauagauguguuaagg

SEQ ID NO: 1295973 - RNA, 19 nt, Homo sapiens
  misc_RNA (1)...(19): siRNA sense strand
gaaaauggacagauagaug

SEQ ID NO: 1295974 - RNA, 19 nt, Homo sapiens
  misc_RNA (1)...(19): siRNA sense strand
aaauauggagcccagauaa

SEQ ID NO: 1295975 - RNA, 19 nt, Homo sapiens
  misc_RNA (1)...(19): siRNA sense strand
gaacuucauuuggcauacu

SEQ ID NO: 1295976 - RNA, 19 nt, Homo sapiens
  misc_RNA (1)...(19): siRNA sense strand
gaacuggcagcuauucaag

SEQ ID NO: 1295977 - RNA, 19 nt, Homo sapiens
  misc_RNA (1)...(19): siRNA sense strand
gaggauguaugaaguucca

SEQ ID NO: 1295978 - RNA, 19 nt, Homo sapiens
  misc_RNA (1)...(19): siRNA sense strand
gaggacaguuggcaguuac

SEQ ID NO: 1295979 - RNA, 19 nt, Homo sapiens
  misc_RNA (1)...(19): siRNA sense strand
cuuuggaguuuacuaauug

SEQ ID NO: 1295980 - RNA, 19 nt, Homo sapiens
  misc_RNA (1)...(19): siRNA sense strand
ucacuuuggaguuuacuaa

SEQ ID NO: 1295981 - RNA, 19 nt, Homo sapiens
  misc_RNA (1)...(19): siRNA sense strand
ggaugacuuuggaaucaca

SEQ ID NO: 1295982 - RNA, 19 nt, Homo sapiens
  misc_RNA (1)...(19): siRNA sense strand
gcauugacacccuuaucuu

SEQ ID NO: 1295983 - RNA, 19 nt, Homo sapiens
  misc_RNA (1)...(19): siRNA sense strand
gaagguuucugugcuuugc

SEQ ID NO: 1295984 - RNA, 19 nt, Homo sapiens
  misc_RNA (1)...(19): siRNA sense strand
gcaagucaaggacauugga

SEQ ID NO: 1295985 - RNA, 19 nt, Homo sapiens
  misc_RNA (1)...(19): siRNA sense strand
gaagacguucugaggaugu

SEQ ID NO: 1295986 - RNA, 19 nt, Homo sapiens
  misc_RNA (1)...(19): siRNA sense strand
ggucugacaguuauauuag

SEQ ID NO: 1295987 - RNA, 19 nt, Homo sapiens
  misc_RNA (1)...(19): siRNA sense strand
agaagaaacgacaccauug

SEQ ID NO: 1295988 - RNA, 19 nt, Homo sapiens
  misc_RNA (1)...(19): siRNA sense strand
ggaaauucgguccagucua

SEQ ID NO: 1295989 - RNA, 19 nt, Homo sapiens
  misc_RNA (1)...(19): siRNA sense strand
caacuacuuuagaagaaac

SEQ ID NO: 1295990 - RNA, 19 nt, Homo sapiens
  misc_RNA (1)...(19): siRNA sense strand
cucaaacgcuuggauucua

SEQ ID NO: 1295991 - RNA, 19 nt, Homo sapiens
  misc_RNA (1)...(19): siRNA sense strand
caauuaaagcacaagcaaa

SEQ ID NO: 1295992 - RNA, 19 nt, Homo sapiens
  misc_RNA (1)...(19): siRNA sense strand
gacugugaguucuuuggaa

SEQ ID NO: 1295993 - RNA, 19 nt, Homo sapiens
  misc_RNA (1)...(19): siRNA sense strand
uguuaaggcuguugcuuca

SEQ ID NO: 1295994 - RNA, 19 nt, Homo sapiens
  misc_RNA (1)...(19): siRNA sense strand
acacggagcaaauguuaau

SEQ ID NO: 1295995 - RNA, 19 nt, Homo sapiens
  misc_RNA (1)...(19): siRNA sense strand
cggagcaaauguuaaugga

SEQ ID NO: 1295996 - RNA, 19 nt, Homo sapiens
  misc_RNA (1)...(19): siRNA sense strand
ugugaguucuuuggaauug

SEQ ID NO: 1295997 - RNA, 19 nt, Homo sapiens
  misc_RNA (1)...(19): siRNA sense strand
ggacugugaguucuuugga

SEQ ID NO: 1295998 - RNA, 19 nt, Homo sapiens
  misc_RNA (1)...(19): siRNA sense strand
acaaaguaagcccuguuua

SEQ ID NO: 1295999 - RNA, 19 nt, Homo sapiens
  misc_RNA (1)...(19): siRNA sense strand
gggugcaaaugucaauugu

SEQ ID NO: 1296000 - RNA, 19 nt, Homo sapiens
  misc_RNA (1)...(19): siRNA sense strand
ugcaacuacuuuagaagaa

SEQ ID NO: 1296001 - RNA, 19 nt, Homo sapiens
  misc_RNA (1)...(19): siRNA sense strand
caccagcuguugaaaggau

SEQ ID NO: 1296002 - RNA, 19 nt, Homo sapiens
  misc_RNA (1)...(19): siRNA sense strand
gagcccagauaaaugaacu

SEQ ID NO: 1296003 - RNA, 19 nt, Homo sapiens
  misc_RNA (1)...(19): siRNA sense strand
aaacaaggaaugccaggau

SEQ ID NO: 1296004 - RNA, 19 nt, Homo sapiens
  misc_RNA (1)...(19): siRNA sense strand
caaaauauaaggagugguu

SEQ ID NO: 1296005 - RNA, 19 nt, Homo sapiens
  misc_RNA (1)...(19): siRNA sense strand
uucgauauuucgcuacuuu

SEQ ID NO: 1296006 - RNA, 19 nt, Homo sapiens
  misc_RNA (1)...(19): siRNA sense strand
gaaaaggagcaaacaagga

SEQ ID NO: 1296007 - RNA, 19 nt, Homo sapiens
  misc_RNA (1)...(19): siRNA sense strand
ugagcauacuuauuucauc

SEQ ID NO: 1296008 - RNA, 19 nt, Homo sapiens
  misc_RNA (1)...(19): siRNA sense strand
ugaguucuuuggaauugug

SEQ ID NO: 1296009 - RNA, 19 nt, Homo sapiens
  misc_RNA (1)...(19): siRNA sense strand
ucuacggucugacaguuau

SEQ ID NO: 1296010 - RNA, 19 nt, Homo sapiens
  misc_RNA (1)...(19): siRNA sense strand
ucaaacgcuuggauucuac

SEQ ID NO: 1296011 - RNA, 19 nt, Homo sapiens
  misc_RNA (1)...(19): siRNA sense strand
cgagaaguuuucgauauuu

SEQ ID NO: 1296012 - RNA, 19 nt, Homo sapiens
  misc_RNA (1)...(19): siRNA sense strand
gcuugagcauacuuauuuc

SEQ ID NO: 1296013 - RNA, 19 nt, Homo sapiens
  misc_RNA (1)...(19): siRNA sense strand
cgucuacggucugacaguu

SEQ ID NO: 1296014 - RNA, 19 nt, Homo sapiens
  misc_RNA (1)...(19): siRNA sense strand
gauucuacagcaacauauu

SEQ ID NO: 1296015 - RNA, 19 nt, Homo sapiens
  misc_RNA (1)...(19): siRNA sense strand
acacccuuaucuucacuuu

SEQ ID NO: 1296016 - RNA, 19 nt, Homo sapiens
  misc_RNA (1)...(19): siRNA sense strand
gauccuaaugcaacuacuu

SEQ ID NO: 1296017 - RNA, 19 nt, Homo sapiens
  misc_RNA (1)...(19): siRNA sense strand
aaauauuacuccggaaugg

SEQ ID NO: 1296018 - RNA, 19 nt, Homo sapiens
  misc_RNA (1)...(19): siRNA sense strand
gauguaugaaguuccagaa

SEQ ID NO: 1296019 - RNA, 19 nt, Homo sapiens
  misc_RNA (1)...(19): siRNA sense strand
cggucugacaguuauauua

SEQ ID NO: 1296020 - RNA, 19 nt, Homo sapiens
  misc_RNA (1)...(19): siRNA sense strand
acccuuaucuucacuuugg

SEQ ID NO: 1296021 - RNA, 19 nt, Homo sapiens
  misc_RNA (1)...(19): siRNA sense strand
caguauggcaagcuagaaa

SEQ ID NO: 1296022 - RNA, 19 nt, Homo sapiens
  misc_RNA (1)...(19): siRNA sense strand
cagaagccuacauaauuau

SEQ ID NO: 1296023 - RNA, 19 nt, Homo sapiens
  misc_RNA (1)...(19): siRNA sense strand
agcuugagcauacuuauuu

SEQ ID NO: 1296024 - RNA, 19 nt, Homo sapiens
  misc_RNA (1)...(19): siRNA sense strand
ugacacugggcuaaacaaa

SEQ ID NO: 1296025 - RNA, 19 nt, Homo sapiens
  misc_RNA (1)...(19): siRNA sense strand
acaguuggcaguuaccuau

SEQ ID NO: 1296026 - RNA, 19 nt, Homo sapiens
  misc_RNA (1)...(19): siRNA sense strand
gacuuguuaauaccacuua

SEQ ID NO: 1296027 - RNA, 19 nt, Homo sapiens
  misc_RNA (1)...(19): siRNA sense strand
acuggcagcuauucaagau

SEQ ID NO: 1296028 - RNA, 19 nt, Homo sapiens
  misc_RNA (1)...(19): siRNA sense strand
guucugaggauguaugaag

SEQ ID NO: 1296029 - RNA, 19 nt, Homo sapiens
  misc_RNA (1)...(19): siRNA sense strand
aagaaacgacaccauuguu

SEQ ID NO: 1296030 - RNA, 19 nt, Homo sapiens
  misc_RNA (1)...(19): siRNA sense strand
gagaaguuuucgauauuuc

SEQ ID NO: 1296031 - RNA, 19 nt, Homo sapiens
  misc_RNA (1)...(19): siRNA sense strand
aauauggagcccagauaaa

SEQ ID NO: 1296032 - RNA, 19 nt, Homo sapiens
  misc_RNA (1)...(19): siRNA sense strand
guuggcaguuaccuauuca

SEQ ID NO: 1296033 - RNA, 19 nt, Homo sapiens
  misc_RNA (1)...(19): siRNA sense strand
augaagacguucugaggau

SEQ ID NO: 1296034 - RNA, 19 nt, Homo sapiens
  misc_RNA (1)...(19): siRNA sense strand
uggauucuacagcaacaua

SEQ ID NO: 1296035 - RNA, 19 nt, Homo sapiens
  misc_RNA (1)...(19): siRNA sense strand
gauuugacccacugauucu

SEQ ID NO: 1296036 - RNA, 19 nt, Homo sapiens
  misc_RNA (1)...(19): siRNA sense strand
gaaauucgguccagucuaa

SEQ ID NO: 1296037 - RNA, 19 nt, Homo sapiens
  misc_RNA (1)...(19): siRNA sense strand
ccagaagccuacauaauua

SEQ ID NO: 1296038 - RNA, 19 nt, Homo sapiens
  misc_RNA (1)...(19): siRNA sense strand
gaggaaagguugcucauug

SEQ ID NO: 1296039 - RNA, 19 nt, Homo sapiens
  misc_RNA (1)...(19): siRNA sense strand
gaagauugccuagaaauau

SEQ ID NO: 1296040 - RNA, 19 nt, Homo sapiens
  misc_RNA (1)...(19): siRNA sense strand
cuagaaagcuugagcauac

SEQ ID NO: 1296041 - RNA, 19 nt, Homo sapiens
  misc_RNA (1)...(19): siRNA sense strand
gaaauauggagcccagaua

SEQ ID NO: 1296042 - RNA, 19 nt, Homo sapiens
  misc_RNA (1)...(19): siRNA sense strand
gugcaaaugucaauuguca

SEQ ID NO: 1296043 - RNA, 19 nt, Homo sapiens
  misc_RNA (1)...(19): siRNA sense strand
gcaacuacuuuagaagaaa

SEQ ID NO: 1296044 - RNA, 19 nt, Homo sapiens
  misc_RNA (1)...(19): siRNA sense strand
ggaaucacaccuuuauuug

SEQ ID NO: 1296045 - RNA, 19 nt, Homo sapiens
  misc_RNA (1)...(19): siRNA sense strand
gcaguuaccuauucaugca

SEQ ID NO: 1296046 - RNA, 19 nt, Homo sapiens
  misc_RNA (1)...(19): siRNA sense strand
gcuacacccuuguucauug

SEQ ID NO: 1296047 - RNA, 19 nt, Homo sapiens
  misc_RNA (1)...(19): siRNA sense strand
gaagaaacgacaccauugu

SEQ ID NO: 1296048 - RNA, 19 nt, Homo sapiens
  misc_RNA (1)...(19): siRNA sense strand
gaaagcuugagcauacuua

SEQ ID NO: 1296049 - RNA, 19 nt, Homo sapiens
  misc_RNA (1)...(19): siRNA sense strand
uaucuucacuuuggaguuu

SEQ ID NO: 1296050 - RNA, 19 nt, Homo sapiens
  misc_RNA (1)...(19): siRNA sense strand
ggaaugccaggaugacuuu

SEQ ID NO: 1296051 - RNA, 19 nt, Homo sapiens
  misc_RNA (1)...(19): siRNA sense strand
acaugaagauugccuagaa

SEQ ID NO: 1296052 - RNA, 19 nt, Homo sapiens
  misc_RNA (1)...(19): siRNA sense strand
gaaauauuacuccggaaug

SEQ ID NO: 1296053 - RNA, 19 nt, Homo sapiens
  misc_RNA (1)...(19): siRNA sense strand
cccagaagccuacauaauu

SEQ ID NO: 1296054 - RNA, 19 nt, Homo sapiens
  misc_RNA (1)...(19): siRNA sense strand
gcaauuaaagcacaagcaa

SEQ ID NO: 1296055 - RNA, 19 nt, Homo sapiens
  misc_RNA (1)...(19): siRNA sense strand
acacugggcuaaacaaagu

SEQ ID NO: 1296056 - RNA, 19 nt, Homo sapiens
  misc_RNA (1)...(19): siRNA sense strand
ggacagauagauguguuaa

SEQ ID NO: 1296057 - RNA, 19 nt, Homo sapiens
  misc_RNA (1)...(19): siRNA sense strand
ugaggacaguuggcaguua

SEQ ID NO: 1296058 - RNA, 19 nt, Homo sapiens
  misc_RNA (1)...(19): siRNA sense strand
caggaugacuuuggaauca

SEQ ID NO: 1296059 - RNA, 19 nt, Homo sapiens
  misc_RNA (1)...(19): siRNA sense strand
uggaaucacaccuuuauuu

SEQ ID NO: 1296060 - RNA, 19 nt, Homo sapiens
  misc_RNA (1)...(19): siRNA sense strand
ggauucaguucuccugugu

SEQ ID NO: 1296061 - RNA, 19 nt, Homo sapiens
  misc_RNA (1)...(19): siRNA sense strand
ugaagauugccuagaaaua

SEQ ID NO: 1296062 - RNA, 19 nt, Homo sapiens
  misc_RNA (1)...(19): siRNA sense strand
caugaagauugccuagaaa

SEQ ID NO: 1296063 - RNA, 19 nt, Homo sapiens
  misc_RNA (1)...(19): siRNA sense strand
gaacgucuacggucugaca

SEQ ID NO: 1296064 - RNA, 19 nt, Homo sapiens
  misc_RNA (1)...(19): siRNA sense strand
gaaucacaccuuuauuugu

SEQ ID NO: 1296065 - RNA, 19 nt, Homo sapiens
  misc_RNA (1)...(19): siRNA sense strand
guucauugcugcucaagag

SEQ ID NO: 1296066 - RNA, 19 nt, Homo sapiens
  misc_RNA (1)...(19): siRNA sense strand
gcaaaugucaauugucaag

SEQ ID NO: 1296067 - RNA, 19 nt, Homo sapiens
  misc_RNA (1)...(19): siRNA sense strand
gcaucucgcugcaagucaa

SEQ ID NO: 1296068 - RNA, 19 nt, Homo sapiens
  misc_RNA (1)...(19): siRNA sense strand
ugacccaucuuugucguuu

SEQ ID NO: 1296069 - RNA, 19 nt, Homo sapiens
  misc_RNA (1)...(19): siRNA sense strand
acauuaagaugaagaccuu

SEQ ID NO: 1296070 - RNA, 19 nt, Homo sapiens
  misc_RNA (1)...(19): siRNA sense strand
ggauuugacccacugauuc

SEQ ID NO: 1296071 - RNA, 19 nt, Homo sapiens
  misc_RNA (1)...(19): siRNA sense strand
uagaagaaacgacaccauu

SEQ ID NO: 1296072 - RNA, 19 nt, Homo sapiens
  misc_RNA (1)...(19): siRNA sense strand
gcuagaaagcuugagcaua

SEQ ID NO: 1296073 - RNA, 19 nt, Homo sapiens
  misc_RNA (1)...(19): siRNA sense strand
acagauagauguguuaagg

SEQ ID NO: 1296074 - RNA, 19 nt, Homo sapiens
  misc_RNA (1)...(19): siRNA sense strand
gaaaauggacagauagaug

SEQ ID NO: 1296075 - RNA, 19 nt, Homo sapiens
  misc_RNA (1)...(19): siRNA sense strand
aaauauggagcccagauaa

SEQ ID NO: 1296076 - RNA, 19 nt, Homo sapiens
  misc_RNA (1)...(19): siRNA sense strand
gaacuucauuuggcauacu

SEQ ID NO: 1296077 - RNA, 19 nt, Homo sapiens
  misc_RNA (1)...(19): siRNA sense strand
gaacuggcagcuauucaag

SEQ ID NO: 1296078 - RNA, 19 nt, Homo sapiens
  misc_RNA (1)...(19): siRNA sense strand
gaggauguaugaaguucca

SEQ ID NO: 1296079 - RNA, 19 nt, Homo sapiens
  misc_RNA (1)...(19): siRNA sense strand
gaggacaguuggcaguuac

SEQ ID NO: 1296080 - RNA, 19 nt, Homo sapiens
  misc_RNA (1)...(19): siRNA sense strand
cuuuggaguuuacuaauug

SEQ ID NO: 1296081 - RNA, 19 nt, Homo sapiens
  misc_RNA (1)...(19): siRNA sense strand
ucacuuuggaguuuacuaa

SEQ ID NO: 1296082 - RNA, 19 nt, Homo sapiens
  misc_RNA (1)...(19): siRNA sense strand
ggaugacuuuggaaucaca

SEQ ID NO: 1296083 - RNA, 19 nt, Homo sapiens
  misc_RNA (1)...(19): siRNA sense strand
gcauugacacccuuaucuu

SEQ ID NO: 1296084 - RNA, 19 nt, Homo sapiens
  misc_RNA (1)...(19): siRNA sense strand
gaagguuucugugcuuugc

SEQ ID NO: 1296085 - RNA, 19 nt, Homo sapiens
  misc_RNA (1)...(19): siRNA sense strand
gcaagucaaggacauugga

SEQ ID NO: 1296086 - RNA, 19 nt, Homo sapiens
  misc_RNA (1)...(19): siRNA sense strand
gaagacguucugaggaugu

SEQ ID NO: 1296087 - RNA, 19 nt, Homo sapiens
  misc_RNA (1)...(19): siRNA sense strand
ggucugacaguuauauuag

SEQ ID NO: 1296088 - RNA, 19 nt, Homo sapiens
  misc_RNA (1)...(19): siRNA sense strand
caacuacuuuagaagaaac

SEQ ID NO: 1296089 - RNA, 19 nt, Homo sapiens
  misc_RNA (1)...(19): siRNA sense strand
ggaaauucgguccagucua

SEQ ID NO: 1296090 - RNA, 19 nt, Homo sapiens
  misc_RNA (1)...(19): siRNA sense strand
cucaaacgcuuggauucua

SEQ ID NO: 1296091 - RNA, 19 nt, Homo sapiens
  misc_RNA (1)...(19): siRNA sense strand
caauuaaagcacaagcaaa

SEQ ID NO: 1296092 - RNA, 19 nt, Homo sapiens
  misc_RNA (1)...(19): siRNA sense strand
gacugugaguucuuuggaa

SEQ ID NO: 1296093 - RNA, 19 nt, Homo sapiens
  misc_RNA (1)...(19): siRNA sense strand
agaagaaacgacaccauug

SEQ ID NO: 1296094 - RNA, 19 nt, Homo sapiens
  misc_RNA (1)...(19): siRNA sense strand
uguuaaggcuguugcuuca

SEQ ID NO: 1296095 - RNA, 19 nt, Homo sapiens
  misc_RNA (1)...(19): siRNA sense strand
acacggagcaaauguuaau

SEQ ID NO: 1296096 - RNA, 19 nt, Homo sapiens
  misc_RNA (1)...(19): siRNA sense strand
cggagcaaauguuaaugga

SEQ ID NO: 1296097 - RNA, 19 nt, Homo sapiens
  misc_RNA (1)...(19): siRNA sense strand
ugugaguucuuuggaauug

SEQ ID NO: 1296098 - RNA, 19 nt, Homo sapiens
  misc_RNA (1)...(19): siRNA sense strand
ggacugugaguucuuugga

SEQ ID NO: 1296099 - RNA, 19 nt, Homo sapiens
  misc_RNA (1)...(19): siRNA sense strand
acaaaguaagcccuguuua

SEQ ID NO: 1296100 - RNA, 19 nt, Homo sapiens
  misc_RNA (1)...(19): siRNA sense strand
ugcaacuacuuuagaagaa

SEQ ID NO: 1296101 - RNA, 19 nt, Homo sapiens
  misc_RNA (1)...(19): siRNA sense strand
caccagcuguugaaaggau

SEQ ID NO: 1296102 - RNA, 19 nt, Homo sapiens
  misc_RNA (1)...(19): siRNA sense strand
gagcccagauaaaugaacu

SEQ ID NO: 1296103 - RNA, 19 nt, Homo sapiens
  misc_RNA (1)...(19): siRNA sense strand
gggugcaaaugucaauugu

SEQ ID NO: 1296104 - RNA, 19 nt, Homo sapiens
  misc_RNA (1)...(19): siRNA sense strand
aaacaaggaaugccaggau

SEQ ID NO: 1296105 - RNA, 19 nt, Homo sapiens
  misc_RNA (1)...(19): siRNA sense strand
caaaauauaaggagugguu

SEQ ID NO: 1296106 - RNA, 19 nt, Homo sapiens
  misc_RNA (1)...(19): siRNA sense strand
uucgauauuucgcuacuuu

SEQ ID NO: 1296107 - RNA, 19 nt, Homo sapiens
  misc_RNA (1)...(19): siRNA sense strand
gaaaaggagcaaacaagga

SEQ ID NO: 1296108 - RNA, 19 nt, Homo sapiens
  misc_RNA (1)...(19): siRNA sense strand
ugagcauacuuauuucauc

SEQ ID NO: 1296109 - RNA, 19 nt, Homo sapiens
  misc_RNA (1)...(19): siRNA sense strand
ugaguucuuuggaauugug

SEQ ID NO: 1296110 - RNA, 19 nt, Homo sapiens
  misc_RNA (1)...(19): siRNA sense strand
ucuacggucugacaguuau

SEQ ID NO: 1296111 - RNA, 19 nt, Homo sapiens
  misc_RNA (1)...(19): siRNA sense strand
ucaaacgcuuggauucuac

SEQ ID NO: 1296112 - RNA, 19 nt, Homo sapiens
  misc_RNA (1)...(19): siRNA sense strand
cgagaaguuuucgauauuu

SEQ ID NO: 1296113 - RNA, 19 nt, Homo sapiens
  misc_RNA (1)...(19): siRNA sense strand
gcuugagcauacuuauuuc

SEQ ID NO: 1296114 - RNA, 19 nt, Homo sapiens
  misc_RNA (1)...(19): siRNA sense strand
cgucuacggucugacaguu

SEQ ID NO: 1296115 - RNA, 19 nt, Homo sapiens
  misc_RNA (1)...(19): siRNA sense strand
gauccuaaugcaacuacuu

SEQ ID NO: 1296116 - RNA, 19 nt, Homo sapiens
  misc_RNA (1)...(19): siRNA sense strand
gauucuacagcaacauauu

SEQ ID NO: 1296117 - RNA, 19 nt, Homo sapiens
  misc_RNA (1)...(19): siRNA sense strand
acacccuuaucuucacuuu

SEQ ID NO: 1296118 - RNA, 19 nt, Homo sapiens
  misc_RNA (1)...(19): siRNA sense strand
uaagaugaagaccuuugaa

SEQ ID NO: 1296119 - RNA, 19 nt, Homo sapiens
  misc_RNA (1)...(19): siRNA sense strand
gauguaugaaguuccagaa

SEQ ID NO: 1296120 - RNA, 19 nt, Homo sapiens
  misc_RNA (1)...(19): siRNA sense strand
cggucugacaguuauauua

SEQ ID NO: 1296121 - RNA, 19 nt, Homo sapiens
  misc_RNA (1)...(19): siRNA sense strand
acccuuaucuucacuuugg

SEQ ID NO: 1296122 - RNA, 19 nt, Homo sapiens
  misc_RNA (1)...(19): siRNA sense strand
aaauauuacuccggaaugg

SEQ ID NO: 1296123 - RNA, 19 nt, Homo sapiens
  misc_RNA (1)...(19): siRNA sense strand
caguauggcaagcuagaaa

SEQ ID NO: 1296124 - RNA, 19 nt, Homo sapiens
  misc_RNA (1)...(19): siRNA sense strand
cagaagccuacauaauuau

SEQ ID NO: 1296125 - RNA, 19 nt, Homo sapiens
  misc_RNA (1)...(19): siRNA sense strand
agcuugagcauacuuauuu

SEQ ID NO: 1296126 - RNA, 19 nt, Homo sapiens
  misc_RNA (1)...(19): siRNA sense strand
ugacacugggcuaaacaaa

SEQ ID NO: 1296127 - RNA, 19 nt, Homo sapiens
  misc_RNA (1)...(19): siRNA sense strand
acaguuggcaguuaccuau

SEQ ID NO: 1296128 - RNA, 19 nt, Homo sapiens
  misc_RNA (1)...(19): siRNA sense strand
gacuuguuaauaccacuua

SEQ ID NO: 1296129 - RNA, 19 nt, Homo sapiens
  misc_RNA (1)...(19): siRNA sense strand
acuggcagcuauucaagau

SEQ ID NO: 1296130 - RNA, 19 nt, Homo sapiens
  misc_RNA (1)...(19): siRNA sense strand
guucugaggauguaugaag

SEQ ID NO: 1296131 - RNA, 19 nt, Homo sapiens
  misc_RNA (1)...(19): siRNA sense strand
gagaaguuuucgauauuuc

SEQ ID NO: 1296132 - RNA, 19 nt, Homo sapiens
  misc_RNA (1)...(19): siRNA sense strand
aagaaacgacaccauuguu

SEQ ID NO: 1296133 - RNA, 19 nt, Homo sapiens
  misc_RNA (1)...(19): siRNA sense strand
aauauggagcccagauaaa

SEQ ID NO: 1296134 - RNA, 19 nt, Homo sapiens
  misc_RNA (1)...(19): siRNA sense strand
uggauucuacagcaacaua

SEQ ID NO: 1296135 - RNA, 19 nt, Homo sapiens
  misc_RNA (1)...(19): siRNA sense strand
augaagacguucugaggau

SEQ ID NO: 1296136 - RNA, 19 nt, Homo sapiens
  misc_RNA (1)...(19): siRNA sense strand
gaaauucgguccagucuaa

SEQ ID NO: 1296137 - RNA, 19 nt, Homo sapiens
  misc_RNA (1)...(19): siRNA sense strand
ccagaagccuacauaauua

SEQ ID NO: 1296138 - RNA, 19 nt, Homo sapiens
  misc_RNA (1)...(19): siRNA sense strand
gaggaaagguugcucauug

SEQ ID NO: 1296139 - RNA, 19 nt, Homo sapiens
  misc_RNA (1)...(19): siRNA sense strand
gaagauugccuagaaauau

SEQ ID NO: 1296140 - RNA, 19 nt, Homo sapiens
  misc_RNA (1)...(19): siRNA sense strand
cuagaaagcuugagcauac

SEQ ID NO: 1296141 - RNA, 19 nt, Homo sapiens
  misc_RNA (1)...(19): siRNA sense strand
gaaauauggagcccagaua

SEQ ID NO: 1296142 - RNA, 19 nt, Homo sapiens
  misc_RNA (1)...(19): siRNA sense strand
gugcaaaugucaauuguca

SEQ ID NO: 1296143 - RNA, 19 nt, Homo sapiens
  misc_RNA (1)...(19): siRNA sense strand
gcaacuacuuuagaagaaa

SEQ ID NO: 1296144 - RNA, 19 nt, Homo sapiens
  misc_RNA (1)...(19): siRNA sense strand
ggaaucacaccuuuauuug

SEQ ID NO: 1296145 - RNA, 19 nt, Homo sapiens
  misc_RNA (1)...(19): siRNA sense strand
gcaguuaccuauucaugca

SEQ ID NO: 1296146 - RNA, 19 nt, Homo sapiens
  misc_RNA (1)...(19): siRNA sense strand
gcuacacccuuguucauug

SEQ ID NO: 1296147 - RNA, 19 nt, Homo sapiens
  misc_RNA (1)...(19): siRNA sense strand
gaagaaacgacaccauugu

SEQ ID NO: 1296148 - RNA, 19 nt, Homo sapiens
  misc_RNA (1)...(19): siRNA sense strand
gaaagcuugagcauacuua

SEQ ID NO: 1296149 - RNA, 19 nt, Homo sapiens
  misc_RNA (1)...(19): siRNA sense strand
uaucuucacuuuggaguuu

SEQ ID NO: 1296150 - RNA, 19 nt, Homo sapiens
  misc_RNA (1)...(19): siRNA sense strand
ggaaugccaggaugacuuu

SEQ ID NO: 1296151 - RNA, 19 nt, Homo sapiens
  misc_RNA (1)...(19): siRNA sense strand
acaugaagauugccuagaa

SEQ ID NO: 1296152 - RNA, 19 nt, Homo sapiens
  misc_RNA (1)...(19): siRNA sense strand
gaaauauuacuccggaaug

SEQ ID NO: 1296153 - RNA, 19 nt, Homo sapiens
  misc_RNA (1)...(19): siRNA sense strand
cccagaagccuacauaauu

SEQ ID NO: 1296154 - RNA, 19 nt, Homo sapiens
  misc_RNA (1)...(19): siRNA sense strand
gcaauuaaagcacaagcaa

SEQ ID NO: 1296155 - RNA, 19 nt, Homo sapiens
  misc_RNA (1)...(19): siRNA sense strand
acacugggcuaaacaaagu

SEQ ID NO: 1296156 - RNA, 19 nt, Homo sapiens
  misc_RNA (1)...(19): siRNA sense strand
ggacagauagauguguuaa

SEQ ID NO: 1296157 - RNA, 19 nt, Homo sapiens
  misc_RNA (1)...(19): siRNA sense strand
ugaggacaguuggcaguua

SEQ ID NO: 1296158 - RNA, 19 nt, Homo sapiens
  misc_RNA (1)...(19): siRNA sense strand
caggaugacuuuggaauca

SEQ ID NO: 1296159 - RNA, 19 nt, Homo sapiens
  misc_RNA (1)...(19): siRNA sense strand
uggaaucacaccuuuauuu

SEQ ID NO: 1296160 - RNA, 19 nt, Homo sapiens
  misc_RNA (1)...(19): siRNA sense strand
ggauucaguucuccugugu

SEQ ID NO: 1296161 - RNA, 19 nt, Homo sapiens
  misc_RNA (1)...(19): siRNA sense strand
ugaagauugccuagaaaua

SEQ ID NO: 1296162 - RNA, 19 nt, Homo sapiens
  misc_RNA (1)...(19): siRNA sense strand
caugaagauugccuagaaa

SEQ ID NO: 1296163 - RNA, 19 nt, Homo sapiens
  misc_RNA (1)...(19): siRNA sense strand
gaacgucuacggucugaca

SEQ ID NO: 1296164 - RNA, 19 nt, Homo sapiens
  misc_RNA (1)...(19): siRNA sense strand
gaaucacaccuuuauuugu

SEQ ID NO: 1296165 - RNA, 19 nt, Homo sapiens
  misc_RNA (1)...(19): siRNA sense strand
guucauugcugcucaagag

SEQ ID NO: 1296166 - RNA, 19 nt, Homo sapiens
  misc_RNA (1)...(19): siRNA sense strand
gcaaaugucaauugucaag

SEQ ID NO: 1296167 - RNA, 19 nt, Homo sapiens
  misc_RNA (1)...(19): siRNA sense strand
gcaucucgcugcaagucaa

SEQ ID NO: 1296168 - RNA, 19 nt, Homo sapiens
  misc_RNA (1)...(19): siRNA sense strand
ugacccaucuuugucguuu

SEQ ID NO: 1296169 - RNA, 19 nt, Homo sapiens
  misc_RNA (1)...(19): siRNA sense strand
ggauuugacccacugauuc

SEQ ID NO: 1296170 - RNA, 19 nt, Homo sapiens
  misc_RNA (1)...(19): siRNA sense strand
uagaagaaacgacaccauu

SEQ ID NO: 1296171 - RNA, 19 nt, Homo sapiens
  misc_RNA (1)...(19): siRNA sense strand
gcuagaaagcuugagcaua

SEQ ID NO: 1296172 - RNA, 19 nt, Homo sapiens
  misc_RNA (1)...(19): siRNA sense strand
acagauagauguguuaagg

SEQ ID NO: 1296173 - RNA, 19 nt, Homo sapiens
  misc_RNA (1)...(19): siRNA sense strand
gaaaauggacagauagaug

SEQ ID NO: 1296174 - RNA, 19 nt, Homo sapiens
  misc_RNA (1)...(19): siRNA sense strand
aaauauggagcccagauaa

SEQ ID NO: 1296175 - RNA, 19 nt, Homo sapiens
  misc_RNA (1)...(19): siRNA sense strand
gaacuucauuuggcauacu

SEQ ID NO: 1296176 - RNA, 19 nt, Homo sapiens
  misc_RNA (1)...(19): siRNA sense strand
gaacuggcagcuauucaag

SEQ ID NO: 1296177 - RNA, 19 nt, Homo sapiens
  misc_RNA (1)...(19): siRNA sense strand
gaggauguaugaaguucca

SEQ ID NO: 1296178 - RNA, 19 nt, Homo sapiens
  misc_RNA (1)...(19): siRNA sense strand
gaggacaguuggcaguuac

SEQ ID NO: 1296179 - RNA, 19 nt, Homo sapiens
  misc_RNA (1)...(19): siRNA sense strand
cuuuggaguuuacuaauug

SEQ ID NO: 1296180 - RNA, 19 nt, Homo sapiens
  misc_RNA (1)...(19): siRNA sense strand
ucacuuuggaguuuacuaa

SEQ ID NO: 1296181 - RNA, 19 nt, Homo sapiens
  misc_RNA (1)...(19): siRNA sense strand
ggaugacuuuggaaucaca

SEQ ID NO: 1296182 - RNA, 19 nt, Homo sapiens
  misc_RNA (1)...(19): siRNA sense strand
gcauugacacccuuaucuu

SEQ ID NO: 1296183 - RNA, 19 nt, Homo sapiens
  misc_RNA (1)...(19): siRNA sense strand
gaagguuucugugcuuugc

SEQ ID NO: 1296184 - RNA, 19 nt, Homo sapiens
  misc_RNA (1)...(19): siRNA sense strand
gcaagucaaggacauugga

SEQ ID NO: 1296185 - RNA, 19 nt, Homo sapiens
  misc_RNA (1)...(19): siRNA sense strand
gaagacguucugaggaugu

SEQ ID NO: 1296186 - RNA, 19 nt, Homo sapiens
  misc_RNA (1)...(19): siRNA sense strand
ggucugacaguuauauuag

SEQ ID NO: 1296187 - RNA, 19 nt, Homo sapiens
  misc_RNA (1)...(19): siRNA sense strand
agaagaaacgacaccauug

SEQ ID NO: 1296188 - RNA, 19 nt, Homo sapiens
  misc_RNA (1)...(19): siRNA sense strand
ggaaauucgguccagucua

SEQ ID NO: 1296189 - RNA, 19 nt, Homo sapiens
  misc_RNA (1)...(19): siRNA sense strand
caacuacuuuagaagaaac

SEQ ID NO: 1296190 - RNA, 19 nt, Homo sapiens
  misc_RNA (1)...(19): siRNA sense strand
cucaaacgcuuggauucua

SEQ ID NO: 1296191 - RNA, 19 nt, Homo sapiens
  misc_RNA (1)...(19): siRNA sense strand
caauuaaagcacaagcaaa

SEQ ID NO: 1296192 - RNA, 19 nt, Homo sapiens
  misc_RNA (1)...(19): siRNA sense strand
gacugugaguucuuuggaa

SEQ ID NO: 1296193 - RNA, 19 nt, Homo sapiens
  misc_RNA (1)...(19): siRNA sense strand
uguuaaggcuguugcuuca

SEQ ID NO: 1296194 - RNA, 19 nt, Homo sapiens
  misc_RNA (1)...(19): siRNA sense strand
acacggagcaaauguuaau

SEQ ID NO: 1296195 - RNA, 19 nt, Homo sapiens
  misc_RNA (1)...(19): siRNA sense strand
cggagcaaauguuaaugga

SEQ ID NO: 1296196 - RNA, 19 nt, Homo sapiens
  misc_RNA (1)...(19): siRNA sense strand
ugugaguucuuuggaauug

SEQ ID NO: 1296197 - RNA, 19 nt, Homo sapiens
  misc_RNA (1)...(19): siRNA sense strand
ggacugugaguucuuugga

SEQ ID NO: 1296198 - RNA, 19 nt, Homo sapiens
  misc_RNA (1)...(19): siRNA sense strand
acaaaguaagcccuguuua

SEQ ID NO: 1296199 - RNA, 19 nt, Homo sapiens
  misc_RNA (1)...(19): siRNA sense strand
gggugcaaaugucaauugu

SEQ ID NO: 1296200 - RNA, 19 nt, Homo sapiens
  misc_RNA (1)...(19): siRNA sense strand
ugcaacuacuuuagaagaa

SEQ ID NO: 1296201 - RNA, 19 nt, Homo sapiens
  misc_RNA (1)...(19): siRNA sense strand
caccagcuguugaaaggau

SEQ ID NO: 1296202 - RNA, 19 nt, Homo sapiens
  misc_RNA (1)...(19): siRNA sense strand
gagcccagauaaaugaacu

SEQ ID NO: 1296203 - RNA, 19 nt, Homo sapiens
  misc_RNA (1)...(19): siRNA sense strand
aaacaaggaaugccaggau

SEQ ID NO: 1296204 - RNA, 19 nt, Homo sapiens
  misc_RNA (1)...(19): siRNA sense strand
caaaauauaaggagugguu

SEQ ID NO: 1296205 - RNA, 19 nt, Homo sapiens
  misc_RNA (1)...(19): siRNA sense strand
uucgauauuucgcuacuuu

SEQ ID NO: 1296206 - RNA, 19 nt, Homo sapiens
  misc_RNA (1)...(19): siRNA sense strand
gaaaaggagcaaacaagga

SEQ ID NO: 1296207 - RNA, 19 nt, Homo sapiens
  misc_RNA (1)...(19): siRNA sense strand
ugagcauacuuauuucauc

SEQ ID NO: 1296208 - RNA, 19 nt, Homo sapiens
  misc_RNA (1)...(19): siRNA sense strand
ugaguucuuuggaauugug

SEQ ID NO: 1296209 - RNA, 19 nt, Homo sapiens
  misc_RNA (1)...(19): siRNA sense strand
ucuacggucugacaguuau

SEQ ID NO: 1296210 - RNA, 19 nt, Homo sapiens
  misc_RNA (1)...(19): siRNA sense strand
ucaaacgcuuggauucuac

SEQ ID NO: 1296211 - RNA, 19 nt, Homo sapiens
  misc_RNA (1)...(19): siRNA sense strand
cgagaaguuuucgauauuu

SEQ ID NO: 1296212 - RNA, 19 nt, Homo sapiens
  misc_RNA (1)...(19): siRNA sense strand
gcuugagcauacuuauuuc

SEQ ID NO: 1296213 - RNA, 19 nt, Homo sapiens
  misc_RNA (1)...(19): siRNA sense strand
cgucuacggucugacaguu

SEQ ID NO: 1296214 - RNA, 19 nt, Homo sapiens
  misc_RNA (1)...(19): siRNA sense strand
gauucuacagcaacauauu

SEQ ID NO: 1296215 - RNA, 19 nt, Homo sapiens
  misc_RNA (1)...(19): siRNA sense strand
acacccuuaucuucacuuu

SEQ ID NO: 1296216 - RNA, 19 nt, Homo sapiens
  misc_RNA (1)...(19): siRNA sense strand
gauccuaaugcaacuacuu

SEQ ID NO: 1296217 - RNA, 19 nt, Homo sapiens
  misc_RNA (1)...(19): siRNA sense strand
aaauauuacuccggaaugg

SEQ ID NO: 1296218 - RNA, 19 nt, Homo sapiens
  misc_RNA (1)...(19): siRNA sense strand
gauguaugaaguuccagaa

SEQ ID NO: 1296219 - RNA, 19 nt, Homo sapiens
  misc_RNA (1)...(19): siRNA sense strand
cggucugacaguuauauua

SEQ ID NO: 1296220 - RNA, 19 nt, Homo sapiens
  misc_RNA (1)...(19): siRNA sense strand
acccuuaucuucacuuugg

SEQ ID NO: 1296221 - RNA, 19 nt, Homo sapiens
  misc_RNA (1)...(19): siRNA sense strand
caguauggcaagcuagaaa

SEQ ID NO: 1296222 - RNA, 19 nt, Homo sapiens
  misc_RNA (1)...(19): siRNA sense strand
cagaagccuacauaauuau

SEQ ID NO: 1296223 - RNA, 19 nt, Homo sapiens
  misc_RNA (1)...(19): siRNA sense strand
agcuugagcauacuuauuu

SEQ ID NO: 1296224 - RNA, 19 nt, Homo sapiens
  misc_RNA (1)...(19): siRNA sense strand
ugacacugggcuaaacaaa

SEQ ID NO: 1296225 - RNA, 19 nt, Homo sapiens
  misc_RNA (1)...(19): siRNA sense strand
acaguuggcaguuaccuau

SEQ ID NO: 1296226 - RNA, 19 nt, Homo sapiens
  misc_RNA (1)...(19): siRNA sense strand
gacuuguuaauaccacuua

SEQ ID NO: 1296227 - RNA, 19 nt, Homo sapiens
  misc_RNA (1)...(19): siRNA sense strand
acuggcagcuauucaagau

SEQ ID NO: 1296228 - RNA, 19 nt, Homo sapiens
  misc_RNA (1)...(19): siRNA sense strand
guucugaggauguaugaag

SEQ ID NO: 1296229 - RNA, 19 nt, Homo sapiens
  misc_RNA (1)...(19): siRNA sense strand
aagaaacgacaccauuguu

SEQ ID NO: 1296230 - RNA, 19 nt, Homo sapiens
  misc_RNA (1)...(19): siRNA sense strand
gagaaguuuucgauauuuc

SEQ ID NO: 1296231 - RNA, 19 nt, Homo sapiens
  misc_RNA (1)...(19): siRNA sense strand
aauauggagcccagauaaa

SEQ ID NO: 1296232 - RNA, 19 nt, Homo sapiens
  misc_RNA (1)...(19): siRNA sense strand
guuggcaguuaccuauuca

SEQ ID NO: 1296233 - RNA, 19 nt, Homo sapiens
  misc_RNA (1)...(19): siRNA sense strand
augaagacguucugaggau

SEQ ID NO: 1296234 - RNA, 19 nt, Homo sapiens
  misc_RNA (1)...(19): siRNA sense strand
uggauucuacagcaacaua

SEQ ID NO: 1296235 - RNA, 19 nt, Homo sapiens
  misc_RNA (1)...(19): siRNA sense strand
gauuugacccacugauucu

SEQ ID NO: 1296236 - RNA, 19 nt, Homo sapiens
  misc_RNA (1)...(19): siRNA sense strand
gaacaaagcccggaagaag

SEQ ID NO: 1296237 - RNA, 19 nt, Homo sapiens
  misc_RNA (1)...(19): siRNA sense strand
ccaacaagcuggcggagaa

SEQ ID NO: 1296238 - RNA, 19 nt, Homo sapiens
  misc_RNA (1)...(19): siRNA sense strand
ugaagaagcgggagaagua

SEQ ID NO: 1296239 - RNA, 19 nt, Homo sapiens
  misc_RNA (1)...(19): siRNA sense strand
caacgaaggugauggugau

SEQ ID NO: 1296240 - RNA, 19 nt, Homo sapiens
  misc_RNA (1)...(19): siRNA sense strand
cagcagaccucagucauug

SEQ ID NO: 1296241 - RNA, 19 nt, Homo sapiens
  misc_RNA (1)...(19): siRNA sense strand
gaaggaaggagauuacguu

SEQ ID NO: 1296242 - RNA, 19 nt, Homo sapiens
  misc_RNA (1)...(19): siRNA sense strand
ccuugaagcuggaggauaa

SEQ ID NO: 1296243 - RNA, 19 nt, Homo sapiens
  misc_RNA (1)...(19): siRNA sense strand
gagcuuggcugacuuuagg

SEQ ID NO: 1296244 - RNA, 19 nt, Homo sapiens
  misc_RNA (1)...(19): siRNA sense strand
acaauaagcccaacuacaa

SEQ ID NO: 1296245 - RNA, 19 nt, Homo sapiens
  misc_RNA (1)...(19): siRNA sense strand
ucaacaaguuccgugaaua

SEQ ID NO: 1296246 - RNA, 19 nt, Homo sapiens
  misc_RNA (1)...(19): siRNA sense strand
ggaacacuguagagcguuu

SEQ ID NO: 1296247 - RNA, 19 nt, Homo sapiens
  misc_RNA (1)...(19): siRNA sense strand
uaucaaagacaucagguuu

SEQ ID NO: 1296248 - RNA, 19 nt, Homo sapiens
  misc_RNA (1)...(19): siRNA sense strand
ccaagcgccuggccauuau

SEQ ID NO: 1296249 - RNA, 19 nt, Homo sapiens
  misc_RNA (1)...(19): siRNA sense strand
cgaaggugauggugaugaa

SEQ ID NO: 1296250 - RNA, 19 nt, Homo sapiens
  misc_RNA (1)...(19): siRNA sense strand
gaagaagaaguaugaacga

SEQ ID NO: 1296251 - RNA, 19 nt, Homo sapiens
  misc_RNA (1)...(19): siRNA sense strand
cgacagacguggacuacag

SEQ ID NO: 1296252 - RNA, 19 nt, Homo sapiens
  misc_RNA (1)...(19): siRNA sense strand
ccauuaugaugaugaagaa

SEQ ID NO: 1296253 - RNA, 19 nt, Homo sapiens
  misc_RNA (1)...(19): siRNA sense strand
caaguuccgugaauacaag

SEQ ID NO: 1296254 - RNA, 19 nt, Homo sapiens
  misc_RNA (1)...(19): siRNA sense strand
caauaagcccaacuacaaa

SEQ ID NO: 1296255 - RNA, 19 nt, Homo sapiens
  misc_RNA (1)...(19): siRNA sense strand
aaacacaagaagaagguua

SEQ ID NO: 1296256 - RNA, 19 nt, Homo sapiens
  misc_RNA (1)...(19): siRNA sense strand
gcagcagaccucagucauu

SEQ ID NO: 1296257 - RNA, 19 nt, Homo sapiens
  misc_RNA (1)...(19): siRNA sense strand
ucaaaggcauuuacuacca

SEQ ID NO: 1296258 - RNA, 19 nt, Homo sapiens
  misc_RNA (1)...(19): siRNA sense strand
gcccuggccuucaucauca

SEQ ID NO: 1296259 - RNA, 19 nt, Homo sapiens
  misc_RNA (1)...(19): siRNA sense strand
ucaaagacaucagguuucu

SEQ ID NO: 1296260 - RNA, 19 nt, Homo sapiens
  misc_RNA (1)...(19): siRNA sense strand
ggaagaagcccagggugau

SEQ ID NO: 1296261 - RNA, 19 nt, Homo sapiens
  misc_RNA (1)...(19): siRNA sense strand
gcggugaggucugagaaga

SEQ ID NO: 1296262 - RNA, 19 nt, Homo sapiens
  misc_RNA (1)...(19): siRNA sense strand
gaacccaaacacaagaaga

SEQ ID NO: 1296263 - RNA, 19 nt, Homo sapiens
  misc_RNA (1)...(19): siRNA sense strand
gaguucaugcacuacauua

SEQ ID NO: 1296264 - RNA, 19 nt, Homo sapiens
  misc_RNA (1)...(19): siRNA sense strand
acaagaagaagguuaacaa

SEQ ID NO: 1296265 - RNA, 19 nt, Homo sapiens
  misc_RNA (1)...(19): siRNA sense strand
cagaagaggaggaggaaga

SEQ ID NO: 1296266 - RNA, 19 nt, Homo sapiens
  misc_RNA (1)...(19): siRNA sense strand
gaacacuguagagcguuua

SEQ ID NO: 1296267 - RNA, 19 nt, Homo sapiens
  misc_RNA (1)...(19): siRNA sense strand
caacaaguuccgugaauac

SEQ ID NO: 1296268 - RNA, 19 nt, Homo sapiens
  misc_RNA (1)...(19): siRNA sense strand
ccacaccuuucacccuuug

SEQ ID NO: 1296269 - RNA, 19 nt, Homo sapiens
  misc_RNA (1)...(19): siRNA sense strand
ggaacaaagcccggaagaa

SEQ ID NO: 1296270 - RNA, 19 nt, Homo sapiens
  misc_RNA (1)...(19): siRNA sense strand
gcccgaacguuuuaccuua

SEQ ID NO: 1296271 - RNA, 19 nt, Homo sapiens
  misc_RNA (1)...(19): siRNA sense strand
gaagaagcccagggugaug

SEQ ID NO: 1296272 - RNA, 19 nt, Homo sapiens
  misc_RNA (1)...(19): siRNA sense strand
ggaagaggacgacaacaac

SEQ ID NO: 1296273 - RNA, 19 nt, Homo sapiens
  misc_RNA (1)...(19): siRNA sense strand
ccgcaucacccaucagauu

SEQ ID NO: 1296274 - RNA, 19 nt, Homo sapiens
  misc_RNA (1)...(19): siRNA sense strand
gggaagagcgaguggaaca

SEQ ID NO: 1296275 - RNA, 19 nt, Homo sapiens
  misc_RNA (1)...(19): siRNA sense strand
caucaaaggcauuuacuac

SEQ ID NO: 1296276 - RNA, 19 nt, Homo sapiens
  misc_RNA (1)...(19): siRNA sense strand
gucaacaaguuccgugaau

SEQ ID NO: 1296277 - RNA, 19 nt, Homo sapiens
  misc_RNA (1)...(19): siRNA sense strand
gcagaggcugguucagaaa

SEQ ID NO: 1296278 - RNA, 19 nt, Homo sapiens
  misc_RNA (1)...(19): siRNA sense strand
ugcagaggcugguucagaa

SEQ ID NO: 1296279 - RNA, 19 nt, Homo sapiens
  misc_RNA (1)...(19): siRNA sense strand
cuacaucacccggaacaaa

SEQ ID NO: 1296280 - RNA, 19 nt, Homo sapiens
  misc_RNA (1)...(19): siRNA sense strand
gcggaaagcccacgaugag

SEQ ID NO: 1296281 - RNA, 19 nt, Homo sapiens
  misc_RNA (1)...(19): siRNA sense strand
gacaauaagcccaacuaca

SEQ ID NO: 1296282 - RNA, 19 nt, Homo sapiens
  misc_RNA (1)...(19): siRNA sense strand
caaacucgaccacaucauc

SEQ ID NO: 1296283 - RNA, 19 nt, Homo sapiens
  misc_RNA (1)...(19): siRNA sense strand
ggugaggucugagaagaag

SEQ ID NO: 1296284 - RNA, 19 nt, Homo sapiens
  misc_RNA (1)...(19): siRNA sense strand
ggaguucaugcacuacauu

SEQ ID NO: 1296285 - RNA, 19 nt, Homo sapiens
  misc_RNA (1)...(19): siRNA sense strand
caacaacgaaggugauggu

SEQ ID NO: 1296286 - RNA, 19 nt, Homo sapiens
  misc_RNA (1)...(19): siRNA sense strand
gccuugagaagaagaagua

SEQ ID NO: 1296287 - RNA, 19 nt, Homo sapiens
  misc_RNA (1)...(19): siRNA sense strand
uacagcagcccgaacguuu

SEQ ID NO: 1296288 - RNA, 19 nt, Homo sapiens
  misc_RNA (1)...(19): siRNA sense strand
gaggcucggccaccaacua

SEQ ID NO: 1296289 - RNA, 19 nt, Homo sapiens
  misc_RNA (1)...(19): siRNA sense strand
ccuaugccuucucccauga

SEQ ID NO: 1296290 - RNA, 19 nt, Homo sapiens
  misc_RNA (1)...(19): siRNA sense strand
gacgaugcccucuccaugu

SEQ ID NO: 1296291 - RNA, 19 nt, Homo sapiens
  misc_RNA (1)...(19): siRNA sense strand
uugagaagaagaaguauga

SEQ ID NO: 1296292 - RNA, 19 nt, Homo sapiens
  misc_RNA (1)...(19): siRNA sense strand
caagaagaagguuaacaag

SEQ ID NO: 1296293 - RNA, 19 nt, Homo sapiens
  misc_RNA (1)...(19): siRNA sense strand
uuugucaacuuccgccuuu

SEQ ID NO: 1296294 - RNA, 19 nt, Homo sapiens
  misc_RNA (1)...(19): siRNA sense strand
gcugggcuuugucaacuuc

SEQ ID NO: 1296295 - RNA, 19 nt, Homo sapiens
  misc_RNA (1)...(19): siRNA sense strand
ggaggaagaggacgacaac

SEQ ID NO: 1296296 - RNA, 19 nt, Homo sapiens
  misc_RNA (1)...(19): siRNA sense strand
guaccagaagaucauguuu

SEQ ID NO: 1296297 - RNA, 19 nt, Homo sapiens
  misc_RNA (1)...(19): siRNA sense strand
gccauuaugaugaugaaga

SEQ ID NO: 1296298 - RNA, 19 nt, Homo sapiens
  misc_RNA (1)...(19): siRNA sense strand
gagaagaagaaguaugaac

SEQ ID NO: 1296299 - RNA, 19 nt, Homo sapiens
  misc_RNA (1)...(19): siRNA sense strand
cgagaguuguauggagaaa

SEQ ID NO: 1296300 - RNA, 19 nt, Homo sapiens
  misc_RNA (1)...(19): siRNA sense strand
gcaaggucuuccuguccau

SEQ ID NO: 1296301 - RNA, 19 nt, Homo sapiens
  misc_RNA (1)...(19): siRNA sense strand
ggacaauaagcccaacuac

SEQ ID NO: 1296302 - RNA, 19 nt, Homo sapiens
  misc_RNA (1)...(19): siRNA sense strand
guucaugcacuacauuauc

SEQ ID NO: 1296303 - RNA, 19 nt, Homo sapiens
  misc_RNA (1)...(19): siRNA sense strand
gaaggcaaggccggaguga

SEQ ID NO: 1296304 - RNA, 19 nt, Homo sapiens
  misc_RNA (1)...(19): siRNA sense strand
ggacgacaacaacgaaggu

SEQ ID NO: 1296305 - RNA, 19 nt, Homo sapiens
  misc_RNA (1)...(19): siRNA sense strand
ccgagaaggaaggagauua

SEQ ID NO: 1296306 - RNA, 19 nt, Homo sapiens
  misc_RNA (1)...(19): siRNA sense strand
ccaaacacaagaagaaggu

SEQ ID NO: 1296307 - RNA, 19 nt, Homo sapiens
  misc_RNA (1)...(19): siRNA sense strand
ccacgaacccauugucaac

SEQ ID NO: 1296308 - RNA, 19 nt, Homo sapiens
  misc_RNA (1)...(19): siRNA sense strand
gcgccuggccauuaugaug

SEQ ID NO: 1296309 - RNA, 19 nt, Homo sapiens
  misc_RNA (1)...(19): siRNA sense strand
cgacaacaacgaaggugau

SEQ ID NO: 1296310 - RNA, 19 nt, Homo sapiens
  misc_RNA (1)...(19): siRNA sense strand
aggccgagguggaugaguu

SEQ ID NO: 1296311 - RNA, 19 nt, Homo sapiens
  misc_RNA (1)...(19): siRNA sense strand
cuacaaacucgaccacauc

SEQ ID NO: 1296312 - RNA, 19 nt, Homo sapiens
  misc_RNA (1)...(19): siRNA sense strand
aggcggcugugcauucuga

SEQ ID NO: 1296313 - RNA, 19 nt, Homo sapiens
  misc_RNA (1)...(19): siRNA sense strand
accagaagaucauguuugg

SEQ ID NO: 1296314 - RNA, 19 nt, Homo sapiens
  misc_RNA (1)...(19): siRNA sense strand
gcugagcuuggcugacuuu

SEQ ID NO: 1296315 - RNA, 19 nt, Homo sapiens
  misc_RNA (1)...(19): siRNA sense strand
ggccaccuaugacgucaca

SEQ ID NO: 1296316 - RNA, 19 nt, Homo sapiens
  misc_RNA (1)...(19): siRNA sense strand
gaugucagcgcaggaggaa

SEQ ID NO: 1296317 - RNA, 19 nt, Homo sapiens
  misc_RNA (1)...(19): siRNA sense strand
ccacgcugcugggcuuugu

SEQ ID NO: 1296318 - RNA, 19 nt, Homo sapiens
  misc_RNA (1)...(19): siRNA sense strand
ccaucaaaggcauuuacua

SEQ ID NO: 1296319 - RNA, 19 nt, Homo sapiens
  misc_RNA (1)...(19): siRNA sense strand
caucaucaaggaacgguau

SEQ ID NO: 1296320 - RNA, 19 nt, Homo sapiens
  misc_RNA (1)...(19): siRNA sense strand
cguuuuaccuuaucaaaga

SEQ ID NO: 1296321 - RNA, 19 nt, Homo sapiens
  misc_RNA (1)...(19): siRNA sense strand
ugucagcgcaggaggaaga

SEQ ID NO: 1296322 - RNA, 19 nt, Homo sapiens
  misc_RNA (1)...(19): siRNA sense strand
aagaucauguuuggcaaga

SEQ ID NO: 1296323 - RNA, 19 nt, Homo sapiens
  misc_RNA (1)...(19): siRNA sense strand
cgagaaggaaggagauuac

SEQ ID NO: 1296324 - RNA, 19 nt, Homo sapiens
  misc_RNA (1)...(19): siRNA sense strand
gucacagacucccgcauca

SEQ ID NO: 1296325 - RNA, 19 nt, Homo sapiens
  misc_RNA (1)...(19): siRNA sense strand
ccaccuaugacgucacaga

SEQ ID NO: 1296326 - RNA, 19 nt, Homo sapiens
  misc_RNA (1)...(19): siRNA sense strand
aaacucgaccacaucauca

SEQ ID NO: 1296327 - RNA, 19 nt, Homo sapiens
  misc_RNA (1)...(19): siRNA sense strand
cugagaagaaggccaagaa

SEQ ID NO: 1296328 - RNA, 19 nt, Homo sapiens
  misc_RNA (1)...(19): siRNA sense strand
uaccagaagaucauguuug

SEQ ID NO: 1296329 - RNA, 19 nt, Homo sapiens
  misc_RNA (1)...(19): siRNA sense strand
gaagaagcgggagaaguac

SEQ ID NO: 1296330 - RNA, 19 nt, Homo sapiens
  misc_RNA (1)...(19): siRNA sense strand
gaagaugcagaggcugguu

SEQ ID NO: 1296331 - RNA, 19 nt, Homo sapiens
  misc_RNA (1)...(19): siRNA sense strand
cuguagagcguuuaaagga

SEQ ID NO: 1296332 - RNA, 19 nt, Homo sapiens
  misc_RNA (1)...(19): siRNA sense strand
ggaggaggaggaagaugca

SEQ ID NO: 1296333 - RNA, 19 nt, Homo sapiens
  misc_RNA (1)...(19): siRNA sense strand
aggaagaggacgacaacaa

SEQ ID NO: 1296334 - RNA, 19 nt, Homo sapiens
  misc_RNA (1)...(19): siRNA sense strand
ggucuuccuguccaucaaa

SEQ ID NO: 1296335 - RNA, 19 nt, Homo sapiens
  misc_RNA (1)...(19): siRNA sense strand
cccaugaacccaaacacaa

SEQ ID NO: 1296336 - RNA, 19 nt, Homo sapiens
  misc_RNA (1)...(19): siRNA sense strand
gaaggacgagguagcucua

SEQ ID NO: 1296337 - RNA, 19 nt, Homo sapiens
  misc_RNA (1)...(19): siRNA sense strand
gaaggacgagguagcucua

SEQ ID NO: 1296338 - RNA, 19 nt, Homo sapiens
  misc_RNA (1)...(19): siRNA sense strand
gaacugcagcgaguacuuc

SEQ ID NO: 1296339 - RNA, 19 nt, Homo sapiens
  misc_RNA (1)...(19): siRNA sense strand
gccggcaucuucuuucaug

SEQ ID NO: 1296340 - RNA, 19 nt, Homo sapiens
  misc_RNA (1)...(19): siRNA sense strand
gcgaguacuucccgcuguu

SEQ ID NO: 1296341 - RNA, 19 nt, Homo sapiens
  misc_RNA (1)...(19): siRNA sense strand
cggcaucuucuuucaugaa

SEQ ID NO: 1296342 - RNA, 19 nt, Homo sapiens
  misc_RNA (1)...(19): siRNA sense strand
gaugaagccugccugauug

SEQ ID NO: 1296343 - RNA, 19 nt, Homo sapiens
  misc_RNA (1)...(19): siRNA sense strand
gaacagacgaguccaaguu

SEQ ID NO: 1296344 - RNA, 19 nt, Homo sapiens
  misc_RNA (1)...(19): siRNA sense strand
ugaaaugucucaagaauac

SEQ ID NO: 1296345 - RNA, 19 nt, Homo sapiens
  misc_RNA (1)...(19): siRNA sense strand
gcacaaacguggacauguc

SEQ ID NO: 1296346 - RNA, 19 nt, Homo sapiens
  misc_RNA (1)...(19): siRNA sense strand
cuacaaagcagaauucaaa

SEQ ID NO: 1296347 - RNA, 19 nt, Homo sapiens
  misc_RNA (1)...(19): siRNA sense strand
ggaagauucugcugaagau

SEQ ID NO: 1296348 - RNA, 19 nt, Homo sapiens
  misc_RNA (1)...(19): siRNA sense strand
gaagaucugugguggcaau

SEQ ID NO: 1296349 - RNA, 19 nt, Homo sapiens
  misc_RNA (1)...(19): siRNA sense strand
aaacagagccuacaaagca

SEQ ID NO: 1296350 - RNA, 19 nt, Homo sapiens
  misc_RNA (1)...(19): siRNA sense strand
ggugaaaugucucaagaau

SEQ ID NO: 1296351 - RNA, 19 nt, Homo sapiens
  misc_RNA (1)...(19): siRNA sense strand
gagcacauccgagaauuaa

SEQ ID NO: 1296352 - RNA, 19 nt, Homo sapiens
  misc_RNA (1)...(19): siRNA sense strand
gacaucagaucagaguaua

SEQ ID NO: 1296353 - RNA, 19 nt, Homo sapiens
  misc_RNA (1)...(19): siRNA sense strand
gaucugaaaucugaacugu

SEQ ID NO: 1296354 - RNA, 19 nt, Homo sapiens
  misc_RNA (1)...(19): siRNA sense strand
ucugaaaucugaacuguca

SEQ ID NO: 1296355 - RNA, 19 nt, Homo sapiens
  misc_RNA (1)...(19): siRNA sense strand
ggacaucagaucagaguau

SEQ ID NO: 1296356 - RNA, 19 nt, Homo sapiens
  misc_RNA (1)...(19): siRNA sense strand
ucaggaaacuuugagaaga

SEQ ID NO: 1296357 - RNA, 19 nt, Homo sapiens
  misc_RNA (1)...(19): siRNA sense strand
ccaguccucuuugacauuu

SEQ ID NO: 1296358 - RNA, 19 nt, Homo sapiens
  misc_RNA (1)...(19): siRNA sense strand
ccuccaggaugcccucaua

SEQ ID NO: 1296359 - RNA, 19 nt, Homo sapiens
  misc_RNA (1)...(19): siRNA sense strand
guggugaaaugucucaaga

SEQ ID NO: 1296360 - RNA, 19 nt, Homo sapiens
  misc_RNA (1)...(19): siRNA sense strand
ugaugaagccugccugauu

SEQ ID NO: 1296361 - RNA, 19 nt, Homo sapiens
  misc_RNA (1)...(19): siRNA sense strand
gauccuacuuuccuucaag

SEQ ID NO: 1296362 - RNA, 19 nt, Homo sapiens
  misc_RNA (1)...(19): siRNA sense strand
gugaaaugucucaagaaua

SEQ ID NO: 1296363 - RNA, 19 nt, Homo sapiens
  misc_RNA (1)...(19): siRNA sense strand
gaacugucaggaaacuuug

SEQ ID NO: 1296364 - RNA, 19 nt, Homo sapiens
  misc_RNA (1)...(19): siRNA sense strand
gcacauccgagaauuaaac

SEQ ID NO: 1296365 - RNA, 19 nt, Homo sapiens
  misc_RNA (1)...(19): siRNA sense strand
gauaaaggaagccaucaag

SEQ ID NO: 1296366 - RNA, 19 nt, Homo sapiens
  misc_RNA (1)...(19): siRNA sense strand
ggcagcagauccuacuuuc

SEQ ID NO: 1296367 - RNA, 19 nt, Homo sapiens
  misc_RNA (1)...(19): siRNA sense strand
gagaugcccaggagcugua

SEQ ID NO: 1296368 - RNA, 19 nt, Homo sapiens
  misc_RNA (1)...(19): siRNA sense strand
caacaugcccaaccuguac

SEQ ID NO: 1296369 - RNA, 19 nt, Homo sapiens
  misc_RNA (1)...(19): siRNA sense strand
gggaaaccgugaugaaagc

SEQ ID NO: 1296370 - RNA, 19 nt, Homo sapiens
  misc_RNA (1)...(19): siRNA sense strand
ugaacugucaggaaacuuu

SEQ ID NO: 1296371 - RNA, 19 nt, Homo sapiens
  misc_RNA (1)...(19): siRNA sense strand
gaagccugccugauugaga

SEQ ID NO: 1296372 - RNA, 19 nt, Homo sapiens
  misc_RNA (1)...(19): siRNA sense strand
ugagcacauccgagaauua

SEQ ID NO: 1296373 - RNA, 19 nt, Homo sapiens
  misc_RNA (1)...(19): siRNA sense strand
ccaacaugcccaaccugua

SEQ ID NO: 1296374 - RNA, 19 nt, Homo sapiens
  misc_RNA (1)...(19): siRNA sense strand
gaaacccacccuccaggau

SEQ ID NO: 1296375 - RNA, 19 nt, Homo sapiens
  misc_RNA (1)...(19): siRNA sense strand
caaaggaccggacccugau

SEQ ID NO: 1296376 - RNA, 19 nt, Homo sapiens
  misc_RNA (1)...(19): siRNA sense strand
gaaacuuugagaagacaau

SEQ ID NO: 1296377 - RNA, 19 nt, Homo sapiens
  misc_RNA (1)...(19): siRNA sense strand
gggauuaccggaagauucu

SEQ ID NO: 1296378 - RNA, 19 nt, Homo sapiens
  misc_RNA (1)...(19): siRNA sense strand
cauccgagaauuaaacaga

SEQ ID NO: 1296379 - RNA, 19 nt, Homo sapiens
  misc_RNA (1)...(19): siRNA sense strand
caggaaacuuugagaagac

SEQ ID NO: 1296380 - RNA, 19 nt, Homo sapiens
  misc_RNA (1)...(19): siRNA sense strand
ucaaugaguaccagagaau

SEQ ID NO: 1296381 - RNA, 19 nt, Homo sapiens
  misc_RNA (1)...(19): siRNA sense strand
gcaguucaaccaggacuau

SEQ ID NO: 1296382 - RNA, 19 nt, Homo sapiens
  misc_RNA (1)...(19): siRNA sense strand
gugccgagcuacccaggau

SEQ ID NO: 1296383 - RNA, 19 nt, Homo sapiens
  misc_RNA (1)...(19): siRNA sense strand
cagggaaaccgugaugaaa

SEQ ID NO: 1296384 - RNA, 19 nt, Homo sapiens
  misc_RNA (1)...(19): siRNA sense strand
aaucuuggcucugaugaag

SEQ ID NO: 1296385 - RNA, 19 nt, Homo sapiens
  misc_RNA (1)...(19): siRNA sense strand
ucagggaaaccgugaugaa

SEQ ID NO: 1296386 - RNA, 19 nt, Homo sapiens
  misc_RNA (1)...(19): siRNA sense strand
gagccuacaaagcagaauu

SEQ ID NO: 1296387 - RNA, 19 nt, Homo sapiens
  misc_RNA (1)...(19): siRNA sense strand
gacuaucucucgggaaugg

SEQ ID NO: 1296388 - RNA, 19 nt, Homo sapiens
  misc_RNA (1)...(19): siRNA sense strand
cggcuuacggcaaggauuu

SEQ ID NO: 1296389 - RNA, 19 nt, Homo sapiens
  misc_RNA (1)...(19): siRNA sense strand
gaucugugguggcaaugac

SEQ ID NO: 1296390 - RNA, 19 nt, Homo sapiens
  misc_RNA (1)...(19): siRNA sense strand
agaccgaccuccuggacau

SEQ ID NO: 1296391 - RNA, 19 nt, Homo sapiens
  misc_RNA (1)...(19): siRNA sense strand
gaauuaaacagagccuaca

SEQ ID NO: 1296392 - RNA, 19 nt, Homo sapiens
  misc_RNA (1)...(19): siRNA sense strand
gagccaacaugcccaaccu

SEQ ID NO: 1296393 - RNA, 19 nt, Homo sapiens
  misc_RNA (1)...(19): siRNA sense strand
cggaagauucugcugaaga

SEQ ID NO: 1296394 - RNA, 19 nt, Homo sapiens
  misc_RNA (1)...(19): siRNA sense strand
gccgggacauugagaagag

SEQ ID NO: 1296395 - RNA, 19 nt, Homo sapiens
  misc_RNA (1)...(19): siRNA sense strand
caaguucaaugcgguucug

SEQ ID NO: 1296396 - RNA, 19 nt, Homo sapiens
  misc_RNA (1)...(19): siRNA sense strand
ggagauacuucaggggauu

SEQ ID NO: 1296397 - RNA, 19 nt, Homo sapiens
  misc_RNA (1)...(19): siRNA sense strand
caucagaucagaguauaag

SEQ ID NO: 1296398 - RNA, 19 nt, Homo sapiens
  misc_RNA (1)...(19): siRNA sense strand
cggcagcagauccuacuuu

SEQ ID NO: 1296399 - RNA, 19 nt, Homo sapiens
  misc_RNA (1)...(19): siRNA sense strand
cgacacaucagggcacuuc

SEQ ID NO: 1296400 - RNA, 19 nt, Homo sapiens
  misc_RNA (1)...(19): siRNA sense strand
cagaguauaagcggaugua

SEQ ID NO: 1296401 - RNA, 19 nt, Homo sapiens
  misc_RNA (1)...(19): siRNA sense strand
cacugaugcucccggcuuu

SEQ ID NO: 1296402 - RNA, 19 nt, Homo sapiens
  misc_RNA (1)...(19): siRNA sense strand
aggacuaucucucgggaau

SEQ ID NO: 1296403 - RNA, 19 nt, Homo sapiens
  misc_RNA (1)...(19): siRNA sense strand
acagacgaguccaaguuca

SEQ ID NO: 1296404 - RNA, 19 nt, Homo sapiens
  misc_RNA (1)...(19): siRNA sense strand
gaauaccccagccuucuuu

SEQ ID NO: 1296405 - RNA, 19 nt, Homo sapiens
  misc_RNA (1)...(19): siRNA sense strand
aagccugccugauugagau

SEQ ID NO: 1296406 - RNA, 19 nt, Homo sapiens
  misc_RNA (1)...(19): siRNA sense strand
uuaaacagagccuacaaag

SEQ ID NO: 1296407 - RNA, 19 nt, Homo sapiens
  misc_RNA (1)...(19): siRNA sense strand
gacaaucuuggcucugaug

SEQ ID NO: 1296408 - RNA, 19 nt, Homo sapiens
  misc_RNA (1)...(19): siRNA sense strand
cagcagauccuacuuuccu

SEQ ID NO: 1296409 - RNA, 19 nt, Homo sapiens
  misc_RNA (1)...(19): siRNA sense strand
aaugaguaccagagaauga

SEQ ID NO: 1296410 - RNA, 19 nt, Homo sapiens
  misc_RNA (1)...(19): siRNA sense strand
gcagccuguuccucccuau

SEQ ID NO: 1296411 - RNA, 19 nt, Homo sapiens
  misc_RNA (1)...(19): siRNA sense strand
ggaacagacgaguccaagu

SEQ ID NO: 1296412 - RNA, 19 nt, Homo sapiens
  misc_RNA (1)...(19): siRNA sense strand
gagauaaaggaagccauca

SEQ ID NO: 1296413 - RNA, 19 nt, Homo sapiens
  misc_RNA (1)...(19): siRNA sense strand
ggagaaccgccugggaaca

SEQ ID NO: 1296414 - RNA, 19 nt, Homo sapiens
  misc_RNA (1)...(19): siRNA sense strand
acaagcagcggcagcagau

SEQ ID NO: 1296415 - RNA, 19 nt, Homo sapiens
  misc_RNA (1)...(19): siRNA sense strand
accggaagauucugcugaa

SEQ ID NO: 1296416 - RNA, 19 nt, Homo sapiens
  misc_RNA (1)...(19): siRNA sense strand
cagacgaguccaaguucaa

SEQ ID NO: 1296417 - RNA, 19 nt, Homo sapiens
  misc_RNA (1)...(19): siRNA sense strand
gagaaccgccugggaacag

SEQ ID NO: 1296418 - RNA, 19 nt, Homo sapiens
  misc_RNA (1)...(19): siRNA sense strand
gaugaagccugccugauug

SEQ ID NO: 1296419 - RNA, 19 nt, Homo sapiens
  misc_RNA (1)...(19): siRNA sense strand
gaacagacgaguccaaguu

SEQ ID NO: 1296420 - RNA, 19 nt, Homo sapiens
  misc_RNA (1)...(19): siRNA sense strand
ugaaaugucucaagaauac

SEQ ID NO: 1296421 - RNA, 19 nt, Homo sapiens
  misc_RNA (1)...(19): siRNA sense strand
gcacaaacguggacauguc

SEQ ID NO: 1296422 - RNA, 19 nt, Homo sapiens
  misc_RNA (1)...(19): siRNA sense strand
cuacaaagcagaauucaaa

SEQ ID NO: 1296423 - RNA, 19 nt, Homo sapiens
  misc_RNA (1)...(19): siRNA sense strand
ggaagauucugcugaagau

SEQ ID NO: 1296424 - RNA, 19 nt, Homo sapiens
  misc_RNA (1)...(19): siRNA sense strand
gaagaucugugguggcaau

SEQ ID NO: 1296425 - RNA, 19 nt, Homo sapiens
  misc_RNA (1)...(19): siRNA sense strand
aaacagagccuacaaagca

SEQ ID NO: 1296426 - RNA, 19 nt, Homo sapiens
  misc_RNA (1)...(19): siRNA sense strand
ggugaaaugucucaagaau

SEQ ID NO: 1296427 - RNA, 19 nt, Homo sapiens
  misc_RNA (1)...(19): siRNA sense strand
gagcacauccgagaauuaa

SEQ ID NO: 1296428 - RNA, 19 nt, Homo sapiens
  misc_RNA (1)...(19): siRNA sense strand
gacaucagaucagaguaua

SEQ ID NO: 1296429 - RNA, 19 nt, Homo sapiens
  misc_RNA (1)...(19): siRNA sense strand
gaucugaaaucugaacugu

SEQ ID NO: 1296430 - RNA, 19 nt, Homo sapiens
  misc_RNA (1)...(19): siRNA sense strand
ucugaaaucugaacuguca

SEQ ID NO: 1296431 - RNA, 19 nt, Homo sapiens
  misc_RNA (1)...(19): siRNA sense strand
ggacaucagaucagaguau

SEQ ID NO: 1296432 - RNA, 19 nt, Homo sapiens
  misc_RNA (1)...(19): siRNA sense strand
ucaggaaacuuugagaaga

SEQ ID NO: 1296433 - RNA, 19 nt, Homo sapiens
  misc_RNA (1)...(19): siRNA sense strand
ccaguccucuuugacauuu

SEQ ID NO: 1296434 - RNA, 19 nt, Homo sapiens
  misc_RNA (1)...(19): siRNA sense strand
ccuccaggaugcccucaua

SEQ ID NO: 1296435 - RNA, 19 nt, Homo sapiens
  misc_RNA (1)...(19): siRNA sense strand
guggugaaaugucucaaga

SEQ ID NO: 1296436 - RNA, 19 nt, Homo sapiens
  misc_RNA (1)...(19): siRNA sense strand
ugaugaagccugccugauu

SEQ ID NO: 1296437 - RNA, 19 nt, Homo sapiens
  misc_RNA (1)...(19): siRNA sense strand
gauccuacuuuccuucaag

SEQ ID NO: 1296438 - RNA, 19 nt, Homo sapiens
  misc_RNA (1)...(19): siRNA sense strand
gugaaaugucucaagaaua

SEQ ID NO: 1296439 - RNA, 19 nt, Homo sapiens
  misc_RNA (1)...(19): siRNA sense strand
gaacugucaggaaacuuug

SEQ ID NO: 1296440 - RNA, 19 nt, Homo sapiens
  misc_RNA (1)...(19): siRNA sense strand
gcacauccgagaauuaaac

SEQ ID NO: 1296441 - RNA, 19 nt, Homo sapiens
  misc_RNA (1)...(19): siRNA sense strand
gauaaaggaagccaucaag

SEQ ID NO: 1296442 - RNA, 19 nt, Homo sapiens
  misc_RNA (1)...(19): siRNA sense strand
ggcagcagauccuacuuuc

SEQ ID NO: 1296443 - RNA, 19 nt, Homo sapiens
  misc_RNA (1)...(19): siRNA sense strand
gagaugcccaggagcugua

SEQ ID NO: 1296444 - RNA, 19 nt, Homo sapiens
  misc_RNA (1)...(19): siRNA sense strand
caacaugcccaaccuguac

SEQ ID NO: 1296445 - RNA, 19 nt, Homo sapiens
  misc_RNA (1)...(19): siRNA sense strand
gggaaaccgugaugaaagc

SEQ ID NO: 1296446 - RNA, 19 nt, Homo sapiens
  misc_RNA (1)...(19): siRNA sense strand
ugaacugucaggaaacuuu

SEQ ID NO: 1296447 - RNA, 19 nt, Homo sapiens
  misc_RNA (1)...(19): siRNA sense strand
gaagccugccugauugaga

SEQ ID NO: 1296448 - RNA, 19 nt, Homo sapiens
  misc_RNA (1)...(19): siRNA sense strand
ugagcacauccgagaauua

SEQ ID NO: 1296449 - RNA, 19 nt, Homo sapiens
  misc_RNA (1)...(19): siRNA sense strand
ccaacaugcccaaccugua

SEQ ID NO: 1296450 - RNA, 19 nt, Homo sapiens
  misc_RNA (1)...(19): siRNA sense strand
gaaacccacccuccaggau

SEQ ID NO: 1296451 - RNA, 19 nt, Homo sapiens
  misc_RNA (1)...(19): siRNA sense strand
caaaggaccggacccugau

SEQ ID NO: 1296452 - RNA, 19 nt, Homo sapiens
  misc_RNA (1)...(19): siRNA sense strand
gaaacuuugagaagacaau

SEQ ID NO: 1296453 - RNA, 19 nt, Homo sapiens
  misc_RNA (1)...(19): siRNA sense strand
gggauuaccggaagauucu

SEQ ID NO: 1296454 - RNA, 19 nt, Homo sapiens
  misc_RNA (1)...(19): siRNA sense strand
cauccgagaauuaaacaga

SEQ ID NO: 1296455 - RNA, 19 nt, Homo sapiens
  misc_RNA (1)...(19): siRNA sense strand
caggaaacuuugagaagac

SEQ ID NO: 1296456 - RNA, 19 nt, Homo sapiens
  misc_RNA (1)...(19): siRNA sense strand
ucaaugaguaccagagaau

SEQ ID NO: 1296457 - RNA, 19 nt, Homo sapiens
  misc_RNA (1)...(19): siRNA sense strand
gcaguucaaccaggacuau

SEQ ID NO: 1296458 - RNA, 19 nt, Homo sapiens
  misc_RNA (1)...(19): siRNA sense strand
gugccgagcuacccaggau

SEQ ID NO: 1296459 - RNA, 19 nt, Homo sapiens
  misc_RNA (1)...(19): siRNA sense strand
cagggaaaccgugaugaaa

SEQ ID NO: 1296460 - RNA, 19 nt, Homo sapiens
  misc_RNA (1)...(19): siRNA sense strand
aaucuuggcucugaugaag

SEQ ID NO: 1296461 - RNA, 19 nt, Homo sapiens
  misc_RNA (1)...(19): siRNA sense strand
ucagggaaaccgugaugaa

SEQ ID NO: 1296462 - RNA, 19 nt, Homo sapiens
  misc_RNA (1)...(19): siRNA sense strand
gagccuacaaagcagaauu

SEQ ID NO: 1296463 - RNA, 19 nt, Homo sapiens
  misc_RNA (1)...(19): siRNA sense strand
gacuaucucucgggaaugg

SEQ ID NO: 1296464 - RNA, 19 nt, Homo sapiens
  misc_RNA (1)...(19): siRNA sense strand
cggcuuacggcaaggauuu

SEQ ID NO: 1296465 - RNA, 19 nt, Homo sapiens
  misc_RNA (1)...(19): siRNA sense strand
gaucugugguggcaaugac

SEQ ID NO: 1296466 - RNA, 19 nt, Homo sapiens
  misc_RNA (1)...(19): siRNA sense strand
agaccgaccuccuggacau

SEQ ID NO: 1296467 - RNA, 19 nt, Homo sapiens
  misc_RNA (1)...(19): siRNA sense strand
gaauuaaacagagccuaca

SEQ ID NO: 1296468 - RNA, 19 nt, Homo sapiens
  misc_RNA (1)...(19): siRNA sense strand
gagccaacaugcccaaccu

SEQ ID NO: 1296469 - RNA, 19 nt, Homo sapiens
  misc_RNA (1)...(19): siRNA sense strand
cggaagauucugcugaaga

SEQ ID NO: 1296470 - RNA, 19 nt, Homo sapiens
  misc_RNA (1)...(19): siRNA sense strand
gccgggacauugagaagag

SEQ ID NO: 1296471 - RNA, 19 nt, Homo sapiens
  misc_RNA (1)...(19): siRNA sense strand
caaguucaaugcgguucug

SEQ ID NO: 1296472 - RNA, 19 nt, Homo sapiens
  misc_RNA (1)...(19): siRNA sense strand
ggagauacuucaggggauu

SEQ ID NO: 1296473 - RNA, 19 nt, Homo sapiens
  misc_RNA (1)...(19): siRNA sense strand
caucagaucagaguauaag

SEQ ID NO: 1296474 - RNA, 19 nt, Homo sapiens
  misc_RNA (1)...(19): siRNA sense strand
cggcagcagauccuacuuu

SEQ ID NO: 1296475 - RNA, 19 nt, Homo sapiens
  misc_RNA (1)...(19): siRNA sense strand
cgacacaucagggcacuuc

SEQ ID NO: 1296476 - RNA, 19 nt, Homo sapiens
  misc_RNA (1)...(19): siRNA sense strand
cagaguauaagcggaugua

SEQ ID NO: 1296477 - RNA, 19 nt, Homo sapiens
  misc_RNA (1)...(19): siRNA sense strand
cacugaugcucccggcuuu

SEQ ID NO: 1296478 - RNA, 19 nt, Homo sapiens
  misc_RNA (1)...(19): siRNA sense strand
aggacuaucucucgggaau

SEQ ID NO: 1296479 - RNA, 19 nt, Homo sapiens
  misc_RNA (1)...(19): siRNA sense strand
acagacgaguccaaguuca

SEQ ID NO: 1296480 - RNA, 19 nt, Homo sapiens
  misc_RNA (1)...(19): siRNA sense strand
gaauaccccagccuucuuu

SEQ ID NO: 1296481 - RNA, 19 nt, Homo sapiens
  misc_RNA (1)...(19): siRNA sense strand
aagccugccugauugagau

SEQ ID NO: 1296482 - RNA, 19 nt, Homo sapiens
  misc_RNA (1)...(19): siRNA sense strand
uuaaacagagccuacaaag

SEQ ID NO: 1296483 - RNA, 19 nt, Homo sapiens
  misc_RNA (1)...(19): siRNA sense strand
gacaaucuuggcucugaug

SEQ ID NO: 1296484 - RNA, 19 nt, Homo sapiens
  misc_RNA (1)...(19): siRNA sense strand
cagcagauccuacuuuccu

SEQ ID NO: 1296485 - RNA, 19 nt, Homo sapiens
  misc_RNA (1)...(19): siRNA sense strand
aaugaguaccagagaauga

SEQ ID NO: 1296486 - RNA, 19 nt, Homo sapiens
  misc_RNA (1)...(19): siRNA sense strand
gcagccuguuccucccuau

SEQ ID NO: 1296487 - RNA, 19 nt, Homo sapiens
  misc_RNA (1)...(19): siRNA sense strand
ggaacagacgaguccaagu

SEQ ID NO: 1296488 - RNA, 19 nt, Homo sapiens
  misc_RNA (1)...(19): siRNA sense strand
gagauaaaggaagccauca

SEQ ID NO: 1296489 - RNA, 19 nt, Homo sapiens
  misc_RNA (1)...(19): siRNA sense strand
ggagaaccgccugggaaca

SEQ ID NO: 1296490 - RNA, 19 nt, Homo sapiens
  misc_RNA (1)...(19): siRNA sense strand
acaagcagcggcagcagau

SEQ ID NO: 1296491 - RNA, 19 nt, Homo sapiens
  misc_RNA (1)...(19): siRNA sense strand
accggaagauucugcugaa

SEQ ID NO: 1296492 - RNA, 19 nt, Homo sapiens
  misc_RNA (1)...(19): siRNA sense strand
cagacgaguccaaguucaa

SEQ ID NO: 1296493 - RNA, 19 nt, Homo sapiens
  misc_RNA (1)...(19): siRNA sense strand
gagaaccgccugggaacag

SEQ ID NO: 1296494 - RNA, 19 nt, Homo sapiens
  misc_RNA (1)...(19): siRNA sense strand
gaugaagccugccugauug

SEQ ID NO: 1296495 - RNA, 19 nt, Homo sapiens
  misc_RNA (1)...(19): siRNA sense strand
gaacagacgaguccaaguu

SEQ ID NO: 1296496 - RNA, 19 nt, Homo sapiens
  misc_RNA (1)...(19): siRNA sense strand
ugaaaugucucaagaauac

SEQ ID NO: 1296497 - RNA, 19 nt, Homo sapiens
  misc_RNA (1)...(19): siRNA sense strand
gcacaaacguggacauguc

SEQ ID NO: 1296498 - RNA, 19 nt, Homo sapiens
  misc_RNA (1)...(19): siRNA sense strand
cuacaaagcagaauucaaa

SEQ ID NO: 1296499 - RNA, 19 nt, Homo sapiens
  misc_RNA (1)...(19): siRNA sense strand
ggaagauucugcugaagau

SEQ ID NO: 1296500 - RNA, 19 nt, Homo sapiens
  misc_RNA (1)...(19): siRNA sense strand
gaagaucugugguggcaau

SEQ ID NO: 1296501 - RNA, 19 nt, Homo sapiens
  misc_RNA (1)...(19): siRNA sense strand
aaacagagccuacaaagca

SEQ ID NO: 1296502 - RNA, 19 nt, Homo sapiens
  misc_RNA (1)...(19): siRNA sense strand
ggugaaaugucucaagaau

SEQ ID NO: 1296503 - RNA, 19 nt, Homo sapiens
  misc_RNA (1)...(19): siRNA sense strand
gagcacauccgagaauuaa

SEQ ID NO: 1296504 - RNA, 19 nt, Homo sapiens
  misc_RNA (1)...(19): siRNA sense strand
gacaucagaucagaguaua

SEQ ID NO: 1296505 - RNA, 19 nt, Homo sapiens
  misc_RNA (1)...(19): siRNA sense strand
gaucugaaaucugaacugu

SEQ ID NO: 1296506 - RNA, 19 nt, Homo sapiens
  misc_RNA (1)...(19): siRNA sense strand
ucugaaaucugaacuguca

SEQ ID NO: 1296507 - RNA, 19 nt, Homo sapiens
  misc_RNA (1)...(19): siRNA sense strand
ggacaucagaucagaguau

SEQ ID NO: 1296508 - RNA, 19 nt, Homo sapiens
  misc_RNA (1)...(19): siRNA sense strand
ucaggaaacuuugagaaga

SEQ ID NO: 1296509 - RNA, 19 nt, Homo sapiens
  misc_RNA (1)...(19): siRNA sense strand
ccaguccucuuugacauuu

SEQ ID NO: 1296510 - RNA, 19 nt, Homo sapiens
  misc_RNA (1)...(19): siRNA sense strand
ccuccaggaugcccucaua

SEQ ID NO: 1296511 - RNA, 19 nt, Homo sapiens
  misc_RNA (1)...(19): siRNA sense strand
guggugaaaugucucaaga

SEQ ID NO: 1296512 - RNA, 19 nt, Homo sapiens
  misc_RNA (1)...(19): siRNA sense strand
ugaugaagccugccugauu

SEQ ID NO: 1296513 - RNA, 19 nt, Homo sapiens
  misc_RNA (1)...(19): siRNA sense strand
gauccuacuuuccuucaag

SEQ ID NO: 1296514 - RNA, 19 nt, Homo sapiens
  misc_RNA (1)...(19): siRNA sense strand
gugaaaugucucaagaaua

SEQ ID NO: 1296515 - RNA, 19 nt, Homo sapiens
  misc_RNA (1)...(19): siRNA sense strand
gaacugucaggaaacuuug

SEQ ID NO: 1296516 - RNA, 19 nt, Homo sapiens
  misc_RNA (1)...(19): siRNA sense strand
gcacauccgagaauuaaac

SEQ ID NO: 1296517 - RNA, 19 nt, Homo sapiens
  misc_RNA (1)...(19): siRNA sense strand
gauaaaggaagccaucaag

SEQ ID NO: 1296518 - RNA, 19 nt, Homo sapiens
  misc_RNA (1)...(19): siRNA sense strand
ggcagcagauccuacuuuc

SEQ ID NO: 1296519 - RNA, 19 nt, Homo sapiens
  misc_RNA (1)...(19): siRNA sense strand
gagaugcccaggagcugua

SEQ ID NO: 1296520 - RNA, 19 nt, Homo sapiens
  misc_RNA (1)...(19): siRNA sense strand
caacaugcccaaccuguac

SEQ ID NO: 1296521 - RNA, 19 nt, Homo sapiens
  misc_RNA (1)...(19): siRNA sense strand
gggaaaccgugaugaaagc

SEQ ID NO: 1296522 - RNA, 19 nt, Homo sapiens
  misc_RNA (1)...(19): siRNA sense strand
ugaacugucaggaaacuuu

SEQ ID NO: 1296523 - RNA, 19 nt, Homo sapiens
  misc_RNA (1)...(19): siRNA sense strand
gaagccugccugauugaga

SEQ ID NO: 1296524 - RNA, 19 nt, Homo sapiens
  misc_RNA (1)...(19): siRNA sense strand
ugagcacauccgagaauua

SEQ ID NO: 1296525 - RNA, 19 nt, Homo sapiens
  misc_RNA (1)...(19): siRNA sense strand
ccaacaugcccaaccugua

SEQ ID NO: 1296526 - RNA, 19 nt, Homo sapiens
  misc_RNA (1)...(19): siRNA sense strand
gaaacccacccuccaggau

SEQ ID NO: 1296527 - RNA, 19 nt, Homo sapiens
  misc_RNA (1)...(19): siRNA sense strand
caaaggaccggacccugau

SEQ ID NO: 1296528 - RNA, 19 nt, Homo sapiens
  misc_RNA (1)...(19): siRNA sense strand
gaaacuuugagaagacaau

SEQ ID NO: 1296529 - RNA, 19 nt, Homo sapiens
  misc_RNA (1)...(19): siRNA sense strand
gggauuaccggaagauucu

SEQ ID NO: 1296530 - RNA, 19 nt, Homo sapiens
  misc_RNA (1)...(19): siRNA sense strand
cauccgagaauuaaacaga

SEQ ID NO: 1296531 - RNA, 19 nt, Homo sapiens
  misc_RNA (1)...(19): siRNA sense strand
caggaaacuuugagaagac

SEQ ID NO: 1296532 - RNA, 19 nt, Homo sapiens
  misc_RNA (1)...(19): siRNA sense strand
ucaaugaguaccagagaau

SEQ ID NO: 1296533 - RNA, 19 nt, Homo sapiens
  misc_RNA (1)...(19): siRNA sense strand
gcaguucaaccaggacuau

SEQ ID NO: 1296534 - RNA, 19 nt, Homo sapiens
  misc_RNA (1)...(19): siRNA sense strand
gugccgagcuacccaggau

SEQ ID NO: 1296535 - RNA, 19 nt, Homo sapiens
  misc_RNA (1)...(19): siRNA sense strand
cagggaaaccgugaugaaa

SEQ ID NO: 1296536 - RNA, 19 nt, Homo sapiens
  misc_RNA (1)...(19): siRNA sense strand
aaucuuggcucugaugaag

SEQ ID NO: 1296537 - RNA, 19 nt, Homo sapiens
  misc_RNA (1)...(19): siRNA sense strand
ucagggaaaccgugaugaa

SEQ ID NO: 1296538 - RNA, 19 nt, Homo sapiens
  misc_RNA (1)...(19): siRNA sense strand
gagccuacaaagcagaauu

SEQ ID NO: 1296539 - RNA, 19 nt, Homo sapiens
  misc_RNA (1)...(19): siRNA sense strand
gacuaucucucgggaaugg

SEQ ID NO: 1296540 - RNA, 19 nt, Homo sapiens
  misc_RNA (1)...(19): siRNA sense strand
cggcuuacggcaaggauuu

SEQ ID NO: 1296541 - RNA, 19 nt, Homo sapiens
  misc_RNA (1)...(19): siRNA sense strand
gaucugugguggcaaugac

SEQ ID NO: 1296542 - RNA, 19 nt, Homo sapiens
  misc_RNA (1)...(19): siRNA sense strand
agaccgaccuccuggacau

SEQ ID NO: 1296543 - RNA, 19 nt, Homo sapiens
  misc_RNA (1)...(19): siRNA sense strand
gaauuaaacagagccuaca

SEQ ID NO: 1296544 - RNA, 19 nt, Homo sapiens
  misc_RNA (1)...(19): siRNA sense strand
gagccaacaugcccaaccu

SEQ ID NO: 1296545 - RNA, 19 nt, Homo sapiens
  misc_RNA (1)...(19): siRNA sense strand
cggaagauucugcugaaga

SEQ ID NO: 1296546 - RNA, 19 nt, Homo sapiens
  misc_RNA (1)...(19): siRNA sense strand
gccgggacauugagaagag

SEQ ID NO: 1296547 - RNA, 19 nt, Homo sapiens
  misc_RNA (1)...(19): siRNA sense strand
caaguucaaugcgguucug

SEQ ID NO: 1296548 - RNA, 19 nt, Homo sapiens
  misc_RNA (1)...(19): siRNA sense strand
ggagauacuucaggggauu

SEQ ID NO: 1296549 - RNA, 19 nt, Homo sapiens
  misc_RNA (1)...(19): siRNA sense strand
caucagaucagaguauaag

SEQ ID NO: 1296550 - RNA, 19 nt, Homo sapiens
  misc_RNA (1)...(19): siRNA sense strand
cggcagcagauccuacuuu

SEQ ID NO: 1296551 - RNA, 19 nt, Homo sapiens
  misc_RNA (1)...(19): siRNA sense strand
cgacacaucagggcacuuc

SEQ ID NO: 1296552 - RNA, 19 nt, Homo sapiens
  misc_RNA (1)...(19): siRNA sense strand
cagaguauaagcggaugua

SEQ ID NO: 1296553 - RNA, 19 nt, Homo sapiens
  misc_RNA (1)...(19): siRNA sense strand
cacugaugcucccggcuuu

SEQ ID NO: 1296554 - RNA, 19 nt, Homo sapiens
  misc_RNA (1)...(19): siRNA sense strand
aggacuaucucucgggaau

SEQ ID NO: 1296555 - RNA, 19 nt, Homo sapiens
  misc_RNA (1)...(19): siRNA sense strand
acagacgaguccaaguuca

SEQ ID NO: 1296556 - RNA, 19 nt, Homo sapiens
  misc_RNA (1)...(19): siRNA sense strand
gaauaccccagccuucuuu

SEQ ID NO: 1296557 - RNA, 19 nt, Homo sapiens
  misc_RNA (1)...(19): siRNA sense strand
aagccugccugauugagau

SEQ ID NO: 1296558 - RNA, 19 nt, Homo sapiens
  misc_RNA (1)...(19): siRNA sense strand
uuaaacagagccuacaaag

SEQ ID NO: 1296559 - RNA, 19 nt, Homo sapiens
  misc_RNA (1)...(19): siRNA sense strand
gacaaucuuggcucugaug

SEQ ID NO: 1296560 - RNA, 19 nt, Homo sapiens
  misc_RNA (1)...(19): siRNA sense strand
cagcagauccuacuuuccu

SEQ ID NO: 1296561 - RNA, 19 nt, Homo sapiens
  misc_RNA (1)...(19): siRNA sense strand
aaugaguaccagagaauga

SEQ ID NO: 1296562 - RNA, 19 nt, Homo sapiens
  misc_RNA (1)...(19): siRNA sense strand
gcagccuguuccucccuau

SEQ ID NO: 1296563 - RNA, 19 nt, Homo sapiens
  misc_RNA (1)...(19): siRNA sense strand
ggaacagacgaguccaagu

SEQ ID NO: 1296564 - RNA, 19 nt, Homo sapiens
  misc_RNA (1)...(19): siRNA sense strand
gagauaaaggaagccauca

SEQ ID NO: 1296565 - RNA, 19 nt, Homo sapiens
  misc_RNA (1)...(19): siRNA sense strand
ggagaaccgccugggaaca

SEQ ID NO: 1296566 - RNA, 19 nt, Homo sapiens
  misc_RNA (1)...(19): siRNA sense strand
acaagcagcggcagcagau

SEQ ID NO: 1296567 - RNA, 19 nt, Homo sapiens
  misc_RNA (1)...(19): siRNA sense strand
accggaagauucugcugaa

SEQ ID NO: 1296568 - RNA, 19 nt, Homo sapiens
  misc_RNA (1)...(19): siRNA sense strand
cagacgaguccaaguucaa

SEQ ID NO: 1296569 - RNA, 19 nt, Homo sapiens
  misc_RNA (1)...(19): siRNA sense strand
gagaaccgccugggaacag

SEQ ID NO: 1296570 - RNA, 19 nt, Homo sapiens
  misc_RNA (1)...(19): siRNA sense strand
gaugaagccugccugauug

SEQ ID NO: 1296571 - RNA, 19 nt, Homo sapiens
  misc_RNA (1)...(19): siRNA sense strand
gaacagacgaguccaaguu

SEQ ID NO: 1296572 - RNA, 19 nt, Homo sapiens
  misc_RNA (1)...(19): siRNA sense strand
ugaaaugucucaagaauac

SEQ ID NO: 1296573 - RNA, 19 nt, Homo sapiens
  misc_RNA (1)...(19): siRNA sense strand
gcacaaacguggacauguc

SEQ ID NO: 1296574 - RNA, 19 nt, Homo sapiens
  misc_RNA (1)...(19): siRNA sense strand
cuacaaagcagaauucaaa

SEQ ID NO: 1296575 - RNA, 19 nt, Homo sapiens
  misc_RNA (1)...(19): siRNA sense strand
ggaagauucugcugaagau

SEQ ID NO: 1296576 - RNA, 19 nt, Homo sapiens
  misc_RNA (1)...(19): siRNA sense strand
gaagaucugugguggcaau

SEQ ID NO: 1296577 - RNA, 19 nt, Homo sapiens
  misc_RNA (1)...(19): siRNA sense strand
aaacagagccuacaaagca

SEQ ID NO: 1296578 - RNA, 19 nt, Homo sapiens
  misc_RNA (1)...(19): siRNA sense strand
ggugaaaugucucaagaau

SEQ ID NO: 1296579 - RNA, 19 nt, Homo sapiens
  misc_RNA (1)...(19): siRNA sense strand
gagcacauccgagaauuaa

SEQ ID NO: 1296580 - RNA, 19 nt, Homo sapiens
  misc_RNA (1)...(19): siRNA sense strand
gacaucagaucagaguaua

SEQ ID NO: 1296581 - RNA, 19 nt, Homo sapiens
  misc_RNA (1)...(19): siRNA sense strand
gaucugaaaucugaacugu

SEQ ID NO: 1296582 - RNA, 19 nt, Homo sapiens
  misc_RNA (1)...(19): siRNA sense strand
ucugaaaucugaacuguca

SEQ ID NO: 1296583 - RNA, 19 nt, Homo sapiens
  misc_RNA (1)...(19): siRNA sense strand
ggacaucagaucagaguau

SEQ ID NO: 1296584 - RNA, 19 nt, Homo sapiens
  misc_RNA (1)...(19): siRNA sense strand
ucaggaaacuuugagaaga

SEQ ID NO: 1296585 - RNA, 19 nt, Homo sapiens
  misc_RNA (1)...(19): siRNA sense strand
ccaguccucuuugacauuu

SEQ ID NO: 1296586 - RNA, 19 nt, Homo sapiens
  misc_RNA (1)...(19): siRNA sense strand
ccuccaggaugcccucaua

SEQ ID NO: 1296587 - RNA, 19 nt, Homo sapiens
  misc_RNA (1)...(19): siRNA sense strand
guggugaaaugucucaaga

SEQ ID NO: 1296588 - RNA, 19 nt, Homo sapiens
  misc_RNA (1)...(19): siRNA sense strand
ugaugaagccugccugauu

SEQ ID NO: 1296589 - RNA, 19 nt, Homo sapiens
  misc_RNA (1)...(19): siRNA sense strand
gauccuacuuuccuucaag

SEQ ID NO: 1296590 - RNA, 19 nt, Homo sapiens
  misc_RNA (1)...(19): siRNA sense strand
gugaaaugucucaagaaua

SEQ ID NO: 1296591 - RNA, 19 nt, Homo sapiens
  misc_RNA (1)...(19): siRNA sense strand
gaacugucaggaaacuuug

SEQ ID NO: 1296592 - RNA, 19 nt, Homo sapiens
  misc_RNA (1)...(19): siRNA sense strand
gcacauccgagaauuaaac

SEQ ID NO: 1296593 - RNA, 19 nt, Homo sapiens
  misc_RNA (1)...(19): siRNA sense strand
gauaaaggaagccaucaag

SEQ ID NO: 1296594 - RNA, 19 nt, Homo sapiens
  misc_RNA (1)...(19): siRNA sense strand
ggcagcagauccuacuuuc

SEQ ID NO: 1296595 - RNA, 19 nt, Homo sapiens
  misc_RNA (1)...(19): siRNA sense strand
gagaugcccaggagcugua

SEQ ID NO: 1296596 - RNA, 19 nt, Homo sapiens
  misc_RNA (1)...(19): siRNA sense strand
caacaugcccaaccuguac

SEQ ID NO: 1296597 - RNA, 19 nt, Homo sapiens
  misc_RNA (1)...(19): siRNA sense strand
gggaaaccgugaugaaagc

SEQ ID NO: 1296598 - RNA, 19 nt, Homo sapiens
  misc_RNA (1)...(19): siRNA sense strand
ugaacugucaggaaacuuu

SEQ ID NO: 1296599 - RNA, 19 nt, Homo sapiens
  misc_RNA (1)...(19): siRNA sense strand
gaagccugccugauugaga

SEQ ID NO: 1296600 - RNA, 19 nt, Homo sapiens
  misc_RNA (1)...(19): siRNA sense strand
ugagcacauccgagaauua

SEQ ID NO: 1296601 - RNA, 19 nt, Homo sapiens
  misc_RNA (1)...(19): siRNA sense strand
ccaacaugcccaaccugua

SEQ ID NO: 1296602 - RNA, 19 nt, Homo sapiens
  misc_RNA (1)...(19): siRNA sense strand
gaaacccacccuccaggau

SEQ ID NO: 1296603 - RNA, 19 nt, Homo sapiens
  misc_RNA (1)...(19): siRNA sense strand
caaaggaccggacccugau

SEQ ID NO: 1296604 - RNA, 19 nt, Homo sapiens
  misc_RNA (1)...(19): siRNA sense strand
gaaacuuugagaagacaau

SEQ ID NO: 1296605 - RNA, 19 nt, Homo sapiens
  misc_RNA (1)...(19): siRNA sense strand
gggauuaccggaagauucu

SEQ ID NO: 1296606 - RNA, 19 nt, Homo sapiens
  misc_RNA (1)...(19): siRNA sense strand
cauccgagaauuaaacaga

SEQ ID NO: 1296607 - RNA, 19 nt, Homo sapiens
  misc_RNA (1)...(19): siRNA sense strand
caggaaacuuugagaagac

SEQ ID NO: 1296608 - RNA, 19 nt, Homo sapiens
  misc_RNA (1)...(19): siRNA sense strand
ucaaugaguaccagagaau

SEQ ID NO: 1296609 - RNA, 19 nt, Homo sapiens
  misc_RNA (1)...(19): siRNA sense strand
gcaguucaaccaggacuau

SEQ ID NO: 1296610 - RNA, 19 nt, Homo sapiens
  misc_RNA (1)...(19): siRNA sense strand
gugccgagcuacccaggau

SEQ ID NO: 1296611 - RNA, 19 nt, Homo sapiens
  misc_RNA (1)...(19): siRNA sense strand
cagggaaaccgugaugaaa

SEQ ID NO: 1296612 - RNA, 19 nt, Homo sapiens
  misc_RNA (1)...(19): siRNA sense strand
aaucuuggcucugaugaag

SEQ ID NO: 1296613 - RNA, 19 nt, Homo sapiens
  misc_RNA (1)...(19): siRNA sense strand
ucagggaaaccgugaugaa

SEQ ID NO: 1296614 - RNA, 19 nt, Homo sapiens
  misc_RNA (1)...(19): siRNA sense strand
gagccuacaaagcagaauu

SEQ ID NO: 1296615 - RNA, 19 nt, Homo sapiens
  misc_RNA (1)...(19): siRNA sense strand
gacuaucucucgggaaugg

SEQ ID NO: 1296616 - RNA, 19 nt, Homo sapiens
  misc_RNA (1)...(19): siRNA sense strand
cggcuuacggcaaggauuu

SEQ ID NO: 1296617 - RNA, 19 nt, Homo sapiens
  misc_RNA (1)...(19): siRNA sense strand
gaucugugguggcaaugac

SEQ ID NO: 1296618 - RNA, 19 nt, Homo sapiens
  misc_RNA (1)...(19): siRNA sense strand
agaccgaccuccuggacau

SEQ ID NO: 1296619 - RNA, 19 nt, Homo sapiens
  misc_RNA (1)...(19): siRNA sense strand
gaauuaaacagagccuaca

SEQ ID NO: 1296620 - RNA, 19 nt, Homo sapiens
  misc_RNA (1)...(19): siRNA sense strand
gagccaacaugcccaaccu

SEQ ID NO: 1296621 - RNA, 19 nt, Homo sapiens
  misc_RNA (1)...(19): siRNA sense strand
cggaagauucugcugaaga

SEQ ID NO: 1296622 - RNA, 19 nt, Homo sapiens
  misc_RNA (1)...(19): siRNA sense strand
gccgggacauugagaagag

SEQ ID NO: 1296623 - RNA, 19 nt, Homo sapiens
  misc_RNA (1)...(19): siRNA sense strand
caaguucaaugcgguucug

SEQ ID NO: 1296624 - RNA, 19 nt, Homo sapiens
  misc_RNA (1)...(19): siRNA sense strand
ggagauacuucaggggauu

SEQ ID NO: 1296625 - RNA, 19 nt, Homo sapiens
  misc_RNA (1)...(19): siRNA sense strand
caucagaucagaguauaag

SEQ ID NO: 1296626 - RNA, 19 nt, Homo sapiens
  misc_RNA (1)...(19): siRNA sense strand
cggcagcagauccuacuuu

SEQ ID NO: 1296627 - RNA, 19 nt, Homo sapiens
  misc_RNA (1)...(19): siRNA sense strand
cgacacaucagggcacuuc

SEQ ID NO: 1296628 - RNA, 19 nt, Homo sapiens
  misc_RNA (1)...(19): siRNA sense strand
cagaguauaagcggaugua

SEQ ID NO: 1296629 - RNA, 19 nt, Homo sapiens
  misc_RNA (1)...(19): siRNA sense strand
cacugaugcucccggcuuu

SEQ ID NO: 1296630 - RNA, 19 nt, Homo sapiens
  misc_RNA (1)...(19): siRNA sense strand
aggacuaucucucgggaau

SEQ ID NO: 1296631 - RNA, 19 nt, Homo sapiens
  misc_RNA (1)...(19): siRNA sense strand
acagacgaguccaaguuca

SEQ ID NO: 1296632 - RNA, 19 nt, Homo sapiens
  misc_RNA (1)...(19): siRNA sense strand
gaauaccccagccuucuuu

SEQ ID NO: 1296633 - RNA, 19 nt, Homo sapiens
  misc_RNA (1)...(19): siRNA sense strand
aagccugccugauugagau

SEQ ID NO: 1296634 - RNA, 19 nt, Homo sapiens
  misc_RNA (1)...(19): siRNA sense strand
uuaaacagagccuacaaag

SEQ ID NO: 1296635 - RNA, 19 nt, Homo sapiens
  misc_RNA (1)...(19): siRNA sense strand
gacaaucuuggcucugaug

SEQ ID NO: 1296636 - RNA, 19 nt, Homo sapiens
  misc_RNA (1)...(19): siRNA sense strand
cagcagauccuacuuuccu

SEQ ID NO: 1296637 - RNA, 19 nt, Homo sapiens
  misc_RNA (1)...(19): siRNA sense strand
aaugaguaccagagaauga

SEQ ID NO: 1296638 - RNA, 19 nt, Homo sapiens
  misc_RNA (1)...(19): siRNA sense strand
gcagccuguuccucccuau

SEQ ID NO: 1296639 - RNA, 19 nt, Homo sapiens
  misc_RNA (1)...(19): siRNA sense strand
ggaacagacgaguccaagu

SEQ ID NO: 1296640 - RNA, 19 nt, Homo sapiens
  misc_RNA (1)...(19): siRNA sense strand
gagauaaaggaagccauca

SEQ ID NO: 1296641 - RNA, 19 nt, Homo sapiens
  misc_RNA (1)...(19): siRNA sense strand
ggagaaccgccugggaaca

SEQ ID NO: 1296642 - RNA, 19 nt, Homo sapiens
  misc_RNA (1)...(19): siRNA sense strand
acaagcagcggcagcagau

SEQ ID NO: 1296643 - RNA, 19 nt, Homo sapiens
  misc_RNA (1)...(19): siRNA sense strand
accggaagauucugcugaa

SEQ ID NO: 1296644 - RNA, 19 nt, Homo sapiens
  misc_RNA (1)...(19): siRNA sense strand
cagacgaguccaaguucaa

SEQ ID NO: 1296645 - RNA, 19 nt, Homo sapiens
  misc_RNA (1)...(19): siRNA sense strand
gagaaccgccugggaacag

SEQ ID NO: 1296646 - RNA, 19 nt, Homo sapiens
  misc_RNA (1)...(19): siRNA sense strand
gaugaagccugccugauug

SEQ ID NO: 1296647 - RNA, 19 nt, Homo sapiens
  misc_RNA (1)...(19): siRNA sense strand
gaacagacgaguccaaguu

SEQ ID NO: 1296648 - RNA, 19 nt, Homo sapiens
  misc_RNA (1)...(19): siRNA sense strand
ugaaaugucucaagaauac

SEQ ID NO: 1296649 - RNA, 19 nt, Homo sapiens
  misc_RNA (1)...(19): siRNA sense strand
gcacaaacguggacauguc

SEQ ID NO: 1296650 - RNA, 19 nt, Homo sapiens
  misc_RNA (1)...(19): siRNA sense strand
cuacaaagcagaauucaaa

SEQ ID NO: 1296651 - RNA, 19 nt, Homo sapiens
  misc_RNA (1)...(19): siRNA sense strand
ggaagauucugcugaagau

SEQ ID NO: 1296652 - RNA, 19 nt, Homo sapiens
  misc_RNA (1)...(19): siRNA sense strand
gaagaucugugguggcaau

SEQ ID NO: 1296653 - RNA, 19 nt, Homo sapiens
  misc_RNA (1)...(19): siRNA sense strand
aaacagagccuacaaagca

SEQ ID NO: 1296654 - RNA, 19 nt, Homo sapiens
  misc_RNA (1)...(19): siRNA sense strand
ggugaaaugucucaagaau

SEQ ID NO: 1296655 - RNA, 19 nt, Homo sapiens
  misc_RNA (1)...(19): siRNA sense strand
gagcacauccgagaauuaa

SEQ ID NO: 1296656 - RNA, 19 nt, Homo sapiens
  misc_RNA (1)...(19): siRNA sense strand
gacaucagaucagaguaua

SEQ ID NO: 1296657 - RNA, 19 nt, Homo sapiens
  misc_RNA (1)...(19): siRNA sense strand
gaucugaaaucugaacugu

SEQ ID NO: 1296658 - RNA, 19 nt, Homo sapiens
  misc_RNA (1)...(19): siRNA sense strand
ucugaaaucugaacuguca

SEQ ID NO: 1296659 - RNA, 19 nt, Homo sapiens
  misc_RNA (1)...(19): siRNA sense strand
ggacaucagaucagaguau

SEQ ID NO: 1296660 - RNA, 19 nt, Homo sapiens
  misc_RNA (1)...(19): siRNA sense strand
ucaggaaacuuugagaaga

SEQ ID NO: 1296661 - RNA, 19 nt, Homo sapiens
  misc_RNA (1)...(19): siRNA sense strand
ccaguccucuuugacauuu

SEQ ID NO: 1296662 - RNA, 19 nt, Homo sapiens
  misc_RNA (1)...(19): siRNA sense strand
ccuccaggaugcccucaua

SEQ ID NO: 1296663 - RNA, 19 nt, Homo sapiens
  misc_RNA (1)...(19): siRNA sense strand
guggugaaaugucucaaga

SEQ ID NO: 1296664 - RNA, 19 nt, Homo sapiens
  misc_RNA (1)...(19): siRNA sense strand
ugaugaagccugccugauu

SEQ ID NO: 1296665 - RNA, 19 nt, Homo sapiens
  misc_RNA (1)...(19): siRNA sense strand
gauccuacuuuccuucaag

SEQ ID NO: 1296666 - RNA, 19 nt, Homo sapiens
  misc_RNA (1)...(19): siRNA sense strand
gugaaaugucucaagaaua

SEQ ID NO: 1296667 - RNA, 19 nt, Homo sapiens
  misc_RNA (1)...(19): siRNA sense strand
gaacugucaggaaacuuug

SEQ ID NO: 1296668 - RNA, 19 nt, Homo sapiens
  misc_RNA (1)...(19): siRNA sense strand
gcacauccgagaauuaaac

SEQ ID NO: 1296669 - RNA, 19 nt, Homo sapiens
  misc_RNA (1)...(19): siRNA sense strand
gauaaaggaagccaucaag

SEQ ID NO: 1296670 - RNA, 19 nt, Homo sapiens
  misc_RNA (1)...(19): siRNA sense strand
ggcagcagauccuacuuuc

SEQ ID NO: 1296671 - RNA, 19 nt, Homo sapiens
  misc_RNA (1)...(19): siRNA sense strand
gagaugcccaggagcugua

SEQ ID NO: 1296672 - RNA, 19 nt, Homo sapiens
  misc_RNA (1)...(19): siRNA sense strand
caacaugcccaaccuguac

SEQ ID NO: 1296673 - RNA, 19 nt, Homo sapiens
  misc_RNA (1)...(19): siRNA sense strand
gggaaaccgugaugaaagc

SEQ ID NO: 1296674 - RNA, 19 nt, Homo sapiens
  misc_RNA (1)...(19): siRNA sense strand
ugaacugucaggaaacuuu

SEQ ID NO: 1296675 - RNA, 19 nt, Homo sapiens
  misc_RNA (1)...(19): siRNA sense strand
gaagccugccugauugaga

SEQ ID NO: 1296676 - RNA, 19 nt, Homo sapiens
  misc_RNA (1)...(19): siRNA sense strand
ugagcacauccgagaauua

SEQ ID NO: 1296677 - RNA, 19 nt, Homo sapiens
  misc_RNA (1)...(19): siRNA sense strand
ccaacaugcccaaccugua

SEQ ID NO: 1296678 - RNA, 19 nt, Homo sapiens
  misc_RNA (1)...(19): siRNA sense strand
gaaacccacccuccaggau

SEQ ID NO: 1296679 - RNA, 19 nt, Homo sapiens
  misc_RNA (1)...(19): siRNA sense strand
caaaggaccggacccugau

SEQ ID NO: 1296680 - RNA, 19 nt, Homo sapiens
  misc_RNA (1)...(19): siRNA sense strand
gaaacuuugagaagacaau

SEQ ID NO: 1296681 - RNA, 19 nt, Homo sapiens
  misc_RNA (1)...(19): siRNA sense strand
gggauuaccggaagauucu

SEQ ID NO: 1296682 - RNA, 19 nt, Homo sapiens
  misc_RNA (1)...(19): siRNA sense strand
cauccgagaauuaaacaga

SEQ ID NO: 1296683 - RNA, 19 nt, Homo sapiens
  misc_RNA (1)...(19): siRNA sense strand
caggaaacuuugagaagac

SEQ ID NO: 1296684 - RNA, 19 nt, Homo sapiens
  misc_RNA (1)...(19): siRNA sense strand
ucaaugaguaccagagaau

SEQ ID NO: 1296685 - RNA, 19 nt, Homo sapiens
  misc_RNA (1)...(19): siRNA sense strand
gcaguucaaccaggacuau

SEQ ID NO: 1296686 - RNA, 19 nt, Homo sapiens
  misc_RNA (1)...(19): siRNA sense strand
gugccgagcuacccaggau

SEQ ID NO: 1296687 - RNA, 19 nt, Homo sapiens
  misc_RNA (1)...(19): siRNA sense strand
cagggaaaccgugaugaaa

SEQ ID NO: 1296688 - RNA, 19 nt, Homo sapiens
  misc_RNA (1)...(19): siRNA sense strand
aaucuuggcucugaugaag

SEQ ID NO: 1296689 - RNA, 19 nt, Homo sapiens
  misc_RNA (1)...(19): siRNA sense strand
ucagggaaaccgugaugaa

SEQ ID NO: 1296690 - RNA, 19 nt, Homo sapiens
  misc_RNA (1)...(19): siRNA sense strand
gagccuacaaagcagaauu

SEQ ID NO: 1296691 - RNA, 19 nt, Homo sapiens
  misc_RNA (1)...(19): siRNA sense strand
gacuaucucucgggaaugg

SEQ ID NO: 1296692 - RNA, 19 nt, Homo sapiens
  misc_RNA (1)...(19): siRNA sense strand
cggcuuacggcaaggauuu

SEQ ID NO: 1296693 - RNA, 19 nt, Homo sapiens
  misc_RNA (1)...(19): siRNA sense strand
gaucugugguggcaaugac

SEQ ID NO: 1296694 - RNA, 19 nt, Homo sapiens
  misc_RNA (1)...(19): siRNA sense strand
agaccgaccuccuggacau

SEQ ID NO: 1296695 - RNA, 19 nt, Homo sapiens
  misc_RNA (1)...(19): siRNA sense strand
gaauuaaacagagccuaca

SEQ ID NO: 1296696 - RNA, 19 nt, Homo sapiens
  misc_RNA (1)...(19): siRNA sense strand
gagccaacaugcccaaccu

SEQ ID NO: 1296697 - RNA, 19 nt, Homo sapiens
  misc_RNA (1)...(19): siRNA sense strand
cggaagauucugcugaaga

SEQ ID NO: 1296698 - RNA, 19 nt, Homo sapiens
  misc_RNA (1)...(19): siRNA sense strand
gccgggacauugagaagag

SEQ ID NO: 1296699 - RNA, 19 nt, Homo sapiens
  misc_RNA (1)...(19): siRNA sense strand
caaguucaaugcgguucug

SEQ ID NO: 1296700 - RNA, 19 nt, Homo sapiens
  misc_RNA (1)...(19): siRNA sense strand
ggagauacuucaggggauu

SEQ ID NO: 1296701 - RNA, 19 nt, Homo sapiens
  misc_RNA (1)...(19): siRNA sense strand
caucagaucagaguauaag

SEQ ID NO: 1296702 - RNA, 19 nt, Homo sapiens
  misc_RNA (1)...(19): siRNA sense strand
cggcagcagauccuacuuu

SEQ ID NO: 1296703 - RNA, 19 nt, Homo sapiens
  misc_RNA (1)...(19): siRNA sense strand
cgacacaucagggcacuuc

SEQ ID NO: 1296704 - RNA, 19 nt, Homo sapiens
  misc_RNA (1)...(19): siRNA sense strand
cagaguauaagcggaugua

SEQ ID NO: 1296705 - RNA, 19 nt, Homo sapiens
  misc_RNA (1)...(19): siRNA sense strand
cacugaugcucccggcuuu

SEQ ID NO: 1296706 - RNA, 19 nt, Homo sapiens
  misc_RNA (1)...(19): siRNA sense strand
aggacuaucucucgggaau

SEQ ID NO: 1296707 - RNA, 19 nt, Homo sapiens
  misc_RNA (1)...(19): siRNA sense strand
acagacgaguccaaguuca

SEQ ID NO: 1296708 - RNA, 19 nt, Homo sapiens
  misc_RNA (1)...(19): siRNA sense strand
gaauaccccagccuucuuu

SEQ ID NO: 1296709 - RNA, 19 nt, Homo sapiens
  misc_RNA (1)...(19): siRNA sense strand
aagccugccugauugagau

SEQ ID NO: 1296710 - RNA, 19 nt, Homo sapiens
  misc_RNA (1)...(19): siRNA sense strand
uuaaacagagccuacaaag

SEQ ID NO: 1296711 - RNA, 19 nt, Homo sapiens
  misc_RNA (1)...(19): siRNA sense strand
gacaaucuuggcucugaug

SEQ ID NO: 1296712 - RNA, 19 nt, Homo sapiens
  misc_RNA (1)...(19): siRNA sense strand
cagcagauccuacuuuccu

SEQ ID NO: 1296713 - RNA, 19 nt, Homo sapiens
  misc_RNA (1)...(19): siRNA sense strand
aaugaguaccagagaauga

SEQ ID NO: 1296714 - RNA, 19 nt, Homo sapiens
  misc_RNA (1)...(19): siRNA sense strand
gcagccuguuccucccuau

SEQ ID NO: 1296715 - RNA, 19 nt, Homo sapiens
  misc_RNA (1)...(19): siRNA sense strand
ggaacagacgaguccaagu

SEQ ID NO: 1296716 - RNA, 19 nt, Homo sapiens
  misc_RNA (1)...(19): siRNA sense strand
gagauaaaggaagccauca

SEQ ID NO: 1296717 - RNA, 19 nt, Homo sapiens
  misc_RNA (1)...(19): siRNA sense strand
ggagaaccgccugggaaca

SEQ ID NO: 1296718 - RNA, 19 nt, Homo sapiens
  misc_RNA (1)...(19): siRNA sense strand
acaagcagcggcagcagau

SEQ ID NO: 1296719 - RNA, 19 nt, Homo sapiens
  misc_RNA (1)...(19): siRNA sense strand
accggaagauucugcugaa

SEQ ID NO: 1296720 - RNA, 19 nt, Homo sapiens
  misc_RNA (1)...(19): siRNA sense strand
cagacgaguccaaguucaa

SEQ ID NO: 1296721 - RNA, 19 nt, Homo sapiens
  misc_RNA (1)...(19): siRNA sense strand
gagaaccgccugggaacag

SEQ ID NO: 1296722 - RNA, 19 nt, Homo sapiens
  misc_RNA (1)...(19): siRNA sense strand
gaugaagccugccugauug

SEQ ID NO: 1296723 - RNA, 19 nt, Homo sapiens
  misc_RNA (1)...(19): siRNA sense strand
gaacagacgaguccaaguu

SEQ ID NO: 1296724 - RNA, 19 nt, Homo sapiens
  misc_RNA (1)...(19): siRNA sense strand
ugaaaugucucaagaauac

SEQ ID NO: 1296725 - RNA, 19 nt, Homo sapiens
  misc_RNA (1)...(19): siRNA sense strand
gcacaaacguggacauguc

SEQ ID NO: 1296726 - RNA, 19 nt, Homo sapiens
  misc_RNA (1)...(19): siRNA sense strand
cuacaaagcagaauucaaa

SEQ ID NO: 1296727 - RNA, 19 nt, Homo sapiens
  misc_RNA (1)...(19): siRNA sense strand
ggaagauucugcugaagau

SEQ ID NO: 1296728 - RNA, 19 nt, Homo sapiens
  misc_RNA (1)...(19): siRNA sense strand
gaagaucugugguggcaau

SEQ ID NO: 1296729 - RNA, 19 nt, Homo sapiens
  misc_RNA (1)...(19): siRNA sense strand
aaacagagccuacaaagca

SEQ ID NO: 1296730 - RNA, 19 nt, Homo sapiens
  misc_RNA (1)...(19): siRNA sense strand
ggugaaaugucucaagaau

SEQ ID NO: 1296731 - RNA, 19 nt, Homo sapiens
  misc_RNA (1)...(19): siRNA sense strand
gagcacauccgagaauuaa

SEQ ID NO: 1296732 - RNA, 19 nt, Homo sapiens
  misc_RNA (1)...(19): siRNA sense strand
gacaucagaucagaguaua

SEQ ID NO: 1296733 - RNA, 19 nt, Homo sapiens
  misc_RNA (1)...(19): siRNA sense strand
gaucugaaaucugaacugu

SEQ ID NO: 1296734 - RNA, 19 nt, Homo sapiens
  misc_RNA (1)...(19): siRNA sense strand
ucugaaaucugaacuguca

SEQ ID NO: 1296735 - RNA, 19 nt, Homo sapiens
  misc_RNA (1)...(19): siRNA sense strand
ggacaucagaucagaguau

SEQ ID NO: 1296736 - RNA, 19 nt, Homo sapiens
  misc_RNA (1)...(19): siRNA sense strand
ucaggaaacuuugagaaga

SEQ ID NO: 1296737 - RNA, 19 nt, Homo sapiens
  misc_RNA (1)...(19): siRNA sense strand
ccaguccucuuugacauuu

SEQ ID NO: 1296738 - RNA, 19 nt, Homo sapiens
  misc_RNA (1)...(19): siRNA sense strand
ccuccaggaugcccucaua

SEQ ID NO: 1296739 - RNA, 19 nt, Homo sapiens
  misc_RNA (1)...(19): siRNA sense strand
guggugaaaugucucaaga

SEQ ID NO: 1296740 - RNA, 19 nt, Homo sapiens
  misc_RNA (1)...(19): siRNA sense strand
ugaugaagccugccugauu

SEQ ID NO: 1296741 - RNA, 19 nt, Homo sapiens
  misc_RNA (1)...(19): siRNA sense strand
gauccuacuuuccuucaag

SEQ ID NO: 1296742 - RNA, 19 nt, Homo sapiens
  misc_RNA (1)...(19): siRNA sense strand
gugaaaugucucaagaaua

SEQ ID NO: 1296743 - RNA, 19 nt, Homo sapiens
  misc_RNA (1)...(19): siRNA sense strand
gaacugucaggaaacuuug

SEQ ID NO: 1296744 - RNA, 19 nt, Homo sapiens
  misc_RNA (1)...(19): siRNA sense strand
gcacauccgagaauuaaac

SEQ ID NO: 1296745 - RNA, 19 nt, Homo sapiens
  misc_RNA (1)...(19): siRNA sense strand
gauaaaggaagccaucaag

SEQ ID NO: 1296746 - RNA, 19 nt, Homo sapiens
  misc_RNA (1)...(19): siRNA sense strand
ggcagcagauccuacuuuc

SEQ ID NO: 1296747 - RNA, 19 nt, Homo sapiens
  misc_RNA (1)...(19): siRNA sense strand
gagaugcccaggagcugua

SEQ ID NO: 1296748 - RNA, 19 nt, Homo sapiens
  misc_RNA (1)...(19): siRNA sense strand
caacaugcccaaccuguac

SEQ ID NO: 1296749 - RNA, 19 nt, Homo sapiens
  misc_RNA (1)...(19): siRNA sense strand
gggaaaccgugaugaaagc

SEQ ID NO: 1296750 - RNA, 19 nt, Homo sapiens
  misc_RNA (1)...(19): siRNA sense strand
ugaacugucaggaaacuuu

SEQ ID NO: 1296751 - RNA, 19 nt, Homo sapiens
  misc_RNA (1)...(19): siRNA sense strand
gaagccugccugauugaga

SEQ ID NO: 1296752 - RNA, 19 nt, Homo sapiens
  misc_RNA (1)...(19): siRNA sense strand
ugagcacauccgagaauua

SEQ ID NO: 1296753 - RNA, 19 nt, Homo sapiens
  misc_RNA (1)...(19): siRNA sense strand
ccaacaugcccaaccugua

SEQ ID NO: 1296754 - RNA, 19 nt, Homo sapiens
  misc_RNA (1)...(19): siRNA sense strand
gaaacccacccuccaggau

SEQ ID NO: 1296755 - RNA, 19 nt, Homo sapiens
  misc_RNA (1)...(19): siRNA sense strand
caaaggaccggacccugau

SEQ ID NO: 1296756 - RNA, 19 nt, Homo sapiens
  misc_RNA (1)...(19): siRNA sense strand
gaaacuuugagaagacaau

SEQ ID NO: 1296757 - RNA, 19 nt, Homo sapiens
  misc_RNA (1)...(19): siRNA sense strand
gggauuaccggaagauucu

SEQ ID NO: 1296758 - RNA, 19 nt, Homo sapiens
  misc_RNA (1)...(19): siRNA sense strand
cauccgagaauuaaacaga

SEQ ID NO: 1296759 - RNA, 19 nt, Homo sapiens
  misc_RNA (1)...(19): siRNA sense strand
caggaaacuuugagaagac

SEQ ID NO: 1296760 - RNA, 19 nt, Homo sapiens
  misc_RNA (1)...(19): siRNA sense strand
ucaaugaguaccagagaau

SEQ ID NO: 1296761 - RNA, 19 nt, Homo sapiens
  misc_RNA (1)...(19): siRNA sense strand
gcaguucaaccaggacuau

SEQ ID NO: 1296762 - RNA, 19 nt, Homo sapiens
  misc_RNA (1)...(19): siRNA sense strand
gugccgagcuacccaggau

SEQ ID NO: 1296763 - RNA, 19 nt, Homo sapiens
  misc_RNA (1)...(19): siRNA sense strand
cagggaaaccgugaugaaa

SEQ ID NO: 1296764 - RNA, 19 nt, Homo sapiens
  misc_RNA (1)...(19): siRNA sense strand
aaucuuggcucugaugaag

SEQ ID NO: 1296765 - RNA, 19 nt, Homo sapiens
  misc_RNA (1)...(19): siRNA sense strand
ucagggaaaccgugaugaa

SEQ ID NO: 1296766 - RNA, 19 nt, Homo sapiens
  misc_RNA (1)...(19): siRNA sense strand
gagccuacaaagcagaauu

SEQ ID NO: 1296767 - RNA, 19 nt, Homo sapiens
  misc_RNA (1)...(19): siRNA sense strand
gacuaucucucgggaaugg

SEQ ID NO: 1296768 - RNA, 19 nt, Homo sapiens
  misc_RNA (1)...(19): siRNA sense strand
cggcuuacggcaaggauuu

SEQ ID NO: 1296769 - RNA, 19 nt, Homo sapiens
  misc_RNA (1)...(19): siRNA sense strand
gaucugugguggcaaugac

SEQ ID NO: 1296770 - RNA, 19 nt, Homo sapiens
  misc_RNA (1)...(19): siRNA sense strand
agaccgaccuccuggacau

SEQ ID NO: 1296771 - RNA, 19 nt, Homo sapiens
  misc_RNA (1)...(19): siRNA sense strand
gaauuaaacagagccuaca

SEQ ID NO: 1296772 - RNA, 19 nt, Homo sapiens
  misc_RNA (1)...(19): siRNA sense strand
gagccaacaugcccaaccu

SEQ ID NO: 1296773 - RNA, 19 nt, Homo sapiens
  misc_RNA (1)...(19): siRNA sense strand
cggaagauucugcugaaga

SEQ ID NO: 1296774 - RNA, 19 nt, Homo sapiens
  misc_RNA (1)...(19): siRNA sense strand
gccgggacauugagaagag

SEQ ID NO: 1296775 - RNA, 19 nt, Homo sapiens
  misc_RNA (1)...(19): siRNA sense strand
caaguucaaugcgguucug

SEQ ID NO: 1296776 - RNA, 19 nt, Homo sapiens
  misc_RNA (1)...(19): siRNA sense strand
ggagauacuucaggggauu

SEQ ID NO: 1296777 - RNA, 19 nt, Homo sapiens
  misc_RNA (1)...(19): siRNA sense strand
caucagaucagaguauaag

SEQ ID NO: 1296778 - RNA, 19 nt, Homo sapiens
  misc_RNA (1)...(19): siRNA sense strand
cggcagcagauccuacuuu

SEQ ID NO: 1296779 - RNA, 19 nt, Homo sapiens
  misc_RNA (1)...(19): siRNA sense strand
cgacacaucagggcacuuc

SEQ ID NO: 1296780 - RNA, 19 nt, Homo sapiens
  misc_RNA (1)...(19): siRNA sense strand
cagaguauaagcggaugua

SEQ ID NO: 1296781 - RNA, 19 nt, Homo sapiens
  misc_RNA (1)...(19): siRNA sense strand
cacugaugcucccggcuuu

SEQ ID NO: 1296782 - RNA, 19 nt, Homo sapiens
  misc_RNA (1)...(19): siRNA sense strand
aggacuaucucucgggaau

SEQ ID NO: 1296783 - RNA, 19 nt, Homo sapiens
  misc_RNA (1)...(19): siRNA sense strand
acagacgaguccaaguuca

SEQ ID NO: 1296784 - RNA, 19 nt, Homo sapiens
  misc_RNA (1)...(19): siRNA sense strand
gaauaccccagccuucuuu

SEQ ID NO: 1296785 - RNA, 19 nt, Homo sapiens
  misc_RNA (1)...(19): siRNA sense strand
aagccugccugauugagau

SEQ ID NO: 1296786 - RNA, 19 nt, Homo sapiens
  misc_RNA (1)...(19): siRNA sense strand
uuaaacagagccuacaaag

SEQ ID NO: 1296787 - RNA, 19 nt, Homo sapiens
  misc_RNA (1)...(19): siRNA sense strand
gacaaucuuggcucugaug

SEQ ID NO: 1296788 - RNA, 19 nt, Homo sapiens
  misc_RNA (1)...(19): siRNA sense strand
cagcagauccuacuuuccu

SEQ ID NO: 1296789 - RNA, 19 nt, Homo sapiens
  misc_RNA (1)...(19): siRNA sense strand
aaugaguaccagagaauga

SEQ ID NO: 1296790 - RNA, 19 nt, Homo sapiens
  misc_RNA (1)...(19): siRNA sense strand
gcagccuguuccucccuau

SEQ ID NO: 1296791 - RNA, 19 nt, Homo sapiens
  misc_RNA (1)...(19): siRNA sense strand
ggaacagacgaguccaagu

SEQ ID NO: 1296792 - RNA, 19 nt, Homo sapiens
  misc_RNA (1)...(19): siRNA sense strand
gagauaaaggaagccauca

SEQ ID NO: 1296793 - RNA, 19 nt, Homo sapiens
  misc_RNA (1)...(19): siRNA sense strand
ggagaaccgccugggaaca

SEQ ID NO: 1296794 - RNA, 19 nt, Homo sapiens
  misc_RNA (1)...(19): siRNA sense strand
acaagcagcggcagcagau

SEQ ID NO: 1296795 - RNA, 19 nt, Homo sapiens
  misc_RNA (1)...(19): siRNA sense strand
accggaagauucugcugaa

SEQ ID NO: 1296796 - RNA, 19 nt, Homo sapiens
  misc_RNA (1)...(19): siRNA sense strand
cagacgaguccaaguucaa

SEQ ID NO: 1296797 - RNA, 19 nt, Homo sapiens
  misc_RNA (1)...(19): siRNA sense strand
gagaaccgccugggaacag

SEQ ID NO: 1296798 - RNA, 19 nt, Homo sapiens
  misc_RNA (1)...(19): siRNA sense strand
cauuuaacgucauauguga

SEQ ID NO: 1296799 - RNA, 19 nt, Homo sapiens
  misc_RNA (1)...(19): siRNA sense strand
cgucauaugugauaaugug

SEQ ID NO: 1296800 - RNA, 19 nt, Homo sapiens
  misc_RNA (1)...(19): siRNA sense strand
ggaagaacacagagaagga

SEQ ID NO: 1296801 - RNA, 19 nt, Homo sapiens
  misc_RNA (1)...(19): siRNA sense strand
ccugguggcugaccuggua

SEQ ID NO: 1296802 - RNA, 19 nt, Homo sapiens
  misc_RNA (1)...(19): siRNA sense strand
uggcugaccugguacaaga

SEQ ID NO: 1296803 - RNA, 19 nt, Homo sapiens
  misc_RNA (1)...(19): siRNA sense strand
agaccugugugcagcauuu

SEQ ID NO: 1296804 - RNA, 19 nt, Homo sapiens
  misc_RNA (1)...(19): siRNA sense strand
gcauuuaacgucauaugug

SEQ ID NO: 1296805 - RNA, 19 nt, Homo sapiens
  misc_RNA (1)...(19): siRNA sense strand
ucacugagaaucuggaaga

SEQ ID NO: 1296806 - RNA, 19 nt, Homo sapiens
  misc_RNA (1)...(19): siRNA sense strand
cugagaaucuggaagaaca

SEQ ID NO: 1296807 - RNA, 19 nt, Homo sapiens
  misc_RNA (1)...(19): siRNA sense strand
gugcgggagucacugagaa

SEQ ID NO: 1296808 - RNA, 19 nt, Homo sapiens
  misc_RNA (1)...(19): siRNA sense strand
gaagaccugugugcagcau

SEQ ID NO: 1296809 - RNA, 19 nt, Homo sapiens
  misc_RNA (1)...(19): siRNA sense strand
acaccaagaucgacagcau

SEQ ID NO: 1296810 - RNA, 19 nt, Homo sapiens
  misc_RNA (1)...(19): siRNA sense strand
gccuagaccucuucuccau

SEQ ID NO: 1296811 - RNA, 19 nt, Homo sapiens
  misc_RNA (1)...(19): siRNA sense strand
ugaccgagcucaaguuccu

SEQ ID NO: 1296812 - RNA, 19 nt, Homo sapiens
  misc_RNA (1)...(19): siRNA sense strand
gggagucacugagaaucug

SEQ ID NO: 1296813 - RNA, 19 nt, Homo sapiens
  misc_RNA (1)...(19): siRNA sense strand
gaacacagagaaggagaac

SEQ ID NO: 1296814 - RNA, 19 nt, Homo sapiens
  misc_RNA (1)...(19): siRNA sense strand
ugcagcauuuaacgucaua

SEQ ID NO: 1296815 - RNA, 19 nt, Homo sapiens
  misc_RNA (1)...(19): siRNA sense strand
gauaauguggggaaagauu

SEQ ID NO: 1296816 - RNA, 19 nt, Homo sapiens
  misc_RNA (1)...(19): siRNA sense strand
agaaggagaacgcaacagu

SEQ ID NO: 1296817 - RNA, 19 nt, Homo sapiens
  misc_RNA (1)...(19): siRNA sense strand
gaccugugugcagcauuua

SEQ ID NO: 1296818 - RNA, 19 nt, Homo sapiens
  misc_RNA (1)...(19): siRNA sense strand
gugcagcauuuaacgucau

SEQ ID NO: 1296819 - RNA, 19 nt, Homo sapiens
  misc_RNA (1)...(19): siRNA sense strand
ggaacucagacgcaucuac

SEQ ID NO: 1296820 - RNA, 19 nt, Homo sapiens
  misc_RNA (1)...(19): siRNA sense strand
ggcaaaugcugaaagauuc

SEQ ID NO: 1296821 - RNA, 19 nt, Homo sapiens
  misc_RNA (1)...(19): siRNA sense strand
gggcauauacuguguagga

SEQ ID NO: 1296822 - RNA, 19 nt, Homo sapiens
  misc_RNA (1)...(19): siRNA sense strand
gagcacagcgggcauauac

SEQ ID NO: 1296823 - RNA, 19 nt, Homo sapiens
  misc_RNA (1)...(19): siRNA sense strand
gguggcaaaugcugaaaga

SEQ ID NO: 1296824 - RNA, 19 nt, Homo sapiens
  misc_RNA (1)...(19): siRNA sense strand
gcacagcgggcauauacug

SEQ ID NO: 1296825 - RNA, 19 nt, Homo sapiens
  misc_RNA (1)...(19): siRNA sense strand
ugccaacccugaagauuga

SEQ ID NO: 1296826 - RNA, 19 nt, Homo sapiens
  misc_RNA (1)...(19): siRNA sense strand
uggcaaaugcugaaagauu

SEQ ID NO: 1296827 - RNA, 19 nt, Homo sapiens
  misc_RNA (1)...(19): siRNA sense strand
gugccaacccugaagauug

SEQ ID NO: 1296828 - RNA, 19 nt, Homo sapiens
  misc_RNA (1)...(19): siRNA sense strand
ccagaacgccaucacuugu

SEQ ID NO: 1296829 - RNA, 19 nt, Homo sapiens
  misc_RNA (1)...(19): siRNA sense strand
gcaagugggagaggagaug

SEQ ID NO: 1296830 - RNA, 19 nt, Homo sapiens
  misc_RNA (1)...(19): siRNA sense strand
gcccagaacgccaucacuu

SEQ ID NO: 1296831 - RNA, 19 nt, Homo sapiens
  misc_RNA (1)...(19): siRNA sense strand
cagcgggcauauacugugu

SEQ ID NO: 1296832 - RNA, 19 nt, Homo sapiens
  misc_RNA (1)...(19): siRNA sense strand
gcgggcauauacuguguag

SEQ ID NO: 1296833 - RNA, 19 nt, Homo sapiens
  misc_RNA (1)...(19): siRNA sense strand
accaucagcuccaucaaca

SEQ ID NO: 1296834 - RNA, 19 nt, Homo sapiens
  misc_RNA (1)...(19): siRNA sense strand
uuaacgcccuggagcagau

SEQ ID NO: 1296835 - RNA, 19 nt, Homo sapiens
  misc_RNA (1)...(19): siRNA sense strand
caucagcuccaucaacaag

SEQ ID NO: 1296836 - RNA, 19 nt, Homo sapiens
  misc_RNA (1)...(19): siRNA sense strand
aaucaccauucaccaguca

SEQ ID NO: 1296837 - RNA, 19 nt, Homo sapiens
  misc_RNA (1)...(19): siRNA sense strand
cccugaagauugauggaau

SEQ ID NO: 1296838 - RNA, 19 nt, Homo sapiens
  misc_RNA (1)...(19): siRNA sense strand
ucagcuccaucaacaagag

SEQ ID NO: 1296839 - RNA, 19 nt, Homo sapiens
  misc_RNA (1)...(19): siRNA sense strand
agaggcugcuggucuugga

SEQ ID NO: 1296840 - RNA, 19 nt, Homo sapiens
  misc_RNA (1)...(19): siRNA sense strand
cccagaacgccaucacuug

SEQ ID NO: 1296841 - RNA, 19 nt, Homo sapiens
  misc_RNA (1)...(19): siRNA sense strand
ugucuguccugaagcaagu

SEQ ID NO: 1296842 - RNA, 19 nt, Homo sapiens
  misc_RNA (1)...(19): siRNA sense strand
gaauugcucuggccuugaa

SEQ ID NO: 1296843 - RNA, 19 nt, Homo sapiens
  misc_RNA (1)...(19): siRNA sense strand
ggcaaaugcugaaagauuc

SEQ ID NO: 1296844 - RNA, 19 nt, Homo sapiens
  misc_RNA (1)...(19): siRNA sense strand
ccaucaaucucauaaagga

SEQ ID NO: 1296845 - RNA, 19 nt, Homo sapiens
  misc_RNA (1)...(19): siRNA sense strand
gggcauauacuguguagga

SEQ ID NO: 1296846 - RNA, 19 nt, Homo sapiens
  misc_RNA (1)...(19): siRNA sense strand
gagcacagcgggcauauac

SEQ ID NO: 1296847 - RNA, 19 nt, Homo sapiens
  misc_RNA (1)...(19): siRNA sense strand
gguggcaaaugcugaaaga

SEQ ID NO: 1296848 - RNA, 19 nt, Homo sapiens
  misc_RNA (1)...(19): siRNA sense strand
gcccaucaaucucauaaag

SEQ ID NO: 1296849 - RNA, 19 nt, Homo sapiens
  misc_RNA (1)...(19): siRNA sense strand
gcacagcgggcauauacug

SEQ ID NO: 1296850 - RNA, 19 nt, Homo sapiens
  misc_RNA (1)...(19): siRNA sense strand
ugccaacccugaagauuga

SEQ ID NO: 1296851 - RNA, 19 nt, Homo sapiens
  misc_RNA (1)...(19): siRNA sense strand
uggcaaaugcugaaagauu

SEQ ID NO: 1296852 - RNA, 19 nt, Homo sapiens
  misc_RNA (1)...(19): siRNA sense strand
cauccucuauuccuauuuc

SEQ ID NO: 1296853 - RNA, 19 nt, Homo sapiens
  misc_RNA (1)...(19): siRNA sense strand
ucauggagaguucgaauug

SEQ ID NO: 1296854 - RNA, 19 nt, Homo sapiens
  misc_RNA (1)...(19): siRNA sense strand
gugccaacccugaagauug

SEQ ID NO: 1296855 - RNA, 19 nt, Homo sapiens
  misc_RNA (1)...(19): siRNA sense strand
ggacuuccaggcacugaau

SEQ ID NO: 1296856 - RNA, 19 nt, Homo sapiens
  misc_RNA (1)...(19): siRNA sense strand
ccagaacgccaucacuugu

SEQ ID NO: 1296857 - RNA, 19 nt, Homo sapiens
  misc_RNA (1)...(19): siRNA sense strand
cgaagcuccugcucaugga

SEQ ID NO: 1296858 - RNA, 19 nt, Homo sapiens
  misc_RNA (1)...(19): siRNA sense strand
gcaagugggagaggagaug

SEQ ID NO: 1296859 - RNA, 19 nt, Homo sapiens
  misc_RNA (1)...(19): siRNA sense strand
gcccagaacgccaucacuu

SEQ ID NO: 1296860 - RNA, 19 nt, Homo sapiens
  misc_RNA (1)...(19): siRNA sense strand
cagcgggcauauacugugu

SEQ ID NO: 1296861 - RNA, 19 nt, Homo sapiens
  misc_RNA (1)...(19): siRNA sense strand
uccaggcacugaauccuau

SEQ ID NO: 1296862 - RNA, 19 nt, Homo sapiens
  misc_RNA (1)...(19): siRNA sense strand
gcgggcauauacuguguag

SEQ ID NO: 1296863 - RNA, 19 nt, Homo sapiens
  misc_RNA (1)...(19): siRNA sense strand
accaucagcuccaucaaca

SEQ ID NO: 1296864 - RNA, 19 nt, Homo sapiens
  misc_RNA (1)...(19): siRNA sense strand
uuaacgcccuggagcagau

SEQ ID NO: 1296865 - RNA, 19 nt, Homo sapiens
  misc_RNA (1)...(19): siRNA sense strand
caucagcuccaucaacaag

SEQ ID NO: 1296866 - RNA, 19 nt, Homo sapiens
  misc_RNA (1)...(19): siRNA sense strand
gccaacaguuuucuaagga

SEQ ID NO: 1296867 - RNA, 19 nt, Homo sapiens
  misc_RNA (1)...(19): siRNA sense strand
aaucaccauucaccaguca

SEQ ID NO: 1296868 - RNA, 19 nt, Homo sapiens
  misc_RNA (1)...(19): siRNA sense strand
agacggugcccaucaaucu

SEQ ID NO: 1296869 - RNA, 19 nt, Homo sapiens
  misc_RNA (1)...(19): siRNA sense strand
gcucauggagaguucgaau

SEQ ID NO: 1296870 - RNA, 19 nt, Homo sapiens
  misc_RNA (1)...(19): siRNA sense strand
ggcacugaauccuaugaag

SEQ ID NO: 1296871 - RNA, 19 nt, Homo sapiens
  misc_RNA (1)...(19): siRNA sense strand
gugcccaucaaucucauaa

SEQ ID NO: 1296872 - RNA, 19 nt, Homo sapiens
  misc_RNA (1)...(19): siRNA sense strand
cccugaagauugauggaau

SEQ ID NO: 1296873 - RNA, 19 nt, Homo sapiens
  misc_RNA (1)...(19): siRNA sense strand
cccauccucuauuccuauu

SEQ ID NO: 1296874 - RNA, 19 nt, Homo sapiens
  misc_RNA (1)...(19): siRNA sense strand
agaggcugcuggucuugga

SEQ ID NO: 1296875 - RNA, 19 nt, Homo sapiens
  misc_RNA (1)...(19): siRNA sense strand
ucagcuccaucaacaagag

SEQ ID NO: 1296876 - RNA, 19 nt, Homo sapiens
  misc_RNA (1)...(19): siRNA sense strand
ugucuguccugaagcaagu

SEQ ID NO: 1296877 - RNA, 19 nt, Homo sapiens
  misc_RNA (1)...(19): siRNA sense strand
gcccauccucuauuccuau

SEQ ID NO: 1296878 - RNA, 19 nt, Homo sapiens
  misc_RNA (1)...(19): siRNA sense strand
cccagaacgccaucacuug

SEQ ID NO: 1296879 - RNA, 19 nt, Homo sapiens
  misc_RNA (1)...(19): siRNA sense strand
gaauugcucuggccuugaa

SEQ ID NO: 1296880 - RNA, 19 nt, Homo sapiens
  misc_RNA (1)...(19): siRNA sense strand
ggcaaaugcugaaagauuc

SEQ ID NO: 1296881 - RNA, 19 nt, Homo sapiens
  misc_RNA (1)...(19): siRNA sense strand
ccaucaaucucauaaagga

SEQ ID NO: 1296882 - RNA, 19 nt, Homo sapiens
  misc_RNA (1)...(19): siRNA sense strand
gggcauauacuguguagga

SEQ ID NO: 1296883 - RNA, 19 nt, Homo sapiens
  misc_RNA (1)...(19): siRNA sense strand
gagcacagcgggcauauac

SEQ ID NO: 1296884 - RNA, 19 nt, Homo sapiens
  misc_RNA (1)...(19): siRNA sense strand
gguggcaaaugcugaaaga

SEQ ID NO: 1296885 - RNA, 19 nt, Homo sapiens
  misc_RNA (1)...(19): siRNA sense strand
gcccaucaaucucauaaag

SEQ ID NO: 1296886 - RNA, 19 nt, Homo sapiens
  misc_RNA (1)...(19): siRNA sense strand
gcacagcgggcauauacug

SEQ ID NO: 1296887 - RNA, 19 nt, Homo sapiens
  misc_RNA (1)...(19): siRNA sense strand
ugccaacccugaagauuga

SEQ ID NO: 1296888 - RNA, 19 nt, Homo sapiens
  misc_RNA (1)...(19): siRNA sense strand
uggcaaaugcugaaagauu

SEQ ID NO: 1296889 - RNA, 19 nt, Homo sapiens
  misc_RNA (1)...(19): siRNA sense strand
cauccucuauuccuauuuc

SEQ ID NO: 1296890 - RNA, 19 nt, Homo sapiens
  misc_RNA (1)...(19): siRNA sense strand
ucauggagaguucgaauug

SEQ ID NO: 1296891 - RNA, 19 nt, Homo sapiens
  misc_RNA (1)...(19): siRNA sense strand
gugccaacccugaagauug

SEQ ID NO: 1296892 - RNA, 19 nt, Homo sapiens
  misc_RNA (1)...(19): siRNA sense strand
ggacuuccaggcacugaau

SEQ ID NO: 1296893 - RNA, 19 nt, Homo sapiens
  misc_RNA (1)...(19): siRNA sense strand
ccagaacgccaucacuugu

SEQ ID NO: 1296894 - RNA, 19 nt, Homo sapiens
  misc_RNA (1)...(19): siRNA sense strand
cgaagcuccugcucaugga

SEQ ID NO: 1296895 - RNA, 19 nt, Homo sapiens
  misc_RNA (1)...(19): siRNA sense strand
gcaagugggagaggagaug

SEQ ID NO: 1296896 - RNA, 19 nt, Homo sapiens
  misc_RNA (1)...(19): siRNA sense strand
gcccagaacgccaucacuu

SEQ ID NO: 1296897 - RNA, 19 nt, Homo sapiens
  misc_RNA (1)...(19): siRNA sense strand
cagcgggcauauacugugu

SEQ ID NO: 1296898 - RNA, 19 nt, Homo sapiens
  misc_RNA (1)...(19): siRNA sense strand
uccaggcacugaauccuau

SEQ ID NO: 1296899 - RNA, 19 nt, Homo sapiens
  misc_RNA (1)...(19): siRNA sense strand
gcgggcauauacuguguag

SEQ ID NO: 1296900 - RNA, 19 nt, Homo sapiens
  misc_RNA (1)...(19): siRNA sense strand
accaucagcuccaucaaca

SEQ ID NO: 1296901 - RNA, 19 nt, Homo sapiens
  misc_RNA (1)...(19): siRNA sense strand
uuaacgcccuggagcagau

SEQ ID NO: 1296902 - RNA, 19 nt, Homo sapiens
  misc_RNA (1)...(19): siRNA sense strand
caucagcuccaucaacaag

SEQ ID NO: 1296903 - RNA, 19 nt, Homo sapiens
  misc_RNA (1)...(19): siRNA sense strand
gccaacaguuuucuaagga

SEQ ID NO: 1296904 - RNA, 19 nt, Homo sapiens
  misc_RNA (1)...(19): siRNA sense strand
aaucaccauucaccaguca

SEQ ID NO: 1296905 - RNA, 19 nt, Homo sapiens
  misc_RNA (1)...(19): siRNA sense strand
agacggugcccaucaaucu

SEQ ID NO: 1296906 - RNA, 19 nt, Homo sapiens
  misc_RNA (1)...(19): siRNA sense strand
gcucauggagaguucgaau

SEQ ID NO: 1296907 - RNA, 19 nt, Homo sapiens
  misc_RNA (1)...(19): siRNA sense strand
ggcacugaauccuaugaag

SEQ ID NO: 1296908 - RNA, 19 nt, Homo sapiens
  misc_RNA (1)...(19): siRNA sense strand
gugcccaucaaucucauaa

SEQ ID NO: 1296909 - RNA, 19 nt, Homo sapiens
  misc_RNA (1)...(19): siRNA sense strand
cccugaagauugauggaau

SEQ ID NO: 1296910 - RNA, 19 nt, Homo sapiens
  misc_RNA (1)...(19): siRNA sense strand
cccauccucuauuccuauu

SEQ ID NO: 1296911 - RNA, 19 nt, Homo sapiens
  misc_RNA (1)...(19): siRNA sense strand
agaggcugcuggucuugga

SEQ ID NO: 1296912 - RNA, 19 nt, Homo sapiens
  misc_RNA (1)...(19): siRNA sense strand
ucagcuccaucaacaagag

SEQ ID NO: 1296913 - RNA, 19 nt, Homo sapiens
  misc_RNA (1)...(19): siRNA sense strand
ugucuguccugaagcaagu

SEQ ID NO: 1296914 - RNA, 19 nt, Homo sapiens
  misc_RNA (1)...(19): siRNA sense strand
gcccauccucuauuccuau

SEQ ID NO: 1296915 - RNA, 19 nt, Homo sapiens
  misc_RNA (1)...(19): siRNA sense strand
cccagaacgccaucacuug

SEQ ID NO: 1296916 - RNA, 19 nt, Homo sapiens
  misc_RNA (1)...(19): siRNA sense strand
ggcaaaugcugaaagauuc

SEQ ID NO: 1296917 - RNA, 19 nt, Homo sapiens
  misc_RNA (1)...(19): siRNA sense strand
gggcauauacuguguagga

SEQ ID NO: 1296918 - RNA, 19 nt, Homo sapiens
  misc_RNA (1)...(19): siRNA sense strand
gagcacagcgggcauauac

SEQ ID NO: 1296919 - RNA, 19 nt, Homo sapiens
  misc_RNA (1)...(19): siRNA sense strand
gguggcaaaugcugaaaga

SEQ ID NO: 1296920 - RNA, 19 nt, Homo sapiens
  misc_RNA (1)...(19): siRNA sense strand
gcacagcgggcauauacug

SEQ ID NO: 1296921 - RNA, 19 nt, Homo sapiens
  misc_RNA (1)...(19): siRNA sense strand
ugccaacccugaagauuga

SEQ ID NO: 1296922 - RNA, 19 nt, Homo sapiens
  misc_RNA (1)...(19): siRNA sense strand
uggcaaaugcugaaagauu

SEQ ID NO: 1296923 - RNA, 19 nt, Homo sapiens
  misc_RNA (1)...(19): siRNA sense strand
gugccaacccugaagauug

SEQ ID NO: 1296924 - RNA, 19 nt, Homo sapiens
  misc_RNA (1)...(19): siRNA sense strand
ccagaacgccaucacuugu

SEQ ID NO: 1296925 - RNA, 19 nt, Homo sapiens
  misc_RNA (1)...(19): siRNA sense strand
gcaagugggagaggagaug

SEQ ID NO: 1296926 - RNA, 19 nt, Homo sapiens
  misc_RNA (1)...(19): siRNA sense strand
gcccagaacgccaucacuu

SEQ ID NO: 1296927 - RNA, 19 nt, Homo sapiens
  misc_RNA (1)...(19): siRNA sense strand
cagcgggcauauacugugu

SEQ ID NO: 1296928 - RNA, 19 nt, Homo sapiens
  misc_RNA (1)...(19): siRNA sense strand
gcgggcauauacuguguag

SEQ ID NO: 1296929 - RNA, 19 nt, Homo sapiens
  misc_RNA (1)...(19): siRNA sense strand
accaucagcuccaucaaca

SEQ ID NO: 1296930 - RNA, 19 nt, Homo sapiens
  misc_RNA (1)...(19): siRNA sense strand
uuaacgcccuggagcagau

SEQ ID NO: 1296931 - RNA, 19 nt, Homo sapiens
  misc_RNA (1)...(19): siRNA sense strand
caucagcuccaucaacaag

SEQ ID NO: 1296932 - RNA, 19 nt, Homo sapiens
  misc_RNA (1)...(19): siRNA sense strand
aaucaccauucaccaguca

SEQ ID NO: 1296933 - RNA, 19 nt, Homo sapiens
  misc_RNA (1)...(19): siRNA sense strand
cccugaagauugauggaau

SEQ ID NO: 1296934 - RNA, 19 nt, Homo sapiens
  misc_RNA (1)...(19): siRNA sense strand
ucagcuccaucaacaagag

SEQ ID NO: 1296935 - RNA, 19 nt, Homo sapiens
  misc_RNA (1)...(19): siRNA sense strand
agaggcugcuggucuugga

SEQ ID NO: 1296936 - RNA, 19 nt, Homo sapiens
  misc_RNA (1)...(19): siRNA sense strand
cccagaacgccaucacuug

SEQ ID NO: 1296937 - RNA, 19 nt, Homo sapiens
  misc_RNA (1)...(19): siRNA sense strand
ugucuguccugaagcaagu

SEQ ID NO: 1296938 - RNA, 19 nt, Homo sapiens
  misc_RNA (1)...(19): siRNA sense strand
gaauugcucuggccuugaa

SEQ ID NO: 1296939 - RNA, 19 nt, Homo sapiens
  misc_RNA (1)...(19): siRNA sense strand
ggcaaaugcugaaagauuc

SEQ ID NO: 1296940 - RNA, 19 nt, Homo sapiens
  misc_RNA (1)...(19): siRNA sense strand
ccaucaaucucauaaagga

SEQ ID NO: 1296941 - RNA, 19 nt, Homo sapiens
  misc_RNA (1)...(19): siRNA sense strand
gggcauauacuguguagga

SEQ ID NO: 1296942 - RNA, 19 nt, Homo sapiens
  misc_RNA (1)...(19): siRNA sense strand
gagcacagcgggcauauac

SEQ ID NO: 1296943 - RNA, 19 nt, Homo sapiens
  misc_RNA (1)...(19): siRNA sense strand
gguggcaaaugcugaaaga

SEQ ID NO: 1296944 - RNA, 19 nt, Homo sapiens
  misc_RNA (1)...(19): siRNA sense strand
gcccaucaaucucauaaag

SEQ ID NO: 1296945 - RNA, 19 nt, Homo sapiens
  misc_RNA (1)...(19): siRNA sense strand
gcacagcgggcauauacug

SEQ ID NO: 1296946 - RNA, 19 nt, Homo sapiens
  misc_RNA (1)...(19): siRNA sense strand
ugccaacccugaagauuga

SEQ ID NO: 1296947 - RNA, 19 nt, Homo sapiens
  misc_RNA (1)...(19): siRNA sense strand
uggcaaaugcugaaagauu

SEQ ID NO: 1296948 - RNA, 19 nt, Homo sapiens
  misc_RNA (1)...(19): siRNA sense strand
cauccucuauuccuauuuc

SEQ ID NO: 1296949 - RNA, 19 nt, Homo sapiens
  misc_RNA (1)...(19): siRNA sense strand
ucauggagaguucgaauug

SEQ ID NO: 1296950 - RNA, 19 nt, Homo sapiens
  misc_RNA (1)...(19): siRNA sense strand
gugccaacccugaagauug

SEQ ID NO: 1296951 - RNA, 19 nt, Homo sapiens
  misc_RNA (1)...(19): siRNA sense strand
ggacuuccaggcacugaau

SEQ ID NO: 1296952 - RNA, 19 nt, Homo sapiens
  misc_RNA (1)...(19): siRNA sense strand
ccagaacgccaucacuugu

SEQ ID NO: 1296953 - RNA, 19 nt, Homo sapiens
  misc_RNA (1)...(19): siRNA sense strand
cgaagcuccugcucaugga

SEQ ID NO: 1296954 - RNA, 19 nt, Homo sapiens
  misc_RNA (1)...(19): siRNA sense strand
gcaagugggagaggagaug

SEQ ID NO: 1296955 - RNA, 19 nt, Homo sapiens
  misc_RNA (1)...(19): siRNA sense strand
gcccagaacgccaucacuu

SEQ ID NO: 1296956 - RNA, 19 nt, Homo sapiens
  misc_RNA (1)...(19): siRNA sense strand
cagcgggcauauacugugu

SEQ ID NO: 1296957 - RNA, 19 nt, Homo sapiens
  misc_RNA (1)...(19): siRNA sense strand
uccaggcacugaauccuau

SEQ ID NO: 1296958 - RNA, 19 nt, Homo sapiens
  misc_RNA (1)...(19): siRNA sense strand
gcgggcauauacuguguag

SEQ ID NO: 1296959 - RNA, 19 nt, Homo sapiens
  misc_RNA (1)...(19): siRNA sense strand
accaucagcuccaucaaca

SEQ ID NO: 1296960 - RNA, 19 nt, Homo sapiens
  misc_RNA (1)...(19): siRNA sense strand
uuaacgcccuggagcagau

SEQ ID NO: 1296961 - RNA, 19 nt, Homo sapiens
  misc_RNA (1)...(19): siRNA sense strand
caucagcuccaucaacaag

SEQ ID NO: 1296962 - RNA, 19 nt, Homo sapiens
  misc_RNA (1)...(19): siRNA sense strand
gccaacaguuuucuaagga

SEQ ID NO: 1296963 - RNA, 19 nt, Homo sapiens
  misc_RNA (1)...(19): siRNA sense strand
aaucaccauucaccaguca

SEQ ID NO: 1296964 - RNA, 19 nt, Homo sapiens
  misc_RNA (1)...(19): siRNA sense strand
agacggugcccaucaaucu

SEQ ID NO: 1296965 - RNA, 19 nt, Homo sapiens
  misc_RNA (1)...(19): siRNA sense strand
gcucauggagaguucgaau

SEQ ID NO: 1296966 - RNA, 19 nt, Homo sapiens
  misc_RNA (1)...(19): siRNA sense strand
ggcacugaauccuaugaag

SEQ ID NO: 1296967 - RNA, 19 nt, Homo sapiens
  misc_RNA (1)...(19): siRNA sense strand
gugcccaucaaucucauaa

SEQ ID NO: 1296968 - RNA, 19 nt, Homo sapiens
  misc_RNA (1)...(19): siRNA sense strand
cccugaagauugauggaau

SEQ ID NO: 1296969 - RNA, 19 nt, Homo sapiens
  misc_RNA (1)...(19): siRNA sense strand
cccauccucuauuccuauu

SEQ ID NO: 1296970 - RNA, 19 nt, Homo sapiens
  misc_RNA (1)...(19): siRNA sense strand
agaggcugcuggucuugga

SEQ ID NO: 1296971 - RNA, 19 nt, Homo sapiens
  misc_RNA (1)...(19): siRNA sense strand
ucagcuccaucaacaagag

SEQ ID NO: 1296972 - RNA, 19 nt, Homo sapiens
  misc_RNA (1)...(19): siRNA sense strand
ugucuguccugaagcaagu

SEQ ID NO: 1296973 - RNA, 19 nt, Homo sapiens
  misc_RNA (1)...(19): siRNA sense strand
gcccauccucuauuccuau

SEQ ID NO: 1296974 - RNA, 19 nt, Homo sapiens
  misc_RNA (1)...(19): siRNA sense strand
cccagaacgccaucacuug

SEQ ID NO: 1296975 - RNA, 19 nt, Homo sapiens
  misc_RNA (1)...(19): siRNA sense strand
gaauugcucuggccuugaa

SEQ ID NO: 1296976 - RNA, 19 nt, Homo sapiens
  misc_RNA (1)...(19): siRNA sense strand
ggcaaaugcugaaagauuc

SEQ ID NO: 1296977 - RNA, 19 nt, Homo sapiens
  misc_RNA (1)...(19): siRNA sense strand
ccaucaaucucauaaagga

SEQ ID NO: 1296978 - RNA, 19 nt, Homo sapiens
  misc_RNA (1)...(19): siRNA sense strand
gggcauauacuguguagga

SEQ ID NO: 1296979 - RNA, 19 nt, Homo sapiens
  misc_RNA (1)...(19): siRNA sense strand
gagcacagcgggcauauac

SEQ ID NO: 1296980 - RNA, 19 nt, Homo sapiens
  misc_RNA (1)...(19): siRNA sense strand
gguggcaaaugcugaaaga

SEQ ID NO: 1296981 - RNA, 19 nt, Homo sapiens
  misc_RNA (1)...(19): siRNA sense strand
gcccaucaaucucauaaag

SEQ ID NO: 1296982 - RNA, 19 nt, Homo sapiens
  misc_RNA (1)...(19): siRNA sense strand
gcacagcgggcauauacug

SEQ ID NO: 1296983 - RNA, 19 nt, Homo sapiens
  misc_RNA (1)...(19): siRNA sense strand
ugccaacccugaagauuga

SEQ ID NO: 1296984 - RNA, 19 nt, Homo sapiens
  misc_RNA (1)...(19): siRNA sense strand
uggcaaaugcugaaagauu

SEQ ID NO: 1296985 - RNA, 19 nt, Homo sapiens
  misc_RNA (1)...(19): siRNA sense strand
cauccucuauuccuauuuc

SEQ ID NO: 1296986 - RNA, 19 nt, Homo sapiens
  misc_RNA (1)...(19): siRNA sense strand
ucauggagaguucgaauug

SEQ ID NO: 1296987 - RNA, 19 nt, Homo sapiens
  misc_RNA (1)...(19): siRNA sense strand
gugccaacccugaagauug

SEQ ID NO: 1296988 - RNA, 19 nt, Homo sapiens
  misc_RNA (1)...(19): siRNA sense strand
ggacuuccaggcacugaau

SEQ ID NO: 1296989 - RNA, 19 nt, Homo sapiens
  misc_RNA (1)...(19): siRNA sense strand
ccagaacgccaucacuugu

SEQ ID NO: 1296990 - RNA, 19 nt, Homo sapiens
  misc_RNA (1)...(19): siRNA sense strand
cgaagcuccugcucaugga

SEQ ID NO: 1296991 - RNA, 19 nt, Homo sapiens
  misc_RNA (1)...(19): siRNA sense strand
gcaagugggagaggagaug

SEQ ID NO: 1296992 - RNA, 19 nt, Homo sapiens
  misc_RNA (1)...(19): siRNA sense strand
gcccagaacgccaucacuu

SEQ ID NO: 1296993 - RNA, 19 nt, Homo sapiens
  misc_RNA (1)...(19): siRNA sense strand
cagcgggcauauacugugu

SEQ ID NO: 1296994 - RNA, 19 nt, Homo sapiens
  misc_RNA (1)...(19): siRNA sense strand
uccaggcacugaauccuau

SEQ ID NO: 1296995 - RNA, 19 nt, Homo sapiens
  misc_RNA (1)...(19): siRNA sense strand
gcgggcauauacuguguag

SEQ ID NO: 1296996 - RNA, 19 nt, Homo sapiens
  misc_RNA (1)...(19): siRNA sense strand
accaucagcuccaucaaca

SEQ ID NO: 1296997 - RNA, 19 nt, Homo sapiens
  misc_RNA (1)...(19): siRNA sense strand
uuaacgcccuggagcagau

SEQ ID NO: 1296998 - RNA, 19 nt, Homo sapiens
  misc_RNA (1)...(19): siRNA sense strand
caucagcuccaucaacaag

SEQ ID NO: 1296999 - RNA, 19 nt, Homo sapiens
  misc_RNA (1)...(19): siRNA sense strand
gccaacaguuuucuaagga

SEQ ID NO: 1297000 - RNA, 19 nt, Homo sapiens
  misc_RNA (1)...(19): siRNA sense strand
aaucaccauucaccaguca

SEQ ID NO: 1297001 - RNA, 19 nt, Homo sapiens
  misc_RNA (1)...(19): siRNA sense strand
agacggugcccaucaaucu

SEQ ID NO: 1297002 - RNA, 19 nt, Homo sapiens
  misc_RNA (1)...(19): siRNA sense strand
gcucauggagaguucgaau

SEQ ID NO: 1297003 - RNA, 19 nt, Homo sapiens
  misc_RNA (1)...(19): siRNA sense strand
ggcacugaauccuaugaag

SEQ ID NO: 1297004 - RNA, 19 nt, Homo sapiens
  misc_RNA (1)...(19): siRNA sense strand
gugcccaucaaucucauaa

SEQ ID NO: 1297005 - RNA, 19 nt, Homo sapiens
  misc_RNA (1)...(19): siRNA sense strand
cccugaagauugauggaau

SEQ ID NO: 1297006 - RNA, 19 nt, Homo sapiens
  misc_RNA (1)...(19): siRNA sense strand
cccauccucuauuccuauu

SEQ ID NO: 1297007 - RNA, 19 nt, Homo sapiens
  misc_RNA (1)...(19): siRNA sense strand
agaggcugcuggucuugga

SEQ ID NO: 1297008 - RNA, 19 nt, Homo sapiens
  misc_RNA (1)...(19): siRNA sense strand
ucagcuccaucaacaagag

SEQ ID NO: 1297009 - RNA, 19 nt, Homo sapiens
  misc_RNA (1)...(19): siRNA sense strand
ugucuguccugaagcaagu

SEQ ID NO: 1297010 - RNA, 19 nt, Homo sapiens
  misc_RNA (1)...(19): siRNA sense strand
gcccauccucuauuccuau

SEQ ID NO: 1297011 - RNA, 19 nt, Homo sapiens
  misc_RNA (1)...(19): siRNA sense strand
cccagaacgccaucacuug

SEQ ID NO: 1297012 - RNA, 19 nt, Homo sapiens
  misc_RNA (1)...(19): siRNA sense strand
aaacagaggugguccauaa

SEQ ID NO: 1297013 - RNA, 19 nt, Homo sapiens
  misc_RNA (1)...(19): siRNA sense strand
cuaggaaacuggaccauua

SEQ ID NO: 1297014 - RNA, 19 nt, Homo sapiens
  misc_RNA (1)...(19): siRNA sense strand
acaaauagccgaaguguuu

SEQ ID NO: 1297015 - RNA, 19 nt, Homo sapiens
  misc_RNA (1)...(19): siRNA sense strand
caugagagcugauaucugu

SEQ ID NO: 1297016 - RNA, 19 nt, Homo sapiens
  misc_RNA (1)...(19): siRNA sense strand
ggaauugacugacaagaag

SEQ ID NO: 1297017 - RNA, 19 nt, Homo sapiens
  misc_RNA (1)...(19): siRNA sense strand
cauaggauuuggaaacaua

SEQ ID NO: 1297018 - RNA, 19 nt, Homo sapiens
  misc_RNA (1)...(19): siRNA sense strand
ggacgaaauuugcccgauu

SEQ ID NO: 1297019 - RNA, 19 nt, Homo sapiens
  misc_RNA (1)...(19): siRNA sense strand
ggauuggccuguaguuuau

SEQ ID NO: 1297020 - RNA, 19 nt, Homo sapiens
  misc_RNA (1)...(19): siRNA sense strand
guggagaggucauuucuga

SEQ ID NO: 1297021 - RNA, 19 nt, Homo sapiens
  misc_RNA (1)...(19): siRNA sense strand
ccauaaacauucaagacua

SEQ ID NO: 1297022 - RNA, 19 nt, Homo sapiens
  misc_RNA (1)...(19): siRNA sense strand
gagcugacgucaugcagaa

SEQ ID NO: 1297023 - RNA, 19 nt, Homo sapiens
  misc_RNA (1)...(19): siRNA sense strand
ucaaggauauuacguuguu

SEQ ID NO: 1297024 - RNA, 19 nt, Homo sapiens
  misc_RNA (1)...(19): siRNA sense strand
gaaacuggaccauuaccua

SEQ ID NO: 1297025 - RNA, 19 nt, Homo sapiens
  misc_RNA (1)...(19): siRNA sense strand
gauauuacguuguucaaac

SEQ ID NO: 1297026 - RNA, 19 nt, Homo sapiens
  misc_RNA (1)...(19): siRNA sense strand
gaaauuugcccgauugaca

SEQ ID NO: 1297027 - RNA, 19 nt, Homo sapiens
  misc_RNA (1)...(19): siRNA sense strand
accaugagaugcugaauaa

SEQ ID NO: 1297028 - RNA, 19 nt, Homo sapiens
  misc_RNA (1)...(19): siRNA sense strand
caagaagaccauugagaaa

SEQ ID NO: 1297029 - RNA, 19 nt, Homo sapiens
  misc_RNA (1)...(19): siRNA sense strand
aaacaaagcagaacaacau

SEQ ID NO: 1297030 - RNA, 19 nt, Homo sapiens
  misc_RNA (1)...(19): siRNA sense strand
cagauauccuuccucagua

SEQ ID NO: 1297031 - RNA, 19 nt, Homo sapiens
  misc_RNA (1)...(19): siRNA sense strand
gacgaaauuugcccgauug

SEQ ID NO: 1297032 - RNA, 19 nt, Homo sapiens
  misc_RNA (1)...(19): siRNA sense strand
cagcaaggauucauuguac

SEQ ID NO: 1297033 - RNA, 19 nt, Homo sapiens
  misc_RNA (1)...(19): siRNA sense strand
gcugauaucuguguucauc

SEQ ID NO: 1297034 - RNA, 19 nt, Homo sapiens
  misc_RNA (1)...(19): siRNA sense strand
gugagcgagucauggauua

SEQ ID NO: 1297035 - RNA, 19 nt, Homo sapiens
  misc_RNA (1)...(19): siRNA sense strand
ggaaucagcagucucuuca

SEQ ID NO: 1297036 - RNA, 19 nt, Homo sapiens
  misc_RNA (1)...(19): siRNA sense strand
ugacaagccuuacaaccau

SEQ ID NO: 1297037 - RNA, 19 nt, Homo sapiens
  misc_RNA (1)...(19): siRNA sense strand
gacaagccuuacaaccaua

SEQ ID NO: 1297038 - RNA, 19 nt, Homo sapiens
  misc_RNA (1)...(19): siRNA sense strand
gaucugcugucuuguuuac

SEQ ID NO: 1297039 - RNA, 19 nt, Homo sapiens
  misc_RNA (1)...(19): siRNA sense strand
uuuguaaacucucuggaua

SEQ ID NO: 1297040 - RNA, 19 nt, Homo sapiens
  misc_RNA (1)...(19): siRNA sense strand
uggauuggccuguaguuua

SEQ ID NO: 1297041 - RNA, 19 nt, Homo sapiens
  misc_RNA (1)...(19): siRNA sense strand
gagcugauaucuguguuca

SEQ ID NO: 1297042 - RNA, 19 nt, Homo sapiens
  misc_RNA (1)...(19): siRNA sense strand
cauaaacauucaagacuag

SEQ ID NO: 1297043 - RNA, 19 nt, Homo sapiens
  misc_RNA (1)...(19): siRNA sense strand
ugauaucuguguucaucua

SEQ ID NO: 1297044 - RNA, 19 nt, Homo sapiens
  misc_RNA (1)...(19): siRNA sense strand
gguuggcucucuucuuuau

SEQ ID NO: 1297045 - RNA, 19 nt, Homo sapiens
  misc_RNA (1)...(19): siRNA sense strand
ggccuguaguuuauaguaa

SEQ ID NO: 1297046 - RNA, 19 nt, Homo sapiens
  misc_RNA (1)...(19): siRNA sense strand
acaagaagaccauugagaa

SEQ ID NO: 1297047 - RNA, 19 nt, Homo sapiens
  misc_RNA (1)...(19): siRNA sense strand
gggaauugacugacaagaa

SEQ ID NO: 1297048 - RNA, 19 nt, Homo sapiens
  misc_RNA (1)...(19): siRNA sense strand
caaaaggcauugauacaga

SEQ ID NO: 1297049 - RNA, 19 nt, Homo sapiens
  misc_RNA (1)...(19): siRNA sense strand
gagcgagucauggauuaua

SEQ ID NO: 1297050 - RNA, 19 nt, Homo sapiens
  misc_RNA (1)...(19): siRNA sense strand
caugagaugcugaauaaug

SEQ ID NO: 1297051 - RNA, 19 nt, Homo sapiens
  misc_RNA (1)...(19): siRNA sense strand
uaaacucucuggauaucau

SEQ ID NO: 1297052 - RNA, 19 nt, Homo sapiens
  misc_RNA (1)...(19): siRNA sense strand
ugaucgaucugcugucuug

SEQ ID NO: 1297053 - RNA, 19 nt, Homo sapiens
  misc_RNA (1)...(19): siRNA sense strand
ucaucgagcugacgucaug

SEQ ID NO: 1297054 - RNA, 19 nt, Homo sapiens
  misc_RNA (1)...(19): siRNA sense strand
gaugaugguuggcucucuu

SEQ ID NO: 1297055 - RNA, 19 nt, Homo sapiens
  misc_RNA (1)...(19): siRNA sense strand
uuaaugaacauccugcuuu

SEQ ID NO: 1297056 - RNA, 19 nt, Homo sapiens
  misc_RNA (1)...(19): siRNA sense strand
ugaacuaucugaaaacuug

SEQ ID NO: 1297057 - RNA, 19 nt, Homo sapiens
  misc_RNA (1)...(19): siRNA sense strand
gacaagaagaccauugaga

SEQ ID NO: 1297058 - RNA, 19 nt, Homo sapiens
  misc_RNA (1)...(19): siRNA sense strand
caaccgauaccaugagaug

SEQ ID NO: 1297059 - RNA, 19 nt, Homo sapiens
  misc_RNA (1)...(19): siRNA sense strand
ggaccauuaccuagaauau

SEQ ID NO: 1297060 - RNA, 19 nt, Homo sapiens
  misc_RNA (1)...(19): siRNA sense strand
ucgaucugcugucuuguuu

SEQ ID NO: 1297061 - RNA, 19 nt, Homo sapiens
  misc_RNA (1)...(19): siRNA sense strand
cagcagcucacgccaauga

SEQ ID NO: 1297062 - RNA, 19 nt, Homo sapiens
  misc_RNA (1)...(19): siRNA sense strand
agaagaccauugagaaagu

SEQ ID NO: 1297063 - RNA, 19 nt, Homo sapiens
  misc_RNA (1)...(19): siRNA sense strand
gccaauagaggaugauuca

SEQ ID NO: 1297064 - RNA, 19 nt, Homo sapiens
  misc_RNA (1)...(19): siRNA sense strand
cguguccucucucuacuuu

SEQ ID NO: 1297065 - RNA, 19 nt, Homo sapiens
  misc_RNA (1)...(19): siRNA sense strand
ccauaucgcuacaauacca

SEQ ID NO: 1297066 - RNA, 19 nt, Homo sapiens
  misc_RNA (1)...(19): siRNA sense strand
ucagauauccuuccucagu

SEQ ID NO: 1297067 - RNA, 19 nt, Homo sapiens
  misc_RNA (1)...(19): siRNA sense strand
gaggugguccauaaacauu

SEQ ID NO: 1297068 - RNA, 19 nt, Homo sapiens
  misc_RNA (1)...(19): siRNA sense strand
cagcucacgccaaugaaua

SEQ ID NO: 1297069 - RNA, 19 nt, Homo sapiens
  misc_RNA (1)...(19): siRNA sense strand
aauagaggaugauucaaca

SEQ ID NO: 1297070 - RNA, 19 nt, Homo sapiens
  misc_RNA (1)...(19): siRNA sense strand
ggacaugagagcugauauc

SEQ ID NO: 1297071 - RNA, 19 nt, Homo sapiens
  misc_RNA (1)...(19): siRNA sense strand
gguauagcaucggagacua

SEQ ID NO: 1297072 - RNA, 19 nt, Homo sapiens
  misc_RNA (1)...(19): siRNA sense strand
gaagaccauugagaaaguc

SEQ ID NO: 1297073 - RNA, 19 nt, Homo sapiens
  misc_RNA (1)...(19): siRNA sense strand
uauauugucucaacauggu

SEQ ID NO: 1297074 - RNA, 19 nt, Homo sapiens
  misc_RNA (1)...(19): siRNA sense strand
augguuggcucucuucuuu

SEQ ID NO: 1297075 - RNA, 19 nt, Homo sapiens
  misc_RNA (1)...(19): siRNA sense strand
gauuguggauuggccugua

SEQ ID NO: 1297076 - RNA, 19 nt, Homo sapiens
  misc_RNA (1)...(19): siRNA sense strand
ccagcaaggauucauugua

SEQ ID NO: 1297077 - RNA, 19 nt, Homo sapiens
  misc_RNA (1)...(19): siRNA sense strand
ucacuaacaccauccaaau

SEQ ID NO: 1297078 - RNA, 19 nt, Homo sapiens
  misc_RNA (1)...(19): siRNA sense strand
ucagcagucucuucaguuc

SEQ ID NO: 1297079 - RNA, 19 nt, Homo sapiens
  misc_RNA (1)...(19): siRNA sense strand
aaacaagaagcgccaaaga

SEQ ID NO: 1297080 - RNA, 19 nt, Homo sapiens
  misc_RNA (1)...(19): siRNA sense strand
cuacgaaucaaacugcuuu

SEQ ID NO: 1297081 - RNA, 19 nt, Homo sapiens
  misc_RNA (1)...(19): siRNA sense strand
cagcuggcuuugagcauug

SEQ ID NO: 1297082 - RNA, 19 nt, Homo sapiens
  misc_RNA (1)...(19): siRNA sense strand
ccagcuggcuuugagcauu

SEQ ID NO: 1297083 - RNA, 19 nt, Homo sapiens
  misc_RNA (1)...(19): siRNA sense strand
cuaacaccauccaaauaga

SEQ ID NO: 1297084 - RNA, 19 nt, Homo sapiens
  misc_RNA (1)...(19): siRNA sense strand
ccaaagacgccaccacaca

SEQ ID NO: 1297085 - RNA, 19 nt, Homo sapiens
  misc_RNA (1)...(19): siRNA sense strand
cagaggugguccauaaaca

SEQ ID NO: 1297086 - RNA, 19 nt, Homo sapiens
  misc_RNA (1)...(19): siRNA sense strand
gaaaugaacaugaaaaggu

SEQ ID NO: 1297087 - RNA, 19 nt, Homo sapiens
  misc_RNA (1)...(19): siRNA sense strand
gagacuacgaggucauuga

SEQ ID NO: 1297088 - RNA, 19 nt, Homo sapiens
  misc_RNA (1)...(19): siRNA sense strand
ggaggacccagcaaggauu

SEQ ID NO: 1297089 - RNA, 19 nt, Homo sapiens
  misc_RNA (1)...(19): siRNA sense strand
gauauccuuccucaguaua

SEQ ID NO: 1297090 - RNA, 19 nt, Homo sapiens
  misc_RNA (1)...(19): siRNA sense strand
gaugaggugguggcuauuu

SEQ ID NO: 1297091 - RNA, 19 nt, Homo sapiens
  misc_RNA (1)...(19): siRNA sense strand
guacguguccucucucuac

SEQ ID NO: 1297092 - RNA, 19 nt, Homo sapiens
  misc_RNA (1)...(19): siRNA sense strand
gauagugugguggacguua

SEQ ID NO: 1297093 - RNA, 19 nt, Homo sapiens
  misc_RNA (1)...(19): siRNA sense strand
acccuaagcucauaaggau

SEQ ID NO: 1297094 - RNA, 19 nt, Homo sapiens
  misc_RNA (1)...(19): siRNA sense strand
uagaggaugauucaacaaa

SEQ ID NO: 1297095 - RNA, 19 nt, Homo sapiens
  misc_RNA (1)...(19): siRNA sense strand
gaaaagguccucuccaucu

SEQ ID NO: 1297096 - RNA, 19 nt, Homo sapiens
  misc_RNA (1)...(19): siRNA sense strand
agucauggauuauauuguc

SEQ ID NO: 1297097 - RNA, 19 nt, Homo sapiens
  misc_RNA (1)...(19): siRNA sense strand
ggaaacauagcuccuacca

SEQ ID NO: 1297098 - RNA, 19 nt, Homo sapiens
  misc_RNA (1)...(19): siRNA sense strand
cacuaacaccauccaaaua

SEQ ID NO: 1297099 - RNA, 19 nt, Homo sapiens
  misc_RNA (1)...(19): siRNA sense strand
ggugguccauaaacauuca

SEQ ID NO: 1297100 - RNA, 19 nt, Homo sapiens
  misc_RNA (1)...(19): siRNA sense strand
ggauauuacguuguucaaa

SEQ ID NO: 1297101 - RNA, 19 nt, Homo sapiens
  misc_RNA (1)...(19): siRNA sense strand
uuaccaugcuggagaaagu

SEQ ID NO: 1297102 - RNA, 19 nt, Homo sapiens
  misc_RNA (1)...(19): siRNA sense strand
gauaucuguguucaucuaa

SEQ ID NO: 1297103 - RNA, 19 nt, Homo sapiens
  misc_RNA (1)...(19): siRNA sense strand
cagcaaauguaugccaaca

SEQ ID NO: 1297104 - RNA, 19 nt, Homo sapiens
  misc_RNA (1)...(19): siRNA sense strand
ugucuuguuuaccuuauga

SEQ ID NO: 1297105 - RNA, 19 nt, Homo sapiens
  misc_RNA (1)...(19): siRNA sense strand
caaagacgccaccacacau

SEQ ID NO: 1297106 - RNA, 19 nt, Homo sapiens
  misc_RNA (1)...(19): siRNA sense strand
uguaaacucucuggauauc

SEQ ID NO: 1297107 - RNA, 19 nt, Homo sapiens
  misc_RNA (1)...(19): siRNA sense strand
uaaugaacauccugcuuuu

SEQ ID NO: 1297108 - RNA, 19 nt, Homo sapiens
  misc_RNA (1)...(19): siRNA sense strand
gagagcugauaucuguguu

SEQ ID NO: 1297109 - RNA, 19 nt, Homo sapiens
  misc_RNA (1)...(19): siRNA sense strand
ugaauaauguacgggacuu

SEQ ID NO: 1297110 - RNA, 19 nt, Homo sapiens
  misc_RNA (1)...(19): siRNA sense strand
augagaugcugaauaaugu

SEQ ID NO: 1297111 - RNA, 19 nt, Homo sapiens
  misc_RNA (1)...(19): siRNA sense strand
ucucucuacuuuaccauga

SEQ ID NO: 1297112 - RNA, 19 nt, Homo sapiens
  misc_RNA (1)...(19): siRNA sense strand
aaacagaggugguccauaa

SEQ ID NO: 1297113 - RNA, 19 nt, Homo sapiens
  misc_RNA (1)...(19): siRNA sense strand
cuaggaaacuggaccauua

SEQ ID NO: 1297114 - RNA, 19 nt, Homo sapiens
  misc_RNA (1)...(19): siRNA sense strand
acaaauagccgaaguguuu

SEQ ID NO: 1297115 - RNA, 19 nt, Homo sapiens
  misc_RNA (1)...(19): siRNA sense strand
caugagagcugauaucugu

SEQ ID NO: 1297116 - RNA, 19 nt, Homo sapiens
  misc_RNA (1)...(19): siRNA sense strand
ggaauugacugacaagaag

SEQ ID NO: 1297117 - RNA, 19 nt, Homo sapiens
  misc_RNA (1)...(19): siRNA sense strand
cauaggauuuggaaacaua

SEQ ID NO: 1297118 - RNA, 19 nt, Homo sapiens
  misc_RNA (1)...(19): siRNA sense strand
ggacgaaauuugcccgauu

SEQ ID NO: 1297119 - RNA, 19 nt, Homo sapiens
  misc_RNA (1)...(19): siRNA sense strand
ggauuggccuguaguuuau

SEQ ID NO: 1297120 - RNA, 19 nt, Homo sapiens
  misc_RNA (1)...(19): siRNA sense strand
guggagaggucauuucuga

SEQ ID NO: 1297121 - RNA, 19 nt, Homo sapiens
  misc_RNA (1)...(19): siRNA sense strand
ccauaaacauucaagacua

SEQ ID NO: 1297122 - RNA, 19 nt, Homo sapiens
  misc_RNA (1)...(19): siRNA sense strand
gagcugacgucaugcagaa

SEQ ID NO: 1297123 - RNA, 19 nt, Homo sapiens
  misc_RNA (1)...(19): siRNA sense strand
ucaaggauauuacguuguu

SEQ ID NO: 1297124 - RNA, 19 nt, Homo sapiens
  misc_RNA (1)...(19): siRNA sense strand
gaaacuggaccauuaccua

SEQ ID NO: 1297125 - RNA, 19 nt, Homo sapiens
  misc_RNA (1)...(19): siRNA sense strand
gauauuacguuguucaaac

SEQ ID NO: 1297126 - RNA, 19 nt, Homo sapiens
  misc_RNA (1)...(19): siRNA sense strand
gaaauuugcccgauugaca

SEQ ID NO: 1297127 - RNA, 19 nt, Homo sapiens
  misc_RNA (1)...(19): siRNA sense strand
accaugagaugcugaauaa

SEQ ID NO: 1297128 - RNA, 19 nt, Homo sapiens
  misc_RNA (1)...(19): siRNA sense strand
caagaagaccauugagaaa

SEQ ID NO: 1297129 - RNA, 19 nt, Homo sapiens
  misc_RNA (1)...(19): siRNA sense strand
aaacaaagcagaacaacau

SEQ ID NO: 1297130 - RNA, 19 nt, Homo sapiens
  misc_RNA (1)...(19): siRNA sense strand
cagauauccuuccucagua

SEQ ID NO: 1297131 - RNA, 19 nt, Homo sapiens
  misc_RNA (1)...(19): siRNA sense strand
gacgaaauuugcccgauug

SEQ ID NO: 1297132 - RNA, 19 nt, Homo sapiens
  misc_RNA (1)...(19): siRNA sense strand
cagcaaggauucauuguac

SEQ ID NO: 1297133 - RNA, 19 nt, Homo sapiens
  misc_RNA (1)...(19): siRNA sense strand
gcugauaucuguguucauc

SEQ ID NO: 1297134 - RNA, 19 nt, Homo sapiens
  misc_RNA (1)...(19): siRNA sense strand
gugagcgagucauggauua

SEQ ID NO: 1297135 - RNA, 19 nt, Homo sapiens
  misc_RNA (1)...(19): siRNA sense strand
ggaaucagcagucucuuca

SEQ ID NO: 1297136 - RNA, 19 nt, Homo sapiens
  misc_RNA (1)...(19): siRNA sense strand
ugacaagccuuacaaccau

SEQ ID NO: 1297137 - RNA, 19 nt, Homo sapiens
  misc_RNA (1)...(19): siRNA sense strand
gacaagccuuacaaccaua

SEQ ID NO: 1297138 - RNA, 19 nt, Homo sapiens
  misc_RNA (1)...(19): siRNA sense strand
gaucugcugucuuguuuac

SEQ ID NO: 1297139 - RNA, 19 nt, Homo sapiens
  misc_RNA (1)...(19): siRNA sense strand
uuuguaaacucucuggaua

SEQ ID NO: 1297140 - RNA, 19 nt, Homo sapiens
  misc_RNA (1)...(19): siRNA sense strand
uggauuggccuguaguuua

SEQ ID NO: 1297141 - RNA, 19 nt, Homo sapiens
  misc_RNA (1)...(19): siRNA sense strand
gagcugauaucuguguuca

SEQ ID NO: 1297142 - RNA, 19 nt, Homo sapiens
  misc_RNA (1)...(19): siRNA sense strand
cauaaacauucaagacuag

SEQ ID NO: 1297143 - RNA, 19 nt, Homo sapiens
  misc_RNA (1)...(19): siRNA sense strand
ugauaucuguguucaucua

SEQ ID NO: 1297144 - RNA, 19 nt, Homo sapiens
  misc_RNA (1)...(19): siRNA sense strand
gguuggcucucuucuuuau

SEQ ID NO: 1297145 - RNA, 19 nt, Homo sapiens
  misc_RNA (1)...(19): siRNA sense strand
ggccuguaguuuauaguaa

SEQ ID NO: 1297146 - RNA, 19 nt, Homo sapiens
  misc_RNA (1)...(19): siRNA sense strand
acaagaagaccauugagaa

SEQ ID NO: 1297147 - RNA, 19 nt, Homo sapiens
  misc_RNA (1)...(19): siRNA sense strand
gggaauugacugacaagaa

SEQ ID NO: 1297148 - RNA, 19 nt, Homo sapiens
  misc_RNA (1)...(19): siRNA sense strand
caaaaggcauugauacaga

SEQ ID NO: 1297149 - RNA, 19 nt, Homo sapiens
  misc_RNA (1)...(19): siRNA sense strand
gagcgagucauggauuaua

SEQ ID NO: 1297150 - RNA, 19 nt, Homo sapiens
  misc_RNA (1)...(19): siRNA sense strand
caugagaugcugaauaaug

SEQ ID NO: 1297151 - RNA, 19 nt, Homo sapiens
  misc_RNA (1)...(19): siRNA sense strand
uaaacucucuggauaucau

SEQ ID NO: 1297152 - RNA, 19 nt, Homo sapiens
  misc_RNA (1)...(19): siRNA sense strand
ugaucgaucugcugucuug

SEQ ID NO: 1297153 - RNA, 19 nt, Homo sapiens
  misc_RNA (1)...(19): siRNA sense strand
ucaucgagcugacgucaug

SEQ ID NO: 1297154 - RNA, 19 nt, Homo sapiens
  misc_RNA (1)...(19): siRNA sense strand
gaugaugguuggcucucuu

SEQ ID NO: 1297155 - RNA, 19 nt, Homo sapiens
  misc_RNA (1)...(19): siRNA sense strand
uuaaugaacauccugcuuu

SEQ ID NO: 1297156 - RNA, 19 nt, Homo sapiens
  misc_RNA (1)...(19): siRNA sense strand
ugaacuaucugaaaacuug

SEQ ID NO: 1297157 - RNA, 19 nt, Homo sapiens
  misc_RNA (1)...(19): siRNA sense strand
gacaagaagaccauugaga

SEQ ID NO: 1297158 - RNA, 19 nt, Homo sapiens
  misc_RNA (1)...(19): siRNA sense strand
caaccgauaccaugagaug

SEQ ID NO: 1297159 - RNA, 19 nt, Homo sapiens
  misc_RNA (1)...(19): siRNA sense strand
ggaccauuaccuagaauau

SEQ ID NO: 1297160 - RNA, 19 nt, Homo sapiens
  misc_RNA (1)...(19): siRNA sense strand
ucgaucugcugucuuguuu

SEQ ID NO: 1297161 - RNA, 19 nt, Homo sapiens
  misc_RNA (1)...(19): siRNA sense strand
cagcagcucacgccaauga

SEQ ID NO: 1297162 - RNA, 19 nt, Homo sapiens
  misc_RNA (1)...(19): siRNA sense strand
agaagaccauugagaaagu

SEQ ID NO: 1297163 - RNA, 19 nt, Homo sapiens
  misc_RNA (1)...(19): siRNA sense strand
gccaauagaggaugauuca

SEQ ID NO: 1297164 - RNA, 19 nt, Homo sapiens
  misc_RNA (1)...(19): siRNA sense strand
cguguccucucucuacuuu

SEQ ID NO: 1297165 - RNA, 19 nt, Homo sapiens
  misc_RNA (1)...(19): siRNA sense strand
ccauaucgcuacaauacca

SEQ ID NO: 1297166 - RNA, 19 nt, Homo sapiens
  misc_RNA (1)...(19): siRNA sense strand
ucagauauccuuccucagu

SEQ ID NO: 1297167 - RNA, 19 nt, Homo sapiens
  misc_RNA (1)...(19): siRNA sense strand
gaggugguccauaaacauu

SEQ ID NO: 1297168 - RNA, 19 nt, Homo sapiens
  misc_RNA (1)...(19): siRNA sense strand
cagcucacgccaaugaaua

SEQ ID NO: 1297169 - RNA, 19 nt, Homo sapiens
  misc_RNA (1)...(19): siRNA sense strand
aauagaggaugauucaaca

SEQ ID NO: 1297170 - RNA, 19 nt, Homo sapiens
  misc_RNA (1)...(19): siRNA sense strand
ggacaugagagcugauauc

SEQ ID NO: 1297171 - RNA, 19 nt, Homo sapiens
  misc_RNA (1)...(19): siRNA sense strand
gguauagcaucggagacua

SEQ ID NO: 1297172 - RNA, 19 nt, Homo sapiens
  misc_RNA (1)...(19): siRNA sense strand
gaagaccauugagaaaguc

SEQ ID NO: 1297173 - RNA, 19 nt, Homo sapiens
  misc_RNA (1)...(19): siRNA sense strand
uauauugucucaacauggu

SEQ ID NO: 1297174 - RNA, 19 nt, Homo sapiens
  misc_RNA (1)...(19): siRNA sense strand
augguuggcucucuucuuu

SEQ ID NO: 1297175 - RNA, 19 nt, Homo sapiens
  misc_RNA (1)...(19): siRNA sense strand
gauuguggauuggccugua

SEQ ID NO: 1297176 - RNA, 19 nt, Homo sapiens
  misc_RNA (1)...(19): siRNA sense strand
ccagcaaggauucauugua

SEQ ID NO: 1297177 - RNA, 19 nt, Homo sapiens
  misc_RNA (1)...(19): siRNA sense strand
ucacuaacaccauccaaau

SEQ ID NO: 1297178 - RNA, 19 nt, Homo sapiens
  misc_RNA (1)...(19): siRNA sense strand
ucagcagucucuucaguuc

SEQ ID NO: 1297179 - RNA, 19 nt, Homo sapiens
  misc_RNA (1)...(19): siRNA sense strand
aaacaagaagcgccaaaga

SEQ ID NO: 1297180 - RNA, 19 nt, Homo sapiens
  misc_RNA (1)...(19): siRNA sense strand
cuacgaaucaaacugcuuu

SEQ ID NO: 1297181 - RNA, 19 nt, Homo sapiens
  misc_RNA (1)...(19): siRNA sense strand
cagcuggcuuugagcauug

SEQ ID NO: 1297182 - RNA, 19 nt, Homo sapiens
  misc_RNA (1)...(19): siRNA sense strand
ccagcuggcuuugagcauu

SEQ ID NO: 1297183 - RNA, 19 nt, Homo sapiens
  misc_RNA (1)...(19): siRNA sense strand
cuaacaccauccaaauaga

SEQ ID NO: 1297184 - RNA, 19 nt, Homo sapiens
  misc_RNA (1)...(19): siRNA sense strand
ccaaagacgccaccacaca

SEQ ID NO: 1297185 - RNA, 19 nt, Homo sapiens
  misc_RNA (1)...(19): siRNA sense strand
cagaggugguccauaaaca

SEQ ID NO: 1297186 - RNA, 19 nt, Homo sapiens
  misc_RNA (1)...(19): siRNA sense strand
gaaaugaacaugaaaaggu

SEQ ID NO: 1297187 - RNA, 19 nt, Homo sapiens
  misc_RNA (1)...(19): siRNA sense strand
gagacuacgaggucauuga

SEQ ID NO: 1297188 - RNA, 19 nt, Homo sapiens
  misc_RNA (1)...(19): siRNA sense strand
ggaggacccagcaaggauu

SEQ ID NO: 1297189 - RNA, 19 nt, Homo sapiens
  misc_RNA (1)...(19): siRNA sense strand
gauauccuuccucaguaua

SEQ ID NO: 1297190 - RNA, 19 nt, Homo sapiens
  misc_RNA (1)...(19): siRNA sense strand
gaugaggugguggcuauuu

SEQ ID NO: 1297191 - RNA, 19 nt, Homo sapiens
  misc_RNA (1)...(19): siRNA sense strand
guacguguccucucucuac

SEQ ID NO: 1297192 - RNA, 19 nt, Homo sapiens
  misc_RNA (1)...(19): siRNA sense strand
gauagugugguggacguua

SEQ ID NO: 1297193 - RNA, 19 nt, Homo sapiens
  misc_RNA (1)...(19): siRNA sense strand
acccuaagcucauaaggau

SEQ ID NO: 1297194 - RNA, 19 nt, Homo sapiens
  misc_RNA (1)...(19): siRNA sense strand
uagaggaugauucaacaaa

SEQ ID NO: 1297195 - RNA, 19 nt, Homo sapiens
  misc_RNA (1)...(19): siRNA sense strand
gaaaagguccucuccaucu

SEQ ID NO: 1297196 - RNA, 19 nt, Homo sapiens
  misc_RNA (1)...(19): siRNA sense strand
agucauggauuauauuguc

SEQ ID NO: 1297197 - RNA, 19 nt, Homo sapiens
  misc_RNA (1)...(19): siRNA sense strand
ggaaacauagcuccuacca

SEQ ID NO: 1297198 - RNA, 19 nt, Homo sapiens
  misc_RNA (1)...(19): siRNA sense strand
cacuaacaccauccaaaua

SEQ ID NO: 1297199 - RNA, 19 nt, Homo sapiens
  misc_RNA (1)...(19): siRNA sense strand
ggugguccauaaacauuca

SEQ ID NO: 1297200 - RNA, 19 nt, Homo sapiens
  misc_RNA (1)...(19): siRNA sense strand
ggauauuacguuguucaaa

SEQ ID NO: 1297201 - RNA, 19 nt, Homo sapiens
  misc_RNA (1)...(19): siRNA sense strand
uuaccaugcuggagaaagu

SEQ ID NO: 1297202 - RNA, 19 nt, Homo sapiens
  misc_RNA (1)...(19): siRNA sense strand
gauaucuguguucaucuaa

SEQ ID NO: 1297203 - RNA, 19 nt, Homo sapiens
  misc_RNA (1)...(19): siRNA sense strand
cagcaaauguaugccaaca

SEQ ID NO: 1297204 - RNA, 19 nt, Homo sapiens
  misc_RNA (1)...(19): siRNA sense strand
ugucuuguuuaccuuauga

SEQ ID NO: 1297205 - RNA, 19 nt, Homo sapiens
  misc_RNA (1)...(19): siRNA sense strand
caaagacgccaccacacau

SEQ ID NO: 1297206 - RNA, 19 nt, Homo sapiens
  misc_RNA (1)...(19): siRNA sense strand
uguaaacucucuggauauc

SEQ ID NO: 1297207 - RNA, 19 nt, Homo sapiens
  misc_RNA (1)...(19): siRNA sense strand
uaaugaacauccugcuuuu

SEQ ID NO: 1297208 - RNA, 19 nt, Homo sapiens
  misc_RNA (1)...(19): siRNA sense strand
gagagcugauaucuguguu

SEQ ID NO: 1297209 - RNA, 19 nt, Homo sapiens
  misc_RNA (1)...(19): siRNA sense strand
ugaauaauguacgggacuu

SEQ ID NO: 1297210 - RNA, 19 nt, Homo sapiens
  misc_RNA (1)...(19): siRNA sense strand
augagaugcugaauaaugu

SEQ ID NO: 1297211 - RNA, 19 nt, Homo sapiens
  misc_RNA (1)...(19): siRNA sense strand
ucucucuacuuuaccauga

SEQ ID NO: 1297212 - RNA, 19 nt, Homo sapiens
  misc_RNA (1)...(19): siRNA sense strand
aaacagaggugguccauaa

SEQ ID NO: 1297213 - RNA, 19 nt, Homo sapiens
  misc_RNA (1)...(19): siRNA sense strand
cuaggaaacuggaccauua

SEQ ID NO: 1297214 - RNA, 19 nt, Homo sapiens
  misc_RNA (1)...(19): siRNA sense strand
acaaauagccgaaguguuu

SEQ ID NO: 1297215 - RNA, 19 nt, Homo sapiens
  misc_RNA (1)...(19): siRNA sense strand
caugagagcugauaucugu

SEQ ID NO: 1297216 - RNA, 19 nt, Homo sapiens
  misc_RNA (1)...(19): siRNA sense strand
ggaauugacugacaagaag

SEQ ID NO: 1297217 - RNA, 19 nt, Homo sapiens
  misc_RNA (1)...(19): siRNA sense strand
cauaggauuuggaaacaua

SEQ ID NO: 1297218 - RNA, 19 nt, Homo sapiens
  misc_RNA (1)...(19): siRNA sense strand
ggacgaaauuugcccgauu

SEQ ID NO: 1297219 - RNA, 19 nt, Homo sapiens
  misc_RNA (1)...(19): siRNA sense strand
ccauaaacauucaagacua

SEQ ID NO: 1297220 - RNA, 19 nt, Homo sapiens
  misc_RNA (1)...(19): siRNA sense strand
guggagaggucauuucuga

SEQ ID NO: 1297221 - RNA, 19 nt, Homo sapiens
  misc_RNA (1)...(19): siRNA sense strand
ucaaggauauuacguuguu

SEQ ID NO: 1297222 - RNA, 19 nt, Homo sapiens
  misc_RNA (1)...(19): siRNA sense strand
gaaacuggaccauuaccua

SEQ ID NO: 1297223 - RNA, 19 nt, Homo sapiens
  misc_RNA (1)...(19): siRNA sense strand
gauauuacguuguucaaac

SEQ ID NO: 1297224 - RNA, 19 nt, Homo sapiens
  misc_RNA (1)...(19): siRNA sense strand
gaaauuugcccgauugaca

SEQ ID NO: 1297225 - RNA, 19 nt, Homo sapiens
  misc_RNA (1)...(19): siRNA sense strand
accaugagaugcugaauaa

SEQ ID NO: 1297226 - RNA, 19 nt, Homo sapiens
  misc_RNA (1)...(19): siRNA sense strand
caagaagaccauugagaaa

SEQ ID NO: 1297227 - RNA, 19 nt, Homo sapiens
  misc_RNA (1)...(19): siRNA sense strand
aaacaaagcagaacaacau

SEQ ID NO: 1297228 - RNA, 19 nt, Homo sapiens
  misc_RNA (1)...(19): siRNA sense strand
cagauauccuuccucagua

SEQ ID NO: 1297229 - RNA, 19 nt, Homo sapiens
  misc_RNA (1)...(19): siRNA sense strand
gacgaaauuugcccgauug

SEQ ID NO: 1297230 - RNA, 19 nt, Homo sapiens
  misc_RNA (1)...(19): siRNA sense strand
cagcaaggauucauuguac

SEQ ID NO: 1297231 - RNA, 19 nt, Homo sapiens
  misc_RNA (1)...(19): siRNA sense strand
gcugauaucuguguucauc

SEQ ID NO: 1297232 - RNA, 19 nt, Homo sapiens
  misc_RNA (1)...(19): siRNA sense strand
gugagcgagucauggauua

SEQ ID NO: 1297233 - RNA, 19 nt, Homo sapiens
  misc_RNA (1)...(19): siRNA sense strand
ggaaucagcagucucuuca

SEQ ID NO: 1297234 - RNA, 19 nt, Homo sapiens
  misc_RNA (1)...(19): siRNA sense strand
ugacaagccuuacaaccau

SEQ ID NO: 1297235 - RNA, 19 nt, Homo sapiens
  misc_RNA (1)...(19): siRNA sense strand
gacaagccuuacaaccaua

SEQ ID NO: 1297236 - RNA, 19 nt, Homo sapiens
  misc_RNA (1)...(19): siRNA sense strand
gaucugcugucuuguuuac

SEQ ID NO: 1297237 - RNA, 19 nt, Homo sapiens
  misc_RNA (1)...(19): siRNA sense strand
gagcugauaucuguguuca

SEQ ID NO: 1297238 - RNA, 19 nt, Homo sapiens
  misc_RNA (1)...(19): siRNA sense strand
cauaaacauucaagacuag

SEQ ID NO: 1297239 - RNA, 19 nt, Homo sapiens
  misc_RNA (1)...(19): siRNA sense strand
ugauaucuguguucaucua

SEQ ID NO: 1297240 - RNA, 19 nt, Homo sapiens
  misc_RNA (1)...(19): siRNA sense strand
gguuggcucucuucuuuau

SEQ ID NO: 1297241 - RNA, 19 nt, Homo sapiens
  misc_RNA (1)...(19): siRNA sense strand
acaagaagaccauugagaa

SEQ ID NO: 1297242 - RNA, 19 nt, Homo sapiens
  misc_RNA (1)...(19): siRNA sense strand
ugaucgaucugcugucuug

SEQ ID NO: 1297243 - RNA, 19 nt, Homo sapiens
  misc_RNA (1)...(19): siRNA sense strand
caaaaggcauugauacaga

SEQ ID NO: 1297244 - RNA, 19 nt, Homo sapiens
  misc_RNA (1)...(19): siRNA sense strand
gagcgagucauggauuaua

SEQ ID NO: 1297245 - RNA, 19 nt, Homo sapiens
  misc_RNA (1)...(19): siRNA sense strand
caugagaugcugaauaaug

SEQ ID NO: 1297246 - RNA, 19 nt, Homo sapiens
  misc_RNA (1)...(19): siRNA sense strand
gggaauugacugacaagaa

SEQ ID NO: 1297247 - RNA, 19 nt, Homo sapiens
  misc_RNA (1)...(19): siRNA sense strand
gaugaugguuggcucucuu

SEQ ID NO: 1297248 - RNA, 19 nt, Homo sapiens
  misc_RNA (1)...(19): siRNA sense strand
uuaaugaacauccugcuuu

SEQ ID NO: 1297249 - RNA, 19 nt, Homo sapiens
  misc_RNA (1)...(19): siRNA sense strand
ugaacuaucugaaaacuug

SEQ ID NO: 1297250 - RNA, 19 nt, Homo sapiens
  misc_RNA (1)...(19): siRNA sense strand
cagcagcucacgccaauga

SEQ ID NO: 1297251 - RNA, 19 nt, Homo sapiens
  misc_RNA (1)...(19): siRNA sense strand
gacaagaagaccauugaga

SEQ ID NO: 1297252 - RNA, 19 nt, Homo sapiens
  misc_RNA (1)...(19): siRNA sense strand
caaccgauaccaugagaug

SEQ ID NO: 1297253 - RNA, 19 nt, Homo sapiens
  misc_RNA (1)...(19): siRNA sense strand
agaagaccauugagaaagu

SEQ ID NO: 1297254 - RNA, 19 nt, Homo sapiens
  misc_RNA (1)...(19): siRNA sense strand
ggaccauuaccuagaauau

SEQ ID NO: 1297255 - RNA, 19 nt, Homo sapiens
  misc_RNA (1)...(19): siRNA sense strand
ucgaucugcugucuuguuu

SEQ ID NO: 1297256 - RNA, 19 nt, Homo sapiens
  misc_RNA (1)...(19): siRNA sense strand
gccaauagaggaugauuca

SEQ ID NO: 1297257 - RNA, 19 nt, Homo sapiens
  misc_RNA (1)...(19): siRNA sense strand
cguguccucucucuacuuu

SEQ ID NO: 1297258 - RNA, 19 nt, Homo sapiens
  misc_RNA (1)...(19): siRNA sense strand
ccauaucgcuacaauacca

SEQ ID NO: 1297259 - RNA, 19 nt, Homo sapiens
  misc_RNA (1)...(19): siRNA sense strand
ucagauauccuuccucagu

SEQ ID NO: 1297260 - RNA, 19 nt, Homo sapiens
  misc_RNA (1)...(19): siRNA sense strand
gaggugguccauaaacauu

SEQ ID NO: 1297261 - RNA, 19 nt, Homo sapiens
  misc_RNA (1)...(19): siRNA sense strand
cagcucacgccaaugaaua

SEQ ID NO: 1297262 - RNA, 19 nt, Homo sapiens
  misc_RNA (1)...(19): siRNA sense strand
aauagaggaugauucaaca

SEQ ID NO: 1297263 - RNA, 19 nt, Homo sapiens
  misc_RNA (1)...(19): siRNA sense strand
ggacaugagagcugauauc

SEQ ID NO: 1297264 - RNA, 19 nt, Homo sapiens
  misc_RNA (1)...(19): siRNA sense strand
gguauagcaucggagacua

SEQ ID NO: 1297265 - RNA, 19 nt, Homo sapiens
  misc_RNA (1)...(19): siRNA sense strand
aaacaagaagcgccaaaga

SEQ ID NO: 1297266 - RNA, 19 nt, Homo sapiens
  misc_RNA (1)...(19): siRNA sense strand
uauauugucucaacauggu

SEQ ID NO: 1297267 - RNA, 19 nt, Homo sapiens
  misc_RNA (1)...(19): siRNA sense strand
augguuggcucucuucuuu

SEQ ID NO: 1297268 - RNA, 19 nt, Homo sapiens
  misc_RNA (1)...(19): siRNA sense strand
ccagcaaggauucauugua

SEQ ID NO: 1297269 - RNA, 19 nt, Homo sapiens
  misc_RNA (1)...(19): siRNA sense strand
ucacuaacaccauccaaau

SEQ ID NO: 1297270 - RNA, 19 nt, Homo sapiens
  misc_RNA (1)...(19): siRNA sense strand
ucagcagucucuucaguuc

SEQ ID NO: 1297271 - RNA, 19 nt, Homo sapiens
  misc_RNA (1)...(19): siRNA sense strand
gaagaccauugagaaaguc

SEQ ID NO: 1297272 - RNA, 19 nt, Homo sapiens
  misc_RNA (1)...(19): siRNA sense strand
cagaggugguccauaaaca

SEQ ID NO: 1297273 - RNA, 19 nt, Homo sapiens
  misc_RNA (1)...(19): siRNA sense strand
cagcuggcuuugagcauug

SEQ ID NO: 1297274 - RNA, 19 nt, Homo sapiens
  misc_RNA (1)...(19): siRNA sense strand
ccagcuggcuuugagcauu

SEQ ID NO: 1297275 - RNA, 19 nt, Homo sapiens
  misc_RNA (1)...(19): siRNA sense strand
cuaacaccauccaaauaga

SEQ ID NO: 1297276 - RNA, 19 nt, Homo sapiens
  misc_RNA (1)...(19): siRNA sense strand
cuacgaaucaaacugcuuu

SEQ ID NO: 1297277 - RNA, 19 nt, Homo sapiens
  misc_RNA (1)...(19): siRNA sense strand
gaaaugaacaugaaaaggu

SEQ ID NO: 1297278 - RNA, 19 nt, Homo sapiens
  misc_RNA (1)...(19): siRNA sense strand
ccaaagacgccaccacaca

SEQ ID NO: 1297279 - RNA, 19 nt, Homo sapiens
  misc_RNA (1)...(19): siRNA sense strand
gagacuacgaggucauuga

SEQ ID NO: 1297280 - RNA, 19 nt, Homo sapiens
  misc_RNA (1)...(19): siRNA sense strand
ggaggacccagcaaggauu

SEQ ID NO: 1297281 - RNA, 19 nt, Homo sapiens
  misc_RNA (1)...(19): siRNA sense strand
gauauccuuccucaguaua

SEQ ID NO: 1297282 - RNA, 19 nt, Homo sapiens
  misc_RNA (1)...(19): siRNA sense strand
gaugaggugguggcuauuu

SEQ ID NO: 1297283 - RNA, 19 nt, Homo sapiens
  misc_RNA (1)...(19): siRNA sense strand
guacguguccucucucuac

SEQ ID NO: 1297284 - RNA, 19 nt, Homo sapiens
  misc_RNA (1)...(19): siRNA sense strand
gauagugugguggacguua

SEQ ID NO: 1297285 - RNA, 19 nt, Homo sapiens
  misc_RNA (1)...(19): siRNA sense strand
acccuaagcucauaaggau

SEQ ID NO: 1297286 - RNA, 19 nt, Homo sapiens
  misc_RNA (1)...(19): siRNA sense strand
uagaggaugauucaacaaa

SEQ ID NO: 1297287 - RNA, 19 nt, Homo sapiens
  misc_RNA (1)...(19): siRNA sense strand
gaaaagguccucuccaucu

SEQ ID NO: 1297288 - RNA, 19 nt, Homo sapiens
  misc_RNA (1)...(19): siRNA sense strand
agucauggauuauauuguc

SEQ ID NO: 1297289 - RNA, 19 nt, Homo sapiens
  misc_RNA (1)...(19): siRNA sense strand
ggaaacauagcuccuacca

SEQ ID NO: 1297290 - RNA, 19 nt, Homo sapiens
  misc_RNA (1)...(19): siRNA sense strand
cacuaacaccauccaaaua

SEQ ID NO: 1297291 - RNA, 19 nt, Homo sapiens
  misc_RNA (1)...(19): siRNA sense strand
ggugguccauaaacauuca

SEQ ID NO: 1297292 - RNA, 19 nt, Homo sapiens
  misc_RNA (1)...(19): siRNA sense strand
ggauauuacguuguucaaa

SEQ ID NO: 1297293 - RNA, 19 nt, Homo sapiens
  misc_RNA (1)...(19): siRNA sense strand
uuaccaugcuggagaaagu

SEQ ID NO: 1297294 - RNA, 19 nt, Homo sapiens
  misc_RNA (1)...(19): siRNA sense strand
gauaucuguguucaucuaa

SEQ ID NO: 1297295 - RNA, 19 nt, Homo sapiens
  misc_RNA (1)...(19): siRNA sense strand
cagcaaauguaugccaaca

SEQ ID NO: 1297296 - RNA, 19 nt, Homo sapiens
  misc_RNA (1)...(19): siRNA sense strand
ugucuuguuuaccuuauga

SEQ ID NO: 1297297 - RNA, 19 nt, Homo sapiens
  misc_RNA (1)...(19): siRNA sense strand
caaagacgccaccacacau

SEQ ID NO: 1297298 - RNA, 19 nt, Homo sapiens
  misc_RNA (1)...(19): siRNA sense strand
caauagaggaugauucaac

SEQ ID NO: 1297299 - RNA, 19 nt, Homo sapiens
  misc_RNA (1)...(19): siRNA sense strand
uaaugaacauccugcuuuu

SEQ ID NO: 1297300 - RNA, 19 nt, Homo sapiens
  misc_RNA (1)...(19): siRNA sense strand
gagagcugauaucuguguu

SEQ ID NO: 1297301 - RNA, 19 nt, Homo sapiens
  misc_RNA (1)...(19): siRNA sense strand
ugaauaauguacgggacuu

SEQ ID NO: 1297302 - RNA, 19 nt, Homo sapiens
  misc_RNA (1)...(19): siRNA sense strand
augagaugcugaauaaugu

SEQ ID NO: 1297303 - RNA, 19 nt, Homo sapiens
  misc_RNA (1)...(19): siRNA sense strand
ucucucuacuuuaccauga

SEQ ID NO: 1297304 - RNA, 19 nt, Homo sapiens
  misc_RNA (1)...(19): siRNA sense strand
gcagucucuucaguucuuu

SEQ ID NO: 1297305 - RNA, 19 nt, Homo sapiens
  misc_RNA (1)...(19): siRNA sense strand
aaucagcagucucuucagu

SEQ ID NO: 1297306 - RNA, 19 nt, Homo sapiens
  misc_RNA (1)...(19): siRNA sense strand
agauauccuuccucaguau

SEQ ID NO: 1297307 - RNA, 19 nt, Homo sapiens
  misc_RNA (1)...(19): siRNA sense strand
guagaguuccaaaccauuc

SEQ ID NO: 1297308 - RNA, 19 nt, Homo sapiens
  misc_RNA (1)...(19): siRNA sense strand
ggauuauauugucucaaca

SEQ ID NO: 1297309 - RNA, 19 nt, Homo sapiens
  misc_RNA (1)...(19): siRNA sense strand
uggauuauauugucucaac

SEQ ID NO: 1297310 - RNA, 19 nt, Homo sapiens
  misc_RNA (1)...(19): siRNA sense strand
gacccuaagcucauaagga

SEQ ID NO: 1297311 - RNA, 19 nt, Homo sapiens
  misc_RNA (1)...(19): siRNA sense strand
gggauugggugauuuuaau

SEQ ID NO: 1297312 - RNA, 19 nt, Homo sapiens
  misc_RNA (1)...(19): siRNA sense strand
gaauauacccuccacaguu

SEQ ID NO: 1297313 - RNA, 19 nt, Homo sapiens
  misc_RNA (1)...(19): siRNA sense strand
acacacagcuuugcacuuu

SEQ ID NO: 1297314 - RNA, 19 nt, Homo sapiens
  misc_RNA (1)...(19): siRNA sense strand
gcaaauagauguggacacu

SEQ ID NO: 1297315 - RNA, 19 nt, Homo sapiens
  misc_RNA (1)...(19): siRNA sense strand
cuacaaagccgaagucaau

SEQ ID NO: 1297316 - RNA, 19 nt, Homo sapiens
  misc_RNA (1)...(19): siRNA sense strand
ccaaguuaguuaagagaaa

SEQ ID NO: 1297317 - RNA, 19 nt, Homo sapiens
  misc_RNA (1)...(19): siRNA sense strand
gcuaccagcuccuguugaa

SEQ ID NO: 1297318 - RNA, 19 nt, Homo sapiens
  misc_RNA (1)...(19): siRNA sense strand
uaagagaaauuuccuugag

SEQ ID NO: 1297319 - RNA, 19 nt, Homo sapiens
  misc_RNA (1)...(19): siRNA sense strand
gaagaugagaauaugguuu

SEQ ID NO: 1297320 - RNA, 19 nt, Homo sapiens
  misc_RNA (1)...(19): siRNA sense strand
ccaucucucugucuuguuu

SEQ ID NO: 1297321 - RNA, 19 nt, Homo sapiens
  misc_RNA (1)...(19): siRNA sense strand
aaauagauguggacacugu

SEQ ID NO: 1297322 - RNA, 19 nt, Homo sapiens
  misc_RNA (1)...(19): siRNA sense strand
guguuaagauccucuguga

SEQ ID NO: 1297323 - RNA, 19 nt, Homo sapiens
  misc_RNA (1)...(19): siRNA sense strand
ggaccacaaugcuacaauc

SEQ ID NO: 1297324 - RNA, 19 nt, Homo sapiens
  misc_RNA (1)...(19): siRNA sense strand
aagccaaucucauggauau

SEQ ID NO: 1297325 - RNA, 19 nt, Homo sapiens
  misc_RNA (1)...(19): siRNA sense strand
gcucaauugcuacuccuua

SEQ ID NO: 1297326 - RNA, 19 nt, Homo sapiens
  misc_RNA (1)...(19): siRNA sense strand
gcaugcugcuugacuacaa

SEQ ID NO: 1297327 - RNA, 19 nt, Homo sapiens
  misc_RNA (1)...(19): siRNA sense strand
ggagcugccaaguuaguua

SEQ ID NO: 1297328 - RNA, 19 nt, Homo sapiens
  misc_RNA (1)...(19): siRNA sense strand
ccacaaugcuacaaucaac

SEQ ID NO: 1297329 - RNA, 19 nt, Homo sapiens
  misc_RNA (1)...(19): siRNA sense strand
gagaugacgacuuuaaauc

SEQ ID NO: 1297330 - RNA, 19 nt, Homo sapiens
  misc_RNA (1)...(19): siRNA sense strand
gaugacgacuuuaaaucuc

SEQ ID NO: 1297331 - RNA, 19 nt, Homo sapiens
  misc_RNA (1)...(19): siRNA sense strand
aauauacccuccacaguuc

SEQ ID NO: 1297332 - RNA, 19 nt, Homo sapiens
  misc_RNA (1)...(19): siRNA sense strand
gaagccaaucucauggaua

SEQ ID NO: 1297333 - RNA, 19 nt, Homo sapiens
  misc_RNA (1)...(19): siRNA sense strand
uugccuagcuauaaauuga

SEQ ID NO: 1297334 - RNA, 19 nt, Homo sapiens
  misc_RNA (1)...(19): siRNA sense strand
cuacugggcccuccgcuuu

SEQ ID NO: 1297335 - RNA, 19 nt, Homo sapiens
  misc_RNA (1)...(19): siRNA sense strand
gagcugccaaguuaguuaa

SEQ ID NO: 1297336 - RNA, 19 nt, Homo sapiens
  misc_RNA (1)...(19): siRNA sense strand
cgaagucaaugcccgagau

SEQ ID NO: 1297337 - RNA, 19 nt, Homo sapiens
  misc_RNA (1)...(19): siRNA sense strand
uaaguggacacacagcuuu

SEQ ID NO: 1297338 - RNA, 19 nt, Homo sapiens
  misc_RNA (1)...(19): siRNA sense strand
ugaaauggccaauguggau

SEQ ID NO: 1297339 - RNA, 19 nt, Homo sapiens
  misc_RNA (1)...(19): siRNA sense strand
gaaauggccaauguggauu

SEQ ID NO: 1297340 - RNA, 19 nt, Homo sapiens
  misc_RNA (1)...(19): siRNA sense strand
ggaaugucuucuggugcua

SEQ ID NO: 1297341 - RNA, 19 nt, Homo sapiens
  misc_RNA (1)...(19): siRNA sense strand
ugcccgagaugacgacuuu

SEQ ID NO: 1297342 - RNA, 19 nt, Homo sapiens
  misc_RNA (1)...(19): siRNA sense strand
cagcgugaaugcccacaug

SEQ ID NO: 1297343 - RNA, 19 nt, Homo sapiens
  misc_RNA (1)...(19): siRNA sense strand
aucuggagcugccaaguua

SEQ ID NO: 1297344 - RNA, 19 nt, Homo sapiens
  misc_RNA (1)...(19): siRNA sense strand
gaagaccaacaaccaagau

SEQ ID NO: 1297345 - RNA, 19 nt, Homo sapiens
  misc_RNA (1)...(19): siRNA sense strand
cgagaugacgacuuuaaau

SEQ ID NO: 1297346 - RNA, 19 nt, Homo sapiens
  misc_RNA (1)...(19): siRNA sense strand
gcuuuaaggagcaggagua

SEQ ID NO: 1297347 - RNA, 19 nt, Homo sapiens
  misc_RNA (1)...(19): siRNA sense strand
gauccaaaggcaaauagau

SEQ ID NO: 1297348 - RNA, 19 nt, Homo sapiens
  misc_RNA (1)...(19): siRNA sense strand
cgaagccaaucucauggau

SEQ ID NO: 1297349 - RNA, 19 nt, Homo sapiens
  misc_RNA (1)...(19): siRNA sense strand
gaacaugaagaccaacaac

SEQ ID NO: 1297350 - RNA, 19 nt, Homo sapiens
  misc_RNA (1)...(19): siRNA sense strand
cucaauugcuacuccuuaa

SEQ ID NO: 1297351 - RNA, 19 nt, Homo sapiens
  misc_RNA (1)...(19): siRNA sense strand
guuacugguugccuagcua

SEQ ID NO: 1297352 - RNA, 19 nt, Homo sapiens
  misc_RNA (1)...(19): siRNA sense strand
agucgaagaugagaauaug

SEQ ID NO: 1297353 - RNA, 19 nt, Homo sapiens
  misc_RNA (1)...(19): siRNA sense strand
cuugugaaauggccaaugu

SEQ ID NO: 1297354 - RNA, 19 nt, Homo sapiens
  misc_RNA (1)...(19): siRNA sense strand
gaagucgaagaugagaaua

SEQ ID NO: 1297355 - RNA, 19 nt, Homo sapiens
  misc_RNA (1)...(19): siRNA sense strand
ccaaucucauggauaucaa

SEQ ID NO: 1297356 - RNA, 19 nt, Homo sapiens
  misc_RNA (1)...(19): siRNA sense strand
ugaagucgaagaugagaau

SEQ ID NO: 1297357 - RNA, 19 nt, Homo sapiens
  misc_RNA (1)...(19): siRNA sense strand
gaagucaaugcccgagaug

SEQ ID NO: 1297358 - RNA, 19 nt, Homo sapiens
  misc_RNA (1)...(19): siRNA sense strand
cuacuggaccacaaugcua

SEQ ID NO: 1297359 - RNA, 19 nt, Homo sapiens
  misc_RNA (1)...(19): siRNA sense strand
gcugugcugccauccagua

SEQ ID NO: 1297360 - RNA, 19 nt, Homo sapiens
  misc_RNA (1)...(19): siRNA sense strand
ccaaugacuucggaaaauu

SEQ ID NO: 1297361 - RNA, 19 nt, Homo sapiens
  misc_RNA (1)...(19): siRNA sense strand
gccgcaugcugcuugacua

SEQ ID NO: 1297362 - RNA, 19 nt, Homo sapiens
  misc_RNA (1)...(19): siRNA sense strand
gcugccaaguuaguuaaga

SEQ ID NO: 1297363 - RNA, 19 nt, Homo sapiens
  misc_RNA (1)...(19): siRNA sense strand
gaccacaaugcuacaauca

SEQ ID NO: 1297364 - RNA, 19 nt, Homo sapiens
  misc_RNA (1)...(19): siRNA sense strand
cugguugccuagcuauaaa

SEQ ID NO: 1297365 - RNA, 19 nt, Homo sapiens
  misc_RNA (1)...(19): siRNA sense strand
caugcugcuugacuacaaa

SEQ ID NO: 1297366 - RNA, 19 nt, Homo sapiens
  misc_RNA (1)...(19): siRNA sense strand
caauugcuacuccuuaagu

SEQ ID NO: 1297367 - RNA, 19 nt, Homo sapiens
  misc_RNA (1)...(19): siRNA sense strand
gccaaucucauggauauca

SEQ ID NO: 1297368 - RNA, 19 nt, Homo sapiens
  misc_RNA (1)...(19): siRNA sense strand
aaucaacuguagacccaau

SEQ ID NO: 1297369 - RNA, 19 nt, Homo sapiens
  misc_RNA (1)...(19): siRNA sense strand
ccacugccccugucacuaa

SEQ ID NO: 1297370 - RNA, 19 nt, Homo sapiens
  misc_RNA (1)...(19): siRNA sense strand
cgaauauacccuccacagu

SEQ ID NO: 1297371 - RNA, 19 nt, Homo sapiens
  misc_RNA (1)...(19): siRNA sense strand
agaccaacaaccaagauga

SEQ ID NO: 1297372 - RNA, 19 nt, Homo sapiens
  misc_RNA (1)...(19): siRNA sense strand
caugaagaccaacaaccaa

SEQ ID NO: 1297373 - RNA, 19 nt, Homo sapiens
  misc_RNA (1)...(19): siRNA sense strand
ccgagaugacgacuuuaaa

SEQ ID NO: 1297374 - RNA, 19 nt, Homo sapiens
  misc_RNA (1)...(19): siRNA sense strand
ugaagaccaacaaccaaga

SEQ ID NO: 1297375 - RNA, 19 nt, Homo sapiens
  misc_RNA (1)...(19): siRNA sense strand
uugaggcgcuaaaguccaa

SEQ ID NO: 1297376 - RNA, 19 nt, Homo sapiens
  misc_RNA (1)...(19): siRNA sense strand
gaccaacaaccaagaugag

SEQ ID NO: 1297377 - RNA, 19 nt, Homo sapiens
  misc_RNA (1)...(19): siRNA sense strand
cgccgaagccaaucucaug

SEQ ID NO: 1297378 - RNA, 19 nt, Homo sapiens
  misc_RNA (1)...(19): siRNA sense strand
cccgagaugacgacuuuaa

SEQ ID NO: 1297379 - RNA, 19 nt, Homo sapiens
  misc_RNA (1)...(19): siRNA sense strand
uuaaggagcaggaguacag

SEQ ID NO: 1297380 - RNA, 19 nt, Homo sapiens
  misc_RNA (1)...(19): siRNA sense strand
auaaacaagguuacugguu

SEQ ID NO: 1297381 - RNA, 19 nt, Homo sapiens
  misc_RNA (1)...(19): siRNA sense strand
cgaagaugagaauaugguu

SEQ ID NO: 1297382 - RNA, 19 nt, Homo sapiens
  misc_RNA (1)...(19): siRNA sense strand
ccaaaggcaaauagaugug

SEQ ID NO: 1297383 - RNA, 19 nt, Homo sapiens
  misc_RNA (1)...(19): siRNA sense strand
cauaguggacagcgugaau

SEQ ID NO: 1297384 - RNA, 19 nt, Homo sapiens
  misc_RNA (1)...(19): siRNA sense strand
gcuuugcacuuuuguacaa

SEQ ID NO: 1297385 - RNA, 19 nt, Homo sapiens
  misc_RNA (1)...(19): siRNA sense strand
acacagcuuugcacuuuug

SEQ ID NO: 1297386 - RNA, 19 nt, Homo sapiens
  misc_RNA (1)...(19): siRNA sense strand
acugggcccuccgcuuuaa

SEQ ID NO: 1297387 - RNA, 19 nt, Homo sapiens
  misc_RNA (1)...(19): siRNA sense strand
aaucuggagcugccaaguu

SEQ ID NO: 1297388 - RNA, 19 nt, Homo sapiens
  misc_RNA (1)...(19): siRNA sense strand
gcugcccacuucggccuuu

SEQ ID NO: 1297389 - RNA, 19 nt, Homo sapiens
  misc_RNA (1)...(19): siRNA sense strand
gaauauacccuccacaguu

SEQ ID NO: 1297390 - RNA, 19 nt, Homo sapiens
  misc_RNA (1)...(19): siRNA sense strand
acacacagcuuugcacuuu

SEQ ID NO: 1297391 - RNA, 19 nt, Homo sapiens
  misc_RNA (1)...(19): siRNA sense strand
gcaaauagauguggacacu

SEQ ID NO: 1297392 - RNA, 19 nt, Homo sapiens
  misc_RNA (1)...(19): siRNA sense strand
cuacaaagccgaagucaau

SEQ ID NO: 1297393 - RNA, 19 nt, Homo sapiens
  misc_RNA (1)...(19): siRNA sense strand
ccaaguuaguuaagagaaa

SEQ ID NO: 1297394 - RNA, 19 nt, Homo sapiens
  misc_RNA (1)...(19): siRNA sense strand
gcuaccagcuccuguugaa

SEQ ID NO: 1297395 - RNA, 19 nt, Homo sapiens
  misc_RNA (1)...(19): siRNA sense strand
uaagagaaauuuccuugag

SEQ ID NO: 1297396 - RNA, 19 nt, Homo sapiens
  misc_RNA (1)...(19): siRNA sense strand
gaagaugagaauaugguuu

SEQ ID NO: 1297397 - RNA, 19 nt, Homo sapiens
  misc_RNA (1)...(19): siRNA sense strand
ccaucucucugucuuguuu

SEQ ID NO: 1297398 - RNA, 19 nt, Homo sapiens
  misc_RNA (1)...(19): siRNA sense strand
aaauagauguggacacugu

SEQ ID NO: 1297399 - RNA, 19 nt, Homo sapiens
  misc_RNA (1)...(19): siRNA sense strand
guguuaagauccucuguga

SEQ ID NO: 1297400 - RNA, 19 nt, Homo sapiens
  misc_RNA (1)...(19): siRNA sense strand
ggaccacaaugcuacaauc

SEQ ID NO: 1297401 - RNA, 19 nt, Homo sapiens
  misc_RNA (1)...(19): siRNA sense strand
aagccaaucucauggauau

SEQ ID NO: 1297402 - RNA, 19 nt, Homo sapiens
  misc_RNA (1)...(19): siRNA sense strand
gcucaauugcuacuccuua

SEQ ID NO: 1297403 - RNA, 19 nt, Homo sapiens
  misc_RNA (1)...(19): siRNA sense strand
gcaugcugcuugacuacaa

SEQ ID NO: 1297404 - RNA, 19 nt, Homo sapiens
  misc_RNA (1)...(19): siRNA sense strand
ggagcugccaaguuaguua

SEQ ID NO: 1297405 - RNA, 19 nt, Homo sapiens
  misc_RNA (1)...(19): siRNA sense strand
ccacaaugcuacaaucaac

SEQ ID NO: 1297406 - RNA, 19 nt, Homo sapiens
  misc_RNA (1)...(19): siRNA sense strand
gagaugacgacuuuaaauc

SEQ ID NO: 1297407 - RNA, 19 nt, Homo sapiens
  misc_RNA (1)...(19): siRNA sense strand
gaugacgacuuuaaaucuc

SEQ ID NO: 1297408 - RNA, 19 nt, Homo sapiens
  misc_RNA (1)...(19): siRNA sense strand
aauauacccuccacaguuc

SEQ ID NO: 1297409 - RNA, 19 nt, Homo sapiens
  misc_RNA (1)...(19): siRNA sense strand
gaagccaaucucauggaua

SEQ ID NO: 1297410 - RNA, 19 nt, Homo sapiens
  misc_RNA (1)...(19): siRNA sense strand
uugccuagcuauaaauuga

SEQ ID NO: 1297411 - RNA, 19 nt, Homo sapiens
  misc_RNA (1)...(19): siRNA sense strand
cuacugggcccuccgcuuu

SEQ ID NO: 1297412 - RNA, 19 nt, Homo sapiens
  misc_RNA (1)...(19): siRNA sense strand
gagcugccaaguuaguuaa

SEQ ID NO: 1297413 - RNA, 19 nt, Homo sapiens
  misc_RNA (1)...(19): siRNA sense strand
cgaagucaaugcccgagau

SEQ ID NO: 1297414 - RNA, 19 nt, Homo sapiens
  misc_RNA (1)...(19): siRNA sense strand
uaaguggacacacagcuuu

SEQ ID NO: 1297415 - RNA, 19 nt, Homo sapiens
  misc_RNA (1)...(19): siRNA sense strand
ugaaauggccaauguggau

SEQ ID NO: 1297416 - RNA, 19 nt, Homo sapiens
  misc_RNA (1)...(19): siRNA sense strand
gaaauggccaauguggauu

SEQ ID NO: 1297417 - RNA, 19 nt, Homo sapiens
  misc_RNA (1)...(19): siRNA sense strand
ggaaugucuucuggugcua

SEQ ID NO: 1297418 - RNA, 19 nt, Homo sapiens
  misc_RNA (1)...(19): siRNA sense strand
ugcccgagaugacgacuuu

SEQ ID NO: 1297419 - RNA, 19 nt, Homo sapiens
  misc_RNA (1)...(19): siRNA sense strand
cagcgugaaugcccacaug

SEQ ID NO: 1297420 - RNA, 19 nt, Homo sapiens
  misc_RNA (1)...(19): siRNA sense strand
aucuggagcugccaaguua

SEQ ID NO: 1297421 - RNA, 19 nt, Homo sapiens
  misc_RNA (1)...(19): siRNA sense strand
gaagaccaacaaccaagau

SEQ ID NO: 1297422 - RNA, 19 nt, Homo sapiens
  misc_RNA (1)...(19): siRNA sense strand
cgagaugacgacuuuaaau

SEQ ID NO: 1297423 - RNA, 19 nt, Homo sapiens
  misc_RNA (1)...(19): siRNA sense strand
gcuuuaaggagcaggagua

SEQ ID NO: 1297424 - RNA, 19 nt, Homo sapiens
  misc_RNA (1)...(19): siRNA sense strand
gauccaaaggcaaauagau

SEQ ID NO: 1297425 - RNA, 19 nt, Homo sapiens
  misc_RNA (1)...(19): siRNA sense strand
cgaagccaaucucauggau

SEQ ID NO: 1297426 - RNA, 19 nt, Homo sapiens
  misc_RNA (1)...(19): siRNA sense strand
gaacaugaagaccaacaac

SEQ ID NO: 1297427 - RNA, 19 nt, Homo sapiens
  misc_RNA (1)...(19): siRNA sense strand
cucaauugcuacuccuuaa

SEQ ID NO: 1297428 - RNA, 19 nt, Homo sapiens
  misc_RNA (1)...(19): siRNA sense strand
guuacugguugccuagcua

SEQ ID NO: 1297429 - RNA, 19 nt, Homo sapiens
  misc_RNA (1)...(19): siRNA sense strand
agucgaagaugagaauaug

SEQ ID NO: 1297430 - RNA, 19 nt, Homo sapiens
  misc_RNA (1)...(19): siRNA sense strand
cuugugaaauggccaaugu

SEQ ID NO: 1297431 - RNA, 19 nt, Homo sapiens
  misc_RNA (1)...(19): siRNA sense strand
gaagucgaagaugagaaua

SEQ ID NO: 1297432 - RNA, 19 nt, Homo sapiens
  misc_RNA (1)...(19): siRNA sense strand
ccaaucucauggauaucaa

SEQ ID NO: 1297433 - RNA, 19 nt, Homo sapiens
  misc_RNA (1)...(19): siRNA sense strand
ugaagucgaagaugagaau

SEQ ID NO: 1297434 - RNA, 19 nt, Homo sapiens
  misc_RNA (1)...(19): siRNA sense strand
gaagucaaugcccgagaug

SEQ ID NO: 1297435 - RNA, 19 nt, Homo sapiens
  misc_RNA (1)...(19): siRNA sense strand
cuacuggaccacaaugcua

SEQ ID NO: 1297436 - RNA, 19 nt, Homo sapiens
  misc_RNA (1)...(19): siRNA sense strand
gcugugcugccauccagua

SEQ ID NO: 1297437 - RNA, 19 nt, Homo sapiens
  misc_RNA (1)...(19): siRNA sense strand
ccaaugacuucggaaaauu

SEQ ID NO: 1297438 - RNA, 19 nt, Homo sapiens
  misc_RNA (1)...(19): siRNA sense strand
gccgcaugcugcuugacua

SEQ ID NO: 1297439 - RNA, 19 nt, Homo sapiens
  misc_RNA (1)...(19): siRNA sense strand
gcugccaaguuaguuaaga

SEQ ID NO: 1297440 - RNA, 19 nt, Homo sapiens
  misc_RNA (1)...(19): siRNA sense strand
gaccacaaugcuacaauca

SEQ ID NO: 1297441 - RNA, 19 nt, Homo sapiens
  misc_RNA (1)...(19): siRNA sense strand
cugguugccuagcuauaaa

SEQ ID NO: 1297442 - RNA, 19 nt, Homo sapiens
  misc_RNA (1)...(19): siRNA sense strand
caugcugcuugacuacaaa

SEQ ID NO: 1297443 - RNA, 19 nt, Homo sapiens
  misc_RNA (1)...(19): siRNA sense strand
caauugcuacuccuuaagu

SEQ ID NO: 1297444 - RNA, 19 nt, Homo sapiens
  misc_RNA (1)...(19): siRNA sense strand
gccaaucucauggauauca

SEQ ID NO: 1297445 - RNA, 19 nt, Homo sapiens
  misc_RNA (1)...(19): siRNA sense strand
aaucaacuguagacccaau

SEQ ID NO: 1297446 - RNA, 19 nt, Homo sapiens
  misc_RNA (1)...(19): siRNA sense strand
ccacugccccugucacuaa

SEQ ID NO: 1297447 - RNA, 19 nt, Homo sapiens
  misc_RNA (1)...(19): siRNA sense strand
cgaauauacccuccacagu

SEQ ID NO: 1297448 - RNA, 19 nt, Homo sapiens
  misc_RNA (1)...(19): siRNA sense strand
agaccaacaaccaagauga

SEQ ID NO: 1297449 - RNA, 19 nt, Homo sapiens
  misc_RNA (1)...(19): siRNA sense strand
caugaagaccaacaaccaa

SEQ ID NO: 1297450 - RNA, 19 nt, Homo sapiens
  misc_RNA (1)...(19): siRNA sense strand
ccgagaugacgacuuuaaa

SEQ ID NO: 1297451 - RNA, 19 nt, Homo sapiens
  misc_RNA (1)...(19): siRNA sense strand
ugaagaccaacaaccaaga

SEQ ID NO: 1297452 - RNA, 19 nt, Homo sapiens
  misc_RNA (1)...(19): siRNA sense strand
uugaggcgcuaaaguccaa

SEQ ID NO: 1297453 - RNA, 19 nt, Homo sapiens
  misc_RNA (1)...(19): siRNA sense strand
gaccaacaaccaagaugag

SEQ ID NO: 1297454 - RNA, 19 nt, Homo sapiens
  misc_RNA (1)...(19): siRNA sense strand
cgccgaagccaaucucaug

SEQ ID NO: 1297455 - RNA, 19 nt, Homo sapiens
  misc_RNA (1)...(19): siRNA sense strand
cccgagaugacgacuuuaa

SEQ ID NO: 1297456 - RNA, 19 nt, Homo sapiens
  misc_RNA (1)...(19): siRNA sense strand
uuaaggagcaggaguacag

SEQ ID NO: 1297457 - RNA, 19 nt, Homo sapiens
  misc_RNA (1)...(19): siRNA sense strand
auaaacaagguuacugguu

SEQ ID NO: 1297458 - RNA, 19 nt, Homo sapiens
  misc_RNA (1)...(19): siRNA sense strand
cgaagaugagaauaugguu

SEQ ID NO: 1297459 - RNA, 19 nt, Homo sapiens
  misc_RNA (1)...(19): siRNA sense strand
ccaaaggcaaauagaugug

SEQ ID NO: 1297460 - RNA, 19 nt, Homo sapiens
  misc_RNA (1)...(19): siRNA sense strand
cauaguggacagcgugaau

SEQ ID NO: 1297461 - RNA, 19 nt, Homo sapiens
  misc_RNA (1)...(19): siRNA sense strand
gcuuugcacuuuuguacaa

SEQ ID NO: 1297462 - RNA, 19 nt, Homo sapiens
  misc_RNA (1)...(19): siRNA sense strand
acacagcuuugcacuuuug

SEQ ID NO: 1297463 - RNA, 19 nt, Homo sapiens
  misc_RNA (1)...(19): siRNA sense strand
acugggcccuccgcuuuaa

SEQ ID NO: 1297464 - RNA, 19 nt, Homo sapiens
  misc_RNA (1)...(19): siRNA sense strand
aaucuggagcugccaaguu

SEQ ID NO: 1297465 - RNA, 19 nt, Homo sapiens
  misc_RNA (1)...(19): siRNA sense strand
gcugcccacuucggccuuu

SEQ ID NO: 1297466 - RNA, 19 nt, Homo sapiens
  misc_RNA (1)...(19): siRNA sense strand
gcacagaaauuguaaacuu

SEQ ID NO: 1297467 - RNA, 19 nt, Homo sapiens
  misc_RNA (1)...(19): siRNA sense strand
caacguuacugaagaauuu

SEQ ID NO: 1297468 - RNA, 19 nt, Homo sapiens
  misc_RNA (1)...(19): siRNA sense strand
aaaccaagauugcaccuua

SEQ ID NO: 1297469 - RNA, 19 nt, Homo sapiens
  misc_RNA (1)...(19): siRNA sense strand
ggauauugcuucaacauga

SEQ ID NO: 1297470 - RNA, 19 nt, Homo sapiens
  misc_RNA (1)...(19): siRNA sense strand
gaaaggauauugcuucaac

SEQ ID NO: 1297471 - RNA, 19 nt, Homo sapiens
  misc_RNA (1)...(19): siRNA sense strand
gccguuugcucaacaauua

SEQ ID NO: 1297472 - RNA, 19 nt, Homo sapiens
  misc_RNA (1)...(19): siRNA sense strand
gcauagauguugaccaaga

SEQ ID NO: 1297473 - RNA, 19 nt, Homo sapiens
  misc_RNA (1)...(19): siRNA sense strand
gggcauagauguugaccaa

SEQ ID NO: 1297474 - RNA, 19 nt, Homo sapiens
  misc_RNA (1)...(19): siRNA sense strand
ucacaggguuauaauguaa

SEQ ID NO: 1297475 - RNA, 19 nt, Homo sapiens
  misc_RNA (1)...(19): siRNA sense strand
gcucaacaauuauccaaug

SEQ ID NO: 1297476 - RNA, 19 nt, Homo sapiens
  misc_RNA (1)...(19): siRNA sense strand
gcacgaagccugccuugga

SEQ ID NO: 1297477 - RNA, 19 nt, Homo sapiens
  misc_RNA (1)...(19): siRNA sense strand
gcagaucgaucaccacuac

SEQ ID NO: 1297478 - RNA, 19 nt, Homo sapiens
  misc_RNA (1)...(19): siRNA sense strand
caaggaagcggcaaggaua

SEQ ID NO: 1297479 - RNA, 19 nt, Homo sapiens
  misc_RNA (1)...(19): siRNA sense strand
uaaaugcaaucacgauaga

SEQ ID NO: 1297480 - RNA, 19 nt, Homo sapiens
  misc_RNA (1)...(19): siRNA sense strand
guacagaaaggcaaauauu

SEQ ID NO: 1297481 - RNA, 19 nt, Homo sapiens
  misc_RNA (1)...(19): siRNA sense strand
gauagcagcugaauuuuau

SEQ ID NO: 1297482 - RNA, 19 nt, Homo sapiens
  misc_RNA (1)...(19): siRNA sense strand
cuauguagcuuguauguca

SEQ ID NO: 1297483 - RNA, 19 nt, Homo sapiens
  misc_RNA (1)...(19): siRNA sense strand
ggaagcaggagcuaaugua

SEQ ID NO: 1297484 - RNA, 19 nt, Homo sapiens
  misc_RNA (1)...(19): siRNA sense strand
aaggauagcagcugaauuu

SEQ ID NO: 1297485 - RNA, 19 nt, Homo sapiens
  misc_RNA (1)...(19): siRNA sense strand
gggaacuccucucuaugua

SEQ ID NO: 1297486 - RNA, 19 nt, Homo sapiens
  misc_RNA (1)...(19): siRNA sense strand
gagcuaauguaaaugcaau

SEQ ID NO: 1297487 - RNA, 19 nt, Homo sapiens
  misc_RNA (1)...(19): siRNA sense strand
gaagcaggagcuaauguaa

SEQ ID NO: 1297488 - RNA, 19 nt, Homo sapiens
  misc_RNA (1)...(19): siRNA sense strand
gaaaggcaaccgcaaggaa

SEQ ID NO: 1297489 - RNA, 19 nt, Homo sapiens
  misc_RNA (1)...(19): siRNA sense strand
caguaaaggucaccaugaa

SEQ ID NO: 1297490 - RNA, 19 nt, Homo sapiens
  misc_RNA (1)...(19): siRNA sense strand
ccucagucauuucuacaua

SEQ ID NO: 1297491 - RNA, 19 nt, Homo sapiens
  misc_RNA (1)...(19): siRNA sense strand
caacuuugccgacucugua

SEQ ID NO: 1297492 - RNA, 19 nt, Homo sapiens
  misc_RNA (1)...(19): siRNA sense strand
caacaauuauccaaugucu

SEQ ID NO: 1297493 - RNA, 19 nt, Homo sapiens
  misc_RNA (1)...(19): siRNA sense strand
uaaaugcaguaaccuuaga

SEQ ID NO: 1297494 - RNA, 19 nt, Homo sapiens
  misc_RNA (1)...(19): siRNA sense strand
gcucugagaacauuauuau

SEQ ID NO: 1297495 - RNA, 19 nt, Homo sapiens
  misc_RNA (1)...(19): siRNA sense strand
guaaaggucaccaugaaug

SEQ ID NO: 1297496 - RNA, 19 nt, Homo sapiens
  misc_RNA (1)...(19): siRNA sense strand
aaaggcaaauauugggaua

SEQ ID NO: 1297497 - RNA, 19 nt, Homo sapiens
  misc_RNA (1)...(19): siRNA sense strand
caacaauccagcacagaaa

SEQ ID NO: 1297498 - RNA, 19 nt, Homo sapiens
  misc_RNA (1)...(19): siRNA sense strand
uacuuucgcuguucuguuu

SEQ ID NO: 1297499 - RNA, 19 nt, Homo sapiens
  misc_RNA (1)...(19): siRNA sense strand
gcaguaugguggaaaggau

SEQ ID NO: 1297500 - RNA, 19 nt, Homo sapiens
  misc_RNA (1)...(19): siRNA sense strand
cauagauguugaccaagaa

SEQ ID NO: 1297501 - RNA, 19 nt, Homo sapiens
  misc_RNA (1)...(19): siRNA sense strand
gcuagaauuuggagcagau

SEQ ID NO: 1297502 - RNA, 19 nt, Homo sapiens
  misc_RNA (1)...(19): siRNA sense strand
uuacaauacuuucgcuguu

SEQ ID NO: 1297503 - RNA, 19 nt, Homo sapiens
  misc_RNA (1)...(19): siRNA sense strand
gcaaggaagcggcaaggau

SEQ ID NO: 1297504 - RNA, 19 nt, Homo sapiens
  misc_RNA (1)...(19): siRNA sense strand
auauugggauacuccauua

SEQ ID NO: 1297505 - RNA, 19 nt, Homo sapiens
  misc_RNA (1)...(19): siRNA sense strand
ucuggaagcuucuuuaugc

SEQ ID NO: 1297506 - RNA, 19 nt, Homo sapiens
  misc_RNA (1)...(19): siRNA sense strand
uguaaaugcaguaaccuua

SEQ ID NO: 1297507 - RNA, 19 nt, Homo sapiens
  misc_RNA (1)...(19): siRNA sense strand
gcaucuggaagcuucuuua

SEQ ID NO: 1297508 - RNA, 19 nt, Homo sapiens
  misc_RNA (1)...(19): siRNA sense strand
agcaggagcuaauguaaau

SEQ ID NO: 1297509 - RNA, 19 nt, Homo sapiens
  misc_RNA (1)...(19): siRNA sense strand
gaccaagaaauuccucauu

SEQ ID NO: 1297510 - RNA, 19 nt, Homo sapiens
  misc_RNA (1)...(19): siRNA sense strand
cagcuggagucaugucuuc

SEQ ID NO: 1297511 - RNA, 19 nt, Homo sapiens
  misc_RNA (1)...(19): siRNA sense strand
guaaaugcaaucacgauag

SEQ ID NO: 1297512 - RNA, 19 nt, Homo sapiens
  misc_RNA (1)...(19): siRNA sense strand
gagcuucugcgaccuauag

SEQ ID NO: 1297513 - RNA, 19 nt, Homo sapiens
  misc_RNA (1)...(19): siRNA sense strand
ggauagcagcugaauuuua

SEQ ID NO: 1297514 - RNA, 19 nt, Homo sapiens
  misc_RNA (1)...(19): siRNA sense strand
caagcucucuuuaccaacu

SEQ ID NO: 1297515 - RNA, 19 nt, Homo sapiens
  misc_RNA (1)...(19): siRNA sense strand
cccaagcucucuuuaccaa

SEQ ID NO: 1297516 - RNA, 19 nt, Homo sapiens
  misc_RNA (1)...(19): siRNA sense strand
uaucacaggguuauaaugu

SEQ ID NO: 1297517 - RNA, 19 nt, Homo sapiens
  misc_RNA (1)...(19): siRNA sense strand
gaauuuggagcagauauca

SEQ ID NO: 1297518 - RNA, 19 nt, Homo sapiens
  misc_RNA (1)...(19): siRNA sense strand
agucauuucuacauaguga

SEQ ID NO: 1297519 - RNA, 19 nt, Homo sapiens
  misc_RNA (1)...(19): siRNA sense strand
uuugggaacuccucucuau

SEQ ID NO: 1297520 - RNA, 19 nt, Homo sapiens
  misc_RNA (1)...(19): siRNA sense strand
ccaguaaaggucaccauga

SEQ ID NO: 1297521 - RNA, 19 nt, Homo sapiens
  misc_RNA (1)...(19): siRNA sense strand
uccaaugucuacuuuacaa

SEQ ID NO: 1297522 - RNA, 19 nt, Homo sapiens
  misc_RNA (1)...(19): siRNA sense strand
gcuuguaugucacagcaau

SEQ ID NO: 1297523 - RNA, 19 nt, Homo sapiens
  misc_RNA (1)...(19): siRNA sense strand
guaaaugcaguaaccuuag

SEQ ID NO: 1297524 - RNA, 19 nt, Homo sapiens
  misc_RNA (1)...(19): siRNA sense strand
ucugcgaccuauagaugua

SEQ ID NO: 1297525 - RNA, 19 nt, Homo sapiens
  misc_RNA (1)...(19): siRNA sense strand
aagcccagcuggagucaug

SEQ ID NO: 1297526 - RNA, 19 nt, Homo sapiens
  misc_RNA (1)...(19): siRNA sense strand
uauccaaugucuacuuuac

SEQ ID NO: 1297527 - RNA, 19 nt, Homo sapiens
  misc_RNA (1)...(19): siRNA sense strand
gcaaggauagcagcugaau

SEQ ID NO: 1297528 - RNA, 19 nt, Homo sapiens
  misc_RNA (1)...(19): siRNA sense strand
uggaaaggauauugcuuca

SEQ ID NO: 1297529 - RNA, 19 nt, Homo sapiens
  misc_RNA (1)...(19): siRNA sense strand
uaaaggucaccaugaaugu

SEQ ID NO: 1297530 - RNA, 19 nt, Homo sapiens
  misc_RNA (1)...(19): siRNA sense strand
ucaacaauccagcacagaa

SEQ ID NO: 1297531 - RNA, 19 nt, Homo sapiens
  misc_RNA (1)...(19): siRNA sense strand
uacagaaaggcaaauauug

SEQ ID NO: 1297532 - RNA, 19 nt, Homo sapiens
  misc_RNA (1)...(19): siRNA sense strand
acaauuauccaaugucuac

SEQ ID NO: 1297533 - RNA, 19 nt, Homo sapiens
  misc_RNA (1)...(19): siRNA sense strand
gcuggaagcaggagcuaau

SEQ ID NO: 1297534 - RNA, 19 nt, Homo sapiens
  misc_RNA (1)...(19): siRNA sense strand
gauguugaccaagaaauuc

SEQ ID NO: 1297535 - RNA, 19 nt, Homo sapiens
  misc_RNA (1)...(19): siRNA sense strand
uaauguaaaugcaguaacc

SEQ ID NO: 1297536 - RNA, 19 nt, Homo sapiens
  misc_RNA (1)...(19): siRNA sense strand
uggcgugacuccguuauuc

SEQ ID NO: 1297537 - RNA, 19 nt, Homo sapiens
  misc_RNA (1)...(19): siRNA sense strand
gaagaaaaucggccguuug

SEQ ID NO: 1297538 - RNA, 19 nt, Homo sapiens
  misc_RNA (1)...(19): siRNA sense strand
gaucgaucaccacuacaug

SEQ ID NO: 1297539 - RNA, 19 nt, Homo sapiens
  misc_RNA (1)...(19): siRNA sense strand
uacaauacuuucgcuguuc

SEQ ID NO: 1297540 - RNA, 19 nt, Homo sapiens
  misc_RNA (1)...(19): siRNA sense strand
ggaacuccucucuauguag

SEQ ID NO: 1297541 - RNA, 19 nt, Homo sapiens
  misc_RNA (1)...(19): siRNA sense strand
ucagucauuucuacauagu

SEQ ID NO: 1297542 - RNA, 19 nt, Homo sapiens
  misc_RNA (1)...(19): siRNA sense strand
uguaaaugcaaucacgaua

SEQ ID NO: 1297543 - RNA, 19 nt, Homo sapiens
  misc_RNA (1)...(19): siRNA sense strand
ugccaacguuacugaagaa

SEQ ID NO: 1297544 - RNA, 19 nt, Homo sapiens
  misc_RNA (1)...(19): siRNA sense strand
acagaaaggcaaauauugg

SEQ ID NO: 1297545 - RNA, 19 nt, Homo sapiens
  misc_RNA (1)...(19): siRNA sense strand
gugcugacguacagaaagg

SEQ ID NO: 1297546 - RNA, 19 nt, Homo sapiens
  misc_RNA (1)...(19): siRNA sense strand
cauccucagucauuucuac

SEQ ID NO: 1297547 - RNA, 19 nt, Homo sapiens
  misc_RNA (1)...(19): siRNA sense strand
ggaguaacccaaggacaag

SEQ ID NO: 1297548 - RNA, 19 nt, Homo sapiens
  misc_RNA (1)...(19): siRNA sense strand
cugccaacguuacugaaga

SEQ ID NO: 1297549 - RNA, 19 nt, Homo sapiens
  misc_RNA (1)...(19): siRNA sense strand
auccgaagcuacauaggaa

SEQ ID NO: 1297550 - RNA, 19 nt, Homo sapiens
  misc_RNA (1)...(19): siRNA sense strand
aagcaggagcuaauguaaa

SEQ ID NO: 1297551 - RNA, 19 nt, Homo sapiens
  misc_RNA (1)...(19): siRNA sense strand
ggagaucacguggcaugug

SEQ ID NO: 1297552 - RNA, 19 nt, Homo sapiens
  misc_RNA (1)...(19): siRNA sense strand
caagguuccugggcagauc

SEQ ID NO: 1297553 - RNA, 19 nt, Homo sapiens
  misc_RNA (1)...(19): siRNA sense strand
ggagcuaauguaaaugcaa

SEQ ID NO: 1297554 - RNA, 19 nt, Homo sapiens
  misc_RNA (1)...(19): siRNA sense strand
ccaacguuacugaagaauu

SEQ ID NO: 1297555 - RNA, 19 nt, Homo sapiens
  misc_RNA (1)...(19): siRNA sense strand
uggaguaacccaaggacaa

SEQ ID NO: 1297556 - RNA, 19 nt, Homo sapiens
  misc_RNA (1)...(19): siRNA sense strand
ggaaaggauauugcuucaa

SEQ ID NO: 1297557 - RNA, 19 nt, Homo sapiens
  misc_RNA (1)...(19): siRNA sense strand
caucuggaagcuucuuuau

SEQ ID NO: 1297558 - RNA, 19 nt, Homo sapiens
  misc_RNA (1)...(19): siRNA sense strand
ugggaacuccucucuaugu

SEQ ID NO: 1297559 - RNA, 19 nt, Homo sapiens
  misc_RNA (1)...(19): siRNA sense strand
ugacguacagaaaggcaaa

SEQ ID NO: 1297560 - RNA, 19 nt, Homo sapiens
  misc_RNA (1)...(19): siRNA sense strand
caaggauagcagcugaauu

SEQ ID NO: 1297561 - RNA, 19 nt, Homo sapiens
  misc_RNA (1)...(19): siRNA sense strand
aaccaagauugcaccuuau

SEQ ID NO: 1297562 - RNA, 19 nt, Homo sapiens
  misc_RNA (1)...(19): siRNA sense strand
uauccgaagcuacauagga

SEQ ID NO: 1297563 - RNA, 19 nt, Homo sapiens
  misc_RNA (1)...(19): siRNA sense strand
agauguugaccaagaaauu

SEQ ID NO: 1297564 - RNA, 19 nt, Homo sapiens
  misc_RNA (1)...(19): siRNA sense strand
ucuggaguauggugccaaa

SEQ ID NO: 1297565 - RNA, 19 nt, Homo sapiens
  misc_RNA (1)...(19): siRNA sense strand
cagcugccaacguuacuga

SEQ ID NO: 1297566 - RNA, 19 nt, Homo sapiens
  misc_RNA (1)...(19): siRNA sense strand
ccucgaggcugcucaguga

SEQ ID NO: 1297567 - RNA, 19 nt, Homo sapiens
  misc_RNA (1)...(19): siRNA sense strand
agaccuaccuggaggaaga

SEQ ID NO: 1297568 - RNA, 19 nt, Homo sapiens
  misc_RNA (1)...(19): siRNA sense strand
gaaucugcuuugucuucua

SEQ ID NO: 1297569 - RNA, 19 nt, Homo sapiens
  misc_RNA (1)...(19): siRNA sense strand
ggcaggacguggcugaaga

SEQ ID NO: 1297570 - RNA, 19 nt, Homo sapiens
  misc_RNA (1)...(19): siRNA sense strand
gcaaguaccaggacagcau

SEQ ID NO: 1297571 - RNA, 19 nt, Homo sapiens
  misc_RNA (1)...(19): siRNA sense strand
cacgcuaccuccugagauu

SEQ ID NO: 1297572 - RNA, 19 nt, Homo sapiens
  misc_RNA (1)...(19): siRNA sense strand
ccagaaaugcccagacugu

SEQ ID NO: 1297573 - RNA, 19 nt, Homo sapiens
  misc_RNA (1)...(19): siRNA sense strand
ccucagauuuggacagcuu

SEQ ID NO: 1297574 - RNA, 19 nt, Homo sapiens
  misc_RNA (1)...(19): siRNA sense strand
acucgcaccugaagaaugu

SEQ ID NO: 1297575 - RNA, 19 nt, Homo sapiens
  misc_RNA (1)...(19): siRNA sense strand
gcaaccuccuggccucugu

SEQ ID NO: 1297576 - RNA, 19 nt, Homo sapiens
  misc_RNA (1)...(19): siRNA sense strand
gccucgaucucucucagaa

SEQ ID NO: 1297577 - RNA, 19 nt, Homo sapiens
  misc_RNA (1)...(19): siRNA sense strand
agaaaugcccagacuguuc

SEQ ID NO: 1297578 - RNA, 19 nt, Homo sapiens
  misc_RNA (1)...(19): siRNA sense strand
ccaucaagcugccgagacu

SEQ ID NO: 1297579 - RNA, 19 nt, Homo sapiens
  misc_RNA (1)...(19): siRNA sense strand
gcagccaccugggaugaca

SEQ ID NO: 1297580 - RNA, 19 nt, Homo sapiens
  misc_RNA (1)...(19): siRNA sense strand
ggggugaccuggagaccua

SEQ ID NO: 1297581 - RNA, 19 nt, Homo sapiens
  misc_RNA (1)...(19): siRNA sense strand
gcagcccucauuccagaaa

SEQ ID NO: 1297582 - RNA, 19 nt, Homo sapiens
  misc_RNA (1)...(19): siRNA sense strand
gaaccagaggcugcaguga

SEQ ID NO: 1297583 - RNA, 19 nt, Homo sapiens
  misc_RNA (1)...(19): siRNA sense strand
ggcacgaguuccgggauga

SEQ ID NO: 1297584 - RNA, 19 nt, Homo sapiens
  misc_RNA (1)...(19): siRNA sense strand
guuccgggaugaucuggau

SEQ ID NO: 1297585 - RNA, 19 nt, Homo sapiens
  misc_RNA (1)...(19): siRNA sense strand
ggagcucacccaccuguac

SEQ ID NO: 1297586 - RNA, 19 nt, Homo sapiens
  misc_RNA (1)...(19): siRNA sense strand
gaagaggugcgcgcagucu

SEQ ID NO: 1297587 - RNA, 19 nt, Homo sapiens
  misc_RNA (1)...(19): siRNA sense strand
ccacuucuccugguuccuu

SEQ ID NO: 1297588 - RNA, 19 nt, Homo sapiens
  misc_RNA (1)...(19): siRNA sense strand
ggagaccuaccuggaggaa

SEQ ID NO: 1297589 - RNA, 19 nt, Homo sapiens
  misc_RNA (1)...(19): siRNA sense strand
guacaccaccaagaacugu

SEQ ID NO: 1297590 - RNA, 19 nt, Homo sapiens
  misc_RNA (1)...(19): siRNA sense strand
gccugcaccuguuguacug

SEQ ID NO: 1297591 - RNA, 19 nt, Homo sapiens
  misc_RNA (1)...(19): siRNA sense strand
cagaaaugcccagacuguu

SEQ ID NO: 1297592 - RNA, 19 nt, Homo sapiens
  misc_RNA (1)...(19): siRNA sense strand
gaugagcagauccgucaca

SEQ ID NO: 1297593 - RNA, 19 nt, Homo sapiens
  misc_RNA (1)...(19): siRNA sense strand
cugacacgguggagauguu

SEQ ID NO: 1297594 - RNA, 19 nt, Homo sapiens
  misc_RNA (1)...(19): siRNA sense strand
cucgaucucucucagaauc

SEQ ID NO: 1297595 - RNA, 19 nt, Homo sapiens
  misc_RNA (1)...(19): siRNA sense strand
aaucugcuuugucuucuac

SEQ ID NO: 1297596 - RNA, 19 nt, Homo sapiens
  misc_RNA (1)...(19): siRNA sense strand
ucuacucgcaccugaagaa

SEQ ID NO: 1297597 - RNA, 19 nt, Homo sapiens
  misc_RNA (1)...(19): siRNA sense strand
ccucgaggcugcucaguga

SEQ ID NO: 1297598 - RNA, 19 nt, Homo sapiens
  misc_RNA (1)...(19): siRNA sense strand
agaccuaccuggaggaaga

SEQ ID NO: 1297599 - RNA, 19 nt, Homo sapiens
  misc_RNA (1)...(19): siRNA sense strand
gaaucugcuuugucuucua

SEQ ID NO: 1297600 - RNA, 19 nt, Homo sapiens
  misc_RNA (1)...(19): siRNA sense strand
guggaauucuugcgucuga

SEQ ID NO: 1297601 - RNA, 19 nt, Homo sapiens
  misc_RNA (1)...(19): siRNA sense strand
ggagaugcuucagaggauu

SEQ ID NO: 1297602 - RNA, 19 nt, Homo sapiens
  misc_RNA (1)...(19): siRNA sense strand
ggcaggacguggcugaaga

SEQ ID NO: 1297603 - RNA, 19 nt, Homo sapiens
  misc_RNA (1)...(19): siRNA sense strand
gcaaguaccaggacagcau

SEQ ID NO: 1297604 - RNA, 19 nt, Homo sapiens
  misc_RNA (1)...(19): siRNA sense strand
gcaaccggcugagcuugga

SEQ ID NO: 1297605 - RNA, 19 nt, Homo sapiens
  misc_RNA (1)...(19): siRNA sense strand
cacgcuaccuccugagauu

SEQ ID NO: 1297606 - RNA, 19 nt, Homo sapiens
  misc_RNA (1)...(19): siRNA sense strand
ccagaaaugcccagacugu

SEQ ID NO: 1297607 - RNA, 19 nt, Homo sapiens
  misc_RNA (1)...(19): siRNA sense strand
ccucagauuuggacagcuu

SEQ ID NO: 1297608 - RNA, 19 nt, Homo sapiens
  misc_RNA (1)...(19): siRNA sense strand
acucgcaccugaagaaugu

SEQ ID NO: 1297609 - RNA, 19 nt, Homo sapiens
  misc_RNA (1)...(19): siRNA sense strand
gcaaccuccuggccucugu

SEQ ID NO: 1297610 - RNA, 19 nt, Homo sapiens
  misc_RNA (1)...(19): siRNA sense strand
gccucgaucucucucagaa

SEQ ID NO: 1297611 - RNA, 19 nt, Homo sapiens
  misc_RNA (1)...(19): siRNA sense strand
agaaaugcccagacuguuc

SEQ ID NO: 1297612 - RNA, 19 nt, Homo sapiens
  misc_RNA (1)...(19): siRNA sense strand
ccaucaagcugccgagacu

SEQ ID NO: 1297613 - RNA, 19 nt, Homo sapiens
  misc_RNA (1)...(19): siRNA sense strand
gcagccaccugggaugaca

SEQ ID NO: 1297614 - RNA, 19 nt, Homo sapiens
  misc_RNA (1)...(19): siRNA sense strand
ggggugaccuggagaccua

SEQ ID NO: 1297615 - RNA, 19 nt, Homo sapiens
  misc_RNA (1)...(19): siRNA sense strand
gcagcccucauuccagaaa

SEQ ID NO: 1297616 - RNA, 19 nt, Homo sapiens
  misc_RNA (1)...(19): siRNA sense strand
gaaccagaggcugcaguga

SEQ ID NO: 1297617 - RNA, 19 nt, Homo sapiens
  misc_RNA (1)...(19): siRNA sense strand
ucaacagccuggagacacu

SEQ ID NO: 1297618 - RNA, 19 nt, Homo sapiens
  misc_RNA (1)...(19): siRNA sense strand
guuccgggaugaucuggau

SEQ ID NO: 1297619 - RNA, 19 nt, Homo sapiens
  misc_RNA (1)...(19): siRNA sense strand
ggcacgaguuccgggauga

SEQ ID NO: 1297620 - RNA, 19 nt, Homo sapiens
  misc_RNA (1)...(19): siRNA sense strand
ggagcucacccaccuguac

SEQ ID NO: 1297621 - RNA, 19 nt, Homo sapiens
  misc_RNA (1)...(19): siRNA sense strand
gaagaggugcgcgcagucu

SEQ ID NO: 1297622 - RNA, 19 nt, Homo sapiens
  misc_RNA (1)...(19): siRNA sense strand
ccacuucuccugguuccuu

SEQ ID NO: 1297623 - RNA, 19 nt, Homo sapiens
  misc_RNA (1)...(19): siRNA sense strand
aggagaugcuucagaggau

SEQ ID NO: 1297624 - RNA, 19 nt, Homo sapiens
  misc_RNA (1)...(19): siRNA sense strand
gagaugcuucagaggauuc

SEQ ID NO: 1297625 - RNA, 19 nt, Homo sapiens
  misc_RNA (1)...(19): siRNA sense strand
guacaccaccaagaacugu

SEQ ID NO: 1297626 - RNA, 19 nt, Homo sapiens
  misc_RNA (1)...(19): siRNA sense strand
gccugcaccuguuguacug

SEQ ID NO: 1297627 - RNA, 19 nt, Homo sapiens
  misc_RNA (1)...(19): siRNA sense strand
ggagaccuaccuggaggaa

SEQ ID NO: 1297628 - RNA, 19 nt, Homo sapiens
  misc_RNA (1)...(19): siRNA sense strand
cagaaaugcccagacuguu

SEQ ID NO: 1297629 - RNA, 19 nt, Homo sapiens
  misc_RNA (1)...(19): siRNA sense strand
gaugagcagauccgucaca

SEQ ID NO: 1297630 - RNA, 19 nt, Homo sapiens
  misc_RNA (1)...(19): siRNA sense strand
cugacacgguggagauguu

SEQ ID NO: 1297631 - RNA, 19 nt, Homo sapiens
  misc_RNA (1)...(19): siRNA sense strand
cucgaucucucucagaauc

SEQ ID NO: 1297632 - RNA, 19 nt, Homo sapiens
  misc_RNA (1)...(19): siRNA sense strand
aaucugcuuugucuucuac

SEQ ID NO: 1297633 - RNA, 19 nt, Homo sapiens
  misc_RNA (1)...(19): siRNA sense strand
ucuacucgcaccugaagaa

SEQ ID NO: 1297634 - RNA, 19 nt, Homo sapiens
  misc_RNA (1)...(19): siRNA sense strand
ccucgaggcugcucaguga

SEQ ID NO: 1297635 - RNA, 19 nt, Homo sapiens
  misc_RNA (1)...(19): siRNA sense strand
agaccuaccuggaggaaga

SEQ ID NO: 1297636 - RNA, 19 nt, Homo sapiens
  misc_RNA (1)...(19): siRNA sense strand
gaaucugcuuugucuucua

SEQ ID NO: 1297637 - RNA, 19 nt, Homo sapiens
  misc_RNA (1)...(19): siRNA sense strand
guggaauucuugcgucuga

SEQ ID NO: 1297638 - RNA, 19 nt, Homo sapiens
  misc_RNA (1)...(19): siRNA sense strand
ggagaugcuucagaggauu

SEQ ID NO: 1297639 - RNA, 19 nt, Homo sapiens
  misc_RNA (1)...(19): siRNA sense strand
ggcaggacguggcugaaga

SEQ ID NO: 1297640 - RNA, 19 nt, Homo sapiens
  misc_RNA (1)...(19): siRNA sense strand
gcaaguaccaggacagcau

SEQ ID NO: 1297641 - RNA, 19 nt, Homo sapiens
  misc_RNA (1)...(19): siRNA sense strand
gcaaccggcugagcuugga

SEQ ID NO: 1297642 - RNA, 19 nt, Homo sapiens
  misc_RNA (1)...(19): siRNA sense strand
cacgcuaccuccugagauu

SEQ ID NO: 1297643 - RNA, 19 nt, Homo sapiens
  misc_RNA (1)...(19): siRNA sense strand
ccagaaaugcccagacugu

SEQ ID NO: 1297644 - RNA, 19 nt, Homo sapiens
  misc_RNA (1)...(19): siRNA sense strand
ccucagauuuggacagcuu

SEQ ID NO: 1297645 - RNA, 19 nt, Homo sapiens
  misc_RNA (1)...(19): siRNA sense strand
acucgcaccugaagaaugu

SEQ ID NO: 1297646 - RNA, 19 nt, Homo sapiens
  misc_RNA (1)...(19): siRNA sense strand
gcaaccuccuggccucugu

SEQ ID NO: 1297647 - RNA, 19 nt, Homo sapiens
  misc_RNA (1)...(19): siRNA sense strand
gccucgaucucucucagaa

SEQ ID NO: 1297648 - RNA, 19 nt, Homo sapiens
  misc_RNA (1)...(19): siRNA sense strand
agaaaugcccagacuguuc

SEQ ID NO: 1297649 - RNA, 19 nt, Homo sapiens
  misc_RNA (1)...(19): siRNA sense strand
ccaucaagcugccgagacu

SEQ ID NO: 1297650 - RNA, 19 nt, Homo sapiens
  misc_RNA (1)...(19): siRNA sense strand
gcagccaccugggaugaca

SEQ ID NO: 1297651 - RNA, 19 nt, Homo sapiens
  misc_RNA (1)...(19): siRNA sense strand
ggggugaccuggagaccua

SEQ ID NO: 1297652 - RNA, 19 nt, Homo sapiens
  misc_RNA (1)...(19): siRNA sense strand
gcagcccucauuccagaaa

SEQ ID NO: 1297653 - RNA, 19 nt, Homo sapiens
  misc_RNA (1)...(19): siRNA sense strand
gaaccagaggcugcaguga

SEQ ID NO: 1297654 - RNA, 19 nt, Homo sapiens
  misc_RNA (1)...(19): siRNA sense strand
ucaacagccuggagacacu

SEQ ID NO: 1297655 - RNA, 19 nt, Homo sapiens
  misc_RNA (1)...(19): siRNA sense strand
guuccgggaugaucuggau

SEQ ID NO: 1297656 - RNA, 19 nt, Homo sapiens
  misc_RNA (1)...(19): siRNA sense strand
ggcacgaguuccgggauga

SEQ ID NO: 1297657 - RNA, 19 nt, Homo sapiens
  misc_RNA (1)...(19): siRNA sense strand
ggagcucacccaccuguac

SEQ ID NO: 1297658 - RNA, 19 nt, Homo sapiens
  misc_RNA (1)...(19): siRNA sense strand
gaagaggugcgcgcagucu

SEQ ID NO: 1297659 - RNA, 19 nt, Homo sapiens
  misc_RNA (1)...(19): siRNA sense strand
ccacuucuccugguuccuu

SEQ ID NO: 1297660 - RNA, 19 nt, Homo sapiens
  misc_RNA (1)...(19): siRNA sense strand
aggagaugcuucagaggau

SEQ ID NO: 1297661 - RNA, 19 nt, Homo sapiens
  misc_RNA (1)...(19): siRNA sense strand
gagaugcuucagaggauuc

SEQ ID NO: 1297662 - RNA, 19 nt, Homo sapiens
  misc_RNA (1)...(19): siRNA sense strand
guacaccaccaagaacugu

SEQ ID NO: 1297663 - RNA, 19 nt, Homo sapiens
  misc_RNA (1)...(19): siRNA sense strand
gccugcaccuguuguacug

SEQ ID NO: 1297664 - RNA, 19 nt, Homo sapiens
  misc_RNA (1)...(19): siRNA sense strand
ggagaccuaccuggaggaa

SEQ ID NO: 1297665 - RNA, 19 nt, Homo sapiens
  misc_RNA (1)...(19): siRNA sense strand
cagaaaugcccagacuguu

SEQ ID NO: 1297666 - RNA, 19 nt, Homo sapiens
  misc_RNA (1)...(19): siRNA sense strand
gaugagcagauccgucaca

SEQ ID NO: 1297667 - RNA, 19 nt, Homo sapiens
  misc_RNA (1)...(19): siRNA sense strand
cugacacgguggagauguu

SEQ ID NO: 1297668 - RNA, 19 nt, Homo sapiens
  misc_RNA (1)...(19): siRNA sense strand
cucgaucucucucagaauc

SEQ ID NO: 1297669 - RNA, 19 nt, Homo sapiens
  misc_RNA (1)...(19): siRNA sense strand
aaucugcuuugucuucuac

SEQ ID NO: 1297670 - RNA, 19 nt, Homo sapiens
  misc_RNA (1)...(19): siRNA sense strand
ucuacucgcaccugaagaa

SEQ ID NO: 1297671 - RNA, 19 nt, Homo sapiens
  misc_RNA (1)...(19): siRNA sense strand
caucaagaccgccaagauu

SEQ ID NO: 1297672 - RNA, 19 nt, Homo sapiens
  misc_RNA (1)...(19): siRNA sense strand
agggugaacaggacaauua

SEQ ID NO: 1297673 - RNA, 19 nt, Homo sapiens
  misc_RNA (1)...(19): siRNA sense strand
ucaccgagaucaucaagac

SEQ ID NO: 1297674 - RNA, 19 nt, Homo sapiens
  misc_RNA (1)...(19): siRNA sense strand
gcgagucccugaugaagcu

SEQ ID NO: 1297675 - RNA, 19 nt, Homo sapiens
  misc_RNA (1)...(19): siRNA sense strand
uguccgaccucaagcaguu

SEQ ID NO: 1297676 - RNA, 19 nt, Homo sapiens
  misc_RNA (1)...(19): siRNA sense strand
acaggacaauuacgagaug

SEQ ID NO: 1297677 - RNA, 19 nt, Homo sapiens
  misc_RNA (1)...(19): siRNA sense strand
caacuucaccgagaucauc

SEQ ID NO: 1297678 - RNA, 19 nt, Homo sapiens
  misc_RNA (1)...(19): siRNA sense strand
acaacaagcggcugaagga

SEQ ID NO: 1297679 - RNA, 19 nt, Homo sapiens
  misc_RNA (1)...(19): siRNA sense strand
gcugaaggacgacauuaag

SEQ ID NO: 1297680 - RNA, 19 nt, Homo sapiens
  misc_RNA (1)...(19): siRNA sense strand
gaucuccauugaccucuac

SEQ ID NO: 1297681 - RNA, 19 nt, Homo sapiens
  misc_RNA (1)...(19): siRNA sense strand
ggacaacuucaccgagauc

SEQ ID NO: 1297682 - RNA, 19 nt, Homo sapiens
  misc_RNA (1)...(19): siRNA sense strand
ggacgagacgcagguguca

SEQ ID NO: 1297683 - RNA, 19 nt, Homo sapiens
  misc_RNA (1)...(19): siRNA sense strand
ggcugaaggacgacauuaa

SEQ ID NO: 1297684 - RNA, 19 nt, Homo sapiens
  misc_RNA (1)...(19): siRNA sense strand
cgacauuaaguccaucaug

SEQ ID NO: 1297685 - RNA, 19 nt, Homo sapiens
  misc_RNA (1)...(19): siRNA sense strand
acaauuacgagaugcaugu

SEQ ID NO: 1297686 - RNA, 19 nt, Homo sapiens
  misc_RNA (1)...(19): siRNA sense strand
gugaacaggacaauuacga

SEQ ID NO: 1297687 - RNA, 19 nt, Homo sapiens
  misc_RNA (1)...(19): siRNA sense strand
ugaaggacgacauuaaguc

SEQ ID NO: 1297688 - RNA, 19 nt, Homo sapiens
  misc_RNA (1)...(19): siRNA sense strand
ggacaauuacgagaugcau

SEQ ID NO: 1297689 - RNA, 19 nt, Homo sapiens
  misc_RNA (1)...(19): siRNA sense strand
caucaagaccgccaagauu

SEQ ID NO: 1297690 - RNA, 19 nt, Homo sapiens
  misc_RNA (1)...(19): siRNA sense strand
agggugaacaggacaauua

SEQ ID NO: 1297691 - RNA, 19 nt, Homo sapiens
  misc_RNA (1)...(19): siRNA sense strand
ucaccgagaucaucaagac

SEQ ID NO: 1297692 - RNA, 19 nt, Homo sapiens
  misc_RNA (1)...(19): siRNA sense strand
gcgagucccugaugaagcu

SEQ ID NO: 1297693 - RNA, 19 nt, Homo sapiens
  misc_RNA (1)...(19): siRNA sense strand
uguccgaccucaagcaguu

SEQ ID NO: 1297694 - RNA, 19 nt, Homo sapiens
  misc_RNA (1)...(19): siRNA sense strand
acaggacaauuacgagaug

SEQ ID NO: 1297695 - RNA, 19 nt, Homo sapiens
  misc_RNA (1)...(19): siRNA sense strand
caacuucaccgagaucauc

SEQ ID NO: 1297696 - RNA, 19 nt, Homo sapiens
  misc_RNA (1)...(19): siRNA sense strand
acaacaagcggcugaagga

SEQ ID NO: 1297697 - RNA, 19 nt, Homo sapiens
  misc_RNA (1)...(19): siRNA sense strand
gcugaaggacgacauuaag

SEQ ID NO: 1297698 - RNA, 19 nt, Homo sapiens
  misc_RNA (1)...(19): siRNA sense strand
gaucuccauugaccucuac

SEQ ID NO: 1297699 - RNA, 19 nt, Homo sapiens
  misc_RNA (1)...(19): siRNA sense strand
ggacaacuucaccgagauc

SEQ ID NO: 1297700 - RNA, 19 nt, Homo sapiens
  misc_RNA (1)...(19): siRNA sense strand
ggacgagacgcagguguca

SEQ ID NO: 1297701 - RNA, 19 nt, Homo sapiens
  misc_RNA (1)...(19): siRNA sense strand
ggcugaaggacgacauuaa

SEQ ID NO: 1297702 - RNA, 19 nt, Homo sapiens
  misc_RNA (1)...(19): siRNA sense strand
cgacauuaaguccaucaug

SEQ ID NO: 1297703 - RNA, 19 nt, Homo sapiens
  misc_RNA (1)...(19): siRNA sense strand
acaauuacgagaugcaugu

SEQ ID NO: 1297704 - RNA, 19 nt, Homo sapiens
  misc_RNA (1)...(19): siRNA sense strand
gugaacaggacaauuacga

SEQ ID NO: 1297705 - RNA, 19 nt, Homo sapiens
  misc_RNA (1)...(19): siRNA sense strand
ugaaggacgacauuaaguc

SEQ ID NO: 1297706 - RNA, 19 nt, Homo sapiens
  misc_RNA (1)...(19): siRNA sense strand
ggacaauuacgagaugcau

SEQ ID NO: 1297707 - RNA, 19 nt, Homo sapiens
  misc_RNA (1)...(19): siRNA sense strand
caucaagaccgccaagauu

SEQ ID NO: 1297708 - RNA, 19 nt, Homo sapiens
  misc_RNA (1)...(19): siRNA sense strand
agggugaacaggacaauua

SEQ ID NO: 1297709 - RNA, 19 nt, Homo sapiens
  misc_RNA (1)...(19): siRNA sense strand
ucaccgagaucaucaagac

SEQ ID NO: 1297710 - RNA, 19 nt, Homo sapiens
  misc_RNA (1)...(19): siRNA sense strand
gcgagucccugaugaagcu

SEQ ID NO: 1297711 - RNA, 19 nt, Homo sapiens
  misc_RNA (1)...(19): siRNA sense strand
uguccgaccucaagcaguu

SEQ ID NO: 1297712 - RNA, 19 nt, Homo sapiens
  misc_RNA (1)...(19): siRNA sense strand
acaggacaauuacgagaug

SEQ ID NO: 1297713 - RNA, 19 nt, Homo sapiens
  misc_RNA (1)...(19): siRNA sense strand
caacuucaccgagaucauc

SEQ ID NO: 1297714 - RNA, 19 nt, Homo sapiens
  misc_RNA (1)...(19): siRNA sense strand
acaacaagcggcugaagga

SEQ ID NO: 1297715 - RNA, 19 nt, Homo sapiens
  misc_RNA (1)...(19): siRNA sense strand
gcugaaggacgacauuaag

SEQ ID NO: 1297716 - RNA, 19 nt, Homo sapiens
  misc_RNA (1)...(19): siRNA sense strand
gaucuccauugaccucuac

SEQ ID NO: 1297717 - RNA, 19 nt, Homo sapiens
  misc_RNA (1)...(19): siRNA sense strand
ggacaacuucaccgagauc

SEQ ID NO: 1297718 - RNA, 19 nt, Homo sapiens
  misc_RNA (1)...(19): siRNA sense strand
ggacgagacgcagguguca

SEQ ID NO: 1297719 - RNA, 19 nt, Homo sapiens
  misc_RNA (1)...(19): siRNA sense strand
ggcugaaggacgacauuaa

SEQ ID NO: 1297720 - RNA, 19 nt, Homo sapiens
  misc_RNA (1)...(19): siRNA sense strand
cgacauuaaguccaucaug

SEQ ID NO: 1297721 - RNA, 19 nt, Homo sapiens
  misc_RNA (1)...(19): siRNA sense strand
acaauuacgagaugcaugu

SEQ ID NO: 1297722 - RNA, 19 nt, Homo sapiens
  misc_RNA (1)...(19): siRNA sense strand
gugaacaggacaauuacga

SEQ ID NO: 1297723 - RNA, 19 nt, Homo sapiens
  misc_RNA (1)...(19): siRNA sense strand
ugaaggacgacauuaaguc

SEQ ID NO: 1297724 - RNA, 19 nt, Homo sapiens
  misc_RNA (1)...(19): siRNA sense strand
ggacaauuacgagaugcau

SEQ ID NO: 1297725 - RNA, 19 nt, Homo sapiens
  misc_RNA (1)...(19): siRNA sense strand
ccagugggcugaaagauau

SEQ ID NO: 1297726 - RNA, 19 nt, Homo sapiens
  misc_RNA (1)...(19): siRNA sense strand
gcugaaagauaugcugaaa

SEQ ID NO: 1297727 - RNA, 19 nt, Homo sapiens
  misc_RNA (1)...(19): siRNA sense strand
ccaaaaggcugguggauga

SEQ ID NO: 1297728 - RNA, 19 nt, Homo sapiens
  misc_RNA (1)...(19): siRNA sense strand
gagaagcaccucccaagga

SEQ ID NO: 1297729 - RNA, 19 nt, Homo sapiens
  misc_RNA (1)...(19): siRNA sense strand
ccaaggaggaucuaucuga

SEQ ID NO: 1297730 - RNA, 19 nt, Homo sapiens
  misc_RNA (1)...(19): siRNA sense strand
ugacugccuuggcucacua

SEQ ID NO: 1297731 - RNA, 19 nt, Homo sapiens
  misc_RNA (1)...(19): siRNA sense strand
gacccagggcuaucucuuu

SEQ ID NO: 1297732 - RNA, 19 nt, Homo sapiens
  misc_RNA (1)...(19): siRNA sense strand
cagcagccguuaccuggau

SEQ ID NO: 1297733 - RNA, 19 nt, Homo sapiens
  misc_RNA (1)...(19): siRNA sense strand
gaccggauccagagcaaug

SEQ ID NO: 1297734 - RNA, 19 nt, Homo sapiens
  misc_RNA (1)...(19): siRNA sense strand
caauguagaaggccuauac

SEQ ID NO: 1297735 - RNA, 19 nt, Homo sapiens
  misc_RNA (1)...(19): siRNA sense strand
ugaaagauaugcugaaaac

SEQ ID NO: 1297736 - RNA, 19 nt, Homo sapiens
  misc_RNA (1)...(19): siRNA sense strand
ggccugcgguaccugcaaa

SEQ ID NO: 1297737 - RNA, 19 nt, Homo sapiens
  misc_RNA (1)...(19): siRNA sense strand
gauccagagcaauguagaa

SEQ ID NO: 1297738 - RNA, 19 nt, Homo sapiens
  misc_RNA (1)...(19): siRNA sense strand
gcugguggaugagcugcaa

SEQ ID NO: 1297739 - RNA, 19 nt, Homo sapiens
  misc_RNA (1)...(19): siRNA sense strand
guggaugagcugcaacuga

SEQ ID NO: 1297740 - RNA, 19 nt, Homo sapiens
  misc_RNA (1)...(19): siRNA sense strand
ggagagacccagggcuauc

SEQ ID NO: 1297741 - RNA, 19 nt, Homo sapiens
  misc_RNA (1)...(19): siRNA sense strand
ggcgucauccuccucugua

SEQ ID NO: 1297742 - RNA, 19 nt, Homo sapiens
  misc_RNA (1)...(19): siRNA sense strand
acccagggcuaucucuuuc

SEQ ID NO: 1297743 - RNA, 19 nt, Homo sapiens
  misc_RNA (1)...(19): siRNA sense strand
gcaauguagaaggccuaua

SEQ ID NO: 1297744 - RNA, 19 nt, Homo sapiens
  misc_RNA (1)...(19): siRNA sense strand
ggccuauaccugacugaug

SEQ ID NO: 1297745 - RNA, 19 nt, Homo sapiens
  misc_RNA (1)...(19): siRNA sense strand
ccucgaggcugcucaguga

SEQ ID NO: 1297746 - RNA, 19 nt, Homo sapiens
  misc_RNA (1)...(19): siRNA sense strand
agaccuaccuggaggaaga

SEQ ID NO: 1297747 - RNA, 19 nt, Homo sapiens
  misc_RNA (1)...(19): siRNA sense strand
gaaucugcuuugucuucua

SEQ ID NO: 1297748 - RNA, 19 nt, Homo sapiens
  misc_RNA (1)...(19): siRNA sense strand
ggcaggacguggcugaaga

SEQ ID NO: 1297749 - RNA, 19 nt, Homo sapiens
  misc_RNA (1)...(19): siRNA sense strand
gcaaguaccaggacagcau

SEQ ID NO: 1297750 - RNA, 19 nt, Homo sapiens
  misc_RNA (1)...(19): siRNA sense strand
cacgcuaccuccugagauu

SEQ ID NO: 1297751 - RNA, 19 nt, Homo sapiens
  misc_RNA (1)...(19): siRNA sense strand
ccagaaaugcccagacugu

SEQ ID NO: 1297752 - RNA, 19 nt, Homo sapiens
  misc_RNA (1)...(19): siRNA sense strand
ccucagauuuggacagcuu

SEQ ID NO: 1297753 - RNA, 19 nt, Homo sapiens
  misc_RNA (1)...(19): siRNA sense strand
acucgcaccugaagaaugu

SEQ ID NO: 1297754 - RNA, 19 nt, Homo sapiens
  misc_RNA (1)...(19): siRNA sense strand
gcaaccuccuggccucugu

SEQ ID NO: 1297755 - RNA, 19 nt, Homo sapiens
  misc_RNA (1)...(19): siRNA sense strand
gccucgaucucucucagaa

SEQ ID NO: 1297756 - RNA, 19 nt, Homo sapiens
  misc_RNA (1)...(19): siRNA sense strand
agaaaugcccagacuguuc

SEQ ID NO: 1297757 - RNA, 19 nt, Homo sapiens
  misc_RNA (1)...(19): siRNA sense strand
ccaucaagcugccgagacu

SEQ ID NO: 1297758 - RNA, 19 nt, Homo sapiens
  misc_RNA (1)...(19): siRNA sense strand
gcagccaccugggaugaca

SEQ ID NO: 1297759 - RNA, 19 nt, Homo sapiens
  misc_RNA (1)...(19): siRNA sense strand
ggggugaccuggagaccua

SEQ ID NO: 1297760 - RNA, 19 nt, Homo sapiens
  misc_RNA (1)...(19): siRNA sense strand
gcagcccucauuccagaaa

SEQ ID NO: 1297761 - RNA, 19 nt, Homo sapiens
  misc_RNA (1)...(19): siRNA sense strand
gaaccagaggcugcaguga

SEQ ID NO: 1297762 - RNA, 19 nt, Homo sapiens
  misc_RNA (1)...(19): siRNA sense strand
ggcacgaguuccgggauga

SEQ ID NO: 1297763 - RNA, 19 nt, Homo sapiens
  misc_RNA (1)...(19): siRNA sense strand
guuccgggaugaucuggau

SEQ ID NO: 1297764 - RNA, 19 nt, Homo sapiens
  misc_RNA (1)...(19): siRNA sense strand
ggagcucacccaccuguac

SEQ ID NO: 1297765 - RNA, 19 nt, Homo sapiens
  misc_RNA (1)...(19): siRNA sense strand
gaagaggugcgcgcagucu

SEQ ID NO: 1297766 - RNA, 19 nt, Homo sapiens
  misc_RNA (1)...(19): siRNA sense strand
ccacuucuccugguuccuu

SEQ ID NO: 1297767 - RNA, 19 nt, Homo sapiens
  misc_RNA (1)...(19): siRNA sense strand
ggagaccuaccuggaggaa

SEQ ID NO: 1297768 - RNA, 19 nt, Homo sapiens
  misc_RNA (1)...(19): siRNA sense strand
guacaccaccaagaacugu

SEQ ID NO: 1297769 - RNA, 19 nt, Homo sapiens
  misc_RNA (1)...(19): siRNA sense strand
gccugcaccuguuguacug

SEQ ID NO: 1297770 - RNA, 19 nt, Homo sapiens
  misc_RNA (1)...(19): siRNA sense strand
cagaaaugcccagacuguu

SEQ ID NO: 1297771 - RNA, 19 nt, Homo sapiens
  misc_RNA (1)...(19): siRNA sense strand
gaugagcagauccgucaca

SEQ ID NO: 1297772 - RNA, 19 nt, Homo sapiens
  misc_RNA (1)...(19): siRNA sense strand
cugacacgguggagauguu

SEQ ID NO: 1297773 - RNA, 19 nt, Homo sapiens
  misc_RNA (1)...(19): siRNA sense strand
cucgaucucucucagaauc

SEQ ID NO: 1297774 - RNA, 19 nt, Homo sapiens
  misc_RNA (1)...(19): siRNA sense strand
aaucugcuuugucuucuac

SEQ ID NO: 1297775 - RNA, 19 nt, Homo sapiens
  misc_RNA (1)...(19): siRNA sense strand
ucuacucgcaccugaagaa

SEQ ID NO: 1297776 - RNA, 19 nt, Homo sapiens
  misc_RNA (1)...(19): siRNA sense strand
ccucgaggcugcucaguga

SEQ ID NO: 1297777 - RNA, 19 nt, Homo sapiens
  misc_RNA (1)...(19): siRNA sense strand
agaccuaccuggaggaaga

SEQ ID NO: 1297778 - RNA, 19 nt, Homo sapiens
  misc_RNA (1)...(19): siRNA sense strand
gaaucugcuuugucuucua

SEQ ID NO: 1297779 - RNA, 19 nt, Homo sapiens
  misc_RNA (1)...(19): siRNA sense strand
guggaauucuugcgucuga

SEQ ID NO: 1297780 - RNA, 19 nt, Homo sapiens
  misc_RNA (1)...(19): siRNA sense strand
ggagaugcuucagaggauu

SEQ ID NO: 1297781 - RNA, 19 nt, Homo sapiens
  misc_RNA (1)...(19): siRNA sense strand
ggcaggacguggcugaaga

SEQ ID NO: 1297782 - RNA, 19 nt, Homo sapiens
  misc_RNA (1)...(19): siRNA sense strand
gcaaguaccaggacagcau

SEQ ID NO: 1297783 - RNA, 19 nt, Homo sapiens
  misc_RNA (1)...(19): siRNA sense strand
gcaaccggcugagcuugga

SEQ ID NO: 1297784 - RNA, 19 nt, Homo sapiens
  misc_RNA (1)...(19): siRNA sense strand
cacgcuaccuccugagauu

SEQ ID NO: 1297785 - RNA, 19 nt, Homo sapiens
  misc_RNA (1)...(19): siRNA sense strand
ccagaaaugcccagacugu

SEQ ID NO: 1297786 - RNA, 19 nt, Homo sapiens
  misc_RNA (1)...(19): siRNA sense strand
ccucagauuuggacagcuu

SEQ ID NO: 1297787 - RNA, 19 nt, Homo sapiens
  misc_RNA (1)...(19): siRNA sense strand
acucgcaccugaagaaugu

SEQ ID NO: 1297788 - RNA, 19 nt, Homo sapiens
  misc_RNA (1)...(19): siRNA sense strand
gcaaccuccuggccucugu

SEQ ID NO: 1297789 - RNA, 19 nt, Homo sapiens
  misc_RNA (1)...(19): siRNA sense strand
gccucgaucucucucagaa

SEQ ID NO: 1297790 - RNA, 19 nt, Homo sapiens
  misc_RNA (1)...(19): siRNA sense strand
agaaaugcccagacuguuc

SEQ ID NO: 1297791 - RNA, 19 nt, Homo sapiens
  misc_RNA (1)...(19): siRNA sense strand
ccaucaagcugccgagacu

SEQ ID NO: 1297792 - RNA, 19 nt, Homo sapiens
  misc_RNA (1)...(19): siRNA sense strand
gcagccaccugggaugaca

SEQ ID NO: 1297793 - RNA, 19 nt, Homo sapiens
  misc_RNA (1)...(19): siRNA sense strand
ggggugaccuggagaccua

SEQ ID NO: 1297794 - RNA, 19 nt, Homo sapiens
  misc_RNA (1)...(19): siRNA sense strand
gcagcccucauuccagaaa

SEQ ID NO: 1297795 - RNA, 19 nt, Homo sapiens
  misc_RNA (1)...(19): siRNA sense strand
gaaccagaggcugcaguga

SEQ ID NO: 1297796 - RNA, 19 nt, Homo sapiens
  misc_RNA (1)...(19): siRNA sense strand
ucaacagccuggagacacu

SEQ ID NO: 1297797 - RNA, 19 nt, Homo sapiens
  misc_RNA (1)...(19): siRNA sense strand
guuccgggaugaucuggau

SEQ ID NO: 1297798 - RNA, 19 nt, Homo sapiens
  misc_RNA (1)...(19): siRNA sense strand
ggcacgaguuccgggauga

SEQ ID NO: 1297799 - RNA, 19 nt, Homo sapiens
  misc_RNA (1)...(19): siRNA sense strand
ggagcucacccaccuguac

SEQ ID NO: 1297800 - RNA, 19 nt, Homo sapiens
  misc_RNA (1)...(19): siRNA sense strand
gaagaggugcgcgcagucu

SEQ ID NO: 1297801 - RNA, 19 nt, Homo sapiens
  misc_RNA (1)...(19): siRNA sense strand
ccacuucuccugguuccuu

SEQ ID NO: 1297802 - RNA, 19 nt, Homo sapiens
  misc_RNA (1)...(19): siRNA sense strand
aggagaugcuucagaggau

SEQ ID NO: 1297803 - RNA, 19 nt, Homo sapiens
  misc_RNA (1)...(19): siRNA sense strand
gagaugcuucagaggauuc

SEQ ID NO: 1297804 - RNA, 19 nt, Homo sapiens
  misc_RNA (1)...(19): siRNA sense strand
guacaccaccaagaacugu

SEQ ID NO: 1297805 - RNA, 19 nt, Homo sapiens
  misc_RNA (1)...(19): siRNA sense strand
gccugcaccuguuguacug

SEQ ID NO: 1297806 - RNA, 19 nt, Homo sapiens
  misc_RNA (1)...(19): siRNA sense strand
ggagaccuaccuggaggaa

SEQ ID NO: 1297807 - RNA, 19 nt, Homo sapiens
  misc_RNA (1)...(19): siRNA sense strand
cagaaaugcccagacuguu

SEQ ID NO: 1297808 - RNA, 19 nt, Homo sapiens
  misc_RNA (1)...(19): siRNA sense strand
gaugagcagauccgucaca

SEQ ID NO: 1297809 - RNA, 19 nt, Homo sapiens
  misc_RNA (1)...(19): siRNA sense strand
cugacacgguggagauguu

SEQ ID NO: 1297810 - RNA, 19 nt, Homo sapiens
  misc_RNA (1)...(19): siRNA sense strand
cucgaucucucucagaauc

SEQ ID NO: 1297811 - RNA, 19 nt, Homo sapiens
  misc_RNA (1)...(19): siRNA sense strand
aaucugcuuugucuucuac

SEQ ID NO: 1297812 - RNA, 19 nt, Homo sapiens
  misc_RNA (1)...(19): siRNA sense strand
ucuacucgcaccugaagaa

SEQ ID NO: 1297813 - RNA, 19 nt, Homo sapiens
  misc_RNA (1)...(19): siRNA sense strand
ccucgaggcugcucaguga

SEQ ID NO: 1297814 - RNA, 19 nt, Homo sapiens
  misc_RNA (1)...(19): siRNA sense strand
agaccuaccuggaggaaga

SEQ ID NO: 1297815 - RNA, 19 nt, Homo sapiens
  misc_RNA (1)...(19): siRNA sense strand
gaaucugcuuugucuucua

SEQ ID NO: 1297816 - RNA, 19 nt, Homo sapiens
  misc_RNA (1)...(19): siRNA sense strand
guggaauucuugcgucuga

SEQ ID NO: 1297817 - RNA, 19 nt, Homo sapiens
  misc_RNA (1)...(19): siRNA sense strand
ggagaugcuucagaggauu

SEQ ID NO: 1297818 - RNA, 19 nt, Homo sapiens
  misc_RNA (1)...(19): siRNA sense strand
ggcaggacguggcugaaga

SEQ ID NO: 1297819 - RNA, 19 nt, Homo sapiens
  misc_RNA (1)...(19): siRNA sense strand
gcaaguaccaggacagcau

SEQ ID NO: 1297820 - RNA, 19 nt, Homo sapiens
  misc_RNA (1)...(19): siRNA sense strand
gcaaccggcugagcuugga

SEQ ID NO: 1297821 - RNA, 19 nt, Homo sapiens
  misc_RNA (1)...(19): siRNA sense strand
cacgcuaccuccugagauu

SEQ ID NO: 1297822 - RNA, 19 nt, Homo sapiens
  misc_RNA (1)...(19): siRNA sense strand
ccagaaaugcccagacugu

SEQ ID NO: 1297823 - RNA, 19 nt, Homo sapiens
  misc_RNA (1)...(19): siRNA sense strand
ccucagauuuggacagcuu

SEQ ID NO: 1297824 - RNA, 19 nt, Homo sapiens
  misc_RNA (1)...(19): siRNA sense strand
acucgcaccugaagaaugu

SEQ ID NO: 1297825 - RNA, 19 nt, Homo sapiens
  misc_RNA (1)...(19): siRNA sense strand
gcaaccuccuggccucugu

SEQ ID NO: 1297826 - RNA, 19 nt, Homo sapiens
  misc_RNA (1)...(19): siRNA sense strand
gccucgaucucucucagaa

SEQ ID NO: 1297827 - RNA, 19 nt, Homo sapiens
  misc_RNA (1)...(19): siRNA sense strand
agaaaugcccagacuguuc

SEQ ID NO: 1297828 - RNA, 19 nt, Homo sapiens
  misc_RNA (1)...(19): siRNA sense strand
ccaucaagcugccgagacu

SEQ ID NO: 1297829 - RNA, 19 nt, Homo sapiens
  misc_RNA (1)...(19): siRNA sense strand
gcagccaccugggaugaca

SEQ ID NO: 1297830 - RNA, 19 nt, Homo sapiens
  misc_RNA (1)...(19): siRNA sense strand
ggggugaccuggagaccua

SEQ ID NO: 1297831 - RNA, 19 nt, Homo sapiens
  misc_RNA (1)...(19): siRNA sense strand
gcagcccucauuccagaaa

SEQ ID NO: 1297832 - RNA, 19 nt, Homo sapiens
  misc_RNA (1)...(19): siRNA sense strand
gaaccagaggcugcaguga

SEQ ID NO: 1297833 - RNA, 19 nt, Homo sapiens
  misc_RNA (1)...(19): siRNA sense strand
ucaacagccuggagacacu

SEQ ID NO: 1297834 - RNA, 19 nt, Homo sapiens
  misc_RNA (1)...(19): siRNA sense strand
guuccgggaugaucuggau

SEQ ID NO: 1297835 - RNA, 19 nt, Homo sapiens
  misc_RNA (1)...(19): siRNA sense strand
ggcacgaguuccgggauga

SEQ ID NO: 1297836 - RNA, 19 nt, Homo sapiens
  misc_RNA (1)...(19): siRNA sense strand
ggagcucacccaccuguac

SEQ ID NO: 1297837 - RNA, 19 nt, Homo sapiens
  misc_RNA (1)...(19): siRNA sense strand
gaagaggugcgcgcagucu

SEQ ID NO: 1297838 - RNA, 19 nt, Homo sapiens
  misc_RNA (1)...(19): siRNA sense strand
ccacuucuccugguuccuu

SEQ ID NO: 1297839 - RNA, 19 nt, Homo sapiens
  misc_RNA (1)...(19): siRNA sense strand
aggagaugcuucagaggau

SEQ ID NO: 1297840 - RNA, 19 nt, Homo sapiens
  misc_RNA (1)...(19): siRNA sense strand
gagaugcuucagaggauuc

SEQ ID NO: 1297841 - RNA, 19 nt, Homo sapiens
  misc_RNA (1)...(19): siRNA sense strand
guacaccaccaagaacugu

SEQ ID NO: 1297842 - RNA, 19 nt, Homo sapiens
  misc_RNA (1)...(19): siRNA sense strand
gccugcaccuguuguacug

SEQ ID NO: 1297843 - RNA, 19 nt, Homo sapiens
  misc_RNA (1)...(19): siRNA sense strand
ggagaccuaccuggaggaa

SEQ ID NO: 1297844 - RNA, 19 nt, Homo sapiens
  misc_RNA (1)...(19): siRNA sense strand
cagaaaugcccagacuguu

SEQ ID NO: 1297845 - RNA, 19 nt, Homo sapiens
  misc_RNA (1)...(19): siRNA sense strand
gaugagcagauccgucaca

SEQ ID NO: 1297846 - RNA, 19 nt, Homo sapiens
  misc_RNA (1)...(19): siRNA sense strand
cugacacgguggagauguu

SEQ ID NO: 1297847 - RNA, 19 nt, Homo sapiens
  misc_RNA (1)...(19): siRNA sense strand
cucgaucucucucagaauc

SEQ ID NO: 1297848 - RNA, 19 nt, Homo sapiens
  misc_RNA (1)...(19): siRNA sense strand
aaucugcuuugucuucuac

SEQ ID NO: 1297849 - RNA, 19 nt, Homo sapiens
  misc_RNA (1)...(19): siRNA sense strand
ucuacucgcaccugaagaa

SEQ ID NO: 1297850 - RNA, 19 nt, Homo sapiens
  misc_RNA (1)...(19): siRNA sense strand
gcaaauacauguccuggau

SEQ ID NO: 1297851 - RNA, 19 nt, Homo sapiens
  misc_RNA (1)...(19): siRNA sense strand
acacccagaucugcaaaua

SEQ ID NO: 1297852 - RNA, 19 nt, Homo sapiens
  misc_RNA (1)...(19): siRNA sense strand
uacauguccuggaucaaua

SEQ ID NO: 1297853 - RNA, 19 nt, Homo sapiens
  misc_RNA (1)...(19): siRNA sense strand
gaacggaugagcacgaucu

SEQ ID NO: 1297854 - RNA, 19 nt, Homo sapiens
  misc_RNA (1)...(19): siRNA sense strand
aaauacauguccuggauca

SEQ ID NO: 1297855 - RNA, 19 nt, Homo sapiens
  misc_RNA (1)...(19): siRNA sense strand
cuggaucaauaaagucaua

SEQ ID NO: 1297856 - RNA, 19 nt, Homo sapiens
  misc_RNA (1)...(19): siRNA sense strand
ucacuauccugagcccuaa

SEQ ID NO: 1297857 - RNA, 19 nt, Homo sapiens
  misc_RNA (1)...(19): siRNA sense strand
ggucaccaacaacaugaua

SEQ ID NO: 1297858 - RNA, 19 nt, Homo sapiens
  misc_RNA (1)...(19): siRNA sense strand
ccaggacccuugccagagu

SEQ ID NO: 1297859 - RNA, 19 nt, Homo sapiens
  misc_RNA (1)...(19): siRNA sense strand
acccagaucugcaaauaca

SEQ ID NO: 1297860 - RNA, 19 nt, Homo sapiens
  misc_RNA (1)...(19): siRNA sense strand
uggcaggucucgcucuuca

SEQ ID NO: 1297861 - RNA, 19 nt, Homo sapiens
  misc_RNA (1)...(19): siRNA sense strand
ccugagcccuaaagagugu

SEQ ID NO: 1297862 - RNA, 19 nt, Homo sapiens
  misc_RNA (1)...(19): siRNA sense strand
uguccuggaucaauaaagu

SEQ ID NO: 1297863 - RNA, 19 nt, Homo sapiens
  misc_RNA (1)...(19): siRNA sense strand
agucauacgcuccaacuga

SEQ ID NO: 1297864 - RNA, 19 nt, Homo sapiens
  misc_RNA (1)...(19): siRNA sense strand
gcgaacggaugagcacgau

SEQ ID NO: 1297865 - RNA, 19 nt, Homo sapiens
  misc_RNA (1)...(19): siRNA sense strand
ccagaucugcaaauacaug

SEQ ID NO: 1297866 - RNA, 19 nt, Homo sapiens
  misc_RNA (1)...(19): siRNA sense strand
ggaccacucgcucuguugu

SEQ ID NO: 1297867 - RNA, 19 nt, Homo sapiens
  misc_RNA (1)...(19): siRNA sense strand
ucaccaacaacaugauaug

SEQ ID NO: 1297868 - RNA, 19 nt, Homo sapiens
  misc_RNA (1)...(19): siRNA sense strand
gcaggucucgcucuucaac

SEQ ID NO: 1297869 - RNA, 19 nt, Homo sapiens
  misc_RNA (1)...(19): siRNA sense strand
ccggaccacucgcucuguu

SEQ ID NO: 1297870 - RNA, 19 nt, Homo sapiens
  misc_RNA (1)...(19): siRNA sense strand
auacauguccuggaucaau

SEQ ID NO: 1297871 - RNA, 19 nt, Homo sapiens
  misc_RNA (1)...(19): siRNA sense strand
gcaaauacauguccuggau

SEQ ID NO: 1297872 - RNA, 19 nt, Homo sapiens
  misc_RNA (1)...(19): siRNA sense strand
acacccagaucugcaaaua

SEQ ID NO: 1297873 - RNA, 19 nt, Homo sapiens
  misc_RNA (1)...(19): siRNA sense strand
uacauguccuggaucaaua

SEQ ID NO: 1297874 - RNA, 19 nt, Homo sapiens
  misc_RNA (1)...(19): siRNA sense strand
gaacggaugagcacgaucu

SEQ ID NO: 1297875 - RNA, 19 nt, Homo sapiens
  misc_RNA (1)...(19): siRNA sense strand
aaauacauguccuggauca

SEQ ID NO: 1297876 - RNA, 19 nt, Homo sapiens
  misc_RNA (1)...(19): siRNA sense strand
cuggaucaauaaagucaua

SEQ ID NO: 1297877 - RNA, 19 nt, Homo sapiens
  misc_RNA (1)...(19): siRNA sense strand
ucacuauccugagcccuaa

SEQ ID NO: 1297878 - RNA, 19 nt, Homo sapiens
  misc_RNA (1)...(19): siRNA sense strand
ggucaccaacaacaugaua

SEQ ID NO: 1297879 - RNA, 19 nt, Homo sapiens
  misc_RNA (1)...(19): siRNA sense strand
ccaggacccuugccagagu

SEQ ID NO: 1297880 - RNA, 19 nt, Homo sapiens
  misc_RNA (1)...(19): siRNA sense strand
acccagaucugcaaauaca

SEQ ID NO: 1297881 - RNA, 19 nt, Homo sapiens
  misc_RNA (1)...(19): siRNA sense strand
uggcaggucucgcucuuca

SEQ ID NO: 1297882 - RNA, 19 nt, Homo sapiens
  misc_RNA (1)...(19): siRNA sense strand
ccugagcccuaaagagugu

SEQ ID NO: 1297883 - RNA, 19 nt, Homo sapiens
  misc_RNA (1)...(19): siRNA sense strand
uguccuggaucaauaaagu

SEQ ID NO: 1297884 - RNA, 19 nt, Homo sapiens
  misc_RNA (1)...(19): siRNA sense strand
agucauacgcuccaacuga

SEQ ID NO: 1297885 - RNA, 19 nt, Homo sapiens
  misc_RNA (1)...(19): siRNA sense strand
gcgaacggaugagcacgau

SEQ ID NO: 1297886 - RNA, 19 nt, Homo sapiens
  misc_RNA (1)...(19): siRNA sense strand
ccagaucugcaaauacaug

SEQ ID NO: 1297887 - RNA, 19 nt, Homo sapiens
  misc_RNA (1)...(19): siRNA sense strand
ggaccacucgcucuguugu

SEQ ID NO: 1297888 - RNA, 19 nt, Homo sapiens
  misc_RNA (1)...(19): siRNA sense strand
ucaccaacaacaugauaug

SEQ ID NO: 1297889 - RNA, 19 nt, Homo sapiens
  misc_RNA (1)...(19): siRNA sense strand
gcaggucucgcucuucaac

SEQ ID NO: 1297890 - RNA, 19 nt, Homo sapiens
  misc_RNA (1)...(19): siRNA sense strand
ccggaccacucgcucuguu

SEQ ID NO: 1297891 - RNA, 19 nt, Homo sapiens
  misc_RNA (1)...(19): siRNA sense strand
auacauguccuggaucaau

SEQ ID NO: 1297892 - RNA, 19 nt, Homo sapiens
  misc_RNA (1)...(19): siRNA sense strand
acaaauggcuggaaauuga

SEQ ID NO: 1297893 - RNA, 19 nt, Homo sapiens
  misc_RNA (1)...(19): siRNA sense strand
gaaauugaauccaguugug

SEQ ID NO: 1297894 - RNA, 19 nt, Homo sapiens
  misc_RNA (1)...(19): siRNA sense strand
gcacguguaaugacaaaua

SEQ ID NO: 1297895 - RNA, 19 nt, Homo sapiens
  misc_RNA (1)...(19): siRNA sense strand
ggagggaucuuccauguac

SEQ ID NO: 1297896 - RNA, 19 nt, Homo sapiens
  misc_RNA (1)...(19): siRNA sense strand
aaagggauuugguuucgua

SEQ ID NO: 1297897 - RNA, 19 nt, Homo sapiens
  misc_RNA (1)...(19): siRNA sense strand
ccaguucacuuguauauac

SEQ ID NO: 1297898 - RNA, 19 nt, Homo sapiens
  misc_RNA (1)...(19): siRNA sense strand
cgucaacccuuauacaaau

SEQ ID NO: 1297899 - RNA, 19 nt, Homo sapiens
  misc_RNA (1)...(19): siRNA sense strand
gauuugguuucguaacuuu

SEQ ID NO: 1297900 - RNA, 19 nt, Homo sapiens
  misc_RNA (1)...(19): siRNA sense strand
ggaccucagacaaauguuu

SEQ ID NO: 1297901 - RNA, 19 nt, Homo sapiens
  misc_RNA (1)...(19): siRNA sense strand
caggagggaucuuccaugu

SEQ ID NO: 1297902 - RNA, 19 nt, Homo sapiens
  misc_RNA (1)...(19): siRNA sense strand
gauccggaccucagacaaa

SEQ ID NO: 1297903 - RNA, 19 nt, Homo sapiens
  misc_RNA (1)...(19): siRNA sense strand
ggacagggcgagggagaaa

SEQ ID NO: 1297904 - RNA, 19 nt, Homo sapiens
  misc_RNA (1)...(19): siRNA sense strand
cacguguaaugacaaauaa

SEQ ID NO: 1297905 - RNA, 19 nt, Homo sapiens
  misc_RNA (1)...(19): siRNA sense strand
ggauuugguuucguaacuu

SEQ ID NO: 1297906 - RNA, 19 nt, Homo sapiens
  misc_RNA (1)...(19): siRNA sense strand
ggaaauugaauccaguugu

SEQ ID NO: 1297907 - RNA, 19 nt, Homo sapiens
  misc_RNA (1)...(19): siRNA sense strand
cagcacguguaaugacaaa

SEQ ID NO: 1297908 - RNA, 19 nt, Homo sapiens
  misc_RNA (1)...(19): siRNA sense strand
aaaagaccgucaacccuua

SEQ ID NO: 1297909 - RNA, 19 nt, Homo sapiens
  misc_RNA (1)...(19): siRNA sense strand
gggauuugguuucguaacu

SEQ ID NO: 1297910 - RNA, 19 nt, Homo sapiens
  misc_RNA (1)...(19): siRNA sense strand
cuacagucccgaauucuau

SEQ ID NO: 1297911 - RNA, 19 nt, Homo sapiens
  misc_RNA (1)...(19): siRNA sense strand
uguauauacuucugcaaug

SEQ ID NO: 1297912 - RNA, 19 nt, Homo sapiens
  misc_RNA (1)...(19): siRNA sense strand
uuauacaaauggcuggaaa

SEQ ID NO: 1297913 - RNA, 19 nt, Homo sapiens
  misc_RNA (1)...(19): siRNA sense strand
ggcugcaugucuccaauau

SEQ ID NO: 1297914 - RNA, 19 nt, Homo sapiens
  misc_RNA (1)...(19): siRNA sense strand
ucacuuguauauacuucug

SEQ ID NO: 1297915 - RNA, 19 nt, Homo sapiens
  misc_RNA (1)...(19): siRNA sense strand
caaauggcuggaaauugaa

SEQ ID NO: 1297916 - RNA, 19 nt, Homo sapiens
  misc_RNA (1)...(19): siRNA sense strand
guauauacuucugcaaugc

SEQ ID NO: 1297917 - RNA, 19 nt, Homo sapiens
  misc_RNA (1)...(19): siRNA sense strand
aaaucgagguaaauaaugc

SEQ ID NO: 1297918 - RNA, 19 nt, Homo sapiens
  misc_RNA (1)...(19): siRNA sense strand
agucuacagucccgaauuc

SEQ ID NO: 1297919 - RNA, 19 nt, Homo sapiens
  misc_RNA (1)...(19): siRNA sense strand
auacaaauggcuggaaauu

SEQ ID NO: 1297920 - RNA, 19 nt, Homo sapiens
  misc_RNA (1)...(19): siRNA sense strand
cacagcacguguaaugaca

SEQ ID NO: 1297921 - RNA, 19 nt, Homo sapiens
  misc_RNA (1)...(19): siRNA sense strand
cugcaugucuccaauaucc

SEQ ID NO: 1297922 - RNA, 19 nt, Homo sapiens
  misc_RNA (1)...(19): siRNA sense strand
guucacuuguauauacuuc

SEQ ID NO: 1297923 - RNA, 19 nt, Homo sapiens
  misc_RNA (1)...(19): siRNA sense strand
acagggcgagggagaaauu

SEQ ID NO: 1297924 - RNA, 19 nt, Homo sapiens
  misc_RNA (1)...(19): siRNA sense strand
agacacaaccuucugaaaa

SEQ ID NO: 1297925 - RNA, 19 nt, Homo sapiens
  misc_RNA (1)...(19): siRNA sense strand
gcacacauuaaaccuguac

SEQ ID NO: 1297926 - RNA, 19 nt, Homo sapiens
  misc_RNA (1)...(19): siRNA sense strand
ugccacagcacguguaaug

SEQ ID NO: 1297927 - RNA, 19 nt, Homo sapiens
  misc_RNA (1)...(19): siRNA sense strand
gacacaaccuucugaaaac

SEQ ID NO: 1297928 - RNA, 19 nt, Homo sapiens
  misc_RNA (1)...(19): siRNA sense strand
gcaccgccacacagacaga

SEQ ID NO: 1297929 - RNA, 19 nt, Homo sapiens
  misc_RNA (1)...(19): siRNA sense strand
gaccgucaacccuuauaca

SEQ ID NO: 1297930 - RNA, 19 nt, Homo sapiens
  misc_RNA (1)...(19): siRNA sense strand
ggucgcaccguguacaaca

SEQ ID NO: 1297931 - RNA, 19 nt, Homo sapiens
  misc_RNA (1)...(19): siRNA sense strand
gucaacccuuauacaaaug

SEQ ID NO: 1297932 - RNA, 19 nt, Homo sapiens
  misc_RNA (1)...(19): siRNA sense strand
gcgaggcucaaagggauuu

SEQ ID NO: 1297933 - RNA, 19 nt, Homo sapiens
  misc_RNA (1)...(19): siRNA sense strand
ccgucaacccuuauacaaa

SEQ ID NO: 1297934 - RNA, 19 nt, Homo sapiens
  misc_RNA (1)...(19): siRNA sense strand
gggcgagggagaaauuaca

SEQ ID NO: 1297935 - RNA, 19 nt, Homo sapiens
  misc_RNA (1)...(19): siRNA sense strand
ccacagcacguguaaugac

SEQ ID NO: 1297936 - RNA, 19 nt, Homo sapiens
  misc_RNA (1)...(19): siRNA sense strand
uacaaauggcuggaaauug

SEQ ID NO: 1297937 - RNA, 19 nt, Homo sapiens
  misc_RNA (1)...(19): siRNA sense strand
acaaauggcuggaaauuga

SEQ ID NO: 1297938 - RNA, 19 nt, Homo sapiens
  misc_RNA (1)...(19): siRNA sense strand
gaaauugaauccaguugug

SEQ ID NO: 1297939 - RNA, 19 nt, Homo sapiens
  misc_RNA (1)...(19): siRNA sense strand
gcacguguaaugacaaaua

SEQ ID NO: 1297940 - RNA, 19 nt, Homo sapiens
  misc_RNA (1)...(19): siRNA sense strand
ggagggaucuuccauguac

SEQ ID NO: 1297941 - RNA, 19 nt, Homo sapiens
  misc_RNA (1)...(19): siRNA sense strand
aaagggauuugguuucgua

SEQ ID NO: 1297942 - RNA, 19 nt, Homo sapiens
  misc_RNA (1)...(19): siRNA sense strand
ccaguucacuuguauauac

SEQ ID NO: 1297943 - RNA, 19 nt, Homo sapiens
  misc_RNA (1)...(19): siRNA sense strand
cgucaacccuuauacaaau

SEQ ID NO: 1297944 - RNA, 19 nt, Homo sapiens
  misc_RNA (1)...(19): siRNA sense strand
gauuugguuucguaacuuu

SEQ ID NO: 1297945 - RNA, 19 nt, Homo sapiens
  misc_RNA (1)...(19): siRNA sense strand
ggaccucagacaaauguuu

SEQ ID NO: 1297946 - RNA, 19 nt, Homo sapiens
  misc_RNA (1)...(19): siRNA sense strand
caggagggaucuuccaugu

SEQ ID NO: 1297947 - RNA, 19 nt, Homo sapiens
  misc_RNA (1)...(19): siRNA sense strand
gauccggaccucagacaaa

SEQ ID NO: 1297948 - RNA, 19 nt, Homo sapiens
  misc_RNA (1)...(19): siRNA sense strand
ggacagggcgagggagaaa

SEQ ID NO: 1297949 - RNA, 19 nt, Homo sapiens
  misc_RNA (1)...(19): siRNA sense strand
cacguguaaugacaaauaa

SEQ ID NO: 1297950 - RNA, 19 nt, Homo sapiens
  misc_RNA (1)...(19): siRNA sense strand
ggauuugguuucguaacuu

SEQ ID NO: 1297951 - RNA, 19 nt, Homo sapiens
  misc_RNA (1)...(19): siRNA sense strand
ggaaauugaauccaguugu

SEQ ID NO: 1297952 - RNA, 19 nt, Homo sapiens
  misc_RNA (1)...(19): siRNA sense strand
cagcacguguaaugacaaa

SEQ ID NO: 1297953 - RNA, 19 nt, Homo sapiens
  misc_RNA (1)...(19): siRNA sense strand
aaaagaccgucaacccuua

SEQ ID NO: 1297954 - RNA, 19 nt, Homo sapiens
  misc_RNA (1)...(19): siRNA sense strand
gggauuugguuucguaacu

SEQ ID NO: 1297955 - RNA, 19 nt, Homo sapiens
  misc_RNA (1)...(19): siRNA sense strand
cuacagucccgaauucuau

SEQ ID NO: 1297956 - RNA, 19 nt, Homo sapiens
  misc_RNA (1)...(19): siRNA sense strand
uguauauacuucugcaaug

SEQ ID NO: 1297957 - RNA, 19 nt, Homo sapiens
  misc_RNA (1)...(19): siRNA sense strand
uuauacaaauggcuggaaa

SEQ ID NO: 1297958 - RNA, 19 nt, Homo sapiens
  misc_RNA (1)...(19): siRNA sense strand
ggcugcaugucuccaauau

SEQ ID NO: 1297959 - RNA, 19 nt, Homo sapiens
  misc_RNA (1)...(19): siRNA sense strand
ucacuuguauauacuucug

SEQ ID NO: 1297960 - RNA, 19 nt, Homo sapiens
  misc_RNA (1)...(19): siRNA sense strand
caaauggcuggaaauugaa

SEQ ID NO: 1297961 - RNA, 19 nt, Homo sapiens
  misc_RNA (1)...(19): siRNA sense strand
guauauacuucugcaaugc

SEQ ID NO: 1297962 - RNA, 19 nt, Homo sapiens
  misc_RNA (1)...(19): siRNA sense strand
aaaucgagguaaauaaugc

SEQ ID NO: 1297963 - RNA, 19 nt, Homo sapiens
  misc_RNA (1)...(19): siRNA sense strand
agucuacagucccgaauuc

SEQ ID NO: 1297964 - RNA, 19 nt, Homo sapiens
  misc_RNA (1)...(19): siRNA sense strand
auacaaauggcuggaaauu

SEQ ID NO: 1297965 - RNA, 19 nt, Homo sapiens
  misc_RNA (1)...(19): siRNA sense strand
cacagcacguguaaugaca

SEQ ID NO: 1297966 - RNA, 19 nt, Homo sapiens
  misc_RNA (1)...(19): siRNA sense strand
cugcaugucuccaauaucc

SEQ ID NO: 1297967 - RNA, 19 nt, Homo sapiens
  misc_RNA (1)...(19): siRNA sense strand
guucacuuguauauacuuc

SEQ ID NO: 1297968 - RNA, 19 nt, Homo sapiens
  misc_RNA (1)...(19): siRNA sense strand
acagggcgagggagaaauu

SEQ ID NO: 1297969 - RNA, 19 nt, Homo sapiens
  misc_RNA (1)...(19): siRNA sense strand
agacacaaccuucugaaaa

SEQ ID NO: 1297970 - RNA, 19 nt, Homo sapiens
  misc_RNA (1)...(19): siRNA sense strand
gcacacauuaaaccuguac

SEQ ID NO: 1297971 - RNA, 19 nt, Homo sapiens
  misc_RNA (1)...(19): siRNA sense strand
ugccacagcacguguaaug

SEQ ID NO: 1297972 - RNA, 19 nt, Homo sapiens
  misc_RNA (1)...(19): siRNA sense strand
gacacaaccuucugaaaac

SEQ ID NO: 1297973 - RNA, 19 nt, Homo sapiens
  misc_RNA (1)...(19): siRNA sense strand
gcaccgccacacagacaga

SEQ ID NO: 1297974 - RNA, 19 nt, Homo sapiens
  misc_RNA (1)...(19): siRNA sense strand
gaccgucaacccuuauaca

SEQ ID NO: 1297975 - RNA, 19 nt, Homo sapiens
  misc_RNA (1)...(19): siRNA sense strand
ggucgcaccguguacaaca

SEQ ID NO: 1297976 - RNA, 19 nt, Homo sapiens
  misc_RNA (1)...(19): siRNA sense strand
gucaacccuuauacaaaug

SEQ ID NO: 1297977 - RNA, 19 nt, Homo sapiens
  misc_RNA (1)...(19): siRNA sense strand
gcgaggcucaaagggauuu

SEQ ID NO: 1297978 - RNA, 19 nt, Homo sapiens
  misc_RNA (1)...(19): siRNA sense strand
ccgucaacccuuauacaaa

SEQ ID NO: 1297979 - RNA, 19 nt, Homo sapiens
  misc_RNA (1)...(19): siRNA sense strand
gggcgagggagaaauuaca

SEQ ID NO: 1297980 - RNA, 19 nt, Homo sapiens
  misc_RNA (1)...(19): siRNA sense strand
ccacagcacguguaaugac

SEQ ID NO: 1297981 - RNA, 19 nt, Homo sapiens
  misc_RNA (1)...(19): siRNA sense strand
uacaaauggcuggaaauug

SEQ ID NO: 1297982 - RNA, 19 nt, Homo sapiens
  misc_RNA (1)...(19): siRNA sense strand
acaaauggcuggaaauuga

SEQ ID NO: 1297983 - RNA, 19 nt, Homo sapiens
  misc_RNA (1)...(19): siRNA sense strand
gaaauugaauccaguugug

SEQ ID NO: 1297984 - RNA, 19 nt, Homo sapiens
  misc_RNA (1)...(19): siRNA sense strand
gcacguguaaugacaaaua

SEQ ID NO: 1297985 - RNA, 19 nt, Homo sapiens
  misc_RNA (1)...(19): siRNA sense strand
ggagggaucuuccauguac

SEQ ID NO: 1297986 - RNA, 19 nt, Homo sapiens
  misc_RNA (1)...(19): siRNA sense strand
aaagggauuugguuucgua

SEQ ID NO: 1297987 - RNA, 19 nt, Homo sapiens
  misc_RNA (1)...(19): siRNA sense strand
ccaguucacuuguauauac

SEQ ID NO: 1297988 - RNA, 19 nt, Homo sapiens
  misc_RNA (1)...(19): siRNA sense strand
cgucaacccuuauacaaau

SEQ ID NO: 1297989 - RNA, 19 nt, Homo sapiens
  misc_RNA (1)...(19): siRNA sense strand
gauuugguuucguaacuuu

SEQ ID NO: 1297990 - RNA, 19 nt, Homo sapiens
  misc_RNA (1)...(19): siRNA sense strand
ggaccucagacaaauguuu

SEQ ID NO: 1297991 - RNA, 19 nt, Homo sapiens
  misc_RNA (1)...(19): siRNA sense strand
caggagggaucuuccaugu

SEQ ID NO: 1297992 - RNA, 19 nt, Homo sapiens
  misc_RNA (1)...(19): siRNA sense strand
gauccggaccucagacaaa

SEQ ID NO: 1297993 - RNA, 19 nt, Homo sapiens
  misc_RNA (1)...(19): siRNA sense strand
ggacagggcgagggagaaa

SEQ ID NO: 1297994 - RNA, 19 nt, Homo sapiens
  misc_RNA (1)...(19): siRNA sense strand
cacguguaaugacaaauaa

SEQ ID NO: 1297995 - RNA, 19 nt, Homo sapiens
  misc_RNA (1)...(19): siRNA sense strand
ggauuugguuucguaacuu

SEQ ID NO: 1297996 - RNA, 19 nt, Homo sapiens
  misc_RNA (1)...(19): siRNA sense strand
ggaaauugaauccaguugu

SEQ ID NO: 1297997 - RNA, 19 nt, Homo sapiens
  misc_RNA (1)...(19): siRNA sense strand
cagcacguguaaugacaaa

SEQ ID NO: 1297998 - RNA, 19 nt, Homo sapiens
  misc_RNA (1)...(19): siRNA sense strand
aaaagaccgucaacccuua

SEQ ID NO: 1297999 - RNA, 19 nt, Homo sapiens
  misc_RNA (1)...(19): siRNA sense strand
gggauuugguuucguaacu

SEQ ID NO: 1298000 - RNA, 19 nt, Homo sapiens
  misc_RNA (1)...(19): siRNA sense strand
cuacagucccgaauucuau

SEQ ID NO: 1298001 - RNA, 19 nt, Homo sapiens
  misc_RNA (1)...(19): siRNA sense strand
uguauauacuucugcaaug

SEQ ID NO: 1298002 - RNA, 19 nt, Homo sapiens
  misc_RNA (1)...(19): siRNA sense strand
uuauacaaauggcuggaaa

SEQ ID NO: 1298003 - RNA, 19 nt, Homo sapiens
  misc_RNA (1)...(19): siRNA sense strand
ggcugcaugucuccaauau

SEQ ID NO: 1298004 - RNA, 19 nt, Homo sapiens
  misc_RNA (1)...(19): siRNA sense strand
ucacuuguauauacuucug

SEQ ID NO: 1298005 - RNA, 19 nt, Homo sapiens
  misc_RNA (1)...(19): siRNA sense strand
caaauggcuggaaauugaa

SEQ ID NO: 1298006 - RNA, 19 nt, Homo sapiens
  misc_RNA (1)...(19): siRNA sense strand
guauauacuucugcaaugc

SEQ ID NO: 1298007 - RNA, 19 nt, Homo sapiens
  misc_RNA (1)...(19): siRNA sense strand
aaaucgagguaaauaaugc

SEQ ID NO: 1298008 - RNA, 19 nt, Homo sapiens
  misc_RNA (1)...(19): siRNA sense strand
agucuacagucccgaauuc

SEQ ID NO: 1298009 - RNA, 19 nt, Homo sapiens
  misc_RNA (1)...(19): siRNA sense strand
auacaaauggcuggaaauu

SEQ ID NO: 1298010 - RNA, 19 nt, Homo sapiens
  misc_RNA (1)...(19): siRNA sense strand
cacagcacguguaaugaca

SEQ ID NO: 1298011 - RNA, 19 nt, Homo sapiens
  misc_RNA (1)...(19): siRNA sense strand
cugcaugucuccaauaucc

SEQ ID NO: 1298012 - RNA, 19 nt, Homo sapiens
  misc_RNA (1)...(19): siRNA sense strand
guucacuuguauauacuuc

SEQ ID NO: 1298013 - RNA, 19 nt, Homo sapiens
  misc_RNA (1)...(19): siRNA sense strand
acagggcgagggagaaauu

SEQ ID NO: 1298014 - RNA, 19 nt, Homo sapiens
  misc_RNA (1)...(19): siRNA sense strand
agacacaaccuucugaaaa

SEQ ID NO: 1298015 - RNA, 19 nt, Homo sapiens
  misc_RNA (1)...(19): siRNA sense strand
gcacacauuaaaccuguac

SEQ ID NO: 1298016 - RNA, 19 nt, Homo sapiens
  misc_RNA (1)...(19): siRNA sense strand
ugccacagcacguguaaug

SEQ ID NO: 1298017 - RNA, 19 nt, Homo sapiens
  misc_RNA (1)...(19): siRNA sense strand
gacacaaccuucugaaaac

SEQ ID NO: 1298018 - RNA, 19 nt, Homo sapiens
  misc_RNA (1)...(19): siRNA sense strand
gcaccgccacacagacaga

SEQ ID NO: 1298019 - RNA, 19 nt, Homo sapiens
  misc_RNA (1)...(19): siRNA sense strand
gaccgucaacccuuauaca

SEQ ID NO: 1298020 - RNA, 19 nt, Homo sapiens
  misc_RNA (1)...(19): siRNA sense strand
ggucgcaccguguacaaca

SEQ ID NO: 1298021 - RNA, 19 nt, Homo sapiens
  misc_RNA (1)...(19): siRNA sense strand
gucaacccuuauacaaaug

SEQ ID NO: 1298022 - RNA, 19 nt, Homo sapiens
  misc_RNA (1)...(19): siRNA sense strand
gcgaggcucaaagggauuu

SEQ ID NO: 1298023 - RNA, 19 nt, Homo sapiens
  misc_RNA (1)...(19): siRNA sense strand
ccgucaacccuuauacaaa

SEQ ID NO: 1298024 - RNA, 19 nt, Homo sapiens
  misc_RNA (1)...(19): siRNA sense strand
gggcgagggagaaauuaca

SEQ ID NO: 1298025 - RNA, 19 nt, Homo sapiens
  misc_RNA (1)...(19): siRNA sense strand
ccacagcacguguaaugac

SEQ ID NO: 1298026 - RNA, 19 nt, Homo sapiens
  misc_RNA (1)...(19): siRNA sense strand
uacaaauggcuggaaauug

SEQ ID NO: 1298027 - RNA, 19 nt, Homo sapiens
  misc_RNA (1)...(19): siRNA sense strand
acaaauggcuggaaauuga

SEQ ID NO: 1298028 - RNA, 19 nt, Homo sapiens
  misc_RNA (1)...(19): siRNA sense strand
gaaauugaauccaguugug

SEQ ID NO: 1298029 - RNA, 19 nt, Homo sapiens
  misc_RNA (1)...(19): siRNA sense strand
gcacguguaaugacaaaua

SEQ ID NO: 1298030 - RNA, 19 nt, Homo sapiens
  misc_RNA (1)...(19): siRNA sense strand
ggagggaucuuccauguac

SEQ ID NO: 1298031 - RNA, 19 nt, Homo sapiens
  misc_RNA (1)...(19): siRNA sense strand
aaagggauuugguuucgua

SEQ ID NO: 1298032 - RNA, 19 nt, Homo sapiens
  misc_RNA (1)...(19): siRNA sense strand
ccaguucacuuguauauac

SEQ ID NO: 1298033 - RNA, 19 nt, Homo sapiens
  misc_RNA (1)...(19): siRNA sense strand
cgucaacccuuauacaaau

SEQ ID NO: 1298034 - RNA, 19 nt, Homo sapiens
  misc_RNA (1)...(19): siRNA sense strand
gauuugguuucguaacuuu

SEQ ID NO: 1298035 - RNA, 19 nt, Homo sapiens
  misc_RNA (1)...(19): siRNA sense strand
ggaccucagacaaauguuu

SEQ ID NO: 1298036 - RNA, 19 nt, Homo sapiens
  misc_RNA (1)...(19): siRNA sense strand
caggagggaucuuccaugu

SEQ ID NO: 1298037 - RNA, 19 nt, Homo sapiens
  misc_RNA (1)...(19): siRNA sense strand
gauccggaccucagacaaa

SEQ ID NO: 1298038 - RNA, 19 nt, Homo sapiens
  misc_RNA (1)...(19): siRNA sense strand
ggacagggcgagggagaaa

SEQ ID NO: 1298039 - RNA, 19 nt, Homo sapiens
  misc_RNA (1)...(19): siRNA sense strand
cacguguaaugacaaauaa

SEQ ID NO: 1298040 - RNA, 19 nt, Homo sapiens
  misc_RNA (1)...(19): siRNA sense strand
ggauuugguuucguaacuu

SEQ ID NO: 1298041 - RNA, 19 nt, Homo sapiens
  misc_RNA (1)...(19): siRNA sense strand
ggaaauugaauccaguugu

SEQ ID NO: 1298042 - RNA, 19 nt, Homo sapiens
  misc_RNA (1)...(19): siRNA sense strand
cagcacguguaaugacaaa

SEQ ID NO: 1298043 - RNA, 19 nt, Homo sapiens
  misc_RNA (1)...(19): siRNA sense strand
aaaagaccgucaacccuua

SEQ ID NO: 1298044 - RNA, 19 nt, Homo sapiens
  misc_RNA (1)...(19): siRNA sense strand
gggauuugguuucguaacu

SEQ ID NO: 1298045 - RNA, 19 nt, Homo sapiens
  misc_RNA (1)...(19): siRNA sense strand
cuacagucccgaauucuau

SEQ ID NO: 1298046 - RNA, 19 nt, Homo sapiens
  misc_RNA (1)...(19): siRNA sense strand
uguauauacuucugcaaug

SEQ ID NO: 1298047 - RNA, 19 nt, Homo sapiens
  misc_RNA (1)...(19): siRNA sense strand
uuauacaaauggcuggaaa

SEQ ID NO: 1298048 - RNA, 19 nt, Homo sapiens
  misc_RNA (1)...(19): siRNA sense strand
ggcugcaugucuccaauau

SEQ ID NO: 1298049 - RNA, 19 nt, Homo sapiens
  misc_RNA (1)...(19): siRNA sense strand
ucacuuguauauacuucug

SEQ ID NO: 1298050 - RNA, 19 nt, Homo sapiens
  misc_RNA (1)...(19): siRNA sense strand
caaauggcuggaaauugaa

SEQ ID NO: 1298051 - RNA, 19 nt, Homo sapiens
  misc_RNA (1)...(19): siRNA sense strand
guauauacuucugcaaugc

SEQ ID NO: 1298052 - RNA, 19 nt, Homo sapiens
  misc_RNA (1)...(19): siRNA sense strand
aaaucgagguaaauaaugc

SEQ ID NO: 1298053 - RNA, 19 nt, Homo sapiens
  misc_RNA (1)...(19): siRNA sense strand
agucuacagucccgaauuc

SEQ ID NO: 1298054 - RNA, 19 nt, Homo sapiens
  misc_RNA (1)...(19): siRNA sense strand
auacaaauggcuggaaauu

SEQ ID NO: 1298055 - RNA, 19 nt, Homo sapiens
  misc_RNA (1)...(19): siRNA sense strand
cacagcacguguaaugaca

SEQ ID NO: 1298056 - RNA, 19 nt, Homo sapiens
  misc_RNA (1)...(19): siRNA sense strand
cugcaugucuccaauaucc

SEQ ID NO: 1298057 - RNA, 19 nt, Homo sapiens
  misc_RNA (1)...(19): siRNA sense strand
guucacuuguauauacuuc

SEQ ID NO: 1298058 - RNA, 19 nt, Homo sapiens
  misc_RNA (1)...(19): siRNA sense strand
acagggcgagggagaaauu

SEQ ID NO: 1298059 - RNA, 19 nt, Homo sapiens
  misc_RNA (1)...(19): siRNA sense strand
agacacaaccuucugaaaa

SEQ ID NO: 1298060 - RNA, 19 nt, Homo sapiens
  misc_RNA (1)...(19): siRNA sense strand
gcacacauuaaaccuguac

SEQ ID NO: 1298061 - RNA, 19 nt, Homo sapiens
  misc_RNA (1)...(19): siRNA sense strand
ugccacagcacguguaaug

SEQ ID NO: 1298062 - RNA, 19 nt, Homo sapiens
  misc_RNA (1)...(19): siRNA sense strand
gacacaaccuucugaaaac

SEQ ID NO: 1298063 - RNA, 19 nt, Homo sapiens
  misc_RNA (1)...(19): siRNA sense strand
gcaccgccacacagacaga

SEQ ID NO: 1298064 - RNA, 19 nt, Homo sapiens
  misc_RNA (1)...(19): siRNA sense strand
gaccgucaacccuuauaca

SEQ ID NO: 1298065 - RNA, 19 nt, Homo sapiens
  misc_RNA (1)...(19): siRNA sense strand
ggucgcaccguguacaaca

SEQ ID NO: 1298066 - RNA, 19 nt, Homo sapiens
  misc_RNA (1)...(19): siRNA sense strand
gucaacccuuauacaaaug

SEQ ID NO: 1298067 - RNA, 19 nt, Homo sapiens
  misc_RNA (1)...(19): siRNA sense strand
gcgaggcucaaagggauuu

SEQ ID NO: 1298068 - RNA, 19 nt, Homo sapiens
  misc_RNA (1)...(19): siRNA sense strand
ccgucaacccuuauacaaa

SEQ ID NO: 1298069 - RNA, 19 nt, Homo sapiens
  misc_RNA (1)...(19): siRNA sense strand
gggcgagggagaaauuaca

SEQ ID NO: 1298070 - RNA, 19 nt, Homo sapiens
  misc_RNA (1)...(19): siRNA sense strand
ccacagcacguguaaugac

SEQ ID NO: 1298071 - RNA, 19 nt, Homo sapiens
  misc_RNA (1)...(19): siRNA sense strand
uacaaauggcuggaaauug

SEQ ID NO: 1298072 - RNA, 19 nt, Homo sapiens
  misc_RNA (1)...(19): siRNA sense strand
acaaauggcuggaaauuga

SEQ ID NO: 1298073 - RNA, 19 nt, Homo sapiens
  misc_RNA (1)...(19): siRNA sense strand
gaaauugaauccaguugug

SEQ ID NO: 1298074 - RNA, 19 nt, Homo sapiens
  misc_RNA (1)...(19): siRNA sense strand
gcacguguaaugacaaaua

SEQ ID NO: 1298075 - RNA, 19 nt, Homo sapiens
  misc_RNA (1)...(19): siRNA sense strand
ggagggaucuuccauguac

SEQ ID NO: 1298076 - RNA, 19 nt, Homo sapiens
  misc_RNA (1)...(19): siRNA sense strand
aaagggauuugguuucgua

SEQ ID NO: 1298077 - RNA, 19 nt, Homo sapiens
  misc_RNA (1)...(19): siRNA sense strand
ccaguucacuuguauauac

SEQ ID NO: 1298078 - RNA, 19 nt, Homo sapiens
  misc_RNA (1)...(19): siRNA sense strand
cgucaacccuuauacaaau

SEQ ID NO: 1298079 - RNA, 19 nt, Homo sapiens
  misc_RNA (1)...(19): siRNA sense strand
gauuugguuucguaacuuu

SEQ ID NO: 1298080 - RNA, 19 nt, Homo sapiens
  misc_RNA (1)...(19): siRNA sense strand
ggaccucagacaaauguuu

SEQ ID NO: 1298081 - RNA, 19 nt, Homo sapiens
  misc_RNA (1)...(19): siRNA sense strand
caggagggaucuuccaugu

SEQ ID NO: 1298082 - RNA, 19 nt, Homo sapiens
  misc_RNA (1)...(19): siRNA sense strand
gauccggaccucagacaaa

SEQ ID NO: 1298083 - RNA, 19 nt, Homo sapiens
  misc_RNA (1)...(19): siRNA sense strand
ggacagggcgagggagaaa

SEQ ID NO: 1298084 - RNA, 19 nt, Homo sapiens
  misc_RNA (1)...(19): siRNA sense strand
cacguguaaugacaaauaa

SEQ ID NO: 1298085 - RNA, 19 nt, Homo sapiens
  misc_RNA (1)...(19): siRNA sense strand
ggauuugguuucguaacuu

SEQ ID NO: 1298086 - RNA, 19 nt, Homo sapiens
  misc_RNA (1)...(19): siRNA sense strand
ggaaauugaauccaguugu

SEQ ID NO: 1298087 - RNA, 19 nt, Homo sapiens
  misc_RNA (1)...(19): siRNA sense strand
cagcacguguaaugacaaa

SEQ ID NO: 1298088 - RNA, 19 nt, Homo sapiens
  misc_RNA (1)...(19): siRNA sense strand
aaaagaccgucaacccuua

SEQ ID NO: 1298089 - RNA, 19 nt, Homo sapiens
  misc_RNA (1)...(19): siRNA sense strand
gggauuugguuucguaacu

SEQ ID NO: 1298090 - RNA, 19 nt, Homo sapiens
  misc_RNA (1)...(19): siRNA sense strand
cuacagucccgaauucuau

SEQ ID NO: 1298091 - RNA, 19 nt, Homo sapiens
  misc_RNA (1)...(19): siRNA sense strand
uguauauacuucugcaaug

SEQ ID NO: 1298092 - RNA, 19 nt, Homo sapiens
  misc_RNA (1)...(19): siRNA sense strand
uuauacaaauggcuggaaa

SEQ ID NO: 1298093 - RNA, 19 nt, Homo sapiens
  misc_RNA (1)...(19): siRNA sense strand
ggcugcaugucuccaauau

SEQ ID NO: 1298094 - RNA, 19 nt, Homo sapiens
  misc_RNA (1)...(19): siRNA sense strand
ucacuuguauauacuucug

SEQ ID NO: 1298095 - RNA, 19 nt, Homo sapiens
  misc_RNA (1)...(19): siRNA sense strand
caaauggcuggaaauugaa

SEQ ID NO: 1298096 - RNA, 19 nt, Homo sapiens
  misc_RNA (1)...(19): siRNA sense strand
guauauacuucugcaaugc

SEQ ID NO: 1298097 - RNA, 19 nt, Homo sapiens
  misc_RNA (1)...(19): siRNA sense strand
aaaucgagguaaauaaugc

SEQ ID NO: 1298098 - RNA, 19 nt, Homo sapiens
  misc_RNA (1)...(19): siRNA sense strand
agucuacagucccgaauuc

SEQ ID NO: 1298099 - RNA, 19 nt, Homo sapiens
  misc_RNA (1)...(19): siRNA sense strand
auacaaauggcuggaaauu

SEQ ID NO: 1298100 - RNA, 19 nt, Homo sapiens
  misc_RNA (1)...(19): siRNA sense strand
cacagcacguguaaugaca

SEQ ID NO: 1298101 - RNA, 19 nt, Homo sapiens
  misc_RNA (1)...(19): siRNA sense strand
cugcaugucuccaauaucc

SEQ ID NO: 1298102 - RNA, 19 nt, Homo sapiens
  misc_RNA (1)...(19): siRNA sense strand
guucacuuguauauacuuc

SEQ ID NO: 1298103 - RNA, 19 nt, Homo sapiens
  misc_RNA (1)...(19): siRNA sense strand
acagggcgagggagaaauu

SEQ ID NO: 1298104 - RNA, 19 nt, Homo sapiens
  misc_RNA (1)...(19): siRNA sense strand
agacacaaccuucugaaaa

SEQ ID NO: 1298105 - RNA, 19 nt, Homo sapiens
  misc_RNA (1)...(19): siRNA sense strand
gcacacauuaaaccuguac

SEQ ID NO: 1298106 - RNA, 19 nt, Homo sapiens
  misc_RNA (1)...(19): siRNA sense strand
ugccacagcacguguaaug

SEQ ID NO: 1298107 - RNA, 19 nt, Homo sapiens
  misc_RNA (1)...(19): siRNA sense strand
gacacaaccuucugaaaac

SEQ ID NO: 1298108 - RNA, 19 nt, Homo sapiens
  misc_RNA (1)...(19): siRNA sense strand
gcaccgccacacagacaga

SEQ ID NO: 1298109 - RNA, 19 nt, Homo sapiens
  misc_RNA (1)...(19): siRNA sense strand
gaccgucaacccuuauaca

SEQ ID NO: 1298110 - RNA, 19 nt, Homo sapiens
  misc_RNA (1)...(19): siRNA sense strand
ggucgcaccguguacaaca

SEQ ID NO: 1298111 - RNA, 19 nt, Homo sapiens
  misc_RNA (1)...(19): siRNA sense strand
gucaacccuuauacaaaug

SEQ ID NO: 1298112 - RNA, 19 nt, Homo sapiens
  misc_RNA (1)...(19): siRNA sense strand
gcgaggcucaaagggauuu

SEQ ID NO: 1298113 - RNA, 19 nt, Homo sapiens
  misc_RNA (1)...(19): siRNA sense strand
ccgucaacccuuauacaaa

SEQ ID NO: 1298114 - RNA, 19 nt, Homo sapiens
  misc_RNA (1)...(19): siRNA sense strand
gggcgagggagaaauuaca

SEQ ID NO: 1298115 - RNA, 19 nt, Homo sapiens
  misc_RNA (1)...(19): siRNA sense strand
ccacagcacguguaaugac

SEQ ID NO: 1298116 - RNA, 19 nt, Homo sapiens
  misc_RNA (1)...(19): siRNA sense strand
uacaaauggcuggaaauug

SEQ ID NO: 1298117 - RNA, 19 nt, Homo sapiens
  misc_RNA (1)...(19): siRNA sense strand
acaaauggcuggaaauuga

SEQ ID NO: 1298118 - RNA, 19 nt, Homo sapiens
  misc_RNA (1)...(19): siRNA sense strand
gaaauugaauccaguugug

SEQ ID NO: 1298119 - RNA, 19 nt, Homo sapiens
  misc_RNA (1)...(19): siRNA sense strand
gcacguguaaugacaaaua

SEQ ID NO: 1298120 - RNA, 19 nt, Homo sapiens
  misc_RNA (1)...(19): siRNA sense strand
ggagggaucuuccauguac

SEQ ID NO: 1298121 - RNA, 19 nt, Homo sapiens
  misc_RNA (1)...(19): siRNA sense strand
aaagggauuugguuucgua

SEQ ID NO: 1298122 - RNA, 19 nt, Homo sapiens
  misc_RNA (1)...(19): siRNA sense strand
ccaguucacuuguauauac

SEQ ID NO: 1298123 - RNA, 19 nt, Homo sapiens
  misc_RNA (1)...(19): siRNA sense strand
cgucaacccuuauacaaau

SEQ ID NO: 1298124 - RNA, 19 nt, Homo sapiens
  misc_RNA (1)...(19): siRNA sense strand
gauuugguuucguaacuuu

SEQ ID NO: 1298125 - RNA, 19 nt, Homo sapiens
  misc_RNA (1)...(19): siRNA sense strand
ggaccucagacaaauguuu

SEQ ID NO: 1298126 - RNA, 19 nt, Homo sapiens
  misc_RNA (1)...(19): siRNA sense strand
caggagggaucuuccaugu

SEQ ID NO: 1298127 - RNA, 19 nt, Homo sapiens
  misc_RNA (1)...(19): siRNA sense strand
gauccggaccucagacaaa

SEQ ID NO: 1298128 - RNA, 19 nt, Homo sapiens
  misc_RNA (1)...(19): siRNA sense strand
ggacagggcgagggagaaa

SEQ ID NO: 1298129 - RNA, 19 nt, Homo sapiens
  misc_RNA (1)...(19): siRNA sense strand
cacguguaaugacaaauaa

SEQ ID NO: 1298130 - RNA, 19 nt, Homo sapiens
  misc_RNA (1)...(19): siRNA sense strand
ggauuugguuucguaacuu

SEQ ID NO: 1298131 - RNA, 19 nt, Homo sapiens
  misc_RNA (1)...(19): siRNA sense strand
ggaaauugaauccaguugu

SEQ ID NO: 1298132 - RNA, 19 nt, Homo sapiens
  misc_RNA (1)...(19): siRNA sense strand
cagcacguguaaugacaaa

SEQ ID NO: 1298133 - RNA, 19 nt, Homo sapiens
  misc_RNA (1)...(19): siRNA sense strand
aaaagaccgucaacccuua

SEQ ID NO: 1298134 - RNA, 19 nt, Homo sapiens
  misc_RNA (1)...(19): siRNA sense strand
gggauuugguuucguaacu

SEQ ID NO: 1298135 - RNA, 19 nt, Homo sapiens
  misc_RNA (1)...(19): siRNA sense strand
cuacagucccgaauucuau

SEQ ID NO: 1298136 - RNA, 19 nt, Homo sapiens
  misc_RNA (1)...(19): siRNA sense strand
uguauauacuucugcaaug

SEQ ID NO: 1298137 - RNA, 19 nt, Homo sapiens
  misc_RNA (1)...(19): siRNA sense strand
uuauacaaauggcuggaaa

SEQ ID NO: 1298138 - RNA, 19 nt, Homo sapiens
  misc_RNA (1)...(19): siRNA sense strand
ggcugcaugucuccaauau

SEQ ID NO: 1298139 - RNA, 19 nt, Homo sapiens
  misc_RNA (1)...(19): siRNA sense strand
ucacuuguauauacuucug

SEQ ID NO: 1298140 - RNA, 19 nt, Homo sapiens
  misc_RNA (1)...(19): siRNA sense strand
caaauggcuggaaauugaa

SEQ ID NO: 1298141 - RNA, 19 nt, Homo sapiens
  misc_RNA (1)...(19): siRNA sense strand
guauauacuucugcaaugc

SEQ ID NO: 1298142 - RNA, 19 nt, Homo sapiens
  misc_RNA (1)...(19): siRNA sense strand
aaaucgagguaaauaaugc

SEQ ID NO: 1298143 - RNA, 19 nt, Homo sapiens
  misc_RNA (1)...(19): siRNA sense strand
agucuacagucccgaauuc

SEQ ID NO: 1298144 - RNA, 19 nt, Homo sapiens
  misc_RNA (1)...(19): siRNA sense strand
auacaaauggcuggaaauu

SEQ ID NO: 1298145 - RNA, 19 nt, Homo sapiens
  misc_RNA (1)...(19): siRNA sense strand
cacagcacguguaaugaca

SEQ ID NO: 1298146 - RNA, 19 nt, Homo sapiens
  misc_RNA (1)...(19): siRNA sense strand
cugcaugucuccaauaucc

SEQ ID NO: 1298147 - RNA, 19 nt, Homo sapiens
  misc_RNA (1)...(19): siRNA sense strand
guucacuuguauauacuuc

SEQ ID NO: 1298148 - RNA, 19 nt, Homo sapiens
  misc_RNA (1)...(19): siRNA sense strand
acagggcgagggagaaauu

SEQ ID NO: 1298149 - RNA, 19 nt, Homo sapiens
  misc_RNA (1)...(19): siRNA sense strand
agacacaaccuucugaaaa

SEQ ID NO: 1298150 - RNA, 19 nt, Homo sapiens
  misc_RNA (1)...(19): siRNA sense strand
gcacacauuaaaccuguac

SEQ ID NO: 1298151 - RNA, 19 nt, Homo sapiens
  misc_RNA (1)...(19): siRNA sense strand
ugccacagcacguguaaug

SEQ ID NO: 1298152 - RNA, 19 nt, Homo sapiens
  misc_RNA (1)...(19): siRNA sense strand
gacacaaccuucugaaaac

SEQ ID NO: 1298153 - RNA, 19 nt, Homo sapiens
  misc_RNA (1)...(19): siRNA sense strand
gcaccgccacacagacaga

SEQ ID NO: 1298154 - RNA, 19 nt, Homo sapiens
  misc_RNA (1)...(19): siRNA sense strand
gaccgucaacccuuauaca

SEQ ID NO: 1298155 - RNA, 19 nt, Homo sapiens
  misc_RNA (1)...(19): siRNA sense strand
ggucgcaccguguacaaca

SEQ ID NO: 1298156 - RNA, 19 nt, Homo sapiens
  misc_RNA (1)...(19): siRNA sense strand
gucaacccuuauacaaaug

SEQ ID NO: 1298157 - RNA, 19 nt, Homo sapiens
  misc_RNA (1)...(19): siRNA sense strand
gcgaggcucaaagggauuu

SEQ ID NO: 1298158 - RNA, 19 nt, Homo sapiens
  misc_RNA (1)...(19): siRNA sense strand
ccgucaacccuuauacaaa

SEQ ID NO: 1298159 - RNA, 19 nt, Homo sapiens
  misc_RNA (1)...(19): siRNA sense strand
gggcgagggagaaauuaca

SEQ ID NO: 1298160 - RNA, 19 nt, Homo sapiens
  misc_RNA (1)...(19): siRNA sense strand
ccacagcacguguaaugac

SEQ ID NO: 1298161 - RNA, 19 nt, Homo sapiens
  misc_RNA (1)...(19): siRNA sense strand
uacaaauggcuggaaauug

SEQ ID NO: 1298162 - RNA, 19 nt, Homo sapiens
  misc_RNA (1)...(19): siRNA sense strand
acaaauggcuggaaauuga

SEQ ID NO: 1298163 - RNA, 19 nt, Homo sapiens
  misc_RNA (1)...(19): siRNA sense strand
gaaauugaauccaguugug

SEQ ID NO: 1298164 - RNA, 19 nt, Homo sapiens
  misc_RNA (1)...(19): siRNA sense strand
gcacguguaaugacaaaua

SEQ ID NO: 1298165 - RNA, 19 nt, Homo sapiens
  misc_RNA (1)...(19): siRNA sense strand
ggagggaucuuccauguac

SEQ ID NO: 1298166 - RNA, 19 nt, Homo sapiens
  misc_RNA (1)...(19): siRNA sense strand
aaagggauuugguuucgua

SEQ ID NO: 1298167 - RNA, 19 nt, Homo sapiens
  misc_RNA (1)...(19): siRNA sense strand
ccaguucacuuguauauac

SEQ ID NO: 1298168 - RNA, 19 nt, Homo sapiens
  misc_RNA (1)...(19): siRNA sense strand
cgucaacccuuauacaaau

SEQ ID NO: 1298169 - RNA, 19 nt, Homo sapiens
  misc_RNA (1)...(19): siRNA sense strand
gauuugguuucguaacuuu

SEQ ID NO: 1298170 - RNA, 19 nt, Homo sapiens
  misc_RNA (1)...(19): siRNA sense strand
ggaccucagacaaauguuu

SEQ ID NO: 1298171 - RNA, 19 nt, Homo sapiens
  misc_RNA (1)...(19): siRNA sense strand
caggagggaucuuccaugu

SEQ ID NO: 1298172 - RNA, 19 nt, Homo sapiens
  misc_RNA (1)...(19): siRNA sense strand
gauccggaccucagacaaa

SEQ ID NO: 1298173 - RNA, 19 nt, Homo sapiens
  misc_RNA (1)...(19): siRNA sense strand
ggacagggcgagggagaaa

SEQ ID NO: 1298174 - RNA, 19 nt, Homo sapiens
  misc_RNA (1)...(19): siRNA sense strand
cacguguaaugacaaauaa

SEQ ID NO: 1298175 - RNA, 19 nt, Homo sapiens
  misc_RNA (1)...(19): siRNA sense strand
ggauuugguuucguaacuu

SEQ ID NO: 1298176 - RNA, 19 nt, Homo sapiens
  misc_RNA (1)...(19): siRNA sense strand
ggaaauugaauccaguugu

SEQ ID NO: 1298177 - RNA, 19 nt, Homo sapiens
  misc_RNA (1)...(19): siRNA sense strand
cagcacguguaaugacaaa

SEQ ID NO: 1298178 - RNA, 19 nt, Homo sapiens
  misc_RNA (1)...(19): siRNA sense strand
aaaagaccgucaacccuua

SEQ ID NO: 1298179 - RNA, 19 nt, Homo sapiens
  misc_RNA (1)...(19): siRNA sense strand
gggauuugguuucguaacu

SEQ ID NO: 1298180 - RNA, 19 nt, Homo sapiens
  misc_RNA (1)...(19): siRNA sense strand
cuacagucccgaauucuau

SEQ ID NO: 1298181 - RNA, 19 nt, Homo sapiens
  misc_RNA (1)...(19): siRNA sense strand
uguauauacuucugcaaug

SEQ ID NO: 1298182 - RNA, 19 nt, Homo sapiens
  misc_RNA (1)...(19): siRNA sense strand
uuauacaaauggcuggaaa

SEQ ID NO: 1298183 - RNA, 19 nt, Homo sapiens
  misc_RNA (1)...(19): siRNA sense strand
ggcugcaugucuccaauau

SEQ ID NO: 1298184 - RNA, 19 nt, Homo sapiens
  misc_RNA (1)...(19): siRNA sense strand
ucacuuguauauacuucug

SEQ ID NO: 1298185 - RNA, 19 nt, Homo sapiens
  misc_RNA (1)...(19): siRNA sense strand
caaauggcuggaaauugaa

SEQ ID NO: 1298186 - RNA, 19 nt, Homo sapiens
  misc_RNA (1)...(19): siRNA sense strand
guauauacuucugcaaugc

SEQ ID NO: 1298187 - RNA, 19 nt, Homo sapiens
  misc_RNA (1)...(19): siRNA sense strand
aaaucgagguaaauaaugc

SEQ ID NO: 1298188 - RNA, 19 nt, Homo sapiens
  misc_RNA (1)...(19): siRNA sense strand
agucuacagucccgaauuc

SEQ ID NO: 1298189 - RNA, 19 nt, Homo sapiens
  misc_RNA (1)...(19): siRNA sense strand
auacaaauggcuggaaauu

SEQ ID NO: 1298190 - RNA, 19 nt, Homo sapiens
  misc_RNA (1)...(19): siRNA sense strand
cacagcacguguaaugaca

SEQ ID NO: 1298191 - RNA, 19 nt, Homo sapiens
  misc_RNA (1)...(19): siRNA sense strand
cugcaugucuccaauaucc

SEQ ID NO: 1298192 - RNA, 19 nt, Homo sapiens
  misc_RNA (1)...(19): siRNA sense strand
guucacuuguauauacuuc

SEQ ID NO: 1298193 - RNA, 19 nt, Homo sapiens
  misc_RNA (1)...(19): siRNA sense strand
acagggcgagggagaaauu

SEQ ID NO: 1298194 - RNA, 19 nt, Homo sapiens
  misc_RNA (1)...(19): siRNA sense strand
agacacaaccuucugaaaa

SEQ ID NO: 1298195 - RNA, 19 nt, Homo sapiens
  misc_RNA (1)...(19): siRNA sense strand
gcacacauuaaaccuguac

SEQ ID NO: 1298196 - RNA, 19 nt, Homo sapiens
  misc_RNA (1)...(19): siRNA sense strand
ugccacagcacguguaaug

SEQ ID NO: 1298197 - RNA, 19 nt, Homo sapiens
  misc_RNA (1)...(19): siRNA sense strand
gacacaaccuucugaaaac

SEQ ID NO: 1298198 - RNA, 19 nt, Homo sapiens
  misc_RNA (1)...(19): siRNA sense strand
gcaccgccacacagacaga

SEQ ID NO: 1298199 - RNA, 19 nt, Homo sapiens
  misc_RNA (1)...(19): siRNA sense strand
gaccgucaacccuuauaca

SEQ ID NO: 1298200 - RNA, 19 nt, Homo sapiens
  misc_RNA (1)...(19): siRNA sense strand
ggucgcaccguguacaaca

SEQ ID NO: 1298201 - RNA, 19 nt, Homo sapiens
  misc_RNA (1)...(19): siRNA sense strand
gucaacccuuauacaaaug

SEQ ID NO: 1298202 - RNA, 19 nt, Homo sapiens
  misc_RNA (1)...(19): siRNA sense strand
gcgaggcucaaagggauuu

SEQ ID NO: 1298203 - RNA, 19 nt, Homo sapiens
  misc_RNA (1)...(19): siRNA sense strand
ccgucaacccuuauacaaa

SEQ ID NO: 1298204 - RNA, 19 nt, Homo sapiens
  misc_RNA (1)...(19): siRNA sense strand
gggcgagggagaaauuaca

SEQ ID NO: 1298205 - RNA, 19 nt, Homo sapiens
  misc_RNA (1)...(19): siRNA sense strand
ccacagcacguguaaugac

SEQ ID NO: 1298206 - RNA, 19 nt, Homo sapiens
  misc_RNA (1)...(19): siRNA sense strand
uacaaauggcuggaaauug

SEQ ID NO: 1298207 - RNA, 19 nt, Homo sapiens
  misc_RNA (1)...(19): siRNA sense strand
acaaauggcuggaaauuga

SEQ ID NO: 1298208 - RNA, 19 nt, Homo sapiens
  misc_RNA (1)...(19): siRNA sense strand
gaaauugaauccaguugug

SEQ ID NO: 1298209 - RNA, 19 nt, Homo sapiens
  misc_RNA (1)...(19): siRNA sense strand
gcacguguaaugacaaaua

SEQ ID NO: 1298210 - RNA, 19 nt, Homo sapiens
  misc_RNA (1)...(19): siRNA sense strand
ggagggaucuuccauguac

SEQ ID NO: 1298211 - RNA, 19 nt, Homo sapiens
  misc_RNA (1)...(19): siRNA sense strand
aaagggauuugguuucgua

SEQ ID NO: 1298212 - RNA, 19 nt, Homo sapiens
  misc_RNA (1)...(19): siRNA sense strand
ccaguucacuuguauauac

SEQ ID NO: 1298213 - RNA, 19 nt, Homo sapiens
  misc_RNA (1)...(19): siRNA sense strand
cgucaacccuuauacaaau

SEQ ID NO: 1298214 - RNA, 19 nt, Homo sapiens
  misc_RNA (1)...(19): siRNA sense strand
gauuugguuucguaacuuu

SEQ ID NO: 1298215 - RNA, 19 nt, Homo sapiens
  misc_RNA (1)...(19): siRNA sense strand
ggaccucagacaaauguuu

SEQ ID NO: 1298216 - RNA, 19 nt, Homo sapiens
  misc_RNA (1)...(19): siRNA sense strand
caggagggaucuuccaugu

SEQ ID NO: 1298217 - RNA, 19 nt, Homo sapiens
  misc_RNA (1)...(19): siRNA sense strand
gauccggaccucagacaaa

SEQ ID NO: 1298218 - RNA, 19 nt, Homo sapiens
  misc_RNA (1)...(19): siRNA sense strand
ggacagggcgagggagaaa

SEQ ID NO: 1298219 - RNA, 19 nt, Homo sapiens
  misc_RNA (1)...(19): siRNA sense strand
cacguguaaugacaaauaa

SEQ ID NO: 1298220 - RNA, 19 nt, Homo sapiens
  misc_RNA (1)...(19): siRNA sense strand
ggauuugguuucguaacuu

SEQ ID NO: 1298221 - RNA, 19 nt, Homo sapiens
  misc_RNA (1)...(19): siRNA sense strand
ggaaauugaauccaguugu

SEQ ID NO: 1298222 - RNA, 19 nt, Homo sapiens
  misc_RNA (1)...(19): siRNA sense strand
cagcacguguaaugacaaa

SEQ ID NO: 1298223 - RNA, 19 nt, Homo sapiens
  misc_RNA (1)...(19): siRNA sense strand
aaaagaccgucaacccuua

SEQ ID NO: 1298224 - RNA, 19 nt, Homo sapiens
  misc_RNA (1)...(19): siRNA sense strand
gggauuugguuucguaacu

SEQ ID NO: 1298225 - RNA, 19 nt, Homo sapiens
  misc_RNA (1)...(19): siRNA sense strand
cuacagucccgaauucuau

SEQ ID NO: 1298226 - RNA, 19 nt, Homo sapiens
  misc_RNA (1)...(19): siRNA sense strand
uguauauacuucugcaaug

SEQ ID NO: 1298227 - RNA, 19 nt, Homo sapiens
  misc_RNA (1)...(19): siRNA sense strand
uuauacaaauggcuggaaa

SEQ ID NO: 1298228 - RNA, 19 nt, Homo sapiens
  misc_RNA (1)...(19): siRNA sense strand
ggcugcaugucuccaauau

SEQ ID NO: 1298229 - RNA, 19 nt, Homo sapiens
  misc_RNA (1)...(19): siRNA sense strand
ucacuuguauauacuucug

SEQ ID NO: 1298230 - RNA, 19 nt, Homo sapiens
  misc_RNA (1)...(19): siRNA sense strand
caaauggcuggaaauugaa

SEQ ID NO: 1298231 - RNA, 19 nt, Homo sapiens
  misc_RNA (1)...(19): siRNA sense strand
guauauacuucugcaaugc

SEQ ID NO: 1298232 - RNA, 19 nt, Homo sapiens
  misc_RNA (1)...(19): siRNA sense strand
aaaucgagguaaauaaugc

SEQ ID NO: 1298233 - RNA, 19 nt, Homo sapiens
  misc_RNA (1)...(19): siRNA sense strand
agucuacagucccgaauuc

SEQ ID NO: 1298234 - RNA, 19 nt, Homo sapiens
  misc_RNA (1)...(19): siRNA sense strand
auacaaauggcuggaaauu

SEQ ID NO: 1298235 - RNA, 19 nt, Homo sapiens
  misc_RNA (1)...(19): siRNA sense strand
cacagcacguguaaugaca

SEQ ID NO: 1298236 - RNA, 19 nt, Homo sapiens
  misc_RNA (1)...(19): siRNA sense strand
cugcaugucuccaauaucc

SEQ ID NO: 1298237 - RNA, 19 nt, Homo sapiens
  misc_RNA (1)...(19): siRNA sense strand
guucacuuguauauacuuc

SEQ ID NO: 1298238 - RNA, 19 nt, Homo sapiens
  misc_RNA (1)...(19): siRNA sense strand
acagggcgagggagaaauu

SEQ ID NO: 1298239 - RNA, 19 nt, Homo sapiens
  misc_RNA (1)...(19): siRNA sense strand
agacacaaccuucugaaaa

SEQ ID NO: 1298240 - RNA, 19 nt, Homo sapiens
  misc_RNA (1)...(19): siRNA sense strand
gcacacauuaaaccuguac

SEQ ID NO: 1298241 - RNA, 19 nt, Homo sapiens
  misc_RNA (1)...(19): siRNA sense strand
ugccacagcacguguaaug

SEQ ID NO: 1298242 - RNA, 19 nt, Homo sapiens
  misc_RNA (1)...(19): siRNA sense strand
gacacaaccuucugaaaac

SEQ ID NO: 1298243 - RNA, 19 nt, Homo sapiens
  misc_RNA (1)...(19): siRNA sense strand
gcaccgccacacagacaga

SEQ ID NO: 1298244 - RNA, 19 nt, Homo sapiens
  misc_RNA (1)...(19): siRNA sense strand
gaccgucaacccuuauaca

SEQ ID NO: 1298245 - RNA, 19 nt, Homo sapiens
  misc_RNA (1)...(19): siRNA sense strand
ggucgcaccguguacaaca

SEQ ID NO: 1298246 - RNA, 19 nt, Homo sapiens
  misc_RNA (1)...(19): siRNA sense strand
gucaacccuuauacaaaug

SEQ ID NO: 1298247 - RNA, 19 nt, Homo sapiens
  misc_RNA (1)...(19): siRNA sense strand
gcgaggcucaaagggauuu

SEQ ID NO: 1298248 - RNA, 19 nt, Homo sapiens
  misc_RNA (1)...(19): siRNA sense strand
ccgucaacccuuauacaaa

SEQ ID NO: 1298249 - RNA, 19 nt, Homo sapiens
  misc_RNA (1)...(19): siRNA sense strand
gggcgagggagaaauuaca

SEQ ID NO: 1298250 - RNA, 19 nt, Homo sapiens
  misc_RNA (1)...(19): siRNA sense strand
ccacagcacguguaaugac

SEQ ID NO: 1298251 - RNA, 19 nt, Homo sapiens
  misc_RNA (1)...(19): siRNA sense strand
uacaaauggcuggaaauug

SEQ ID NO: 1298252 - RNA, 19 nt, Homo sapiens
  misc_RNA (1)...(19): siRNA sense strand
acaaauggcuggaaauuga

SEQ ID NO: 1298253 - RNA, 19 nt, Homo sapiens
  misc_RNA (1)...(19): siRNA sense strand
gaaauugaauccaguugug

SEQ ID NO: 1298254 - RNA, 19 nt, Homo sapiens
  misc_RNA (1)...(19): siRNA sense strand
gcacguguaaugacaaaua

SEQ ID NO: 1298255 - RNA, 19 nt, Homo sapiens
  misc_RNA (1)...(19): siRNA sense strand
ggagggaucuuccauguac

SEQ ID NO: 1298256 - RNA, 19 nt, Homo sapiens
  misc_RNA (1)...(19): siRNA sense strand
aaagggauuugguuucgua

SEQ ID NO: 1298257 - RNA, 19 nt, Homo sapiens
  misc_RNA (1)...(19): siRNA sense strand
ccaguucacuuguauauac

SEQ ID NO: 1298258 - RNA, 19 nt, Homo sapiens
  misc_RNA (1)...(19): siRNA sense strand
cgucaacccuuauacaaau

SEQ ID NO: 1298259 - RNA, 19 nt, Homo sapiens
  misc_RNA (1)...(19): siRNA sense strand
gauuugguuucguaacuuu

SEQ ID NO: 1298260 - RNA, 19 nt, Homo sapiens
  misc_RNA (1)...(19): siRNA sense strand
ggaccucagacaaauguuu

SEQ ID NO: 1298261 - RNA, 19 nt, Homo sapiens
  misc_RNA (1)...(19): siRNA sense strand
caggagggaucuuccaugu

SEQ ID NO: 1298262 - RNA, 19 nt, Homo sapiens
  misc_RNA (1)...(19): siRNA sense strand
gauccggaccucagacaaa

SEQ ID NO: 1298263 - RNA, 19 nt, Homo sapiens
  misc_RNA (1)...(19): siRNA sense strand
ggacagggcgagggagaaa

SEQ ID NO: 1298264 - RNA, 19 nt, Homo sapiens
  misc_RNA (1)...(19): siRNA sense strand
cacguguaaugacaaauaa

SEQ ID NO: 1298265 - RNA, 19 nt, Homo sapiens
  misc_RNA (1)...(19): siRNA sense strand
ggauuugguuucguaacuu

SEQ ID NO: 1298266 - RNA, 19 nt, Homo sapiens
  misc_RNA (1)...(19): siRNA sense strand
ggaaauugaauccaguugu

SEQ ID NO: 1298267 - RNA, 19 nt, Homo sapiens
  misc_RNA (1)...(19): siRNA sense strand
cagcacguguaaugacaaa

SEQ ID NO: 1298268 - RNA, 19 nt, Homo sapiens
  misc_RNA (1)...(19): siRNA sense strand
aaaagaccgucaacccuua

SEQ ID NO: 1298269 - RNA, 19 nt, Homo sapiens
  misc_RNA (1)...(19): siRNA sense strand
gggauuugguuucguaacu

SEQ ID NO: 1298270 - RNA, 19 nt, Homo sapiens
  misc_RNA (1)...(19): siRNA sense strand
cuacagucccgaauucuau

SEQ ID NO: 1298271 - RNA, 19 nt, Homo sapiens
  misc_RNA (1)...(19): siRNA sense strand
uguauauacuucugcaaug

SEQ ID NO: 1298272 - RNA, 19 nt, Homo sapiens
  misc_RNA (1)...(19): siRNA sense strand
uuauacaaauggcuggaaa

SEQ ID NO: 1298273 - RNA, 19 nt, Homo sapiens
  misc_RNA (1)...(19): siRNA sense strand
ggcugcaugucuccaauau

SEQ ID NO: 1298274 - RNA, 19 nt, Homo sapiens
  misc_RNA (1)...(19): siRNA sense strand
ucacuuguauauacuucug

SEQ ID NO: 1298275 - RNA, 19 nt, Homo sapiens
  misc_RNA (1)...(19): siRNA sense strand
caaauggcuggaaauugaa

SEQ ID NO: 1298276 - RNA, 19 nt, Homo sapiens
  misc_RNA (1)...(19): siRNA sense strand
guauauacuucugcaaugc

SEQ ID NO: 1298277 - RNA, 19 nt, Homo sapiens
  misc_RNA (1)...(19): siRNA sense strand
aaaucgagguaaauaaugc

SEQ ID NO: 1298278 - RNA, 19 nt, Homo sapiens
  misc_RNA (1)...(19): siRNA sense strand
agucuacagucccgaauuc

SEQ ID NO: 1298279 - RNA, 19 nt, Homo sapiens
  misc_RNA (1)...(19): siRNA sense strand
auacaaauggcuggaaauu

SEQ ID NO: 1298280 - RNA, 19 nt, Homo sapiens
  misc_RNA (1)...(19): siRNA sense strand
cacagcacguguaaugaca

SEQ ID NO: 1298281 - RNA, 19 nt, Homo sapiens
  misc_RNA (1)...(19): siRNA sense strand
cugcaugucuccaauaucc

SEQ ID NO: 1298282 - RNA, 19 nt, Homo sapiens
  misc_RNA (1)...(19): siRNA sense strand
guucacuuguauauacuuc

SEQ ID NO: 1298283 - RNA, 19 nt, Homo sapiens
  misc_RNA (1)...(19): siRNA sense strand
acagggcgagggagaaauu

SEQ ID NO: 1298284 - RNA, 19 nt, Homo sapiens
  misc_RNA (1)...(19): siRNA sense strand
agacacaaccuucugaaaa

SEQ ID NO: 1298285 - RNA, 19 nt, Homo sapiens
  misc_RNA (1)...(19): siRNA sense strand
gcacacauuaaaccuguac

SEQ ID NO: 1298286 - RNA, 19 nt, Homo sapiens
  misc_RNA (1)...(19): siRNA sense strand
ugccacagcacguguaaug

SEQ ID NO: 1298287 - RNA, 19 nt, Homo sapiens
  misc_RNA (1)...(19): siRNA sense strand
gacacaaccuucugaaaac

SEQ ID NO: 1298288 - RNA, 19 nt, Homo sapiens
  misc_RNA (1)...(19): siRNA sense strand
gcaccgccacacagacaga

SEQ ID NO: 1298289 - RNA, 19 nt, Homo sapiens
  misc_RNA (1)...(19): siRNA sense strand
gaccgucaacccuuauaca

SEQ ID NO: 1298290 - RNA, 19 nt, Homo sapiens
  misc_RNA (1)...(19): siRNA sense strand
ggucgcaccguguacaaca

SEQ ID NO: 1298291 - RNA, 19 nt, Homo sapiens
  misc_RNA (1)...(19): siRNA sense strand
gucaacccuuauacaaaug

SEQ ID NO: 1298292 - RNA, 19 nt, Homo sapiens
  misc_RNA (1)...(19): siRNA sense strand
gcgaggcucaaagggauuu

SEQ ID NO: 1298293 - RNA, 19 nt, Homo sapiens
  misc_RNA (1)...(19): siRNA sense strand
ccgucaacccuuauacaaa

SEQ ID NO: 1298294 - RNA, 19 nt, Homo sapiens
  misc_RNA (1)...(19): siRNA sense strand
gggcgagggagaaauuaca

SEQ ID NO: 1298295 - RNA, 19 nt, Homo sapiens
  misc_RNA (1)...(19): siRNA sense strand
ccacagcacguguaaugac

SEQ ID NO: 1298296 - RNA, 19 nt, Homo sapiens
  misc_RNA (1)...(19): siRNA sense strand
uacaaauggcuggaaauug

SEQ ID NO: 1298297 - RNA, 19 nt, Homo sapiens
  misc_RNA (1)...(19): siRNA sense strand
acaaauggcuggaaauuga

SEQ ID NO: 1298298 - RNA, 19 nt, Homo sapiens
  misc_RNA (1)...(19): siRNA sense strand
gaaauugaauccaguugug

SEQ ID NO: 1298299 - RNA, 19 nt, Homo sapiens
  misc_RNA (1)...(19): siRNA sense strand
gcacguguaaugacaaaua

SEQ ID NO: 1298300 - RNA, 19 nt, Homo sapiens
  misc_RNA (1)...(19): siRNA sense strand
ggagggaucuuccauguac

SEQ ID NO: 1298301 - RNA, 19 nt, Homo sapiens
  misc_RNA (1)...(19): siRNA sense strand
aaagggauuugguuucgua

SEQ ID NO: 1298302 - RNA, 19 nt, Homo sapiens
  misc_RNA (1)...(19): siRNA sense strand
ccaguucacuuguauauac

SEQ ID NO: 1298303 - RNA, 19 nt, Homo sapiens
  misc_RNA (1)...(19): siRNA sense strand
cgucaacccuuauacaaau

SEQ ID NO: 1298304 - RNA, 19 nt, Homo sapiens
  misc_RNA (1)...(19): siRNA sense strand
gauuugguuucguaacuuu

SEQ ID NO: 1298305 - RNA, 19 nt, Homo sapiens
  misc_RNA (1)...(19): siRNA sense strand
ggaccucagacaaauguuu

SEQ ID NO: 1298306 - RNA, 19 nt, Homo sapiens
  misc_RNA (1)...(19): siRNA sense strand
caggagggaucuuccaugu

SEQ ID NO: 1298307 - RNA, 19 nt, Homo sapiens
  misc_RNA (1)...(19): siRNA sense strand
gauccggaccucagacaaa

SEQ ID NO: 1298308 - RNA, 19 nt, Homo sapiens
  misc_RNA (1)...(19): siRNA sense strand
ggacagggcgagggagaaa

SEQ ID NO: 1298309 - RNA, 19 nt, Homo sapiens
  misc_RNA (1)...(19): siRNA sense strand
cacguguaaugacaaauaa

SEQ ID NO: 1298310 - RNA, 19 nt, Homo sapiens
  misc_RNA (1)...(19): siRNA sense strand
ggauuugguuucguaacuu

SEQ ID NO: 1298311 - RNA, 19 nt, Homo sapiens
  misc_RNA (1)...(19): siRNA sense strand
ggaaauugaauccaguugu

SEQ ID NO: 1298312 - RNA, 19 nt, Homo sapiens
  misc_RNA (1)...(19): siRNA sense strand
cagcacguguaaugacaaa

SEQ ID NO: 1298313 - RNA, 19 nt, Homo sapiens
  misc_RNA (1)...(19): siRNA sense strand
aaaagaccgucaacccuua

SEQ ID NO: 1298314 - RNA, 19 nt, Homo sapiens
  misc_RNA (1)...(19): siRNA sense strand
gggauuugguuucguaacu

SEQ ID NO: 1298315 - RNA, 19 nt, Homo sapiens
  misc_RNA (1)...(19): siRNA sense strand
cuacagucccgaauucuau

SEQ ID NO: 1298316 - RNA, 19 nt, Homo sapiens
  misc_RNA (1)...(19): siRNA sense strand
uguauauacuucugcaaug

SEQ ID NO: 1298317 - RNA, 19 nt, Homo sapiens
  misc_RNA (1)...(19): siRNA sense strand
uuauacaaauggcuggaaa

SEQ ID NO: 1298318 - RNA, 19 nt, Homo sapiens
  misc_RNA (1)...(19): siRNA sense strand
ggcugcaugucuccaauau

SEQ ID NO: 1298319 - RNA, 19 nt, Homo sapiens
  misc_RNA (1)...(19): siRNA sense strand
ucacuuguauauacuucug

SEQ ID NO: 1298320 - RNA, 19 nt, Homo sapiens
  misc_RNA (1)...(19): siRNA sense strand
caaauggcuggaaauugaa

SEQ ID NO: 1298321 - RNA, 19 nt, Homo sapiens
  misc_RNA (1)...(19): siRNA sense strand
guauauacuucugcaaugc

SEQ ID NO: 1298322 - RNA, 19 nt, Homo sapiens
  misc_RNA (1)...(19): siRNA sense strand
aaaucgagguaaauaaugc

SEQ ID NO: 1298323 - RNA, 19 nt, Homo sapiens
  misc_RNA (1)...(19): siRNA sense strand
agucuacagucccgaauuc

SEQ ID NO: 1298324 - RNA, 19 nt, Homo sapiens
  misc_RNA (1)...(19): siRNA sense strand
auacaaauggcuggaaauu

SEQ ID NO: 1298325 - RNA, 19 nt, Homo sapiens
  misc_RNA (1)...(19): siRNA sense strand
cacagcacguguaaugaca

SEQ ID NO: 1298326 - RNA, 19 nt, Homo sapiens
  misc_RNA (1)...(19): siRNA sense strand
cugcaugucuccaauaucc

SEQ ID NO: 1298327 - RNA, 19 nt, Homo sapiens
  misc_RNA (1)...(19): siRNA sense strand
guucacuuguauauacuuc

SEQ ID NO: 1298328 - RNA, 19 nt, Homo sapiens
  misc_RNA (1)...(19): siRNA sense strand
acagggcgagggagaaauu

SEQ ID NO: 1298329 - RNA, 19 nt, Homo sapiens
  misc_RNA (1)...(19): siRNA sense strand
agacacaaccuucugaaaa

SEQ ID NO: 1298330 - RNA, 19 nt, Homo sapiens
  misc_RNA (1)...(19): siRNA sense strand
gcacacauuaaaccuguac

SEQ ID NO: 1298331 - RNA, 19 nt, Homo sapiens
  misc_RNA (1)...(19): siRNA sense strand
ugccacagcacguguaaug

SEQ ID NO: 1298332 - RNA, 19 nt, Homo sapiens
  misc_RNA (1)...(19): siRNA sense strand
gacacaaccuucugaaaac

SEQ ID NO: 1298333 - RNA, 19 nt, Homo sapiens
  misc_RNA (1)...(19): siRNA sense strand
gcaccgccacacagacaga

SEQ ID NO: 1298334 - RNA, 19 nt, Homo sapiens
  misc_RNA (1)...(19): siRNA sense strand
gaccgucaacccuuauaca

SEQ ID NO: 1298335 - RNA, 19 nt, Homo sapiens
  misc_RNA (1)...(19): siRNA sense strand
ggucgcaccguguacaaca

SEQ ID NO: 1298336 - RNA, 19 nt, Homo sapiens
  misc_RNA (1)...(19): siRNA sense strand
gucaacccuuauacaaaug

SEQ ID NO: 1298337 - RNA, 19 nt, Homo sapiens
  misc_RNA (1)...(19): siRNA sense strand
gcgaggcucaaagggauuu

SEQ ID NO: 1298338 - RNA, 19 nt, Homo sapiens
  misc_RNA (1)...(19): siRNA sense strand
ccgucaacccuuauacaaa

SEQ ID NO: 1298339 - RNA, 19 nt, Homo sapiens
  misc_RNA (1)...(19): siRNA sense strand
gggcgagggagaaauuaca

SEQ ID NO: 1298340 - RNA, 19 nt, Homo sapiens
  misc_RNA (1)...(19): siRNA sense strand
ccacagcacguguaaugac

SEQ ID NO: 1298341 - RNA, 19 nt, Homo sapiens
  misc_RNA (1)...(19): siRNA sense strand
uacaaauggcuggaaauug

SEQ ID NO: 1298342 - RNA, 19 nt, Homo sapiens
  misc_RNA (1)...(19): siRNA sense strand
acaaauggcuggaaauuga

SEQ ID NO: 1298343 - RNA, 19 nt, Homo sapiens
  misc_RNA (1)...(19): siRNA sense strand
gaaauugaauccaguugug

SEQ ID NO: 1298344 - RNA, 19 nt, Homo sapiens
  misc_RNA (1)...(19): siRNA sense strand
gcacguguaaugacaaaua

SEQ ID NO: 1298345 - RNA, 19 nt, Homo sapiens
  misc_RNA (1)...(19): siRNA sense strand
ggagggaucuuccauguac

SEQ ID NO: 1298346 - RNA, 19 nt, Homo sapiens
  misc_RNA (1)...(19): siRNA sense strand
aaagggauuugguuucgua

SEQ ID NO: 1298347 - RNA, 19 nt, Homo sapiens
  misc_RNA (1)...(19): siRNA sense strand
ccaguucacuuguauauac

SEQ ID NO: 1298348 - RNA, 19 nt, Homo sapiens
  misc_RNA (1)...(19): siRNA sense strand
cgucaacccuuauacaaau

SEQ ID NO: 1298349 - RNA, 19 nt, Homo sapiens
  misc_RNA (1)...(19): siRNA sense strand
gauuugguuucguaacuuu

SEQ ID NO: 1298350 - RNA, 19 nt, Homo sapiens
  misc_RNA (1)...(19): siRNA sense strand
ggaccucagacaaauguuu

SEQ ID NO: 1298351 - RNA, 19 nt, Homo sapiens
  misc_RNA (1)...(19): siRNA sense strand
caggagggaucuuccaugu

SEQ ID NO: 1298352 - RNA, 19 nt, Homo sapiens
  misc_RNA (1)...(19): siRNA sense strand
gauccggaccucagacaaa

SEQ ID NO: 1298353 - RNA, 19 nt, Homo sapiens
  misc_RNA (1)...(19): siRNA sense strand
ggacagggcgagggagaaa

SEQ ID NO: 1298354 - RNA, 19 nt, Homo sapiens
  misc_RNA (1)...(19): siRNA sense strand
cacguguaaugacaaauaa

SEQ ID NO: 1298355 - RNA, 19 nt, Homo sapiens
  misc_RNA (1)...(19): siRNA sense strand
ggauuugguuucguaacuu

SEQ ID NO: 1298356 - RNA, 19 nt, Homo sapiens
  misc_RNA (1)...(19): siRNA sense strand
ggaaauugaauccaguugu

SEQ ID NO: 1298357 - RNA, 19 nt, Homo sapiens
  misc_RNA (1)...(19): siRNA sense strand
cagcacguguaaugacaaa

SEQ ID NO: 1298358 - RNA, 19 nt, Homo sapiens
  misc_RNA (1)...(19): siRNA sense strand
aaaagaccgucaacccuua

SEQ ID NO: 1298359 - RNA, 19 nt, Homo sapiens
  misc_RNA (1)...(19): siRNA sense strand
gggauuugguuucguaacu

SEQ ID NO: 1298360 - RNA, 19 nt, Homo sapiens
  misc_RNA (1)...(19): siRNA sense strand
cuacagucccgaauucuau

SEQ ID NO: 1298361 - RNA, 19 nt, Homo sapiens
  misc_RNA (1)...(19): siRNA sense strand
uguauauacuucugcaaug

SEQ ID NO: 1298362 - RNA, 19 nt, Homo sapiens
  misc_RNA (1)...(19): siRNA sense strand
uuauacaaauggcuggaaa

SEQ ID NO: 1298363 - RNA, 19 nt, Homo sapiens
  misc_RNA (1)...(19): siRNA sense strand
ggcugcaugucuccaauau

SEQ ID NO: 1298364 - RNA, 19 nt, Homo sapiens
  misc_RNA (1)...(19): siRNA sense strand
ucacuuguauauacuucug

SEQ ID NO: 1298365 - RNA, 19 nt, Homo sapiens
  misc_RNA (1)...(19): siRNA sense strand
caaauggcuggaaauugaa

SEQ ID NO: 1298366 - RNA, 19 nt, Homo sapiens
  misc_RNA (1)...(19): siRNA sense strand
guauauacuucugcaaugc

SEQ ID NO: 1298367 - RNA, 19 nt, Homo sapiens
  misc_RNA (1)...(19): siRNA sense strand
aaaucgagguaaauaaugc

SEQ ID NO: 1298368 - RNA, 19 nt, Homo sapiens
  misc_RNA (1)...(19): siRNA sense strand
agucuacagucccgaauuc

SEQ ID NO: 1298369 - RNA, 19 nt, Homo sapiens
  misc_RNA (1)...(19): siRNA sense strand
auacaaauggcuggaaauu

SEQ ID NO: 1298370 - RNA, 19 nt, Homo sapiens
  misc_RNA (1)...(19): siRNA sense strand
cacagcacguguaaugaca

SEQ ID NO: 1298371 - RNA, 19 nt, Homo sapiens
  misc_RNA (1)...(19): siRNA sense strand
cugcaugucuccaauaucc

SEQ ID NO: 1298372 - RNA, 19 nt, Homo sapiens
  misc_RNA (1)...(19): siRNA sense strand
guucacuuguauauacuuc

SEQ ID NO: 1298373 - RNA, 19 nt, Homo sapiens
  misc_RNA (1)...(19): siRNA sense strand
acagggcgagggagaaauu

SEQ ID NO: 1298374 - RNA, 19 nt, Homo sapiens
  misc_RNA (1)...(19): siRNA sense strand
agacacaaccuucugaaaa

SEQ ID NO: 1298375 - RNA, 19 nt, Homo sapiens
  misc_RNA (1)...(19): siRNA sense strand
gcacacauuaaaccuguac

SEQ ID NO: 1298376 - RNA, 19 nt, Homo sapiens
  misc_RNA (1)...(19): siRNA sense strand
ugccacagcacguguaaug

SEQ ID NO: 1298377 - RNA, 19 nt, Homo sapiens
  misc_RNA (1)...(19): siRNA sense strand
gacacaaccuucugaaaac

SEQ ID NO: 1298378 - RNA, 19 nt, Homo sapiens
  misc_RNA (1)...(19): siRNA sense strand
gcaccgccacacagacaga

SEQ ID NO: 1298379 - RNA, 19 nt, Homo sapiens
  misc_RNA (1)...(19): siRNA sense strand
gaccgucaacccuuauaca

SEQ ID NO: 1298380 - RNA, 19 nt, Homo sapiens
  misc_RNA (1)...(19): siRNA sense strand
ggucgcaccguguacaaca

SEQ ID NO: 1298381 - RNA, 19 nt, Homo sapiens
  misc_RNA (1)...(19): siRNA sense strand
gucaacccuuauacaaaug

SEQ ID NO: 1298382 - RNA, 19 nt, Homo sapiens
  misc_RNA (1)...(19): siRNA sense strand
gcgaggcucaaagggauuu

SEQ ID NO: 1298383 - RNA, 19 nt, Homo sapiens
  misc_RNA (1)...(19): siRNA sense strand
ccgucaacccuuauacaaa

SEQ ID NO: 1298384 - RNA, 19 nt, Homo sapiens
  misc_RNA (1)...(19): siRNA sense strand
gggcgagggagaaauuaca

SEQ ID NO: 1298385 - RNA, 19 nt, Homo sapiens
  misc_RNA (1)...(19): siRNA sense strand
ccacagcacguguaaugac

SEQ ID NO: 1298386 - RNA, 19 nt, Homo sapiens
  misc_RNA (1)...(19): siRNA sense strand
uacaaauggcuggaaauug

SEQ ID NO: 1298387 - RNA, 19 nt, Homo sapiens
  misc_RNA (1)...(19): siRNA sense strand
acaaauggcuggaaauuga

SEQ ID NO: 1298388 - RNA, 19 nt, Homo sapiens
  misc_RNA (1)...(19): siRNA sense strand
gaaauugaauccaguugug

SEQ ID NO: 1298389 - RNA, 19 nt, Homo sapiens
  misc_RNA (1)...(19): siRNA sense strand
gcacguguaaugacaaaua

SEQ ID NO: 1298390 - RNA, 19 nt, Homo sapiens
  misc_RNA (1)...(19): siRNA sense strand
ggagggaucuuccauguac

SEQ ID NO: 1298391 - RNA, 19 nt, Homo sapiens
  misc_RNA (1)...(19): siRNA sense strand
aaagggauuugguuucgua

SEQ ID NO: 1298392 - RNA, 19 nt, Homo sapiens
  misc_RNA (1)...(19): siRNA sense strand
ccaguucacuuguauauac

SEQ ID NO: 1298393 - RNA, 19 nt, Homo sapiens
  misc_RNA (1)...(19): siRNA sense strand
cgucaacccuuauacaaau

SEQ ID NO: 1298394 - RNA, 19 nt, Homo sapiens
  misc_RNA (1)...(19): siRNA sense strand
gauuugguuucguaacuuu

SEQ ID NO: 1298395 - RNA, 19 nt, Homo sapiens
  misc_RNA (1)...(19): siRNA sense strand
ggaccucagacaaauguuu

SEQ ID NO: 1298396 - RNA, 19 nt, Homo sapiens
  misc_RNA (1)...(19): siRNA sense strand
caggagggaucuuccaugu

SEQ ID NO: 1298397 - RNA, 19 nt, Homo sapiens
  misc_RNA (1)...(19): siRNA sense strand
gauccggaccucagacaaa

SEQ ID NO: 1298398 - RNA, 19 nt, Homo sapiens
  misc_RNA (1)...(19): siRNA sense strand
ggacagggcgagggagaaa

SEQ ID NO: 1298399 - RNA, 19 nt, Homo sapiens
  misc_RNA (1)...(19): siRNA sense strand
cacguguaaugacaaauaa

SEQ ID NO: 1298400 - RNA, 19 nt, Homo sapiens
  misc_RNA (1)...(19): siRNA sense strand
ggauuugguuucguaacuu

SEQ ID NO: 1298401 - RNA, 19 nt, Homo sapiens
  misc_RNA (1)...(19): siRNA sense strand
ggaaauugaauccaguugu

SEQ ID NO: 1298402 - RNA, 19 nt, Homo sapiens
  misc_RNA (1)...(19): siRNA sense strand
cagcacguguaaugacaaa

SEQ ID NO: 1298403 - RNA, 19 nt, Homo sapiens
  misc_RNA (1)...(19): siRNA sense strand
aaaagaccgucaacccuua

SEQ ID NO: 1298404 - RNA, 19 nt, Homo sapiens
  misc_RNA (1)...(19): siRNA sense strand
gggauuugguuucguaacu

SEQ ID NO: 1298405 - RNA, 19 nt, Homo sapiens
  misc_RNA (1)...(19): siRNA sense strand
cuacagucccgaauucuau

SEQ ID NO: 1298406 - RNA, 19 nt, Homo sapiens
  misc_RNA (1)...(19): siRNA sense strand
uguauauacuucugcaaug

SEQ ID NO: 1298407 - RNA, 19 nt, Homo sapiens
  misc_RNA (1)...(19): siRNA sense strand
uuauacaaauggcuggaaa

SEQ ID NO: 1298408 - RNA, 19 nt, Homo sapiens
  misc_RNA (1)...(19): siRNA sense strand
ggcugcaugucuccaauau

SEQ ID NO: 1298409 - RNA, 19 nt, Homo sapiens
  misc_RNA (1)...(19): siRNA sense strand
ucacuuguauauacuucug

SEQ ID NO: 1298410 - RNA, 19 nt, Homo sapiens
  misc_RNA (1)...(19): siRNA sense strand
caaauggcuggaaauugaa

SEQ ID NO: 1298411 - RNA, 19 nt, Homo sapiens
  misc_RNA (1)...(19): siRNA sense strand
guauauacuucugcaaugc

SEQ ID NO: 1298412 - RNA, 19 nt, Homo sapiens
  misc_RNA (1)...(19): siRNA sense strand
aaaucgagguaaauaaugc

SEQ ID NO: 1298413 - RNA, 19 nt, Homo sapiens
  misc_RNA (1)...(19): siRNA sense strand
agucuacagucccgaauuc

SEQ ID NO: 1298414 - RNA, 19 nt, Homo sapiens
  misc_RNA (1)...(19): siRNA sense strand
auacaaauggcuggaaauu

SEQ ID NO: 1298415 - RNA, 19 nt, Homo sapiens
  misc_RNA (1)...(19): siRNA sense strand
cacagcacguguaaugaca

SEQ ID NO: 1298416 - RNA, 19 nt, Homo sapiens
  misc_RNA (1)...(19): siRNA sense strand
cugcaugucuccaauaucc

SEQ ID NO: 1298417 - RNA, 19 nt, Homo sapiens
  misc_RNA (1)...(19): siRNA sense strand
guucacuuguauauacuuc

SEQ ID NO: 1298418 - RNA, 19 nt, Homo sapiens
  misc_RNA (1)...(19): siRNA sense strand
acagggcgagggagaaauu

SEQ ID NO: 1298419 - RNA, 19 nt, Homo sapiens
  misc_RNA (1)...(19): siRNA sense strand
agacacaaccuucugaaaa

SEQ ID NO: 1298420 - RNA, 19 nt, Homo sapiens
  misc_RNA (1)...(19): siRNA sense strand
gcacacauuaaaccuguac

SEQ ID NO: 1298421 - RNA, 19 nt, Homo sapiens
  misc_RNA (1)...(19): siRNA sense strand
ugccacagcacguguaaug

SEQ ID NO: 1298422 - RNA, 19 nt, Homo sapiens
  misc_RNA (1)...(19): siRNA sense strand
gacacaaccuucugaaaac

SEQ ID NO: 1298423 - RNA, 19 nt, Homo sapiens
  misc_RNA (1)...(19): siRNA sense strand
gcaccgccacacagacaga

SEQ ID NO: 1298424 - RNA, 19 nt, Homo sapiens
  misc_RNA (1)...(19): siRNA sense strand
gaccgucaacccuuauaca

SEQ ID NO: 1298425 - RNA, 19 nt, Homo sapiens
  misc_RNA (1)...(19): siRNA sense strand
ggucgcaccguguacaaca

SEQ ID NO: 1298426 - RNA, 19 nt, Homo sapiens
  misc_RNA (1)...(19): siRNA sense strand
gucaacccuuauacaaaug

SEQ ID NO: 1298427 - RNA, 19 nt, Homo sapiens
  misc_RNA (1)...(19): siRNA sense strand
gcgaggcucaaagggauuu

SEQ ID NO: 1298428 - RNA, 19 nt, Homo sapiens
  misc_RNA (1)...(19): siRNA sense strand
ccgucaacccuuauacaaa

SEQ ID NO: 1298429 - RNA, 19 nt, Homo sapiens
  misc_RNA (1)...(19): siRNA sense strand
gggcgagggagaaauuaca

SEQ ID NO: 1298430 - RNA, 19 nt, Homo sapiens
  misc_RNA (1)...(19): siRNA sense strand
ccacagcacguguaaugac

SEQ ID NO: 1298431 - RNA, 19 nt, Homo sapiens
  misc_RNA (1)...(19): siRNA sense strand
uacaaauggcuggaaauug

SEQ ID NO: 1298432 - RNA, 19 nt, Homo sapiens
  misc_RNA (1)...(19): siRNA sense strand
gaacuucuuggaacuuuaa

SEQ ID NO: 1298433 - RNA, 19 nt, Homo sapiens
  misc_RNA (1)...(19): siRNA sense strand
ggaacuucuuggaacuuua

SEQ ID NO: 1298434 - RNA, 19 nt, Homo sapiens
  misc_RNA (1)...(19): siRNA sense strand
gggaacuucuuggaacuuu

SEQ ID NO: 1298435 - RNA, 19 nt, Homo sapiens
  misc_RNA (1)...(19): siRNA sense strand
ggagucuacaccuauauuu

SEQ ID NO: 1298436 - RNA, 19 nt, Homo sapiens
  misc_RNA (1)...(19): siRNA sense strand
gcagccacaccgaagauuu

SEQ ID NO: 1298437 - RNA, 19 nt, Homo sapiens
  misc_RNA (1)...(19): siRNA sense strand
gagaaucacgagcaacaug

SEQ ID NO: 1298438 - RNA, 19 nt, Homo sapiens
  misc_RNA (1)...(19): siRNA sense strand
ccuggagucuacaccuaua

SEQ ID NO: 1298439 - RNA, 19 nt, Homo sapiens
  misc_RNA (1)...(19): siRNA sense strand
gagucuacaccuauauuug

SEQ ID NO: 1298440 - RNA, 19 nt, Homo sapiens
  misc_RNA (1)...(19): siRNA sense strand
gggagaaucacgagcaaca

SEQ ID NO: 1298441 - RNA, 19 nt, Homo sapiens
  misc_RNA (1)...(19): siRNA sense strand
uggcaucccuggagucuac

SEQ ID NO: 1298442 - RNA, 19 nt, Homo sapiens
  misc_RNA (1)...(19): siRNA sense strand
caccgaagauuuucaaugg

SEQ ID NO: 1298443 - RNA, 19 nt, Homo sapiens
  misc_RNA (1)...(19): siRNA sense strand
ucccuggagucuacaccua

SEQ ID NO: 1298444 - RNA, 19 nt, Homo sapiens
  misc_RNA (1)...(19): siRNA sense strand
ggagucuacaccuauauuu

SEQ ID NO: 1298445 - RNA, 19 nt, Homo sapiens
  misc_RNA (1)...(19): siRNA sense strand
gcagccacaccgaagauuu

SEQ ID NO: 1298446 - RNA, 19 nt, Homo sapiens
  misc_RNA (1)...(19): siRNA sense strand
gagaaucacgagcaacaug

SEQ ID NO: 1298447 - RNA, 19 nt, Homo sapiens
  misc_RNA (1)...(19): siRNA sense strand
ccuggagucuacaccuaua

SEQ ID NO: 1298448 - RNA, 19 nt, Homo sapiens
  misc_RNA (1)...(19): siRNA sense strand
gagucuacaccuauauuug

SEQ ID NO: 1298449 - RNA, 19 nt, Homo sapiens
  misc_RNA (1)...(19): siRNA sense strand
gggagaaucacgagcaaca

SEQ ID NO: 1298450 - RNA, 19 nt, Homo sapiens
  misc_RNA (1)...(19): siRNA sense strand
uggcaucccuggagucuac

SEQ ID NO: 1298451 - RNA, 19 nt, Homo sapiens
  misc_RNA (1)...(19): siRNA sense strand
caccgaagauuuucaaugg

SEQ ID NO: 1298452 - RNA, 19 nt, Homo sapiens
  misc_RNA (1)...(19): siRNA sense strand
ucccuggagucuacaccua

SEQ ID NO: 1298453 - RNA, 19 nt, Homo sapiens
  misc_RNA (1)...(19): siRNA sense strand
gcagccacaccgaagauuu

SEQ ID NO: 1298454 - RNA, 19 nt, Homo sapiens
  misc_RNA (1)...(19): siRNA sense strand
gagaaucacgagcaacaug

SEQ ID NO: 1298455 - RNA, 19 nt, Homo sapiens
  misc_RNA (1)...(19): siRNA sense strand
gggagaaucacgagcaaca

SEQ ID NO: 1298456 - RNA, 19 nt, Homo sapiens
  misc_RNA (1)...(19): siRNA sense strand
caccgaagauuuucaaugg

SEQ ID NO: 1298457 - RNA, 19 nt, Homo sapiens
  misc_RNA (1)...(19): siRNA sense strand
gaacuucuuggaacuuuaa

SEQ ID NO: 1298458 - RNA, 19 nt, Homo sapiens
  misc_RNA (1)...(19): siRNA sense strand
ggaacuucuuggaacuuua

SEQ ID NO: 1298459 - RNA, 19 nt, Homo sapiens
  misc_RNA (1)...(19): siRNA sense strand
gggaacuucuuggaacuuu

SEQ ID NO: 1298460 - RNA, 19 nt, Homo sapiens
  misc_RNA (1)...(19): siRNA sense strand
ggagucuacaccuauauuu

SEQ ID NO: 1298461 - RNA, 19 nt, Homo sapiens
  misc_RNA (1)...(19): siRNA sense strand
gcagccacaccgaagauuu

SEQ ID NO: 1298462 - RNA, 19 nt, Homo sapiens
  misc_RNA (1)...(19): siRNA sense strand
gagaaucacgagcaacaug

SEQ ID NO: 1298463 - RNA, 19 nt, Homo sapiens
  misc_RNA (1)...(19): siRNA sense strand
ccuggagucuacaccuaua

SEQ ID NO: 1298464 - RNA, 19 nt, Homo sapiens
  misc_RNA (1)...(19): siRNA sense strand
gagucuacaccuauauuug

SEQ ID NO: 1298465 - RNA, 19 nt, Homo sapiens
  misc_RNA (1)...(19): siRNA sense strand
gggagaaucacgagcaaca

SEQ ID NO: 1298466 - RNA, 19 nt, Homo sapiens
  misc_RNA (1)...(19): siRNA sense strand
uggcaucccuggagucuac

SEQ ID NO: 1298467 - RNA, 19 nt, Homo sapiens
  misc_RNA (1)...(19): siRNA sense strand
caccgaagauuuucaaugg

SEQ ID NO: 1298468 - RNA, 19 nt, Homo sapiens
  misc_RNA (1)...(19): siRNA sense strand
ucccuggagucuacaccua

SEQ ID NO: 1298469 - RNA, 19 nt, Homo sapiens
  misc_RNA (1)...(19): siRNA sense strand
ggagucuacaccuauauuu

SEQ ID NO: 1298470 - RNA, 19 nt, Homo sapiens
  misc_RNA (1)...(19): siRNA sense strand
gcagccacaccgaagauuu

SEQ ID NO: 1298471 - RNA, 19 nt, Homo sapiens
  misc_RNA (1)...(19): siRNA sense strand
gagaaucacgagcaacaug

SEQ ID NO: 1298472 - RNA, 19 nt, Homo sapiens
  misc_RNA (1)...(19): siRNA sense strand
ccuggagucuacaccuaua

SEQ ID NO: 1298473 - RNA, 19 nt, Homo sapiens
  misc_RNA (1)...(19): siRNA sense strand
gagucuacaccuauauuug

SEQ ID NO: 1298474 - RNA, 19 nt, Homo sapiens
  misc_RNA (1)...(19): siRNA sense strand
gggagaaucacgagcaaca

SEQ ID NO: 1298475 - RNA, 19 nt, Homo sapiens
  misc_RNA (1)...(19): siRNA sense strand
uggcaucccuggagucuac

SEQ ID NO: 1298476 - RNA, 19 nt, Homo sapiens
  misc_RNA (1)...(19): siRNA sense strand
caccgaagauuuucaaugg

SEQ ID NO: 1298477 - RNA, 19 nt, Homo sapiens
  misc_RNA (1)...(19): siRNA sense strand
ucccuggagucuacaccua

SEQ ID NO: 1298478 - RNA, 19 nt, Homo sapiens
  misc_RNA (1)...(19): siRNA sense strand
gcagccacaccgaagauuu

SEQ ID NO: 1298479 - RNA, 19 nt, Homo sapiens
  misc_RNA (1)...(19): siRNA sense strand
gagaaucacgagcaacaug

SEQ ID NO: 1298480 - RNA, 19 nt, Homo sapiens
  misc_RNA (1)...(19): siRNA sense strand
gggagaaucacgagcaaca

SEQ ID NO: 1298481 - RNA, 19 nt, Homo sapiens
  misc_RNA (1)...(19): siRNA sense strand
caccgaagauuuucaaugg

SEQ ID NO: 1298482 - RNA, 19 nt, Homo sapiens
  misc_RNA (1)...(19): siRNA sense strand
ggacaaagccaauuuacga

SEQ ID NO: 1298483 - RNA, 19 nt, Homo sapiens
  misc_RNA (1)...(19): siRNA sense strand
gauugaagcuacuaagaau

SEQ ID NO: 1298484 - RNA, 19 nt, Homo sapiens
  misc_RNA (1)...(19): siRNA sense strand
uaacgagggugucaagaau

SEQ ID NO: 1298485 - RNA, 19 nt, Homo sapiens
  misc_RNA (1)...(19): siRNA sense strand
ccagagacauucagaaagu

SEQ ID NO: 1298486 - RNA, 19 nt, Homo sapiens
  misc_RNA (1)...(19): siRNA sense strand
gaaagugcuuagccuuguu

SEQ ID NO: 1298487 - RNA, 19 nt, Homo sapiens
  misc_RNA (1)...(19): siRNA sense strand
gaccaggccugcuauaucu

SEQ ID NO: 1298488 - RNA, 19 nt, Homo sapiens
  misc_RNA (1)...(19): siRNA sense strand
cagaccagcuccucuauca

SEQ ID NO: 1298489 - RNA, 19 nt, Homo sapiens
  misc_RNA (1)...(19): siRNA sense strand
gcagaccacugaggaaauc

SEQ ID NO: 1298490 - RNA, 19 nt, Homo sapiens
  misc_RNA (1)...(19): siRNA sense strand
caaggaaccacauagagaa

SEQ ID NO: 1298491 - RNA, 19 nt, Homo sapiens
  misc_RNA (1)...(19): siRNA sense strand
ggacgugucuuccauuucc

SEQ ID NO: 1298492 - RNA, 19 nt, Homo sapiens
  misc_RNA (1)...(19): siRNA sense strand
caucguggacaaccuaaua

SEQ ID NO: 1298493 - RNA, 19 nt, Homo sapiens
  misc_RNA (1)...(19): siRNA sense strand
gggccaagaugauccuguu

SEQ ID NO: 1298494 - RNA, 19 nt, Homo sapiens
  misc_RNA (1)...(19): siRNA sense strand
ccaaggaaccacauagaga

SEQ ID NO: 1298495 - RNA, 19 nt, Homo sapiens
  misc_RNA (1)...(19): siRNA sense strand
guaacgagggugucaagaa

SEQ ID NO: 1298496 - RNA, 19 nt, Homo sapiens
  misc_RNA (1)...(19): siRNA sense strand
ggaaugaugccaaggucuu

SEQ ID NO: 1298497 - RNA, 19 nt, Homo sapiens
  misc_RNA (1)...(19): siRNA sense strand
gagauugaagcuacuaaga

SEQ ID NO: 1298498 - RNA, 19 nt, Homo sapiens
  misc_RNA (1)...(19): siRNA sense strand
acgagggugucaagaauuu

SEQ ID NO: 1298499 - RNA, 19 nt, Homo sapiens
  misc_RNA (1)...(19): siRNA sense strand
gagcccgacugagcacuaa

SEQ ID NO: 1298500 - RNA, 19 nt, Homo sapiens
  misc_RNA (1)...(19): siRNA sense strand
acaaagaccaggccugcua

SEQ ID NO: 1298501 - RNA, 19 nt, Homo sapiens
  misc_RNA (1)...(19): siRNA sense strand
caagacgagugcguucuga

SEQ ID NO: 1298502 - RNA, 19 nt, Homo sapiens
  misc_RNA (1)...(19): siRNA sense strand
caagaccaaguuaauagaa

SEQ ID NO: 1298503 - RNA, 19 nt, Homo sapiens
  misc_RNA (1)...(19): siRNA sense strand
caccaagaccaaguuaaua

SEQ ID NO: 1298504 - RNA, 19 nt, Homo sapiens
  misc_RNA (1)...(19): siRNA sense strand
gaucuucaugaaugcaaua

SEQ ID NO: 1298505 - RNA, 19 nt, Homo sapiens
  misc_RNA (1)...(19): siRNA sense strand
ucaccaagaccaaguuaau

SEQ ID NO: 1298506 - RNA, 19 nt, Homo sapiens
  misc_RNA (1)...(19): siRNA sense strand
gugcuuagccuuguugaug

SEQ ID NO: 1298507 - RNA, 19 nt, Homo sapiens
  misc_RNA (1)...(19): siRNA sense strand
gcucaccaagaccaaguua

SEQ ID NO: 1298508 - RNA, 19 nt, Homo sapiens
  misc_RNA (1)...(19): siRNA sense strand
aaagagagugguuguggaa

SEQ ID NO: 1298509 - RNA, 19 nt, Homo sapiens
  misc_RNA (1)...(19): siRNA sense strand
agaaagugcuuagccuugu

SEQ ID NO: 1298510 - RNA, 19 nt, Homo sapiens
  misc_RNA (1)...(19): siRNA sense strand
agaugauccuguuugcuuu

SEQ ID NO: 1298511 - RNA, 19 nt, Homo sapiens
  misc_RNA (1)...(19): siRNA sense strand
gagcauccgcuguacaaag

SEQ ID NO: 1298512 - RNA, 19 nt, Homo sapiens
  misc_RNA (1)...(19): siRNA sense strand
cagcuccucuaucagcauu

SEQ ID NO: 1298513 - RNA, 19 nt, Homo sapiens
  misc_RNA (1)...(19): siRNA sense strand
ggaaccacauagagaacca

SEQ ID NO: 1298514 - RNA, 19 nt, Homo sapiens
  misc_RNA (1)...(19): siRNA sense strand
ccaagaugauccuguuugc

SEQ ID NO: 1298515 - RNA, 19 nt, Homo sapiens
  misc_RNA (1)...(19): siRNA sense strand
ggucaucguggacaaccua

SEQ ID NO: 1298516 - RNA, 19 nt, Homo sapiens
  misc_RNA (1)...(19): siRNA sense strand
cagagacauucagaaaguu

SEQ ID NO: 1298517 - RNA, 19 nt, Homo sapiens
  misc_RNA (1)...(19): siRNA sense strand
ccaagaccaaguuaauaga

SEQ ID NO: 1298518 - RNA, 19 nt, Homo sapiens
  misc_RNA (1)...(19): siRNA sense strand
ugucuuccauuuccuagug

SEQ ID NO: 1298519 - RNA, 19 nt, Homo sapiens
  misc_RNA (1)...(19): siRNA sense strand
aagaugauccuguuugcuu

SEQ ID NO: 1298520 - RNA, 19 nt, Homo sapiens
  misc_RNA (1)...(19): siRNA sense strand
aggaggaucuguguccaaa

SEQ ID NO: 1298521 - RNA, 19 nt, Homo sapiens
  misc_RNA (1)...(19): siRNA sense strand
gccaagaugauccuguuug

SEQ ID NO: 1298522 - RNA, 19 nt, Homo sapiens
  misc_RNA (1)...(19): siRNA sense strand
agcauccgcuguacaaaga

SEQ ID NO: 1298523 - RNA, 19 nt, Homo sapiens
  misc_RNA (1)...(19): siRNA sense strand
ccaggccugcuauaucuuu

SEQ ID NO: 1298524 - RNA, 19 nt, Homo sapiens
  misc_RNA (1)...(19): siRNA sense strand
agauugaagcuacuaagaa

SEQ ID NO: 1298525 - RNA, 19 nt, Homo sapiens
  misc_RNA (1)...(19): siRNA sense strand
gcuacaaggacccaagguu

SEQ ID NO: 1298526 - RNA, 19 nt, Homo sapiens
  misc_RNA (1)...(19): siRNA sense strand
caaagaccaggccugcuau

SEQ ID NO: 1298527 - RNA, 19 nt, Homo sapiens
  misc_RNA (1)...(19): siRNA sense strand
gacuggagcccaucaccuu

SEQ ID NO: 1298528 - RNA, 19 nt, Homo sapiens
  misc_RNA (1)...(19): siRNA sense strand
gaagcuacuaagaaucaug

SEQ ID NO: 1298529 - RNA, 19 nt, Homo sapiens
  misc_RNA (1)...(19): siRNA sense strand
uggauaggguguacgagau

SEQ ID NO: 1298530 - RNA, 19 nt, Homo sapiens
  misc_RNA (1)...(19): siRNA sense strand
gauccaaggaaccacauag

SEQ ID NO: 1298531 - RNA, 19 nt, Homo sapiens
  misc_RNA (1)...(19): siRNA sense strand
gacgagugcguucugaaug

SEQ ID NO: 1298532 - RNA, 19 nt, Homo sapiens
  misc_RNA (1)...(19): siRNA sense strand
ccacauagagaaccaagac

SEQ ID NO: 1298533 - RNA, 19 nt, Homo sapiens
  misc_RNA (1)...(19): siRNA sense strand
acgagugcguucugaaugu

SEQ ID NO: 1298534 - RNA, 19 nt, Homo sapiens
  misc_RNA (1)...(19): siRNA sense strand
uaucacccaucaucgaucu

SEQ ID NO: 1298535 - RNA, 19 nt, Homo sapiens
  misc_RNA (1)...(19): siRNA sense strand
ggagcccgacugagcacua

SEQ ID NO: 1298536 - RNA, 19 nt, Homo sapiens
  misc_RNA (1)...(19): siRNA sense strand
agagacauucagaaaguuu

SEQ ID NO: 1298537 - RNA, 19 nt, Homo sapiens
  misc_RNA (1)...(19): siRNA sense strand
gcuuagccuuguugaugau

SEQ ID NO: 1298538 - RNA, 19 nt, Homo sapiens
  misc_RNA (1)...(19): siRNA sense strand
ggagauugaagcuacuaag

SEQ ID NO: 1298539 - RNA, 19 nt, Homo sapiens
  misc_RNA (1)...(19): siRNA sense strand
ugcuuagccuuguugauga

SEQ ID NO: 1298540 - RNA, 19 nt, Homo sapiens
  misc_RNA (1)...(19): siRNA sense strand
ccauaucacccaucaucga

SEQ ID NO: 1298541 - RNA, 19 nt, Homo sapiens
  misc_RNA (1)...(19): siRNA sense strand
acaaggacccaagguucua

SEQ ID NO: 1298542 - RNA, 19 nt, Homo sapiens
  misc_RNA (1)...(19): siRNA sense strand
guuucaagccagagacauu

SEQ ID NO: 1298543 - RNA, 19 nt, Homo sapiens
  misc_RNA (1)...(19): siRNA sense strand
ggauaggguguacgagauc

SEQ ID NO: 1298544 - RNA, 19 nt, Homo sapiens
  misc_RNA (1)...(19): siRNA sense strand
uuccuaguguuucaacuga

SEQ ID NO: 1298545 - RNA, 19 nt, Homo sapiens
  misc_RNA (1)...(19): siRNA sense strand
aaagaccaggccugcuaua

SEQ ID NO: 1298546 - RNA, 19 nt, Homo sapiens
  misc_RNA (1)...(19): siRNA sense strand
gaggagauugaagcuacua

SEQ ID NO: 1298547 - RNA, 19 nt, Homo sapiens
  misc_RNA (1)...(19): siRNA sense strand
cgagugcguucugaaugug

SEQ ID NO: 1298548 - RNA, 19 nt, Homo sapiens
  misc_RNA (1)...(19): siRNA sense strand
agaccaggccugcuauauc

SEQ ID NO: 1298549 - RNA, 19 nt, Homo sapiens
  misc_RNA (1)...(19): siRNA sense strand
agccagagacauucagaaa

SEQ ID NO: 1298550 - RNA, 19 nt, Homo sapiens
  misc_RNA (1)...(19): siRNA sense strand
uugaagcuacuaagaauca

SEQ ID NO: 1298551 - RNA, 19 nt, Homo sapiens
  misc_RNA (1)...(19): siRNA sense strand
uggccuggguggacucaga

SEQ ID NO: 1298552 - RNA, 19 nt, Homo sapiens
  misc_RNA (1)...(19): siRNA sense strand
aagaccaaguuaauagaag

SEQ ID NO: 1298553 - RNA, 19 nt, Homo sapiens
  misc_RNA (1)...(19): siRNA sense strand
gcuacuaagaaucauguuc

SEQ ID NO: 1298554 - RNA, 19 nt, Homo sapiens
  misc_RNA (1)...(19): siRNA sense strand
cauaucacccaucaucgau

SEQ ID NO: 1298555 - RNA, 19 nt, Homo sapiens
  misc_RNA (1)...(19): siRNA sense strand
agacgagugcguucugaau

SEQ ID NO: 1298556 - RNA, 19 nt, Homo sapiens
  misc_RNA (1)...(19): siRNA sense strand
acucagaccagcuccucua

SEQ ID NO: 1298557 - RNA, 19 nt, Homo sapiens
  misc_RNA (1)...(19): siRNA sense strand
gaggaucuguguccaaaac

SEQ ID NO: 1298558 - RNA, 19 nt, Homo sapiens
  misc_RNA (1)...(19): siRNA sense strand
gaaacaggccgucauggaa

SEQ ID NO: 1298559 - RNA, 19 nt, Homo sapiens
  misc_RNA (1)...(19): siRNA sense strand
gaaaugaugagucagaaga

SEQ ID NO: 1298560 - RNA, 19 nt, Homo sapiens
  misc_RNA (1)...(19): siRNA sense strand
gaagcugcaugauguggaa

SEQ ID NO: 1298561 - RNA, 19 nt, Homo sapiens
  misc_RNA (1)...(19): siRNA sense strand
ggaacuggguacuauguag

SEQ ID NO: 1298562 - RNA, 19 nt, Homo sapiens
  misc_RNA (1)...(19): siRNA sense strand
ggagaagcacgccaugaaa

SEQ ID NO: 1298563 - RNA, 19 nt, Homo sapiens
  misc_RNA (1)...(19): siRNA sense strand
uaaccaagcagauggagaa

SEQ ID NO: 1298564 - RNA, 19 nt, Homo sapiens
  misc_RNA (1)...(19): siRNA sense strand
ucaagaggaagauagauuu

SEQ ID NO: 1298565 - RNA, 19 nt, Homo sapiens
  misc_RNA (1)...(19): siRNA sense strand
gaacuggguacuauguaga

SEQ ID NO: 1298566 - RNA, 19 nt, Homo sapiens
  misc_RNA (1)...(19): siRNA sense strand
uagaaaugcucaagaacca

SEQ ID NO: 1298567 - RNA, 19 nt, Homo sapiens
  misc_RNA (1)...(19): siRNA sense strand
aaacaggccgucauggaaa

SEQ ID NO: 1298568 - RNA, 19 nt, Homo sapiens
  misc_RNA (1)...(19): siRNA sense strand
cugggaagcugcaugaugu

SEQ ID NO: 1298569 - RNA, 19 nt, Homo sapiens
  misc_RNA (1)...(19): siRNA sense strand
aaccagcucuucaggagaa

SEQ ID NO: 1298570 - RNA, 19 nt, Homo sapiens
  misc_RNA (1)...(19): siRNA sense strand
cagcucaggcuacugcuaa

SEQ ID NO: 1298571 - RNA, 19 nt, Homo sapiens
  misc_RNA (1)...(19): siRNA sense strand
ccaagcagauggagaaaau

SEQ ID NO: 1298572 - RNA, 19 nt, Homo sapiens
  misc_RNA (1)...(19): siRNA sense strand
ugaaacaggccgucaugga

SEQ ID NO: 1298573 - RNA, 19 nt, Homo sapiens
  misc_RNA (1)...(19): siRNA sense strand
gcucaucgaugugggaacu

SEQ ID NO: 1298574 - RNA, 19 nt, Homo sapiens
  misc_RNA (1)...(19): siRNA sense strand
aaugaugagucagaagauu

SEQ ID NO: 1298575 - RNA, 19 nt, Homo sapiens
  misc_RNA (1)...(19): siRNA sense strand
uaacaucacggagcugaau

SEQ ID NO: 1298576 - RNA, 19 nt, Homo sapiens
  misc_RNA (1)...(19): siRNA sense strand
ugugggaacuggguacuau

SEQ ID NO: 1298577 - RNA, 19 nt, Homo sapiens
  misc_RNA (1)...(19): siRNA sense strand
gagaagcacgccaugaaac

SEQ ID NO: 1298578 - RNA, 19 nt, Homo sapiens
  misc_RNA (1)...(19): siRNA sense strand
cagcugaggaugccaagga

SEQ ID NO: 1298579 - RNA, 19 nt, Homo sapiens
  misc_RNA (1)...(19): siRNA sense strand
gggaacuggguacuaugua

SEQ ID NO: 1298580 - RNA, 19 nt, Homo sapiens
  misc_RNA (1)...(19): siRNA sense strand
gguacuauguagagaagac

SEQ ID NO: 1298581 - RNA, 19 nt, Homo sapiens
  misc_RNA (1)...(19): siRNA sense strand
uggaaaugaugagucagaa

SEQ ID NO: 1298582 - RNA, 19 nt, Homo sapiens
  misc_RNA (1)...(19): siRNA sense strand
agcuagaaaugcucaagaa

SEQ ID NO: 1298583 - RNA, 19 nt, Homo sapiens
  misc_RNA (1)...(19): siRNA sense strand
ggaaaugaugagucagaag

SEQ ID NO: 1298584 - RNA, 19 nt, Homo sapiens
  misc_RNA (1)...(19): siRNA sense strand
aggagaagcacgccaugaa

SEQ ID NO: 1298585 - RNA, 19 nt, Homo sapiens
  misc_RNA (1)...(19): siRNA sense strand
uggaacacgugcucaucga

SEQ ID NO: 1298586 - RNA, 19 nt, Homo sapiens
  misc_RNA (1)...(19): siRNA sense strand
cagcuagaaaugcucaaga

SEQ ID NO: 1298587 - RNA, 19 nt, Homo sapiens
  misc_RNA (1)...(19): siRNA sense strand
agaagcacgccaugaaaca

SEQ ID NO: 1298588 - RNA, 19 nt, Homo sapiens
  misc_RNA (1)...(19): siRNA sense strand
ggaacacgugcucaucgau

SEQ ID NO: 1298589 - RNA, 19 nt, Homo sapiens
  misc_RNA (1)...(19): siRNA sense strand
uagaaaugcucaagaacca

SEQ ID NO: 1298590 - RNA, 19 nt, Homo sapiens
  misc_RNA (1)...(19): siRNA sense strand
uaacaucacggagcugaau

SEQ ID NO: 1298591 - RNA, 19 nt, Homo sapiens
  misc_RNA (1)...(19): siRNA sense strand
agcuagaaaugcucaagaa

SEQ ID NO: 1298592 - RNA, 19 nt, Homo sapiens
  misc_RNA (1)...(19): siRNA sense strand
cagcuagaaaugcucaaga

SEQ ID NO: 1298593 - RNA, 19 nt, Homo sapiens
  misc_RNA (1)...(19): siRNA sense strand
gaaacaggccgucauggaa

SEQ ID NO: 1298594 - RNA, 19 nt, Homo sapiens
  misc_RNA (1)...(19): siRNA sense strand
gaaaugaugagucagaaga

SEQ ID NO: 1298595 - RNA, 19 nt, Homo sapiens
  misc_RNA (1)...(19): siRNA sense strand
gaagcugcaugauguggaa

SEQ ID NO: 1298596 - RNA, 19 nt, Homo sapiens
  misc_RNA (1)...(19): siRNA sense strand
ggaacuggguacuauguag

SEQ ID NO: 1298597 - RNA, 19 nt, Homo sapiens
  misc_RNA (1)...(19): siRNA sense strand
ggagaagcacgccaugaaa

SEQ ID NO: 1298598 - RNA, 19 nt, Homo sapiens
  misc_RNA (1)...(19): siRNA sense strand
uaaccaagcagauggagaa

SEQ ID NO: 1298599 - RNA, 19 nt, Homo sapiens
  misc_RNA (1)...(19): siRNA sense strand
ucaagaggaagauagauuu

SEQ ID NO: 1298600 - RNA, 19 nt, Homo sapiens
  misc_RNA (1)...(19): siRNA sense strand
gaacuggguacuauguaga

SEQ ID NO: 1298601 - RNA, 19 nt, Homo sapiens
  misc_RNA (1)...(19): siRNA sense strand
uagaaaugcucaagaacca

SEQ ID NO: 1298602 - RNA, 19 nt, Homo sapiens
  misc_RNA (1)...(19): siRNA sense strand
aaacaggccgucauggaaa

SEQ ID NO: 1298603 - RNA, 19 nt, Homo sapiens
  misc_RNA (1)...(19): siRNA sense strand
cugggaagcugcaugaugu

SEQ ID NO: 1298604 - RNA, 19 nt, Homo sapiens
  misc_RNA (1)...(19): siRNA sense strand
aaccagcucuucaggagaa

SEQ ID NO: 1298605 - RNA, 19 nt, Homo sapiens
  misc_RNA (1)...(19): siRNA sense strand
cagcucaggcuacugcuaa

SEQ ID NO: 1298606 - RNA, 19 nt, Homo sapiens
  misc_RNA (1)...(19): siRNA sense strand
ccaagcagauggagaaaau

SEQ ID NO: 1298607 - RNA, 19 nt, Homo sapiens
  misc_RNA (1)...(19): siRNA sense strand
ugaaacaggccgucaugga

SEQ ID NO: 1298608 - RNA, 19 nt, Homo sapiens
  misc_RNA (1)...(19): siRNA sense strand
gcucaucgaugugggaacu

SEQ ID NO: 1298609 - RNA, 19 nt, Homo sapiens
  misc_RNA (1)...(19): siRNA sense strand
aaugaugagucagaagauu

SEQ ID NO: 1298610 - RNA, 19 nt, Homo sapiens
  misc_RNA (1)...(19): siRNA sense strand
uaacaucacggagcugaau

SEQ ID NO: 1298611 - RNA, 19 nt, Homo sapiens
  misc_RNA (1)...(19): siRNA sense strand
ugugggaacuggguacuau

SEQ ID NO: 1298612 - RNA, 19 nt, Homo sapiens
  misc_RNA (1)...(19): siRNA sense strand
gagaagcacgccaugaaac

SEQ ID NO: 1298613 - RNA, 19 nt, Homo sapiens
  misc_RNA (1)...(19): siRNA sense strand
cagcugaggaugccaagga

SEQ ID NO: 1298614 - RNA, 19 nt, Homo sapiens
  misc_RNA (1)...(19): siRNA sense strand
gggaacuggguacuaugua

SEQ ID NO: 1298615 - RNA, 19 nt, Homo sapiens
  misc_RNA (1)...(19): siRNA sense strand
gguacuauguagagaagac

SEQ ID NO: 1298616 - RNA, 19 nt, Homo sapiens
  misc_RNA (1)...(19): siRNA sense strand
uggaaaugaugagucagaa

SEQ ID NO: 1298617 - RNA, 19 nt, Homo sapiens
  misc_RNA (1)...(19): siRNA sense strand
agcuagaaaugcucaagaa

SEQ ID NO: 1298618 - RNA, 19 nt, Homo sapiens
  misc_RNA (1)...(19): siRNA sense strand
ggaaaugaugagucagaag

SEQ ID NO: 1298619 - RNA, 19 nt, Homo sapiens
  misc_RNA (1)...(19): siRNA sense strand
aggagaagcacgccaugaa

SEQ ID NO: 1298620 - RNA, 19 nt, Homo sapiens
  misc_RNA (1)...(19): siRNA sense strand
uggaacacgugcucaucga

SEQ ID NO: 1298621 - RNA, 19 nt, Homo sapiens
  misc_RNA (1)...(19): siRNA sense strand
cagcuagaaaugcucaaga

SEQ ID NO: 1298622 - RNA, 19 nt, Homo sapiens
  misc_RNA (1)...(19): siRNA sense strand
agaagcacgccaugaaaca

SEQ ID NO: 1298623 - RNA, 19 nt, Homo sapiens
  misc_RNA (1)...(19): siRNA sense strand
ggaacacgugcucaucgau

SEQ ID NO: 1298624 - RNA, 19 nt, Homo sapiens
  misc_RNA (1)...(19): siRNA sense strand
gaaacaggccgucauggaa

SEQ ID NO: 1298625 - RNA, 19 nt, Homo sapiens
  misc_RNA (1)...(19): siRNA sense strand
gaaaugaugagucagaaga

SEQ ID NO: 1298626 - RNA, 19 nt, Homo sapiens
  misc_RNA (1)...(19): siRNA sense strand
gaagcugcaugauguggaa

SEQ ID NO: 1298627 - RNA, 19 nt, Homo sapiens
  misc_RNA (1)...(19): siRNA sense strand
ggaacuggguacuauguag

SEQ ID NO: 1298628 - RNA, 19 nt, Homo sapiens
  misc_RNA (1)...(19): siRNA sense strand
ggagaagcacgccaugaaa

SEQ ID NO: 1298629 - RNA, 19 nt, Homo sapiens
  misc_RNA (1)...(19): siRNA sense strand
uaaccaagcagauggagaa

SEQ ID NO: 1298630 - RNA, 19 nt, Homo sapiens
  misc_RNA (1)...(19): siRNA sense strand
ucaagaggaagauagauuu

SEQ ID NO: 1298631 - RNA, 19 nt, Homo sapiens
  misc_RNA (1)...(19): siRNA sense strand
gaacuggguacuauguaga

SEQ ID NO: 1298632 - RNA, 19 nt, Homo sapiens
  misc_RNA (1)...(19): siRNA sense strand
uagaaaugcucaagaacca

SEQ ID NO: 1298633 - RNA, 19 nt, Homo sapiens
  misc_RNA (1)...(19): siRNA sense strand
aaacaggccgucauggaaa

SEQ ID NO: 1298634 - RNA, 19 nt, Homo sapiens
  misc_RNA (1)...(19): siRNA sense strand
cugggaagcugcaugaugu

SEQ ID NO: 1298635 - RNA, 19 nt, Homo sapiens
  misc_RNA (1)...(19): siRNA sense strand
aaccagcucuucaggagaa

SEQ ID NO: 1298636 - RNA, 19 nt, Homo sapiens
  misc_RNA (1)...(19): siRNA sense strand
cagcucaggcuacugcuaa

SEQ ID NO: 1298637 - RNA, 19 nt, Homo sapiens
  misc_RNA (1)...(19): siRNA sense strand
ccaagcagauggagaaaau

SEQ ID NO: 1298638 - RNA, 19 nt, Homo sapiens
  misc_RNA (1)...(19): siRNA sense strand
ugaaacaggccgucaugga

SEQ ID NO: 1298639 - RNA, 19 nt, Homo sapiens
  misc_RNA (1)...(19): siRNA sense strand
gcucaucgaugugggaacu

SEQ ID NO: 1298640 - RNA, 19 nt, Homo sapiens
  misc_RNA (1)...(19): siRNA sense strand
aaugaugagucagaagauu

SEQ ID NO: 1298641 - RNA, 19 nt, Homo sapiens
  misc_RNA (1)...(19): siRNA sense strand
uaacaucacggagcugaau

SEQ ID NO: 1298642 - RNA, 19 nt, Homo sapiens
  misc_RNA (1)...(19): siRNA sense strand
ugugggaacuggguacuau

SEQ ID NO: 1298643 - RNA, 19 nt, Homo sapiens
  misc_RNA (1)...(19): siRNA sense strand
gagaagcacgccaugaaac

SEQ ID NO: 1298644 - RNA, 19 nt, Homo sapiens
  misc_RNA (1)...(19): siRNA sense strand
cagcugaggaugccaagga

SEQ ID NO: 1298645 - RNA, 19 nt, Homo sapiens
  misc_RNA (1)...(19): siRNA sense strand
gggaacuggguacuaugua

SEQ ID NO: 1298646 - RNA, 19 nt, Homo sapiens
  misc_RNA (1)...(19): siRNA sense strand
gguacuauguagagaagac

SEQ ID NO: 1298647 - RNA, 19 nt, Homo sapiens
  misc_RNA (1)...(19): siRNA sense strand
uggaaaugaugagucagaa

SEQ ID NO: 1298648 - RNA, 19 nt, Homo sapiens
  misc_RNA (1)...(19): siRNA sense strand
agcuagaaaugcucaagaa

SEQ ID NO: 1298649 - RNA, 19 nt, Homo sapiens
  misc_RNA (1)...(19): siRNA sense strand
ggaaaugaugagucagaag

SEQ ID NO: 1298650 - RNA, 19 nt, Homo sapiens
  misc_RNA (1)...(19): siRNA sense strand
aggagaagcacgccaugaa

SEQ ID NO: 1298651 - RNA, 19 nt, Homo sapiens
  misc_RNA (1)...(19): siRNA sense strand
uggaacacgugcucaucga

SEQ ID NO: 1298652 - RNA, 19 nt, Homo sapiens
  misc_RNA (1)...(19): siRNA sense strand
cagcuagaaaugcucaaga

SEQ ID NO: 1298653 - RNA, 19 nt, Homo sapiens
  misc_RNA (1)...(19): siRNA sense strand
agaagcacgccaugaaaca

SEQ ID NO: 1298654 - RNA, 19 nt, Homo sapiens
  misc_RNA (1)...(19): siRNA sense strand
ggaacacgugcucaucgau

SEQ ID NO: 1298655 - RNA, 19 nt, Homo sapiens
  misc_RNA (1)...(19): siRNA sense strand
uagaaaugcucaagaacca

SEQ ID NO: 1298656 - RNA, 19 nt, Homo sapiens
  misc_RNA (1)...(19): siRNA sense strand
uaacaucacggagcugaau

SEQ ID NO: 1298657 - RNA, 19 nt, Homo sapiens
  misc_RNA (1)...(19): siRNA sense strand
agcuagaaaugcucaagaa

SEQ ID NO: 1298658 - RNA, 19 nt, Homo sapiens
  misc_RNA (1)...(19): siRNA sense strand
cagcuagaaaugcucaaga

SEQ ID NO: 1298659 - RNA, 19 nt, Homo sapiens
  misc_RNA (1)...(19): siRNA sense strand
gaaacaggccgucauggaa

SEQ ID NO: 1298660 - RNA, 19 nt, Homo sapiens
  misc_RNA (1)...(19): siRNA sense strand
gaaaugaugagucagaaga

SEQ ID NO: 1298661 - RNA, 19 nt, Homo sapiens
  misc_RNA (1)...(19): siRNA sense strand
gaagcugcaugauguggaa

SEQ ID NO: 1298662 - RNA, 19 nt, Homo sapiens
  misc_RNA (1)...(19): siRNA sense strand
ggaacuggguacuauguag

SEQ ID NO: 1298663 - RNA, 19 nt, Homo sapiens
  misc_RNA (1)...(19): siRNA sense strand
ggagaagcacgccaugaaa

SEQ ID NO: 1298664 - RNA, 19 nt, Homo sapiens
  misc_RNA (1)...(19): siRNA sense strand
uaaccaagcagauggagaa

SEQ ID NO: 1298665 - RNA, 19 nt, Homo sapiens
  misc_RNA (1)...(19): siRNA sense strand
ucaagaggaagauagauuu

SEQ ID NO: 1298666 - RNA, 19 nt, Homo sapiens
  misc_RNA (1)...(19): siRNA sense strand
gaacuggguacuauguaga

SEQ ID NO: 1298667 - RNA, 19 nt, Homo sapiens
  misc_RNA (1)...(19): siRNA sense strand
uagaaaugcucaagaacca

SEQ ID NO: 1298668 - RNA, 19 nt, Homo sapiens
  misc_RNA (1)...(19): siRNA sense strand
aaacaggccgucauggaaa

SEQ ID NO: 1298669 - RNA, 19 nt, Homo sapiens
  misc_RNA (1)...(19): siRNA sense strand
cugggaagcugcaugaugu

SEQ ID NO: 1298670 - RNA, 19 nt, Homo sapiens
  misc_RNA (1)...(19): siRNA sense strand
aaccagcucuucaggagaa

SEQ ID NO: 1298671 - RNA, 19 nt, Homo sapiens
  misc_RNA (1)...(19): siRNA sense strand
cagcucaggcuacugcuaa

SEQ ID NO: 1298672 - RNA, 19 nt, Homo sapiens
  misc_RNA (1)...(19): siRNA sense strand
ccaagcagauggagaaaau

SEQ ID NO: 1298673 - RNA, 19 nt, Homo sapiens
  misc_RNA (1)...(19): siRNA sense strand
ugaaacaggccgucaugga

SEQ ID NO: 1298674 - RNA, 19 nt, Homo sapiens
  misc_RNA (1)...(19): siRNA sense strand
gcucaucgaugugggaacu

SEQ ID NO: 1298675 - RNA, 19 nt, Homo sapiens
  misc_RNA (1)...(19): siRNA sense strand
aaugaugagucagaagauu

SEQ ID NO: 1298676 - RNA, 19 nt, Homo sapiens
  misc_RNA (1)...(19): siRNA sense strand
uaacaucacggagcugaau

SEQ ID NO: 1298677 - RNA, 19 nt, Homo sapiens
  misc_RNA (1)...(19): siRNA sense strand
ugugggaacuggguacuau

SEQ ID NO: 1298678 - RNA, 19 nt, Homo sapiens
  misc_RNA (1)...(19): siRNA sense strand
gagaagcacgccaugaaac

SEQ ID NO: 1298679 - RNA, 19 nt, Homo sapiens
  misc_RNA (1)...(19): siRNA sense strand
cagcugaggaugccaagga

SEQ ID NO: 1298680 - RNA, 19 nt, Homo sapiens
  misc_RNA (1)...(19): siRNA sense strand
gggaacuggguacuaugua

SEQ ID NO: 1298681 - RNA, 19 nt, Homo sapiens
  misc_RNA (1)...(19): siRNA sense strand
gguacuauguagagaagac

SEQ ID NO: 1298682 - RNA, 19 nt, Homo sapiens
  misc_RNA (1)...(19): siRNA sense strand
uggaaaugaugagucagaa

SEQ ID NO: 1298683 - RNA, 19 nt, Homo sapiens
  misc_RNA (1)...(19): siRNA sense strand
agcuagaaaugcucaagaa

SEQ ID NO: 1298684 - RNA, 19 nt, Homo sapiens
  misc_RNA (1)...(19): siRNA sense strand
ggaaaugaugagucagaag

SEQ ID NO: 1298685 - RNA, 19 nt, Homo sapiens
  misc_RNA (1)...(19): siRNA sense strand
aggagaagcacgccaugaa

SEQ ID NO: 1298686 - RNA, 19 nt, Homo sapiens
  misc_RNA (1)...(19): siRNA sense strand
uggaacacgugcucaucga

SEQ ID NO: 1298687 - RNA, 19 nt, Homo sapiens
  misc_RNA (1)...(19): siRNA sense strand
cagcuagaaaugcucaaga

SEQ ID NO: 1298688 - RNA, 19 nt, Homo sapiens
  misc_RNA (1)...(19): siRNA sense strand
agaagcacgccaugaaaca

SEQ ID NO: 1298689 - RNA, 19 nt, Homo sapiens
  misc_RNA (1)...(19): siRNA sense strand
ggaacacgugcucaucgau

SEQ ID NO: 1298690 - RNA, 19 nt, Homo sapiens
  misc_RNA (1)...(19): siRNA sense strand
gauaagcaaguucagguuu

SEQ ID NO: 1298691 - RNA, 19 nt, Homo sapiens
  misc_RNA (1)...(19): siRNA sense strand
gcagagacagaguucauga

SEQ ID NO: 1298692 - RNA, 19 nt, Homo sapiens
  misc_RNA (1)...(19): siRNA sense strand
gagacagaguucaugaugu

SEQ ID NO: 1298693 - RNA, 19 nt, Homo sapiens
  misc_RNA (1)...(19): siRNA sense strand
cagaguucaugaugucaaa

SEQ ID NO: 1298694 - RNA, 19 nt, Homo sapiens
  misc_RNA (1)...(19): siRNA sense strand
gagaguuacuuugaaacga

SEQ ID NO: 1298695 - RNA, 19 nt, Homo sapiens
  misc_RNA (1)...(19): siRNA sense strand
agaguuacuuugaaacgaa

SEQ ID NO: 1298696 - RNA, 19 nt, Homo sapiens
  misc_RNA (1)...(19): siRNA sense strand
cuggagaguuacuuugaaa

SEQ ID NO: 1298697 - RNA, 19 nt, Homo sapiens
  misc_RNA (1)...(19): siRNA sense strand
caagccgggugucaucuuc

SEQ ID NO: 1298698 - RNA, 19 nt, Homo sapiens
  misc_RNA (1)...(19): siRNA sense strand
auaagcaaguucagguuug

SEQ ID NO: 1298699 - RNA, 19 nt, Homo sapiens
  misc_RNA (1)...(19): siRNA sense strand
ucaagaccaggaagaauug

SEQ ID NO: 1298700 - RNA, 19 nt, Homo sapiens
  misc_RNA (1)...(19): siRNA sense strand
gaugucaaagcuuccauug

SEQ ID NO: 1298701 - RNA, 19 nt, Homo sapiens
  misc_RNA (1)...(19): siRNA sense strand
gaucaagaccaggaagaau

SEQ ID NO: 1298702 - RNA, 19 nt, Homo sapiens
  misc_RNA (1)...(19): siRNA sense strand
ggaucaagaccaggaagaa

SEQ ID NO: 1298703 - RNA, 19 nt, Homo sapiens
  misc_RNA (1)...(19): siRNA sense strand
ccuggagaguuacuuugaa

SEQ ID NO: 1298704 - RNA, 19 nt, Homo sapiens
  misc_RNA (1)...(19): siRNA sense strand
cacaaaagaugcagagaca

SEQ ID NO: 1298705 - RNA, 19 nt, Homo sapiens
  misc_RNA (1)...(19): siRNA sense strand
guucagguuugcgugagaa

SEQ ID NO: 1298706 - RNA, 19 nt, Homo sapiens
  misc_RNA (1)...(19): siRNA sense strand
agagacagaguucaugaug

SEQ ID NO: 1298707 - RNA, 19 nt, Homo sapiens
  misc_RNA (1)...(19): siRNA sense strand
caaaagaugcagagacaga

SEQ ID NO: 1298708 - RNA, 19 nt, Homo sapiens
  misc_RNA (1)...(19): siRNA sense strand
ccagugauaagcaaguuca

SEQ ID NO: 1298709 - RNA, 19 nt, Homo sapiens
  misc_RNA (1)...(19): siRNA sense strand
gcuuguuacugcccuugga

SEQ ID NO: 1298710 - RNA, 19 nt, Homo sapiens
  misc_RNA (1)...(19): siRNA sense strand
ggagaguuacuuugaaacg

SEQ ID NO: 1298711 - RNA, 19 nt, Homo sapiens
  misc_RNA (1)...(19): siRNA sense strand
gauaagcaaguucagguuu

SEQ ID NO: 1298712 - RNA, 19 nt, Homo sapiens
  misc_RNA (1)...(19): siRNA sense strand
gcagagacagaguucauga

SEQ ID NO: 1298713 - RNA, 19 nt, Homo sapiens
  misc_RNA (1)...(19): siRNA sense strand
gagacagaguucaugaugu

SEQ ID NO: 1298714 - RNA, 19 nt, Homo sapiens
  misc_RNA (1)...(19): siRNA sense strand
cagaguucaugaugucaaa

SEQ ID NO: 1298715 - RNA, 19 nt, Homo sapiens
  misc_RNA (1)...(19): siRNA sense strand
gagaguuacuuugaaacga

SEQ ID NO: 1298716 - RNA, 19 nt, Homo sapiens
  misc_RNA (1)...(19): siRNA sense strand
agaguuacuuugaaacgaa

SEQ ID NO: 1298717 - RNA, 19 nt, Homo sapiens
  misc_RNA (1)...(19): siRNA sense strand
cuggagaguuacuuugaaa

SEQ ID NO: 1298718 - RNA, 19 nt, Homo sapiens
  misc_RNA (1)...(19): siRNA sense strand
caagccgggugucaucuuc

SEQ ID NO: 1298719 - RNA, 19 nt, Homo sapiens
  misc_RNA (1)...(19): siRNA sense strand
auaagcaaguucagguuug

SEQ ID NO: 1298720 - RNA, 19 nt, Homo sapiens
  misc_RNA (1)...(19): siRNA sense strand
ucaagaccaggaagaauug

SEQ ID NO: 1298721 - RNA, 19 nt, Homo sapiens
  misc_RNA (1)...(19): siRNA sense strand
gaugucaaagcuuccauug

SEQ ID NO: 1298722 - RNA, 19 nt, Homo sapiens
  misc_RNA (1)...(19): siRNA sense strand
gaucaagaccaggaagaau

SEQ ID NO: 1298723 - RNA, 19 nt, Homo sapiens
  misc_RNA (1)...(19): siRNA sense strand
ggaucaagaccaggaagaa

SEQ ID NO: 1298724 - RNA, 19 nt, Homo sapiens
  misc_RNA (1)...(19): siRNA sense strand
ccuggagaguuacuuugaa

SEQ ID NO: 1298725 - RNA, 19 nt, Homo sapiens
  misc_RNA (1)...(19): siRNA sense strand
cacaaaagaugcagagaca

SEQ ID NO: 1298726 - RNA, 19 nt, Homo sapiens
  misc_RNA (1)...(19): siRNA sense strand
guucagguuugcgugagaa

SEQ ID NO: 1298727 - RNA, 19 nt, Homo sapiens
  misc_RNA (1)...(19): siRNA sense strand
agagacagaguucaugaug

SEQ ID NO: 1298728 - RNA, 19 nt, Homo sapiens
  misc_RNA (1)...(19): siRNA sense strand
caaaagaugcagagacaga

SEQ ID NO: 1298729 - RNA, 19 nt, Homo sapiens
  misc_RNA (1)...(19): siRNA sense strand
ccagugauaagcaaguuca

SEQ ID NO: 1298730 - RNA, 19 nt, Homo sapiens
  misc_RNA (1)...(19): siRNA sense strand
gcuuguuacugcccuugga

SEQ ID NO: 1298731 - RNA, 19 nt, Homo sapiens
  misc_RNA (1)...(19): siRNA sense strand
ggagaguuacuuugaaacg

SEQ ID NO: 1298732 - RNA, 19 nt, Homo sapiens
  misc_RNA (1)...(19): siRNA sense strand
gauaagcaaguucagguuu

SEQ ID NO: 1298733 - RNA, 19 nt, Homo sapiens
  misc_RNA (1)...(19): siRNA sense strand
gcagagacagaguucauga

SEQ ID NO: 1298734 - RNA, 19 nt, Homo sapiens
  misc_RNA (1)...(19): siRNA sense strand
gagacagaguucaugaugu

SEQ ID NO: 1298735 - RNA, 19 nt, Homo sapiens
  misc_RNA (1)...(19): siRNA sense strand
cagaguucaugaugucaaa

SEQ ID NO: 1298736 - RNA, 19 nt, Homo sapiens
  misc_RNA (1)...(19): siRNA sense strand
gagaguuacuuugaaacga

SEQ ID NO: 1298737 - RNA, 19 nt, Homo sapiens
  misc_RNA (1)...(19): siRNA sense strand
agaguuacuuugaaacgaa

SEQ ID NO: 1298738 - RNA, 19 nt, Homo sapiens
  misc_RNA (1)...(19): siRNA sense strand
cuggagaguuacuuugaaa

SEQ ID NO: 1298739 - RNA, 19 nt, Homo sapiens
  misc_RNA (1)...(19): siRNA sense strand
caagccgggugucaucuuc

SEQ ID NO: 1298740 - RNA, 19 nt, Homo sapiens
  misc_RNA (1)...(19): siRNA sense strand
auaagcaaguucagguuug

SEQ ID NO: 1298741 - RNA, 19 nt, Homo sapiens
  misc_RNA (1)...(19): siRNA sense strand
ucaagaccaggaagaauug

SEQ ID NO: 1298742 - RNA, 19 nt, Homo sapiens
  misc_RNA (1)...(19): siRNA sense strand
gaugucaaagcuuccauug

SEQ ID NO: 1298743 - RNA, 19 nt, Homo sapiens
  misc_RNA (1)...(19): siRNA sense strand
gaucaagaccaggaagaau

SEQ ID NO: 1298744 - RNA, 19 nt, Homo sapiens
  misc_RNA (1)...(19): siRNA sense strand
ggaucaagaccaggaagaa

SEQ ID NO: 1298745 - RNA, 19 nt, Homo sapiens
  misc_RNA (1)...(19): siRNA sense strand
ccuggagaguuacuuugaa

SEQ ID NO: 1298746 - RNA, 19 nt, Homo sapiens
  misc_RNA (1)...(19): siRNA sense strand
cacaaaagaugcagagaca

SEQ ID NO: 1298747 - RNA, 19 nt, Homo sapiens
  misc_RNA (1)...(19): siRNA sense strand
guucagguuugcgugagaa

SEQ ID NO: 1298748 - RNA, 19 nt, Homo sapiens
  misc_RNA (1)...(19): siRNA sense strand
agagacagaguucaugaug

SEQ ID NO: 1298749 - RNA, 19 nt, Homo sapiens
  misc_RNA (1)...(19): siRNA sense strand
caaaagaugcagagacaga

SEQ ID NO: 1298750 - RNA, 19 nt, Homo sapiens
  misc_RNA (1)...(19): siRNA sense strand
ccagugauaagcaaguuca

SEQ ID NO: 1298751 - RNA, 19 nt, Homo sapiens
  misc_RNA (1)...(19): siRNA sense strand
gcuuguuacugcccuugga

SEQ ID NO: 1298752 - RNA, 19 nt, Homo sapiens
  misc_RNA (1)...(19): siRNA sense strand
ggagaguuacuuugaaacg

SEQ ID NO: 1298753 - RNA, 19 nt, Homo sapiens
  misc_RNA (1)...(19): siRNA sense strand
gauaagcaaguucagguuu

SEQ ID NO: 1298754 - RNA, 19 nt, Homo sapiens
  misc_RNA (1)...(19): siRNA sense strand
gcagagacagaguucauga

SEQ ID NO: 1298755 - RNA, 19 nt, Homo sapiens
  misc_RNA (1)...(19): siRNA sense strand
gagacagaguucaugaugu

SEQ ID NO: 1298756 - RNA, 19 nt, Homo sapiens
  misc_RNA (1)...(19): siRNA sense strand
cagaguucaugaugucaaa

SEQ ID NO: 1298757 - RNA, 19 nt, Homo sapiens
  misc_RNA (1)...(19): siRNA sense strand
gagaguuacuuugaaacga

SEQ ID NO: 1298758 - RNA, 19 nt, Homo sapiens
  misc_RNA (1)...(19): siRNA sense strand
agaguuacuuugaaacgaa

SEQ ID NO: 1298759 - RNA, 19 nt, Homo sapiens
  misc_RNA (1)...(19): siRNA sense strand
cuggagaguuacuuugaaa

SEQ ID NO: 1298760 - RNA, 19 nt, Homo sapiens
  misc_RNA (1)...(19): siRNA sense strand
caagccgggugucaucuuc

SEQ ID NO: 1298761 - RNA, 19 nt, Homo sapiens
  misc_RNA (1)...(19): siRNA sense strand
auaagcaaguucagguuug

SEQ ID NO: 1298762 - RNA, 19 nt, Homo sapiens
  misc_RNA (1)...(19): siRNA sense strand
ucaagaccaggaagaauug

SEQ ID NO: 1298763 - RNA, 19 nt, Homo sapiens
  misc_RNA (1)...(19): siRNA sense strand
gaugucaaagcuuccauug

SEQ ID NO: 1298764 - RNA, 19 nt, Homo sapiens
  misc_RNA (1)...(19): siRNA sense strand
gaucaagaccaggaagaau

SEQ ID NO: 1298765 - RNA, 19 nt, Homo sapiens
  misc_RNA (1)...(19): siRNA sense strand
ggaucaagaccaggaagaa

SEQ ID NO: 1298766 - RNA, 19 nt, Homo sapiens
  misc_RNA (1)...(19): siRNA sense strand
ccuggagaguuacuuugaa

SEQ ID NO: 1298767 - RNA, 19 nt, Homo sapiens
  misc_RNA (1)...(19): siRNA sense strand
cacaaaagaugcagagaca

SEQ ID NO: 1298768 - RNA, 19 nt, Homo sapiens
  misc_RNA (1)...(19): siRNA sense strand
guucagguuugcgugagaa

SEQ ID NO: 1298769 - RNA, 19 nt, Homo sapiens
  misc_RNA (1)...(19): siRNA sense strand
agagacagaguucaugaug

SEQ ID NO: 1298770 - RNA, 19 nt, Homo sapiens
  misc_RNA (1)...(19): siRNA sense strand
caaaagaugcagagacaga

SEQ ID NO: 1298771 - RNA, 19 nt, Homo sapiens
  misc_RNA (1)...(19): siRNA sense strand
ccagugauaagcaaguuca

SEQ ID NO: 1298772 - RNA, 19 nt, Homo sapiens
  misc_RNA (1)...(19): siRNA sense strand
gcuuguuacugcccuugga

SEQ ID NO: 1298773 - RNA, 19 nt, Homo sapiens
  misc_RNA (1)...(19): siRNA sense strand
ggagaguuacuuugaaacg

SEQ ID NO: 1298774 - RNA, 19 nt, Homo sapiens
  misc_RNA (1)...(19): siRNA sense strand
ggaacaagaugccaagcuu

SEQ ID NO: 1298775 - RNA, 19 nt, Homo sapiens
  misc_RNA (1)...(19): siRNA sense strand
gaguagaguuugaagagaa

SEQ ID NO: 1298776 - RNA, 19 nt, Homo sapiens
  misc_RNA (1)...(19): siRNA sense strand
gcaaauacaaccucuaugg

SEQ ID NO: 1298777 - RNA, 19 nt, Homo sapiens
  misc_RNA (1)...(19): siRNA sense strand
uagaagguauagcagauuu

SEQ ID NO: 1298778 - RNA, 19 nt, Homo sapiens
  misc_RNA (1)...(19): siRNA sense strand
cuacuucccugccuuugaa

SEQ ID NO: 1298779 - RNA, 19 nt, Homo sapiens
  misc_RNA (1)...(19): siRNA sense strand
caaggaagccucccaugga

SEQ ID NO: 1298780 - RNA, 19 nt, Homo sapiens
  misc_RNA (1)...(19): siRNA sense strand
ggaguagaguuugaagaga

SEQ ID NO: 1298781 - RNA, 19 nt, Homo sapiens
  misc_RNA (1)...(19): siRNA sense strand
caaggaagauuuucagguu

SEQ ID NO: 1298782 - RNA, 19 nt, Homo sapiens
  misc_RNA (1)...(19): siRNA sense strand
uuagaagaaucaaggaaga

SEQ ID NO: 1298783 - RNA, 19 nt, Homo sapiens
  misc_RNA (1)...(19): siRNA sense strand
ugguggaacuucucuacua

SEQ ID NO: 1298784 - RNA, 19 nt, Homo sapiens
  misc_RNA (1)...(19): siRNA sense strand
cagcaaauacaaccucuau

SEQ ID NO: 1298785 - RNA, 19 nt, Homo sapiens
  misc_RNA (1)...(19): siRNA sense strand
cagcuggaguagaguuuga

SEQ ID NO: 1298786 - RNA, 19 nt, Homo sapiens
  misc_RNA (1)...(19): siRNA sense strand
ggugaaaugauccuucuuc

SEQ ID NO: 1298787 - RNA, 19 nt, Homo sapiens
  misc_RNA (1)...(19): siRNA sense strand
ggaagauuuucagguuuua

SEQ ID NO: 1298788 - RNA, 19 nt, Homo sapiens
  misc_RNA (1)...(19): siRNA sense strand
ugauggauauuugauguuc

SEQ ID NO: 1298789 - RNA, 19 nt, Homo sapiens
  misc_RNA (1)...(19): siRNA sense strand
gguggaacuucucuacuac

SEQ ID NO: 1298790 - RNA, 19 nt, Homo sapiens
  misc_RNA (1)...(19): siRNA sense strand
uuggacaaguuaagaaaug

SEQ ID NO: 1298791 - RNA, 19 nt, Homo sapiens
  misc_RNA (1)...(19): siRNA sense strand
uauagcagauuugggugaa

SEQ ID NO: 1298792 - RNA, 19 nt, Homo sapiens
  misc_RNA (1)...(19): siRNA sense strand
gugaaaugauccuucuucu

SEQ ID NO: 1298793 - RNA, 19 nt, Homo sapiens
  misc_RNA (1)...(19): siRNA sense strand
gaagguauagcagauuugg

SEQ ID NO: 1298794 - RNA, 19 nt, Homo sapiens
  misc_RNA (1)...(19): siRNA sense strand
gauuuggacaaguuaagaa

SEQ ID NO: 1298795 - RNA, 19 nt, Homo sapiens
  misc_RNA (1)...(19): siRNA sense strand
aguagaguuugaagagaaa

SEQ ID NO: 1298796 - RNA, 19 nt, Homo sapiens
  misc_RNA (1)...(19): siRNA sense strand
caaguuaagaaaugaugga

SEQ ID NO: 1298797 - RNA, 19 nt, Homo sapiens
  misc_RNA (1)...(19): siRNA sense strand
aaggaagccucccauggau

SEQ ID NO: 1298798 - RNA, 19 nt, Homo sapiens
  misc_RNA (1)...(19): siRNA sense strand
uggacaaguuaagaaauga

SEQ ID NO: 1298799 - RNA, 19 nt, Homo sapiens
  misc_RNA (1)...(19): siRNA sense strand
ggacaaguuaagaaaugau

SEQ ID NO: 1298800 - RNA, 19 nt, Homo sapiens
  misc_RNA (1)...(19): siRNA sense strand
gacaaguuaagaaaugaug

SEQ ID NO: 1298801 - RNA, 19 nt, Homo sapiens
  misc_RNA (1)...(19): siRNA sense strand
gcuacuucccugccuuuga

SEQ ID NO: 1298802 - RNA, 19 nt, Homo sapiens
  misc_RNA (1)...(19): siRNA sense strand
ggcugcagcuggaguagag

SEQ ID NO: 1298803 - RNA, 19 nt, Homo sapiens
  misc_RNA (1)...(19): siRNA sense strand
caaccucuaugggaaagac

SEQ ID NO: 1298804 - RNA, 19 nt, Homo sapiens
  misc_RNA (1)...(19): siRNA sense strand
gcccugauugauauguaua

SEQ ID NO: 1298805 - RNA, 19 nt, Homo sapiens
  misc_RNA (1)...(19): siRNA sense strand
ugaaaugauccuucuucug

SEQ ID NO: 1298806 - RNA, 19 nt, Homo sapiens
  misc_RNA (1)...(19): siRNA sense strand
gaagugccaacaccuaaga

SEQ ID NO: 1298807 - RNA, 19 nt, Homo sapiens
  misc_RNA (1)...(19): siRNA sense strand
gcgaagugccaacaccuaa

SEQ ID NO: 1298808 - RNA, 19 nt, Homo sapiens
  misc_RNA (1)...(19): siRNA sense strand
gaaggagcccagcgaagug

SEQ ID NO: 1298809 - RNA, 19 nt, Homo sapiens
  misc_RNA (1)...(19): siRNA sense strand
gaaaaggacggcacugaga

SEQ ID NO: 1298810 - RNA, 19 nt, Homo sapiens
  misc_RNA (1)...(19): siRNA sense strand
ccacaacuccaggaaggaa

SEQ ID NO: 1298811 - RNA, 19 nt, Homo sapiens
  misc_RNA (1)...(19): siRNA sense strand
gaagugccaacaccuaaga

SEQ ID NO: 1298812 - RNA, 19 nt, Homo sapiens
  misc_RNA (1)...(19): siRNA sense strand
gcgaagugccaacaccuaa

SEQ ID NO: 1298813 - RNA, 19 nt, Homo sapiens
  misc_RNA (1)...(19): siRNA sense strand
gaaggagcccagcgaagug

SEQ ID NO: 1298814 - RNA, 19 nt, Homo sapiens
  misc_RNA (1)...(19): siRNA sense strand
gaaaaggacggcacugaga

SEQ ID NO: 1298815 - RNA, 19 nt, Homo sapiens
  misc_RNA (1)...(19): siRNA sense strand
ccacaacuccaggaaggaa

SEQ ID NO: 1298816 - RNA, 19 nt, Homo sapiens
  misc_RNA (1)...(19): siRNA sense strand
gaagugccaacaccuaaga

SEQ ID NO: 1298817 - RNA, 19 nt, Homo sapiens
  misc_RNA (1)...(19): siRNA sense strand
gcgaagugccaacaccuaa

SEQ ID NO: 1298818 - RNA, 19 nt, Homo sapiens
  misc_RNA (1)...(19): siRNA sense strand
gaaggagcccagcgaagug

SEQ ID NO: 1298819 - RNA, 19 nt, Homo sapiens
  misc_RNA (1)...(19): siRNA sense strand
gaaaaggacggcacugaga

SEQ ID NO: 1298820 - RNA, 19 nt, Homo sapiens
  misc_RNA (1)...(19): siRNA sense strand
ccacaacuccaggaaggaa

SEQ ID NO: 1298821 - RNA, 19 nt, Homo sapiens
  misc_RNA (1)...(19): siRNA sense strand
gaagugccaacaccuaaga

SEQ ID NO: 1298822 - RNA, 19 nt, Homo sapiens
  misc_RNA (1)...(19): siRNA sense strand
gcgaagugccaacaccuaa

SEQ ID NO: 1298823 - RNA, 19 nt, Homo sapiens
  misc_RNA (1)...(19): siRNA sense strand
gaaggagcccagcgaagug

SEQ ID NO: 1298824 - RNA, 19 nt, Homo sapiens
  misc_RNA (1)...(19): siRNA sense strand
gaaaaggacggcacugaga

SEQ ID NO: 1298825 - RNA, 19 nt, Homo sapiens
  misc_RNA (1)...(19): siRNA sense strand
ccacaacuccaggaaggaa

SEQ ID NO: 1298826 - RNA, 19 nt, Homo sapiens
  misc_RNA (1)...(19): siRNA sense strand
gaagugccaacaccuaaga

SEQ ID NO: 1298827 - RNA, 19 nt, Homo sapiens
  misc_RNA (1)...(19): siRNA sense strand
gcgaagugccaacaccuaa

SEQ ID NO: 1298828 - RNA, 19 nt, Homo sapiens
  misc_RNA (1)...(19): siRNA sense strand
gaaggagcccagcgaagug

SEQ ID NO: 1298829 - RNA, 19 nt, Homo sapiens
  misc_RNA (1)...(19): siRNA sense strand
gaaaaggacggcacugaga

SEQ ID NO: 1298830 - RNA, 19 nt, Homo sapiens
  misc_RNA (1)...(19): siRNA sense strand
ccacaacuccaggaaggaa

SEQ ID NO: 1298831 - RNA, 19 nt, Homo sapiens
  misc_RNA (1)...(19): siRNA sense strand
gaagugccaacaccuaaga

SEQ ID NO: 1298832 - RNA, 19 nt, Homo sapiens
  misc_RNA (1)...(19): siRNA sense strand
gcgaagugccaacaccuaa

SEQ ID NO: 1298833 - RNA, 19 nt, Homo sapiens
  misc_RNA (1)...(19): siRNA sense strand
gaaggagcccagcgaagug

SEQ ID NO: 1298834 - RNA, 19 nt, Homo sapiens
  misc_RNA (1)...(19): siRNA sense strand
gaaaaggacggcacugaga

SEQ ID NO: 1298835 - RNA, 19 nt, Homo sapiens
  misc_RNA (1)...(19): siRNA sense strand
ccacaacuccaggaaggaa

SEQ ID NO: 1298836 - RNA, 19 nt, Homo sapiens
  misc_RNA (1)...(19): siRNA sense strand
gaagugccaacaccuaaga

SEQ ID NO: 1298837 - RNA, 19 nt, Homo sapiens
  misc_RNA (1)...(19): siRNA sense strand
gcgaagugccaacaccuaa

SEQ ID NO: 1298838 - RNA, 19 nt, Homo sapiens
  misc_RNA (1)...(19): siRNA sense strand
gaaggagcccagcgaagug

SEQ ID NO: 1298839 - RNA, 19 nt, Homo sapiens
  misc_RNA (1)...(19): siRNA sense strand
gaaaaggacggcacugaga

SEQ ID NO: 1298840 - RNA, 19 nt, Homo sapiens
  misc_RNA (1)...(19): siRNA sense strand
ccacaacuccaggaaggaa

SEQ ID NO: 1298841 - RNA, 19 nt, Homo sapiens
  misc_RNA (1)...(19): siRNA sense strand
gaagggcuguugaauugua

SEQ ID NO: 1298842 - RNA, 19 nt, Homo sapiens
  misc_RNA (1)...(19): siRNA sense strand
gaaccuggcuacuucagaa

SEQ ID NO: 1298843 - RNA, 19 nt, Homo sapiens
  misc_RNA (1)...(19): siRNA sense strand
ccaauuaccuuaugugagu

SEQ ID NO: 1298844 - RNA, 19 nt, Homo sapiens
  misc_RNA (1)...(19): siRNA sense strand
gaacgggaaugacaaacau

SEQ ID NO: 1298845 - RNA, 19 nt, Homo sapiens
  misc_RNA (1)...(19): siRNA sense strand
ggcgugagauucaacauuu

SEQ ID NO: 1298846 - RNA, 19 nt, Homo sapiens
  misc_RNA (1)...(19): siRNA sense strand
gaagcaaaguuggaaagaa

SEQ ID NO: 1298847 - RNA, 19 nt, Homo sapiens
  misc_RNA (1)...(19): siRNA sense strand
cuacaucacuggcagacua

SEQ ID NO: 1298848 - RNA, 19 nt, Homo sapiens
  misc_RNA (1)...(19): siRNA sense strand
aggaagggcuguugaauug

SEQ ID NO: 1298849 - RNA, 19 nt, Homo sapiens
  misc_RNA (1)...(19): siRNA sense strand
uggcugggaugcuaaauuu

SEQ ID NO: 1298850 - RNA, 19 nt, Homo sapiens
  misc_RNA (1)...(19): siRNA sense strand
ugaauaugcucaaagugaa

SEQ ID NO: 1298851 - RNA, 19 nt, Homo sapiens
  misc_RNA (1)...(19): siRNA sense strand
acugaggacucuaugaaua

SEQ ID NO: 1298852 - RNA, 19 nt, Homo sapiens
  misc_RNA (1)...(19): siRNA sense strand
gagcaucgcugcagcuacu

SEQ ID NO: 1298853 - RNA, 19 nt, Homo sapiens
  misc_RNA (1)...(19): siRNA sense strand
gaaccucauuggugugauc

SEQ ID NO: 1298854 - RNA, 19 nt, Homo sapiens
  misc_RNA (1)...(19): siRNA sense strand
aaacaugacacaguccuua

SEQ ID NO: 1298855 - RNA, 19 nt, Homo sapiens
  misc_RNA (1)...(19): siRNA sense strand
uugaugcccuuuacaauau

SEQ ID NO: 1298856 - RNA, 19 nt, Homo sapiens
  misc_RNA (1)...(19): siRNA sense strand
cuucaucccucuaucuuau

SEQ ID NO: 1298857 - RNA, 19 nt, Homo sapiens
  misc_RNA (1)...(19): siRNA sense strand
aagcaaaguuggaaagaag

SEQ ID NO: 1298858 - RNA, 19 nt, Homo sapiens
  misc_RNA (1)...(19): siRNA sense strand
gaaugaagcaaaguuggaa

SEQ ID NO: 1298859 - RNA, 19 nt, Homo sapiens
  misc_RNA (1)...(19): siRNA sense strand
gaaggaagggcuguugaau

SEQ ID NO: 1298860 - RNA, 19 nt, Homo sapiens
  misc_RNA (1)...(19): siRNA sense strand
uuacaccaauuaccuuaug

SEQ ID NO: 1298861 - RNA, 19 nt, Homo sapiens
  misc_RNA (1)...(19): siRNA sense strand
gcucaaagugaaccucauu

SEQ ID NO: 1298862 - RNA, 19 nt, Homo sapiens
  misc_RNA (1)...(19): siRNA sense strand
ccuauggacagcaguauuu

SEQ ID NO: 1298863 - RNA, 19 nt, Homo sapiens
  misc_RNA (1)...(19): siRNA sense strand
guggaagccuuuucagaua

SEQ ID NO: 1298864 - RNA, 19 nt, Homo sapiens
  misc_RNA (1)...(19): siRNA sense strand
ggcauucuuacaccaauua

SEQ ID NO: 1298865 - RNA, 19 nt, Homo sapiens
  misc_RNA (1)...(19): siRNA sense strand
ggacagcaguauuuugaug

SEQ ID NO: 1298866 - RNA, 19 nt, Homo sapiens
  misc_RNA (1)...(19): siRNA sense strand
ggaaccugcuggccagaca

SEQ ID NO: 1298867 - RNA, 19 nt, Homo sapiens
  misc_RNA (1)...(19): siRNA sense strand
gagcgaaugaagcaaaguu

SEQ ID NO: 1298868 - RNA, 19 nt, Homo sapiens
  misc_RNA (1)...(19): siRNA sense strand
cuaugaauaugcucaaagu

SEQ ID NO: 1298869 - RNA, 19 nt, Homo sapiens
  misc_RNA (1)...(19): siRNA sense strand
gaacacugaggacucuaug

SEQ ID NO: 1298870 - RNA, 19 nt, Homo sapiens
  misc_RNA (1)...(19): siRNA sense strand
ucaucccucuaucuuauuu

SEQ ID NO: 1298871 - RNA, 19 nt, Homo sapiens
  misc_RNA (1)...(19): siRNA sense strand
uuugaugcccuuuacaaua

SEQ ID NO: 1298872 - RNA, 19 nt, Homo sapiens
  misc_RNA (1)...(19): siRNA sense strand
acacugaggacucuaugaa

SEQ ID NO: 1298873 - RNA, 19 nt, Homo sapiens
  misc_RNA (1)...(19): siRNA sense strand
gaaaaucagcauaguugaa

SEQ ID NO: 1298874 - RNA, 19 nt, Homo sapiens
  misc_RNA (1)...(19): siRNA sense strand
gcugaacacugaggacucu

SEQ ID NO: 1298875 - RNA, 19 nt, Homo sapiens
  misc_RNA (1)...(19): siRNA sense strand
gauauucugaggcgugaga

SEQ ID NO: 1298876 - RNA, 19 nt, Homo sapiens
  misc_RNA (1)...(19): siRNA sense strand
cgaaugaagcaaaguugga

SEQ ID NO: 1298877 - RNA, 19 nt, Homo sapiens
  misc_RNA (1)...(19): siRNA sense strand
uuaccaagauggagagcau

SEQ ID NO: 1298878 - RNA, 19 nt, Homo sapiens
  misc_RNA (1)...(19): siRNA sense strand
ugagccaccuccaagacaa

SEQ ID NO: 1298879 - RNA, 19 nt, Homo sapiens
  misc_RNA (1)...(19): siRNA sense strand
ggaagccuuuucagauauu

SEQ ID NO: 1298880 - RNA, 19 nt, Homo sapiens
  misc_RNA (1)...(19): siRNA sense strand
ugaggacucuaugaauaug

SEQ ID NO: 1298881 - RNA, 19 nt, Homo sapiens
  misc_RNA (1)...(19): siRNA sense strand
cugcgugucugacggagaa

SEQ ID NO: 1298882 - RNA, 19 nt, Homo sapiens
  misc_RNA (1)...(19): siRNA sense strand
guauggaguggaagccuuu

SEQ ID NO: 1298883 - RNA, 19 nt, Homo sapiens
  misc_RNA (1)...(19): siRNA sense strand
aaggaagggcuguugaauu

SEQ ID NO: 1298884 - RNA, 19 nt, Homo sapiens
  misc_RNA (1)...(19): siRNA sense strand
ugaaggaagggcuguugaa

SEQ ID NO: 1298885 - RNA, 19 nt, Homo sapiens
  misc_RNA (1)...(19): siRNA sense strand
caaagugaaccucauuggu

SEQ ID NO: 1298886 - RNA, 19 nt, Homo sapiens
  misc_RNA (1)...(19): siRNA sense strand
acaaguaugucuuuaucac

SEQ ID NO: 1298887 - RNA, 19 nt, Homo sapiens
  misc_RNA (1)...(19): siRNA sense strand
gaaugacaaacaugacaca

SEQ ID NO: 1298888 - RNA, 19 nt, Homo sapiens
  misc_RNA (1)...(19): siRNA sense strand
ucagaacgggaaugacaaa

SEQ ID NO: 1298889 - RNA, 19 nt, Homo sapiens
  misc_RNA (1)...(19): siRNA sense strand
augaauaugcucaaaguga

SEQ ID NO: 1298890 - RNA, 19 nt, Homo sapiens
  misc_RNA (1)...(19): siRNA sense strand
gcaggcauucuuacaccaa

SEQ ID NO: 1298891 - RNA, 19 nt, Homo sapiens
  misc_RNA (1)...(19): siRNA sense strand
gagagcaucgcugcagcua

SEQ ID NO: 1298892 - RNA, 19 nt, Homo sapiens
  misc_RNA (1)...(19): siRNA sense strand
gggaaugacaaacaugaca

SEQ ID NO: 1298893 - RNA, 19 nt, Homo sapiens
  misc_RNA (1)...(19): siRNA sense strand
agaguugcuuucuuuguag

SEQ ID NO: 1298894 - RNA, 19 nt, Homo sapiens
  misc_RNA (1)...(19): siRNA sense strand
aguugaaccuggcuacuuc

SEQ ID NO: 1298895 - RNA, 19 nt, Homo sapiens
  misc_RNA (1)...(19): siRNA sense strand
ucacuggcagacuacauuu

SEQ ID NO: 1298896 - RNA, 19 nt, Homo sapiens
  misc_RNA (1)...(19): siRNA sense strand
caccaauuaccuuauguga

SEQ ID NO: 1298897 - RNA, 19 nt, Homo sapiens
  misc_RNA (1)...(19): siRNA sense strand
ccuugagcaugcuuccuuu

SEQ ID NO: 1298898 - RNA, 19 nt, Homo sapiens
  misc_RNA (1)...(19): siRNA sense strand
acggugacccuggauguua

SEQ ID NO: 1298899 - RNA, 19 nt, Homo sapiens
  misc_RNA (1)...(19): siRNA sense strand
uuagagcgaaugaagcaaa

SEQ ID NO: 1298900 - RNA, 19 nt, Homo sapiens
  misc_RNA (1)...(19): siRNA sense strand
gugaaaaucagcauaguug

SEQ ID NO: 1298901 - RNA, 19 nt, Homo sapiens
  misc_RNA (1)...(19): siRNA sense strand
gaugcccuuuacaauauca

SEQ ID NO: 1298902 - RNA, 19 nt, Homo sapiens
  misc_RNA (1)...(19): siRNA sense strand
cugaggacucuaugaauau

SEQ ID NO: 1298903 - RNA, 19 nt, Homo sapiens
  misc_RNA (1)...(19): siRNA sense strand
accugaaccuggucacuga

SEQ ID NO: 1298904 - RNA, 19 nt, Homo sapiens
  misc_RNA (1)...(19): siRNA sense strand
ugagcaugcuuccuuuggu

SEQ ID NO: 1298905 - RNA, 19 nt, Homo sapiens
  misc_RNA (1)...(19): siRNA sense strand
uccgcgaacucgauauuca

SEQ ID NO: 1298906 - RNA, 19 nt, Homo sapiens
  misc_RNA (1)...(19): siRNA sense strand
cauccgcgaacucgauauu

SEQ ID NO: 1298907 - RNA, 19 nt, Homo sapiens
  misc_RNA (1)...(19): siRNA sense strand
uagagcgaaugaagcaaag

SEQ ID NO: 1298908 - RNA, 19 nt, Homo sapiens
  misc_RNA (1)...(19): siRNA sense strand
ucuuacaccaauuaccuua

SEQ ID NO: 1298909 - RNA, 19 nt, Homo sapiens
  misc_RNA (1)...(19): siRNA sense strand
ugaagcaaaguuggaaaga

SEQ ID NO: 1298910 - RNA, 19 nt, Homo sapiens
  misc_RNA (1)...(19): siRNA sense strand
cuucagaacgggaaugaca

SEQ ID NO: 1298911 - RNA, 19 nt, Homo sapiens
  misc_RNA (1)...(19): siRNA sense strand
ccaccuccaagacaaguau

SEQ ID NO: 1298912 - RNA, 19 nt, Homo sapiens
  misc_RNA (1)...(19): siRNA sense strand
gaauaugcucaaagugaac

SEQ ID NO: 1298913 - RNA, 19 nt, Homo sapiens
  misc_RNA (1)...(19): siRNA sense strand
ccucuaucuuauuuaccua

SEQ ID NO: 1298914 - RNA, 19 nt, Homo sapiens
  misc_RNA (1)...(19): siRNA sense strand
caggcauucuuacaccaau

SEQ ID NO: 1298915 - RNA, 19 nt, Homo sapiens
  misc_RNA (1)...(19): siRNA sense strand
ggaugcacgaggcuugaga

SEQ ID NO: 1298916 - RNA, 19 nt, Homo sapiens
  misc_RNA (1)...(19): siRNA sense strand
gcacaaagaugaaccaugu

SEQ ID NO: 1298917 - RNA, 19 nt, Homo sapiens
  misc_RNA (1)...(19): siRNA sense strand
caaauuaccucaagaauac

SEQ ID NO: 1298918 - RNA, 19 nt, Homo sapiens
  misc_RNA (1)...(19): siRNA sense strand
gacaauggcuugaaucuug

SEQ ID NO: 1298919 - RNA, 19 nt, Homo sapiens
  misc_RNA (1)...(19): siRNA sense strand
caaacaagguggaugauga

SEQ ID NO: 1298920 - RNA, 19 nt, Homo sapiens
  misc_RNA (1)...(19): siRNA sense strand
ggcaaacagucuauuaaua

SEQ ID NO: 1298921 - RNA, 19 nt, Homo sapiens
  misc_RNA (1)...(19): siRNA sense strand
ggaaugcagucccguguaa

SEQ ID NO: 1298922 - RNA, 19 nt, Homo sapiens
  misc_RNA (1)...(19): siRNA sense strand
gaagaucucugccaaaggu

SEQ ID NO: 1298923 - RNA, 19 nt, Homo sapiens
  misc_RNA (1)...(19): siRNA sense strand
gccaggagauucauucuaa

SEQ ID NO: 1298924 - RNA, 19 nt, Homo sapiens
  misc_RNA (1)...(19): siRNA sense strand
gaacaaugccagauccuuu

SEQ ID NO: 1298925 - RNA, 19 nt, Homo sapiens
  misc_RNA (1)...(19): siRNA sense strand
gcaagaagaaucaaaguug

SEQ ID NO: 1298926 - RNA, 19 nt, Homo sapiens
  misc_RNA (1)...(19): siRNA sense strand
caaggaagauuuggaaaga

SEQ ID NO: 1298927 - RNA, 19 nt, Homo sapiens
  misc_RNA (1)...(19): siRNA sense strand
gagcaaccaugucaaacaa

SEQ ID NO: 1298928 - RNA, 19 nt, Homo sapiens
  misc_RNA (1)...(19): siRNA sense strand
gaauuauggucuucacuau

SEQ ID NO: 1298929 - RNA, 19 nt, Homo sapiens
  misc_RNA (1)...(19): siRNA sense strand
ugaaaugggucacaacaug

SEQ ID NO: 1298930 - RNA, 19 nt, Homo sapiens
  misc_RNA (1)...(19): siRNA sense strand
gguagaaggugagaaagaa

SEQ ID NO: 1298931 - RNA, 19 nt, Homo sapiens
  misc_RNA (1)...(19): siRNA sense strand
cgaaugggaucguuucaga

SEQ ID NO: 1298932 - RNA, 19 nt, Homo sapiens
  misc_RNA (1)...(19): siRNA sense strand
caagguggaugaugacaga

SEQ ID NO: 1298933 - RNA, 19 nt, Homo sapiens
  misc_RNA (1)...(19): siRNA sense strand
gcaaugguuuccuaucaug

SEQ ID NO: 1298934 - RNA, 19 nt, Homo sapiens
  misc_RNA (1)...(19): siRNA sense strand
gaagaucauugugguguau

SEQ ID NO: 1298935 - RNA, 19 nt, Homo sapiens
  misc_RNA (1)...(19): siRNA sense strand
gacauacacugcugaugaa

SEQ ID NO: 1298936 - RNA, 19 nt, Homo sapiens
  misc_RNA (1)...(19): siRNA sense strand
uggcugugaugguuuauua

SEQ ID NO: 1298937 - RNA, 19 nt, Homo sapiens
  misc_RNA (1)...(19): siRNA sense strand
caagaagaaucaaaguugu

SEQ ID NO: 1298938 - RNA, 19 nt, Homo sapiens
  misc_RNA (1)...(19): siRNA sense strand
gcaaugagcaaccauguca

SEQ ID NO: 1298939 - RNA, 19 nt, Homo sapiens
  misc_RNA (1)...(19): siRNA sense strand
ggagaucaguggccagugu

SEQ ID NO: 1298940 - RNA, 19 nt, Homo sapiens
  misc_RNA (1)...(19): siRNA sense strand
aaacaaauccgcagagugu

SEQ ID NO: 1298941 - RNA, 19 nt, Homo sapiens
  misc_RNA (1)...(19): siRNA sense strand
gaaaggaagacaacagugu

SEQ ID NO: 1298942 - RNA, 19 nt, Homo sapiens
  misc_RNA (1)...(19): siRNA sense strand
gagggaaacgauauucaua

SEQ ID NO: 1298943 - RNA, 19 nt, Homo sapiens
  misc_RNA (1)...(19): siRNA sense strand
uuagauaucugugcaaaug

SEQ ID NO: 1298944 - RNA, 19 nt, Homo sapiens
  misc_RNA (1)...(19): siRNA sense strand
uacaauugcucaugaaaug

SEQ ID NO: 1298945 - RNA, 19 nt, Homo sapiens
  misc_RNA (1)...(19): siRNA sense strand
ccaugaaacuccaccagaa

SEQ ID NO: 1298946 - RNA, 19 nt, Homo sapiens
  misc_RNA (1)...(19): siRNA sense strand
ggucaaucuucgugugaua

SEQ ID NO: 1298947 - RNA, 19 nt, Homo sapiens
  misc_RNA (1)...(19): siRNA sense strand
cauagagacuguagugguu

SEQ ID NO: 1298948 - RNA, 19 nt, Homo sapiens
  misc_RNA (1)...(19): siRNA sense strand
cagcaaugguuuccuauca

SEQ ID NO: 1298949 - RNA, 19 nt, Homo sapiens
  misc_RNA (1)...(19): siRNA sense strand
gaacagccuauucuucuau

SEQ ID NO: 1298950 - RNA, 19 nt, Homo sapiens
  misc_RNA (1)...(19): siRNA sense strand
ugacauacacugcugauga

SEQ ID NO: 1298951 - RNA, 19 nt, Homo sapiens
  misc_RNA (1)...(19): siRNA sense strand
guggcaacaugaagaauuu

SEQ ID NO: 1298952 - RNA, 19 nt, Homo sapiens
  misc_RNA (1)...(19): siRNA sense strand
gagguggccugaugggauu

SEQ ID NO: 1298953 - RNA, 19 nt, Homo sapiens
  misc_RNA (1)...(19): siRNA sense strand
cagaggagcagguuaugua

SEQ ID NO: 1298954 - RNA, 19 nt, Homo sapiens
  misc_RNA (1)...(19): siRNA sense strand
uaucaugucuggugaaugg

SEQ ID NO: 1298955 - RNA, 19 nt, Homo sapiens
  misc_RNA (1)...(19): siRNA sense strand
aaagaugaaccaugugaua

SEQ ID NO: 1298956 - RNA, 19 nt, Homo sapiens
  misc_RNA (1)...(19): siRNA sense strand
gggaaacgauauucauaca

SEQ ID NO: 1298957 - RNA, 19 nt, Homo sapiens
  misc_RNA (1)...(19): siRNA sense strand
aauagugacuggaagauug

SEQ ID NO: 1298958 - RNA, 19 nt, Homo sapiens
  misc_RNA (1)...(19): siRNA sense strand
gauuagauaucugugcaaa

SEQ ID NO: 1298959 - RNA, 19 nt, Homo sapiens
  misc_RNA (1)...(19): siRNA sense strand
gagaaagaaugcagaacca

SEQ ID NO: 1298960 - RNA, 19 nt, Homo sapiens
  misc_RNA (1)...(19): siRNA sense strand
caagguagaaggugagaaa

SEQ ID NO: 1298961 - RNA, 19 nt, Homo sapiens
  misc_RNA (1)...(19): siRNA sense strand
caacauagagacuguagug

SEQ ID NO: 1298962 - RNA, 19 nt, Homo sapiens
  misc_RNA (1)...(19): siRNA sense strand
agacaugacuucaguggau

SEQ ID NO: 1298963 - RNA, 19 nt, Homo sapiens
  misc_RNA (1)...(19): siRNA sense strand
gcagacaaguggccuguac

SEQ ID NO: 1298964 - RNA, 19 nt, Homo sapiens
  misc_RNA (1)...(19): siRNA sense strand
ugaauacacuaucccauca

SEQ ID NO: 1298965 - RNA, 19 nt, Homo sapiens
  misc_RNA (1)...(19): siRNA sense strand
guguaaggcuggagaaugu

SEQ ID NO: 1298966 - RNA, 19 nt, Homo sapiens
  misc_RNA (1)...(19): siRNA sense strand
ggucacaacaugggcauua

SEQ ID NO: 1298967 - RNA, 19 nt, Homo sapiens
  misc_RNA (1)...(19): siRNA sense strand
ggagugggaagucguguuu

SEQ ID NO: 1298968 - RNA, 19 nt, Homo sapiens
  misc_RNA (1)...(19): siRNA sense strand
ggcaagcuguccuggauga

SEQ ID NO: 1298969 - RNA, 19 nt, Homo sapiens
  misc_RNA (1)...(19): siRNA sense strand
aaagauuucucaggucaaa

SEQ ID NO: 1298970 - RNA, 19 nt, Homo sapiens
  misc_RNA (1)...(19): siRNA sense strand
gaucagaauuauggucuuc

SEQ ID NO: 1298971 - RNA, 19 nt, Homo sapiens
  misc_RNA (1)...(19): siRNA sense strand
aaaguuggcugugaugguu

SEQ ID NO: 1298972 - RNA, 19 nt, Homo sapiens
  misc_RNA (1)...(19): siRNA sense strand
gaagcaagggauuguaaug

SEQ ID NO: 1298973 - RNA, 19 nt, Homo sapiens
  misc_RNA (1)...(19): siRNA sense strand
caccagaacuauauauugg

SEQ ID NO: 1298974 - RNA, 19 nt, Homo sapiens
  misc_RNA (1)...(19): siRNA sense strand
ugaagacaauggcuugaau

SEQ ID NO: 1298975 - RNA, 19 nt, Homo sapiens
  misc_RNA (1)...(19): siRNA sense strand
ggaagagggaaacgauauu

SEQ ID NO: 1298976 - RNA, 19 nt, Homo sapiens
  misc_RNA (1)...(19): siRNA sense strand
gcugaagacugugaggauu

SEQ ID NO: 1298977 - RNA, 19 nt, Homo sapiens
  misc_RNA (1)...(19): siRNA sense strand
ugucaggcuuauaguguua

SEQ ID NO: 1298978 - RNA, 19 nt, Homo sapiens
  misc_RNA (1)...(19): siRNA sense strand
gaaucuuggugacguuuca

SEQ ID NO: 1298979 - RNA, 19 nt, Homo sapiens
  misc_RNA (1)...(19): siRNA sense strand
aggaagacauggaaaugaa

SEQ ID NO: 1298980 - RNA, 19 nt, Homo sapiens
  misc_RNA (1)...(19): siRNA sense strand
ucaauuaccuguggcaaag

SEQ ID NO: 1298981 - RNA, 19 nt, Homo sapiens
  misc_RNA (1)...(19): siRNA sense strand
uggucuaagugcucaauua

SEQ ID NO: 1298982 - RNA, 19 nt, Homo sapiens
  misc_RNA (1)...(19): siRNA sense strand
cagggaggcugaagacugu

SEQ ID NO: 1298983 - RNA, 19 nt, Homo sapiens
  misc_RNA (1)...(19): siRNA sense strand
gcuggcaaacagucuauua

SEQ ID NO: 1298984 - RNA, 19 nt, Homo sapiens
  misc_RNA (1)...(19): siRNA sense strand
ccagaaaguuggcugugau

SEQ ID NO: 1298985 - RNA, 19 nt, Homo sapiens
  misc_RNA (1)...(19): siRNA sense strand
aggaagauuuggaaagauu

SEQ ID NO: 1298986 - RNA, 19 nt, Homo sapiens
  misc_RNA (1)...(19): siRNA sense strand
ggagauucauucuaaccau

SEQ ID NO: 1298987 - RNA, 19 nt, Homo sapiens
  misc_RNA (1)...(19): siRNA sense strand
gaagacauggaaaugaaug

SEQ ID NO: 1298988 - RNA, 19 nt, Homo sapiens
  misc_RNA (1)...(19): siRNA sense strand
caacaacugagcaauggaa

SEQ ID NO: 1298989 - RNA, 19 nt, Homo sapiens
  misc_RNA (1)...(19): siRNA sense strand
cacacaagcugggaagauu

SEQ ID NO: 1298990 - RNA, 19 nt, Homo sapiens
  misc_RNA (1)...(19): siRNA sense strand
auuauggucuucacuauga

SEQ ID NO: 1298991 - RNA, 19 nt, Homo sapiens
  misc_RNA (1)...(19): siRNA sense strand
gccggcacauagcuauuua

SEQ ID NO: 1298992 - RNA, 19 nt, Homo sapiens
  misc_RNA (1)...(19): siRNA sense strand
gcaaauguccugggcuaga

SEQ ID NO: 1298993 - RNA, 19 nt, Homo sapiens
  misc_RNA (1)...(19): siRNA sense strand
ugguauagcuuacuugagu

SEQ ID NO: 1298994 - RNA, 19 nt, Homo sapiens
  misc_RNA (1)...(19): siRNA sense strand
cuucaacccugcaaugaga

SEQ ID NO: 1298995 - RNA, 19 nt, Homo sapiens
  misc_RNA (1)...(19): siRNA sense strand
guccugggcuagauucuga

SEQ ID NO: 1298996 - RNA, 19 nt, Homo sapiens
  misc_RNA (1)...(19): siRNA sense strand
ucauuacugugguaucauu

SEQ ID NO: 1298997 - RNA, 19 nt, Homo sapiens
  misc_RNA (1)...(19): siRNA sense strand
ggacaaugagaaaugcaaa

SEQ ID NO: 1298998 - RNA, 19 nt, Homo sapiens
  misc_RNA (1)...(19): siRNA sense strand
gagugucaauucugugaug

SEQ ID NO: 1298999 - RNA, 19 nt, Homo sapiens
  misc_RNA (1)...(19): siRNA sense strand
gcaaggaagauuuggaaag

SEQ ID NO: 1299000 - RNA, 19 nt, Homo sapiens
  misc_RNA (1)...(19): siRNA sense strand
guaaguggcaacaugaaga

SEQ ID NO: 1299001 - RNA, 19 nt, Homo sapiens
  misc_RNA (1)...(19): siRNA sense strand
ccaccagaacuauauauug

SEQ ID NO: 1299002 - RNA, 19 nt, Homo sapiens
  misc_RNA (1)...(19): siRNA sense strand
gaagagggaaacgauauuc

SEQ ID NO: 1299003 - RNA, 19 nt, Homo sapiens
  misc_RNA (1)...(19): siRNA sense strand
caauacagaauaugugaga

SEQ ID NO: 1299004 - RNA, 19 nt, Homo sapiens
  misc_RNA (1)...(19): siRNA sense strand
caaauguccugggcuagau

SEQ ID NO: 1299005 - RNA, 19 nt, Homo sapiens
  misc_RNA (1)...(19): siRNA sense strand
ggaagauuuggaaagauuu

SEQ ID NO: 1299006 - RNA, 19 nt, Homo sapiens
  misc_RNA (1)...(19): siRNA sense strand
ggauggcgacgaaguguug

SEQ ID NO: 1299007 - RNA, 19 nt, Homo sapiens
  misc_RNA (1)...(19): siRNA sense strand
gaggacuucauauuuauug

SEQ ID NO: 1299008 - RNA, 19 nt, Homo sapiens
  misc_RNA (1)...(19): siRNA sense strand
gcagucccguguaauccaa

SEQ ID NO: 1299009 - RNA, 19 nt, Homo sapiens
  misc_RNA (1)...(19): siRNA sense strand
aaucaaaguuguggaggaa

SEQ ID NO: 1299010 - RNA, 19 nt, Homo sapiens
  misc_RNA (1)...(19): siRNA sense strand
aggagcagguuauguagaa

SEQ ID NO: 1299011 - RNA, 19 nt, Homo sapiens
  misc_RNA (1)...(19): siRNA sense strand
auacacugcugaugaacaa

SEQ ID NO: 1299012 - RNA, 19 nt, Homo sapiens
  misc_RNA (1)...(19): siRNA sense strand
aguaacugcuugcuacaaa

SEQ ID NO: 1299013 - RNA, 19 nt, Homo sapiens
  misc_RNA (1)...(19): siRNA sense strand
gauguagcaaggaagauuu

SEQ ID NO: 1299014 - RNA, 19 nt, Homo sapiens
  misc_RNA (1)...(19): siRNA sense strand
uuagagaugucaacaaacu

SEQ ID NO: 1299015 - RNA, 19 nt, Homo sapiens
  misc_RNA (1)...(19): siRNA sense strand
ugaagacugugaggauuau

SEQ ID NO: 1299016 - RNA, 19 nt, Homo sapiens
  misc_RNA (1)...(19): siRNA sense strand
gaagugccaacaccuaaga

SEQ ID NO: 1299017 - RNA, 19 nt, Homo sapiens
  misc_RNA (1)...(19): siRNA sense strand
gcgaagugccaacaccuaa

SEQ ID NO: 1299018 - RNA, 19 nt, Homo sapiens
  misc_RNA (1)...(19): siRNA sense strand
gaaggagcccagcgaagug

SEQ ID NO: 1299019 - RNA, 19 nt, Homo sapiens
  misc_RNA (1)...(19): siRNA sense strand
gaaaaggacggcacugaga

SEQ ID NO: 1299020 - RNA, 19 nt, Homo sapiens
  misc_RNA (1)...(19): siRNA sense strand
ccacaacuccaggaaggaa

SEQ ID NO: 1299021 - RNA, 19 nt, Homo sapiens
  misc_RNA (1)...(19): siRNA sense strand
gaagugccaacaccuaaga

SEQ ID NO: 1299022 - RNA, 19 nt, Homo sapiens
  misc_RNA (1)...(19): siRNA sense strand
gcgaagugccaacaccuaa

SEQ ID NO: 1299023 - RNA, 19 nt, Homo sapiens
  misc_RNA (1)...(19): siRNA sense strand
gaaggagcccagcgaagug

SEQ ID NO: 1299024 - RNA, 19 nt, Homo sapiens
  misc_RNA (1)...(19): siRNA sense strand
gaaaaggacggcacugaga

SEQ ID NO: 1299025 - RNA, 19 nt, Homo sapiens
  misc_RNA (1)...(19): siRNA sense strand
ccacaacuccaggaaggaa

SEQ ID NO: 1299026 - RNA, 19 nt, Homo sapiens
  misc_RNA (1)...(19): siRNA sense strand
gaagugccaacaccuaaga

SEQ ID NO: 1299027 - RNA, 19 nt, Homo sapiens
  misc_RNA (1)...(19): siRNA sense strand
gcgaagugccaacaccuaa

SEQ ID NO: 1299028 - RNA, 19 nt, Homo sapiens
  misc_RNA (1)...(19): siRNA sense strand
gaaggagcccagcgaagug

SEQ ID NO: 1299029 - RNA, 19 nt, Homo sapiens
  misc_RNA (1)...(19): siRNA sense strand
gaaaaggacggcacugaga

SEQ ID NO: 1299030 - RNA, 19 nt, Homo sapiens
  misc_RNA (1)...(19): siRNA sense strand
ccacaacuccaggaaggaa

SEQ ID NO: 1299031 - RNA, 19 nt, Homo sapiens
  misc_RNA (1)...(19): siRNA sense strand
gaagugccaacaccuaaga

SEQ ID NO: 1299032 - RNA, 19 nt, Homo sapiens
  misc_RNA (1)...(19): siRNA sense strand
gcgaagugccaacaccuaa

SEQ ID NO: 1299033 - RNA, 19 nt, Homo sapiens
  misc_RNA (1)...(19): siRNA sense strand
gaaggagcccagcgaagug

SEQ ID NO: 1299034 - RNA, 19 nt, Homo sapiens
  misc_RNA (1)...(19): siRNA sense strand
gaaaaggacggcacugaga

SEQ ID NO: 1299035 - RNA, 19 nt, Homo sapiens
  misc_RNA (1)...(19): siRNA sense strand
ccacaacuccaggaaggaa

SEQ ID NO: 1299036 - RNA, 19 nt, Homo sapiens
  misc_RNA (1)...(19): siRNA sense strand
gaagugccaacaccuaaga

SEQ ID NO: 1299037 - RNA, 19 nt, Homo sapiens
  misc_RNA (1)...(19): siRNA sense strand
gcgaagugccaacaccuaa

SEQ ID NO: 1299038 - RNA, 19 nt, Homo sapiens
  misc_RNA (1)...(19): siRNA sense strand
gaaggagcccagcgaagug

SEQ ID NO: 1299039 - RNA, 19 nt, Homo sapiens
  misc_RNA (1)...(19): siRNA sense strand
gaaaaggacggcacugaga

SEQ ID NO: 1299040 - RNA, 19 nt, Homo sapiens
  misc_RNA (1)...(19): siRNA sense strand
ccacaacuccaggaaggaa

SEQ ID NO: 1299041 - RNA, 19 nt, Homo sapiens
  misc_RNA (1)...(19): siRNA sense strand
gaagugccaacaccuaaga

SEQ ID NO: 1299042 - RNA, 19 nt, Homo sapiens
  misc_RNA (1)...(19): siRNA sense strand
gcgaagugccaacaccuaa

SEQ ID NO: 1299043 - RNA, 19 nt, Homo sapiens
  misc_RNA (1)...(19): siRNA sense strand
gaaggagcccagcgaagug

SEQ ID NO: 1299044 - RNA, 19 nt, Homo sapiens
  misc_RNA (1)...(19): siRNA sense strand
gaaaaggacggcacugaga

SEQ ID NO: 1299045 - RNA, 19 nt, Homo sapiens
  misc_RNA (1)...(19): siRNA sense strand
ccacaacuccaggaaggaa

SEQ ID NO: 1299046 - RNA, 19 nt, Homo sapiens
  misc_RNA (1)...(19): siRNA sense strand
gaagugccaacaccuaaga

SEQ ID NO: 1299047 - RNA, 19 nt, Homo sapiens
  misc_RNA (1)...(19): siRNA sense strand
gcgaagugccaacaccuaa

SEQ ID NO: 1299048 - RNA, 19 nt, Homo sapiens
  misc_RNA (1)...(19): siRNA sense strand
gaaggagcccagcgaagug

SEQ ID NO: 1299049 - RNA, 19 nt, Homo sapiens
  misc_RNA (1)...(19): siRNA sense strand
gaaaaggacggcacugaga

SEQ ID NO: 1299050 - RNA, 19 nt, Homo sapiens
  misc_RNA (1)...(19): siRNA sense strand
ccacaacuccaggaaggaa

SEQ ID NO: 1299051 - RNA, 19 nt, Homo sapiens
  misc_RNA (1)...(19): siRNA sense strand
gaagugccaacaccuaaga

SEQ ID NO: 1299052 - RNA, 19 nt, Homo sapiens
  misc_RNA (1)...(19): siRNA sense strand
gcgaagugccaacaccuaa

SEQ ID NO: 1299053 - RNA, 19 nt, Homo sapiens
  misc_RNA (1)...(19): siRNA sense strand
gaaggagcccagcgaagug

SEQ ID NO: 1299054 - RNA, 19 nt, Homo sapiens
  misc_RNA (1)...(19): siRNA sense strand
gaaaaggacggcacugaga

SEQ ID NO: 1299055 - RNA, 19 nt, Homo sapiens
  misc_RNA (1)...(19): siRNA sense strand
ccacaacuccaggaaggaa

SEQ ID NO: 1299056 - RNA, 19 nt, Homo sapiens
  misc_RNA (1)...(19): siRNA sense strand
gaagugccaacaccuaaga

SEQ ID NO: 1299057 - RNA, 19 nt, Homo sapiens
  misc_RNA (1)...(19): siRNA sense strand
gcgaagugccaacaccuaa

SEQ ID NO: 1299058 - RNA, 19 nt, Homo sapiens
  misc_RNA (1)...(19): siRNA sense strand
gaaggagcccagcgaagug

SEQ ID NO: 1299059 - RNA, 19 nt, Homo sapiens
  misc_RNA (1)...(19): siRNA sense strand
gaaaaggacggcacugaga

SEQ ID NO: 1299060 - RNA, 19 nt, Homo sapiens
  misc_RNA (1)...(19): siRNA sense strand
ccacaacuccaggaaggaa

SEQ ID NO: 1299061 - RNA, 19 nt, Homo sapiens
  misc_RNA (1)...(19): siRNA sense strand
gaagugccaacaccuaaga

SEQ ID NO: 1299062 - RNA, 19 nt, Homo sapiens
  misc_RNA (1)...(19): siRNA sense strand
gcgaagugccaacaccuaa

SEQ ID NO: 1299063 - RNA, 19 nt, Homo sapiens
  misc_RNA (1)...(19): siRNA sense strand
gaaggagcccagcgaagug

SEQ ID NO: 1299064 - RNA, 19 nt, Homo sapiens
  misc_RNA (1)...(19): siRNA sense strand
gaaaaggacggcacugaga

SEQ ID NO: 1299065 - RNA, 19 nt, Homo sapiens
  misc_RNA (1)...(19): siRNA sense strand
ccacaacuccaggaaggaa

SEQ ID NO: 1299066 - RNA, 19 nt, Homo sapiens
  misc_RNA (1)...(19): siRNA sense strand
gaagugccaacaccuaaga

SEQ ID NO: 1299067 - RNA, 19 nt, Homo sapiens
  misc_RNA (1)...(19): siRNA sense strand
gcgaagugccaacaccuaa

SEQ ID NO: 1299068 - RNA, 19 nt, Homo sapiens
  misc_RNA (1)...(19): siRNA sense strand
gaaggagcccagcgaagug

SEQ ID NO: 1299069 - RNA, 19 nt, Homo sapiens
  misc_RNA (1)...(19): siRNA sense strand
gaaaaggacggcacugaga

SEQ ID NO: 1299070 - RNA, 19 nt, Homo sapiens
  misc_RNA (1)...(19): siRNA sense strand
ccacaacuccaggaaggaa

SEQ ID NO: 1299071 - RNA, 19 nt, Homo sapiens
  misc_RNA (1)...(19): siRNA sense strand
gaagugccaacaccuaaga

SEQ ID NO: 1299072 - RNA, 19 nt, Homo sapiens
  misc_RNA (1)...(19): siRNA sense strand
gcgaagugccaacaccuaa

SEQ ID NO: 1299073 - RNA, 19 nt, Homo sapiens
  misc_RNA (1)...(19): siRNA sense strand
gaaggagcccagcgaagug

SEQ ID NO: 1299074 - RNA, 19 nt, Homo sapiens
  misc_RNA (1)...(19): siRNA sense strand
gaaaaggacggcacugaga

SEQ ID NO: 1299075 - RNA, 19 nt, Homo sapiens
  misc_RNA (1)...(19): siRNA sense strand
ccacaacuccaggaaggaa

SEQ ID NO: 1299076 - RNA, 19 nt, Homo sapiens
  misc_RNA (1)...(19): siRNA sense strand
gaagugccaacaccuaaga

SEQ ID NO: 1299077 - RNA, 19 nt, Homo sapiens
  misc_RNA (1)...(19): siRNA sense strand
gcgaagugccaacaccuaa

SEQ ID NO: 1299078 - RNA, 19 nt, Homo sapiens
  misc_RNA (1)...(19): siRNA sense strand
gaaggagcccagcgaagug

SEQ ID NO: 1299079 - RNA, 19 nt, Homo sapiens
  misc_RNA (1)...(19): siRNA sense strand
gaaaaggacggcacugaga

SEQ ID NO: 1299080 - RNA, 19 nt, Homo sapiens
  misc_RNA (1)...(19): siRNA sense strand
ccacaacuccaggaaggaa

SEQ ID NO: 1299081 - RNA, 19 nt, Homo sapiens
  misc_RNA (1)...(19): siRNA sense strand
gaagugccaacaccuaaga

SEQ ID NO: 1299082 - RNA, 19 nt, Homo sapiens
  misc_RNA (1)...(19): siRNA sense strand
gcgaagugccaacaccuaa

SEQ ID NO: 1299083 - RNA, 19 nt, Homo sapiens
  misc_RNA (1)...(19): siRNA sense strand
gaaggagcccagcgaagug

SEQ ID NO: 1299084 - RNA, 19 nt, Homo sapiens
  misc_RNA (1)...(19): siRNA sense strand
gaaaaggacggcacugaga

SEQ ID NO: 1299085 - RNA, 19 nt, Homo sapiens
  misc_RNA (1)...(19): siRNA sense strand
ccacaacuccaggaaggaa

SEQ ID NO: 1299086 - RNA, 19 nt, Homo sapiens
  misc_RNA (1)...(19): siRNA sense strand
gagaagaucuuucagaauc

SEQ ID NO: 1299087 - RNA, 19 nt, Homo sapiens
  misc_RNA (1)...(19): siRNA sense strand
gagcaugucuuuacagauc

SEQ ID NO: 1299088 - RNA, 19 nt, Homo sapiens
  misc_RNA (1)...(19): siRNA sense strand
ccaggaaacuagaaaugua

SEQ ID NO: 1299089 - RNA, 19 nt, Homo sapiens
  misc_RNA (1)...(19): siRNA sense strand
acaaagaucucaguggaua

SEQ ID NO: 1299090 - RNA, 19 nt, Homo sapiens
  misc_RNA (1)...(19): siRNA sense strand
ugacucagaugcauauaaa

SEQ ID NO: 1299091 - RNA, 19 nt, Homo sapiens
  misc_RNA (1)...(19): siRNA sense strand
gcaaacacauugaaguaca

SEQ ID NO: 1299092 - RNA, 19 nt, Homo sapiens
  misc_RNA (1)...(19): siRNA sense strand
gucaaacuaucaccucuua

SEQ ID NO: 1299093 - RNA, 19 nt, Homo sapiens
  misc_RNA (1)...(19): siRNA sense strand
gaagaauuauccagucuag

SEQ ID NO: 1299094 - RNA, 19 nt, Homo sapiens
  misc_RNA (1)...(19): siRNA sense strand
gaugagcuuucugauguua

SEQ ID NO: 1299095 - RNA, 19 nt, Homo sapiens
  misc_RNA (1)...(19): siRNA sense strand
gcaacaauuccuacugaua

SEQ ID NO: 1299096 - RNA, 19 nt, Homo sapiens
  misc_RNA (1)...(19): siRNA sense strand
uaucaguacugccaaauga

SEQ ID NO: 1299097 - RNA, 19 nt, Homo sapiens
  misc_RNA (1)...(19): siRNA sense strand
gcaacauccuagacaguuu

SEQ ID NO: 1299098 - RNA, 19 nt, Homo sapiens
  misc_RNA (1)...(19): siRNA sense strand
gagauaagcaaacacauug

SEQ ID NO: 1299099 - RNA, 19 nt, Homo sapiens
  misc_RNA (1)...(19): siRNA sense strand
gcauagagaacaaagcuuu

SEQ ID NO: 1299100 - RNA, 19 nt, Homo sapiens
  misc_RNA (1)...(19): siRNA sense strand
agaacgcccuauaucauua

SEQ ID NO: 1299101 - RNA, 19 nt, Homo sapiens
  misc_RNA (1)...(19): siRNA sense strand
uuacagaugcgccaaauaa

SEQ ID NO: 1299102 - RNA, 19 nt, Homo sapiens
  misc_RNA (1)...(19): siRNA sense strand
ggauaaaccaccagaaaug

SEQ ID NO: 1299103 - RNA, 19 nt, Homo sapiens
  misc_RNA (1)...(19): siRNA sense strand
acaaggauguugcugguuu

SEQ ID NO: 1299104 - RNA, 19 nt, Homo sapiens
  misc_RNA (1)...(19): siRNA sense strand
caaggcggaucuaaagcua

SEQ ID NO: 1299105 - RNA, 19 nt, Homo sapiens
  misc_RNA (1)...(19): siRNA sense strand
gaagggaaucguguuagua

SEQ ID NO: 1299106 - RNA, 19 nt, Homo sapiens
  misc_RNA (1)...(19): siRNA sense strand
gagagaagaagcccagaaa

SEQ ID NO: 1299107 - RNA, 19 nt, Homo sapiens
  misc_RNA (1)...(19): siRNA sense strand
ugaagaaacugaagcuagu

SEQ ID NO: 1299108 - RNA, 19 nt, Homo sapiens
  misc_RNA (1)...(19): siRNA sense strand
uacagaaucucucuuugaa

SEQ ID NO: 1299109 - RNA, 19 nt, Homo sapiens
  misc_RNA (1)...(19): siRNA sense strand
gaucugagcaauggaaauu

SEQ ID NO: 1299110 - RNA, 19 nt, Homo sapiens
  misc_RNA (1)...(19): siRNA sense strand
gcaaugacucagaugcaua

SEQ ID NO: 1299111 - RNA, 19 nt, Homo sapiens
  misc_RNA (1)...(19): siRNA sense strand
caauacagaaucucucuuu

SEQ ID NO: 1299112 - RNA, 19 nt, Homo sapiens
  misc_RNA (1)...(19): siRNA sense strand
ccaaaggcauagagaacaa

SEQ ID NO: 1299113 - RNA, 19 nt, Homo sapiens
  misc_RNA (1)...(19): siRNA sense strand
ggagauggauugcuuacac

SEQ ID NO: 1299114 - RNA, 19 nt, Homo sapiens
  misc_RNA (1)...(19): siRNA sense strand
caauggaaauuucaggaau

SEQ ID NO: 1299115 - RNA, 19 nt, Homo sapiens
  misc_RNA (1)...(19): siRNA sense strand
aggaugagcuuucugaugu

SEQ ID NO: 1299116 - RNA, 19 nt, Homo sapiens
  misc_RNA (1)...(19): siRNA sense strand
gaauuauccagucuaguuu

SEQ ID NO: 1299117 - RNA, 19 nt, Homo sapiens
  misc_RNA (1)...(19): siRNA sense strand
aagauucgauucucaguau

SEQ ID NO: 1299118 - RNA, 19 nt, Homo sapiens
  misc_RNA (1)...(19): siRNA sense strand
gaguucagaucccagaaga

SEQ ID NO: 1299119 - RNA, 19 nt, Homo sapiens
  misc_RNA (1)...(19): siRNA sense strand
caaacuaucaccucuuaga

SEQ ID NO: 1299120 - RNA, 19 nt, Homo sapiens
  misc_RNA (1)...(19): siRNA sense strand
agacuacccugcaggagaa

SEQ ID NO: 1299121 - RNA, 19 nt, Homo sapiens
  misc_RNA (1)...(19): siRNA sense strand
guauguccauucaucugua

SEQ ID NO: 1299122 - RNA, 19 nt, Homo sapiens
  misc_RNA (1)...(19): siRNA sense strand
aaacuggcgucuacacaga

SEQ ID NO: 1299123 - RNA, 19 nt, Homo sapiens
  misc_RNA (1)...(19): siRNA sense strand
ggaagaaaacgaaggauuu

SEQ ID NO: 1299124 - RNA, 19 nt, Homo sapiens
  misc_RNA (1)...(19): siRNA sense strand
cuacacagagcaugucuuu

SEQ ID NO: 1299125 - RNA, 19 nt, Homo sapiens
  misc_RNA (1)...(19): siRNA sense strand
aggagaagaucuuucagaa

SEQ ID NO: 1299126 - RNA, 19 nt, Homo sapiens
  misc_RNA (1)...(19): siRNA sense strand
ggauguugcugguuuggau

SEQ ID NO: 1299127 - RNA, 19 nt, Homo sapiens
  misc_RNA (1)...(19): siRNA sense strand
gaagaaaagucagaaguuc

SEQ ID NO: 1299128 - RNA, 19 nt, Homo sapiens
  misc_RNA (1)...(19): siRNA sense strand
uggcaacaauuccuacuga

SEQ ID NO: 1299129 - RNA, 19 nt, Homo sapiens
  misc_RNA (1)...(19): siRNA sense strand
cagagcaugucuuuacaga

SEQ ID NO: 1299130 - RNA, 19 nt, Homo sapiens
  misc_RNA (1)...(19): siRNA sense strand
gcacucauucggcuacaaa

SEQ ID NO: 1299131 - RNA, 19 nt, Homo sapiens
  misc_RNA (1)...(19): siRNA sense strand
agaauuauccagucuaguu

SEQ ID NO: 1299132 - RNA, 19 nt, Homo sapiens
  misc_RNA (1)...(19): siRNA sense strand
acaaacagguaaccaaugg

SEQ ID NO: 1299133 - RNA, 19 nt, Homo sapiens
  misc_RNA (1)...(19): siRNA sense strand
gauaagcaaacacauugaa

SEQ ID NO: 1299134 - RNA, 19 nt, Homo sapiens
  misc_RNA (1)...(19): siRNA sense strand
gcaauggaaauuucaggaa

SEQ ID NO: 1299135 - RNA, 19 nt, Homo sapiens
  misc_RNA (1)...(19): siRNA sense strand
caacaauuccuacugauac

SEQ ID NO: 1299136 - RNA, 19 nt, Homo sapiens
  misc_RNA (1)...(19): siRNA sense strand
gaagaagcccagaaaauga

SEQ ID NO: 1299137 - RNA, 19 nt, Homo sapiens
  misc_RNA (1)...(19): siRNA sense strand
ggaaguaugacaagcaaca

SEQ ID NO: 1299138 - RNA, 19 nt, Homo sapiens
  misc_RNA (1)...(19): siRNA sense strand
gaauuaagucaaccacguu

SEQ ID NO: 1299139 - RNA, 19 nt, Homo sapiens
  misc_RNA (1)...(19): siRNA sense strand
aagcaaacacauugaagua

SEQ ID NO: 1299140 - RNA, 19 nt, Homo sapiens
  misc_RNA (1)...(19): siRNA sense strand
cuacugauacucccuuaaa

SEQ ID NO: 1299141 - RNA, 19 nt, Homo sapiens
  misc_RNA (1)...(19): siRNA sense strand
caacagcuaauucagaugu

SEQ ID NO: 1299142 - RNA, 19 nt, Homo sapiens
  misc_RNA (1)...(19): siRNA sense strand
cagaguaguuuagauaagu

SEQ ID NO: 1299143 - RNA, 19 nt, Homo sapiens
  misc_RNA (1)...(19): siRNA sense strand
ucucagaguaguuuagaua

SEQ ID NO: 1299144 - RNA, 19 nt, Homo sapiens
  misc_RNA (1)...(19): siRNA sense strand
guacaaacagguaaccaau

SEQ ID NO: 1299145 - RNA, 19 nt, Homo sapiens
  misc_RNA (1)...(19): siRNA sense strand
gaaggauuugugaagguua

SEQ ID NO: 1299146 - RNA, 19 nt, Homo sapiens
  misc_RNA (1)...(19): siRNA sense strand
ggaugagcuuucugauguu

SEQ ID NO: 1299147 - RNA, 19 nt, Homo sapiens
  misc_RNA (1)...(19): siRNA sense strand
gaaaagaacgcccuauauc

SEQ ID NO: 1299148 - RNA, 19 nt, Homo sapiens
  misc_RNA (1)...(19): siRNA sense strand
gauggugguucuguuguug

SEQ ID NO: 1299149 - RNA, 19 nt, Homo sapiens
  misc_RNA (1)...(19): siRNA sense strand
cgaaggauuugugaagguu

SEQ ID NO: 1299150 - RNA, 19 nt, Homo sapiens
  misc_RNA (1)...(19): siRNA sense strand
aaagaucucaguggauaua

SEQ ID NO: 1299151 - RNA, 19 nt, Homo sapiens
  misc_RNA (1)...(19): siRNA sense strand
acacagagcaugucuuuac

SEQ ID NO: 1299152 - RNA, 19 nt, Homo sapiens
  misc_RNA (1)...(19): siRNA sense strand
ggagaagaucuuucagaau

SEQ ID NO: 1299153 - RNA, 19 nt, Homo sapiens
  misc_RNA (1)...(19): siRNA sense strand
gaacagcagaaggaguuaa

SEQ ID NO: 1299154 - RNA, 19 nt, Homo sapiens
  misc_RNA (1)...(19): siRNA sense strand
ggauacagaaggcaguaaa

SEQ ID NO: 1299155 - RNA, 19 nt, Homo sapiens
  misc_RNA (1)...(19): siRNA sense strand
aagcacauguucagaagga

SEQ ID NO: 1299156 - RNA, 19 nt, Homo sapiens
  misc_RNA (1)...(19): siRNA sense strand
caaggauguugcugguuug

SEQ ID NO: 1299157 - RNA, 19 nt, Homo sapiens
  misc_RNA (1)...(19): siRNA sense strand
gaagaagcaacugaagcua

SEQ ID NO: 1299158 - RNA, 19 nt, Homo sapiens
  misc_RNA (1)...(19): siRNA sense strand
caacagcucagcagagaca

SEQ ID NO: 1299159 - RNA, 19 nt, Homo sapiens
  misc_RNA (1)...(19): siRNA sense strand
aaucagagauaagcaaaca

SEQ ID NO: 1299160 - RNA, 19 nt, Homo sapiens
  misc_RNA (1)...(19): siRNA sense strand
guggacaucucccaaacug

SEQ ID NO: 1299161 - RNA, 19 nt, Homo sapiens
  misc_RNA (1)...(19): siRNA sense strand
caucaacagcuaauucaga

SEQ ID NO: 1299162 - RNA, 19 nt, Homo sapiens
  misc_RNA (1)...(19): siRNA sense strand
agaagcaacugaagcuaca

SEQ ID NO: 1299163 - RNA, 19 nt, Homo sapiens
  misc_RNA (1)...(19): siRNA sense strand
ugaaggaugagcuuucuga

SEQ ID NO: 1299164 - RNA, 19 nt, Homo sapiens
  misc_RNA (1)...(19): siRNA sense strand
ggauauaaagguucaagca

SEQ ID NO: 1299165 - RNA, 19 nt, Homo sapiens
  misc_RNA (1)...(19): siRNA sense strand
auaccagccugaaggauga

SEQ ID NO: 1299166 - RNA, 19 nt, Homo sapiens
  misc_RNA (1)...(19): siRNA sense strand
ugaagggaaucguguuagu

SEQ ID NO: 1299167 - RNA, 19 nt, Homo sapiens
  misc_RNA (1)...(19): siRNA sense strand
aaauaucaguacugccaaa

SEQ ID NO: 1299168 - RNA, 19 nt, Homo sapiens
  misc_RNA (1)...(19): siRNA sense strand
ucagaugcauauaaagauc

SEQ ID NO: 1299169 - RNA, 19 nt, Homo sapiens
  misc_RNA (1)...(19): siRNA sense strand
gaagaccucuccccagugu

SEQ ID NO: 1299170 - RNA, 19 nt, Homo sapiens
  misc_RNA (1)...(19): siRNA sense strand
aaagaacgcccuauaucau

SEQ ID NO: 1299171 - RNA, 19 nt, Homo sapiens
  misc_RNA (1)...(19): siRNA sense strand
gaaauggaagcagaaaaua

SEQ ID NO: 1299172 - RNA, 19 nt, Homo sapiens
  misc_RNA (1)...(19): siRNA sense strand
ucacagugguugguuguuc

SEQ ID NO: 1299173 - RNA, 19 nt, Homo sapiens
  misc_RNA (1)...(19): siRNA sense strand
gcaucuuuauguggaagua

SEQ ID NO: 1299174 - RNA, 19 nt, Homo sapiens
  misc_RNA (1)...(19): siRNA sense strand
caaccacguucucauacca

SEQ ID NO: 1299175 - RNA, 19 nt, Homo sapiens
  misc_RNA (1)...(19): siRNA sense strand
guggaaguaugacaagcaa

SEQ ID NO: 1299176 - RNA, 19 nt, Homo sapiens
  misc_RNA (1)...(19): siRNA sense strand
agucagaaguucaagcaau

SEQ ID NO: 1299177 - RNA, 19 nt, Homo sapiens
  misc_RNA (1)...(19): siRNA sense strand
guacagguagcccaggaaa

SEQ ID NO: 1299178 - RNA, 19 nt, Homo sapiens
  misc_RNA (1)...(19): siRNA sense strand
agagauaagcaaacacauu

SEQ ID NO: 1299179 - RNA, 19 nt, Homo sapiens
  misc_RNA (1)...(19): siRNA sense strand
cagaugcgccaaauaaauc

SEQ ID NO: 1299180 - RNA, 19 nt, Homo sapiens
  misc_RNA (1)...(19): siRNA sense strand
aaacgaaggauuugugaag

SEQ ID NO: 1299181 - RNA, 19 nt, Homo sapiens
  misc_RNA (1)...(19): siRNA sense strand
caaugacucagaugcauau

SEQ ID NO: 1299182 - RNA, 19 nt, Homo sapiens
  misc_RNA (1)...(19): siRNA sense strand
guuugcaacucucauguuc

SEQ ID NO: 1299183 - RNA, 19 nt, Homo sapiens
  misc_RNA (1)...(19): siRNA sense strand
auacagaaucucucuuuga

SEQ ID NO: 1299184 - RNA, 19 nt, Homo sapiens
  misc_RNA (1)...(19): siRNA sense strand
cuccugagcuggauaugga

SEQ ID NO: 1299185 - RNA, 19 nt, Homo sapiens
  misc_RNA (1)...(19): siRNA sense strand
gucagaaguucaagcaauc

SEQ ID NO: 1299186 - RNA, 19 nt, Homo sapiens
  misc_RNA (1)...(19): siRNA sense strand
gagaagaucuuucagaauc

SEQ ID NO: 1299187 - RNA, 19 nt, Homo sapiens
  misc_RNA (1)...(19): siRNA sense strand
gagcaugucuuuacagauc

SEQ ID NO: 1299188 - RNA, 19 nt, Homo sapiens
  misc_RNA (1)...(19): siRNA sense strand
ccaggaaacuagaaaugua

SEQ ID NO: 1299189 - RNA, 19 nt, Homo sapiens
  misc_RNA (1)...(19): siRNA sense strand
acaaagaucucaguggaua

SEQ ID NO: 1299190 - RNA, 19 nt, Homo sapiens
  misc_RNA (1)...(19): siRNA sense strand
ugacucagaugcauauaaa

SEQ ID NO: 1299191 - RNA, 19 nt, Homo sapiens
  misc_RNA (1)...(19): siRNA sense strand
gcaaacacauugaaguaca

SEQ ID NO: 1299192 - RNA, 19 nt, Homo sapiens
  misc_RNA (1)...(19): siRNA sense strand
gucaaacuaucaccucuua

SEQ ID NO: 1299193 - RNA, 19 nt, Homo sapiens
  misc_RNA (1)...(19): siRNA sense strand
gaagaauuauccagucuag

SEQ ID NO: 1299194 - RNA, 19 nt, Homo sapiens
  misc_RNA (1)...(19): siRNA sense strand
gaugagcuuucugauguua

SEQ ID NO: 1299195 - RNA, 19 nt, Homo sapiens
  misc_RNA (1)...(19): siRNA sense strand
gcaacaauuccuacugaua

SEQ ID NO: 1299196 - RNA, 19 nt, Homo sapiens
  misc_RNA (1)...(19): siRNA sense strand
uaucaguacugccaaauga

SEQ ID NO: 1299197 - RNA, 19 nt, Homo sapiens
  misc_RNA (1)...(19): siRNA sense strand
gcaacauccuagacaguuu

SEQ ID NO: 1299198 - RNA, 19 nt, Homo sapiens
  misc_RNA (1)...(19): siRNA sense strand
gagauaagcaaacacauug

SEQ ID NO: 1299199 - RNA, 19 nt, Homo sapiens
  misc_RNA (1)...(19): siRNA sense strand
gcauagagaacaaagcuuu

SEQ ID NO: 1299200 - RNA, 19 nt, Homo sapiens
  misc_RNA (1)...(19): siRNA sense strand
agaacgcccuauaucauua

SEQ ID NO: 1299201 - RNA, 19 nt, Homo sapiens
  misc_RNA (1)...(19): siRNA sense strand
uuacagaugcgccaaauaa

SEQ ID NO: 1299202 - RNA, 19 nt, Homo sapiens
  misc_RNA (1)...(19): siRNA sense strand
ggauaaaccaccagaaaug

SEQ ID NO: 1299203 - RNA, 19 nt, Homo sapiens
  misc_RNA (1)...(19): siRNA sense strand
acaaggauguugcugguuu

SEQ ID NO: 1299204 - RNA, 19 nt, Homo sapiens
  misc_RNA (1)...(19): siRNA sense strand
caaggcggaucuaaagcua

SEQ ID NO: 1299205 - RNA, 19 nt, Homo sapiens
  misc_RNA (1)...(19): siRNA sense strand
gaagggaaucguguuagua

SEQ ID NO: 1299206 - RNA, 19 nt, Homo sapiens
  misc_RNA (1)...(19): siRNA sense strand
gagagaagaagcccagaaa

SEQ ID NO: 1299207 - RNA, 19 nt, Homo sapiens
  misc_RNA (1)...(19): siRNA sense strand
ugaagaaacugaagcuagu

SEQ ID NO: 1299208 - RNA, 19 nt, Homo sapiens
  misc_RNA (1)...(19): siRNA sense strand
uacagaaucucucuuugaa

SEQ ID NO: 1299209 - RNA, 19 nt, Homo sapiens
  misc_RNA (1)...(19): siRNA sense strand
gaucugagcaauggaaauu

SEQ ID NO: 1299210 - RNA, 19 nt, Homo sapiens
  misc_RNA (1)...(19): siRNA sense strand
gcaaugacucagaugcaua

SEQ ID NO: 1299211 - RNA, 19 nt, Homo sapiens
  misc_RNA (1)...(19): siRNA sense strand
caauacagaaucucucuuu

SEQ ID NO: 1299212 - RNA, 19 nt, Homo sapiens
  misc_RNA (1)...(19): siRNA sense strand
ccaaaggcauagagaacaa

SEQ ID NO: 1299213 - RNA, 19 nt, Homo sapiens
  misc_RNA (1)...(19): siRNA sense strand
ggagauggauugcuuacac

SEQ ID NO: 1299214 - RNA, 19 nt, Homo sapiens
  misc_RNA (1)...(19): siRNA sense strand
caauggaaauuucaggaau

SEQ ID NO: 1299215 - RNA, 19 nt, Homo sapiens
  misc_RNA (1)...(19): siRNA sense strand
aggaugagcuuucugaugu

SEQ ID NO: 1299216 - RNA, 19 nt, Homo sapiens
  misc_RNA (1)...(19): siRNA sense strand
gaauuauccagucuaguuu

SEQ ID NO: 1299217 - RNA, 19 nt, Homo sapiens
  misc_RNA (1)...(19): siRNA sense strand
aagauucgauucucaguau

SEQ ID NO: 1299218 - RNA, 19 nt, Homo sapiens
  misc_RNA (1)...(19): siRNA sense strand
gaguucagaucccagaaga

SEQ ID NO: 1299219 - RNA, 19 nt, Homo sapiens
  misc_RNA (1)...(19): siRNA sense strand
caaacuaucaccucuuaga

SEQ ID NO: 1299220 - RNA, 19 nt, Homo sapiens
  misc_RNA (1)...(19): siRNA sense strand
agacuacccugcaggagaa

SEQ ID NO: 1299221 - RNA, 19 nt, Homo sapiens
  misc_RNA (1)...(19): siRNA sense strand
guauguccauucaucugua

SEQ ID NO: 1299222 - RNA, 19 nt, Homo sapiens
  misc_RNA (1)...(19): siRNA sense strand
aaacuggcgucuacacaga

SEQ ID NO: 1299223 - RNA, 19 nt, Homo sapiens
  misc_RNA (1)...(19): siRNA sense strand
ggaagaaaacgaaggauuu

SEQ ID NO: 1299224 - RNA, 19 nt, Homo sapiens
  misc_RNA (1)...(19): siRNA sense strand
cuacacagagcaugucuuu

SEQ ID NO: 1299225 - RNA, 19 nt, Homo sapiens
  misc_RNA (1)...(19): siRNA sense strand
aggagaagaucuuucagaa

SEQ ID NO: 1299226 - RNA, 19 nt, Homo sapiens
  misc_RNA (1)...(19): siRNA sense strand
ggauguugcugguuuggau

SEQ ID NO: 1299227 - RNA, 19 nt, Homo sapiens
  misc_RNA (1)...(19): siRNA sense strand
gaagaaaagucagaaguuc

SEQ ID NO: 1299228 - RNA, 19 nt, Homo sapiens
  misc_RNA (1)...(19): siRNA sense strand
uggcaacaauuccuacuga

SEQ ID NO: 1299229 - RNA, 19 nt, Homo sapiens
  misc_RNA (1)...(19): siRNA sense strand
cagagcaugucuuuacaga

SEQ ID NO: 1299230 - RNA, 19 nt, Homo sapiens
  misc_RNA (1)...(19): siRNA sense strand
gcacucauucggcuacaaa

SEQ ID NO: 1299231 - RNA, 19 nt, Homo sapiens
  misc_RNA (1)...(19): siRNA sense strand
agaauuauccagucuaguu

SEQ ID NO: 1299232 - RNA, 19 nt, Homo sapiens
  misc_RNA (1)...(19): siRNA sense strand
acaaacagguaaccaaugg

SEQ ID NO: 1299233 - RNA, 19 nt, Homo sapiens
  misc_RNA (1)...(19): siRNA sense strand
gauaagcaaacacauugaa

SEQ ID NO: 1299234 - RNA, 19 nt, Homo sapiens
  misc_RNA (1)...(19): siRNA sense strand
gcaauggaaauuucaggaa

SEQ ID NO: 1299235 - RNA, 19 nt, Homo sapiens
  misc_RNA (1)...(19): siRNA sense strand
caacaauuccuacugauac

SEQ ID NO: 1299236 - RNA, 19 nt, Homo sapiens
  misc_RNA (1)...(19): siRNA sense strand
gaagaagcccagaaaauga

SEQ ID NO: 1299237 - RNA, 19 nt, Homo sapiens
  misc_RNA (1)...(19): siRNA sense strand
ggaaguaugacaagcaaca

SEQ ID NO: 1299238 - RNA, 19 nt, Homo sapiens
  misc_RNA (1)...(19): siRNA sense strand
gaauuaagucaaccacguu

SEQ ID NO: 1299239 - RNA, 19 nt, Homo sapiens
  misc_RNA (1)...(19): siRNA sense strand
aagcaaacacauugaagua

SEQ ID NO: 1299240 - RNA, 19 nt, Homo sapiens
  misc_RNA (1)...(19): siRNA sense strand
cuacugauacucccuuaaa

SEQ ID NO: 1299241 - RNA, 19 nt, Homo sapiens
  misc_RNA (1)...(19): siRNA sense strand
caacagcuaauucagaugu

SEQ ID NO: 1299242 - RNA, 19 nt, Homo sapiens
  misc_RNA (1)...(19): siRNA sense strand
cagaguaguuuagauaagu

SEQ ID NO: 1299243 - RNA, 19 nt, Homo sapiens
  misc_RNA (1)...(19): siRNA sense strand
ucucagaguaguuuagaua

SEQ ID NO: 1299244 - RNA, 19 nt, Homo sapiens
  misc_RNA (1)...(19): siRNA sense strand
guacaaacagguaaccaau

SEQ ID NO: 1299245 - RNA, 19 nt, Homo sapiens
  misc_RNA (1)...(19): siRNA sense strand
gaaggauuugugaagguua

SEQ ID NO: 1299246 - RNA, 19 nt, Homo sapiens
  misc_RNA (1)...(19): siRNA sense strand
ggaugagcuuucugauguu

SEQ ID NO: 1299247 - RNA, 19 nt, Homo sapiens
  misc_RNA (1)...(19): siRNA sense strand
gaaaagaacgcccuauauc

SEQ ID NO: 1299248 - RNA, 19 nt, Homo sapiens
  misc_RNA (1)...(19): siRNA sense strand
gauggugguucuguuguug

SEQ ID NO: 1299249 - RNA, 19 nt, Homo sapiens
  misc_RNA (1)...(19): siRNA sense strand
cgaaggauuugugaagguu

SEQ ID NO: 1299250 - RNA, 19 nt, Homo sapiens
  misc_RNA (1)...(19): siRNA sense strand
aaagaucucaguggauaua

SEQ ID NO: 1299251 - RNA, 19 nt, Homo sapiens
  misc_RNA (1)...(19): siRNA sense strand
acacagagcaugucuuuac

SEQ ID NO: 1299252 - RNA, 19 nt, Homo sapiens
  misc_RNA (1)...(19): siRNA sense strand
ggagaagaucuuucagaau

SEQ ID NO: 1299253 - RNA, 19 nt, Homo sapiens
  misc_RNA (1)...(19): siRNA sense strand
gaacagcagaaggaguuaa

SEQ ID NO: 1299254 - RNA, 19 nt, Homo sapiens
  misc_RNA (1)...(19): siRNA sense strand
ggauacagaaggcaguaaa

SEQ ID NO: 1299255 - RNA, 19 nt, Homo sapiens
  misc_RNA (1)...(19): siRNA sense strand
aagcacauguucagaagga

SEQ ID NO: 1299256 - RNA, 19 nt, Homo sapiens
  misc_RNA (1)...(19): siRNA sense strand
caaggauguugcugguuug

SEQ ID NO: 1299257 - RNA, 19 nt, Homo sapiens
  misc_RNA (1)...(19): siRNA sense strand
gaagaagcaacugaagcua

SEQ ID NO: 1299258 - RNA, 19 nt, Homo sapiens
  misc_RNA (1)...(19): siRNA sense strand
caacagcucagcagagaca

SEQ ID NO: 1299259 - RNA, 19 nt, Homo sapiens
  misc_RNA (1)...(19): siRNA sense strand
aaucagagauaagcaaaca

SEQ ID NO: 1299260 - RNA, 19 nt, Homo sapiens
  misc_RNA (1)...(19): siRNA sense strand
guggacaucucccaaacug

SEQ ID NO: 1299261 - RNA, 19 nt, Homo sapiens
  misc_RNA (1)...(19): siRNA sense strand
caucaacagcuaauucaga

SEQ ID NO: 1299262 - RNA, 19 nt, Homo sapiens
  misc_RNA (1)...(19): siRNA sense strand
agaagcaacugaagcuaca

SEQ ID NO: 1299263 - RNA, 19 nt, Homo sapiens
  misc_RNA (1)...(19): siRNA sense strand
ugaaggaugagcuuucuga

SEQ ID NO: 1299264 - RNA, 19 nt, Homo sapiens
  misc_RNA (1)...(19): siRNA sense strand
ggauauaaagguucaagca

SEQ ID NO: 1299265 - RNA, 19 nt, Homo sapiens
  misc_RNA (1)...(19): siRNA sense strand
auaccagccugaaggauga

SEQ ID NO: 1299266 - RNA, 19 nt, Homo sapiens
  misc_RNA (1)...(19): siRNA sense strand
ugaagggaaucguguuagu

SEQ ID NO: 1299267 - RNA, 19 nt, Homo sapiens
  misc_RNA (1)...(19): siRNA sense strand
aaauaucaguacugccaaa

SEQ ID NO: 1299268 - RNA, 19 nt, Homo sapiens
  misc_RNA (1)...(19): siRNA sense strand
ucagaugcauauaaagauc

SEQ ID NO: 1299269 - RNA, 19 nt, Homo sapiens
  misc_RNA (1)...(19): siRNA sense strand
gaagaccucuccccagugu

SEQ ID NO: 1299270 - RNA, 19 nt, Homo sapiens
  misc_RNA (1)...(19): siRNA sense strand
aaagaacgcccuauaucau

SEQ ID NO: 1299271 - RNA, 19 nt, Homo sapiens
  misc_RNA (1)...(19): siRNA sense strand
gaaauggaagcagaaaaua

SEQ ID NO: 1299272 - RNA, 19 nt, Homo sapiens
  misc_RNA (1)...(19): siRNA sense strand
ucacagugguugguuguuc

SEQ ID NO: 1299273 - RNA, 19 nt, Homo sapiens
  misc_RNA (1)...(19): siRNA sense strand
gcaucuuuauguggaagua

SEQ ID NO: 1299274 - RNA, 19 nt, Homo sapiens
  misc_RNA (1)...(19): siRNA sense strand
caaccacguucucauacca

SEQ ID NO: 1299275 - RNA, 19 nt, Homo sapiens
  misc_RNA (1)...(19): siRNA sense strand
guggaaguaugacaagcaa

SEQ ID NO: 1299276 - RNA, 19 nt, Homo sapiens
  misc_RNA (1)...(19): siRNA sense strand
agucagaaguucaagcaau

SEQ ID NO: 1299277 - RNA, 19 nt, Homo sapiens
  misc_RNA (1)...(19): siRNA sense strand
guacagguagcccaggaaa

SEQ ID NO: 1299278 - RNA, 19 nt, Homo sapiens
  misc_RNA (1)...(19): siRNA sense strand
agagauaagcaaacacauu

SEQ ID NO: 1299279 - RNA, 19 nt, Homo sapiens
  misc_RNA (1)...(19): siRNA sense strand
cagaugcgccaaauaaauc

SEQ ID NO: 1299280 - RNA, 19 nt, Homo sapiens
  misc_RNA (1)...(19): siRNA sense strand
aaacgaaggauuugugaag

SEQ ID NO: 1299281 - RNA, 19 nt, Homo sapiens
  misc_RNA (1)...(19): siRNA sense strand
caaugacucagaugcauau

SEQ ID NO: 1299282 - RNA, 19 nt, Homo sapiens
  misc_RNA (1)...(19): siRNA sense strand
guuugcaacucucauguuc

SEQ ID NO: 1299283 - RNA, 19 nt, Homo sapiens
  misc_RNA (1)...(19): siRNA sense strand
auacagaaucucucuuuga

SEQ ID NO: 1299284 - RNA, 19 nt, Homo sapiens
  misc_RNA (1)...(19): siRNA sense strand
cuccugagcuggauaugga

SEQ ID NO: 1299285 - RNA, 19 nt, Homo sapiens
  misc_RNA (1)...(19): siRNA sense strand
gucagaaguucaagcaauc

SEQ ID NO: 1299286 - RNA, 19 nt, Homo sapiens
  misc_RNA (1)...(19): siRNA sense strand
gcaaugggcuacuucaaau

SEQ ID NO: 1299287 - RNA, 19 nt, Homo sapiens
  misc_RNA (1)...(19): siRNA sense strand
ucacagaccuuucacaaau

SEQ ID NO: 1299288 - RNA, 19 nt, Homo sapiens
  misc_RNA (1)...(19): siRNA sense strand
ggauggauauggugaguuu

SEQ ID NO: 1299289 - RNA, 19 nt, Homo sapiens
  misc_RNA (1)...(19): siRNA sense strand
gacgucagcuucuucauuu

SEQ ID NO: 1299290 - RNA, 19 nt, Homo sapiens
  misc_RNA (1)...(19): siRNA sense strand
caaacuggauuauaacuug

SEQ ID NO: 1299291 - RNA, 19 nt, Homo sapiens
  misc_RNA (1)...(19): siRNA sense strand
gaggaaaucagaaagauaa

SEQ ID NO: 1299292 - RNA, 19 nt, Homo sapiens
  misc_RNA (1)...(19): siRNA sense strand
gaagauuucucagcucauu

SEQ ID NO: 1299293 - RNA, 19 nt, Homo sapiens
  misc_RNA (1)...(19): siRNA sense strand
caugagaaauguccaguuu

SEQ ID NO: 1299294 - RNA, 19 nt, Homo sapiens
  misc_RNA (1)...(19): siRNA sense strand
gaaaggaacaagugucauu

SEQ ID NO: 1299295 - RNA, 19 nt, Homo sapiens
  misc_RNA (1)...(19): siRNA sense strand
aaagaucgauugggaauuu

SEQ ID NO: 1299296 - RNA, 19 nt, Homo sapiens
  misc_RNA (1)...(19): siRNA sense strand
uaaaggaaguggaacaaga

SEQ ID NO: 1299297 - RNA, 19 nt, Homo sapiens
  misc_RNA (1)...(19): siRNA sense strand
ggauauaacaguccacuuu

SEQ ID NO: 1299298 - RNA, 19 nt, Homo sapiens
  misc_RNA (1)...(19): siRNA sense strand
ucagaaagccucaaugaaa

SEQ ID NO: 1299299 - RNA, 19 nt, Homo sapiens
  misc_RNA (1)...(19): siRNA sense strand
aaagauaacuggcgucugu

SEQ ID NO: 1299300 - RNA, 19 nt, Homo sapiens
  misc_RNA (1)...(19): siRNA sense strand
gaaauuaacagcaggaauc

SEQ ID NO: 1299301 - RNA, 19 nt, Homo sapiens
  misc_RNA (1)...(19): siRNA sense strand
gagaugagcgccauuauuc

SEQ ID NO: 1299302 - RNA, 19 nt, Homo sapiens
  misc_RNA (1)...(19): siRNA sense strand
gaacaaguggagaugauaa

SEQ ID NO: 1299303 - RNA, 19 nt, Homo sapiens
  misc_RNA (1)...(19): siRNA sense strand
gaacaaauaacauccuuca

SEQ ID NO: 1299304 - RNA, 19 nt, Homo sapiens
  misc_RNA (1)...(19): siRNA sense strand
agagagagcuuauuggaau

SEQ ID NO: 1299305 - RNA, 19 nt, Homo sapiens
  misc_RNA (1)...(19): siRNA sense strand
gaucaucaauaacacagaa

SEQ ID NO: 1299306 - RNA, 19 nt, Homo sapiens
  misc_RNA (1)...(19): siRNA sense strand
ucagaaauguuaagaagga

SEQ ID NO: 1299307 - RNA, 19 nt, Homo sapiens
  misc_RNA (1)...(19): siRNA sense strand
gaagacauuaccuuucaua

SEQ ID NO: 1299308 - RNA, 19 nt, Homo sapiens
  misc_RNA (1)...(19): siRNA sense strand
gacauuaccuuucauaacu

SEQ ID NO: 1299309 - RNA, 19 nt, Homo sapiens
  misc_RNA (1)...(19): siRNA sense strand
gcuauuggcauuauacuuu

SEQ ID NO: 1299310 - RNA, 19 nt, Homo sapiens
  misc_RNA (1)...(19): siRNA sense strand
gcagugaagcauaacuuua

SEQ ID NO: 1299311 - RNA, 19 nt, Homo sapiens
  misc_RNA (1)...(19): siRNA sense strand
uagaagcagugaagcauaa

SEQ ID NO: 1299312 - RNA, 19 nt, Homo sapiens
  misc_RNA (1)...(19): siRNA sense strand
gaugagaaaccuguuauaa

SEQ ID NO: 1299313 - RNA, 19 nt, Homo sapiens
  misc_RNA (1)...(19): siRNA sense strand
cagaagaacccauagauga

SEQ ID NO: 1299314 - RNA, 19 nt, Homo sapiens
  misc_RNA (1)...(19): siRNA sense strand
cagaaagccucaaugaaau

SEQ ID NO: 1299315 - RNA, 19 nt, Homo sapiens
  misc_RNA (1)...(19): siRNA sense strand
ugaaauauguaacccagaa

SEQ ID NO: 1299316 - RNA, 19 nt, Homo sapiens
  misc_RNA (1)...(19): siRNA sense strand
gaucaguuaccaucuauaa

SEQ ID NO: 1299317 - RNA, 19 nt, Homo sapiens
  misc_RNA (1)...(19): siRNA sense strand
uggcaaaucuucacugcua

SEQ ID NO: 1299318 - RNA, 19 nt, Homo sapiens
  misc_RNA (1)...(19): siRNA sense strand
ggaaggguagauaaauuua

SEQ ID NO: 1299319 - RNA, 19 nt, Homo sapiens
  misc_RNA (1)...(19): siRNA sense strand
uaagaugcauggaacuaaa

SEQ ID NO: 1299320 - RNA, 19 nt, Homo sapiens
  misc_RNA (1)...(19): siRNA sense strand
ucaagcccauuuccucuua

SEQ ID NO: 1299321 - RNA, 19 nt, Homo sapiens
  misc_RNA (1)...(19): siRNA sense strand
ucagugaucuggauaagug

SEQ ID NO: 1299322 - RNA, 19 nt, Homo sapiens
  misc_RNA (1)...(19): siRNA sense strand
ggaaacuccucccucauuc

SEQ ID NO: 1299323 - RNA, 19 nt, Homo sapiens
  misc_RNA (1)...(19): siRNA sense strand
gaaggaaacgucucaagug

SEQ ID NO: 1299324 - RNA, 19 nt, Homo sapiens
  misc_RNA (1)...(19): siRNA sense strand
uaugcuggcuucaucuuua

SEQ ID NO: 1299325 - RNA, 19 nt, Homo sapiens
  misc_RNA (1)...(19): siRNA sense strand
gaacaggaaguaggaaauu

SEQ ID NO: 1299326 - RNA, 19 nt, Homo sapiens
  misc_RNA (1)...(19): siRNA sense strand
gaaaauagcagcaagaaau

SEQ ID NO: 1299327 - RNA, 19 nt, Homo sapiens
  misc_RNA (1)...(19): siRNA sense strand
uaacauccuucauuacuca

SEQ ID NO: 1299328 - RNA, 19 nt, Homo sapiens
  misc_RNA (1)...(19): siRNA sense strand
gaacaagagguacaacgaa

SEQ ID NO: 1299329 - RNA, 19 nt, Homo sapiens
  misc_RNA (1)...(19): siRNA sense strand
ggacuaaugcuaagguuau

SEQ ID NO: 1299330 - RNA, 19 nt, Homo sapiens
  misc_RNA (1)...(19): siRNA sense strand
ggaaguggaacaagaggua

SEQ ID NO: 1299331 - RNA, 19 nt, Homo sapiens
  misc_RNA (1)...(19): siRNA sense strand
gaauacagccuuucucagu

SEQ ID NO: 1299332 - RNA, 19 nt, Homo sapiens
  misc_RNA (1)...(19): siRNA sense strand
acagaccuuucacaaauua

SEQ ID NO: 1299333 - RNA, 19 nt, Homo sapiens
  misc_RNA (1)...(19): siRNA sense strand
ccaagagauugcacuguuu

SEQ ID NO: 1299334 - RNA, 19 nt, Homo sapiens
  misc_RNA (1)...(19): siRNA sense strand
ggucuuggauaucaccuaa

SEQ ID NO: 1299335 - RNA, 19 nt, Homo sapiens
  misc_RNA (1)...(19): siRNA sense strand
ugagugugcuguuaaagaa

SEQ ID NO: 1299336 - RNA, 19 nt, Homo sapiens
  misc_RNA (1)...(19): siRNA sense strand
ucugaccacuucaaucuua

SEQ ID NO: 1299337 - RNA, 19 nt, Homo sapiens
  misc_RNA (1)...(19): siRNA sense strand
gguauugguuccuucauau

SEQ ID NO: 1299338 - RNA, 19 nt, Homo sapiens
  misc_RNA (1)...(19): siRNA sense strand
aaacacacauggacgaaau

SEQ ID NO: 1299339 - RNA, 19 nt, Homo sapiens
  misc_RNA (1)...(19): siRNA sense strand
ggaaacgucucaagugacu

SEQ ID NO: 1299340 - RNA, 19 nt, Homo sapiens
  misc_RNA (1)...(19): siRNA sense strand
cagcaggaaucacgagaaa

SEQ ID NO: 1299341 - RNA, 19 nt, Homo sapiens
  misc_RNA (1)...(19): siRNA sense strand
ccacugcucugaccacuuc

SEQ ID NO: 1299342 - RNA, 19 nt, Homo sapiens
  misc_RNA (1)...(19): siRNA sense strand
gaacuaaaauguggaaaga

SEQ ID NO: 1299343 - RNA, 19 nt, Homo sapiens
  misc_RNA (1)...(19): siRNA sense strand
aaacagaaaugguacugau

SEQ ID NO: 1299344 - RNA, 19 nt, Homo sapiens
  misc_RNA (1)...(19): siRNA sense strand
aagauaaccuugcuaaaca

SEQ ID NO: 1299345 - RNA, 19 nt, Homo sapiens
  misc_RNA (1)...(19): siRNA sense strand
cauguacauugaccaaaua

SEQ ID NO: 1299346 - RNA, 19 nt, Homo sapiens
  misc_RNA (1)...(19): siRNA sense strand
gaacaagauuucgaacaag

SEQ ID NO: 1299347 - RNA, 19 nt, Homo sapiens
  misc_RNA (1)...(19): siRNA sense strand
guacugauggccucucaua

SEQ ID NO: 1299348 - RNA, 19 nt, Homo sapiens
  misc_RNA (1)...(19): siRNA sense strand
cuuaagaaauggaggauga

SEQ ID NO: 1299349 - RNA, 19 nt, Homo sapiens
  misc_RNA (1)...(19): siRNA sense strand
gaaggacagucaacuaucg

SEQ ID NO: 1299350 - RNA, 19 nt, Homo sapiens
  misc_RNA (1)...(19): siRNA sense strand
gggaaggguagauaaauuu

SEQ ID NO: 1299351 - RNA, 19 nt, Homo sapiens
  misc_RNA (1)...(19): siRNA sense strand
ggacgucagcuucuucauu

SEQ ID NO: 1299352 - RNA, 19 nt, Homo sapiens
  misc_RNA (1)...(19): siRNA sense strand
uauguagcauuucuccuua

SEQ ID NO: 1299353 - RNA, 19 nt, Homo sapiens
  misc_RNA (1)...(19): siRNA sense strand
caugucaacucuaaaugaa

SEQ ID NO: 1299354 - RNA, 19 nt, Homo sapiens
  misc_RNA (1)...(19): siRNA sense strand
ggaggaaaucagaaagaua

SEQ ID NO: 1299355 - RNA, 19 nt, Homo sapiens
  misc_RNA (1)...(19): siRNA sense strand
ucaggagacucauauacaa

SEQ ID NO: 1299356 - RNA, 19 nt, Homo sapiens
  misc_RNA (1)...(19): siRNA sense strand
gaaaagagagagcuuauug

SEQ ID NO: 1299357 - RNA, 19 nt, Homo sapiens
  misc_RNA (1)...(19): siRNA sense strand
gcuaugggaaucaucuuua

SEQ ID NO: 1299358 - RNA, 19 nt, Homo sapiens
  misc_RNA (1)...(19): siRNA sense strand
uggcaaggauuacauucua

SEQ ID NO: 1299359 - RNA, 19 nt, Homo sapiens
  misc_RNA (1)...(19): siRNA sense strand
ggagaugagcgccauuauu

SEQ ID NO: 1299360 - RNA, 19 nt, Homo sapiens
  misc_RNA (1)...(19): siRNA sense strand
agagguacaacgaauauua

SEQ ID NO: 1299361 - RNA, 19 nt, Homo sapiens
  misc_RNA (1)...(19): siRNA sense strand
gaauguuccugugcagaaa

SEQ ID NO: 1299362 - RNA, 19 nt, Homo sapiens
  misc_RNA (1)...(19): siRNA sense strand
ucauauaccuugcuuggau

SEQ ID NO: 1299363 - RNA, 19 nt, Homo sapiens
  misc_RNA (1)...(19): siRNA sense strand
guuauugacccuauuauug

SEQ ID NO: 1299364 - RNA, 19 nt, Homo sapiens
  misc_RNA (1)...(19): siRNA sense strand
uggaauggcuccucagaau

SEQ ID NO: 1299365 - RNA, 19 nt, Homo sapiens
  misc_RNA (1)...(19): siRNA sense strand
gagaaaccuguuauaauug

SEQ ID NO: 1299366 - RNA, 19 nt, Homo sapiens
  misc_RNA (1)...(19): siRNA sense strand
guagagaugcuaagccaaa

SEQ ID NO: 1299367 - RNA, 19 nt, Homo sapiens
  misc_RNA (1)...(19): siRNA sense strand
gauaagagacucagaaagc

SEQ ID NO: 1299368 - RNA, 19 nt, Homo sapiens
  misc_RNA (1)...(19): siRNA sense strand
aagcuguccucaccaauuu

SEQ ID NO: 1299369 - RNA, 19 nt, Homo sapiens
  misc_RNA (1)...(19): siRNA sense strand
acuuuaaccuggaagaaua

SEQ ID NO: 1299370 - RNA, 19 nt, Homo sapiens
  misc_RNA (1)...(19): siRNA sense strand
ugacuuugguccacacuga

SEQ ID NO: 1299371 - RNA, 19 nt, Homo sapiens
  misc_RNA (1)...(19): siRNA sense strand
aaggaaacgucucaaguga

SEQ ID NO: 1299372 - RNA, 19 nt, Homo sapiens
  misc_RNA (1)...(19): siRNA sense strand
ggauuacauucuagagcua

SEQ ID NO: 1299373 - RNA, 19 nt, Homo sapiens
  misc_RNA (1)...(19): siRNA sense strand
ucucuugucuucuucauau

SEQ ID NO: 1299374 - RNA, 19 nt, Homo sapiens
  misc_RNA (1)...(19): siRNA sense strand
gauggccucucauacaaug

SEQ ID NO: 1299375 - RNA, 19 nt, Homo sapiens
  misc_RNA (1)...(19): siRNA sense strand
uaaaaucacugaagcauca

SEQ ID NO: 1299376 - RNA, 19 nt, Homo sapiens
  misc_RNA (1)...(19): siRNA sense strand
ccacuggaaaggacaaaua

SEQ ID NO: 1299377 - RNA, 19 nt, Homo sapiens
  misc_RNA (1)...(19): siRNA sense strand
gaaaagugaucauguccaa

SEQ ID NO: 1299378 - RNA, 19 nt, Homo sapiens
  misc_RNA (1)...(19): siRNA sense strand
ggucucaucuacuugcuau

SEQ ID NO: 1299379 - RNA, 19 nt, Homo sapiens
  misc_RNA (1)...(19): siRNA sense strand
uaauuuaacccagcagaua

SEQ ID NO: 1299380 - RNA, 19 nt, Homo sapiens
  misc_RNA (1)...(19): siRNA sense strand
ucaagaaggugaaauuuug

SEQ ID NO: 1299381 - RNA, 19 nt, Homo sapiens
  misc_RNA (1)...(19): siRNA sense strand
caacauauucgaauugagu

SEQ ID NO: 1299382 - RNA, 19 nt, Homo sapiens
  misc_RNA (1)...(19): siRNA sense strand
cccagcagauaaugaauaa

SEQ ID NO: 1299383 - RNA, 19 nt, Homo sapiens
  misc_RNA (1)...(19): siRNA sense strand
gcaggaaucacgagaaagu

SEQ ID NO: 1299384 - RNA, 19 nt, Homo sapiens
  misc_RNA (1)...(19): siRNA sense strand
gaagguauucuuagagcuu

SEQ ID NO: 1299385 - RNA, 19 nt, Homo sapiens
  misc_RNA (1)...(19): siRNA sense strand
cagugaagcauaacuuuaa

SEQ ID NO: 1299386 - RNA, 19 nt, Homo sapiens
  misc_RNA (1)...(19): siRNA sense strand
ggauggauauggugaguuu

SEQ ID NO: 1299387 - RNA, 19 nt, Homo sapiens
  misc_RNA (1)...(19): siRNA sense strand
caaacuggauuauaacuug

SEQ ID NO: 1299388 - RNA, 19 nt, Homo sapiens
  misc_RNA (1)...(19): siRNA sense strand
gaggaaaucagaaagauaa

SEQ ID NO: 1299389 - RNA, 19 nt, Homo sapiens
  misc_RNA (1)...(19): siRNA sense strand
gaagauuucucagcucauu

SEQ ID NO: 1299390 - RNA, 19 nt, Homo sapiens
  misc_RNA (1)...(19): siRNA sense strand
caugagaaauguccaguuu

SEQ ID NO: 1299391 - RNA, 19 nt, Homo sapiens
  misc_RNA (1)...(19): siRNA sense strand
gaaaggaacaagugucauu

SEQ ID NO: 1299392 - RNA, 19 nt, Homo sapiens
  misc_RNA (1)...(19): siRNA sense strand
uaaaggaaguggaacaaga

SEQ ID NO: 1299393 - RNA, 19 nt, Homo sapiens
  misc_RNA (1)...(19): siRNA sense strand
ggauauaacaguccacuuu

SEQ ID NO: 1299394 - RNA, 19 nt, Homo sapiens
  misc_RNA (1)...(19): siRNA sense strand
aaagauaacuggcgucugu

SEQ ID NO: 1299395 - RNA, 19 nt, Homo sapiens
  misc_RNA (1)...(19): siRNA sense strand
gagaugagcgccauuauuc

SEQ ID NO: 1299396 - RNA, 19 nt, Homo sapiens
  misc_RNA (1)...(19): siRNA sense strand
agagagagcuuauuggaau

SEQ ID NO: 1299397 - RNA, 19 nt, Homo sapiens
  misc_RNA (1)...(19): siRNA sense strand
ucagaaauguuaagaagga

SEQ ID NO: 1299398 - RNA, 19 nt, Homo sapiens
  misc_RNA (1)...(19): siRNA sense strand
gaagacauuaccuuucaua

SEQ ID NO: 1299399 - RNA, 19 nt, Homo sapiens
  misc_RNA (1)...(19): siRNA sense strand
gacauuaccuuucauaacu

SEQ ID NO: 1299400 - RNA, 19 nt, Homo sapiens
  misc_RNA (1)...(19): siRNA sense strand
gcuauuggcauuauacuuu

SEQ ID NO: 1299401 - RNA, 19 nt, Homo sapiens
  misc_RNA (1)...(19): siRNA sense strand
gaucaguuaccaucuauaa

SEQ ID NO: 1299402 - RNA, 19 nt, Homo sapiens
  misc_RNA (1)...(19): siRNA sense strand
uggcaaaucuucacugcua

SEQ ID NO: 1299403 - RNA, 19 nt, Homo sapiens
  misc_RNA (1)...(19): siRNA sense strand
ggaaggguagauaaauuua

SEQ ID NO: 1299404 - RNA, 19 nt, Homo sapiens
  misc_RNA (1)...(19): siRNA sense strand
uaugcuggcuucaucuuua

SEQ ID NO: 1299405 - RNA, 19 nt, Homo sapiens
  misc_RNA (1)...(19): siRNA sense strand
gaacaagagguacaacgaa

SEQ ID NO: 1299406 - RNA, 19 nt, Homo sapiens
  misc_RNA (1)...(19): siRNA sense strand
ggacuaaugcuaagguuau

SEQ ID NO: 1299407 - RNA, 19 nt, Homo sapiens
  misc_RNA (1)...(19): siRNA sense strand
ggaaguggaacaagaggua

SEQ ID NO: 1299408 - RNA, 19 nt, Homo sapiens
  misc_RNA (1)...(19): siRNA sense strand
ugagugugcuguuaaagaa

SEQ ID NO: 1299409 - RNA, 19 nt, Homo sapiens
  misc_RNA (1)...(19): siRNA sense strand
aaacacacauggacgaaau

SEQ ID NO: 1299410 - RNA, 19 nt, Homo sapiens
  misc_RNA (1)...(19): siRNA sense strand
aagauaaccuugcuaaaca

SEQ ID NO: 1299411 - RNA, 19 nt, Homo sapiens
  misc_RNA (1)...(19): siRNA sense strand
cauguacauugaccaaaua

SEQ ID NO: 1299412 - RNA, 19 nt, Homo sapiens
  misc_RNA (1)...(19): siRNA sense strand
cuuaagaaauggaggauga

SEQ ID NO: 1299413 - RNA, 19 nt, Homo sapiens
  misc_RNA (1)...(19): siRNA sense strand
gaaaagagagagcuuauug

SEQ ID NO: 1299414 - RNA, 19 nt, Homo sapiens
  misc_RNA (1)...(19): siRNA sense strand
ggaggaaaucagaaagaua

SEQ ID NO: 1299415 - RNA, 19 nt, Homo sapiens
  misc_RNA (1)...(19): siRNA sense strand
ucaggagacucauauacaa

SEQ ID NO: 1299416 - RNA, 19 nt, Homo sapiens
  misc_RNA (1)...(19): siRNA sense strand
gggaaggguagauaaauuu

SEQ ID NO: 1299417 - RNA, 19 nt, Homo sapiens
  misc_RNA (1)...(19): siRNA sense strand
gcuaugggaaucaucuuua

SEQ ID NO: 1299418 - RNA, 19 nt, Homo sapiens
  misc_RNA (1)...(19): siRNA sense strand
ggagaugagcgccauuauu

SEQ ID NO: 1299419 - RNA, 19 nt, Homo sapiens
  misc_RNA (1)...(19): siRNA sense strand
agagguacaacgaauauua

SEQ ID NO: 1299420 - RNA, 19 nt, Homo sapiens
  misc_RNA (1)...(19): siRNA sense strand
uggaauggcuccucagaau

SEQ ID NO: 1299421 - RNA, 19 nt, Homo sapiens
  misc_RNA (1)...(19): siRNA sense strand
aagcuguccucaccaauuu

SEQ ID NO: 1299422 - RNA, 19 nt, Homo sapiens
  misc_RNA (1)...(19): siRNA sense strand
ggucucaucuacuugcuau

SEQ ID NO: 1299423 - RNA, 19 nt, Homo sapiens
  misc_RNA (1)...(19): siRNA sense strand
uaauuuaacccagcagaua

SEQ ID NO: 1299424 - RNA, 19 nt, Homo sapiens
  misc_RNA (1)...(19): siRNA sense strand
cccagcagauaaugaauaa

SEQ ID NO: 1299425 - RNA, 19 nt, Homo sapiens
  misc_RNA (1)...(19): siRNA sense strand
gaaaucagaaagauaacug

SEQ ID NO: 1299426 - RNA, 19 nt, Homo sapiens
  misc_RNA (1)...(19): siRNA sense strand
gcgccauuauucuccuuua

SEQ ID NO: 1299427 - RNA, 19 nt, Homo sapiens
  misc_RNA (1)...(19): siRNA sense strand
accaguagcuccugaauuc

SEQ ID NO: 1299428 - RNA, 19 nt, Homo sapiens
  misc_RNA (1)...(19): siRNA sense strand
ccaaaggacuaaugcuaag

SEQ ID NO: 1299429 - RNA, 19 nt, Homo sapiens
  misc_RNA (1)...(19): siRNA sense strand
gauauaacaguccacuuug

SEQ ID NO: 1299430 - RNA, 19 nt, Homo sapiens
  misc_RNA (1)...(19): siRNA sense strand
caagagguacaacgaauau

SEQ ID NO: 1299431 - RNA, 19 nt, Homo sapiens
  misc_RNA (1)...(19): siRNA sense strand
ggauucaucuaaaggaagu

SEQ ID NO: 1299432 - RNA, 19 nt, Homo sapiens
  misc_RNA (1)...(19): siRNA sense strand
cuuaauggauugucuguuc

SEQ ID NO: 1299433 - RNA, 19 nt, Homo sapiens
  misc_RNA (1)...(19): siRNA sense strand
gaaaagaagccaucagaau

SEQ ID NO: 1299434 - RNA, 19 nt, Homo sapiens
  misc_RNA (1)...(19): siRNA sense strand
gacgaaauacuucuggaaa

SEQ ID NO: 1299435 - RNA, 19 nt, Homo sapiens
  misc_RNA (1)...(19): siRNA sense strand
caguggagcuggcaaaucu

SEQ ID NO: 1299436 - RNA, 19 nt, Homo sapiens
  misc_RNA (1)...(19): siRNA sense strand
cuaagguuauugagaaaga

SEQ ID NO: 1299437 - RNA, 19 nt, Homo sapiens
  misc_RNA (1)...(19): siRNA sense strand
uagaggauuuguggcuuua

SEQ ID NO: 1299438 - RNA, 19 nt, Homo sapiens
  misc_RNA (1)...(19): siRNA sense strand
cuaugggaaucaucuuuaa

SEQ ID NO: 1299439 - RNA, 19 nt, Homo sapiens
  misc_RNA (1)...(19): siRNA sense strand
ugggaaggguagauaaauu

SEQ ID NO: 1299440 - RNA, 19 nt, Homo sapiens
  misc_RNA (1)...(19): siRNA sense strand
gaagccaucagaaucagaa

SEQ ID NO: 1299441 - RNA, 19 nt, Homo sapiens
  misc_RNA (1)...(19): siRNA sense strand
ccugaugagugugcuguua

SEQ ID NO: 1299442 - RNA, 19 nt, Homo sapiens
  misc_RNA (1)...(19): siRNA sense strand
gaggaguugaugucaguua

SEQ ID NO: 1299443 - RNA, 19 nt, Homo sapiens
  misc_RNA (1)...(19): siRNA sense strand
ggacgaaauacuucuggaa

SEQ ID NO: 1299444 - RNA, 19 nt, Homo sapiens
  misc_RNA (1)...(19): siRNA sense strand
gaauggcuccucagaaucu

SEQ ID NO: 1299445 - RNA, 19 nt, Homo sapiens
  misc_RNA (1)...(19): siRNA sense strand
ggaacaagagguacaacga

SEQ ID NO: 1299446 - RNA, 19 nt, Homo sapiens
  misc_RNA (1)...(19): siRNA sense strand
gcaaaucuucacugcuaaa

SEQ ID NO: 1299447 - RNA, 19 nt, Homo sapiens
  misc_RNA (1)...(19): siRNA sense strand
gcuuaucuuugguagcuuu

SEQ ID NO: 1299448 - RNA, 19 nt, Homo sapiens
  misc_RNA (1)...(19): siRNA sense strand
uuauauggcuuaucuuugg

SEQ ID NO: 1299449 - RNA, 19 nt, Homo sapiens
  misc_RNA (1)...(19): siRNA sense strand
acacauggacgaaauacuu

SEQ ID NO: 1299450 - RNA, 19 nt, Homo sapiens
  misc_RNA (1)...(19): siRNA sense strand
ccaacagaaggaucaguua

SEQ ID NO: 1299451 - RNA, 19 nt, Homo sapiens
  misc_RNA (1)...(19): siRNA sense strand
gaauucaucaucuuguuuc

SEQ ID NO: 1299452 - RNA, 19 nt, Homo sapiens
  misc_RNA (1)...(19): siRNA sense strand
ugucugggauucacuguau

SEQ ID NO: 1299453 - RNA, 19 nt, Homo sapiens
  misc_RNA (1)...(19): siRNA sense strand
ucauguacauugaccaaau

SEQ ID NO: 1299454 - RNA, 19 nt, Homo sapiens
  misc_RNA (1)...(19): siRNA sense strand
uaacccagcagauaaugaa

SEQ ID NO: 1299455 - RNA, 19 nt, Homo sapiens
  misc_RNA (1)...(19): siRNA sense strand
gcugacauccuggcugaua

SEQ ID NO: 1299456 - RNA, 19 nt, Homo sapiens
  misc_RNA (1)...(19): siRNA sense strand
gagguacaacgaauauuau

SEQ ID NO: 1299457 - RNA, 19 nt, Homo sapiens
  misc_RNA (1)...(19): siRNA sense strand
ggaauggggccucucaaua

SEQ ID NO: 1299458 - RNA, 19 nt, Homo sapiens
  misc_RNA (1)...(19): siRNA sense strand
gagagagcuuauuggaaug

SEQ ID NO: 1299459 - RNA, 19 nt, Homo sapiens
  misc_RNA (1)...(19): siRNA sense strand
aaagaagccaucagaauca

SEQ ID NO: 1299460 - RNA, 19 nt, Homo sapiens
  misc_RNA (1)...(19): siRNA sense strand
gggauucacuguauuuuau

SEQ ID NO: 1299461 - RNA, 19 nt, Homo sapiens
  misc_RNA (1)...(19): siRNA sense strand
agaaagcuguccucaccaa

SEQ ID NO: 1299462 - RNA, 19 nt, Homo sapiens
  misc_RNA (1)...(19): siRNA sense strand
guacauugaccaaauacug

SEQ ID NO: 1299463 - RNA, 19 nt, Homo sapiens
  misc_RNA (1)...(19): siRNA sense strand
auacuggaauagaggauuu

SEQ ID NO: 1299464 - RNA, 19 nt, Homo sapiens
  misc_RNA (1)...(19): siRNA sense strand
gaggauuuguggcuuuaca

SEQ ID NO: 1299465 - RNA, 19 nt, Homo sapiens
  misc_RNA (1)...(19): siRNA sense strand
augcuaagguuauugagaa

SEQ ID NO: 1299466 - RNA, 19 nt, Homo sapiens
  misc_RNA (1)...(19): siRNA sense strand
caacaccaaaggacuaaug

SEQ ID NO: 1299467 - RNA, 19 nt, Homo sapiens
  misc_RNA (1)...(19): siRNA sense strand
aaagagagagcuuauugga

SEQ ID NO: 1299468 - RNA, 19 nt, Homo sapiens
  misc_RNA (1)...(19): siRNA sense strand
ugaugagugugcuguuaaa

SEQ ID NO: 1299469 - RNA, 19 nt, Homo sapiens
  misc_RNA (1)...(19): siRNA sense strand
gcuuugguguuccugauga

SEQ ID NO: 1299470 - RNA, 19 nt, Homo sapiens
  misc_RNA (1)...(19): siRNA sense strand
ucuccaagauucagcauuc

SEQ ID NO: 1299471 - RNA, 19 nt, Homo sapiens
  misc_RNA (1)...(19): siRNA sense strand
gcucauugcugggauggau

SEQ ID NO: 1299472 - RNA, 19 nt, Homo sapiens
  misc_RNA (1)...(19): siRNA sense strand
aaggaucaguuaccaucua

SEQ ID NO: 1299473 - RNA, 19 nt, Homo sapiens
  misc_RNA (1)...(19): siRNA sense strand
caccaaaggacuaaugcua

SEQ ID NO: 1299474 - RNA, 19 nt, Homo sapiens
  misc_RNA (1)...(19): siRNA sense strand
gcuggcuucaucuuuauua

SEQ ID NO: 1299475 - RNA, 19 nt, Homo sapiens
  misc_RNA (1)...(19): siRNA sense strand
ugaugggucuccaagauuc

SEQ ID NO: 1299476 - RNA, 19 nt, Homo sapiens
  misc_RNA (1)...(19): siRNA sense strand
gaccaaauacuggaauaga

SEQ ID NO: 1299477 - RNA, 19 nt, Homo sapiens
  misc_RNA (1)...(19): siRNA sense strand
aaugaugggucuccaagau

SEQ ID NO: 1299478 - RNA, 19 nt, Homo sapiens
  misc_RNA (1)...(19): siRNA sense strand
ggcaaaucuucacugcuaa

SEQ ID NO: 1299479 - RNA, 19 nt, Homo sapiens
  misc_RNA (1)...(19): siRNA sense strand
gaacaacuuccuucaucuc

SEQ ID NO: 1299480 - RNA, 19 nt, Homo sapiens
  misc_RNA (1)...(19): siRNA sense strand
ccaguuccaugagaaaugu

SEQ ID NO: 1299481 - RNA, 19 nt, Homo sapiens
  misc_RNA (1)...(19): siRNA sense strand
ucucugaaaugcaagacuu

SEQ ID NO: 1299482 - RNA, 19 nt, Homo sapiens
  misc_RNA (1)...(19): siRNA sense strand
gccauuauucuccuuuauu

SEQ ID NO: 1299483 - RNA, 19 nt, Homo sapiens
  misc_RNA (1)...(19): siRNA sense strand
gacuaaugcuaagguuauu

SEQ ID NO: 1299484 - RNA, 19 nt, Homo sapiens
  misc_RNA (1)...(19): siRNA sense strand
acaagagguacaacgaaua

SEQ ID NO: 1299485 - RNA, 19 nt, Homo sapiens
  misc_RNA (1)...(19): siRNA sense strand
gauaaccuugcuaaacauu

SEQ ID NO: 1299486 - RNA, 19 nt, Homo sapiens
  misc_RNA (1)...(19): siRNA sense strand
caguggaccugaagaagga

SEQ ID NO: 1299487 - RNA, 19 nt, Homo sapiens
  misc_RNA (1)...(19): siRNA sense strand
gcacagggaggacguacug

SEQ ID NO: 1299488 - RNA, 19 nt, Homo sapiens
  misc_RNA (1)...(19): siRNA sense strand
aggaggagcuggccuacug

SEQ ID NO: 1299489 - RNA, 19 nt, Homo sapiens
  misc_RNA (1)...(19): siRNA sense strand
ugcggaagcugcugaggaa

SEQ ID NO: 1299490 - RNA, 19 nt, Homo sapiens
  misc_RNA (1)...(19): siRNA sense strand
gccaggaguucuucuucga

SEQ ID NO: 1299491 - RNA, 19 nt, Homo sapiens
  misc_RNA (1)...(19): siRNA sense strand
ggacagccaggaguucuuc

SEQ ID NO: 1299492 - RNA, 19 nt, Homo sapiens
  misc_RNA (1)...(19): siRNA sense strand
ccagacaccaccacuaugg

SEQ ID NO: 1299493 - RNA, 19 nt, Homo sapiens
  misc_RNA (1)...(19): siRNA sense strand
gccgucagccuguguguca

SEQ ID NO: 1299494 - RNA, 19 nt, Homo sapiens
  misc_RNA (1)...(19): siRNA sense strand
ucccagacaccaccacuau

SEQ ID NO: 1299495 - RNA, 19 nt, Homo sapiens
  misc_RNA (1)...(19): siRNA sense strand
caguggaccugaagaagga

SEQ ID NO: 1299496 - RNA, 19 nt, Homo sapiens
  misc_RNA (1)...(19): siRNA sense strand
gcacagggaggacguacug

SEQ ID NO: 1299497 - RNA, 19 nt, Homo sapiens
  misc_RNA (1)...(19): siRNA sense strand
aggaggagcuggccuacug

SEQ ID NO: 1299498 - RNA, 19 nt, Homo sapiens
  misc_RNA (1)...(19): siRNA sense strand
ugcggaagcugcugaggaa

SEQ ID NO: 1299499 - RNA, 19 nt, Homo sapiens
  misc_RNA (1)...(19): siRNA sense strand
gccaggaguucuucuucga

SEQ ID NO: 1299500 - RNA, 19 nt, Homo sapiens
  misc_RNA (1)...(19): siRNA sense strand
ggacagccaggaguucuuc

SEQ ID NO: 1299501 - RNA, 19 nt, Homo sapiens
  misc_RNA (1)...(19): siRNA sense strand
ccagacaccaccacuaugg

SEQ ID NO: 1299502 - RNA, 19 nt, Homo sapiens
  misc_RNA (1)...(19): siRNA sense strand
gccgucagccuguguguca

SEQ ID NO: 1299503 - RNA, 19 nt, Homo sapiens
  misc_RNA (1)...(19): siRNA sense strand
ucccagacaccaccacuau

SEQ ID NO: 1299504 - RNA, 19 nt, Homo sapiens
  misc_RNA (1)...(19): siRNA sense strand
gaacacaacugagaaggaa

SEQ ID NO: 1299505 - RNA, 19 nt, Homo sapiens
  misc_RNA (1)...(19): siRNA sense strand
caagugcgauaucaccuua

SEQ ID NO: 1299506 - RNA, 19 nt, Homo sapiens
  misc_RNA (1)...(19): siRNA sense strand
uaaagacgaucaugagaga

SEQ ID NO: 1299507 - RNA, 19 nt, Homo sapiens
  misc_RNA (1)...(19): siRNA sense strand
ggacacaagugcgauauca

SEQ ID NO: 1299508 - RNA, 19 nt, Homo sapiens
  misc_RNA (1)...(19): siRNA sense strand
ugaaacggcucgacaggaa

SEQ ID NO: 1299509 - RNA, 19 nt, Homo sapiens
  misc_RNA (1)...(19): siRNA sense strand
acaagcagcugauccgauu

SEQ ID NO: 1299510 - RNA, 19 nt, Homo sapiens
  misc_RNA (1)...(19): siRNA sense strand
gaaggaagccaaccagagu

SEQ ID NO: 1299511 - RNA, 19 nt, Homo sapiens
  misc_RNA (1)...(19): siRNA sense strand
gaucaugagagagaaauau

SEQ ID NO: 1299512 - RNA, 19 nt, Homo sapiens
  misc_RNA (1)...(19): siRNA sense strand
gaaaggcuaaagacgauca

SEQ ID NO: 1299513 - RNA, 19 nt, Homo sapiens
  misc_RNA (1)...(19): siRNA sense strand
gagagaaauauucaaagug

SEQ ID NO: 1299514 - RNA, 19 nt, Homo sapiens
  misc_RNA (1)...(19): siRNA sense strand
uggaaaggcuaaagacgau

SEQ ID NO: 1299515 - RNA, 19 nt, Homo sapiens
  misc_RNA (1)...(19): siRNA sense strand
gaauuccuguccugugaag

SEQ ID NO: 1299516 - RNA, 19 nt, Homo sapiens
  misc_RNA (1)...(19): siRNA sense strand
gcuaaagacgaucaugaga

SEQ ID NO: 1299517 - RNA, 19 nt, Homo sapiens
  misc_RNA (1)...(19): siRNA sense strand
uugaauuccuguccuguga

SEQ ID NO: 1299518 - RNA, 19 nt, Homo sapiens
  misc_RNA (1)...(19): siRNA sense strand
caugagagagaaauauuca

SEQ ID NO: 1299519 - RNA, 19 nt, Homo sapiens
  misc_RNA (1)...(19): siRNA sense strand
gcugauccgauuccugaaa

SEQ ID NO: 1299520 - RNA, 19 nt, Homo sapiens
  misc_RNA (1)...(19): siRNA sense strand
gagagagaaauauucaaag

SEQ ID NO: 1299521 - RNA, 19 nt, Homo sapiens
  misc_RNA (1)...(19): siRNA sense strand
gcaugugccggcaacuuug

SEQ ID NO: 1299522 - RNA, 19 nt, Homo sapiens
  misc_RNA (1)...(19): siRNA sense strand
gaagccaaccagaguacgu

SEQ ID NO: 1299523 - RNA, 19 nt, Homo sapiens
  misc_RNA (1)...(19): siRNA sense strand
cuacagccaccaugagaag

SEQ ID NO: 1299524 - RNA, 19 nt, Homo sapiens
  misc_RNA (1)...(19): siRNA sense strand
agacgaucaugagagagaa

SEQ ID NO: 1299525 - RNA, 19 nt, Homo sapiens
  misc_RNA (1)...(19): siRNA sense strand
uuggaaaacuucuuggaaa

SEQ ID NO: 1299526 - RNA, 19 nt, Homo sapiens
  misc_RNA (1)...(19): siRNA sense strand
aagacgaucaugagagaga

SEQ ID NO: 1299527 - RNA, 19 nt, Homo sapiens
  misc_RNA (1)...(19): siRNA sense strand
gaacacaacugagaaggaa

SEQ ID NO: 1299528 - RNA, 19 nt, Homo sapiens
  misc_RNA (1)...(19): siRNA sense strand
caagugcgauaucaccuua

SEQ ID NO: 1299529 - RNA, 19 nt, Homo sapiens
  misc_RNA (1)...(19): siRNA sense strand
uaaagacgaucaugagaga

SEQ ID NO: 1299530 - RNA, 19 nt, Homo sapiens
  misc_RNA (1)...(19): siRNA sense strand
ggacacaagugcgauauca

SEQ ID NO: 1299531 - RNA, 19 nt, Homo sapiens
  misc_RNA (1)...(19): siRNA sense strand
ugaaacggcucgacaggaa

SEQ ID NO: 1299532 - RNA, 19 nt, Homo sapiens
  misc_RNA (1)...(19): siRNA sense strand
acaagcagcugauccgauu

SEQ ID NO: 1299533 - RNA, 19 nt, Homo sapiens
  misc_RNA (1)...(19): siRNA sense strand
gaaggaagccaaccagagu

SEQ ID NO: 1299534 - RNA, 19 nt, Homo sapiens
  misc_RNA (1)...(19): siRNA sense strand
gaucaugagagagaaauau

SEQ ID NO: 1299535 - RNA, 19 nt, Homo sapiens
  misc_RNA (1)...(19): siRNA sense strand
gaaaggcuaaagacgauca

SEQ ID NO: 1299536 - RNA, 19 nt, Homo sapiens
  misc_RNA (1)...(19): siRNA sense strand
gagagaaauauucaaagug

SEQ ID NO: 1299537 - RNA, 19 nt, Homo sapiens
  misc_RNA (1)...(19): siRNA sense strand
uggaaaggcuaaagacgau

SEQ ID NO: 1299538 - RNA, 19 nt, Homo sapiens
  misc_RNA (1)...(19): siRNA sense strand
gaauuccuguccugugaag

SEQ ID NO: 1299539 - RNA, 19 nt, Homo sapiens
  misc_RNA (1)...(19): siRNA sense strand
gcuaaagacgaucaugaga

SEQ ID NO: 1299540 - RNA, 19 nt, Homo sapiens
  misc_RNA (1)...(19): siRNA sense strand
uugaauuccuguccuguga

SEQ ID NO: 1299541 - RNA, 19 nt, Homo sapiens
  misc_RNA (1)...(19): siRNA sense strand
caugagagagaaauauuca

SEQ ID NO: 1299542 - RNA, 19 nt, Homo sapiens
  misc_RNA (1)...(19): siRNA sense strand
gcugauccgauuccugaaa

SEQ ID NO: 1299543 - RNA, 19 nt, Homo sapiens
  misc_RNA (1)...(19): siRNA sense strand
gagagagaaauauucaaag

SEQ ID NO: 1299544 - RNA, 19 nt, Homo sapiens
  misc_RNA (1)...(19): siRNA sense strand
gcaugugccggcaacuuug

SEQ ID NO: 1299545 - RNA, 19 nt, Homo sapiens
  misc_RNA (1)...(19): siRNA sense strand
gaagccaaccagaguacgu

SEQ ID NO: 1299546 - RNA, 19 nt, Homo sapiens
  misc_RNA (1)...(19): siRNA sense strand
cuacagccaccaugagaag

SEQ ID NO: 1299547 - RNA, 19 nt, Homo sapiens
  misc_RNA (1)...(19): siRNA sense strand
agacgaucaugagagagaa

SEQ ID NO: 1299548 - RNA, 19 nt, Homo sapiens
  misc_RNA (1)...(19): siRNA sense strand
uuggaaaacuucuuggaaa

SEQ ID NO: 1299549 - RNA, 19 nt, Homo sapiens
  misc_RNA (1)...(19): siRNA sense strand
aagacgaucaugagagaga

SEQ ID NO: 1299550 - RNA, 19 nt, Homo sapiens
  misc_RNA (1)...(19): siRNA sense strand
gaacacaacugagaaggaa

SEQ ID NO: 1299551 - RNA, 19 nt, Homo sapiens
  misc_RNA (1)...(19): siRNA sense strand
caagugcgauaucaccuua

SEQ ID NO: 1299552 - RNA, 19 nt, Homo sapiens
  misc_RNA (1)...(19): siRNA sense strand
uaaagacgaucaugagaga

SEQ ID NO: 1299553 - RNA, 19 nt, Homo sapiens
  misc_RNA (1)...(19): siRNA sense strand
ggacacaagugcgauauca

SEQ ID NO: 1299554 - RNA, 19 nt, Homo sapiens
  misc_RNA (1)...(19): siRNA sense strand
ugaaacggcucgacaggaa

SEQ ID NO: 1299555 - RNA, 19 nt, Homo sapiens
  misc_RNA (1)...(19): siRNA sense strand
acaagcagcugauccgauu

SEQ ID NO: 1299556 - RNA, 19 nt, Homo sapiens
  misc_RNA (1)...(19): siRNA sense strand
gaaggaagccaaccagagu

SEQ ID NO: 1299557 - RNA, 19 nt, Homo sapiens
  misc_RNA (1)...(19): siRNA sense strand
gaucaugagagagaaauau

SEQ ID NO: 1299558 - RNA, 19 nt, Homo sapiens
  misc_RNA (1)...(19): siRNA sense strand
gaaaggcuaaagacgauca

SEQ ID NO: 1299559 - RNA, 19 nt, Homo sapiens
  misc_RNA (1)...(19): siRNA sense strand
gagagaaauauucaaagug

SEQ ID NO: 1299560 - RNA, 19 nt, Homo sapiens
  misc_RNA (1)...(19): siRNA sense strand
uggaaaggcuaaagacgau

SEQ ID NO: 1299561 - RNA, 19 nt, Homo sapiens
  misc_RNA (1)...(19): siRNA sense strand
gaauuccuguccugugaag

SEQ ID NO: 1299562 - RNA, 19 nt, Homo sapiens
  misc_RNA (1)...(19): siRNA sense strand
gcuaaagacgaucaugaga

SEQ ID NO: 1299563 - RNA, 19 nt, Homo sapiens
  misc_RNA (1)...(19): siRNA sense strand
uugaauuccuguccuguga

SEQ ID NO: 1299564 - RNA, 19 nt, Homo sapiens
  misc_RNA (1)...(19): siRNA sense strand
caugagagagaaauauuca

SEQ ID NO: 1299565 - RNA, 19 nt, Homo sapiens
  misc_RNA (1)...(19): siRNA sense strand
gcugauccgauuccugaaa

SEQ ID NO: 1299566 - RNA, 19 nt, Homo sapiens
  misc_RNA (1)...(19): siRNA sense strand
gagagagaaauauucaaag

SEQ ID NO: 1299567 - RNA, 19 nt, Homo sapiens
  misc_RNA (1)...(19): siRNA sense strand
gcaugugccggcaacuuug

SEQ ID NO: 1299568 - RNA, 19 nt, Homo sapiens
  misc_RNA (1)...(19): siRNA sense strand
gaagccaaccagaguacgu

SEQ ID NO: 1299569 - RNA, 19 nt, Homo sapiens
  misc_RNA (1)...(19): siRNA sense strand
cuacagccaccaugagaag

SEQ ID NO: 1299570 - RNA, 19 nt, Homo sapiens
  misc_RNA (1)...(19): siRNA sense strand
agacgaucaugagagagaa

SEQ ID NO: 1299571 - RNA, 19 nt, Homo sapiens
  misc_RNA (1)...(19): siRNA sense strand
uuggaaaacuucuuggaaa

SEQ ID NO: 1299572 - RNA, 19 nt, Homo sapiens
  misc_RNA (1)...(19): siRNA sense strand
aagacgaucaugagagaga

SEQ ID NO: 1299573 - RNA, 19 nt, Homo sapiens
  misc_RNA (1)...(19): siRNA sense strand
gaacacaacugagaaggaa

SEQ ID NO: 1299574 - RNA, 19 nt, Homo sapiens
  misc_RNA (1)...(19): siRNA sense strand
caagugcgauaucaccuua

SEQ ID NO: 1299575 - RNA, 19 nt, Homo sapiens
  misc_RNA (1)...(19): siRNA sense strand
uaaagacgaucaugagaga

SEQ ID NO: 1299576 - RNA, 19 nt, Homo sapiens
  misc_RNA (1)...(19): siRNA sense strand
ggacacaagugcgauauca

SEQ ID NO: 1299577 - RNA, 19 nt, Homo sapiens
  misc_RNA (1)...(19): siRNA sense strand
ugaaacggcucgacaggaa

SEQ ID NO: 1299578 - RNA, 19 nt, Homo sapiens
  misc_RNA (1)...(19): siRNA sense strand
acaagcagcugauccgauu

SEQ ID NO: 1299579 - RNA, 19 nt, Homo sapiens
  misc_RNA (1)...(19): siRNA sense strand
gaaggaagccaaccagagu

SEQ ID NO: 1299580 - RNA, 19 nt, Homo sapiens
  misc_RNA (1)...(19): siRNA sense strand
gaucaugagagagaaauau

SEQ ID NO: 1299581 - RNA, 19 nt, Homo sapiens
  misc_RNA (1)...(19): siRNA sense strand
gaaaggcuaaagacgauca

SEQ ID NO: 1299582 - RNA, 19 nt, Homo sapiens
  misc_RNA (1)...(19): siRNA sense strand
gagagaaauauucaaagug

SEQ ID NO: 1299583 - RNA, 19 nt, Homo sapiens
  misc_RNA (1)...(19): siRNA sense strand
uggaaaggcuaaagacgau

SEQ ID NO: 1299584 - RNA, 19 nt, Homo sapiens
  misc_RNA (1)...(19): siRNA sense strand
gaauuccuguccugugaag

SEQ ID NO: 1299585 - RNA, 19 nt, Homo sapiens
  misc_RNA (1)...(19): siRNA sense strand
gcuaaagacgaucaugaga

SEQ ID NO: 1299586 - RNA, 19 nt, Homo sapiens
  misc_RNA (1)...(19): siRNA sense strand
uugaauuccuguccuguga

SEQ ID NO: 1299587 - RNA, 19 nt, Homo sapiens
  misc_RNA (1)...(19): siRNA sense strand
caugagagagaaauauuca

SEQ ID NO: 1299588 - RNA, 19 nt, Homo sapiens
  misc_RNA (1)...(19): siRNA sense strand
gcugauccgauuccugaaa

SEQ ID NO: 1299589 - RNA, 19 nt, Homo sapiens
  misc_RNA (1)...(19): siRNA sense strand
gagagagaaauauucaaag

SEQ ID NO: 1299590 - RNA, 19 nt, Homo sapiens
  misc_RNA (1)...(19): siRNA sense strand
gcaugugccggcaacuuug

SEQ ID NO: 1299591 - RNA, 19 nt, Homo sapiens
  misc_RNA (1)...(19): siRNA sense strand
gaagccaaccagaguacgu

SEQ ID NO: 1299592 - RNA, 19 nt, Homo sapiens
  misc_RNA (1)...(19): siRNA sense strand
cuacagccaccaugagaag

SEQ ID NO: 1299593 - RNA, 19 nt, Homo sapiens
  misc_RNA (1)...(19): siRNA sense strand
agacgaucaugagagagaa

SEQ ID NO: 1299594 - RNA, 19 nt, Homo sapiens
  misc_RNA (1)...(19): siRNA sense strand
uuggaaaacuucuuggaaa

SEQ ID NO: 1299595 - RNA, 19 nt, Homo sapiens
  misc_RNA (1)...(19): siRNA sense strand
aagacgaucaugagagaga

SEQ ID NO: 1299596 - RNA, 19 nt, Homo sapiens
  misc_RNA (1)...(19): siRNA sense strand
gaucuucacugcagacuua

SEQ ID NO: 1299597 - RNA, 19 nt, Homo sapiens
  misc_RNA (1)...(19): siRNA sense strand
gaacuuaccuucaacuaca

SEQ ID NO: 1299598 - RNA, 19 nt, Homo sapiens
  misc_RNA (1)...(19): siRNA sense strand
gaaaguaaacgucaaagaa

SEQ ID NO: 1299599 - RNA, 19 nt, Homo sapiens
  misc_RNA (1)...(19): siRNA sense strand
gauauuugcuccuaagaaa

SEQ ID NO: 1299600 - RNA, 19 nt, Homo sapiens
  misc_RNA (1)...(19): siRNA sense strand
ggacgagaauucuuugauu

SEQ ID NO: 1299601 - RNA, 19 nt, Homo sapiens
  misc_RNA (1)...(19): siRNA sense strand
gaacugcaguggcuucuug

SEQ ID NO: 1299602 - RNA, 19 nt, Homo sapiens
  misc_RNA (1)...(19): siRNA sense strand
gcaaguggcuuuuggaaua

SEQ ID NO: 1299603 - RNA, 19 nt, Homo sapiens
  misc_RNA (1)...(19): siRNA sense strand
gaacuacccagaagaaauu

SEQ ID NO: 1299604 - RNA, 19 nt, Homo sapiens
  misc_RNA (1)...(19): siRNA sense strand
gaaggaaacugguauugca

SEQ ID NO: 1299605 - RNA, 19 nt, Homo sapiens
  misc_RNA (1)...(19): siRNA sense strand
aaacagaagccucucauua

SEQ ID NO: 1299606 - RNA, 19 nt, Homo sapiens
  misc_RNA (1)...(19): siRNA sense strand
uaagacagcugcaggaaga

SEQ ID NO: 1299607 - RNA, 19 nt, Homo sapiens
  misc_RNA (1)...(19): siRNA sense strand
gcuuauagaugaagaagaa

SEQ ID NO: 1299608 - RNA, 19 nt, Homo sapiens
  misc_RNA (1)...(19): siRNA sense strand
gugaagcucugcuauauug

SEQ ID NO: 1299609 - RNA, 19 nt, Homo sapiens
  misc_RNA (1)...(19): siRNA sense strand
gccgagagcuguugagaaa

SEQ ID NO: 1299610 - RNA, 19 nt, Homo sapiens
  misc_RNA (1)...(19): siRNA sense strand
gaaagacuguuugcaaaug

SEQ ID NO: 1299611 - RNA, 19 nt, Homo sapiens
  misc_RNA (1)...(19): siRNA sense strand
gaucaaagccuucauccaa

SEQ ID NO: 1299612 - RNA, 19 nt, Homo sapiens
  misc_RNA (1)...(19): siRNA sense strand
gaaaguggauggucuaaaa

SEQ ID NO: 1299613 - RNA, 19 nt, Homo sapiens
  misc_RNA (1)...(19): siRNA sense strand
agugagaacucguuaauaa

SEQ ID NO: 1299614 - RNA, 19 nt, Homo sapiens
  misc_RNA (1)...(19): siRNA sense strand
gacaaacccucuccaguga

SEQ ID NO: 1299615 - RNA, 19 nt, Homo sapiens
  misc_RNA (1)...(19): siRNA sense strand
gaucagauauuugcuccua

SEQ ID NO: 1299616 - RNA, 19 nt, Homo sapiens
  misc_RNA (1)...(19): siRNA sense strand
gaaggcaucuacucuuguu

SEQ ID NO: 1299617 - RNA, 19 nt, Homo sapiens
  misc_RNA (1)...(19): siRNA sense strand
gaauggagauacccgugua

SEQ ID NO: 1299618 - RNA, 19 nt, Homo sapiens
  misc_RNA (1)...(19): siRNA sense strand
gaacauugauaucccugaa

SEQ ID NO: 1299619 - RNA, 19 nt, Homo sapiens
  misc_RNA (1)...(19): siRNA sense strand
gacgagaauucuuugauuu

SEQ ID NO: 1299620 - RNA, 19 nt, Homo sapiens
  misc_RNA (1)...(19): siRNA sense strand
gaaccagacuacaaauuca

SEQ ID NO: 1299621 - RNA, 19 nt, Homo sapiens
  misc_RNA (1)...(19): siRNA sense strand
ugaaagauaugcaugauag

SEQ ID NO: 1299622 - RNA, 19 nt, Homo sapiens
  misc_RNA (1)...(19): siRNA sense strand
guaggagucucuaagguuu

SEQ ID NO: 1299623 - RNA, 19 nt, Homo sapiens
  misc_RNA (1)...(19): siRNA sense strand
agaaagagcucugauaauc

SEQ ID NO: 1299624 - RNA, 19 nt, Homo sapiens
  misc_RNA (1)...(19): siRNA sense strand
gcagagcaaucaacaggaa

SEQ ID NO: 1299625 - RNA, 19 nt, Homo sapiens
  misc_RNA (1)...(19): siRNA sense strand
gagcuggacucuguaauga

SEQ ID NO: 1299626 - RNA, 19 nt, Homo sapiens
  misc_RNA (1)...(19): siRNA sense strand
gaacaucaaagccaucaaa

SEQ ID NO: 1299627 - RNA, 19 nt, Homo sapiens
  misc_RNA (1)...(19): siRNA sense strand
gcauaagguuccucagaaa

SEQ ID NO: 1299628 - RNA, 19 nt, Homo sapiens
  misc_RNA (1)...(19): siRNA sense strand
uaaaucaaguggugccuaa

SEQ ID NO: 1299629 - RNA, 19 nt, Homo sapiens
  misc_RNA (1)...(19): siRNA sense strand
cgaagugauuccauuagua

SEQ ID NO: 1299630 - RNA, 19 nt, Homo sapiens
  misc_RNA (1)...(19): siRNA sense strand
ccagacagacugcucauua

SEQ ID NO: 1299631 - RNA, 19 nt, Homo sapiens
  misc_RNA (1)...(19): siRNA sense strand
gagcugcacucaaggagaa

SEQ ID NO: 1299632 - RNA, 19 nt, Homo sapiens
  misc_RNA (1)...(19): siRNA sense strand
ugaaucagcuuccaagugu

SEQ ID NO: 1299633 - RNA, 19 nt, Homo sapiens
  misc_RNA (1)...(19): siRNA sense strand
cagccaagaugcaguguaa

SEQ ID NO: 1299634 - RNA, 19 nt, Homo sapiens
  misc_RNA (1)...(19): siRNA sense strand
cagagaacauguuaucuau

SEQ ID NO: 1299635 - RNA, 19 nt, Homo sapiens
  misc_RNA (1)...(19): siRNA sense strand
caaggagacuguugaggaa

SEQ ID NO: 1299636 - RNA, 19 nt, Homo sapiens
  misc_RNA (1)...(19): siRNA sense strand
aagaagauaugccauuuga

SEQ ID NO: 1299637 - RNA, 19 nt, Homo sapiens
  misc_RNA (1)...(19): siRNA sense strand
caaauucaguacauugcua

SEQ ID NO: 1299638 - RNA, 19 nt, Homo sapiens
  misc_RNA (1)...(19): siRNA sense strand
ugaagaagauaugccauuu

SEQ ID NO: 1299639 - RNA, 19 nt, Homo sapiens
  misc_RNA (1)...(19): siRNA sense strand
gaucagaccugugaacuac

SEQ ID NO: 1299640 - RNA, 19 nt, Homo sapiens
  misc_RNA (1)...(19): siRNA sense strand
ggauucaagugacauagaa

SEQ ID NO: 1299641 - RNA, 19 nt, Homo sapiens
  misc_RNA (1)...(19): siRNA sense strand
gaagauaugccauuugaag

SEQ ID NO: 1299642 - RNA, 19 nt, Homo sapiens
  misc_RNA (1)...(19): siRNA sense strand
gaagugauuccauuaguau

SEQ ID NO: 1299643 - RNA, 19 nt, Homo sapiens
  misc_RNA (1)...(19): siRNA sense strand
caaaggagcgagaagauga

SEQ ID NO: 1299644 - RNA, 19 nt, Homo sapiens
  misc_RNA (1)...(19): siRNA sense strand
gggccacgguuaaauguuu

SEQ ID NO: 1299645 - RNA, 19 nt, Homo sapiens
  misc_RNA (1)...(19): siRNA sense strand
ggcagaagauccuaguaaa

SEQ ID NO: 1299646 - RNA, 19 nt, Homo sapiens
  misc_RNA (1)...(19): siRNA sense strand
gagaacauguuaucuaugc

SEQ ID NO: 1299647 - RNA, 19 nt, Homo sapiens
  misc_RNA (1)...(19): siRNA sense strand
uaggaaacaugcuagaauu

SEQ ID NO: 1299648 - RNA, 19 nt, Homo sapiens
  misc_RNA (1)...(19): siRNA sense strand
gaagaugaguguuuuaguu

SEQ ID NO: 1299649 - RNA, 19 nt, Homo sapiens
  misc_RNA (1)...(19): siRNA sense strand
ugggugagcuuauagauga

SEQ ID NO: 1299650 - RNA, 19 nt, Homo sapiens
  misc_RNA (1)...(19): siRNA sense strand
agaagccucucauuaguaa

SEQ ID NO: 1299651 - RNA, 19 nt, Homo sapiens
  misc_RNA (1)...(19): siRNA sense strand
gaagagcuaccuguccuua

SEQ ID NO: 1299652 - RNA, 19 nt, Homo sapiens
  misc_RNA (1)...(19): siRNA sense strand
guucugauccguugauuaa

SEQ ID NO: 1299653 - RNA, 19 nt, Homo sapiens
  misc_RNA (1)...(19): siRNA sense strand
agacaaagaccgaaucauu

SEQ ID NO: 1299654 - RNA, 19 nt, Homo sapiens
  misc_RNA (1)...(19): siRNA sense strand
cagcaagguuugaggaauu

SEQ ID NO: 1299655 - RNA, 19 nt, Homo sapiens
  misc_RNA (1)...(19): siRNA sense strand
caucugcccuaaucacuuu

SEQ ID NO: 1299656 - RNA, 19 nt, Homo sapiens
  misc_RNA (1)...(19): siRNA sense strand
gagaauggcauaacugaau

SEQ ID NO: 1299657 - RNA, 19 nt, Homo sapiens
  misc_RNA (1)...(19): siRNA sense strand
gaaccuuggccuaaacuuu

SEQ ID NO: 1299658 - RNA, 19 nt, Homo sapiens
  misc_RNA (1)...(19): siRNA sense strand
ggcauaagguuccucagaa

SEQ ID NO: 1299659 - RNA, 19 nt, Homo sapiens
  misc_RNA (1)...(19): siRNA sense strand
gaaaagcaaucgucauguu

SEQ ID NO: 1299660 - RNA, 19 nt, Homo sapiens
  misc_RNA (1)...(19): siRNA sense strand
gaaguggucugugaaugga

SEQ ID NO: 1299661 - RNA, 19 nt, Homo sapiens
  misc_RNA (1)...(19): siRNA sense strand
agaauuaccuggaacuuca

SEQ ID NO: 1299662 - RNA, 19 nt, Homo sapiens
  misc_RNA (1)...(19): siRNA sense strand
acaagaagccaccaccuua

SEQ ID NO: 1299663 - RNA, 19 nt, Homo sapiens
  misc_RNA (1)...(19): siRNA sense strand
cuaaugaacuuuccaggau

SEQ ID NO: 1299664 - RNA, 19 nt, Homo sapiens
  misc_RNA (1)...(19): siRNA sense strand
gagaagagggaaacagaaa

SEQ ID NO: 1299665 - RNA, 19 nt, Homo sapiens
  misc_RNA (1)...(19): siRNA sense strand
gacaaagaccgaaucauug

SEQ ID NO: 1299666 - RNA, 19 nt, Homo sapiens
  misc_RNA (1)...(19): siRNA sense strand
ucugaggaauugcuaguua

SEQ ID NO: 1299667 - RNA, 19 nt, Homo sapiens
  misc_RNA (1)...(19): siRNA sense strand
gagaagaaacgccuuagga

SEQ ID NO: 1299668 - RNA, 19 nt, Homo sapiens
  misc_RNA (1)...(19): siRNA sense strand
gcaaucugauccugguaaa

SEQ ID NO: 1299669 - RNA, 19 nt, Homo sapiens
  misc_RNA (1)...(19): siRNA sense strand
guuaaucucucugaucuga

SEQ ID NO: 1299670 - RNA, 19 nt, Homo sapiens
  misc_RNA (1)...(19): siRNA sense strand
cuacgccacugaaguauga

SEQ ID NO: 1299671 - RNA, 19 nt, Homo sapiens
  misc_RNA (1)...(19): siRNA sense strand
gauaaugggccacuuaaca

SEQ ID NO: 1299672 - RNA, 19 nt, Homo sapiens
  misc_RNA (1)...(19): siRNA sense strand
aaacagcaguggugaaaca

SEQ ID NO: 1299673 - RNA, 19 nt, Homo sapiens
  misc_RNA (1)...(19): siRNA sense strand
uaaugaacuuuccaggaua

SEQ ID NO: 1299674 - RNA, 19 nt, Homo sapiens
  misc_RNA (1)...(19): siRNA sense strand
cuuaauggcuguuugaaau

SEQ ID NO: 1299675 - RNA, 19 nt, Homo sapiens
  misc_RNA (1)...(19): siRNA sense strand
gaagagggaaacagaaaga

SEQ ID NO: 1299676 - RNA, 19 nt, Homo sapiens
  misc_RNA (1)...(19): siRNA sense strand
ugaacaauaugcaugagaa

SEQ ID NO: 1299677 - RNA, 19 nt, Homo sapiens
  misc_RNA (1)...(19): siRNA sense strand
agacaggccuacugacaaa

SEQ ID NO: 1299678 - RNA, 19 nt, Homo sapiens
  misc_RNA (1)...(19): siRNA sense strand
gcaggaagaccgaaagaau

SEQ ID NO: 1299679 - RNA, 19 nt, Homo sapiens
  misc_RNA (1)...(19): siRNA sense strand
ggaaacugguauugcaaug

SEQ ID NO: 1299680 - RNA, 19 nt, Homo sapiens
  misc_RNA (1)...(19): siRNA sense strand
guaagcgcaugaacagauu

SEQ ID NO: 1299681 - RNA, 19 nt, Homo sapiens
  misc_RNA (1)...(19): siRNA sense strand
ucacauaccuauugaacca

SEQ ID NO: 1299682 - RNA, 19 nt, Homo sapiens
  misc_RNA (1)...(19): siRNA sense strand
ggaacuucaucaucaucua

SEQ ID NO: 1299683 - RNA, 19 nt, Homo sapiens
  misc_RNA (1)...(19): siRNA sense strand
gugaauuugugaaugagua

SEQ ID NO: 1299684 - RNA, 19 nt, Homo sapiens
  misc_RNA (1)...(19): siRNA sense strand
aauguuagcuggugcuuug

SEQ ID NO: 1299685 - RNA, 19 nt, Homo sapiens
  misc_RNA (1)...(19): siRNA sense strand
caaucaaguuggacaguga

SEQ ID NO: 1299686 - RNA, 19 nt, Homo sapiens
  misc_RNA (1)...(19): siRNA sense strand
uggaaagacuguuugcaaa

SEQ ID NO: 1299687 - RNA, 19 nt, Homo sapiens
  misc_RNA (1)...(19): siRNA sense strand
gauaagaugagacaugaug

SEQ ID NO: 1299688 - RNA, 19 nt, Homo sapiens
  misc_RNA (1)...(19): siRNA sense strand
gggcagaagauccuaguaa

SEQ ID NO: 1299689 - RNA, 19 nt, Homo sapiens
  misc_RNA (1)...(19): siRNA sense strand
gaaggaacucucuuacaga

SEQ ID NO: 1299690 - RNA, 19 nt, Homo sapiens
  misc_RNA (1)...(19): siRNA sense strand
cagaaucacauaccuauug

SEQ ID NO: 1299691 - RNA, 19 nt, Homo sapiens
  misc_RNA (1)...(19): siRNA sense strand
guaugugggugagcuuaua

SEQ ID NO: 1299692 - RNA, 19 nt, Homo sapiens
  misc_RNA (1)...(19): siRNA sense strand
guaaagcuacugaugagaa

SEQ ID NO: 1299693 - RNA, 19 nt, Homo sapiens
  misc_RNA (1)...(19): siRNA sense strand
gcacuaccaagauauuuga

SEQ ID NO: 1299694 - RNA, 19 nt, Homo sapiens
  misc_RNA (1)...(19): siRNA sense strand
uggcauaacugaaucuugu

SEQ ID NO: 1299695 - RNA, 19 nt, Homo sapiens
  misc_RNA (1)...(19): siRNA sense strand
caaagaagagccuccaguu

SEQ ID NO: 1299696 - RNA, 19 nt, Homo sapiens
  misc_RNA (1)...(19): siRNA sense strand
gaucuucacugcagacuua

SEQ ID NO: 1299697 - RNA, 19 nt, Homo sapiens
  misc_RNA (1)...(19): siRNA sense strand
gaacuuaccuucaacuaca

SEQ ID NO: 1299698 - RNA, 19 nt, Homo sapiens
  misc_RNA (1)...(19): siRNA sense strand
gaaaguaaacgucaaagaa

SEQ ID NO: 1299699 - RNA, 19 nt, Homo sapiens
  misc_RNA (1)...(19): siRNA sense strand
gauauuugcuccuaagaaa

SEQ ID NO: 1299700 - RNA, 19 nt, Homo sapiens
  misc_RNA (1)...(19): siRNA sense strand
ggacgagaauucuuugauu

SEQ ID NO: 1299701 - RNA, 19 nt, Homo sapiens
  misc_RNA (1)...(19): siRNA sense strand
gaacugcaguggcuucuug

SEQ ID NO: 1299702 - RNA, 19 nt, Homo sapiens
  misc_RNA (1)...(19): siRNA sense strand
gcaaguggcuuuuggaaua

SEQ ID NO: 1299703 - RNA, 19 nt, Homo sapiens
  misc_RNA (1)...(19): siRNA sense strand
aaacagaagccucucauua

SEQ ID NO: 1299704 - RNA, 19 nt, Homo sapiens
  misc_RNA (1)...(19): siRNA sense strand
gaaggaaacugguauugca

SEQ ID NO: 1299705 - RNA, 19 nt, Homo sapiens
  misc_RNA (1)...(19): siRNA sense strand
uaagacagcugcaggaaga

SEQ ID NO: 1299706 - RNA, 19 nt, Homo sapiens
  misc_RNA (1)...(19): siRNA sense strand
gcuuauagaugaagaagaa

SEQ ID NO: 1299707 - RNA, 19 nt, Homo sapiens
  misc_RNA (1)...(19): siRNA sense strand
gugaagcucugcuauauug

SEQ ID NO: 1299708 - RNA, 19 nt, Homo sapiens
  misc_RNA (1)...(19): siRNA sense strand
gccgagagcuguugagaaa

SEQ ID NO: 1299709 - RNA, 19 nt, Homo sapiens
  misc_RNA (1)...(19): siRNA sense strand
gaaagacuguuugcaaaug

SEQ ID NO: 1299710 - RNA, 19 nt, Homo sapiens
  misc_RNA (1)...(19): siRNA sense strand
gaucaaagccuucauccaa

SEQ ID NO: 1299711 - RNA, 19 nt, Homo sapiens
  misc_RNA (1)...(19): siRNA sense strand
gaaaguggauggucuaaaa

SEQ ID NO: 1299712 - RNA, 19 nt, Homo sapiens
  misc_RNA (1)...(19): siRNA sense strand
agugagaacucguuaauaa

SEQ ID NO: 1299713 - RNA, 19 nt, Homo sapiens
  misc_RNA (1)...(19): siRNA sense strand
gacaaacccucuccaguga

SEQ ID NO: 1299714 - RNA, 19 nt, Homo sapiens
  misc_RNA (1)...(19): siRNA sense strand
gaucagauauuugcuccua

SEQ ID NO: 1299715 - RNA, 19 nt, Homo sapiens
  misc_RNA (1)...(19): siRNA sense strand
gaaggcaucuacucuuguu

SEQ ID NO: 1299716 - RNA, 19 nt, Homo sapiens
  misc_RNA (1)...(19): siRNA sense strand
gaauggagauacccgugua

SEQ ID NO: 1299717 - RNA, 19 nt, Homo sapiens
  misc_RNA (1)...(19): siRNA sense strand
gaacauugauaucccugaa

SEQ ID NO: 1299718 - RNA, 19 nt, Homo sapiens
  misc_RNA (1)...(19): siRNA sense strand
gacgagaauucuuugauuu

SEQ ID NO: 1299719 - RNA, 19 nt, Homo sapiens
  misc_RNA (1)...(19): siRNA sense strand
gaaccagacuacaaauuca

SEQ ID NO: 1299720 - RNA, 19 nt, Homo sapiens
  misc_RNA (1)...(19): siRNA sense strand
ugaaagauaugcaugauag

SEQ ID NO: 1299721 - RNA, 19 nt, Homo sapiens
  misc_RNA (1)...(19): siRNA sense strand
guaggagucucuaagguuu

SEQ ID NO: 1299722 - RNA, 19 nt, Homo sapiens
  misc_RNA (1)...(19): siRNA sense strand
agaaagagcucugauaauc

SEQ ID NO: 1299723 - RNA, 19 nt, Homo sapiens
  misc_RNA (1)...(19): siRNA sense strand
gcagagcaaucaacaggaa

SEQ ID NO: 1299724 - RNA, 19 nt, Homo sapiens
  misc_RNA (1)...(19): siRNA sense strand
gagcuggacucuguaauga

SEQ ID NO: 1299725 - RNA, 19 nt, Homo sapiens
  misc_RNA (1)...(19): siRNA sense strand
gaacaucaaagccaucaaa

SEQ ID NO: 1299726 - RNA, 19 nt, Homo sapiens
  misc_RNA (1)...(19): siRNA sense strand
gcauaagguuccucagaaa

SEQ ID NO: 1299727 - RNA, 19 nt, Homo sapiens
  misc_RNA (1)...(19): siRNA sense strand
uaaaucaaguggugccuaa

SEQ ID NO: 1299728 - RNA, 19 nt, Homo sapiens
  misc_RNA (1)...(19): siRNA sense strand
cgaagugauuccauuagua

SEQ ID NO: 1299729 - RNA, 19 nt, Homo sapiens
  misc_RNA (1)...(19): siRNA sense strand
ccagacagacugcucauua

SEQ ID NO: 1299730 - RNA, 19 nt, Homo sapiens
  misc_RNA (1)...(19): siRNA sense strand
gagcugcacucaaggagaa

SEQ ID NO: 1299731 - RNA, 19 nt, Homo sapiens
  misc_RNA (1)...(19): siRNA sense strand
ugaaucagcuuccaagugu

SEQ ID NO: 1299732 - RNA, 19 nt, Homo sapiens
  misc_RNA (1)...(19): siRNA sense strand
cagccaagaugcaguguaa

SEQ ID NO: 1299733 - RNA, 19 nt, Homo sapiens
  misc_RNA (1)...(19): siRNA sense strand
cagagaacauguuaucuau

SEQ ID NO: 1299734 - RNA, 19 nt, Homo sapiens
  misc_RNA (1)...(19): siRNA sense strand
caaggagacuguugaggaa

SEQ ID NO: 1299735 - RNA, 19 nt, Homo sapiens
  misc_RNA (1)...(19): siRNA sense strand
aagaagauaugccauuuga

SEQ ID NO: 1299736 - RNA, 19 nt, Homo sapiens
  misc_RNA (1)...(19): siRNA sense strand
caaauucaguacauugcua

SEQ ID NO: 1299737 - RNA, 19 nt, Homo sapiens
  misc_RNA (1)...(19): siRNA sense strand
ugaagaagauaugccauuu

SEQ ID NO: 1299738 - RNA, 19 nt, Homo sapiens
  misc_RNA (1)...(19): siRNA sense strand
ggauucaagugacauagaa

SEQ ID NO: 1299739 - RNA, 19 nt, Homo sapiens
  misc_RNA (1)...(19): siRNA sense strand
gaagauaugccauuugaag

SEQ ID NO: 1299740 - RNA, 19 nt, Homo sapiens
  misc_RNA (1)...(19): siRNA sense strand
gaagugauuccauuaguau

SEQ ID NO: 1299741 - RNA, 19 nt, Homo sapiens
  misc_RNA (1)...(19): siRNA sense strand
caaaggagcgagaagauga

SEQ ID NO: 1299742 - RNA, 19 nt, Homo sapiens
  misc_RNA (1)...(19): siRNA sense strand
gggccacgguuaaauguuu

SEQ ID NO: 1299743 - RNA, 19 nt, Homo sapiens
  misc_RNA (1)...(19): siRNA sense strand
ggcagaagauccuaguaaa

SEQ ID NO: 1299744 - RNA, 19 nt, Homo sapiens
  misc_RNA (1)...(19): siRNA sense strand
gagaacauguuaucuaugc

SEQ ID NO: 1299745 - RNA, 19 nt, Homo sapiens
  misc_RNA (1)...(19): siRNA sense strand
gaagagcuaccuguccuua

SEQ ID NO: 1299746 - RNA, 19 nt, Homo sapiens
  misc_RNA (1)...(19): siRNA sense strand
gaagaugaguguuuuaguu

SEQ ID NO: 1299747 - RNA, 19 nt, Homo sapiens
  misc_RNA (1)...(19): siRNA sense strand
ugggugagcuuauagauga

SEQ ID NO: 1299748 - RNA, 19 nt, Homo sapiens
  misc_RNA (1)...(19): siRNA sense strand
uaggaaacaugcuagaauu

SEQ ID NO: 1299749 - RNA, 19 nt, Homo sapiens
  misc_RNA (1)...(19): siRNA sense strand
agaagccucucauuaguaa

SEQ ID NO: 1299750 - RNA, 19 nt, Homo sapiens
  misc_RNA (1)...(19): siRNA sense strand
guucugauccguugauuaa

SEQ ID NO: 1299751 - RNA, 19 nt, Homo sapiens
  misc_RNA (1)...(19): siRNA sense strand
agacaaagaccgaaucauu

SEQ ID NO: 1299752 - RNA, 19 nt, Homo sapiens
  misc_RNA (1)...(19): siRNA sense strand
cagcaagguuugaggaauu

SEQ ID NO: 1299753 - RNA, 19 nt, Homo sapiens
  misc_RNA (1)...(19): siRNA sense strand
caucugcccuaaucacuuu

SEQ ID NO: 1299754 - RNA, 19 nt, Homo sapiens
  misc_RNA (1)...(19): siRNA sense strand
gagaauggcauaacugaau

SEQ ID NO: 1299755 - RNA, 19 nt, Homo sapiens
  misc_RNA (1)...(19): siRNA sense strand
gaaccuuggccuaaacuuu

SEQ ID NO: 1299756 - RNA, 19 nt, Homo sapiens
  misc_RNA (1)...(19): siRNA sense strand
ggcauaagguuccucagaa

SEQ ID NO: 1299757 - RNA, 19 nt, Homo sapiens
  misc_RNA (1)...(19): siRNA sense strand
gaaaagcaaucgucauguu

SEQ ID NO: 1299758 - RNA, 19 nt, Homo sapiens
  misc_RNA (1)...(19): siRNA sense strand
gaaguggucugugaaugga

SEQ ID NO: 1299759 - RNA, 19 nt, Homo sapiens
  misc_RNA (1)...(19): siRNA sense strand
acaagaagccaccaccuua

SEQ ID NO: 1299760 - RNA, 19 nt, Homo sapiens
  misc_RNA (1)...(19): siRNA sense strand
agaauuaccuggaacuuca

SEQ ID NO: 1299761 - RNA, 19 nt, Homo sapiens
  misc_RNA (1)...(19): siRNA sense strand
cuaaugaacuuuccaggau

SEQ ID NO: 1299762 - RNA, 19 nt, Homo sapiens
  misc_RNA (1)...(19): siRNA sense strand
gagaagagggaaacagaaa

SEQ ID NO: 1299763 - RNA, 19 nt, Homo sapiens
  misc_RNA (1)...(19): siRNA sense strand
gacaaagaccgaaucauug

SEQ ID NO: 1299764 - RNA, 19 nt, Homo sapiens
  misc_RNA (1)...(19): siRNA sense strand
ucugaggaauugcuaguua

SEQ ID NO: 1299765 - RNA, 19 nt, Homo sapiens
  misc_RNA (1)...(19): siRNA sense strand
gagaagaaacgccuuagga

SEQ ID NO: 1299766 - RNA, 19 nt, Homo sapiens
  misc_RNA (1)...(19): siRNA sense strand
gcaaucugauccugguaaa

SEQ ID NO: 1299767 - RNA, 19 nt, Homo sapiens
  misc_RNA (1)...(19): siRNA sense strand
guuaaucucucugaucuga

SEQ ID NO: 1299768 - RNA, 19 nt, Homo sapiens
  misc_RNA (1)...(19): siRNA sense strand
gaagagggaaacagaaaga

SEQ ID NO: 1299769 - RNA, 19 nt, Homo sapiens
  misc_RNA (1)...(19): siRNA sense strand
cuacgccacugaaguauga

SEQ ID NO: 1299770 - RNA, 19 nt, Homo sapiens
  misc_RNA (1)...(19): siRNA sense strand
gauaaugggccacuuaaca

SEQ ID NO: 1299771 - RNA, 19 nt, Homo sapiens
  misc_RNA (1)...(19): siRNA sense strand
aaacagcaguggugaaaca

SEQ ID NO: 1299772 - RNA, 19 nt, Homo sapiens
  misc_RNA (1)...(19): siRNA sense strand
uaaugaacuuuccaggaua

SEQ ID NO: 1299773 - RNA, 19 nt, Homo sapiens
  misc_RNA (1)...(19): siRNA sense strand
cuuaauggcuguuugaaau

SEQ ID NO: 1299774 - RNA, 19 nt, Homo sapiens
  misc_RNA (1)...(19): siRNA sense strand
ugaacaauaugcaugagaa

SEQ ID NO: 1299775 - RNA, 19 nt, Homo sapiens
  misc_RNA (1)...(19): siRNA sense strand
agacaggccuacugacaaa

SEQ ID NO: 1299776 - RNA, 19 nt, Homo sapiens
  misc_RNA (1)...(19): siRNA sense strand
gcaggaagaccgaaagaau

SEQ ID NO: 1299777 - RNA, 19 nt, Homo sapiens
  misc_RNA (1)...(19): siRNA sense strand
ggaaacugguauugcaaug

SEQ ID NO: 1299778 - RNA, 19 nt, Homo sapiens
  misc_RNA (1)...(19): siRNA sense strand
guaagcgcaugaacagauu

SEQ ID NO: 1299779 - RNA, 19 nt, Homo sapiens
  misc_RNA (1)...(19): siRNA sense strand
ucacauaccuauugaacca

SEQ ID NO: 1299780 - RNA, 19 nt, Homo sapiens
  misc_RNA (1)...(19): siRNA sense strand
aauguuagcuggugcuuug

SEQ ID NO: 1299781 - RNA, 19 nt, Homo sapiens
  misc_RNA (1)...(19): siRNA sense strand
ggaacuucaucaucaucua

SEQ ID NO: 1299782 - RNA, 19 nt, Homo sapiens
  misc_RNA (1)...(19): siRNA sense strand
gugaauuugugaaugagua

SEQ ID NO: 1299783 - RNA, 19 nt, Homo sapiens
  misc_RNA (1)...(19): siRNA sense strand
caaucaaguuggacaguga

SEQ ID NO: 1299784 - RNA, 19 nt, Homo sapiens
  misc_RNA (1)...(19): siRNA sense strand
uggaaagacuguuugcaaa

SEQ ID NO: 1299785 - RNA, 19 nt, Homo sapiens
  misc_RNA (1)...(19): siRNA sense strand
gauaagaugagacaugaug

SEQ ID NO: 1299786 - RNA, 19 nt, Homo sapiens
  misc_RNA (1)...(19): siRNA sense strand
gggcagaagauccuaguaa

SEQ ID NO: 1299787 - RNA, 19 nt, Homo sapiens
  misc_RNA (1)...(19): siRNA sense strand
gaaggaacucucuuacaga

SEQ ID NO: 1299788 - RNA, 19 nt, Homo sapiens
  misc_RNA (1)...(19): siRNA sense strand
ugaaggaacucucuuacag

SEQ ID NO: 1299789 - RNA, 19 nt, Homo sapiens
  misc_RNA (1)...(19): siRNA sense strand
guaugugggugagcuuaua

SEQ ID NO: 1299790 - RNA, 19 nt, Homo sapiens
  misc_RNA (1)...(19): siRNA sense strand
guaaagcuacugaugagaa

SEQ ID NO: 1299791 - RNA, 19 nt, Homo sapiens
  misc_RNA (1)...(19): siRNA sense strand
gcacuaccaagauauuuga

SEQ ID NO: 1299792 - RNA, 19 nt, Homo sapiens
  misc_RNA (1)...(19): siRNA sense strand
uggcauaacugaaucuugu

SEQ ID NO: 1299793 - RNA, 19 nt, Homo sapiens
  misc_RNA (1)...(19): siRNA sense strand
caaagaagagccuccaguu

SEQ ID NO: 1299794 - RNA, 19 nt, Homo sapiens
  misc_RNA (1)...(19): siRNA sense strand
cagaaucacauaccuauug

SEQ ID NO: 1299795 - RNA, 19 nt, Homo sapiens
  misc_RNA (1)...(19): siRNA sense strand
cauaguggcuggacagaca

SEQ ID NO: 1299796 - RNA, 19 nt, Homo sapiens
  misc_RNA (1)...(19): siRNA sense strand
ggagagagcacgauuuauu

SEQ ID NO: 1299797 - RNA, 19 nt, Homo sapiens
  misc_RNA (1)...(19): siRNA sense strand
agagaaacauguccauaua

SEQ ID NO: 1299798 - RNA, 19 nt, Homo sapiens
  misc_RNA (1)...(19): siRNA sense strand
cagaugcacuuuauuugua

SEQ ID NO: 1299799 - RNA, 19 nt, Homo sapiens
  misc_RNA (1)...(19): siRNA sense strand
ggacuuacgaguuugguua

SEQ ID NO: 1299800 - RNA, 19 nt, Homo sapiens
  misc_RNA (1)...(19): siRNA sense strand
aaacagauaucaggauuug

SEQ ID NO: 1299801 - RNA, 19 nt, Homo sapiens
  misc_RNA (1)...(19): siRNA sense strand
cuauggagcucauugguaa

SEQ ID NO: 1299802 - RNA, 19 nt, Homo sapiens
  misc_RNA (1)...(19): siRNA sense strand
aaacacaccuuuagugaag

SEQ ID NO: 1299803 - RNA, 19 nt, Homo sapiens
  misc_RNA (1)...(19): siRNA sense strand
gaacuuaaaggaucaguag

SEQ ID NO: 1299804 - RNA, 19 nt, Homo sapiens
  misc_RNA (1)...(19): siRNA sense strand
gaaaacagauaucaggauu

SEQ ID NO: 1299805 - RNA, 19 nt, Homo sapiens
  misc_RNA (1)...(19): siRNA sense strand
uaaaggaucaguagcaauu

SEQ ID NO: 1299806 - RNA, 19 nt, Homo sapiens
  misc_RNA (1)...(19): siRNA sense strand
aaaugggacuuacgaguuu

SEQ ID NO: 1299807 - RNA, 19 nt, Homo sapiens
  misc_RNA (1)...(19): siRNA sense strand
guuaucagaugcacuuuau

SEQ ID NO: 1299808 - RNA, 19 nt, Homo sapiens
  misc_RNA (1)...(19): siRNA sense strand
ugagauuggugaacgagua

SEQ ID NO: 1299809 - RNA, 19 nt, Homo sapiens
  misc_RNA (1)...(19): siRNA sense strand
gugaacgaguagauuauaa

SEQ ID NO: 1299810 - RNA, 19 nt, Homo sapiens
  misc_RNA (1)...(19): siRNA sense strand
gagagagcacgauuuauug

SEQ ID NO: 1299811 - RNA, 19 nt, Homo sapiens
  misc_RNA (1)...(19): siRNA sense strand
caaaugggacuuacgaguu

SEQ ID NO: 1299812 - RNA, 19 nt, Homo sapiens
  misc_RNA (1)...(19): siRNA sense strand
ggucauugcugugauuguu

SEQ ID NO: 1299813 - RNA, 19 nt, Homo sapiens
  misc_RNA (1)...(19): siRNA sense strand
ccagauccauuuucacuua

SEQ ID NO: 1299814 - RNA, 19 nt, Homo sapiens
  misc_RNA (1)...(19): siRNA sense strand
gaaggaauacuugacaguu

SEQ ID NO: 1299815 - RNA, 19 nt, Homo sapiens
  misc_RNA (1)...(19): siRNA sense strand
aaggaauacuugacaguuu

SEQ ID NO: 1299816 - RNA, 19 nt, Homo sapiens
  misc_RNA (1)...(19): siRNA sense strand
ucagaugacgccuguuaua

SEQ ID NO: 1299817 - RNA, 19 nt, Homo sapiens
  misc_RNA (1)...(19): siRNA sense strand
gaaaacacaccuuuaguga

SEQ ID NO: 1299818 - RNA, 19 nt, Homo sapiens
  misc_RNA (1)...(19): siRNA sense strand
gaugacgccuguuauagag

SEQ ID NO: 1299819 - RNA, 19 nt, Homo sapiens
  misc_RNA (1)...(19): siRNA sense strand
gagaaacauguccauauau

SEQ ID NO: 1299820 - RNA, 19 nt, Homo sapiens
  misc_RNA (1)...(19): siRNA sense strand
acgaguagauuauaagugu

SEQ ID NO: 1299821 - RNA, 19 nt, Homo sapiens
  misc_RNA (1)...(19): siRNA sense strand
cuacaaagcaacaguuaug

SEQ ID NO: 1299822 - RNA, 19 nt, Homo sapiens
  misc_RNA (1)...(19): siRNA sense strand
ccaccaacauuugaagcua

SEQ ID NO: 1299823 - RNA, 19 nt, Homo sapiens
  misc_RNA (1)...(19): siRNA sense strand
uauacgggauccuuuaaau

SEQ ID NO: 1299824 - RNA, 19 nt, Homo sapiens
  misc_RNA (1)...(19): siRNA sense strand
cgaguuugguuaucagaug

SEQ ID NO: 1299825 - RNA, 19 nt, Homo sapiens
  misc_RNA (1)...(19): siRNA sense strand
gaacgaguagauuauaagu

SEQ ID NO: 1299826 - RNA, 19 nt, Homo sapiens
  misc_RNA (1)...(19): siRNA sense strand
gugaggagccaccaacauu

SEQ ID NO: 1299827 - RNA, 19 nt, Homo sapiens
  misc_RNA (1)...(19): siRNA sense strand
gauggcagcgacacaauug

SEQ ID NO: 1299828 - RNA, 19 nt, Homo sapiens
  misc_RNA (1)...(19): siRNA sense strand
gcuauggagcucauuggua

SEQ ID NO: 1299829 - RNA, 19 nt, Homo sapiens
  misc_RNA (1)...(19): siRNA sense strand
gaggagccaccaacauuug

SEQ ID NO: 1299830 - RNA, 19 nt, Homo sapiens
  misc_RNA (1)...(19): siRNA sense strand
acacaccuuuagugaagua

SEQ ID NO: 1299831 - RNA, 19 nt, Homo sapiens
  misc_RNA (1)...(19): siRNA sense strand
ucucagaugacgccuguua

SEQ ID NO: 1299832 - RNA, 19 nt, Homo sapiens
  misc_RNA (1)...(19): siRNA sense strand
uagagaaacauguccauau

SEQ ID NO: 1299833 - RNA, 19 nt, Homo sapiens
  misc_RNA (1)...(19): siRNA sense strand
guuccaaagugucuuaaag

SEQ ID NO: 1299834 - RNA, 19 nt, Homo sapiens
  misc_RNA (1)...(19): siRNA sense strand
ggugaacgaguagauuaua

SEQ ID NO: 1299835 - RNA, 19 nt, Homo sapiens
  misc_RNA (1)...(19): siRNA sense strand
gaaguagaaguauuugagu

SEQ ID NO: 1299836 - RNA, 19 nt, Homo sapiens
  misc_RNA (1)...(19): siRNA sense strand
gaaacauguccauauauac

SEQ ID NO: 1299837 - RNA, 19 nt, Homo sapiens
  misc_RNA (1)...(19): siRNA sense strand
ugacgccuguuauagagaa

SEQ ID NO: 1299838 - RNA, 19 nt, Homo sapiens
  misc_RNA (1)...(19): siRNA sense strand
cgaguagauuauaagugua

SEQ ID NO: 1299839 - RNA, 19 nt, Homo sapiens
  misc_RNA (1)...(19): siRNA sense strand
gcacuuuauuuguaaugag

SEQ ID NO: 1299840 - RNA, 19 nt, Homo sapiens
  misc_RNA (1)...(19): siRNA sense strand
guagaaguauuugaguauc

SEQ ID NO: 1299841 - RNA, 19 nt, Homo sapiens
  misc_RNA (1)...(19): siRNA sense strand
guauuugaguaucuugaug

SEQ ID NO: 1299842 - RNA, 19 nt, Homo sapiens
  misc_RNA (1)...(19): siRNA sense strand
aggaauacuugacaguuug

SEQ ID NO: 1299843 - RNA, 19 nt, Homo sapiens
  misc_RNA (1)...(19): siRNA sense strand
ccaaaacccuacuaugaga

SEQ ID NO: 1299844 - RNA, 19 nt, Homo sapiens
  misc_RNA (1)...(19): siRNA sense strand
aguguaaaguggucaaaug

SEQ ID NO: 1299845 - RNA, 19 nt, Homo sapiens
  misc_RNA (1)...(19): siRNA sense strand
ccacccauacuauuuguga

SEQ ID NO: 1299846 - RNA, 19 nt, Homo sapiens
  misc_RNA (1)...(19): siRNA sense strand
caccaacauuugaagcuau

SEQ ID NO: 1299847 - RNA, 19 nt, Homo sapiens
  misc_RNA (1)...(19): siRNA sense strand
uuggagagagcacgauuua

SEQ ID NO: 1299848 - RNA, 19 nt, Homo sapiens
  misc_RNA (1)...(19): siRNA sense strand
gguuaucagaugcacuuua

SEQ ID NO: 1299849 - RNA, 19 nt, Homo sapiens
  misc_RNA (1)...(19): siRNA sense strand
ugaggagccaccaacauuu

SEQ ID NO: 1299850 - RNA, 19 nt, Homo sapiens
  misc_RNA (1)...(19): siRNA sense strand
ggaaggaauacuugacagu

SEQ ID NO: 1299851 - RNA, 19 nt, Homo sapiens
  misc_RNA (1)...(19): siRNA sense strand
gaggaaggaauacuugaca

SEQ ID NO: 1299852 - RNA, 19 nt, Homo sapiens
  misc_RNA (1)...(19): siRNA sense strand
ccaguuccaaagugucuua

SEQ ID NO: 1299853 - RNA, 19 nt, Homo sapiens
  misc_RNA (1)...(19): siRNA sense strand
ugaguaucuugaugcagua

SEQ ID NO: 1299854 - RNA, 19 nt, Homo sapiens
  misc_RNA (1)...(19): siRNA sense strand
caccuuuagugaaguagaa

SEQ ID NO: 1299855 - RNA, 19 nt, Homo sapiens
  misc_RNA (1)...(19): siRNA sense strand
acagauaucaggauuugga

SEQ ID NO: 1299856 - RNA, 19 nt, Homo sapiens
  misc_RNA (1)...(19): siRNA sense strand
ucauugcugugauuguuau

SEQ ID NO: 1299857 - RNA, 19 nt, Homo sapiens
  misc_RNA (1)...(19): siRNA sense strand
ucagaugcacuuuauuugu

SEQ ID NO: 1299858 - RNA, 19 nt, Homo sapiens
  misc_RNA (1)...(19): siRNA sense strand
gugcugcuccagaguguaa

SEQ ID NO: 1299859 - RNA, 19 nt, Homo sapiens
  misc_RNA (1)...(19): siRNA sense strand
ggaaaacacaccuuuagug

SEQ ID NO: 1299860 - RNA, 19 nt, Homo sapiens
  misc_RNA (1)...(19): siRNA sense strand
aaggaucaguagcaauuug

SEQ ID NO: 1299861 - RNA, 19 nt, Homo sapiens
  misc_RNA (1)...(19): siRNA sense strand
uauauacgggauccuuuaa

SEQ ID NO: 1299862 - RNA, 19 nt, Homo sapiens
  misc_RNA (1)...(19): siRNA sense strand
ugaaguagaaguauuugag

SEQ ID NO: 1299863 - RNA, 19 nt, Homo sapiens
  misc_RNA (1)...(19): siRNA sense strand
cuugacaguuuggauguuu

SEQ ID NO: 1299864 - RNA, 19 nt, Homo sapiens
  misc_RNA (1)...(19): siRNA sense strand
cauauauacgggauccuuu

SEQ ID NO: 1299865 - RNA, 19 nt, Homo sapiens
  misc_RNA (1)...(19): siRNA sense strand
auauauacgggauccuuua

SEQ ID NO: 1299866 - RNA, 19 nt, Homo sapiens
  misc_RNA (1)...(19): siRNA sense strand
cuuaaaggaucaguagcaa

SEQ ID NO: 1299867 - RNA, 19 nt, Homo sapiens
  misc_RNA (1)...(19): siRNA sense strand
uaaaccugaggaaggaaua

SEQ ID NO: 1299868 - RNA, 19 nt, Homo sapiens
  misc_RNA (1)...(19): siRNA sense strand
agaugacgccuguuauaga

SEQ ID NO: 1299869 - RNA, 19 nt, Homo sapiens
  misc_RNA (1)...(19): siRNA sense strand
ugugauuguuauugccaua

SEQ ID NO: 1299870 - RNA, 19 nt, Homo sapiens
  misc_RNA (1)...(19): siRNA sense strand
gagagcacgauuuauugug

SEQ ID NO: 1299871 - RNA, 19 nt, Homo sapiens
  misc_RNA (1)...(19): siRNA sense strand
gaaguauuugaguaucuug

SEQ ID NO: 1299872 - RNA, 19 nt, Homo sapiens
  misc_RNA (1)...(19): siRNA sense strand
ggcuaccugucucagauga

SEQ ID NO: 1299873 - RNA, 19 nt, Homo sapiens
  misc_RNA (1)...(19): siRNA sense strand
gauaucaggauuuggaaaa

SEQ ID NO: 1299874 - RNA, 19 nt, Homo sapiens
  misc_RNA (1)...(19): siRNA sense strand
ccucuugccacccauacua

SEQ ID NO: 1299875 - RNA, 19 nt, Homo sapiens
  misc_RNA (1)...(19): siRNA sense strand
ccaugguguugcugcugua

SEQ ID NO: 1299876 - RNA, 19 nt, Homo sapiens
  misc_RNA (1)...(19): siRNA sense strand
cagaugacgccuguuauag

SEQ ID NO: 1299877 - RNA, 19 nt, Homo sapiens
  misc_RNA (1)...(19): siRNA sense strand
uuggugaacgaguagauua

SEQ ID NO: 1299878 - RNA, 19 nt, Homo sapiens
  misc_RNA (1)...(19): siRNA sense strand
gucauugcugugauuguua

SEQ ID NO: 1299879 - RNA, 19 nt, Homo sapiens
  misc_RNA (1)...(19): siRNA sense strand
ggagccaccaacauuugaa

SEQ ID NO: 1299880 - RNA, 19 nt, Homo sapiens
  misc_RNA (1)...(19): siRNA sense strand
gcgcuuuccuggguugcuu

SEQ ID NO: 1299881 - RNA, 19 nt, Homo sapiens
  misc_RNA (1)...(19): siRNA sense strand
uacuacaaagcaacaguua

SEQ ID NO: 1299882 - RNA, 19 nt, Homo sapiens
  misc_RNA (1)...(19): siRNA sense strand
cuugaugcaguaacuuaua

SEQ ID NO: 1299883 - RNA, 19 nt, Homo sapiens
  misc_RNA (1)...(19): siRNA sense strand
aaacauguccauauauacg

SEQ ID NO: 1299884 - RNA, 19 nt, Homo sapiens
  misc_RNA (1)...(19): siRNA sense strand
guguaaaguggucaaaugu

SEQ ID NO: 1299885 - RNA, 19 nt, Homo sapiens
  misc_RNA (1)...(19): siRNA sense strand
cuuacgaguuugguuauca

SEQ ID NO: 1299886 - RNA, 19 nt, Homo sapiens
  misc_RNA (1)...(19): siRNA sense strand
uacgggauccuuuaaaugg

SEQ ID NO: 1299887 - RNA, 19 nt, Homo sapiens
  misc_RNA (1)...(19): siRNA sense strand
aaccaaaacccuacuauga

SEQ ID NO: 1299888 - RNA, 19 nt, Homo sapiens
  misc_RNA (1)...(19): siRNA sense strand
cccaauaugugaaaagguu

SEQ ID NO: 1299889 - RNA, 19 nt, Homo sapiens
  misc_RNA (1)...(19): siRNA sense strand
cgauggcagcgacacaauu

SEQ ID NO: 1299890 - RNA, 19 nt, Homo sapiens
  misc_RNA (1)...(19): siRNA sense strand
gauccauuuucacuuauug

SEQ ID NO: 1299891 - RNA, 19 nt, Homo sapiens
  misc_RNA (1)...(19): siRNA sense strand
uugaugcaguaacuuauag

SEQ ID NO: 1299892 - RNA, 19 nt, Homo sapiens
  misc_RNA (1)...(19): siRNA sense strand
guaucuugaugcaguaacu

SEQ ID NO: 1299893 - RNA, 19 nt, Homo sapiens
  misc_RNA (1)...(19): siRNA sense strand
caacauuugaagcuaugga

SEQ ID NO: 1299894 - RNA, 19 nt, Homo sapiens
  misc_RNA (1)...(19): siRNA sense strand
gagauuggugaacgaguag

SEQ ID NO: 1299895 - RNA, 19 nt, Homo sapiens
  misc_RNA (1)...(19): siRNA sense strand
ggagagagcacgauuuauu

SEQ ID NO: 1299896 - RNA, 19 nt, Homo sapiens
  misc_RNA (1)...(19): siRNA sense strand
agagaaacauguccauaua

SEQ ID NO: 1299897 - RNA, 19 nt, Homo sapiens
  misc_RNA (1)...(19): siRNA sense strand
cagaugcacuuuauuugua

SEQ ID NO: 1299898 - RNA, 19 nt, Homo sapiens
  misc_RNA (1)...(19): siRNA sense strand
ggacuuacgaguuugguua

SEQ ID NO: 1299899 - RNA, 19 nt, Homo sapiens
  misc_RNA (1)...(19): siRNA sense strand
aaacagauaucaggauuug

SEQ ID NO: 1299900 - RNA, 19 nt, Homo sapiens
  misc_RNA (1)...(19): siRNA sense strand
cuauggagcucauugguaa

SEQ ID NO: 1299901 - RNA, 19 nt, Homo sapiens
  misc_RNA (1)...(19): siRNA sense strand
aaacacaccuuuagugaag

SEQ ID NO: 1299902 - RNA, 19 nt, Homo sapiens
  misc_RNA (1)...(19): siRNA sense strand
gaacuuaaaggaucaguag

SEQ ID NO: 1299903 - RNA, 19 nt, Homo sapiens
  misc_RNA (1)...(19): siRNA sense strand
gaaaacagauaucaggauu

SEQ ID NO: 1299904 - RNA, 19 nt, Homo sapiens
  misc_RNA (1)...(19): siRNA sense strand
uaaaggaucaguagcaauu

SEQ ID NO: 1299905 - RNA, 19 nt, Homo sapiens
  misc_RNA (1)...(19): siRNA sense strand
aaaugggacuuacgaguuu

SEQ ID NO: 1299906 - RNA, 19 nt, Homo sapiens
  misc_RNA (1)...(19): siRNA sense strand
guuaucagaugcacuuuau

SEQ ID NO: 1299907 - RNA, 19 nt, Homo sapiens
  misc_RNA (1)...(19): siRNA sense strand
gagcugaauaugccacuua

SEQ ID NO: 1299908 - RNA, 19 nt, Homo sapiens
  misc_RNA (1)...(19): siRNA sense strand
ugagauuggugaacgagua

SEQ ID NO: 1299909 - RNA, 19 nt, Homo sapiens
  misc_RNA (1)...(19): siRNA sense strand
gugaacgaguagauuauaa

SEQ ID NO: 1299910 - RNA, 19 nt, Homo sapiens
  misc_RNA (1)...(19): siRNA sense strand
gagagagcacgauuuauug

SEQ ID NO: 1299911 - RNA, 19 nt, Homo sapiens
  misc_RNA (1)...(19): siRNA sense strand
caaaugggacuuacgaguu

SEQ ID NO: 1299912 - RNA, 19 nt, Homo sapiens
  misc_RNA (1)...(19): siRNA sense strand
ggucauugcugugauuguu

SEQ ID NO: 1299913 - RNA, 19 nt, Homo sapiens
  misc_RNA (1)...(19): siRNA sense strand
ccagauccauuuucacuua

SEQ ID NO: 1299914 - RNA, 19 nt, Homo sapiens
  misc_RNA (1)...(19): siRNA sense strand
gaaggaauacuugacaguu

SEQ ID NO: 1299915 - RNA, 19 nt, Homo sapiens
  misc_RNA (1)...(19): siRNA sense strand
aaggaauacuugacaguuu

SEQ ID NO: 1299916 - RNA, 19 nt, Homo sapiens
  misc_RNA (1)...(19): siRNA sense strand
ucagaugacgccuguuaua

SEQ ID NO: 1299917 - RNA, 19 nt, Homo sapiens
  misc_RNA (1)...(19): siRNA sense strand
gaaaacacaccuuuaguga

SEQ ID NO: 1299918 - RNA, 19 nt, Homo sapiens
  misc_RNA (1)...(19): siRNA sense strand
gaugacgccuguuauagag

SEQ ID NO: 1299919 - RNA, 19 nt, Homo sapiens
  misc_RNA (1)...(19): siRNA sense strand
gagaaacauguccauauau

SEQ ID NO: 1299920 - RNA, 19 nt, Homo sapiens
  misc_RNA (1)...(19): siRNA sense strand
ccacuuaccagacuaaauc

SEQ ID NO: 1299921 - RNA, 19 nt, Homo sapiens
  misc_RNA (1)...(19): siRNA sense strand
acgaguagauuauaagugu

SEQ ID NO: 1299922 - RNA, 19 nt, Homo sapiens
  misc_RNA (1)...(19): siRNA sense strand
cuacaaagcaacaguuaug

SEQ ID NO: 1299923 - RNA, 19 nt, Homo sapiens
  misc_RNA (1)...(19): siRNA sense strand
ccaccaacauuugaagcua

SEQ ID NO: 1299924 - RNA, 19 nt, Homo sapiens
  misc_RNA (1)...(19): siRNA sense strand
uauacgggauccuuuaaau

SEQ ID NO: 1299925 - RNA, 19 nt, Homo sapiens
  misc_RNA (1)...(19): siRNA sense strand
cgaguuugguuaucagaug

SEQ ID NO: 1299926 - RNA, 19 nt, Homo sapiens
  misc_RNA (1)...(19): siRNA sense strand
gaacgaguagauuauaagu

SEQ ID NO: 1299927 - RNA, 19 nt, Homo sapiens
  misc_RNA (1)...(19): siRNA sense strand
gugaggagccaccaacauu

SEQ ID NO: 1299928 - RNA, 19 nt, Homo sapiens
  misc_RNA (1)...(19): siRNA sense strand
gauggcagcgacacaauug

SEQ ID NO: 1299929 - RNA, 19 nt, Homo sapiens
  misc_RNA (1)...(19): siRNA sense strand
ucucagaugacgccuguua

SEQ ID NO: 1299930 - RNA, 19 nt, Homo sapiens
  misc_RNA (1)...(19): siRNA sense strand
gaggagccaccaacauuug

SEQ ID NO: 1299931 - RNA, 19 nt, Homo sapiens
  misc_RNA (1)...(19): siRNA sense strand
gcuauggagcucauuggua

SEQ ID NO: 1299932 - RNA, 19 nt, Homo sapiens
  misc_RNA (1)...(19): siRNA sense strand
acacaccuuuagugaagua

SEQ ID NO: 1299933 - RNA, 19 nt, Homo sapiens
  misc_RNA (1)...(19): siRNA sense strand
uagagaaacauguccauau

SEQ ID NO: 1299934 - RNA, 19 nt, Homo sapiens
  misc_RNA (1)...(19): siRNA sense strand
ggugaacgaguagauuaua

SEQ ID NO: 1299935 - RNA, 19 nt, Homo sapiens
  misc_RNA (1)...(19): siRNA sense strand
gaaguagaaguauuugagu

SEQ ID NO: 1299936 - RNA, 19 nt, Homo sapiens
  misc_RNA (1)...(19): siRNA sense strand
gaaacauguccauauauac

SEQ ID NO: 1299937 - RNA, 19 nt, Homo sapiens
  misc_RNA (1)...(19): siRNA sense strand
ugacgccuguuauagagaa

SEQ ID NO: 1299938 - RNA, 19 nt, Homo sapiens
  misc_RNA (1)...(19): siRNA sense strand
cgaguagauuauaagugua

SEQ ID NO: 1299939 - RNA, 19 nt, Homo sapiens
  misc_RNA (1)...(19): siRNA sense strand
gcacuuuauuuguaaugag

SEQ ID NO: 1299940 - RNA, 19 nt, Homo sapiens
  misc_RNA (1)...(19): siRNA sense strand
guagaaguauuugaguauc

SEQ ID NO: 1299941 - RNA, 19 nt, Homo sapiens
  misc_RNA (1)...(19): siRNA sense strand
guauuugaguaucuugaug

SEQ ID NO: 1299942 - RNA, 19 nt, Homo sapiens
  misc_RNA (1)...(19): siRNA sense strand
aggaauacuugacaguuug

SEQ ID NO: 1299943 - RNA, 19 nt, Homo sapiens
  misc_RNA (1)...(19): siRNA sense strand
ccaaaacccuacuaugaga

SEQ ID NO: 1299944 - RNA, 19 nt, Homo sapiens
  misc_RNA (1)...(19): siRNA sense strand
aguguaaaguggucaaaug

SEQ ID NO: 1299945 - RNA, 19 nt, Homo sapiens
  misc_RNA (1)...(19): siRNA sense strand
ccacccauacuauuuguga

SEQ ID NO: 1299946 - RNA, 19 nt, Homo sapiens
  misc_RNA (1)...(19): siRNA sense strand
uuggagagagcacgauuua

SEQ ID NO: 1299947 - RNA, 19 nt, Homo sapiens
  misc_RNA (1)...(19): siRNA sense strand
gguuaucagaugcacuuua

SEQ ID NO: 1299948 - RNA, 19 nt, Homo sapiens
  misc_RNA (1)...(19): siRNA sense strand
caccaacauuugaagcuau

SEQ ID NO: 1299949 - RNA, 19 nt, Homo sapiens
  misc_RNA (1)...(19): siRNA sense strand
ugaggagccaccaacauuu

SEQ ID NO: 1299950 - RNA, 19 nt, Homo sapiens
  misc_RNA (1)...(19): siRNA sense strand
ggaaggaauacuugacagu

SEQ ID NO: 1299951 - RNA, 19 nt, Homo sapiens
  misc_RNA (1)...(19): siRNA sense strand
gaggaaggaauacuugaca

SEQ ID NO: 1299952 - RNA, 19 nt, Homo sapiens
  misc_RNA (1)...(19): siRNA sense strand
ugaguaucuugaugcagua

SEQ ID NO: 1299953 - RNA, 19 nt, Homo sapiens
  misc_RNA (1)...(19): siRNA sense strand
caccuuuagugaaguagaa

SEQ ID NO: 1299954 - RNA, 19 nt, Homo sapiens
  misc_RNA (1)...(19): siRNA sense strand
acagauaucaggauuugga

SEQ ID NO: 1299955 - RNA, 19 nt, Homo sapiens
  misc_RNA (1)...(19): siRNA sense strand
ucauugcugugauuguuau

SEQ ID NO: 1299956 - RNA, 19 nt, Homo sapiens
  misc_RNA (1)...(19): siRNA sense strand
ucagaugcacuuuauuugu

SEQ ID NO: 1299957 - RNA, 19 nt, Homo sapiens
  misc_RNA (1)...(19): siRNA sense strand
gugcugcuccagaguguaa

SEQ ID NO: 1299958 - RNA, 19 nt, Homo sapiens
  misc_RNA (1)...(19): siRNA sense strand
ggaaaacacaccuuuagug

SEQ ID NO: 1299959 - RNA, 19 nt, Homo sapiens
  misc_RNA (1)...(19): siRNA sense strand
aaggaucaguagcaauuug

SEQ ID NO: 1299960 - RNA, 19 nt, Homo sapiens
  misc_RNA (1)...(19): siRNA sense strand
uauauacgggauccuuuaa

SEQ ID NO: 1299961 - RNA, 19 nt, Homo sapiens
  misc_RNA (1)...(19): siRNA sense strand
ugaaguagaaguauuugag

SEQ ID NO: 1299962 - RNA, 19 nt, Homo sapiens
  misc_RNA (1)...(19): siRNA sense strand
cuugacaguuuggauguuu

SEQ ID NO: 1299963 - RNA, 19 nt, Homo sapiens
  misc_RNA (1)...(19): siRNA sense strand
cauauauacgggauccuuu

SEQ ID NO: 1299964 - RNA, 19 nt, Homo sapiens
  misc_RNA (1)...(19): siRNA sense strand
auauauacgggauccuuua

SEQ ID NO: 1299965 - RNA, 19 nt, Homo sapiens
  misc_RNA (1)...(19): siRNA sense strand
cuuaaaggaucaguagcaa

SEQ ID NO: 1299966 - RNA, 19 nt, Homo sapiens
  misc_RNA (1)...(19): siRNA sense strand
uaaaccugaggaaggaaua

SEQ ID NO: 1299967 - RNA, 19 nt, Homo sapiens
  misc_RNA (1)...(19): siRNA sense strand
agaugacgccuguuauaga

SEQ ID NO: 1299968 - RNA, 19 nt, Homo sapiens
  misc_RNA (1)...(19): siRNA sense strand
ugugauuguuauugccaua

SEQ ID NO: 1299969 - RNA, 19 nt, Homo sapiens
  misc_RNA (1)...(19): siRNA sense strand
gagagcacgauuuauugug

SEQ ID NO: 1299970 - RNA, 19 nt, Homo sapiens
  misc_RNA (1)...(19): siRNA sense strand
gaaguauuugaguaucuug

SEQ ID NO: 1299971 - RNA, 19 nt, Homo sapiens
  misc_RNA (1)...(19): siRNA sense strand
ggcuaccugucucagauga

SEQ ID NO: 1299972 - RNA, 19 nt, Homo sapiens
  misc_RNA (1)...(19): siRNA sense strand
gauaucaggauuuggaaaa

SEQ ID NO: 1299973 - RNA, 19 nt, Homo sapiens
  misc_RNA (1)...(19): siRNA sense strand
ccucuugccacccauacua

SEQ ID NO: 1299974 - RNA, 19 nt, Homo sapiens
  misc_RNA (1)...(19): siRNA sense strand
ccaugguguugcugcugua

SEQ ID NO: 1299975 - RNA, 19 nt, Homo sapiens
  misc_RNA (1)...(19): siRNA sense strand
cagaugacgccuguuauag

SEQ ID NO: 1299976 - RNA, 19 nt, Homo sapiens
  misc_RNA (1)...(19): siRNA sense strand
cagaugguggagcugaaua

SEQ ID NO: 1299977 - RNA, 19 nt, Homo sapiens
  misc_RNA (1)...(19): siRNA sense strand
uuggugaacgaguagauua

SEQ ID NO: 1299978 - RNA, 19 nt, Homo sapiens
  misc_RNA (1)...(19): siRNA sense strand
gucauugcugugauuguua

SEQ ID NO: 1299979 - RNA, 19 nt, Homo sapiens
  misc_RNA (1)...(19): siRNA sense strand
ggagccaccaacauuugaa

SEQ ID NO: 1299980 - RNA, 19 nt, Homo sapiens
  misc_RNA (1)...(19): siRNA sense strand
gcgcuuuccuggguugcuu

SEQ ID NO: 1299981 - RNA, 19 nt, Homo sapiens
  misc_RNA (1)...(19): siRNA sense strand
uacuacaaagcaacaguua

SEQ ID NO: 1299982 - RNA, 19 nt, Homo sapiens
  misc_RNA (1)...(19): siRNA sense strand
cuugaugcaguaacuuaua

SEQ ID NO: 1299983 - RNA, 19 nt, Homo sapiens
  misc_RNA (1)...(19): siRNA sense strand
aaacauguccauauauacg

SEQ ID NO: 1299984 - RNA, 19 nt, Homo sapiens
  misc_RNA (1)...(19): siRNA sense strand
guguaaaguggucaaaugu

SEQ ID NO: 1299985 - RNA, 19 nt, Homo sapiens
  misc_RNA (1)...(19): siRNA sense strand
cuuacgaguuugguuauca

SEQ ID NO: 1299986 - RNA, 19 nt, Homo sapiens
  misc_RNA (1)...(19): siRNA sense strand
uacgggauccuuuaaaugg

SEQ ID NO: 1299987 - RNA, 19 nt, Homo sapiens
  misc_RNA (1)...(19): siRNA sense strand
gcagaugguggagcugaau

SEQ ID NO: 1299988 - RNA, 19 nt, Homo sapiens
  misc_RNA (1)...(19): siRNA sense strand
aaccaaaacccuacuauga

SEQ ID NO: 1299989 - RNA, 19 nt, Homo sapiens
  misc_RNA (1)...(19): siRNA sense strand
cccaauaugugaaaagguu

SEQ ID NO: 1299990 - RNA, 19 nt, Homo sapiens
  misc_RNA (1)...(19): siRNA sense strand
ggagcugaauaugccacuu

SEQ ID NO: 1299991 - RNA, 19 nt, Homo sapiens
  misc_RNA (1)...(19): siRNA sense strand
cgauggcagcgacacaauu

SEQ ID NO: 1299992 - RNA, 19 nt, Homo sapiens
  misc_RNA (1)...(19): siRNA sense strand
gauccauuuucacuuauug

SEQ ID NO: 1299993 - RNA, 19 nt, Homo sapiens
  misc_RNA (1)...(19): siRNA sense strand
uugaugcaguaacuuauag

SEQ ID NO: 1299994 - RNA, 19 nt, Homo sapiens
  misc_RNA (1)...(19): siRNA sense strand
guaucuugaugcaguaacu

SEQ ID NO: 1299995 - RNA, 19 nt, Homo sapiens
  misc_RNA (1)...(19): siRNA sense strand
ggagagagcacgauuuauu

SEQ ID NO: 1299996 - RNA, 19 nt, Homo sapiens
  misc_RNA (1)...(19): siRNA sense strand
agagaaacauguccauaua

SEQ ID NO: 1299997 - RNA, 19 nt, Homo sapiens
  misc_RNA (1)...(19): siRNA sense strand
cagaugcacuuuauuugua

SEQ ID NO: 1299998 - RNA, 19 nt, Homo sapiens
  misc_RNA (1)...(19): siRNA sense strand
ggacuuacgaguuugguua

SEQ ID NO: 1299999 - RNA, 19 nt, Homo sapiens
  misc_RNA (1)...(19): siRNA sense strand
aaacagauaucaggauuug

SEQ ID NO: 1300000 - RNA, 19 nt, Homo sapiens
  misc_RNA (1)...(19): siRNA sense strand
cuauggagcucauugguaa

SEQ ID NO: 1300001 - RNA, 19 nt, Homo sapiens
  misc_RNA (1)...(19): siRNA sense strand
aaacacaccuuuagugaag

SEQ ID NO: 1300002 - RNA, 19 nt, Homo sapiens
  misc_RNA (1)...(19): siRNA sense strand
gaacuuaaaggaucaguag

SEQ ID NO: 1300003 - RNA, 19 nt, Homo sapiens
  misc_RNA (1)...(19): siRNA sense strand
gaaaacagauaucaggauu

SEQ ID NO: 1300004 - RNA, 19 nt, Homo sapiens
  misc_RNA (1)...(19): siRNA sense strand
uaaaggaucaguagcaauu

SEQ ID NO: 1300005 - RNA, 19 nt, Homo sapiens
  misc_RNA (1)...(19): siRNA sense strand
aaaugggacuuacgaguuu

SEQ ID NO: 1300006 - RNA, 19 nt, Homo sapiens
  misc_RNA (1)...(19): siRNA sense strand
guuaucagaugcacuuuau

SEQ ID NO: 1300007 - RNA, 19 nt, Homo sapiens
  misc_RNA (1)...(19): siRNA sense strand
gagcugaauaugccacuua

SEQ ID NO: 1300008 - RNA, 19 nt, Homo sapiens
  misc_RNA (1)...(19): siRNA sense strand
gagcagagaggcugaauag

SEQ ID NO: 1300009 - RNA, 19 nt, Homo sapiens
  misc_RNA (1)...(19): siRNA sense strand
ugagauuggugaacgagua

SEQ ID NO: 1300010 - RNA, 19 nt, Homo sapiens
  misc_RNA (1)...(19): siRNA sense strand
gugaacgaguagauuauaa

SEQ ID NO: 1300011 - RNA, 19 nt, Homo sapiens
  misc_RNA (1)...(19): siRNA sense strand
gagagagcacgauuuauug

SEQ ID NO: 1300012 - RNA, 19 nt, Homo sapiens
  misc_RNA (1)...(19): siRNA sense strand
caaaugggacuuacgaguu

SEQ ID NO: 1300013 - RNA, 19 nt, Homo sapiens
  misc_RNA (1)...(19): siRNA sense strand
ggucauugcugugauuguu

SEQ ID NO: 1300014 - RNA, 19 nt, Homo sapiens
  misc_RNA (1)...(19): siRNA sense strand
ccagauccauuuucacuua

SEQ ID NO: 1300015 - RNA, 19 nt, Homo sapiens
  misc_RNA (1)...(19): siRNA sense strand
gaaggaauacuugacaguu

SEQ ID NO: 1300016 - RNA, 19 nt, Homo sapiens
  misc_RNA (1)...(19): siRNA sense strand
aaggaauacuugacaguuu

SEQ ID NO: 1300017 - RNA, 19 nt, Homo sapiens
  misc_RNA (1)...(19): siRNA sense strand
ucagaugacgccuguuaua

SEQ ID NO: 1300018 - RNA, 19 nt, Homo sapiens
  misc_RNA (1)...(19): siRNA sense strand
gaaaacacaccuuuaguga

SEQ ID NO: 1300019 - RNA, 19 nt, Homo sapiens
  misc_RNA (1)...(19): siRNA sense strand
gaugacgccuguuauagag

SEQ ID NO: 1300020 - RNA, 19 nt, Homo sapiens
  misc_RNA (1)...(19): siRNA sense strand
gagaaacauguccauauau

SEQ ID NO: 1300021 - RNA, 19 nt, Homo sapiens
  misc_RNA (1)...(19): siRNA sense strand
ccacuuaccagacuaaauc

SEQ ID NO: 1300022 - RNA, 19 nt, Homo sapiens
  misc_RNA (1)...(19): siRNA sense strand
acgaguagauuauaagugu

SEQ ID NO: 1300023 - RNA, 19 nt, Homo sapiens
  misc_RNA (1)...(19): siRNA sense strand
cuacaaagcaacaguuaug

SEQ ID NO: 1300024 - RNA, 19 nt, Homo sapiens
  misc_RNA (1)...(19): siRNA sense strand
ccaccaacauuugaagcua

SEQ ID NO: 1300025 - RNA, 19 nt, Homo sapiens
  misc_RNA (1)...(19): siRNA sense strand
uauacgggauccuuuaaau

SEQ ID NO: 1300026 - RNA, 19 nt, Homo sapiens
  misc_RNA (1)...(19): siRNA sense strand
cgaguuugguuaucagaug

SEQ ID NO: 1300027 - RNA, 19 nt, Homo sapiens
  misc_RNA (1)...(19): siRNA sense strand
gaacgaguagauuauaagu

SEQ ID NO: 1300028 - RNA, 19 nt, Homo sapiens
  misc_RNA (1)...(19): siRNA sense strand
gugaggagccaccaacauu

SEQ ID NO: 1300029 - RNA, 19 nt, Homo sapiens
  misc_RNA (1)...(19): siRNA sense strand
gauggcagcgacacaauug

SEQ ID NO: 1300030 - RNA, 19 nt, Homo sapiens
  misc_RNA (1)...(19): siRNA sense strand
ucucagaugacgccuguua

SEQ ID NO: 1300031 - RNA, 19 nt, Homo sapiens
  misc_RNA (1)...(19): siRNA sense strand
acacaccuuuagugaagua

SEQ ID NO: 1300032 - RNA, 19 nt, Homo sapiens
  misc_RNA (1)...(19): siRNA sense strand
gcuauggagcucauuggua

SEQ ID NO: 1300033 - RNA, 19 nt, Homo sapiens
  misc_RNA (1)...(19): siRNA sense strand
gaggagccaccaacauuug

SEQ ID NO: 1300034 - RNA, 19 nt, Homo sapiens
  misc_RNA (1)...(19): siRNA sense strand
uagagaaacauguccauau

SEQ ID NO: 1300035 - RNA, 19 nt, Homo sapiens
  misc_RNA (1)...(19): siRNA sense strand
guuccaaagugucuuaaag

SEQ ID NO: 1300036 - RNA, 19 nt, Homo sapiens
  misc_RNA (1)...(19): siRNA sense strand
ggugaacgaguagauuaua

SEQ ID NO: 1300037 - RNA, 19 nt, Homo sapiens
  misc_RNA (1)...(19): siRNA sense strand
gaaguagaaguauuugagu

SEQ ID NO: 1300038 - RNA, 19 nt, Homo sapiens
  misc_RNA (1)...(19): siRNA sense strand
gaaacauguccauauauac

SEQ ID NO: 1300039 - RNA, 19 nt, Homo sapiens
  misc_RNA (1)...(19): siRNA sense strand
ugacgccuguuauagagaa

SEQ ID NO: 1300040 - RNA, 19 nt, Homo sapiens
  misc_RNA (1)...(19): siRNA sense strand
cgaguagauuauaagugua

SEQ ID NO: 1300041 - RNA, 19 nt, Homo sapiens
  misc_RNA (1)...(19): siRNA sense strand
gcacuuuauuuguaaugag

SEQ ID NO: 1300042 - RNA, 19 nt, Homo sapiens
  misc_RNA (1)...(19): siRNA sense strand
guagaaguauuugaguauc

SEQ ID NO: 1300043 - RNA, 19 nt, Homo sapiens
  misc_RNA (1)...(19): siRNA sense strand
guauuugaguaucuugaug

SEQ ID NO: 1300044 - RNA, 19 nt, Homo sapiens
  misc_RNA (1)...(19): siRNA sense strand
aggaauacuugacaguuug

SEQ ID NO: 1300045 - RNA, 19 nt, Homo sapiens
  misc_RNA (1)...(19): siRNA sense strand
ccaaaacccuacuaugaga

SEQ ID NO: 1300046 - RNA, 19 nt, Homo sapiens
  misc_RNA (1)...(19): siRNA sense strand
aguguaaaguggucaaaug

SEQ ID NO: 1300047 - RNA, 19 nt, Homo sapiens
  misc_RNA (1)...(19): siRNA sense strand
ccacccauacuauuuguga

SEQ ID NO: 1300048 - RNA, 19 nt, Homo sapiens
  misc_RNA (1)...(19): siRNA sense strand
uuggagagagcacgauuua

SEQ ID NO: 1300049 - RNA, 19 nt, Homo sapiens
  misc_RNA (1)...(19): siRNA sense strand
gguuaucagaugcacuuua

SEQ ID NO: 1300050 - RNA, 19 nt, Homo sapiens
  misc_RNA (1)...(19): siRNA sense strand
caccaacauuugaagcuau

SEQ ID NO: 1300051 - RNA, 19 nt, Homo sapiens
  misc_RNA (1)...(19): siRNA sense strand
ugaggagccaccaacauuu

SEQ ID NO: 1300052 - RNA, 19 nt, Homo sapiens
  misc_RNA (1)...(19): siRNA sense strand
ggaaggaauacuugacagu

SEQ ID NO: 1300053 - RNA, 19 nt, Homo sapiens
  misc_RNA (1)...(19): siRNA sense strand
gaggaaggaauacuugaca

SEQ ID NO: 1300054 - RNA, 19 nt, Homo sapiens
  misc_RNA (1)...(19): siRNA sense strand
ccaguuccaaagugucuua

SEQ ID NO: 1300055 - RNA, 19 nt, Homo sapiens
  misc_RNA (1)...(19): siRNA sense strand
ugaguaucuugaugcagua

SEQ ID NO: 1300056 - RNA, 19 nt, Homo sapiens
  misc_RNA (1)...(19): siRNA sense strand
caccuuuagugaaguagaa

SEQ ID NO: 1300057 - RNA, 19 nt, Homo sapiens
  misc_RNA (1)...(19): siRNA sense strand
acagauaucaggauuugga

SEQ ID NO: 1300058 - RNA, 19 nt, Homo sapiens
  misc_RNA (1)...(19): siRNA sense strand
ucauugcugugauuguuau

SEQ ID NO: 1300059 - RNA, 19 nt, Homo sapiens
  misc_RNA (1)...(19): siRNA sense strand
ucagaugcacuuuauuugu

SEQ ID NO: 1300060 - RNA, 19 nt, Homo sapiens
  misc_RNA (1)...(19): siRNA sense strand
gugcugcuccagaguguaa

SEQ ID NO: 1300061 - RNA, 19 nt, Homo sapiens
  misc_RNA (1)...(19): siRNA sense strand
ggaaaacacaccuuuagug

SEQ ID NO: 1300062 - RNA, 19 nt, Homo sapiens
  misc_RNA (1)...(19): siRNA sense strand
aaggaucaguagcaauuug

SEQ ID NO: 1300063 - RNA, 19 nt, Homo sapiens
  misc_RNA (1)...(19): siRNA sense strand
uauauacgggauccuuuaa

SEQ ID NO: 1300064 - RNA, 19 nt, Homo sapiens
  misc_RNA (1)...(19): siRNA sense strand
ugaaguagaaguauuugag

SEQ ID NO: 1300065 - RNA, 19 nt, Homo sapiens
  misc_RNA (1)...(19): siRNA sense strand
cuugacaguuuggauguuu

SEQ ID NO: 1300066 - RNA, 19 nt, Homo sapiens
  misc_RNA (1)...(19): siRNA sense strand
cauauauacgggauccuuu

SEQ ID NO: 1300067 - RNA, 19 nt, Homo sapiens
  misc_RNA (1)...(19): siRNA sense strand
auauauacgggauccuuua

SEQ ID NO: 1300068 - RNA, 19 nt, Homo sapiens
  misc_RNA (1)...(19): siRNA sense strand
cuuaaaggaucaguagcaa

SEQ ID NO: 1300069 - RNA, 19 nt, Homo sapiens
  misc_RNA (1)...(19): siRNA sense strand
uaaaccugaggaaggaaua

SEQ ID NO: 1300070 - RNA, 19 nt, Homo sapiens
  misc_RNA (1)...(19): siRNA sense strand
agaugacgccuguuauaga

SEQ ID NO: 1300071 - RNA, 19 nt, Homo sapiens
  misc_RNA (1)...(19): siRNA sense strand
ugugauuguuauugccaua

SEQ ID NO: 1300072 - RNA, 19 nt, Homo sapiens
  misc_RNA (1)...(19): siRNA sense strand
gagagcacgauuuauugug

SEQ ID NO: 1300073 - RNA, 19 nt, Homo sapiens
  misc_RNA (1)...(19): siRNA sense strand
gaaguauuugaguaucuug

SEQ ID NO: 1300074 - RNA, 19 nt, Homo sapiens
  misc_RNA (1)...(19): siRNA sense strand
ggcuaccugucucagauga

SEQ ID NO: 1300075 - RNA, 19 nt, Homo sapiens
  misc_RNA (1)...(19): siRNA sense strand
ccucuugccacccauacua

SEQ ID NO: 1300076 - RNA, 19 nt, Homo sapiens
  misc_RNA (1)...(19): siRNA sense strand
gauaucaggauuuggaaaa

SEQ ID NO: 1300077 - RNA, 19 nt, Homo sapiens
  misc_RNA (1)...(19): siRNA sense strand
ccaugguguugcugcugua

SEQ ID NO: 1300078 - RNA, 19 nt, Homo sapiens
  misc_RNA (1)...(19): siRNA sense strand
cagaugacgccuguuauag

SEQ ID NO: 1300079 - RNA, 19 nt, Homo sapiens
  misc_RNA (1)...(19): siRNA sense strand
cagaugguggagcugaaua

SEQ ID NO: 1300080 - RNA, 19 nt, Homo sapiens
  misc_RNA (1)...(19): siRNA sense strand
gucauugcugugauuguua

SEQ ID NO: 1300081 - RNA, 19 nt, Homo sapiens
  misc_RNA (1)...(19): siRNA sense strand
uuggugaacgaguagauua

SEQ ID NO: 1300082 - RNA, 19 nt, Homo sapiens
  misc_RNA (1)...(19): siRNA sense strand
ggagccaccaacauuugaa

SEQ ID NO: 1300083 - RNA, 19 nt, Homo sapiens
  misc_RNA (1)...(19): siRNA sense strand
gcgcuuuccuggguugcuu

SEQ ID NO: 1300084 - RNA, 19 nt, Homo sapiens
  misc_RNA (1)...(19): siRNA sense strand
uacuacaaagcaacaguua

SEQ ID NO: 1300085 - RNA, 19 nt, Homo sapiens
  misc_RNA (1)...(19): siRNA sense strand
cuugaugcaguaacuuaua

SEQ ID NO: 1300086 - RNA, 19 nt, Homo sapiens
  misc_RNA (1)...(19): siRNA sense strand
aaacauguccauauauacg

SEQ ID NO: 1300087 - RNA, 19 nt, Homo sapiens
  misc_RNA (1)...(19): siRNA sense strand
guguaaaguggucaaaugu

SEQ ID NO: 1300088 - RNA, 19 nt, Homo sapiens
  misc_RNA (1)...(19): siRNA sense strand
cuuacgaguuugguuauca

SEQ ID NO: 1300089 - RNA, 19 nt, Homo sapiens
  misc_RNA (1)...(19): siRNA sense strand
aaccaaaacccuacuauga

SEQ ID NO: 1300090 - RNA, 19 nt, Homo sapiens
  misc_RNA (1)...(19): siRNA sense strand
gcagaugguggagcugaau

SEQ ID NO: 1300091 - RNA, 19 nt, Homo sapiens
  misc_RNA (1)...(19): siRNA sense strand
uacgggauccuuuaaaugg

SEQ ID NO: 1300092 - RNA, 19 nt, Homo sapiens
  misc_RNA (1)...(19): siRNA sense strand
cgauggcagcgacacaauu

SEQ ID NO: 1300093 - RNA, 19 nt, Homo sapiens
  misc_RNA (1)...(19): siRNA sense strand
ggagcugaauaugccacuu

SEQ ID NO: 1300094 - RNA, 19 nt, Homo sapiens
  misc_RNA (1)...(19): siRNA sense strand
caacauuugaagcuaugga

SEQ ID NO: 1300095 - RNA, 19 nt, Homo sapiens
  misc_RNA (1)...(19): siRNA sense strand
ggagagagcacgauuuauu

SEQ ID NO: 1300096 - RNA, 19 nt, Homo sapiens
  misc_RNA (1)...(19): siRNA sense strand
agagaaacauguccauaua

SEQ ID NO: 1300097 - RNA, 19 nt, Homo sapiens
  misc_RNA (1)...(19): siRNA sense strand
cagaugcacuuuauuugua

SEQ ID NO: 1300098 - RNA, 19 nt, Homo sapiens
  misc_RNA (1)...(19): siRNA sense strand
ggacuuacgaguuugguua

SEQ ID NO: 1300099 - RNA, 19 nt, Homo sapiens
  misc_RNA (1)...(19): siRNA sense strand
aaacagauaucaggauuug

SEQ ID NO: 1300100 - RNA, 19 nt, Homo sapiens
  misc_RNA (1)...(19): siRNA sense strand
cuauggagcucauugguaa

SEQ ID NO: 1300101 - RNA, 19 nt, Homo sapiens
  misc_RNA (1)...(19): siRNA sense strand
aaacacaccuuuagugaag

SEQ ID NO: 1300102 - RNA, 19 nt, Homo sapiens
  misc_RNA (1)...(19): siRNA sense strand
gaacuuaaaggaucaguag

SEQ ID NO: 1300103 - RNA, 19 nt, Homo sapiens
  misc_RNA (1)...(19): siRNA sense strand
gaaaacagauaucaggauu

SEQ ID NO: 1300104 - RNA, 19 nt, Homo sapiens
  misc_RNA (1)...(19): siRNA sense strand
uaaaggaucaguagcaauu

SEQ ID NO: 1300105 - RNA, 19 nt, Homo sapiens
  misc_RNA (1)...(19): siRNA sense strand
aaaugggacuuacgaguuu

SEQ ID NO: 1300106 - RNA, 19 nt, Homo sapiens
  misc_RNA (1)...(19): siRNA sense strand
guuaucagaugcacuuuau

SEQ ID NO: 1300107 - RNA, 19 nt, Homo sapiens
  misc_RNA (1)...(19): siRNA sense strand
ugagauuggugaacgagua

SEQ ID NO: 1300108 - RNA, 19 nt, Homo sapiens
  misc_RNA (1)...(19): siRNA sense strand
gugaacgaguagauuauaa

SEQ ID NO: 1300109 - RNA, 19 nt, Homo sapiens
  misc_RNA (1)...(19): siRNA sense strand
gagagagcacgauuuauug

SEQ ID NO: 1300110 - RNA, 19 nt, Homo sapiens
  misc_RNA (1)...(19): siRNA sense strand
caaaugggacuuacgaguu

SEQ ID NO: 1300111 - RNA, 19 nt, Homo sapiens
  misc_RNA (1)...(19): siRNA sense strand
ggucauugcugugauuguu

SEQ ID NO: 1300112 - RNA, 19 nt, Homo sapiens
  misc_RNA (1)...(19): siRNA sense strand
ccagauccauuuucacuua

SEQ ID NO: 1300113 - RNA, 19 nt, Homo sapiens
  misc_RNA (1)...(19): siRNA sense strand
gaaggaauacuugacaguu

SEQ ID NO: 1300114 - RNA, 19 nt, Homo sapiens
  misc_RNA (1)...(19): siRNA sense strand
aaggaauacuugacaguuu

SEQ ID NO: 1300115 - RNA, 19 nt, Homo sapiens
  misc_RNA (1)...(19): siRNA sense strand
ucagaugacgccuguuaua

SEQ ID NO: 1300116 - RNA, 19 nt, Homo sapiens
  misc_RNA (1)...(19): siRNA sense strand
gaaaacacaccuuuaguga

SEQ ID NO: 1300117 - RNA, 19 nt, Homo sapiens
  misc_RNA (1)...(19): siRNA sense strand
gaugacgccuguuauagag

SEQ ID NO: 1300118 - RNA, 19 nt, Homo sapiens
  misc_RNA (1)...(19): siRNA sense strand
gagaaacauguccauauau

SEQ ID NO: 1300119 - RNA, 19 nt, Homo sapiens
  misc_RNA (1)...(19): siRNA sense strand
acgaguagauuauaagugu

SEQ ID NO: 1300120 - RNA, 19 nt, Homo sapiens
  misc_RNA (1)...(19): siRNA sense strand
cuacaaagcaacaguuaug

SEQ ID NO: 1300121 - RNA, 19 nt, Homo sapiens
  misc_RNA (1)...(19): siRNA sense strand
ccaccaacauuugaagcua

SEQ ID NO: 1300122 - RNA, 19 nt, Homo sapiens
  misc_RNA (1)...(19): siRNA sense strand
uauacgggauccuuuaaau

SEQ ID NO: 1300123 - RNA, 19 nt, Homo sapiens
  misc_RNA (1)...(19): siRNA sense strand
cgaguuugguuaucagaug

SEQ ID NO: 1300124 - RNA, 19 nt, Homo sapiens
  misc_RNA (1)...(19): siRNA sense strand
gaacgaguagauuauaagu

SEQ ID NO: 1300125 - RNA, 19 nt, Homo sapiens
  misc_RNA (1)...(19): siRNA sense strand
gugaggagccaccaacauu

SEQ ID NO: 1300126 - RNA, 19 nt, Homo sapiens
  misc_RNA (1)...(19): siRNA sense strand
gauggcagcgacacaauug

SEQ ID NO: 1300127 - RNA, 19 nt, Homo sapiens
  misc_RNA (1)...(19): siRNA sense strand
gcuauggagcucauuggua

SEQ ID NO: 1300128 - RNA, 19 nt, Homo sapiens
  misc_RNA (1)...(19): siRNA sense strand
gaggagccaccaacauuug

SEQ ID NO: 1300129 - RNA, 19 nt, Homo sapiens
  misc_RNA (1)...(19): siRNA sense strand
acacaccuuuagugaagua

SEQ ID NO: 1300130 - RNA, 19 nt, Homo sapiens
  misc_RNA (1)...(19): siRNA sense strand
ucucagaugacgccuguua

SEQ ID NO: 1300131 - RNA, 19 nt, Homo sapiens
  misc_RNA (1)...(19): siRNA sense strand
uagagaaacauguccauau

SEQ ID NO: 1300132 - RNA, 19 nt, Homo sapiens
  misc_RNA (1)...(19): siRNA sense strand
ggugaacgaguagauuaua

SEQ ID NO: 1300133 - RNA, 19 nt, Homo sapiens
  misc_RNA (1)...(19): siRNA sense strand
gaaguagaaguauuugagu

SEQ ID NO: 1300134 - RNA, 19 nt, Homo sapiens
  misc_RNA (1)...(19): siRNA sense strand
gaaacauguccauauauac

SEQ ID NO: 1300135 - RNA, 19 nt, Homo sapiens
  misc_RNA (1)...(19): siRNA sense strand
ugacgccuguuauagagaa

SEQ ID NO: 1300136 - RNA, 19 nt, Homo sapiens
  misc_RNA (1)...(19): siRNA sense strand
cgaguagauuauaagugua

SEQ ID NO: 1300137 - RNA, 19 nt, Homo sapiens
  misc_RNA (1)...(19): siRNA sense strand
gcacuuuauuuguaaugag

SEQ ID NO: 1300138 - RNA, 19 nt, Homo sapiens
  misc_RNA (1)...(19): siRNA sense strand
guagaaguauuugaguauc

SEQ ID NO: 1300139 - RNA, 19 nt, Homo sapiens
  misc_RNA (1)...(19): siRNA sense strand
guauuugaguaucuugaug

SEQ ID NO: 1300140 - RNA, 19 nt, Homo sapiens
  misc_RNA (1)...(19): siRNA sense strand
aggaauacuugacaguuug

SEQ ID NO: 1300141 - RNA, 19 nt, Homo sapiens
  misc_RNA (1)...(19): siRNA sense strand
aguguaaaguggucaaaug

SEQ ID NO: 1300142 - RNA, 19 nt, Homo sapiens
  misc_RNA (1)...(19): siRNA sense strand
ccaaaacccuacuaugaga

SEQ ID NO: 1300143 - RNA, 19 nt, Homo sapiens
  misc_RNA (1)...(19): siRNA sense strand
ccacccauacuauuuguga

SEQ ID NO: 1300144 - RNA, 19 nt, Homo sapiens
  misc_RNA (1)...(19): siRNA sense strand
caccaacauuugaagcuau

SEQ ID NO: 1300145 - RNA, 19 nt, Homo sapiens
  misc_RNA (1)...(19): siRNA sense strand
uuggagagagcacgauuua

SEQ ID NO: 1300146 - RNA, 19 nt, Homo sapiens
  misc_RNA (1)...(19): siRNA sense strand
gguuaucagaugcacuuua

SEQ ID NO: 1300147 - RNA, 19 nt, Homo sapiens
  misc_RNA (1)...(19): siRNA sense strand
ugaggagccaccaacauuu

SEQ ID NO: 1300148 - RNA, 19 nt, Homo sapiens
  misc_RNA (1)...(19): siRNA sense strand
ggaaggaauacuugacagu

SEQ ID NO: 1300149 - RNA, 19 nt, Homo sapiens
  misc_RNA (1)...(19): siRNA sense strand
gaggaaggaauacuugaca

SEQ ID NO: 1300150 - RNA, 19 nt, Homo sapiens
  misc_RNA (1)...(19): siRNA sense strand
ugaguaucuugaugcagua

SEQ ID NO: 1300151 - RNA, 19 nt, Homo sapiens
  misc_RNA (1)...(19): siRNA sense strand
caccuuuagugaaguagaa

SEQ ID NO: 1300152 - RNA, 19 nt, Homo sapiens
  misc_RNA (1)...(19): siRNA sense strand
acagauaucaggauuugga

SEQ ID NO: 1300153 - RNA, 19 nt, Homo sapiens
  misc_RNA (1)...(19): siRNA sense strand
ucauugcugugauuguuau

SEQ ID NO: 1300154 - RNA, 19 nt, Homo sapiens
  misc_RNA (1)...(19): siRNA sense strand
ucagaugcacuuuauuugu

SEQ ID NO: 1300155 - RNA, 19 nt, Homo sapiens
  misc_RNA (1)...(19): siRNA sense strand
gugcugcuccagaguguaa

SEQ ID NO: 1300156 - RNA, 19 nt, Homo sapiens
  misc_RNA (1)...(19): siRNA sense strand
ggaaaacacaccuuuagug

SEQ ID NO: 1300157 - RNA, 19 nt, Homo sapiens
  misc_RNA (1)...(19): siRNA sense strand
aaggaucaguagcaauuug

SEQ ID NO: 1300158 - RNA, 19 nt, Homo sapiens
  misc_RNA (1)...(19): siRNA sense strand
uauauacgggauccuuuaa

SEQ ID NO: 1300159 - RNA, 19 nt, Homo sapiens
  misc_RNA (1)...(19): siRNA sense strand
ugaaguagaaguauuugag

SEQ ID NO: 1300160 - RNA, 19 nt, Homo sapiens
  misc_RNA (1)...(19): siRNA sense strand
cuugacaguuuggauguuu

SEQ ID NO: 1300161 - RNA, 19 nt, Homo sapiens
  misc_RNA (1)...(19): siRNA sense strand
cauauauacgggauccuuu

SEQ ID NO: 1300162 - RNA, 19 nt, Homo sapiens
  misc_RNA (1)...(19): siRNA sense strand
auauauacgggauccuuua

SEQ ID NO: 1300163 - RNA, 19 nt, Homo sapiens
  misc_RNA (1)...(19): siRNA sense strand
cuuaaaggaucaguagcaa

SEQ ID NO: 1300164 - RNA, 19 nt, Homo sapiens
  misc_RNA (1)...(19): siRNA sense strand
uaaaccugaggaaggaaua

SEQ ID NO: 1300165 - RNA, 19 nt, Homo sapiens
  misc_RNA (1)...(19): siRNA sense strand
agaugacgccuguuauaga

SEQ ID NO: 1300166 - RNA, 19 nt, Homo sapiens
  misc_RNA (1)...(19): siRNA sense strand
ugugauuguuauugccaua

SEQ ID NO: 1300167 - RNA, 19 nt, Homo sapiens
  misc_RNA (1)...(19): siRNA sense strand
gagagcacgauuuauugug

SEQ ID NO: 1300168 - RNA, 19 nt, Homo sapiens
  misc_RNA (1)...(19): siRNA sense strand
gaaguauuugaguaucuug

SEQ ID NO: 1300169 - RNA, 19 nt, Homo sapiens
  misc_RNA (1)...(19): siRNA sense strand
ccucuugccacccauacua

SEQ ID NO: 1300170 - RNA, 19 nt, Homo sapiens
  misc_RNA (1)...(19): siRNA sense strand
gauaucaggauuuggaaaa

SEQ ID NO: 1300171 - RNA, 19 nt, Homo sapiens
  misc_RNA (1)...(19): siRNA sense strand
ggcuaccugucucagauga

SEQ ID NO: 1300172 - RNA, 19 nt, Homo sapiens
  misc_RNA (1)...(19): siRNA sense strand
ccaugguguugcugcugua

SEQ ID NO: 1300173 - RNA, 19 nt, Homo sapiens
  misc_RNA (1)...(19): siRNA sense strand
cagaugacgccuguuauag

SEQ ID NO: 1300174 - RNA, 19 nt, Homo sapiens
  misc_RNA (1)...(19): siRNA sense strand
gucauugcugugauuguua

SEQ ID NO: 1300175 - RNA, 19 nt, Homo sapiens
  misc_RNA (1)...(19): siRNA sense strand
uuggugaacgaguagauua

SEQ ID NO: 1300176 - RNA, 19 nt, Homo sapiens
  misc_RNA (1)...(19): siRNA sense strand
ggagccaccaacauuugaa

SEQ ID NO: 1300177 - RNA, 19 nt, Homo sapiens
  misc_RNA (1)...(19): siRNA sense strand
gcgcuuuccuggguugcuu

SEQ ID NO: 1300178 - RNA, 19 nt, Homo sapiens
  misc_RNA (1)...(19): siRNA sense strand
uacuacaaagcaacaguua

SEQ ID NO: 1300179 - RNA, 19 nt, Homo sapiens
  misc_RNA (1)...(19): siRNA sense strand
cuugaugcaguaacuuaua

SEQ ID NO: 1300180 - RNA, 19 nt, Homo sapiens
  misc_RNA (1)...(19): siRNA sense strand
aaacauguccauauauacg

SEQ ID NO: 1300181 - RNA, 19 nt, Homo sapiens
  misc_RNA (1)...(19): siRNA sense strand
guguaaaguggucaaaugu

SEQ ID NO: 1300182 - RNA, 19 nt, Homo sapiens
  misc_RNA (1)...(19): siRNA sense strand
cuuacgaguuugguuauca

SEQ ID NO: 1300183 - RNA, 19 nt, Homo sapiens
  misc_RNA (1)...(19): siRNA sense strand
uacgggauccuuuaaaugg

SEQ ID NO: 1300184 - RNA, 19 nt, Homo sapiens
  misc_RNA (1)...(19): siRNA sense strand
aaccaaaacccuacuauga

SEQ ID NO: 1300185 - RNA, 19 nt, Homo sapiens
  misc_RNA (1)...(19): siRNA sense strand
cccaauaugugaaaagguu

SEQ ID NO: 1300186 - RNA, 19 nt, Homo sapiens
  misc_RNA (1)...(19): siRNA sense strand
cgauggcagcgacacaauu

SEQ ID NO: 1300187 - RNA, 19 nt, Homo sapiens
  misc_RNA (1)...(19): siRNA sense strand
gauccauuuucacuuauug

SEQ ID NO: 1300188 - RNA, 19 nt, Homo sapiens
  misc_RNA (1)...(19): siRNA sense strand
uugaugcaguaacuuauag

SEQ ID NO: 1300189 - RNA, 19 nt, Homo sapiens
  misc_RNA (1)...(19): siRNA sense strand
guaucuugaugcaguaacu

SEQ ID NO: 1300190 - RNA, 19 nt, Homo sapiens
  misc_RNA (1)...(19): siRNA sense strand
caacauuugaagcuaugga

SEQ ID NO: 1300191 - RNA, 19 nt, Homo sapiens
  misc_RNA (1)...(19): siRNA sense strand
gagauuggugaacgaguag

SEQ ID NO: 1300192 - RNA, 19 nt, Homo sapiens
  misc_RNA (1)...(19): siRNA sense strand
ggagagagcacgauuuauu

SEQ ID NO: 1300193 - RNA, 19 nt, Homo sapiens
  misc_RNA (1)...(19): siRNA sense strand
agagaaacauguccauaua

SEQ ID NO: 1300194 - RNA, 19 nt, Homo sapiens
  misc_RNA (1)...(19): siRNA sense strand
cagaugcacuuuauuugua

SEQ ID NO: 1300195 - RNA, 19 nt, Homo sapiens
  misc_RNA (1)...(19): siRNA sense strand
ggacuuacgaguuugguua

SEQ ID NO: 1300196 - RNA, 19 nt, Homo sapiens
  misc_RNA (1)...(19): siRNA sense strand
aaacagauaucaggauuug

SEQ ID NO: 1300197 - RNA, 19 nt, Homo sapiens
  misc_RNA (1)...(19): siRNA sense strand
cuauggagcucauugguaa

SEQ ID NO: 1300198 - RNA, 19 nt, Homo sapiens
  misc_RNA (1)...(19): siRNA sense strand
aaacacaccuuuagugaag

SEQ ID NO: 1300199 - RNA, 19 nt, Homo sapiens
  misc_RNA (1)...(19): siRNA sense strand
gaacuuaaaggaucaguag

SEQ ID NO: 1300200 - RNA, 19 nt, Homo sapiens
  misc_RNA (1)...(19): siRNA sense strand
gaaaacagauaucaggauu

SEQ ID NO: 1300201 - RNA, 19 nt, Homo sapiens
  misc_RNA (1)...(19): siRNA sense strand
uaaaggaucaguagcaauu

SEQ ID NO: 1300202 - RNA, 19 nt, Homo sapiens
  misc_RNA (1)...(19): siRNA sense strand
aaaugggacuuacgaguuu

SEQ ID NO: 1300203 - RNA, 19 nt, Homo sapiens
  misc_RNA (1)...(19): siRNA sense strand
guuaucagaugcacuuuau

SEQ ID NO: 1300204 - RNA, 19 nt, Homo sapiens
  misc_RNA (1)...(19): siRNA sense strand
ugagauuggugaacgagua

SEQ ID NO: 1300205 - RNA, 19 nt, Homo sapiens
  misc_RNA (1)...(19): siRNA sense strand
gugaacgaguagauuauaa

SEQ ID NO: 1300206 - RNA, 19 nt, Homo sapiens
  misc_RNA (1)...(19): siRNA sense strand
gagagagcacgauuuauug

SEQ ID NO: 1300207 - RNA, 19 nt, Homo sapiens
  misc_RNA (1)...(19): siRNA sense strand
caaaugggacuuacgaguu

SEQ ID NO: 1300208 - RNA, 19 nt, Homo sapiens
  misc_RNA (1)...(19): siRNA sense strand
ggucauugcugugauuguu

SEQ ID NO: 1300209 - RNA, 19 nt, Homo sapiens
  misc_RNA (1)...(19): siRNA sense strand
ccagauccauuuucacuua

SEQ ID NO: 1300210 - RNA, 19 nt, Homo sapiens
  misc_RNA (1)...(19): siRNA sense strand
gaaggaauacuugacaguu

SEQ ID NO: 1300211 - RNA, 19 nt, Homo sapiens
  misc_RNA (1)...(19): siRNA sense strand
aaggaauacuugacaguuu

SEQ ID NO: 1300212 - RNA, 19 nt, Homo sapiens
  misc_RNA (1)...(19): siRNA sense strand
ucagaugacgccuguuaua

SEQ ID NO: 1300213 - RNA, 19 nt, Homo sapiens
  misc_RNA (1)...(19): siRNA sense strand
gaaaacacaccuuuaguga

SEQ ID NO: 1300214 - RNA, 19 nt, Homo sapiens
  misc_RNA (1)...(19): siRNA sense strand
gaugacgccuguuauagag

SEQ ID NO: 1300215 - RNA, 19 nt, Homo sapiens
  misc_RNA (1)...(19): siRNA sense strand
gagaaacauguccauauau

SEQ ID NO: 1300216 - RNA, 19 nt, Homo sapiens
  misc_RNA (1)...(19): siRNA sense strand
acgaguagauuauaagugu

SEQ ID NO: 1300217 - RNA, 19 nt, Homo sapiens
  misc_RNA (1)...(19): siRNA sense strand
cuacaaagcaacaguuaug

SEQ ID NO: 1300218 - RNA, 19 nt, Homo sapiens
  misc_RNA (1)...(19): siRNA sense strand
ccaccaacauuugaagcua

SEQ ID NO: 1300219 - RNA, 19 nt, Homo sapiens
  misc_RNA (1)...(19): siRNA sense strand
uauacgggauccuuuaaau

SEQ ID NO: 1300220 - RNA, 19 nt, Homo sapiens
  misc_RNA (1)...(19): siRNA sense strand
cgaguuugguuaucagaug

SEQ ID NO: 1300221 - RNA, 19 nt, Homo sapiens
  misc_RNA (1)...(19): siRNA sense strand
gaacgaguagauuauaagu

SEQ ID NO: 1300222 - RNA, 19 nt, Homo sapiens
  misc_RNA (1)...(19): siRNA sense strand
gugaggagccaccaacauu

SEQ ID NO: 1300223 - RNA, 19 nt, Homo sapiens
  misc_RNA (1)...(19): siRNA sense strand
gauggcagcgacacaauug

SEQ ID NO: 1300224 - RNA, 19 nt, Homo sapiens
  misc_RNA (1)...(19): siRNA sense strand
gcuauggagcucauuggua

SEQ ID NO: 1300225 - RNA, 19 nt, Homo sapiens
  misc_RNA (1)...(19): siRNA sense strand
gaggagccaccaacauuug

SEQ ID NO: 1300226 - RNA, 19 nt, Homo sapiens
  misc_RNA (1)...(19): siRNA sense strand
acacaccuuuagugaagua

SEQ ID NO: 1300227 - RNA, 19 nt, Homo sapiens
  misc_RNA (1)...(19): siRNA sense strand
ucucagaugacgccuguua

SEQ ID NO: 1300228 - RNA, 19 nt, Homo sapiens
  misc_RNA (1)...(19): siRNA sense strand
uagagaaacauguccauau

SEQ ID NO: 1300229 - RNA, 19 nt, Homo sapiens
  misc_RNA (1)...(19): siRNA sense strand
guuccaaagugucuuaaag

SEQ ID NO: 1300230 - RNA, 19 nt, Homo sapiens
  misc_RNA (1)...(19): siRNA sense strand
ggugaacgaguagauuaua

SEQ ID NO: 1300231 - RNA, 19 nt, Homo sapiens
  misc_RNA (1)...(19): siRNA sense strand
gaaguagaaguauuugagu

SEQ ID NO: 1300232 - RNA, 19 nt, Homo sapiens
  misc_RNA (1)...(19): siRNA sense strand
gaaacauguccauauauac

SEQ ID NO: 1300233 - RNA, 19 nt, Homo sapiens
  misc_RNA (1)...(19): siRNA sense strand
ugacgccuguuauagagaa

SEQ ID NO: 1300234 - RNA, 19 nt, Homo sapiens
  misc_RNA (1)...(19): siRNA sense strand
cgaguagauuauaagugua

SEQ ID NO: 1300235 - RNA, 19 nt, Homo sapiens
  misc_RNA (1)...(19): siRNA sense strand
gcacuuuauuuguaaugag

SEQ ID NO: 1300236 - RNA, 19 nt, Homo sapiens
  misc_RNA (1)...(19): siRNA sense strand
guagaaguauuugaguauc

SEQ ID NO: 1300237 - RNA, 19 nt, Homo sapiens
  misc_RNA (1)...(19): siRNA sense strand
guauuugaguaucuugaug

SEQ ID NO: 1300238 - RNA, 19 nt, Homo sapiens
  misc_RNA (1)...(19): siRNA sense strand
aggaauacuugacaguuug

SEQ ID NO: 1300239 - RNA, 19 nt, Homo sapiens
  misc_RNA (1)...(19): siRNA sense strand
ccaaaacccuacuaugaga

SEQ ID NO: 1300240 - RNA, 19 nt, Homo sapiens
  misc_RNA (1)...(19): siRNA sense strand
aguguaaaguggucaaaug

SEQ ID NO: 1300241 - RNA, 19 nt, Homo sapiens
  misc_RNA (1)...(19): siRNA sense strand
ccacccauacuauuuguga

SEQ ID NO: 1300242 - RNA, 19 nt, Homo sapiens
  misc_RNA (1)...(19): siRNA sense strand
caccaacauuugaagcuau

SEQ ID NO: 1300243 - RNA, 19 nt, Homo sapiens
  misc_RNA (1)...(19): siRNA sense strand
uuggagagagcacgauuua

SEQ ID NO: 1300244 - RNA, 19 nt, Homo sapiens
  misc_RNA (1)...(19): siRNA sense strand
gguuaucagaugcacuuua

SEQ ID NO: 1300245 - RNA, 19 nt, Homo sapiens
  misc_RNA (1)...(19): siRNA sense strand
ugaggagccaccaacauuu

SEQ ID NO: 1300246 - RNA, 19 nt, Homo sapiens
  misc_RNA (1)...(19): siRNA sense strand
ggaaggaauacuugacagu

SEQ ID NO: 1300247 - RNA, 19 nt, Homo sapiens
  misc_RNA (1)...(19): siRNA sense strand
gaggaaggaauacuugaca

SEQ ID NO: 1300248 - RNA, 19 nt, Homo sapiens
  misc_RNA (1)...(19): siRNA sense strand
ccaguuccaaagugucuua

SEQ ID NO: 1300249 - RNA, 19 nt, Homo sapiens
  misc_RNA (1)...(19): siRNA sense strand
ugaguaucuugaugcagua

SEQ ID NO: 1300250 - RNA, 19 nt, Homo sapiens
  misc_RNA (1)...(19): siRNA sense strand
caccuuuagugaaguagaa

SEQ ID NO: 1300251 - RNA, 19 nt, Homo sapiens
  misc_RNA (1)...(19): siRNA sense strand
acagauaucaggauuugga

SEQ ID NO: 1300252 - RNA, 19 nt, Homo sapiens
  misc_RNA (1)...(19): siRNA sense strand
ucauugcugugauuguuau

SEQ ID NO: 1300253 - RNA, 19 nt, Homo sapiens
  misc_RNA (1)...(19): siRNA sense strand
ucagaugcacuuuauuugu

SEQ ID NO: 1300254 - RNA, 19 nt, Homo sapiens
  misc_RNA (1)...(19): siRNA sense strand
gugcugcuccagaguguaa

SEQ ID NO: 1300255 - RNA, 19 nt, Homo sapiens
  misc_RNA (1)...(19): siRNA sense strand
ggaaaacacaccuuuagug

SEQ ID NO: 1300256 - RNA, 19 nt, Homo sapiens
  misc_RNA (1)...(19): siRNA sense strand
aaggaucaguagcaauuug

SEQ ID NO: 1300257 - RNA, 19 nt, Homo sapiens
  misc_RNA (1)...(19): siRNA sense strand
uauauacgggauccuuuaa

SEQ ID NO: 1300258 - RNA, 19 nt, Homo sapiens
  misc_RNA (1)...(19): siRNA sense strand
ugaaguagaaguauuugag

SEQ ID NO: 1300259 - RNA, 19 nt, Homo sapiens
  misc_RNA (1)...(19): siRNA sense strand
cuugacaguuuggauguuu

SEQ ID NO: 1300260 - RNA, 19 nt, Homo sapiens
  misc_RNA (1)...(19): siRNA sense strand
cauauauacgggauccuuu

SEQ ID NO: 1300261 - RNA, 19 nt, Homo sapiens
  misc_RNA (1)...(19): siRNA sense strand
auauauacgggauccuuua

SEQ ID NO: 1300262 - RNA, 19 nt, Homo sapiens
  misc_RNA (1)...(19): siRNA sense strand
cuuaaaggaucaguagcaa

SEQ ID NO: 1300263 - RNA, 19 nt, Homo sapiens
  misc_RNA (1)...(19): siRNA sense strand
uaaaccugaggaaggaaua

SEQ ID NO: 1300264 - RNA, 19 nt, Homo sapiens
  misc_RNA (1)...(19): siRNA sense strand
agaugacgccuguuauaga

SEQ ID NO: 1300265 - RNA, 19 nt, Homo sapiens
  misc_RNA (1)...(19): siRNA sense strand
ugugauuguuauugccaua

SEQ ID NO: 1300266 - RNA, 19 nt, Homo sapiens
  misc_RNA (1)...(19): siRNA sense strand
gagagcacgauuuauugug

SEQ ID NO: 1300267 - RNA, 19 nt, Homo sapiens
  misc_RNA (1)...(19): siRNA sense strand
gaaguauuugaguaucuug

SEQ ID NO: 1300268 - RNA, 19 nt, Homo sapiens
  misc_RNA (1)...(19): siRNA sense strand
ggcuaccugucucagauga

SEQ ID NO: 1300269 - RNA, 19 nt, Homo sapiens
  misc_RNA (1)...(19): siRNA sense strand
gauaucaggauuuggaaaa

SEQ ID NO: 1300270 - RNA, 19 nt, Homo sapiens
  misc_RNA (1)...(19): siRNA sense strand
ccucuugccacccauacua

SEQ ID NO: 1300271 - RNA, 19 nt, Homo sapiens
  misc_RNA (1)...(19): siRNA sense strand
ccaugguguugcugcugua

SEQ ID NO: 1300272 - RNA, 19 nt, Homo sapiens
  misc_RNA (1)...(19): siRNA sense strand
cagaugacgccuguuauag

SEQ ID NO: 1300273 - RNA, 19 nt, Homo sapiens
  misc_RNA (1)...(19): siRNA sense strand
uuggugaacgaguagauua

SEQ ID NO: 1300274 - RNA, 19 nt, Homo sapiens
  misc_RNA (1)...(19): siRNA sense strand
gucauugcugugauuguua

SEQ ID NO: 1300275 - RNA, 19 nt, Homo sapiens
  misc_RNA (1)...(19): siRNA sense strand
ggagccaccaacauuugaa

SEQ ID NO: 1300276 - RNA, 19 nt, Homo sapiens
  misc_RNA (1)...(19): siRNA sense strand
gcgcuuuccuggguugcuu

SEQ ID NO: 1300277 - RNA, 19 nt, Homo sapiens
  misc_RNA (1)...(19): siRNA sense strand
uacuacaaagcaacaguua

SEQ ID NO: 1300278 - RNA, 19 nt, Homo sapiens
  misc_RNA (1)...(19): siRNA sense strand
cuugaugcaguaacuuaua

SEQ ID NO: 1300279 - RNA, 19 nt, Homo sapiens
  misc_RNA (1)...(19): siRNA sense strand
aaacauguccauauauacg

SEQ ID NO: 1300280 - RNA, 19 nt, Homo sapiens
  misc_RNA (1)...(19): siRNA sense strand
guguaaaguggucaaaugu

SEQ ID NO: 1300281 - RNA, 19 nt, Homo sapiens
  misc_RNA (1)...(19): siRNA sense strand
cuuacgaguuugguuauca

SEQ ID NO: 1300282 - RNA, 19 nt, Homo sapiens
  misc_RNA (1)...(19): siRNA sense strand
uacgggauccuuuaaaugg

SEQ ID NO: 1300283 - RNA, 19 nt, Homo sapiens
  misc_RNA (1)...(19): siRNA sense strand
aaccaaaacccuacuauga

SEQ ID NO: 1300284 - RNA, 19 nt, Homo sapiens
  misc_RNA (1)...(19): siRNA sense strand
cccaauaugugaaaagguu

SEQ ID NO: 1300285 - RNA, 19 nt, Homo sapiens
  misc_RNA (1)...(19): siRNA sense strand
cgauggcagcgacacaauu

SEQ ID NO: 1300286 - RNA, 19 nt, Homo sapiens
  misc_RNA (1)...(19): siRNA sense strand
gauccauuuucacuuauug

SEQ ID NO: 1300287 - RNA, 19 nt, Homo sapiens
  misc_RNA (1)...(19): siRNA sense strand
uugaugcaguaacuuauag

SEQ ID NO: 1300288 - RNA, 19 nt, Homo sapiens
  misc_RNA (1)...(19): siRNA sense strand
guaucuugaugcaguaacu

SEQ ID NO: 1300289 - RNA, 19 nt, Homo sapiens
  misc_RNA (1)...(19): siRNA sense strand
caacauuugaagcuaugga

SEQ ID NO: 1300290 - RNA, 19 nt, Homo sapiens
  misc_RNA (1)...(19): siRNA sense strand
gagauuggugaacgaguag

SEQ ID NO: 1300291 - RNA, 19 nt, Homo sapiens
  misc_RNA (1)...(19): siRNA sense strand
ggagagagcacgauuuauu

SEQ ID NO: 1300292 - RNA, 19 nt, Homo sapiens
  misc_RNA (1)...(19): siRNA sense strand
agagaaacauguccauaua

SEQ ID NO: 1300293 - RNA, 19 nt, Homo sapiens
  misc_RNA (1)...(19): siRNA sense strand
cagaugcacuuuauuugua

SEQ ID NO: 1300294 - RNA, 19 nt, Homo sapiens
  misc_RNA (1)...(19): siRNA sense strand
ggacuuacgaguuugguua

SEQ ID NO: 1300295 - RNA, 19 nt, Homo sapiens
  misc_RNA (1)...(19): siRNA sense strand
aaacagauaucaggauuug

SEQ ID NO: 1300296 - RNA, 19 nt, Homo sapiens
  misc_RNA (1)...(19): siRNA sense strand
cuauggagcucauugguaa

SEQ ID NO: 1300297 - RNA, 19 nt, Homo sapiens
  misc_RNA (1)...(19): siRNA sense strand
aaacacaccuuuagugaag

SEQ ID NO: 1300298 - RNA, 19 nt, Homo sapiens
  misc_RNA (1)...(19): siRNA sense strand
gaacuuaaaggaucaguag

SEQ ID NO: 1300299 - RNA, 19 nt, Homo sapiens
  misc_RNA (1)...(19): siRNA sense strand
gaaaacagauaucaggauu

SEQ ID NO: 1300300 - RNA, 19 nt, Homo sapiens
  misc_RNA (1)...(19): siRNA sense strand
uaaaggaucaguagcaauu

SEQ ID NO: 1300301 - RNA, 19 nt, Homo sapiens
  misc_RNA (1)...(19): siRNA sense strand
aaaugggacuuacgaguuu

SEQ ID NO: 1300302 - RNA, 19 nt, Homo sapiens
  misc_RNA (1)...(19): siRNA sense strand
guuaucagaugcacuuuau

SEQ ID NO: 1300303 - RNA, 19 nt, Homo sapiens
  misc_RNA (1)...(19): siRNA sense strand
gagcugaauaugccacuua

SEQ ID NO: 1300304 - RNA, 19 nt, Homo sapiens
  misc_RNA (1)...(19): siRNA sense strand
ugagauuggugaacgagua

SEQ ID NO: 1300305 - RNA, 19 nt, Homo sapiens
  misc_RNA (1)...(19): siRNA sense strand
gugaacgaguagauuauaa

SEQ ID NO: 1300306 - RNA, 19 nt, Homo sapiens
  misc_RNA (1)...(19): siRNA sense strand
gagagagcacgauuuauug

SEQ ID NO: 1300307 - RNA, 19 nt, Homo sapiens
  misc_RNA (1)...(19): siRNA sense strand
caaaugggacuuacgaguu

SEQ ID NO: 1300308 - RNA, 19 nt, Homo sapiens
  misc_RNA (1)...(19): siRNA sense strand
ggucauugcugugauuguu

SEQ ID NO: 1300309 - RNA, 19 nt, Homo sapiens
  misc_RNA (1)...(19): siRNA sense strand
ccagauccauuuucacuua

SEQ ID NO: 1300310 - RNA, 19 nt, Homo sapiens
  misc_RNA (1)...(19): siRNA sense strand
gaaggaauacuugacaguu

SEQ ID NO: 1300311 - RNA, 19 nt, Homo sapiens
  misc_RNA (1)...(19): siRNA sense strand
aaggaauacuugacaguuu

SEQ ID NO: 1300312 - RNA, 19 nt, Homo sapiens
  misc_RNA (1)...(19): siRNA sense strand
ucagaugacgccuguuaua

SEQ ID NO: 1300313 - RNA, 19 nt, Homo sapiens
  misc_RNA (1)...(19): siRNA sense strand
gaaaacacaccuuuaguga

SEQ ID NO: 1300314 - RNA, 19 nt, Homo sapiens
  misc_RNA (1)...(19): siRNA sense strand
gaugacgccuguuauagag

SEQ ID NO: 1300315 - RNA, 19 nt, Homo sapiens
  misc_RNA (1)...(19): siRNA sense strand
gagaaacauguccauauau

SEQ ID NO: 1300316 - RNA, 19 nt, Homo sapiens
  misc_RNA (1)...(19): siRNA sense strand
ccacuuaccagacuaaauc

SEQ ID NO: 1300317 - RNA, 19 nt, Homo sapiens
  misc_RNA (1)...(19): siRNA sense strand
acgaguagauuauaagugu

SEQ ID NO: 1300318 - RNA, 19 nt, Homo sapiens
  misc_RNA (1)...(19): siRNA sense strand
cuacaaagcaacaguuaug

SEQ ID NO: 1300319 - RNA, 19 nt, Homo sapiens
  misc_RNA (1)...(19): siRNA sense strand
ccaccaacauuugaagcua

SEQ ID NO: 1300320 - RNA, 19 nt, Homo sapiens
  misc_RNA (1)...(19): siRNA sense strand
uauacgggauccuuuaaau

SEQ ID NO: 1300321 - RNA, 19 nt, Homo sapiens
  misc_RNA (1)...(19): siRNA sense strand
cgaguuugguuaucagaug

SEQ ID NO: 1300322 - RNA, 19 nt, Homo sapiens
  misc_RNA (1)...(19): siRNA sense strand
gaacgaguagauuauaagu

SEQ ID NO: 1300323 - RNA, 19 nt, Homo sapiens
  misc_RNA (1)...(19): siRNA sense strand
gugaggagccaccaacauu

SEQ ID NO: 1300324 - RNA, 19 nt, Homo sapiens
  misc_RNA (1)...(19): siRNA sense strand
gauggcagcgacacaauug

SEQ ID NO: 1300325 - RNA, 19 nt, Homo sapiens
  misc_RNA (1)...(19): siRNA sense strand
ucucagaugacgccuguua

SEQ ID NO: 1300326 - RNA, 19 nt, Homo sapiens
  misc_RNA (1)...(19): siRNA sense strand
gaggagccaccaacauuug

SEQ ID NO: 1300327 - RNA, 19 nt, Homo sapiens
  misc_RNA (1)...(19): siRNA sense strand
gcuauggagcucauuggua

SEQ ID NO: 1300328 - RNA, 19 nt, Homo sapiens
  misc_RNA (1)...(19): siRNA sense strand
acacaccuuuagugaagua

SEQ ID NO: 1300329 - RNA, 19 nt, Homo sapiens
  misc_RNA (1)...(19): siRNA sense strand
uagagaaacauguccauau

SEQ ID NO: 1300330 - RNA, 19 nt, Homo sapiens
  misc_RNA (1)...(19): siRNA sense strand
guuccaaagugucuuaaag

SEQ ID NO: 1300331 - RNA, 19 nt, Homo sapiens
  misc_RNA (1)...(19): siRNA sense strand
ggugaacgaguagauuaua

SEQ ID NO: 1300332 - RNA, 19 nt, Homo sapiens
  misc_RNA (1)...(19): siRNA sense strand
gaaguagaaguauuugagu

SEQ ID NO: 1300333 - RNA, 19 nt, Homo sapiens
  misc_RNA (1)...(19): siRNA sense strand
gaaacauguccauauauac

SEQ ID NO: 1300334 - RNA, 19 nt, Homo sapiens
  misc_RNA (1)...(19): siRNA sense strand
ugacgccuguuauagagaa

SEQ ID NO: 1300335 - RNA, 19 nt, Homo sapiens
  misc_RNA (1)...(19): siRNA sense strand
cgaguagauuauaagugua

SEQ ID NO: 1300336 - RNA, 19 nt, Homo sapiens
  misc_RNA (1)...(19): siRNA sense strand
gcacuuuauuuguaaugag

SEQ ID NO: 1300337 - RNA, 19 nt, Homo sapiens
  misc_RNA (1)...(19): siRNA sense strand
guagaaguauuugaguauc

SEQ ID NO: 1300338 - RNA, 19 nt, Homo sapiens
  misc_RNA (1)...(19): siRNA sense strand
guauuugaguaucuugaug

SEQ ID NO: 1300339 - RNA, 19 nt, Homo sapiens
  misc_RNA (1)...(19): siRNA sense strand
aggaauacuugacaguuug

SEQ ID NO: 1300340 - RNA, 19 nt, Homo sapiens
  misc_RNA (1)...(19): siRNA sense strand
ccaaaacccuacuaugaga

SEQ ID NO: 1300341 - RNA, 19 nt, Homo sapiens
  misc_RNA (1)...(19): siRNA sense strand
aguguaaaguggucaaaug

SEQ ID NO: 1300342 - RNA, 19 nt, Homo sapiens
  misc_RNA (1)...(19): siRNA sense strand
ccacccauacuauuuguga

SEQ ID NO: 1300343 - RNA, 19 nt, Homo sapiens
  misc_RNA (1)...(19): siRNA sense strand
uuggagagagcacgauuua

SEQ ID NO: 1300344 - RNA, 19 nt, Homo sapiens
  misc_RNA (1)...(19): siRNA sense strand
gguuaucagaugcacuuua

SEQ ID NO: 1300345 - RNA, 19 nt, Homo sapiens
  misc_RNA (1)...(19): siRNA sense strand
caccaacauuugaagcuau

SEQ ID NO: 1300346 - RNA, 19 nt, Homo sapiens
  misc_RNA (1)...(19): siRNA sense strand
ugaggagccaccaacauuu

SEQ ID NO: 1300347 - RNA, 19 nt, Homo sapiens
  misc_RNA (1)...(19): siRNA sense strand
ggaaggaauacuugacagu

SEQ ID NO: 1300348 - RNA, 19 nt, Homo sapiens
  misc_RNA (1)...(19): siRNA sense strand
gaggaaggaauacuugaca

SEQ ID NO: 1300349 - RNA, 19 nt, Homo sapiens
  misc_RNA (1)...(19): siRNA sense strand
ccaguuccaaagugucuua

SEQ ID NO: 1300350 - RNA, 19 nt, Homo sapiens
  misc_RNA (1)...(19): siRNA sense strand
ugaguaucuugaugcagua

SEQ ID NO: 1300351 - RNA, 19 nt, Homo sapiens
  misc_RNA (1)...(19): siRNA sense strand
caccuuuagugaaguagaa

SEQ ID NO: 1300352 - RNA, 19 nt, Homo sapiens
  misc_RNA (1)...(19): siRNA sense strand
acagauaucaggauuugga

SEQ ID NO: 1300353 - RNA, 19 nt, Homo sapiens
  misc_RNA (1)...(19): siRNA sense strand
ucauugcugugauuguuau

SEQ ID NO: 1300354 - RNA, 19 nt, Homo sapiens
  misc_RNA (1)...(19): siRNA sense strand
ucagaugcacuuuauuugu

SEQ ID NO: 1300355 - RNA, 19 nt, Homo sapiens
  misc_RNA (1)...(19): siRNA sense strand
gugcugcuccagaguguaa

SEQ ID NO: 1300356 - RNA, 19 nt, Homo sapiens
  misc_RNA (1)...(19): siRNA sense strand
ggaaaacacaccuuuagug

SEQ ID NO: 1300357 - RNA, 19 nt, Homo sapiens
  misc_RNA (1)...(19): siRNA sense strand
aaggaucaguagcaauuug

SEQ ID NO: 1300358 - RNA, 19 nt, Homo sapiens
  misc_RNA (1)...(19): siRNA sense strand
uauauacgggauccuuuaa

SEQ ID NO: 1300359 - RNA, 19 nt, Homo sapiens
  misc_RNA (1)...(19): siRNA sense strand
ugaaguagaaguauuugag

SEQ ID NO: 1300360 - RNA, 19 nt, Homo sapiens
  misc_RNA (1)...(19): siRNA sense strand
cuugacaguuuggauguuu

SEQ ID NO: 1300361 - RNA, 19 nt, Homo sapiens
  misc_RNA (1)...(19): siRNA sense strand
cauauauacgggauccuuu

SEQ ID NO: 1300362 - RNA, 19 nt, Homo sapiens
  misc_RNA (1)...(19): siRNA sense strand
auauauacgggauccuuua

SEQ ID NO: 1300363 - RNA, 19 nt, Homo sapiens
  misc_RNA (1)...(19): siRNA sense strand
cuuaaaggaucaguagcaa

SEQ ID NO: 1300364 - RNA, 19 nt, Homo sapiens
  misc_RNA (1)...(19): siRNA sense strand
uaaaccugaggaaggaaua

SEQ ID NO: 1300365 - RNA, 19 nt, Homo sapiens
  misc_RNA (1)...(19): siRNA sense strand
agaugacgccuguuauaga

SEQ ID NO: 1300366 - RNA, 19 nt, Homo sapiens
  misc_RNA (1)...(19): siRNA sense strand
ugugauuguuauugccaua

SEQ ID NO: 1300367 - RNA, 19 nt, Homo sapiens
  misc_RNA (1)...(19): siRNA sense strand
gagagcacgauuuauugug

SEQ ID NO: 1300368 - RNA, 19 nt, Homo sapiens
  misc_RNA (1)...(19): siRNA sense strand
gaaguauuugaguaucuug

SEQ ID NO: 1300369 - RNA, 19 nt, Homo sapiens
  misc_RNA (1)...(19): siRNA sense strand
ggcuaccugucucagauga

SEQ ID NO: 1300370 - RNA, 19 nt, Homo sapiens
  misc_RNA (1)...(19): siRNA sense strand
gauaucaggauuuggaaaa

SEQ ID NO: 1300371 - RNA, 19 nt, Homo sapiens
  misc_RNA (1)...(19): siRNA sense strand
ccucuugccacccauacua

SEQ ID NO: 1300372 - RNA, 19 nt, Homo sapiens
  misc_RNA (1)...(19): siRNA sense strand
ccaugguguugcugcugua

SEQ ID NO: 1300373 - RNA, 19 nt, Homo sapiens
  misc_RNA (1)...(19): siRNA sense strand
cagaugacgccuguuauag

SEQ ID NO: 1300374 - RNA, 19 nt, Homo sapiens
  misc_RNA (1)...(19): siRNA sense strand
cagaugguggagcugaaua

SEQ ID NO: 1300375 - RNA, 19 nt, Homo sapiens
  misc_RNA (1)...(19): siRNA sense strand
gucauugcugugauuguua

SEQ ID NO: 1300376 - RNA, 19 nt, Homo sapiens
  misc_RNA (1)...(19): siRNA sense strand
ggagccaccaacauuugaa

SEQ ID NO: 1300377 - RNA, 19 nt, Homo sapiens
  misc_RNA (1)...(19): siRNA sense strand
uuggugaacgaguagauua

SEQ ID NO: 1300378 - RNA, 19 nt, Homo sapiens
  misc_RNA (1)...(19): siRNA sense strand
gcgcuuuccuggguugcuu

SEQ ID NO: 1300379 - RNA, 19 nt, Homo sapiens
  misc_RNA (1)...(19): siRNA sense strand
uacuacaaagcaacaguua

SEQ ID NO: 1300380 - RNA, 19 nt, Homo sapiens
  misc_RNA (1)...(19): siRNA sense strand
cuugaugcaguaacuuaua

SEQ ID NO: 1300381 - RNA, 19 nt, Homo sapiens
  misc_RNA (1)...(19): siRNA sense strand
aaacauguccauauauacg

SEQ ID NO: 1300382 - RNA, 19 nt, Homo sapiens
  misc_RNA (1)...(19): siRNA sense strand
guguaaaguggucaaaugu

SEQ ID NO: 1300383 - RNA, 19 nt, Homo sapiens
  misc_RNA (1)...(19): siRNA sense strand
cuuacgaguuugguuauca

SEQ ID NO: 1300384 - RNA, 19 nt, Homo sapiens
  misc_RNA (1)...(19): siRNA sense strand
uacgggauccuuuaaaugg

SEQ ID NO: 1300385 - RNA, 19 nt, Homo sapiens
  misc_RNA (1)...(19): siRNA sense strand
gcagaugguggagcugaau

SEQ ID NO: 1300386 - RNA, 19 nt, Homo sapiens
  misc_RNA (1)...(19): siRNA sense strand
aaccaaaacccuacuauga

SEQ ID NO: 1300387 - RNA, 19 nt, Homo sapiens
  misc_RNA (1)...(19): siRNA sense strand
uugaugcaguaacuuauag

SEQ ID NO: 1300388 - RNA, 19 nt, Homo sapiens
  misc_RNA (1)...(19): siRNA sense strand
ggagcugaauaugccacuu

SEQ ID NO: 1300389 - RNA, 19 nt, Homo sapiens
  misc_RNA (1)...(19): siRNA sense strand
cgauggcagcgacacaauu

SEQ ID NO: 1300390 - RNA, 19 nt, Homo sapiens
  misc_RNA (1)...(19): siRNA sense strand
gauccauuuucacuuauug

SEQ ID NO: 1300391 - RNA, 19 nt, Homo sapiens
  misc_RNA (1)...(19): siRNA sense strand
ggagagagcacgauuuauu

SEQ ID NO: 1300392 - RNA, 19 nt, Homo sapiens
  misc_RNA (1)...(19): siRNA sense strand
agagaaacauguccauaua

SEQ ID NO: 1300393 - RNA, 19 nt, Homo sapiens
  misc_RNA (1)...(19): siRNA sense strand
cagaugcacuuuauuugua

SEQ ID NO: 1300394 - RNA, 19 nt, Homo sapiens
  misc_RNA (1)...(19): siRNA sense strand
ggacuuacgaguuugguua

SEQ ID NO: 1300395 - RNA, 19 nt, Homo sapiens
  misc_RNA (1)...(19): siRNA sense strand
aaacagauaucaggauuug

SEQ ID NO: 1300396 - RNA, 19 nt, Homo sapiens
  misc_RNA (1)...(19): siRNA sense strand
cuauggagcucauugguaa

SEQ ID NO: 1300397 - RNA, 19 nt, Homo sapiens
  misc_RNA (1)...(19): siRNA sense strand
aaacacaccuuuagugaag

SEQ ID NO: 1300398 - RNA, 19 nt, Homo sapiens
  misc_RNA (1)...(19): siRNA sense strand
gaacuuaaaggaucaguag

SEQ ID NO: 1300399 - RNA, 19 nt, Homo sapiens
  misc_RNA (1)...(19): siRNA sense strand
gaaaacagauaucaggauu

SEQ ID NO: 1300400 - RNA, 19 nt, Homo sapiens
  misc_RNA (1)...(19): siRNA sense strand
uaaaggaucaguagcaauu

SEQ ID NO: 1300401 - RNA, 19 nt, Homo sapiens
  misc_RNA (1)...(19): siRNA sense strand
aaaugggacuuacgaguuu

SEQ ID NO: 1300402 - RNA, 19 nt, Homo sapiens
  misc_RNA (1)...(19): siRNA sense strand
guuaucagaugcacuuuau

SEQ ID NO: 1300403 - RNA, 19 nt, Homo sapiens
  misc_RNA (1)...(19): siRNA sense strand
ugagauuggugaacgagua

SEQ ID NO: 1300404 - RNA, 19 nt, Homo sapiens
  misc_RNA (1)...(19): siRNA sense strand
gugaacgaguagauuauaa

SEQ ID NO: 1300405 - RNA, 19 nt, Homo sapiens
  misc_RNA (1)...(19): siRNA sense strand
gagagagcacgauuuauug

SEQ ID NO: 1300406 - RNA, 19 nt, Homo sapiens
  misc_RNA (1)...(19): siRNA sense strand
caaaugggacuuacgaguu

SEQ ID NO: 1300407 - RNA, 19 nt, Homo sapiens
  misc_RNA (1)...(19): siRNA sense strand
ggucauugcugugauuguu

SEQ ID NO: 1300408 - RNA, 19 nt, Homo sapiens
  misc_RNA (1)...(19): siRNA sense strand
ccagauccauuuucacuua

SEQ ID NO: 1300409 - RNA, 19 nt, Homo sapiens
  misc_RNA (1)...(19): siRNA sense strand
gaaggaauacuugacaguu

SEQ ID NO: 1300410 - RNA, 19 nt, Homo sapiens
  misc_RNA (1)...(19): siRNA sense strand
aaggaauacuugacaguuu

SEQ ID NO: 1300411 - RNA, 19 nt, Homo sapiens
  misc_RNA (1)...(19): siRNA sense strand
ucagaugacgccuguuaua

SEQ ID NO: 1300412 - RNA, 19 nt, Homo sapiens
  misc_RNA (1)...(19): siRNA sense strand
gaaaacacaccuuuaguga

SEQ ID NO: 1300413 - RNA, 19 nt, Homo sapiens
  misc_RNA (1)...(19): siRNA sense strand
gaugacgccuguuauagag

SEQ ID NO: 1300414 - RNA, 19 nt, Homo sapiens
  misc_RNA (1)...(19): siRNA sense strand
gagaaacauguccauauau

SEQ ID NO: 1300415 - RNA, 19 nt, Homo sapiens
  misc_RNA (1)...(19): siRNA sense strand
acgaguagauuauaagugu

SEQ ID NO: 1300416 - RNA, 19 nt, Homo sapiens
  misc_RNA (1)...(19): siRNA sense strand
cuacaaagcaacaguuaug

SEQ ID NO: 1300417 - RNA, 19 nt, Homo sapiens
  misc_RNA (1)...(19): siRNA sense strand
ccaccaacauuugaagcua

SEQ ID NO: 1300418 - RNA, 19 nt, Homo sapiens
  misc_RNA (1)...(19): siRNA sense strand
uauacgggauccuuuaaau

SEQ ID NO: 1300419 - RNA, 19 nt, Homo sapiens
  misc_RNA (1)...(19): siRNA sense strand
cgaguuugguuaucagaug

SEQ ID NO: 1300420 - RNA, 19 nt, Homo sapiens
  misc_RNA (1)...(19): siRNA sense strand
gaacgaguagauuauaagu

SEQ ID NO: 1300421 - RNA, 19 nt, Homo sapiens
  misc_RNA (1)...(19): siRNA sense strand
gugaggagccaccaacauu

SEQ ID NO: 1300422 - RNA, 19 nt, Homo sapiens
  misc_RNA (1)...(19): siRNA sense strand
gauggcagcgacacaauug

SEQ ID NO: 1300423 - RNA, 19 nt, Homo sapiens
  misc_RNA (1)...(19): siRNA sense strand
gcuauggagcucauuggua

SEQ ID NO: 1300424 - RNA, 19 nt, Homo sapiens
  misc_RNA (1)...(19): siRNA sense strand
gaggagccaccaacauuug

SEQ ID NO: 1300425 - RNA, 19 nt, Homo sapiens
  misc_RNA (1)...(19): siRNA sense strand
acacaccuuuagugaagua

SEQ ID NO: 1300426 - RNA, 19 nt, Homo sapiens
  misc_RNA (1)...(19): siRNA sense strand
ucucagaugacgccuguua

SEQ ID NO: 1300427 - RNA, 19 nt, Homo sapiens
  misc_RNA (1)...(19): siRNA sense strand
uagagaaacauguccauau

SEQ ID NO: 1300428 - RNA, 19 nt, Homo sapiens
  misc_RNA (1)...(19): siRNA sense strand
guuccaaagugucuuaaag

SEQ ID NO: 1300429 - RNA, 19 nt, Homo sapiens
  misc_RNA (1)...(19): siRNA sense strand
ggugaacgaguagauuaua

SEQ ID NO: 1300430 - RNA, 19 nt, Homo sapiens
  misc_RNA (1)...(19): siRNA sense strand
gaaguagaaguauuugagu

SEQ ID NO: 1300431 - RNA, 19 nt, Homo sapiens
  misc_RNA (1)...(19): siRNA sense strand
gaaacauguccauauauac

SEQ ID NO: 1300432 - RNA, 19 nt, Homo sapiens
  misc_RNA (1)...(19): siRNA sense strand
ugacgccuguuauagagaa

SEQ ID NO: 1300433 - RNA, 19 nt, Homo sapiens
  misc_RNA (1)...(19): siRNA sense strand
cgaguagauuauaagugua

SEQ ID NO: 1300434 - RNA, 19 nt, Homo sapiens
  misc_RNA (1)...(19): siRNA sense strand
gcacuuuauuuguaaugag

SEQ ID NO: 1300435 - RNA, 19 nt, Homo sapiens
  misc_RNA (1)...(19): siRNA sense strand
guagaaguauuugaguauc

SEQ ID NO: 1300436 - RNA, 19 nt, Homo sapiens
  misc_RNA (1)...(19): siRNA sense strand
guauuugaguaucuugaug

SEQ ID NO: 1300437 - RNA, 19 nt, Homo sapiens
  misc_RNA (1)...(19): siRNA sense strand
aggaauacuugacaguuug

SEQ ID NO: 1300438 - RNA, 19 nt, Homo sapiens
  misc_RNA (1)...(19): siRNA sense strand
ccaaaacccuacuaugaga

SEQ ID NO: 1300439 - RNA, 19 nt, Homo sapiens
  misc_RNA (1)...(19): siRNA sense strand
aguguaaaguggucaaaug

SEQ ID NO: 1300440 - RNA, 19 nt, Homo sapiens
  misc_RNA (1)...(19): siRNA sense strand
ccacccauacuauuuguga

SEQ ID NO: 1300441 - RNA, 19 nt, Homo sapiens
  misc_RNA (1)...(19): siRNA sense strand
caccaacauuugaagcuau

SEQ ID NO: 1300442 - RNA, 19 nt, Homo sapiens
  misc_RNA (1)...(19): siRNA sense strand
uuggagagagcacgauuua

SEQ ID NO: 1300443 - RNA, 19 nt, Homo sapiens
  misc_RNA (1)...(19): siRNA sense strand
gguuaucagaugcacuuua

SEQ ID NO: 1300444 - RNA, 19 nt, Homo sapiens
  misc_RNA (1)...(19): siRNA sense strand
ugaggagccaccaacauuu

SEQ ID NO: 1300445 - RNA, 19 nt, Homo sapiens
  misc_RNA (1)...(19): siRNA sense strand
ggaaggaauacuugacagu

SEQ ID NO: 1300446 - RNA, 19 nt, Homo sapiens
  misc_RNA (1)...(19): siRNA sense strand
gaggaaggaauacuugaca

SEQ ID NO: 1300447 - RNA, 19 nt, Homo sapiens
  misc_RNA (1)...(19): siRNA sense strand
ccaguuccaaagugucuua

SEQ ID NO: 1300448 - RNA, 19 nt, Homo sapiens
  misc_RNA (1)...(19): siRNA sense strand
ugaguaucuugaugcagua

SEQ ID NO: 1300449 - RNA, 19 nt, Homo sapiens
  misc_RNA (1)...(19): siRNA sense strand
caccuuuagugaaguagaa

SEQ ID NO: 1300450 - RNA, 19 nt, Homo sapiens
  misc_RNA (1)...(19): siRNA sense strand
acagauaucaggauuugga

SEQ ID NO: 1300451 - RNA, 19 nt, Homo sapiens
  misc_RNA (1)...(19): siRNA sense strand
ucauugcugugauuguuau

SEQ ID NO: 1300452 - RNA, 19 nt, Homo sapiens
  misc_RNA (1)...(19): siRNA sense strand
ucagaugcacuuuauuugu

SEQ ID NO: 1300453 - RNA, 19 nt, Homo sapiens
  misc_RNA (1)...(19): siRNA sense strand
gugcugcuccagaguguaa

SEQ ID NO: 1300454 - RNA, 19 nt, Homo sapiens
  misc_RNA (1)...(19): siRNA sense strand
ggaaaacacaccuuuagug

SEQ ID NO: 1300455 - RNA, 19 nt, Homo sapiens
  misc_RNA (1)...(19): siRNA sense strand
aaggaucaguagcaauuug

SEQ ID NO: 1300456 - RNA, 19 nt, Homo sapiens
  misc_RNA (1)...(19): siRNA sense strand
uauauacgggauccuuuaa

SEQ ID NO: 1300457 - RNA, 19 nt, Homo sapiens
  misc_RNA (1)...(19): siRNA sense strand
ugaaguagaaguauuugag

SEQ ID NO: 1300458 - RNA, 19 nt, Homo sapiens
  misc_RNA (1)...(19): siRNA sense strand
cuugacaguuuggauguuu

SEQ ID NO: 1300459 - RNA, 19 nt, Homo sapiens
  misc_RNA (1)...(19): siRNA sense strand
cauauauacgggauccuuu

SEQ ID NO: 1300460 - RNA, 19 nt, Homo sapiens
  misc_RNA (1)...(19): siRNA sense strand
auauauacgggauccuuua

SEQ ID NO: 1300461 - RNA, 19 nt, Homo sapiens
  misc_RNA (1)...(19): siRNA sense strand
cuuaaaggaucaguagcaa

SEQ ID NO: 1300462 - RNA, 19 nt, Homo sapiens
  misc_RNA (1)...(19): siRNA sense strand
uaaaccugaggaaggaaua

SEQ ID NO: 1300463 - RNA, 19 nt, Homo sapiens
  misc_RNA (1)...(19): siRNA sense strand
agaugacgccuguuauaga

SEQ ID NO: 1300464 - RNA, 19 nt, Homo sapiens
  misc_RNA (1)...(19): siRNA sense strand
ugugauuguuauugccaua

SEQ ID NO: 1300465 - RNA, 19 nt, Homo sapiens
  misc_RNA (1)...(19): siRNA sense strand
gagagcacgauuuauugug

SEQ ID NO: 1300466 - RNA, 19 nt, Homo sapiens
  misc_RNA (1)...(19): siRNA sense strand
gaaguauuugaguaucuug

SEQ ID NO: 1300467 - RNA, 19 nt, Homo sapiens
  misc_RNA (1)...(19): siRNA sense strand
ggcuaccugucucagauga

SEQ ID NO: 1300468 - RNA, 19 nt, Homo sapiens
  misc_RNA (1)...(19): siRNA sense strand
gauaucaggauuuggaaaa

SEQ ID NO: 1300469 - RNA, 19 nt, Homo sapiens
  misc_RNA (1)...(19): siRNA sense strand
ccucuugccacccauacua

SEQ ID NO: 1300470 - RNA, 19 nt, Homo sapiens
  misc_RNA (1)...(19): siRNA sense strand
ccaugguguugcugcugua

SEQ ID NO: 1300471 - RNA, 19 nt, Homo sapiens
  misc_RNA (1)...(19): siRNA sense strand
cagaugacgccuguuauag

SEQ ID NO: 1300472 - RNA, 19 nt, Homo sapiens
  misc_RNA (1)...(19): siRNA sense strand
uuggugaacgaguagauua

SEQ ID NO: 1300473 - RNA, 19 nt, Homo sapiens
  misc_RNA (1)...(19): siRNA sense strand
gucauugcugugauuguua

SEQ ID NO: 1300474 - RNA, 19 nt, Homo sapiens
  misc_RNA (1)...(19): siRNA sense strand
ggagccaccaacauuugaa

SEQ ID NO: 1300475 - RNA, 19 nt, Homo sapiens
  misc_RNA (1)...(19): siRNA sense strand
gcgcuuuccuggguugcuu

SEQ ID NO: 1300476 - RNA, 19 nt, Homo sapiens
  misc_RNA (1)...(19): siRNA sense strand
uacuacaaagcaacaguua

SEQ ID NO: 1300477 - RNA, 19 nt, Homo sapiens
  misc_RNA (1)...(19): siRNA sense strand
cuugaugcaguaacuuaua

SEQ ID NO: 1300478 - RNA, 19 nt, Homo sapiens
  misc_RNA (1)...(19): siRNA sense strand
aaacauguccauauauacg

SEQ ID NO: 1300479 - RNA, 19 nt, Homo sapiens
  misc_RNA (1)...(19): siRNA sense strand
guguaaaguggucaaaugu

SEQ ID NO: 1300480 - RNA, 19 nt, Homo sapiens
  misc_RNA (1)...(19): siRNA sense strand
cuuacgaguuugguuauca

SEQ ID NO: 1300481 - RNA, 19 nt, Homo sapiens
  misc_RNA (1)...(19): siRNA sense strand
uacgggauccuuuaaaugg

SEQ ID NO: 1300482 - RNA, 19 nt, Homo sapiens
  misc_RNA (1)...(19): siRNA sense strand
aaccaaaacccuacuauga

SEQ ID NO: 1300483 - RNA, 19 nt, Homo sapiens
  misc_RNA (1)...(19): siRNA sense strand
cccaauaugugaaaagguu

SEQ ID NO: 1300484 - RNA, 19 nt, Homo sapiens
  misc_RNA (1)...(19): siRNA sense strand
cgauggcagcgacacaauu

SEQ ID NO: 1300485 - RNA, 19 nt, Homo sapiens
  misc_RNA (1)...(19): siRNA sense strand
gauccauuuucacuuauug

SEQ ID NO: 1300486 - RNA, 19 nt, Homo sapiens
  misc_RNA (1)...(19): siRNA sense strand
uugaugcaguaacuuauag

SEQ ID NO: 1300487 - RNA, 19 nt, Homo sapiens
  misc_RNA (1)...(19): siRNA sense strand
guaucuugaugcaguaacu

SEQ ID NO: 1300488 - RNA, 19 nt, Homo sapiens
  misc_RNA (1)...(19): siRNA sense strand
caacauuugaagcuaugga

SEQ ID NO: 1300489 - RNA, 19 nt, Homo sapiens
  misc_RNA (1)...(19): siRNA sense strand
gagauuggugaacgaguag

SEQ ID NO: 1300490 - RNA, 19 nt, Homo sapiens
  misc_RNA (1)...(19): siRNA sense strand
ggagagagcacgauuuauu

SEQ ID NO: 1300491 - RNA, 19 nt, Homo sapiens
  misc_RNA (1)...(19): siRNA sense strand
agagaaacauguccauaua

SEQ ID NO: 1300492 - RNA, 19 nt, Homo sapiens
  misc_RNA (1)...(19): siRNA sense strand
cagaugcacuuuauuugua

SEQ ID NO: 1300493 - RNA, 19 nt, Homo sapiens
  misc_RNA (1)...(19): siRNA sense strand
ggacuuacgaguuugguua

SEQ ID NO: 1300494 - RNA, 19 nt, Homo sapiens
  misc_RNA (1)...(19): siRNA sense strand
aaacagauaucaggauuug

SEQ ID NO: 1300495 - RNA, 19 nt, Homo sapiens
  misc_RNA (1)...(19): siRNA sense strand
cuauggagcucauugguaa

SEQ ID NO: 1300496 - RNA, 19 nt, Homo sapiens
  misc_RNA (1)...(19): siRNA sense strand
aaacacaccuuuagugaag

SEQ ID NO: 1300497 - RNA, 19 nt, Homo sapiens
  misc_RNA (1)...(19): siRNA sense strand
gaacuuaaaggaucaguag

SEQ ID NO: 1300498 - RNA, 19 nt, Homo sapiens
  misc_RNA (1)...(19): siRNA sense strand
gaaaacagauaucaggauu

SEQ ID NO: 1300499 - RNA, 19 nt, Homo sapiens
  misc_RNA (1)...(19): siRNA sense strand
uaaaggaucaguagcaauu

SEQ ID NO: 1300500 - RNA, 19 nt, Homo sapiens
  misc_RNA (1)...(19): siRNA sense strand
aaaugggacuuacgaguuu

SEQ ID NO: 1300501 - RNA, 19 nt, Homo sapiens
  misc_RNA (1)...(19): siRNA sense strand
guuaucagaugcacuuuau

SEQ ID NO: 1300502 - RNA, 19 nt, Homo sapiens
  misc_RNA (1)...(19): siRNA sense strand
ugagauuggugaacgagua

SEQ ID NO: 1300503 - RNA, 19 nt, Homo sapiens
  misc_RNA (1)...(19): siRNA sense strand
gugaacgaguagauuauaa

SEQ ID NO: 1300504 - RNA, 19 nt, Homo sapiens
  misc_RNA (1)...(19): siRNA sense strand
gagagagcacgauuuauug

SEQ ID NO: 1300505 - RNA, 19 nt, Homo sapiens
  misc_RNA (1)...(19): siRNA sense strand
caaaugggacuuacgaguu

SEQ ID NO: 1300506 - RNA, 19 nt, Homo sapiens
  misc_RNA (1)...(19): siRNA sense strand
ggucauugcugugauuguu

SEQ ID NO: 1300507 - RNA, 19 nt, Homo sapiens
  misc_RNA (1)...(19): siRNA sense strand
ccagauccauuuucacuua

SEQ ID NO: 1300508 - RNA, 19 nt, Homo sapiens
  misc_RNA (1)...(19): siRNA sense strand
gaaggaauacuugacaguu

SEQ ID NO: 1300509 - RNA, 19 nt, Homo sapiens
  misc_RNA (1)...(19): siRNA sense strand
aaggaauacuugacaguuu

SEQ ID NO: 1300510 - RNA, 19 nt, Homo sapiens
  misc_RNA (1)...(19): siRNA sense strand
ucagaugacgccuguuaua

SEQ ID NO: 1300511 - RNA, 19 nt, Homo sapiens
  misc_RNA (1)...(19): siRNA sense strand
gaaaacacaccuuuaguga

SEQ ID NO: 1300512 - RNA, 19 nt, Homo sapiens
  misc_RNA (1)...(19): siRNA sense strand
gaugacgccuguuauagag

SEQ ID NO: 1300513 - RNA, 19 nt, Homo sapiens
  misc_RNA (1)...(19): siRNA sense strand
gagaaacauguccauauau

SEQ ID NO: 1300514 - RNA, 19 nt, Homo sapiens
  misc_RNA (1)...(19): siRNA sense strand
acgaguagauuauaagugu

SEQ ID NO: 1300515 - RNA, 19 nt, Homo sapiens
  misc_RNA (1)...(19): siRNA sense strand
cuacaaagcaacaguuaug

SEQ ID NO: 1300516 - RNA, 19 nt, Homo sapiens
  misc_RNA (1)...(19): siRNA sense strand
ccaccaacauuugaagcua

SEQ ID NO: 1300517 - RNA, 19 nt, Homo sapiens
  misc_RNA (1)...(19): siRNA sense strand
uauacgggauccuuuaaau

SEQ ID NO: 1300518 - RNA, 19 nt, Homo sapiens
  misc_RNA (1)...(19): siRNA sense strand
cgaguuugguuaucagaug

SEQ ID NO: 1300519 - RNA, 19 nt, Homo sapiens
  misc_RNA (1)...(19): siRNA sense strand
gaacgaguagauuauaagu

SEQ ID NO: 1300520 - RNA, 19 nt, Homo sapiens
  misc_RNA (1)...(19): siRNA sense strand
gugaggagccaccaacauu

SEQ ID NO: 1300521 - RNA, 19 nt, Homo sapiens
  misc_RNA (1)...(19): siRNA sense strand
gauggcagcgacacaauug

SEQ ID NO: 1300522 - RNA, 19 nt, Homo sapiens
  misc_RNA (1)...(19): siRNA sense strand
gcuauggagcucauuggua

SEQ ID NO: 1300523 - RNA, 19 nt, Homo sapiens
  misc_RNA (1)...(19): siRNA sense strand
gaggagccaccaacauuug

SEQ ID NO: 1300524 - RNA, 19 nt, Homo sapiens
  misc_RNA (1)...(19): siRNA sense strand
acacaccuuuagugaagua

SEQ ID NO: 1300525 - RNA, 19 nt, Homo sapiens
  misc_RNA (1)...(19): siRNA sense strand
ucucagaugacgccuguua

SEQ ID NO: 1300526 - RNA, 19 nt, Homo sapiens
  misc_RNA (1)...(19): siRNA sense strand
uagagaaacauguccauau

SEQ ID NO: 1300527 - RNA, 19 nt, Homo sapiens
  misc_RNA (1)...(19): siRNA sense strand
ggugaacgaguagauuaua

SEQ ID NO: 1300528 - RNA, 19 nt, Homo sapiens
  misc_RNA (1)...(19): siRNA sense strand
gaaguagaaguauuugagu

SEQ ID NO: 1300529 - RNA, 19 nt, Homo sapiens
  misc_RNA (1)...(19): siRNA sense strand
gaaacauguccauauauac

SEQ ID NO: 1300530 - RNA, 19 nt, Homo sapiens
  misc_RNA (1)...(19): siRNA sense strand
ugacgccuguuauagagaa

SEQ ID NO: 1300531 - RNA, 19 nt, Homo sapiens
  misc_RNA (1)...(19): siRNA sense strand
cgaguagauuauaagugua

SEQ ID NO: 1300532 - RNA, 19 nt, Homo sapiens
  misc_RNA (1)...(19): siRNA sense strand
gcacuuuauuuguaaugag

SEQ ID NO: 1300533 - RNA, 19 nt, Homo sapiens
  misc_RNA (1)...(19): siRNA sense strand
guagaaguauuugaguauc

SEQ ID NO: 1300534 - RNA, 19 nt, Homo sapiens
  misc_RNA (1)...(19): siRNA sense strand
guauuugaguaucuugaug

SEQ ID NO: 1300535 - RNA, 19 nt, Homo sapiens
  misc_RNA (1)...(19): siRNA sense strand
aggaauacuugacaguuug

SEQ ID NO: 1300536 - RNA, 19 nt, Homo sapiens
  misc_RNA (1)...(19): siRNA sense strand
aguguaaaguggucaaaug

SEQ ID NO: 1300537 - RNA, 19 nt, Homo sapiens
  misc_RNA (1)...(19): siRNA sense strand
ccaaaacccuacuaugaga

SEQ ID NO: 1300538 - RNA, 19 nt, Homo sapiens
  misc_RNA (1)...(19): siRNA sense strand
ccacccauacuauuuguga

SEQ ID NO: 1300539 - RNA, 19 nt, Homo sapiens
  misc_RNA (1)...(19): siRNA sense strand
caccaacauuugaagcuau

SEQ ID NO: 1300540 - RNA, 19 nt, Homo sapiens
  misc_RNA (1)...(19): siRNA sense strand
uuggagagagcacgauuua

SEQ ID NO: 1300541 - RNA, 19 nt, Homo sapiens
  misc_RNA (1)...(19): siRNA sense strand
gguuaucagaugcacuuua

SEQ ID NO: 1300542 - RNA, 19 nt, Homo sapiens
  misc_RNA (1)...(19): siRNA sense strand
ugaggagccaccaacauuu

SEQ ID NO: 1300543 - RNA, 19 nt, Homo sapiens
  misc_RNA (1)...(19): siRNA sense strand
ggaaggaauacuugacagu

SEQ ID NO: 1300544 - RNA, 19 nt, Homo sapiens
  misc_RNA (1)...(19): siRNA sense strand
gaggaaggaauacuugaca

SEQ ID NO: 1300545 - RNA, 19 nt, Homo sapiens
  misc_RNA (1)...(19): siRNA sense strand
ugaguaucuugaugcagua

SEQ ID NO: 1300546 - RNA, 19 nt, Homo sapiens
  misc_RNA (1)...(19): siRNA sense strand
caccuuuagugaaguagaa

SEQ ID NO: 1300547 - RNA, 19 nt, Homo sapiens
  misc_RNA (1)...(19): siRNA sense strand
acagauaucaggauuugga

SEQ ID NO: 1300548 - RNA, 19 nt, Homo sapiens
  misc_RNA (1)...(19): siRNA sense strand
ucauugcugugauuguuau

SEQ ID NO: 1300549 - RNA, 19 nt, Homo sapiens
  misc_RNA (1)...(19): siRNA sense strand
ucagaugcacuuuauuugu

SEQ ID NO: 1300550 - RNA, 19 nt, Homo sapiens
  misc_RNA (1)...(19): siRNA sense strand
gugcugcuccagaguguaa

SEQ ID NO: 1300551 - RNA, 19 nt, Homo sapiens
  misc_RNA (1)...(19): siRNA sense strand
ggaaaacacaccuuuagug

SEQ ID NO: 1300552 - RNA, 19 nt, Homo sapiens
  misc_RNA (1)...(19): siRNA sense strand
aaggaucaguagcaauuug

SEQ ID NO: 1300553 - RNA, 19 nt, Homo sapiens
  misc_RNA (1)...(19): siRNA sense strand
uauauacgggauccuuuaa

SEQ ID NO: 1300554 - RNA, 19 nt, Homo sapiens
  misc_RNA (1)...(19): siRNA sense strand
ugaaguagaaguauuugag

SEQ ID NO: 1300555 - RNA, 19 nt, Homo sapiens
  misc_RNA (1)...(19): siRNA sense strand
cuugacaguuuggauguuu

SEQ ID NO: 1300556 - RNA, 19 nt, Homo sapiens
  misc_RNA (1)...(19): siRNA sense strand
cauauauacgggauccuuu

SEQ ID NO: 1300557 - RNA, 19 nt, Homo sapiens
  misc_RNA (1)...(19): siRNA sense strand
auauauacgggauccuuua

SEQ ID NO: 1300558 - RNA, 19 nt, Homo sapiens
  misc_RNA (1)...(19): siRNA sense strand
cuuaaaggaucaguagcaa

SEQ ID NO: 1300559 - RNA, 19 nt, Homo sapiens
  misc_RNA (1)...(19): siRNA sense strand
uaaaccugaggaaggaaua

SEQ ID NO: 1300560 - RNA, 19 nt, Homo sapiens
  misc_RNA (1)...(19): siRNA sense strand
agaugacgccuguuauaga

SEQ ID NO: 1300561 - RNA, 19 nt, Homo sapiens
  misc_RNA (1)...(19): siRNA sense strand
ugugauuguuauugccaua

SEQ ID NO: 1300562 - RNA, 19 nt, Homo sapiens
  misc_RNA (1)...(19): siRNA sense strand
gagagcacgauuuauugug

SEQ ID NO: 1300563 - RNA, 19 nt, Homo sapiens
  misc_RNA (1)...(19): siRNA sense strand
gaaguauuugaguaucuug

SEQ ID NO: 1300564 - RNA, 19 nt, Homo sapiens
  misc_RNA (1)...(19): siRNA sense strand
ccucuugccacccauacua

SEQ ID NO: 1300565 - RNA, 19 nt, Homo sapiens
  misc_RNA (1)...(19): siRNA sense strand
gauaucaggauuuggaaaa

SEQ ID NO: 1300566 - RNA, 19 nt, Homo sapiens
  misc_RNA (1)...(19): siRNA sense strand
ggcuaccugucucagauga

SEQ ID NO: 1300567 - RNA, 19 nt, Homo sapiens
  misc_RNA (1)...(19): siRNA sense strand
ccaugguguugcugcugua

SEQ ID NO: 1300568 - RNA, 19 nt, Homo sapiens
  misc_RNA (1)...(19): siRNA sense strand
cagaugacgccuguuauag

SEQ ID NO: 1300569 - RNA, 19 nt, Homo sapiens
  misc_RNA (1)...(19): siRNA sense strand
gucauugcugugauuguua

SEQ ID NO: 1300570 - RNA, 19 nt, Homo sapiens
  misc_RNA (1)...(19): siRNA sense strand
uuggugaacgaguagauua

SEQ ID NO: 1300571 - RNA, 19 nt, Homo sapiens
  misc_RNA (1)...(19): siRNA sense strand
ggagccaccaacauuugaa

SEQ ID NO: 1300572 - RNA, 19 nt, Homo sapiens
  misc_RNA (1)...(19): siRNA sense strand
gcgcuuuccuggguugcuu

SEQ ID NO: 1300573 - RNA, 19 nt, Homo sapiens
  misc_RNA (1)...(19): siRNA sense strand
uacuacaaagcaacaguua

SEQ ID NO: 1300574 - RNA, 19 nt, Homo sapiens
  misc_RNA (1)...(19): siRNA sense strand
cuugaugcaguaacuuaua

SEQ ID NO: 1300575 - RNA, 19 nt, Homo sapiens
  misc_RNA (1)...(19): siRNA sense strand
aaacauguccauauauacg

SEQ ID NO: 1300576 - RNA, 19 nt, Homo sapiens
  misc_RNA (1)...(19): siRNA sense strand
guguaaaguggucaaaugu

SEQ ID NO: 1300577 - RNA, 19 nt, Homo sapiens
  misc_RNA (1)...(19): siRNA sense strand
cuuacgaguuugguuauca

SEQ ID NO: 1300578 - RNA, 19 nt, Homo sapiens
  misc_RNA (1)...(19): siRNA sense strand
uacgggauccuuuaaaugg

SEQ ID NO: 1300579 - RNA, 19 nt, Homo sapiens
  misc_RNA (1)...(19): siRNA sense strand
aaccaaaacccuacuauga

SEQ ID NO: 1300580 - RNA, 19 nt, Homo sapiens
  misc_RNA (1)...(19): siRNA sense strand
cccaauaugugaaaagguu

SEQ ID NO: 1300581 - RNA, 19 nt, Homo sapiens
  misc_RNA (1)...(19): siRNA sense strand
cgauggcagcgacacaauu

SEQ ID NO: 1300582 - RNA, 19 nt, Homo sapiens
  misc_RNA (1)...(19): siRNA sense strand
gauccauuuucacuuauug

SEQ ID NO: 1300583 - RNA, 19 nt, Homo sapiens
  misc_RNA (1)...(19): siRNA sense strand
uugaugcaguaacuuauag

SEQ ID NO: 1300584 - RNA, 19 nt, Homo sapiens
  misc_RNA (1)...(19): siRNA sense strand
guaucuugaugcaguaacu

SEQ ID NO: 1300585 - RNA, 19 nt, Homo sapiens
  misc_RNA (1)...(19): siRNA sense strand
caacauuugaagcuaugga

SEQ ID NO: 1300586 - RNA, 19 nt, Homo sapiens
  misc_RNA (1)...(19): siRNA sense strand
gagauuggugaacgaguag

SEQ ID NO: 1300587 - RNA, 19 nt, Homo sapiens
  misc_RNA (1)...(19): siRNA sense strand
ggagagagcacgauuuauu

SEQ ID NO: 1300588 - RNA, 19 nt, Homo sapiens
  misc_RNA (1)...(19): siRNA sense strand
agagaaacauguccauaua

SEQ ID NO: 1300589 - RNA, 19 nt, Homo sapiens
  misc_RNA (1)...(19): siRNA sense strand
cagaugcacuuuauuugua

SEQ ID NO: 1300590 - RNA, 19 nt, Homo sapiens
  misc_RNA (1)...(19): siRNA sense strand
ggacuuacgaguuugguua

SEQ ID NO: 1300591 - RNA, 19 nt, Homo sapiens
  misc_RNA (1)...(19): siRNA sense strand
aaacagauaucaggauuug

SEQ ID NO: 1300592 - RNA, 19 nt, Homo sapiens
  misc_RNA (1)...(19): siRNA sense strand
cuauggagcucauugguaa

SEQ ID NO: 1300593 - RNA, 19 nt, Homo sapiens
  misc_RNA (1)...(19): siRNA sense strand
aaacacaccuuuagugaag

SEQ ID NO: 1300594 - RNA, 19 nt, Homo sapiens
  misc_RNA (1)...(19): siRNA sense strand
gaacuuaaaggaucaguag

SEQ ID NO: 1300595 - RNA, 19 nt, Homo sapiens
  misc_RNA (1)...(19): siRNA sense strand
gaaaacagauaucaggauu

SEQ ID NO: 1300596 - RNA, 19 nt, Homo sapiens
  misc_RNA (1)...(19): siRNA sense strand
uaaaggaucaguagcaauu

SEQ ID NO: 1300597 - RNA, 19 nt, Homo sapiens
  misc_RNA (1)...(19): siRNA sense strand
aaaugggacuuacgaguuu

SEQ ID NO: 1300598 - RNA, 19 nt, Homo sapiens
  misc_RNA (1)...(19): siRNA sense strand
guuaucagaugcacuuuau

SEQ ID NO: 1300599 - RNA, 19 nt, Homo sapiens
  misc_RNA (1)...(19): siRNA sense strand
gagcugaauaugccacuua

SEQ ID NO: 1300600 - RNA, 19 nt, Homo sapiens
  misc_RNA (1)...(19): siRNA sense strand
ugagauuggugaacgagua

SEQ ID NO: 1300601 - RNA, 19 nt, Homo sapiens
  misc_RNA (1)...(19): siRNA sense strand
gugaacgaguagauuauaa

SEQ ID NO: 1300602 - RNA, 19 nt, Homo sapiens
  misc_RNA (1)...(19): siRNA sense strand
gagagagcacgauuuauug

SEQ ID NO: 1300603 - RNA, 19 nt, Homo sapiens
  misc_RNA (1)...(19): siRNA sense strand
caaaugggacuuacgaguu

SEQ ID NO: 1300604 - RNA, 19 nt, Homo sapiens
  misc_RNA (1)...(19): siRNA sense strand
ggucauugcugugauuguu

SEQ ID NO: 1300605 - RNA, 19 nt, Homo sapiens
  misc_RNA (1)...(19): siRNA sense strand
ccagauccauuuucacuua

SEQ ID NO: 1300606 - RNA, 19 nt, Homo sapiens
  misc_RNA (1)...(19): siRNA sense strand
gaaggaauacuugacaguu

SEQ ID NO: 1300607 - RNA, 19 nt, Homo sapiens
  misc_RNA (1)...(19): siRNA sense strand
aaggaauacuugacaguuu

SEQ ID NO: 1300608 - RNA, 19 nt, Homo sapiens
  misc_RNA (1)...(19): siRNA sense strand
ucagaugacgccuguuaua

SEQ ID NO: 1300609 - RNA, 19 nt, Homo sapiens
  misc_RNA (1)...(19): siRNA sense strand
gaaaacacaccuuuaguga

SEQ ID NO: 1300610 - RNA, 19 nt, Homo sapiens
  misc_RNA (1)...(19): siRNA sense strand
gaugacgccuguuauagag

SEQ ID NO: 1300611 - RNA, 19 nt, Homo sapiens
  misc_RNA (1)...(19): siRNA sense strand
gagaaacauguccauauau

SEQ ID NO: 1300612 - RNA, 19 nt, Homo sapiens
  misc_RNA (1)...(19): siRNA sense strand
ccacuuaccagacuaaauc

SEQ ID NO: 1300613 - RNA, 19 nt, Homo sapiens
  misc_RNA (1)...(19): siRNA sense strand
acgaguagauuauaagugu

SEQ ID NO: 1300614 - RNA, 19 nt, Homo sapiens
  misc_RNA (1)...(19): siRNA sense strand
cuacaaagcaacaguuaug

SEQ ID NO: 1300615 - RNA, 19 nt, Homo sapiens
  misc_RNA (1)...(19): siRNA sense strand
ccaccaacauuugaagcua

SEQ ID NO: 1300616 - RNA, 19 nt, Homo sapiens
  misc_RNA (1)...(19): siRNA sense strand
uauacgggauccuuuaaau

SEQ ID NO: 1300617 - RNA, 19 nt, Homo sapiens
  misc_RNA (1)...(19): siRNA sense strand
cgaguuugguuaucagaug

SEQ ID NO: 1300618 - RNA, 19 nt, Homo sapiens
  misc_RNA (1)...(19): siRNA sense strand
gaacgaguagauuauaagu

SEQ ID NO: 1300619 - RNA, 19 nt, Homo sapiens
  misc_RNA (1)...(19): siRNA sense strand
gugaggagccaccaacauu

SEQ ID NO: 1300620 - RNA, 19 nt, Homo sapiens
  misc_RNA (1)...(19): siRNA sense strand
gauggcagcgacacaauug

SEQ ID NO: 1300621 - RNA, 19 nt, Homo sapiens
  misc_RNA (1)...(19): siRNA sense strand
ucucagaugacgccuguua

SEQ ID NO: 1300622 - RNA, 19 nt, Homo sapiens
  misc_RNA (1)...(19): siRNA sense strand
gaggagccaccaacauuug

SEQ ID NO: 1300623 - RNA, 19 nt, Homo sapiens
  misc_RNA (1)...(19): siRNA sense strand
gcuauggagcucauuggua

SEQ ID NO: 1300624 - RNA, 19 nt, Homo sapiens
  misc_RNA (1)...(19): siRNA sense strand
acacaccuuuagugaagua

SEQ ID NO: 1300625 - RNA, 19 nt, Homo sapiens
  misc_RNA (1)...(19): siRNA sense strand
uagagaaacauguccauau

SEQ ID NO: 1300626 - RNA, 19 nt, Homo sapiens
  misc_RNA (1)...(19): siRNA sense strand
ggugaacgaguagauuaua

SEQ ID NO: 1300627 - RNA, 19 nt, Homo sapiens
  misc_RNA (1)...(19): siRNA sense strand
gaaguagaaguauuugagu

SEQ ID NO: 1300628 - RNA, 19 nt, Homo sapiens
  misc_RNA (1)...(19): siRNA sense strand
gaaacauguccauauauac

SEQ ID NO: 1300629 - RNA, 19 nt, Homo sapiens
  misc_RNA (1)...(19): siRNA sense strand
ugacgccuguuauagagaa

SEQ ID NO: 1300630 - RNA, 19 nt, Homo sapiens
  misc_RNA (1)...(19): siRNA sense strand
cgaguagauuauaagugua

SEQ ID NO: 1300631 - RNA, 19 nt, Homo sapiens
  misc_RNA (1)...(19): siRNA sense strand
gcacuuuauuuguaaugag

SEQ ID NO: 1300632 - RNA, 19 nt, Homo sapiens
  misc_RNA (1)...(19): siRNA sense strand
guagaaguauuugaguauc

SEQ ID NO: 1300633 - RNA, 19 nt, Homo sapiens
  misc_RNA (1)...(19): siRNA sense strand
guauuugaguaucuugaug

SEQ ID NO: 1300634 - RNA, 19 nt, Homo sapiens
  misc_RNA (1)...(19): siRNA sense strand
aggaauacuugacaguuug

SEQ ID NO: 1300635 - RNA, 19 nt, Homo sapiens
  misc_RNA (1)...(19): siRNA sense strand
ccaaaacccuacuaugaga

SEQ ID NO: 1300636 - RNA, 19 nt, Homo sapiens
  misc_RNA (1)...(19): siRNA sense strand
aguguaaaguggucaaaug

SEQ ID NO: 1300637 - RNA, 19 nt, Homo sapiens
  misc_RNA (1)...(19): siRNA sense strand
ccacccauacuauuuguga

SEQ ID NO: 1300638 - RNA, 19 nt, Homo sapiens
  misc_RNA (1)...(19): siRNA sense strand
uuggagagagcacgauuua

SEQ ID NO: 1300639 - RNA, 19 nt, Homo sapiens
  misc_RNA (1)...(19): siRNA sense strand
gguuaucagaugcacuuua

SEQ ID NO: 1300640 - RNA, 19 nt, Homo sapiens
  misc_RNA (1)...(19): siRNA sense strand
caccaacauuugaagcuau

SEQ ID NO: 1300641 - RNA, 19 nt, Homo sapiens
  misc_RNA (1)...(19): siRNA sense strand
ugaggagccaccaacauuu

SEQ ID NO: 1300642 - RNA, 19 nt, Homo sapiens
  misc_RNA (1)...(19): siRNA sense strand
ggaaggaauacuugacagu

SEQ ID NO: 1300643 - RNA, 19 nt, Homo sapiens
  misc_RNA (1)...(19): siRNA sense strand
gaggaaggaauacuugaca

SEQ ID NO: 1300644 - RNA, 19 nt, Homo sapiens
  misc_RNA (1)...(19): siRNA sense strand
ugaguaucuugaugcagua

SEQ ID NO: 1300645 - RNA, 19 nt, Homo sapiens
  misc_RNA (1)...(19): siRNA sense strand
caccuuuagugaaguagaa

SEQ ID NO: 1300646 - RNA, 19 nt, Homo sapiens
  misc_RNA (1)...(19): siRNA sense strand
acagauaucaggauuugga

SEQ ID NO: 1300647 - RNA, 19 nt, Homo sapiens
  misc_RNA (1)...(19): siRNA sense strand
ucauugcugugauuguuau

SEQ ID NO: 1300648 - RNA, 19 nt, Homo sapiens
  misc_RNA (1)...(19): siRNA sense strand
ucagaugcacuuuauuugu

SEQ ID NO: 1300649 - RNA, 19 nt, Homo sapiens
  misc_RNA (1)...(19): siRNA sense strand
gugcugcuccagaguguaa

SEQ ID NO: 1300650 - RNA, 19 nt, Homo sapiens
  misc_RNA (1)...(19): siRNA sense strand
ggaaaacacaccuuuagug

SEQ ID NO: 1300651 - RNA, 19 nt, Homo sapiens
  misc_RNA (1)...(19): siRNA sense strand
aaggaucaguagcaauuug

SEQ ID NO: 1300652 - RNA, 19 nt, Homo sapiens
  misc_RNA (1)...(19): siRNA sense strand
uauauacgggauccuuuaa

SEQ ID NO: 1300653 - RNA, 19 nt, Homo sapiens
  misc_RNA (1)...(19): siRNA sense strand
ugaaguagaaguauuugag

SEQ ID NO: 1300654 - RNA, 19 nt, Homo sapiens
  misc_RNA (1)...(19): siRNA sense strand
cuugacaguuuggauguuu

SEQ ID NO: 1300655 - RNA, 19 nt, Homo sapiens
  misc_RNA (1)...(19): siRNA sense strand
cauauauacgggauccuuu

SEQ ID NO: 1300656 - RNA, 19 nt, Homo sapiens
  misc_RNA (1)...(19): siRNA sense strand
auauauacgggauccuuua

SEQ ID NO: 1300657 - RNA, 19 nt, Homo sapiens
  misc_RNA (1)...(19): siRNA sense strand
cuuaaaggaucaguagcaa

SEQ ID NO: 1300658 - RNA, 19 nt, Homo sapiens
  misc_RNA (1)...(19): siRNA sense strand
uaaaccugaggaaggaaua

SEQ ID NO: 1300659 - RNA, 19 nt, Homo sapiens
  misc_RNA (1)...(19): siRNA sense strand
agaugacgccuguuauaga

SEQ ID NO: 1300660 - RNA, 19 nt, Homo sapiens
  misc_RNA (1)...(19): siRNA sense strand
ugugauuguuauugccaua

SEQ ID NO: 1300661 - RNA, 19 nt, Homo sapiens
  misc_RNA (1)...(19): siRNA sense strand
gagagcacgauuuauugug

SEQ ID NO: 1300662 - RNA, 19 nt, Homo sapiens
  misc_RNA (1)...(19): siRNA sense strand
gaaguauuugaguaucuug

SEQ ID NO: 1300663 - RNA, 19 nt, Homo sapiens
  misc_RNA (1)...(19): siRNA sense strand
ggcuaccugucucagauga

SEQ ID NO: 1300664 - RNA, 19 nt, Homo sapiens
  misc_RNA (1)...(19): siRNA sense strand
gauaucaggauuuggaaaa

SEQ ID NO: 1300665 - RNA, 19 nt, Homo sapiens
  misc_RNA (1)...(19): siRNA sense strand
ccucuugccacccauacua

SEQ ID NO: 1300666 - RNA, 19 nt, Homo sapiens
  misc_RNA (1)...(19): siRNA sense strand
ccaugguguugcugcugua

SEQ ID NO: 1300667 - RNA, 19 nt, Homo sapiens
  misc_RNA (1)...(19): siRNA sense strand
cagaugacgccuguuauag

SEQ ID NO: 1300668 - RNA, 19 nt, Homo sapiens
  misc_RNA (1)...(19): siRNA sense strand
cagaugguggagcugaaua

SEQ ID NO: 1300669 - RNA, 19 nt, Homo sapiens
  misc_RNA (1)...(19): siRNA sense strand
uuggugaacgaguagauua

SEQ ID NO: 1300670 - RNA, 19 nt, Homo sapiens
  misc_RNA (1)...(19): siRNA sense strand
gucauugcugugauuguua

SEQ ID NO: 1300671 - RNA, 19 nt, Homo sapiens
  misc_RNA (1)...(19): siRNA sense strand
ggagccaccaacauuugaa

SEQ ID NO: 1300672 - RNA, 19 nt, Homo sapiens
  misc_RNA (1)...(19): siRNA sense strand
gcgcuuuccuggguugcuu

SEQ ID NO: 1300673 - RNA, 19 nt, Homo sapiens
  misc_RNA (1)...(19): siRNA sense strand
uacuacaaagcaacaguua

SEQ ID NO: 1300674 - RNA, 19 nt, Homo sapiens
  misc_RNA (1)...(19): siRNA sense strand
cuugaugcaguaacuuaua

SEQ ID NO: 1300675 - RNA, 19 nt, Homo sapiens
  misc_RNA (1)...(19): siRNA sense strand
aaacauguccauauauacg

SEQ ID NO: 1300676 - RNA, 19 nt, Homo sapiens
  misc_RNA (1)...(19): siRNA sense strand
guguaaaguggucaaaugu

SEQ ID NO: 1300677 - RNA, 19 nt, Homo sapiens
  misc_RNA (1)...(19): siRNA sense strand
cuuacgaguuugguuauca

SEQ ID NO: 1300678 - RNA, 19 nt, Homo sapiens
  misc_RNA (1)...(19): siRNA sense strand
uacgggauccuuuaaaugg

SEQ ID NO: 1300679 - RNA, 19 nt, Homo sapiens
  misc_RNA (1)...(19): siRNA sense strand
gcagaugguggagcugaau

SEQ ID NO: 1300680 - RNA, 19 nt, Homo sapiens
  misc_RNA (1)...(19): siRNA sense strand
aaccaaaacccuacuauga

SEQ ID NO: 1300681 - RNA, 19 nt, Homo sapiens
  misc_RNA (1)...(19): siRNA sense strand
cccaauaugugaaaagguu

SEQ ID NO: 1300682 - RNA, 19 nt, Homo sapiens
  misc_RNA (1)...(19): siRNA sense strand
ggagcugaauaugccacuu

SEQ ID NO: 1300683 - RNA, 19 nt, Homo sapiens
  misc_RNA (1)...(19): siRNA sense strand
cgauggcagcgacacaauu

SEQ ID NO: 1300684 - RNA, 19 nt, Homo sapiens
  misc_RNA (1)...(19): siRNA sense strand
gauccauuuucacuuauug

SEQ ID NO: 1300685 - RNA, 19 nt, Homo sapiens
  misc_RNA (1)...(19): siRNA sense strand
uugaugcaguaacuuauag

SEQ ID NO: 1300686 - RNA, 19 nt, Homo sapiens
  misc_RNA (1)...(19): siRNA sense strand
guaucuugaugcaguaacu

SEQ ID NO: 1300687 - RNA, 19 nt, Homo sapiens
  misc_RNA (1)...(19): siRNA sense strand
ggagagagcacgauuuauu

SEQ ID NO: 1300688 - RNA, 19 nt, Homo sapiens
  misc_RNA (1)...(19): siRNA sense strand
agagaaacauguccauaua

SEQ ID NO: 1300689 - RNA, 19 nt, Homo sapiens
  misc_RNA (1)...(19): siRNA sense strand
cagaugcacuuuauuugua

SEQ ID NO: 1300690 - RNA, 19 nt, Homo sapiens
  misc_RNA (1)...(19): siRNA sense strand
ggacuuacgaguuugguua

SEQ ID NO: 1300691 - RNA, 19 nt, Homo sapiens
  misc_RNA (1)...(19): siRNA sense strand
aaacagauaucaggauuug

SEQ ID NO: 1300692 - RNA, 19 nt, Homo sapiens
  misc_RNA (1)...(19): siRNA sense strand
cuauggagcucauugguaa

SEQ ID NO: 1300693 - RNA, 19 nt, Homo sapiens
  misc_RNA (1)...(19): siRNA sense strand
aaacacaccuuuagugaag

SEQ ID NO: 1300694 - RNA, 19 nt, Homo sapiens
  misc_RNA (1)...(19): siRNA sense strand
gaacuuaaaggaucaguag

SEQ ID NO: 1300695 - RNA, 19 nt, Homo sapiens
  misc_RNA (1)...(19): siRNA sense strand
gaaaacagauaucaggauu

SEQ ID NO: 1300696 - RNA, 19 nt, Homo sapiens
  misc_RNA (1)...(19): siRNA sense strand
uaaaggaucaguagcaauu

SEQ ID NO: 1300697 - RNA, 19 nt, Homo sapiens
  misc_RNA (1)...(19): siRNA sense strand
aaaugggacuuacgaguuu

SEQ ID NO: 1300698 - RNA, 19 nt, Homo sapiens
  misc_RNA (1)...(19): siRNA sense strand
guuaucagaugcacuuuau

SEQ ID NO: 1300699 - RNA, 19 nt, Homo sapiens
  misc_RNA (1)...(19): siRNA sense strand
ugagauuggugaacgagua

SEQ ID NO: 1300700 - RNA, 19 nt, Homo sapiens
  misc_RNA (1)...(19): siRNA sense strand
gugaacgaguagauuauaa

SEQ ID NO: 1300701 - RNA, 19 nt, Homo sapiens
  misc_RNA (1)...(19): siRNA sense strand
gagagagcacgauuuauug

SEQ ID NO: 1300702 - RNA, 19 nt, Homo sapiens
  misc_RNA (1)...(19): siRNA sense strand
caaaugggacuuacgaguu

SEQ ID NO: 1300703 - RNA, 19 nt, Homo sapiens
  misc_RNA (1)...(19): siRNA sense strand
ggucauugcugugauuguu

SEQ ID NO: 1300704 - RNA, 19 nt, Homo sapiens
  misc_RNA (1)...(19): siRNA sense strand
ccagauccauuuucacuua

SEQ ID NO: 1300705 - RNA, 19 nt, Homo sapiens
  misc_RNA (1)...(19): siRNA sense strand
gaaggaauacuugacaguu

SEQ ID NO: 1300706 - RNA, 19 nt, Homo sapiens
  misc_RNA (1)...(19): siRNA sense strand
aaggaauacuugacaguuu

SEQ ID NO: 1300707 - RNA, 19 nt, Homo sapiens
  misc_RNA (1)...(19): siRNA sense strand
ucagaugacgccuguuaua

SEQ ID NO: 1300708 - RNA, 19 nt, Homo sapiens
  misc_RNA (1)...(19): siRNA sense strand
gaaaacacaccuuuaguga

SEQ ID NO: 1300709 - RNA, 19 nt, Homo sapiens
  misc_RNA (1)...(19): siRNA sense strand
gaugacgccuguuauagag

SEQ ID NO: 1300710 - RNA, 19 nt, Homo sapiens
  misc_RNA (1)...(19): siRNA sense strand
gagaaacauguccauauau

SEQ ID NO: 1300711 - RNA, 19 nt, Homo sapiens
  misc_RNA (1)...(19): siRNA sense strand
acgaguagauuauaagugu

SEQ ID NO: 1300712 - RNA, 19 nt, Homo sapiens
  misc_RNA (1)...(19): siRNA sense strand
cuacaaagcaacaguuaug

SEQ ID NO: 1300713 - RNA, 19 nt, Homo sapiens
  misc_RNA (1)...(19): siRNA sense strand
ccaccaacauuugaagcua

SEQ ID NO: 1300714 - RNA, 19 nt, Homo sapiens
  misc_RNA (1)...(19): siRNA sense strand
uauacgggauccuuuaaau

SEQ ID NO: 1300715 - RNA, 19 nt, Homo sapiens
  misc_RNA (1)...(19): siRNA sense strand
cgaguuugguuaucagaug

SEQ ID NO: 1300716 - RNA, 19 nt, Homo sapiens
  misc_RNA (1)...(19): siRNA sense strand
gaacgaguagauuauaagu

SEQ ID NO: 1300717 - RNA, 19 nt, Homo sapiens
  misc_RNA (1)...(19): siRNA sense strand
gugaggagccaccaacauu

SEQ ID NO: 1300718 - RNA, 19 nt, Homo sapiens
  misc_RNA (1)...(19): siRNA sense strand
gauggcagcgacacaauug

SEQ ID NO: 1300719 - RNA, 19 nt, Homo sapiens
  misc_RNA (1)...(19): siRNA sense strand
gcuauggagcucauuggua

SEQ ID NO: 1300720 - RNA, 19 nt, Homo sapiens
  misc_RNA (1)...(19): siRNA sense strand
gaggagccaccaacauuug

SEQ ID NO: 1300721 - RNA, 19 nt, Homo sapiens
  misc_RNA (1)...(19): siRNA sense strand
acacaccuuuagugaagua

SEQ ID NO: 1300722 - RNA, 19 nt, Homo sapiens
  misc_RNA (1)...(19): siRNA sense strand
ucucagaugacgccuguua

SEQ ID NO: 1300723 - RNA, 19 nt, Homo sapiens
  misc_RNA (1)...(19): siRNA sense strand
uagagaaacauguccauau

SEQ ID NO: 1300724 - RNA, 19 nt, Homo sapiens
  misc_RNA (1)...(19): siRNA sense strand
guuccaaagugucuuaaag

SEQ ID NO: 1300725 - RNA, 19 nt, Homo sapiens
  misc_RNA (1)...(19): siRNA sense strand
ggugaacgaguagauuaua

SEQ ID NO: 1300726 - RNA, 19 nt, Homo sapiens
  misc_RNA (1)...(19): siRNA sense strand
gaaguagaaguauuugagu

SEQ ID NO: 1300727 - RNA, 19 nt, Homo sapiens
  misc_RNA (1)...(19): siRNA sense strand
gaaacauguccauauauac

SEQ ID NO: 1300728 - RNA, 19 nt, Homo sapiens
  misc_RNA (1)...(19): siRNA sense strand
ugacgccuguuauagagaa

SEQ ID NO: 1300729 - RNA, 19 nt, Homo sapiens
  misc_RNA (1)...(19): siRNA sense strand
cgaguagauuauaagugua

SEQ ID NO: 1300730 - RNA, 19 nt, Homo sapiens
  misc_RNA (1)...(19): siRNA sense strand
gcacuuuauuuguaaugag

SEQ ID NO: 1300731 - RNA, 19 nt, Homo sapiens
  misc_RNA (1)...(19): siRNA sense strand
guagaaguauuugaguauc

SEQ ID NO: 1300732 - RNA, 19 nt, Homo sapiens
  misc_RNA (1)...(19): siRNA sense strand
guauuugaguaucuugaug

SEQ ID NO: 1300733 - RNA, 19 nt, Homo sapiens
  misc_RNA (1)...(19): siRNA sense strand
aggaauacuugacaguuug

SEQ ID NO: 1300734 - RNA, 19 nt, Homo sapiens
  misc_RNA (1)...(19): siRNA sense strand
ccaaaacccuacuaugaga

SEQ ID NO: 1300735 - RNA, 19 nt, Homo sapiens
  misc_RNA (1)...(19): siRNA sense strand
aguguaaaguggucaaaug

SEQ ID NO: 1300736 - RNA, 19 nt, Homo sapiens
  misc_RNA (1)...(19): siRNA sense strand
ccacccauacuauuuguga

SEQ ID NO: 1300737 - RNA, 19 nt, Homo sapiens
  misc_RNA (1)...(19): siRNA sense strand
caccaacauuugaagcuau

SEQ ID NO: 1300738 - RNA, 19 nt, Homo sapiens
  misc_RNA (1)...(19): siRNA sense strand
uuggagagagcacgauuua

SEQ ID NO: 1300739 - RNA, 19 nt, Homo sapiens
  misc_RNA (1)...(19): siRNA sense strand
gguuaucagaugcacuuua

SEQ ID NO: 1300740 - RNA, 19 nt, Homo sapiens
  misc_RNA (1)...(19): siRNA sense strand
ugaggagccaccaacauuu

SEQ ID NO: 1300741 - RNA, 19 nt, Homo sapiens
  misc_RNA (1)...(19): siRNA sense strand
ggaaggaauacuugacagu

SEQ ID NO: 1300742 - RNA, 19 nt, Homo sapiens
  misc_RNA (1)...(19): siRNA sense strand
gaggaaggaauacuugaca

SEQ ID NO: 1300743 - RNA, 19 nt, Homo sapiens
  misc_RNA (1)...(19): siRNA sense strand
ccaguuccaaagugucuua

SEQ ID NO: 1300744 - RNA, 19 nt, Homo sapiens
  misc_RNA (1)...(19): siRNA sense strand
ugaguaucuugaugcagua

SEQ ID NO: 1300745 - RNA, 19 nt, Homo sapiens
  misc_RNA (1)...(19): siRNA sense strand
caccuuuagugaaguagaa

SEQ ID NO: 1300746 - RNA, 19 nt, Homo sapiens
  misc_RNA (1)...(19): siRNA sense strand
acagauaucaggauuugga

SEQ ID NO: 1300747 - RNA, 19 nt, Homo sapiens
  misc_RNA (1)...(19): siRNA sense strand
ucauugcugugauuguuau

SEQ ID NO: 1300748 - RNA, 19 nt, Homo sapiens
  misc_RNA (1)...(19): siRNA sense strand
ucagaugcacuuuauuugu

SEQ ID NO: 1300749 - RNA, 19 nt, Homo sapiens
  misc_RNA (1)...(19): siRNA sense strand
gugcugcuccagaguguaa

SEQ ID NO: 1300750 - RNA, 19 nt, Homo sapiens
  misc_RNA (1)...(19): siRNA sense strand
ggaaaacacaccuuuagug

SEQ ID NO: 1300751 - RNA, 19 nt, Homo sapiens
  misc_RNA (1)...(19): siRNA sense strand
aaggaucaguagcaauuug

SEQ ID NO: 1300752 - RNA, 19 nt, Homo sapiens
  misc_RNA (1)...(19): siRNA sense strand
uauauacgggauccuuuaa

SEQ ID NO: 1300753 - RNA, 19 nt, Homo sapiens
  misc_RNA (1)...(19): siRNA sense strand
ugaaguagaaguauuugag

SEQ ID NO: 1300754 - RNA, 19 nt, Homo sapiens
  misc_RNA (1)...(19): siRNA sense strand
cuugacaguuuggauguuu

SEQ ID NO: 1300755 - RNA, 19 nt, Homo sapiens
  misc_RNA (1)...(19): siRNA sense strand
cauauauacgggauccuuu

SEQ ID NO: 1300756 - RNA, 19 nt, Homo sapiens
  misc_RNA (1)...(19): siRNA sense strand
auauauacgggauccuuua

SEQ ID NO: 1300757 - RNA, 19 nt, Homo sapiens
  misc_RNA (1)...(19): siRNA sense strand
cuuaaaggaucaguagcaa

SEQ ID NO: 1300758 - RNA, 19 nt, Homo sapiens
  misc_RNA (1)...(19): siRNA sense strand
uaaaccugaggaaggaaua

SEQ ID NO: 1300759 - RNA, 19 nt, Homo sapiens
  misc_RNA (1)...(19): siRNA sense strand
agaugacgccuguuauaga

SEQ ID NO: 1300760 - RNA, 19 nt, Homo sapiens
  misc_RNA (1)...(19): siRNA sense strand
ugugauuguuauugccaua

SEQ ID NO: 1300761 - RNA, 19 nt, Homo sapiens
  misc_RNA (1)...(19): siRNA sense strand
gagagcacgauuuauugug

SEQ ID NO: 1300762 - RNA, 19 nt, Homo sapiens
  misc_RNA (1)...(19): siRNA sense strand
gaaguauuugaguaucuug

SEQ ID NO: 1300763 - RNA, 19 nt, Homo sapiens
  misc_RNA (1)...(19): siRNA sense strand
ggcuaccugucucagauga

SEQ ID NO: 1300764 - RNA, 19 nt, Homo sapiens
  misc_RNA (1)...(19): siRNA sense strand
gauaucaggauuuggaaaa

SEQ ID NO: 1300765 - RNA, 19 nt, Homo sapiens
  misc_RNA (1)...(19): siRNA sense strand
ccucuugccacccauacua

SEQ ID NO: 1300766 - RNA, 19 nt, Homo sapiens
  misc_RNA (1)...(19): siRNA sense strand
ccaugguguugcugcugua

SEQ ID NO: 1300767 - RNA, 19 nt, Homo sapiens
  misc_RNA (1)...(19): siRNA sense strand
cagaugacgccuguuauag

SEQ ID NO: 1300768 - RNA, 19 nt, Homo sapiens
  misc_RNA (1)...(19): siRNA sense strand
uuggugaacgaguagauua

SEQ ID NO: 1300769 - RNA, 19 nt, Homo sapiens
  misc_RNA (1)...(19): siRNA sense strand
gucauugcugugauuguua

SEQ ID NO: 1300770 - RNA, 19 nt, Homo sapiens
  misc_RNA (1)...(19): siRNA sense strand
ggagccaccaacauuugaa

SEQ ID NO: 1300771 - RNA, 19 nt, Homo sapiens
  misc_RNA (1)...(19): siRNA sense strand
gcgcuuuccuggguugcuu

SEQ ID NO: 1300772 - RNA, 19 nt, Homo sapiens
  misc_RNA (1)...(19): siRNA sense strand
uacuacaaagcaacaguua

SEQ ID NO: 1300773 - RNA, 19 nt, Homo sapiens
  misc_RNA (1)...(19): siRNA sense strand
cuugaugcaguaacuuaua

SEQ ID NO: 1300774 - RNA, 19 nt, Homo sapiens
  misc_RNA (1)...(19): siRNA sense strand
aaacauguccauauauacg

SEQ ID NO: 1300775 - RNA, 19 nt, Homo sapiens
  misc_RNA (1)...(19): siRNA sense strand
guguaaaguggucaaaugu

SEQ ID NO: 1300776 - RNA, 19 nt, Homo sapiens
  misc_RNA (1)...(19): siRNA sense strand
cuuacgaguuugguuauca

SEQ ID NO: 1300777 - RNA, 19 nt, Homo sapiens
  misc_RNA (1)...(19): siRNA sense strand
uacgggauccuuuaaaugg

SEQ ID NO: 1300778 - RNA, 19 nt, Homo sapiens
  misc_RNA (1)...(19): siRNA sense strand
aaccaaaacccuacuauga

SEQ ID NO: 1300779 - RNA, 19 nt, Homo sapiens
  misc_RNA (1)...(19): siRNA sense strand
cccaauaugugaaaagguu

SEQ ID NO: 1300780 - RNA, 19 nt, Homo sapiens
  misc_RNA (1)...(19): siRNA sense strand
cgauggcagcgacacaauu

SEQ ID NO: 1300781 - RNA, 19 nt, Homo sapiens
  misc_RNA (1)...(19): siRNA sense strand
gauccauuuucacuuauug

SEQ ID NO: 1300782 - RNA, 19 nt, Homo sapiens
  misc_RNA (1)...(19): siRNA sense strand
uugaugcaguaacuuauag

SEQ ID NO: 1300783 - RNA, 19 nt, Homo sapiens
  misc_RNA (1)...(19): siRNA sense strand
guaucuugaugcaguaacu

SEQ ID NO: 1300784 - RNA, 19 nt, Homo sapiens
  misc_RNA (1)...(19): siRNA sense strand
caacauuugaagcuaugga

SEQ ID NO: 1300785 - RNA, 19 nt, Homo sapiens
  misc_RNA (1)...(19): siRNA sense strand
gagauuggugaacgaguag

SEQ ID NO: 1300786 - RNA, 19 nt, Homo sapiens
  misc_RNA (1)...(19): siRNA sense strand
ggagagagcacgauuuauu

SEQ ID NO: 1300787 - RNA, 19 nt, Homo sapiens
  misc_RNA (1)...(19): siRNA sense strand
agagaaacauguccauaua

SEQ ID NO: 1300788 - RNA, 19 nt, Homo sapiens
  misc_RNA (1)...(19): siRNA sense strand
cagaugcacuuuauuugua

SEQ ID NO: 1300789 - RNA, 19 nt, Homo sapiens
  misc_RNA (1)...(19): siRNA sense strand
ggacuuacgaguuugguua

SEQ ID NO: 1300790 - RNA, 19 nt, Homo sapiens
  misc_RNA (1)...(19): siRNA sense strand
aaacagauaucaggauuug

SEQ ID NO: 1300791 - RNA, 19 nt, Homo sapiens
  misc_RNA (1)...(19): siRNA sense strand
cuauggagcucauugguaa

SEQ ID NO: 1300792 - RNA, 19 nt, Homo sapiens
  misc_RNA (1)...(19): siRNA sense strand
aaacacaccuuuagugaag

SEQ ID NO: 1300793 - RNA, 19 nt, Homo sapiens
  misc_RNA (1)...(19): siRNA sense strand
gaacuuaaaggaucaguag

SEQ ID NO: 1300794 - RNA, 19 nt, Homo sapiens
  misc_RNA (1)...(19): siRNA sense strand
gaaaacagauaucaggauu

SEQ ID NO: 1300795 - RNA, 19 nt, Homo sapiens
  misc_RNA (1)...(19): siRNA sense strand
uaaaggaucaguagcaauu

SEQ ID NO: 1300796 - RNA, 19 nt, Homo sapiens
  misc_RNA (1)...(19): siRNA sense strand
aaaugggacuuacgaguuu

SEQ ID NO: 1300797 - RNA, 19 nt, Homo sapiens
  misc_RNA (1)...(19): siRNA sense strand
guuaucagaugcacuuuau

SEQ ID NO: 1300798 - RNA, 19 nt, Homo sapiens
  misc_RNA (1)...(19): siRNA sense strand
gagcugaauaugccacuua

SEQ ID NO: 1300799 - RNA, 19 nt, Homo sapiens
  misc_RNA (1)...(19): siRNA sense strand
gagcagagaggcugaauag

SEQ ID NO: 1300800 - RNA, 19 nt, Homo sapiens
  misc_RNA (1)...(19): siRNA sense strand
ugagauuggugaacgagua

SEQ ID NO: 1300801 - RNA, 19 nt, Homo sapiens
  misc_RNA (1)...(19): siRNA sense strand
gugaacgaguagauuauaa

SEQ ID NO: 1300802 - RNA, 19 nt, Homo sapiens
  misc_RNA (1)...(19): siRNA sense strand
gagagagcacgauuuauug

SEQ ID NO: 1300803 - RNA, 19 nt, Homo sapiens
  misc_RNA (1)...(19): siRNA sense strand
caaaugggacuuacgaguu

SEQ ID NO: 1300804 - RNA, 19 nt, Homo sapiens
  misc_RNA (1)...(19): siRNA sense strand
ggucauugcugugauuguu

SEQ ID NO: 1300805 - RNA, 19 nt, Homo sapiens
  misc_RNA (1)...(19): siRNA sense strand
ccagauccauuuucacuua

SEQ ID NO: 1300806 - RNA, 19 nt, Homo sapiens
  misc_RNA (1)...(19): siRNA sense strand
gaaggaauacuugacaguu

SEQ ID NO: 1300807 - RNA, 19 nt, Homo sapiens
  misc_RNA (1)...(19): siRNA sense strand
aaggaauacuugacaguuu

SEQ ID NO: 1300808 - RNA, 19 nt, Homo sapiens
  misc_RNA (1)...(19): siRNA sense strand
ucagaugacgccuguuaua

SEQ ID NO: 1300809 - RNA, 19 nt, Homo sapiens
  misc_RNA (1)...(19): siRNA sense strand
gaaaacacaccuuuaguga

SEQ ID NO: 1300810 - RNA, 19 nt, Homo sapiens
  misc_RNA (1)...(19): siRNA sense strand
gaugacgccuguuauagag

SEQ ID NO: 1300811 - RNA, 19 nt, Homo sapiens
  misc_RNA (1)...(19): siRNA sense strand
gagaaacauguccauauau

SEQ ID NO: 1300812 - RNA, 19 nt, Homo sapiens
  misc_RNA (1)...(19): siRNA sense strand
ccacuuaccagacuaaauc

SEQ ID NO: 1300813 - RNA, 19 nt, Homo sapiens
  misc_RNA (1)...(19): siRNA sense strand
acgaguagauuauaagugu

SEQ ID NO: 1300814 - RNA, 19 nt, Homo sapiens
  misc_RNA (1)...(19): siRNA sense strand
cuacaaagcaacaguuaug

SEQ ID NO: 1300815 - RNA, 19 nt, Homo sapiens
  misc_RNA (1)...(19): siRNA sense strand
ccaccaacauuugaagcua

SEQ ID NO: 1300816 - RNA, 19 nt, Homo sapiens
  misc_RNA (1)...(19): siRNA sense strand
uauacgggauccuuuaaau

SEQ ID NO: 1300817 - RNA, 19 nt, Homo sapiens
  misc_RNA (1)...(19): siRNA sense strand
cgaguuugguuaucagaug

SEQ ID NO: 1300818 - RNA, 19 nt, Homo sapiens
  misc_RNA (1)...(19): siRNA sense strand
gaacgaguagauuauaagu

SEQ ID NO: 1300819 - RNA, 19 nt, Homo sapiens
  misc_RNA (1)...(19): siRNA sense strand
gugaggagccaccaacauu

SEQ ID NO: 1300820 - RNA, 19 nt, Homo sapiens
  misc_RNA (1)...(19): siRNA sense strand
gauggcagcgacacaauug

SEQ ID NO: 1300821 - RNA, 19 nt, Homo sapiens
  misc_RNA (1)...(19): siRNA sense strand
ucucagaugacgccuguua

SEQ ID NO: 1300822 - RNA, 19 nt, Homo sapiens
  misc_RNA (1)...(19): siRNA sense strand
acacaccuuuagugaagua

SEQ ID NO: 1300823 - RNA, 19 nt, Homo sapiens
  misc_RNA (1)...(19): siRNA sense strand
gcuauggagcucauuggua

SEQ ID NO: 1300824 - RNA, 19 nt, Homo sapiens
  misc_RNA (1)...(19): siRNA sense strand
gaggagccaccaacauuug

SEQ ID NO: 1300825 - RNA, 19 nt, Homo sapiens
  misc_RNA (1)...(19): siRNA sense strand
uagagaaacauguccauau

SEQ ID NO: 1300826 - RNA, 19 nt, Homo sapiens
  misc_RNA (1)...(19): siRNA sense strand
ggugaacgaguagauuaua

SEQ ID NO: 1300827 - RNA, 19 nt, Homo sapiens
  misc_RNA (1)...(19): siRNA sense strand
gaaguagaaguauuugagu

SEQ ID NO: 1300828 - RNA, 19 nt, Homo sapiens
  misc_RNA (1)...(19): siRNA sense strand
gaaacauguccauauauac

SEQ ID NO: 1300829 - RNA, 19 nt, Homo sapiens
  misc_RNA (1)...(19): siRNA sense strand
ugacgccuguuauagagaa

SEQ ID NO: 1300830 - RNA, 19 nt, Homo sapiens
  misc_RNA (1)...(19): siRNA sense strand
cgaguagauuauaagugua

SEQ ID NO: 1300831 - RNA, 19 nt, Homo sapiens
  misc_RNA (1)...(19): siRNA sense strand
gcacuuuauuuguaaugag

SEQ ID NO: 1300832 - RNA, 19 nt, Homo sapiens
  misc_RNA (1)...(19): siRNA sense strand
guagaaguauuugaguauc

SEQ ID NO: 1300833 - RNA, 19 nt, Homo sapiens
  misc_RNA (1)...(19): siRNA sense strand
guauuugaguaucuugaug

SEQ ID NO: 1300834 - RNA, 19 nt, Homo sapiens
  misc_RNA (1)...(19): siRNA sense strand
aggaauacuugacaguuug

SEQ ID NO: 1300835 - RNA, 19 nt, Homo sapiens
  misc_RNA (1)...(19): siRNA sense strand
ccaaaacccuacuaugaga

SEQ ID NO: 1300836 - RNA, 19 nt, Homo sapiens
  misc_RNA (1)...(19): siRNA sense strand
aguguaaaguggucaaaug

SEQ ID NO: 1300837 - RNA, 19 nt, Homo sapiens
  misc_RNA (1)...(19): siRNA sense strand
ccacccauacuauuuguga

SEQ ID NO: 1300838 - RNA, 19 nt, Homo sapiens
  misc_RNA (1)...(19): siRNA sense strand
uuggagagagcacgauuua

SEQ ID NO: 1300839 - RNA, 19 nt, Homo sapiens
  misc_RNA (1)...(19): siRNA sense strand
gguuaucagaugcacuuua

SEQ ID NO: 1300840 - RNA, 19 nt, Homo sapiens
  misc_RNA (1)...(19): siRNA sense strand
caccaacauuugaagcuau

SEQ ID NO: 1300841 - RNA, 19 nt, Homo sapiens
  misc_RNA (1)...(19): siRNA sense strand
ugaggagccaccaacauuu

SEQ ID NO: 1300842 - RNA, 19 nt, Homo sapiens
  misc_RNA (1)...(19): siRNA sense strand
ggaaggaauacuugacagu

SEQ ID NO: 1300843 - RNA, 19 nt, Homo sapiens
  misc_RNA (1)...(19): siRNA sense strand
gaggaaggaauacuugaca

SEQ ID NO: 1300844 - RNA, 19 nt, Homo sapiens
  misc_RNA (1)...(19): siRNA sense strand
ugaguaucuugaugcagua

SEQ ID NO: 1300845 - RNA, 19 nt, Homo sapiens
  misc_RNA (1)...(19): siRNA sense strand
caccuuuagugaaguagaa

SEQ ID NO: 1300846 - RNA, 19 nt, Homo sapiens
  misc_RNA (1)...(19): siRNA sense strand
acagauaucaggauuugga

SEQ ID NO: 1300847 - RNA, 19 nt, Homo sapiens
  misc_RNA (1)...(19): siRNA sense strand
ucauugcugugauuguuau

SEQ ID NO: 1300848 - RNA, 19 nt, Homo sapiens
  misc_RNA (1)...(19): siRNA sense strand
ucagaugcacuuuauuugu

SEQ ID NO: 1300849 - RNA, 19 nt, Homo sapiens
  misc_RNA (1)...(19): siRNA sense strand
gugcugcuccagaguguaa

SEQ ID NO: 1300850 - RNA, 19 nt, Homo sapiens
  misc_RNA (1)...(19): siRNA sense strand
ggaaaacacaccuuuagug

SEQ ID NO: 1300851 - RNA, 19 nt, Homo sapiens
  misc_RNA (1)...(19): siRNA sense strand
aaggaucaguagcaauuug

SEQ ID NO: 1300852 - RNA, 19 nt, Homo sapiens
  misc_RNA (1)...(19): siRNA sense strand
uauauacgggauccuuuaa

SEQ ID NO: 1300853 - RNA, 19 nt, Homo sapiens
  misc_RNA (1)...(19): siRNA sense strand
ugaaguagaaguauuugag

SEQ ID NO: 1300854 - RNA, 19 nt, Homo sapiens
  misc_RNA (1)...(19): siRNA sense strand
cuugacaguuuggauguuu

SEQ ID NO: 1300855 - RNA, 19 nt, Homo sapiens
  misc_RNA (1)...(19): siRNA sense strand
cauauauacgggauccuuu

SEQ ID NO: 1300856 - RNA, 19 nt, Homo sapiens
  misc_RNA (1)...(19): siRNA sense strand
auauauacgggauccuuua

SEQ ID NO: 1300857 - RNA, 19 nt, Homo sapiens
  misc_RNA (1)...(19): siRNA sense strand
cuuaaaggaucaguagcaa

SEQ ID NO: 1300858 - RNA, 19 nt, Homo sapiens
  misc_RNA (1)...(19): siRNA sense strand
uaaaccugaggaaggaaua

SEQ ID NO: 1300859 - RNA, 19 nt, Homo sapiens
  misc_RNA (1)...(19): siRNA sense strand
agaugacgccuguuauaga

SEQ ID NO: 1300860 - RNA, 19 nt, Homo sapiens
  misc_RNA (1)...(19): siRNA sense strand
ugugauuguuauugccaua

SEQ ID NO: 1300861 - RNA, 19 nt, Homo sapiens
  misc_RNA (1)...(19): siRNA sense strand
gagagcacgauuuauugug

SEQ ID NO: 1300862 - RNA, 19 nt, Homo sapiens
  misc_RNA (1)...(19): siRNA sense strand
gaaguauuugaguaucuug

SEQ ID NO: 1300863 - RNA, 19 nt, Homo sapiens
  misc_RNA (1)...(19): siRNA sense strand
ggcuaccugucucagauga

SEQ ID NO: 1300864 - RNA, 19 nt, Homo sapiens
  misc_RNA (1)...(19): siRNA sense strand
gauaucaggauuuggaaaa

SEQ ID NO: 1300865 - RNA, 19 nt, Homo sapiens
  misc_RNA (1)...(19): siRNA sense strand
ccucuugccacccauacua

SEQ ID NO: 1300866 - RNA, 19 nt, Homo sapiens
  misc_RNA (1)...(19): siRNA sense strand
ccaugguguugcugcugua

SEQ ID NO: 1300867 - RNA, 19 nt, Homo sapiens
  misc_RNA (1)...(19): siRNA sense strand
cagaugacgccuguuauag

SEQ ID NO: 1300868 - RNA, 19 nt, Homo sapiens
  misc_RNA (1)...(19): siRNA sense strand
cagaugguggagcugaaua

SEQ ID NO: 1300869 - RNA, 19 nt, Homo sapiens
  misc_RNA (1)...(19): siRNA sense strand
gucauugcugugauuguua

SEQ ID NO: 1300870 - RNA, 19 nt, Homo sapiens
  misc_RNA (1)...(19): siRNA sense strand
ggagccaccaacauuugaa

SEQ ID NO: 1300871 - RNA, 19 nt, Homo sapiens
  misc_RNA (1)...(19): siRNA sense strand
uuggugaacgaguagauua

SEQ ID NO: 1300872 - RNA, 19 nt, Homo sapiens
  misc_RNA (1)...(19): siRNA sense strand
gcgcuuuccuggguugcuu

SEQ ID NO: 1300873 - RNA, 19 nt, Homo sapiens
  misc_RNA (1)...(19): siRNA sense strand
uacuacaaagcaacaguua

SEQ ID NO: 1300874 - RNA, 19 nt, Homo sapiens
  misc_RNA (1)...(19): siRNA sense strand
cuugaugcaguaacuuaua

SEQ ID NO: 1300875 - RNA, 19 nt, Homo sapiens
  misc_RNA (1)...(19): siRNA sense strand
aaacauguccauauauacg

SEQ ID NO: 1300876 - RNA, 19 nt, Homo sapiens
  misc_RNA (1)...(19): siRNA sense strand
guguaaaguggucaaaugu

SEQ ID NO: 1300877 - RNA, 19 nt, Homo sapiens
  misc_RNA (1)...(19): siRNA sense strand
cuuacgaguuugguuauca

SEQ ID NO: 1300878 - RNA, 19 nt, Homo sapiens
  misc_RNA (1)...(19): siRNA sense strand
uacgggauccuuuaaaugg

SEQ ID NO: 1300879 - RNA, 19 nt, Homo sapiens
  misc_RNA (1)...(19): siRNA sense strand
gcagaugguggagcugaau

SEQ ID NO: 1300880 - RNA, 19 nt, Homo sapiens
  misc_RNA (1)...(19): siRNA sense strand
aaccaaaacccuacuauga

SEQ ID NO: 1300881 - RNA, 19 nt, Homo sapiens
  misc_RNA (1)...(19): siRNA sense strand
uugaugcaguaacuuauag

SEQ ID NO: 1300882 - RNA, 19 nt, Homo sapiens
  misc_RNA (1)...(19): siRNA sense strand
ggagcugaauaugccacuu

SEQ ID NO: 1300883 - RNA, 19 nt, Homo sapiens
  misc_RNA (1)...(19): siRNA sense strand
caacauuugaagcuaugga

SEQ ID NO: 1300884 - RNA, 19 nt, Homo sapiens
  misc_RNA (1)...(19): siRNA sense strand
cgauggcagcgacacaauu

SEQ ID NO: 1300885 - RNA, 19 nt, Homo sapiens
  misc_RNA (1)...(19): siRNA sense strand
gauccauuuucacuuauug

SEQ ID NO: 1300886 - RNA, 19 nt, Homo sapiens
  misc_RNA (1)...(19): siRNA sense strand
ggagagagcacgauuuauu

SEQ ID NO: 1300887 - RNA, 19 nt, Homo sapiens
  misc_RNA (1)...(19): siRNA sense strand
agagaaacauguccauaua

SEQ ID NO: 1300888 - RNA, 19 nt, Homo sapiens
  misc_RNA (1)...(19): siRNA sense strand
cagaugcacuuuauuugua

SEQ ID NO: 1300889 - RNA, 19 nt, Homo sapiens
  misc_RNA (1)...(19): siRNA sense strand
ggacuuacgaguuugguua

SEQ ID NO: 1300890 - RNA, 19 nt, Homo sapiens
  misc_RNA (1)...(19): siRNA sense strand
aaacagauaucaggauuug

SEQ ID NO: 1300891 - RNA, 19 nt, Homo sapiens
  misc_RNA (1)...(19): siRNA sense strand
cuauggagcucauugguaa

SEQ ID NO: 1300892 - RNA, 19 nt, Homo sapiens
  misc_RNA (1)...(19): siRNA sense strand
aaacacaccuuuagugaag

SEQ ID NO: 1300893 - RNA, 19 nt, Homo sapiens
  misc_RNA (1)...(19): siRNA sense strand
gaacuuaaaggaucaguag

SEQ ID NO: 1300894 - RNA, 19 nt, Homo sapiens
  misc_RNA (1)...(19): siRNA sense strand
gaaaacagauaucaggauu

SEQ ID NO: 1300895 - RNA, 19 nt, Homo sapiens
  misc_RNA (1)...(19): siRNA sense strand
uaaaggaucaguagcaauu

SEQ ID NO: 1300896 - RNA, 19 nt, Homo sapiens
  misc_RNA (1)...(19): siRNA sense strand
aaaugggacuuacgaguuu

SEQ ID NO: 1300897 - RNA, 19 nt, Homo sapiens
  misc_RNA (1)...(19): siRNA sense strand
guuaucagaugcacuuuau

SEQ ID NO: 1300898 - RNA, 19 nt, Homo sapiens
  misc_RNA (1)...(19): siRNA sense strand
gagcugaauaugccacuua

SEQ ID NO: 1300899 - RNA, 19 nt, Homo sapiens
  misc_RNA (1)...(19): siRNA sense strand
ugagauuggugaacgagua

SEQ ID NO: 1300900 - RNA, 19 nt, Homo sapiens
  misc_RNA (1)...(19): siRNA sense strand
gugaacgaguagauuauaa

SEQ ID NO: 1300901 - RNA, 19 nt, Homo sapiens
  misc_RNA (1)...(19): siRNA sense strand
gagagagcacgauuuauug

SEQ ID NO: 1300902 - RNA, 19 nt, Homo sapiens
  misc_RNA (1)...(19): siRNA sense strand
caaaugggacuuacgaguu

SEQ ID NO: 1300903 - RNA, 19 nt, Homo sapiens
  misc_RNA (1)...(19): siRNA sense strand
ggucauugcugugauuguu

SEQ ID NO: 1300904 - RNA, 19 nt, Homo sapiens
  misc_RNA (1)...(19): siRNA sense strand
ccagauccauuuucacuua

SEQ ID NO: 1300905 - RNA, 19 nt, Homo sapiens
  misc_RNA (1)...(19): siRNA sense strand
gaaggaauacuugacaguu

SEQ ID NO: 1300906 - RNA, 19 nt, Homo sapiens
  misc_RNA (1)...(19): siRNA sense strand
aaggaauacuugacaguuu

SEQ ID NO: 1300907 - RNA, 19 nt, Homo sapiens
  misc_RNA (1)...(19): siRNA sense strand
ucagaugacgccuguuaua

SEQ ID NO: 1300908 - RNA, 19 nt, Homo sapiens
  misc_RNA (1)...(19): siRNA sense strand
gaaaacacaccuuuaguga

SEQ ID NO: 1300909 - RNA, 19 nt, Homo sapiens
  misc_RNA (1)...(19): siRNA sense strand
gaugacgccuguuauagag

SEQ ID NO: 1300910 - RNA, 19 nt, Homo sapiens
  misc_RNA (1)...(19): siRNA sense strand
gagaaacauguccauauau

SEQ ID NO: 1300911 - RNA, 19 nt, Homo sapiens
  misc_RNA (1)...(19): siRNA sense strand
ccacuuaccagacuaaauc

SEQ ID NO: 1300912 - RNA, 19 nt, Homo sapiens
  misc_RNA (1)...(19): siRNA sense strand
acgaguagauuauaagugu

SEQ ID NO: 1300913 - RNA, 19 nt, Homo sapiens
  misc_RNA (1)...(19): siRNA sense strand
cuacaaagcaacaguuaug

SEQ ID NO: 1300914 - RNA, 19 nt, Homo sapiens
  misc_RNA (1)...(19): siRNA sense strand
ccaccaacauuugaagcua

SEQ ID NO: 1300915 - RNA, 19 nt, Homo sapiens
  misc_RNA (1)...(19): siRNA sense strand
uauacgggauccuuuaaau

SEQ ID NO: 1300916 - RNA, 19 nt, Homo sapiens
  misc_RNA (1)...(19): siRNA sense strand
cgaguuugguuaucagaug

SEQ ID NO: 1300917 - RNA, 19 nt, Homo sapiens
  misc_RNA (1)...(19): siRNA sense strand
gaacgaguagauuauaagu

SEQ ID NO: 1300918 - RNA, 19 nt, Homo sapiens
  misc_RNA (1)...(19): siRNA sense strand
gugaggagccaccaacauu

SEQ ID NO: 1300919 - RNA, 19 nt, Homo sapiens
  misc_RNA (1)...(19): siRNA sense strand
gauggcagcgacacaauug

SEQ ID NO: 1300920 - RNA, 19 nt, Homo sapiens
  misc_RNA (1)...(19): siRNA sense strand
ucucagaugacgccuguua

SEQ ID NO: 1300921 - RNA, 19 nt, Homo sapiens
  misc_RNA (1)...(19): siRNA sense strand
gaggagccaccaacauuug

SEQ ID NO: 1300922 - RNA, 19 nt, Homo sapiens
  misc_RNA (1)...(19): siRNA sense strand
gcuauggagcucauuggua

SEQ ID NO: 1300923 - RNA, 19 nt, Homo sapiens
  misc_RNA (1)...(19): siRNA sense strand
acacaccuuuagugaagua

SEQ ID NO: 1300924 - RNA, 19 nt, Homo sapiens
  misc_RNA (1)...(19): siRNA sense strand
uagagaaacauguccauau

SEQ ID NO: 1300925 - RNA, 19 nt, Homo sapiens
  misc_RNA (1)...(19): siRNA sense strand
guuccaaagugucuuaaag

SEQ ID NO: 1300926 - RNA, 19 nt, Homo sapiens
  misc_RNA (1)...(19): siRNA sense strand
ggugaacgaguagauuaua

SEQ ID NO: 1300927 - RNA, 19 nt, Homo sapiens
  misc_RNA (1)...(19): siRNA sense strand
gaaguagaaguauuugagu

SEQ ID NO: 1300928 - RNA, 19 nt, Homo sapiens
  misc_RNA (1)...(19): siRNA sense strand
gaaacauguccauauauac

SEQ ID NO: 1300929 - RNA, 19 nt, Homo sapiens
  misc_RNA (1)...(19): siRNA sense strand
ugacgccuguuauagagaa

SEQ ID NO: 1300930 - RNA, 19 nt, Homo sapiens
  misc_RNA (1)...(19): siRNA sense strand
cgaguagauuauaagugua

SEQ ID NO: 1300931 - RNA, 19 nt, Homo sapiens
  misc_RNA (1)...(19): siRNA sense strand
gcacuuuauuuguaaugag

SEQ ID NO: 1300932 - RNA, 19 nt, Homo sapiens
  misc_RNA (1)...(19): siRNA sense strand
guagaaguauuugaguauc

SEQ ID NO: 1300933 - RNA, 19 nt, Homo sapiens
  misc_RNA (1)...(19): siRNA sense strand
guauuugaguaucuugaug

SEQ ID NO: 1300934 - RNA, 19 nt, Homo sapiens
  misc_RNA (1)...(19): siRNA sense strand
aggaauacuugacaguuug

SEQ ID NO: 1300935 - RNA, 19 nt, Homo sapiens
  misc_RNA (1)...(19): siRNA sense strand
ccaaaacccuacuaugaga

SEQ ID NO: 1300936 - RNA, 19 nt, Homo sapiens
  misc_RNA (1)...(19): siRNA sense strand
aguguaaaguggucaaaug

SEQ ID NO: 1300937 - RNA, 19 nt, Homo sapiens
  misc_RNA (1)...(19): siRNA sense strand
ccacccauacuauuuguga

SEQ ID NO: 1300938 - RNA, 19 nt, Homo sapiens
  misc_RNA (1)...(19): siRNA sense strand
uuggagagagcacgauuua

SEQ ID NO: 1300939 - RNA, 19 nt, Homo sapiens
  misc_RNA (1)...(19): siRNA sense strand
gguuaucagaugcacuuua

SEQ ID NO: 1300940 - RNA, 19 nt, Homo sapiens
  misc_RNA (1)...(19): siRNA sense strand
caccaacauuugaagcuau

SEQ ID NO: 1300941 - RNA, 19 nt, Homo sapiens
  misc_RNA (1)...(19): siRNA sense strand
ugaggagccaccaacauuu

SEQ ID NO: 1300942 - RNA, 19 nt, Homo sapiens
  misc_RNA (1)...(19): siRNA sense strand
ggaaggaauacuugacagu

SEQ ID NO: 1300943 - RNA, 19 nt, Homo sapiens
  misc_RNA (1)...(19): siRNA sense strand
gaggaaggaauacuugaca

SEQ ID NO: 1300944 - RNA, 19 nt, Homo sapiens
  misc_RNA (1)...(19): siRNA sense strand
ccaguuccaaagugucuua

SEQ ID NO: 1300945 - RNA, 19 nt, Homo sapiens
  misc_RNA (1)...(19): siRNA sense strand
ugaguaucuugaugcagua

SEQ ID NO: 1300946 - RNA, 19 nt, Homo sapiens
  misc_RNA (1)...(19): siRNA sense strand
caccuuuagugaaguagaa

SEQ ID NO: 1300947 - RNA, 19 nt, Homo sapiens
  misc_RNA (1)...(19): siRNA sense strand
acagauaucaggauuugga

SEQ ID NO: 1300948 - RNA, 19 nt, Homo sapiens
  misc_RNA (1)...(19): siRNA sense strand
ucauugcugugauuguuau

SEQ ID NO: 1300949 - RNA, 19 nt, Homo sapiens
  misc_RNA (1)...(19): siRNA sense strand
ucagaugcacuuuauuugu

SEQ ID NO: 1300950 - RNA, 19 nt, Homo sapiens
  misc_RNA (1)...(19): siRNA sense strand
gugcugcuccagaguguaa

SEQ ID NO: 1300951 - RNA, 19 nt, Homo sapiens
  misc_RNA (1)...(19): siRNA sense strand
ggaaaacacaccuuuagug

SEQ ID NO: 1300952 - RNA, 19 nt, Homo sapiens
  misc_RNA (1)...(19): siRNA sense strand
aaggaucaguagcaauuug

SEQ ID NO: 1300953 - RNA, 19 nt, Homo sapiens
  misc_RNA (1)...(19): siRNA sense strand
uauauacgggauccuuuaa

SEQ ID NO: 1300954 - RNA, 19 nt, Homo sapiens
  misc_RNA (1)...(19): siRNA sense strand
ugaaguagaaguauuugag

SEQ ID NO: 1300955 - RNA, 19 nt, Homo sapiens
  misc_RNA (1)...(19): siRNA sense strand
cuugacaguuuggauguuu

SEQ ID NO: 1300956 - RNA, 19 nt, Homo sapiens
  misc_RNA (1)...(19): siRNA sense strand
cauauauacgggauccuuu

SEQ ID NO: 1300957 - RNA, 19 nt, Homo sapiens
  misc_RNA (1)...(19): siRNA sense strand
auauauacgggauccuuua

SEQ ID NO: 1300958 - RNA, 19 nt, Homo sapiens
  misc_RNA (1)...(19): siRNA sense strand
cuuaaaggaucaguagcaa

SEQ ID NO: 1300959 - RNA, 19 nt, Homo sapiens
  misc_RNA (1)...(19): siRNA sense strand
uaaaccugaggaaggaaua

SEQ ID NO: 1300960 - RNA, 19 nt, Homo sapiens
  misc_RNA (1)...(19): siRNA sense strand
agaugacgccuguuauaga

SEQ ID NO: 1300961 - RNA, 19 nt, Homo sapiens
  misc_RNA (1)...(19): siRNA sense strand
ugugauuguuauugccaua

SEQ ID NO: 1300962 - RNA, 19 nt, Homo sapiens
  misc_RNA (1)...(19): siRNA sense strand
gagagcacgauuuauugug

SEQ ID NO: 1300963 - RNA, 19 nt, Homo sapiens
  misc_RNA (1)...(19): siRNA sense strand
gaaguauuugaguaucuug

SEQ ID NO: 1300964 - RNA, 19 nt, Homo sapiens
  misc_RNA (1)...(19): siRNA sense strand
ggcuaccugucucagauga

SEQ ID NO: 1300965 - RNA, 19 nt, Homo sapiens
  misc_RNA (1)...(19): siRNA sense strand
gauaucaggauuuggaaaa

SEQ ID NO: 1300966 - RNA, 19 nt, Homo sapiens
  misc_RNA (1)...(19): siRNA sense strand
ccucuugccacccauacua

SEQ ID NO: 1300967 - RNA, 19 nt, Homo sapiens
  misc_RNA (1)...(19): siRNA sense strand
ccaugguguugcugcugua

SEQ ID NO: 1300968 - RNA, 19 nt, Homo sapiens
  misc_RNA (1)...(19): siRNA sense strand
cagaugacgccuguuauag

SEQ ID NO: 1300969 - RNA, 19 nt, Homo sapiens
  misc_RNA (1)...(19): siRNA sense strand
cagaugguggagcugaaua

SEQ ID NO: 1300970 - RNA, 19 nt, Homo sapiens
  misc_RNA (1)...(19): siRNA sense strand
gucauugcugugauuguua

SEQ ID NO: 1300971 - RNA, 19 nt, Homo sapiens
  misc_RNA (1)...(19): siRNA sense strand
ggagccaccaacauuugaa

SEQ ID NO: 1300972 - RNA, 19 nt, Homo sapiens
  misc_RNA (1)...(19): siRNA sense strand
uuggugaacgaguagauua

SEQ ID NO: 1300973 - RNA, 19 nt, Homo sapiens
  misc_RNA (1)...(19): siRNA sense strand
gcgcuuuccuggguugcuu

SEQ ID NO: 1300974 - RNA, 19 nt, Homo sapiens
  misc_RNA (1)...(19): siRNA sense strand
uacuacaaagcaacaguua

SEQ ID NO: 1300975 - RNA, 19 nt, Homo sapiens
  misc_RNA (1)...(19): siRNA sense strand
cuugaugcaguaacuuaua

SEQ ID NO: 1300976 - RNA, 19 nt, Homo sapiens
  misc_RNA (1)...(19): siRNA sense strand
aaacauguccauauauacg

SEQ ID NO: 1300977 - RNA, 19 nt, Homo sapiens
  misc_RNA (1)...(19): siRNA sense strand
guguaaaguggucaaaugu

SEQ ID NO: 1300978 - RNA, 19 nt, Homo sapiens
  misc_RNA (1)...(19): siRNA sense strand
cuuacgaguuugguuauca

SEQ ID NO: 1300979 - RNA, 19 nt, Homo sapiens
  misc_RNA (1)...(19): siRNA sense strand
uacgggauccuuuaaaugg

SEQ ID NO: 1300980 - RNA, 19 nt, Homo sapiens
  misc_RNA (1)...(19): siRNA sense strand
gcagaugguggagcugaau

SEQ ID NO: 1300981 - RNA, 19 nt, Homo sapiens
  misc_RNA (1)...(19): siRNA sense strand
aaccaaaacccuacuauga

SEQ ID NO: 1300982 - RNA, 19 nt, Homo sapiens
  misc_RNA (1)...(19): siRNA sense strand
uugaugcaguaacuuauag

SEQ ID NO: 1300983 - RNA, 19 nt, Homo sapiens
  misc_RNA (1)...(19): siRNA sense strand
ggagcugaauaugccacuu

SEQ ID NO: 1300984 - RNA, 19 nt, Homo sapiens
  misc_RNA (1)...(19): siRNA sense strand
cgauggcagcgacacaauu

SEQ ID NO: 1300985 - RNA, 19 nt, Homo sapiens
  misc_RNA (1)...(19): siRNA sense strand
gauccauuuucacuuauug

SEQ ID NO: 1300986 - RNA, 19 nt, Homo sapiens
  misc_RNA (1)...(19): siRNA sense strand
ggagagagcacgauuuauu

SEQ ID NO: 1300987 - RNA, 19 nt, Homo sapiens
  misc_RNA (1)...(19): siRNA sense strand
agagaaacauguccauaua

SEQ ID NO: 1300988 - RNA, 19 nt, Homo sapiens
  misc_RNA (1)...(19): siRNA sense strand
cagaugcacuuuauuugua

SEQ ID NO: 1300989 - RNA, 19 nt, Homo sapiens
  misc_RNA (1)...(19): siRNA sense strand
ggacuuacgaguuugguua

SEQ ID NO: 1300990 - RNA, 19 nt, Homo sapiens
  misc_RNA (1)...(19): siRNA sense strand
aaacagauaucaggauuug

SEQ ID NO: 1300991 - RNA, 19 nt, Homo sapiens
  misc_RNA (1)...(19): siRNA sense strand
cuauggagcucauugguaa

SEQ ID NO: 1300992 - RNA, 19 nt, Homo sapiens
  misc_RNA (1)...(19): siRNA sense strand
aaacacaccuuuagugaag

SEQ ID NO: 1300993 - RNA, 19 nt, Homo sapiens
  misc_RNA (1)...(19): siRNA sense strand
gaacuuaaaggaucaguag

SEQ ID NO: 1300994 - RNA, 19 nt, Homo sapiens
  misc_RNA (1)...(19): siRNA sense strand
gaaaacagauaucaggauu

SEQ ID NO: 1300995 - RNA, 19 nt, Homo sapiens
  misc_RNA (1)...(19): siRNA sense strand
uaaaggaucaguagcaauu

SEQ ID NO: 1300996 - RNA, 19 nt, Homo sapiens
  misc_RNA (1)...(19): siRNA sense strand
aaaugggacuuacgaguuu

SEQ ID NO: 1300997 - RNA, 19 nt, Homo sapiens
  misc_RNA (1)...(19): siRNA sense strand
guuaucagaugcacuuuau

SEQ ID NO: 1300998 - RNA, 19 nt, Homo sapiens
  misc_RNA (1)...(19): siRNA sense strand
gagcugaauaugccacuua

SEQ ID NO: 1300999 - RNA, 19 nt, Homo sapiens
  misc_RNA (1)...(19): siRNA sense strand
ugagauuggugaacgagua

SEQ ID NO: 1301000 - RNA, 19 nt, Homo sapiens
  misc_RNA (1)...(19): siRNA sense strand
gugaacgaguagauuauaa

SEQ ID NO: 1301001 - RNA, 19 nt, Homo sapiens
  misc_RNA (1)...(19): siRNA sense strand
gagagagcacgauuuauug

SEQ ID NO: 1301002 - RNA, 19 nt, Homo sapiens
  misc_RNA (1)...(19): siRNA sense strand
caaaugggacuuacgaguu

SEQ ID NO: 1301003 - RNA, 19 nt, Homo sapiens
  misc_RNA (1)...(19): siRNA sense strand
ggucauugcugugauuguu

SEQ ID NO: 1301004 - RNA, 19 nt, Homo sapiens
  misc_RNA (1)...(19): siRNA sense strand
ccagauccauuuucacuua

SEQ ID NO: 1301005 - RNA, 19 nt, Homo sapiens
  misc_RNA (1)...(19): siRNA sense strand
gaaggaauacuugacaguu

SEQ ID NO: 1301006 - RNA, 19 nt, Homo sapiens
  misc_RNA (1)...(19): siRNA sense strand
aaggaauacuugacaguuu

SEQ ID NO: 1301007 - RNA, 19 nt, Homo sapiens
  misc_RNA (1)...(19): siRNA sense strand
ucagaugacgccuguuaua

SEQ ID NO: 1301008 - RNA, 19 nt, Homo sapiens
  misc_RNA (1)...(19): siRNA sense strand
gaaaacacaccuuuaguga

SEQ ID NO: 1301009 - RNA, 19 nt, Homo sapiens
  misc_RNA (1)...(19): siRNA sense strand
gaugacgccuguuauagag

SEQ ID NO: 1301010 - RNA, 19 nt, Homo sapiens
  misc_RNA (1)...(19): siRNA sense strand
gagaaacauguccauauau

SEQ ID NO: 1301011 - RNA, 19 nt, Homo sapiens
  misc_RNA (1)...(19): siRNA sense strand
ccacuuaccagacuaaauc

SEQ ID NO: 1301012 - RNA, 19 nt, Homo sapiens
  misc_RNA (1)...(19): siRNA sense strand
acgaguagauuauaagugu

SEQ ID NO: 1301013 - RNA, 19 nt, Homo sapiens
  misc_RNA (1)...(19): siRNA sense strand
cuacaaagcaacaguuaug

SEQ ID NO: 1301014 - RNA, 19 nt, Homo sapiens
  misc_RNA (1)...(19): siRNA sense strand
ccaccaacauuugaagcua

SEQ ID NO: 1301015 - RNA, 19 nt, Homo sapiens
  misc_RNA (1)...(19): siRNA sense strand
uauacgggauccuuuaaau

SEQ ID NO: 1301016 - RNA, 19 nt, Homo sapiens
  misc_RNA (1)...(19): siRNA sense strand
cgaguuugguuaucagaug

SEQ ID NO: 1301017 - RNA, 19 nt, Homo sapiens
  misc_RNA (1)...(19): siRNA sense strand
gaacgaguagauuauaagu

SEQ ID NO: 1301018 - RNA, 19 nt, Homo sapiens
  misc_RNA (1)...(19): siRNA sense strand
gugaggagccaccaacauu

SEQ ID NO: 1301019 - RNA, 19 nt, Homo sapiens
  misc_RNA (1)...(19): siRNA sense strand
gauggcagcgacacaauug

SEQ ID NO: 1301020 - RNA, 19 nt, Homo sapiens
  misc_RNA (1)...(19): siRNA sense strand
ucucagaugacgccuguua

SEQ ID NO: 1301021 - RNA, 19 nt, Homo sapiens
  misc_RNA (1)...(19): siRNA sense strand
gaggagccaccaacauuug

SEQ ID NO: 1301022 - RNA, 19 nt, Homo sapiens
  misc_RNA (1)...(19): siRNA sense strand
gcuauggagcucauuggua

SEQ ID NO: 1301023 - RNA, 19 nt, Homo sapiens
  misc_RNA (1)...(19): siRNA sense strand
acacaccuuuagugaagua

SEQ ID NO: 1301024 - RNA, 19 nt, Homo sapiens
  misc_RNA (1)...(19): siRNA sense strand
uagagaaacauguccauau

SEQ ID NO: 1301025 - RNA, 19 nt, Homo sapiens
  misc_RNA (1)...(19): siRNA sense strand
guuccaaagugucuuaaag

SEQ ID NO: 1301026 - RNA, 19 nt, Homo sapiens
  misc_RNA (1)...(19): siRNA sense strand
ggugaacgaguagauuaua

SEQ ID NO: 1301027 - RNA, 19 nt, Homo sapiens
  misc_RNA (1)...(19): siRNA sense strand
gaaguagaaguauuugagu

SEQ ID NO: 1301028 - RNA, 19 nt, Homo sapiens
  misc_RNA (1)...(19): siRNA sense strand
gaaacauguccauauauac

SEQ ID NO: 1301029 - RNA, 19 nt, Homo sapiens
  misc_RNA (1)...(19): siRNA sense strand
ugacgccuguuauagagaa

SEQ ID NO: 1301030 - RNA, 19 nt, Homo sapiens
  misc_RNA (1)...(19): siRNA sense strand
cgaguagauuauaagugua

SEQ ID NO: 1301031 - RNA, 19 nt, Homo sapiens
  misc_RNA (1)...(19): siRNA sense strand
gcacuuuauuuguaaugag

SEQ ID NO: 1301032 - RNA, 19 nt, Homo sapiens
  misc_RNA (1)...(19): siRNA sense strand
guagaaguauuugaguauc

SEQ ID NO: 1301033 - RNA, 19 nt, Homo sapiens
  misc_RNA (1)...(19): siRNA sense strand
guauuugaguaucuugaug

SEQ ID NO: 1301034 - RNA, 19 nt, Homo sapiens
  misc_RNA (1)...(19): siRNA sense strand
aggaauacuugacaguuug

SEQ ID NO: 1301035 - RNA, 19 nt, Homo sapiens
  misc_RNA (1)...(19): siRNA sense strand
ccaaaacccuacuaugaga

SEQ ID NO: 1301036 - RNA, 19 nt, Homo sapiens
  misc_RNA (1)...(19): siRNA sense strand
aguguaaaguggucaaaug

SEQ ID NO: 1301037 - RNA, 19 nt, Homo sapiens
  misc_RNA (1)...(19): siRNA sense strand
ccacccauacuauuuguga

SEQ ID NO: 1301038 - RNA, 19 nt, Homo sapiens
  misc_RNA (1)...(19): siRNA sense strand
uuggagagagcacgauuua

SEQ ID NO: 1301039 - RNA, 19 nt, Homo sapiens
  misc_RNA (1)...(19): siRNA sense strand
gguuaucagaugcacuuua

SEQ ID NO: 1301040 - RNA, 19 nt, Homo sapiens
  misc_RNA (1)...(19): siRNA sense strand
caccaacauuugaagcuau

SEQ ID NO: 1301041 - RNA, 19 nt, Homo sapiens
  misc_RNA (1)...(19): siRNA sense strand
ugaggagccaccaacauuu

SEQ ID NO: 1301042 - RNA, 19 nt, Homo sapiens
  misc_RNA (1)...(19): siRNA sense strand
ggaaggaauacuugacagu

SEQ ID NO: 1301043 - RNA, 19 nt, Homo sapiens
  misc_RNA (1)...(19): siRNA sense strand
gaggaaggaauacuugaca

SEQ ID NO: 1301044 - RNA, 19 nt, Homo sapiens
  misc_RNA (1)...(19): siRNA sense strand
ccaguuccaaagugucuua

SEQ ID NO: 1301045 - RNA, 19 nt, Homo sapiens
  misc_RNA (1)...(19): siRNA sense strand
ugaguaucuugaugcagua

SEQ ID NO: 1301046 - RNA, 19 nt, Homo sapiens
  misc_RNA (1)...(19): siRNA sense strand
caccuuuagugaaguagaa

SEQ ID NO: 1301047 - RNA, 19 nt, Homo sapiens
  misc_RNA (1)...(19): siRNA sense strand
acagauaucaggauuugga

SEQ ID NO: 1301048 - RNA, 19 nt, Homo sapiens
  misc_RNA (1)...(19): siRNA sense strand
ucauugcugugauuguuau

SEQ ID NO: 1301049 - RNA, 19 nt, Homo sapiens
  misc_RNA (1)...(19): siRNA sense strand
ucagaugcacuuuauuugu

SEQ ID NO: 1301050 - RNA, 19 nt, Homo sapiens
  misc_RNA (1)...(19): siRNA sense strand
gugcugcuccagaguguaa

SEQ ID NO: 1301051 - RNA, 19 nt, Homo sapiens
  misc_RNA (1)...(19): siRNA sense strand
ggaaaacacaccuuuagug

SEQ ID NO: 1301052 - RNA, 19 nt, Homo sapiens
  misc_RNA (1)...(19): siRNA sense strand
aaggaucaguagcaauuug

SEQ ID NO: 1301053 - RNA, 19 nt, Homo sapiens
  misc_RNA (1)...(19): siRNA sense strand
uauauacgggauccuuuaa

SEQ ID NO: 1301054 - RNA, 19 nt, Homo sapiens
  misc_RNA (1)...(19): siRNA sense strand
ugaaguagaaguauuugag

SEQ ID NO: 1301055 - RNA, 19 nt, Homo sapiens
  misc_RNA (1)...(19): siRNA sense strand
cuugacaguuuggauguuu

SEQ ID NO: 1301056 - RNA, 19 nt, Homo sapiens
  misc_RNA (1)...(19): siRNA sense strand
cauauauacgggauccuuu

SEQ ID NO: 1301057 - RNA, 19 nt, Homo sapiens
  misc_RNA (1)...(19): siRNA sense strand
auauauacgggauccuuua

SEQ ID NO: 1301058 - RNA, 19 nt, Homo sapiens
  misc_RNA (1)...(19): siRNA sense strand
cuuaaaggaucaguagcaa

SEQ ID NO: 1301059 - RNA, 19 nt, Homo sapiens
  misc_RNA (1)...(19): siRNA sense strand
uaaaccugaggaaggaaua

SEQ ID NO: 1301060 - RNA, 19 nt, Homo sapiens
  misc_RNA (1)...(19): siRNA sense strand
agaugacgccuguuauaga

SEQ ID NO: 1301061 - RNA, 19 nt, Homo sapiens
  misc_RNA (1)...(19): siRNA sense strand
ugugauuguuauugccaua

SEQ ID NO: 1301062 - RNA, 19 nt, Homo sapiens
  misc_RNA (1)...(19): siRNA sense strand
gagagcacgauuuauugug

SEQ ID NO: 1301063 - RNA, 19 nt, Homo sapiens
  misc_RNA (1)...(19): siRNA sense strand
gaaguauuugaguaucuug

SEQ ID NO: 1301064 - RNA, 19 nt, Homo sapiens
  misc_RNA (1)...(19): siRNA sense strand
ggcuaccugucucagauga

SEQ ID NO: 1301065 - RNA, 19 nt, Homo sapiens
  misc_RNA (1)...(19): siRNA sense strand
gauaucaggauuuggaaaa

SEQ ID NO: 1301066 - RNA, 19 nt, Homo sapiens
  misc_RNA (1)...(19): siRNA sense strand
ccucuugccacccauacua

SEQ ID NO: 1301067 - RNA, 19 nt, Homo sapiens
  misc_RNA (1)...(19): siRNA sense strand
ccaugguguugcugcugua

SEQ ID NO: 1301068 - RNA, 19 nt, Homo sapiens
  misc_RNA (1)...(19): siRNA sense strand
cagaugacgccuguuauag

SEQ ID NO: 1301069 - RNA, 19 nt, Homo sapiens
  misc_RNA (1)...(19): siRNA sense strand
cagaugguggagcugaaua

SEQ ID NO: 1301070 - RNA, 19 nt, Homo sapiens
  misc_RNA (1)...(19): siRNA sense strand
gucauugcugugauuguua

SEQ ID NO: 1301071 - RNA, 19 nt, Homo sapiens
  misc_RNA (1)...(19): siRNA sense strand
ggagccaccaacauuugaa

SEQ ID NO: 1301072 - RNA, 19 nt, Homo sapiens
  misc_RNA (1)...(19): siRNA sense strand
uuggugaacgaguagauua

SEQ ID NO: 1301073 - RNA, 19 nt, Homo sapiens
  misc_RNA (1)...(19): siRNA sense strand
gcgcuuuccuggguugcuu

SEQ ID NO: 1301074 - RNA, 19 nt, Homo sapiens
  misc_RNA (1)...(19): siRNA sense strand
uacuacaaagcaacaguua

SEQ ID NO: 1301075 - RNA, 19 nt, Homo sapiens
  misc_RNA (1)...(19): siRNA sense strand
cuugaugcaguaacuuaua

SEQ ID NO: 1301076 - RNA, 19 nt, Homo sapiens
  misc_RNA (1)...(19): siRNA sense strand
aaacauguccauauauacg

SEQ ID NO: 1301077 - RNA, 19 nt, Homo sapiens
  misc_RNA (1)...(19): siRNA sense strand
guguaaaguggucaaaugu

SEQ ID NO: 1301078 - RNA, 19 nt, Homo sapiens
  misc_RNA (1)...(19): siRNA sense strand
cuuacgaguuugguuauca

SEQ ID NO: 1301079 - RNA, 19 nt, Homo sapiens
  misc_RNA (1)...(19): siRNA sense strand
uacgggauccuuuaaaugg

SEQ ID NO: 1301080 - RNA, 19 nt, Homo sapiens
  misc_RNA (1)...(19): siRNA sense strand
gcagaugguggagcugaau

SEQ ID NO: 1301081 - RNA, 19 nt, Homo sapiens
  misc_RNA (1)...(19): siRNA sense strand
aaccaaaacccuacuauga

SEQ ID NO: 1301082 - RNA, 19 nt, Homo sapiens
  misc_RNA (1)...(19): siRNA sense strand
uugaugcaguaacuuauag

SEQ ID NO: 1301083 - RNA, 19 nt, Homo sapiens
  misc_RNA (1)...(19): siRNA sense strand
ggagcugaauaugccacuu

SEQ ID NO: 1301084 - RNA, 19 nt, Homo sapiens
  misc_RNA (1)...(19): siRNA sense strand
cgauggcagcgacacaauu

SEQ ID NO: 1301085 - RNA, 19 nt, Homo sapiens
  misc_RNA (1)...(19): siRNA sense strand
gauccauuuucacuuauug

SEQ ID NO: 1301086 - RNA, 19 nt, Homo sapiens
  misc_RNA (1)...(19): siRNA sense strand
ggagagagcacgauuuauu

SEQ ID NO: 1301087 - RNA, 19 nt, Homo sapiens
  misc_RNA (1)...(19): siRNA sense strand
agagaaacauguccauaua

SEQ ID NO: 1301088 - RNA, 19 nt, Homo sapiens
  misc_RNA (1)...(19): siRNA sense strand
cagaugcacuuuauuugua

SEQ ID NO: 1301089 - RNA, 19 nt, Homo sapiens
  misc_RNA (1)...(19): siRNA sense strand
ggacuuacgaguuugguua

SEQ ID NO: 1301090 - RNA, 19 nt, Homo sapiens
  misc_RNA (1)...(19): siRNA sense strand
aaacagauaucaggauuug

SEQ ID NO: 1301091 - RNA, 19 nt, Homo sapiens
  misc_RNA (1)...(19): siRNA sense strand
cuauggagcucauugguaa

SEQ ID NO: 1301092 - RNA, 19 nt, Homo sapiens
  misc_RNA (1)...(19): siRNA sense strand
aaacacaccuuuagugaag

SEQ ID NO: 1301093 - RNA, 19 nt, Homo sapiens
  misc_RNA (1)...(19): siRNA sense strand
gaacuuaaaggaucaguag

SEQ ID NO: 1301094 - RNA, 19 nt, Homo sapiens
  misc_RNA (1)...(19): siRNA sense strand
gaaaacagauaucaggauu

SEQ ID NO: 1301095 - RNA, 19 nt, Homo sapiens
  misc_RNA (1)...(19): siRNA sense strand
uaaaggaucaguagcaauu

SEQ ID NO: 1301096 - RNA, 19 nt, Homo sapiens
  misc_RNA (1)...(19): siRNA sense strand
aaaugggacuuacgaguuu

SEQ ID NO: 1301097 - RNA, 19 nt, Homo sapiens
  misc_RNA (1)...(19): siRNA sense strand
guuaucagaugcacuuuau

SEQ ID NO: 1301098 - RNA, 19 nt, Homo sapiens
  misc_RNA (1)...(19): siRNA sense strand
gagcugaauaugccacuua

SEQ ID NO: 1301099 - RNA, 19 nt, Homo sapiens
  misc_RNA (1)...(19): siRNA sense strand
ugagauuggugaacgagua

SEQ ID NO: 1301100 - RNA, 19 nt, Homo sapiens
  misc_RNA (1)...(19): siRNA sense strand
gugaacgaguagauuauaa

SEQ ID NO: 1301101 - RNA, 19 nt, Homo sapiens
  misc_RNA (1)...(19): siRNA sense strand
gagagagcacgauuuauug

SEQ ID NO: 1301102 - RNA, 19 nt, Homo sapiens
  misc_RNA (1)...(19): siRNA sense strand
caaaugggacuuacgaguu

SEQ ID NO: 1301103 - RNA, 19 nt, Homo sapiens
  misc_RNA (1)...(19): siRNA sense strand
ggucauugcugugauuguu

SEQ ID NO: 1301104 - RNA, 19 nt, Homo sapiens
  misc_RNA (1)...(19): siRNA sense strand
ccagauccauuuucacuua

SEQ ID NO: 1301105 - RNA, 19 nt, Homo sapiens
  misc_RNA (1)...(19): siRNA sense strand
gaaggaauacuugacaguu

SEQ ID NO: 1301106 - RNA, 19 nt, Homo sapiens
  misc_RNA (1)...(19): siRNA sense strand
aaggaauacuugacaguuu

SEQ ID NO: 1301107 - RNA, 19 nt, Homo sapiens
  misc_RNA (1)...(19): siRNA sense strand
ucagaugacgccuguuaua

SEQ ID NO: 1301108 - RNA, 19 nt, Homo sapiens
  misc_RNA (1)...(19): siRNA sense strand
gaaaacacaccuuuaguga

SEQ ID NO: 1301109 - RNA, 19 nt, Homo sapiens
  misc_RNA (1)...(19): siRNA sense strand
gaugacgccuguuauagag

SEQ ID NO: 1301110 - RNA, 19 nt, Homo sapiens
  misc_RNA (1)...(19): siRNA sense strand
gagaaacauguccauauau

SEQ ID NO: 1301111 - RNA, 19 nt, Homo sapiens
  misc_RNA (1)...(19): siRNA sense strand
ccacuuaccagacuaaauc

SEQ ID NO: 1301112 - RNA, 19 nt, Homo sapiens
  misc_RNA (1)...(19): siRNA sense strand
acgaguagauuauaagugu

SEQ ID NO: 1301113 - RNA, 19 nt, Homo sapiens
  misc_RNA (1)...(19): siRNA sense strand
cuacaaagcaacaguuaug

SEQ ID NO: 1301114 - RNA, 19 nt, Homo sapiens
  misc_RNA (1)...(19): siRNA sense strand
ccaccaacauuugaagcua

SEQ ID NO: 1301115 - RNA, 19 nt, Homo sapiens
  misc_RNA (1)...(19): siRNA sense strand
uauacgggauccuuuaaau

SEQ ID NO: 1301116 - RNA, 19 nt, Homo sapiens
  misc_RNA (1)...(19): siRNA sense strand
cgaguuugguuaucagaug

SEQ ID NO: 1301117 - RNA, 19 nt, Homo sapiens
  misc_RNA (1)...(19): siRNA sense strand
gaacgaguagauuauaagu

SEQ ID NO: 1301118 - RNA, 19 nt, Homo sapiens
  misc_RNA (1)...(19): siRNA sense strand
gugaggagccaccaacauu

SEQ ID NO: 1301119 - RNA, 19 nt, Homo sapiens
  misc_RNA (1)...(19): siRNA sense strand
gauggcagcgacacaauug

SEQ ID NO: 1301120 - RNA, 19 nt, Homo sapiens
  misc_RNA (1)...(19): siRNA sense strand
ucucagaugacgccuguua

SEQ ID NO: 1301121 - RNA, 19 nt, Homo sapiens
  misc_RNA (1)...(19): siRNA sense strand
gaggagccaccaacauuug

SEQ ID NO: 1301122 - RNA, 19 nt, Homo sapiens
  misc_RNA (1)...(19): siRNA sense strand
gcuauggagcucauuggua

SEQ ID NO: 1301123 - RNA, 19 nt, Homo sapiens
  misc_RNA (1)...(19): siRNA sense strand
acacaccuuuagugaagua

SEQ ID NO: 1301124 - RNA, 19 nt, Homo sapiens
  misc_RNA (1)...(19): siRNA sense strand
uagagaaacauguccauau

SEQ ID NO: 1301125 - RNA, 19 nt, Homo sapiens
  misc_RNA (1)...(19): siRNA sense strand
guuccaaagugucuuaaag

SEQ ID NO: 1301126 - RNA, 19 nt, Homo sapiens
  misc_RNA (1)...(19): siRNA sense strand
ggugaacgaguagauuaua

SEQ ID NO: 1301127 - RNA, 19 nt, Homo sapiens
  misc_RNA (1)...(19): siRNA sense strand
gaaguagaaguauuugagu

SEQ ID NO: 1301128 - RNA, 19 nt, Homo sapiens
  misc_RNA (1)...(19): siRNA sense strand
gaaacauguccauauauac

SEQ ID NO: 1301129 - RNA, 19 nt, Homo sapiens
  misc_RNA (1)...(19): siRNA sense strand
ugacgccuguuauagagaa

SEQ ID NO: 1301130 - RNA, 19 nt, Homo sapiens
  misc_RNA (1)...(19): siRNA sense strand
cgaguagauuauaagugua

SEQ ID NO: 1301131 - RNA, 19 nt, Homo sapiens
  misc_RNA (1)...(19): siRNA sense strand
gcacuuuauuuguaaugag

SEQ ID NO: 1301132 - RNA, 19 nt, Homo sapiens
  misc_RNA (1)...(19): siRNA sense strand
guagaaguauuugaguauc

SEQ ID NO: 1301133 - RNA, 19 nt, Homo sapiens
  misc_RNA (1)...(19): siRNA sense strand
guauuugaguaucuugaug

SEQ ID NO: 1301134 - RNA, 19 nt, Homo sapiens
  misc_RNA (1)...(19): siRNA sense strand
aggaauacuugacaguuug

SEQ ID NO: 1301135 - RNA, 19 nt, Homo sapiens
  misc_RNA (1)...(19): siRNA sense strand
ccaaaacccuacuaugaga

SEQ ID NO: 1301136 - RNA, 19 nt, Homo sapiens
  misc_RNA (1)...(19): siRNA sense strand
aguguaaaguggucaaaug

SEQ ID NO: 1301137 - RNA, 19 nt, Homo sapiens
  misc_RNA (1)...(19): siRNA sense strand
ccacccauacuauuuguga

SEQ ID NO: 1301138 - RNA, 19 nt, Homo sapiens
  misc_RNA (1)...(19): siRNA sense strand
uuggagagagcacgauuua

SEQ ID NO: 1301139 - RNA, 19 nt, Homo sapiens
  misc_RNA (1)...(19): siRNA sense strand
gguuaucagaugcacuuua

SEQ ID NO: 1301140 - RNA, 19 nt, Homo sapiens
  misc_RNA (1)...(19): siRNA sense strand
caccaacauuugaagcuau

SEQ ID NO: 1301141 - RNA, 19 nt, Homo sapiens
  misc_RNA (1)...(19): siRNA sense strand
ugaggagccaccaacauuu

SEQ ID NO: 1301142 - RNA, 19 nt, Homo sapiens
  misc_RNA (1)...(19): siRNA sense strand
ggaaggaauacuugacagu

SEQ ID NO: 1301143 - RNA, 19 nt, Homo sapiens
  misc_RNA (1)...(19): siRNA sense strand
gaggaaggaauacuugaca

SEQ ID NO: 1301144 - RNA, 19 nt, Homo sapiens
  misc_RNA (1)...(19): siRNA sense strand
ccaguuccaaagugucuua

SEQ ID NO: 1301145 - RNA, 19 nt, Homo sapiens
  misc_RNA (1)...(19): siRNA sense strand
ugaguaucuugaugcagua

SEQ ID NO: 1301146 - RNA, 19 nt, Homo sapiens
  misc_RNA (1)...(19): siRNA sense strand
caccuuuagugaaguagaa

SEQ ID NO: 1301147 - RNA, 19 nt, Homo sapiens
  misc_RNA (1)...(19): siRNA sense strand
acagauaucaggauuugga

SEQ ID NO: 1301148 - RNA, 19 nt, Homo sapiens
  misc_RNA (1)...(19): siRNA sense strand
ucauugcugugauuguuau

SEQ ID NO: 1301149 - RNA, 19 nt, Homo sapiens
  misc_RNA (1)...(19): siRNA sense strand
ucagaugcacuuuauuugu

SEQ ID NO: 1301150 - RNA, 19 nt, Homo sapiens
  misc_RNA (1)...(19): siRNA sense strand
gugcugcuccagaguguaa

SEQ ID NO: 1301151 - RNA, 19 nt, Homo sapiens
  misc_RNA (1)...(19): siRNA sense strand
ggaaaacacaccuuuagug

SEQ ID NO: 1301152 - RNA, 19 nt, Homo sapiens
  misc_RNA (1)...(19): siRNA sense strand
aaggaucaguagcaauuug

SEQ ID NO: 1301153 - RNA, 19 nt, Homo sapiens
  misc_RNA (1)...(19): siRNA sense strand
uauauacgggauccuuuaa

SEQ ID NO: 1301154 - RNA, 19 nt, Homo sapiens
  misc_RNA (1)...(19): siRNA sense strand
ugaaguagaaguauuugag

SEQ ID NO: 1301155 - RNA, 19 nt, Homo sapiens
  misc_RNA (1)...(19): siRNA sense strand
cuugacaguuuggauguuu

SEQ ID NO: 1301156 - RNA, 19 nt, Homo sapiens
  misc_RNA (1)...(19): siRNA sense strand
cauauauacgggauccuuu

SEQ ID NO: 1301157 - RNA, 19 nt, Homo sapiens
  misc_RNA (1)...(19): siRNA sense strand
auauauacgggauccuuua

SEQ ID NO: 1301158 - RNA, 19 nt, Homo sapiens
  misc_RNA (1)...(19): siRNA sense strand
cuuaaaggaucaguagcaa

SEQ ID NO: 1301159 - RNA, 19 nt, Homo sapiens
  misc_RNA (1)...(19): siRNA sense strand
uaaaccugaggaaggaaua

SEQ ID NO: 1301160 - RNA, 19 nt, Homo sapiens
  misc_RNA (1)...(19): siRNA sense strand
agaugacgccuguuauaga

SEQ ID NO: 1301161 - RNA, 19 nt, Homo sapiens
  misc_RNA (1)...(19): siRNA sense strand
ugugauuguuauugccaua

SEQ ID NO: 1301162 - RNA, 19 nt, Homo sapiens
  misc_RNA (1)...(19): siRNA sense strand
gagagcacgauuuauugug

SEQ ID NO: 1301163 - RNA, 19 nt, Homo sapiens
  misc_RNA (1)...(19): siRNA sense strand
gaaguauuugaguaucuug

SEQ ID NO: 1301164 - RNA, 19 nt, Homo sapiens
  misc_RNA (1)...(19): siRNA sense strand
ggcuaccugucucagauga

SEQ ID NO: 1301165 - RNA, 19 nt, Homo sapiens
  misc_RNA (1)...(19): siRNA sense strand
gauaucaggauuuggaaaa

SEQ ID NO: 1301166 - RNA, 19 nt, Homo sapiens
  misc_RNA (1)...(19): siRNA sense strand
ccucuugccacccauacua

SEQ ID NO: 1301167 - RNA, 19 nt, Homo sapiens
  misc_RNA (1)...(19): siRNA sense strand
ccaugguguugcugcugua

SEQ ID NO: 1301168 - RNA, 19 nt, Homo sapiens
  misc_RNA (1)...(19): siRNA sense strand
cagaugacgccuguuauag

SEQ ID NO: 1301169 - RNA, 19 nt, Homo sapiens
  misc_RNA (1)...(19): siRNA sense strand
cagaugguggagcugaaua

SEQ ID NO: 1301170 - RNA, 19 nt, Homo sapiens
  misc_RNA (1)...(19): siRNA sense strand
gucauugcugugauuguua

SEQ ID NO: 1301171 - RNA, 19 nt, Homo sapiens
  misc_RNA (1)...(19): siRNA sense strand
ggagccaccaacauuugaa

SEQ ID NO: 1301172 - RNA, 19 nt, Homo sapiens
  misc_RNA (1)...(19): siRNA sense strand
uuggugaacgaguagauua

SEQ ID NO: 1301173 - RNA, 19 nt, Homo sapiens
  misc_RNA (1)...(19): siRNA sense strand
gcgcuuuccuggguugcuu

SEQ ID NO: 1301174 - RNA, 19 nt, Homo sapiens
  misc_RNA (1)...(19): siRNA sense strand
uacuacaaagcaacaguua

SEQ ID NO: 1301175 - RNA, 19 nt, Homo sapiens
  misc_RNA (1)...(19): siRNA sense strand
cuugaugcaguaacuuaua

SEQ ID NO: 1301176 - RNA, 19 nt, Homo sapiens
  misc_RNA (1)...(19): siRNA sense strand
aaacauguccauauauacg

SEQ ID NO: 1301177 - RNA, 19 nt, Homo sapiens
  misc_RNA (1)...(19): siRNA sense strand
guguaaaguggucaaaugu

SEQ ID NO: 1301178 - RNA, 19 nt, Homo sapiens
  misc_RNA (1)...(19): siRNA sense strand
cuuacgaguuugguuauca

SEQ ID NO: 1301179 - RNA, 19 nt, Homo sapiens
  misc_RNA (1)...(19): siRNA sense strand
uacgggauccuuuaaaugg

SEQ ID NO: 1301180 - RNA, 19 nt, Homo sapiens
  misc_RNA (1)...(19): siRNA sense strand
gcagaugguggagcugaau

SEQ ID NO: 1301181 - RNA, 19 nt, Homo sapiens
  misc_RNA (1)...(19): siRNA sense strand
aaccaaaacccuacuauga

SEQ ID NO: 1301182 - RNA, 19 nt, Homo sapiens
  misc_RNA (1)...(19): siRNA sense strand
uugaugcaguaacuuauag

SEQ ID NO: 1301183 - RNA, 19 nt, Homo sapiens
  misc_RNA (1)...(19): siRNA sense strand
ggagcugaauaugccacuu

SEQ ID NO: 1301184 - RNA, 19 nt, Homo sapiens
  misc_RNA (1)...(19): siRNA sense strand
cgauggcagcgacacaauu

SEQ ID NO: 1301185 - RNA, 19 nt, Homo sapiens
  misc_RNA (1)...(19): siRNA sense strand
gauccauuuucacuuauug

SEQ ID NO: 1301186 - RNA, 19 nt, Homo sapiens
  misc_RNA (1)...(19): siRNA sense strand
ggagagagcacgauuuauu

SEQ ID NO: 1301187 - RNA, 19 nt, Homo sapiens
  misc_RNA (1)...(19): siRNA sense strand
agagaaacauguccauaua

SEQ ID NO: 1301188 - RNA, 19 nt, Homo sapiens
  misc_RNA (1)...(19): siRNA sense strand
cagaugcacuuuauuugua

SEQ ID NO: 1301189 - RNA, 19 nt, Homo sapiens
  misc_RNA (1)...(19): siRNA sense strand
ggacuuacgaguuugguua

SEQ ID NO: 1301190 - RNA, 19 nt, Homo sapiens
  misc_RNA (1)...(19): siRNA sense strand
aaacagauaucaggauuug

SEQ ID NO: 1301191 - RNA, 19 nt, Homo sapiens
  misc_RNA (1)...(19): siRNA sense strand
cuauggagcucauugguaa

SEQ ID NO: 1301192 - RNA, 19 nt, Homo sapiens
  misc_RNA (1)...(19): siRNA sense strand
aaacacaccuuuagugaag

SEQ ID NO: 1301193 - RNA, 19 nt, Homo sapiens
  misc_RNA (1)...(19): siRNA sense strand
gaacuuaaaggaucaguag

SEQ ID NO: 1301194 - RNA, 19 nt, Homo sapiens
  misc_RNA (1)...(19): siRNA sense strand
gaaaacagauaucaggauu

SEQ ID NO: 1301195 - RNA, 19 nt, Homo sapiens
  misc_RNA (1)...(19): siRNA sense strand
uaaaggaucaguagcaauu

SEQ ID NO: 1301196 - RNA, 19 nt, Homo sapiens
  misc_RNA (1)...(19): siRNA sense strand
aaaugggacuuacgaguuu

SEQ ID NO: 1301197 - RNA, 19 nt, Homo sapiens
  misc_RNA (1)...(19): siRNA sense strand
guuaucagaugcacuuuau

SEQ ID NO: 1301198 - RNA, 19 nt, Homo sapiens
  misc_RNA (1)...(19): siRNA sense strand
ugagauuggugaacgagua

SEQ ID NO: 1301199 - RNA, 19 nt, Homo sapiens
  misc_RNA (1)...(19): siRNA sense strand
gugaacgaguagauuauaa

SEQ ID NO: 1301200 - RNA, 19 nt, Homo sapiens
  misc_RNA (1)...(19): siRNA sense strand
gagagagcacgauuuauug

SEQ ID NO: 1301201 - RNA, 19 nt, Homo sapiens
  misc_RNA (1)...(19): siRNA sense strand
caaaugggacuuacgaguu

SEQ ID NO: 1301202 - RNA, 19 nt, Homo sapiens
  misc_RNA (1)...(19): siRNA sense strand
ggucauugcugugauuguu

SEQ ID NO: 1301203 - RNA, 19 nt, Homo sapiens
  misc_RNA (1)...(19): siRNA sense strand
ccagauccauuuucacuua

SEQ ID NO: 1301204 - RNA, 19 nt, Homo sapiens
  misc_RNA (1)...(19): siRNA sense strand
gaaggaauacuugacaguu

SEQ ID NO: 1301205 - RNA, 19 nt, Homo sapiens
  misc_RNA (1)...(19): siRNA sense strand
aaggaauacuugacaguuu

SEQ ID NO: 1301206 - RNA, 19 nt, Homo sapiens
  misc_RNA (1)...(19): siRNA sense strand
ucagaugacgccuguuaua

SEQ ID NO: 1301207 - RNA, 19 nt, Homo sapiens
  misc_RNA (1)...(19): siRNA sense strand
gaaaacacaccuuuaguga

SEQ ID NO: 1301208 - RNA, 19 nt, Homo sapiens
  misc_RNA (1)...(19): siRNA sense strand
gaugacgccuguuauagag

SEQ ID NO: 1301209 - RNA, 19 nt, Homo sapiens
  misc_RNA (1)...(19): siRNA sense strand
gagaaacauguccauauau

SEQ ID NO: 1301210 - RNA, 19 nt, Homo sapiens
  misc_RNA (1)...(19): siRNA sense strand
acgaguagauuauaagugu

SEQ ID NO: 1301211 - RNA, 19 nt, Homo sapiens
  misc_RNA (1)...(19): siRNA sense strand
cuacaaagcaacaguuaug

SEQ ID NO: 1301212 - RNA, 19 nt, Homo sapiens
  misc_RNA (1)...(19): siRNA sense strand
ccaccaacauuugaagcua

SEQ ID NO: 1301213 - RNA, 19 nt, Homo sapiens
  misc_RNA (1)...(19): siRNA sense strand
uauacgggauccuuuaaau

SEQ ID NO: 1301214 - RNA, 19 nt, Homo sapiens
  misc_RNA (1)...(19): siRNA sense strand
cgaguuugguuaucagaug

SEQ ID NO: 1301215 - RNA, 19 nt, Homo sapiens
  misc_RNA (1)...(19): siRNA sense strand
gaacgaguagauuauaagu

SEQ ID NO: 1301216 - RNA, 19 nt, Homo sapiens
  misc_RNA (1)...(19): siRNA sense strand
gugaggagccaccaacauu

SEQ ID NO: 1301217 - RNA, 19 nt, Homo sapiens
  misc_RNA (1)...(19): siRNA sense strand
gauggcagcgacacaauug

SEQ ID NO: 1301218 - RNA, 19 nt, Homo sapiens
  misc_RNA (1)...(19): siRNA sense strand
gcuauggagcucauuggua

SEQ ID NO: 1301219 - RNA, 19 nt, Homo sapiens
  misc_RNA (1)...(19): siRNA sense strand
gaggagccaccaacauuug

SEQ ID NO: 1301220 - RNA, 19 nt, Homo sapiens
  misc_RNA (1)...(19): siRNA sense strand
acacaccuuuagugaagua

SEQ ID NO: 1301221 - RNA, 19 nt, Homo sapiens
  misc_RNA (1)...(19): siRNA sense strand
ucucagaugacgccuguua

SEQ ID NO: 1301222 - RNA, 19 nt, Homo sapiens
  misc_RNA (1)...(19): siRNA sense strand
uagagaaacauguccauau

SEQ ID NO: 1301223 - RNA, 19 nt, Homo sapiens
  misc_RNA (1)...(19): siRNA sense strand
guuccaaagugucuuaaag

SEQ ID NO: 1301224 - RNA, 19 nt, Homo sapiens
  misc_RNA (1)...(19): siRNA sense strand
ggugaacgaguagauuaua

SEQ ID NO: 1301225 - RNA, 19 nt, Homo sapiens
  misc_RNA (1)...(19): siRNA sense strand
gaaguagaaguauuugagu

SEQ ID NO: 1301226 - RNA, 19 nt, Homo sapiens
  misc_RNA (1)...(19): siRNA sense strand
gaaacauguccauauauac

SEQ ID NO: 1301227 - RNA, 19 nt, Homo sapiens
  misc_RNA (1)...(19): siRNA sense strand
ugacgccuguuauagagaa

SEQ ID NO: 1301228 - RNA, 19 nt, Homo sapiens
  misc_RNA (1)...(19): siRNA sense strand
cgaguagauuauaagugua

SEQ ID NO: 1301229 - RNA, 19 nt, Homo sapiens
  misc_RNA (1)...(19): siRNA sense strand
gcacuuuauuuguaaugag

SEQ ID NO: 1301230 - RNA, 19 nt, Homo sapiens
  misc_RNA (1)...(19): siRNA sense strand
guagaaguauuugaguauc

SEQ ID NO: 1301231 - RNA, 19 nt, Homo sapiens
  misc_RNA (1)...(19): siRNA sense strand
guauuugaguaucuugaug

SEQ ID NO: 1301232 - RNA, 19 nt, Homo sapiens
  misc_RNA (1)...(19): siRNA sense strand
aggaauacuugacaguuug

SEQ ID NO: 1301233 - RNA, 19 nt, Homo sapiens
  misc_RNA (1)...(19): siRNA sense strand
ccaaaacccuacuaugaga

SEQ ID NO: 1301234 - RNA, 19 nt, Homo sapiens
  misc_RNA (1)...(19): siRNA sense strand
aguguaaaguggucaaaug

SEQ ID NO: 1301235 - RNA, 19 nt, Homo sapiens
  misc_RNA (1)...(19): siRNA sense strand
ccacccauacuauuuguga

SEQ ID NO: 1301236 - RNA, 19 nt, Homo sapiens
  misc_RNA (1)...(19): siRNA sense strand
caccaacauuugaagcuau

SEQ ID NO: 1301237 - RNA, 19 nt, Homo sapiens
  misc_RNA (1)...(19): siRNA sense strand
uuggagagagcacgauuua

SEQ ID NO: 1301238 - RNA, 19 nt, Homo sapiens
  misc_RNA (1)...(19): siRNA sense strand
gguuaucagaugcacuuua

SEQ ID NO: 1301239 - RNA, 19 nt, Homo sapiens
  misc_RNA (1)...(19): siRNA sense strand
ugaggagccaccaacauuu

SEQ ID NO: 1301240 - RNA, 19 nt, Homo sapiens
  misc_RNA (1)...(19): siRNA sense strand
ggaaggaauacuugacagu

SEQ ID NO: 1301241 - RNA, 19 nt, Homo sapiens
  misc_RNA (1)...(19): siRNA sense strand
gaggaaggaauacuugaca

SEQ ID NO: 1301242 - RNA, 19 nt, Homo sapiens
  misc_RNA (1)...(19): siRNA sense strand
ccaguuccaaagugucuua

SEQ ID NO: 1301243 - RNA, 19 nt, Homo sapiens
  misc_RNA (1)...(19): siRNA sense strand
ugaguaucuugaugcagua

SEQ ID NO: 1301244 - RNA, 19 nt, Homo sapiens
  misc_RNA (1)...(19): siRNA sense strand
caccuuuagugaaguagaa

SEQ ID NO: 1301245 - RNA, 19 nt, Homo sapiens
  misc_RNA (1)...(19): siRNA sense strand
acagauaucaggauuugga

SEQ ID NO: 1301246 - RNA, 19 nt, Homo sapiens
  misc_RNA (1)...(19): siRNA sense strand
ucauugcugugauuguuau

SEQ ID NO: 1301247 - RNA, 19 nt, Homo sapiens
  misc_RNA (1)...(19): siRNA sense strand
ucagaugcacuuuauuugu

SEQ ID NO: 1301248 - RNA, 19 nt, Homo sapiens
  misc_RNA (1)...(19): siRNA sense strand
gugcugcuccagaguguaa

SEQ ID NO: 1301249 - RNA, 19 nt, Homo sapiens
  misc_RNA (1)...(19): siRNA sense strand
ggaaaacacaccuuuagug

SEQ ID NO: 1301250 - RNA, 19 nt, Homo sapiens
  misc_RNA (1)...(19): siRNA sense strand
aaggaucaguagcaauuug

SEQ ID NO: 1301251 - RNA, 19 nt, Homo sapiens
  misc_RNA (1)...(19): siRNA sense strand
uauauacgggauccuuuaa

SEQ ID NO: 1301252 - RNA, 19 nt, Homo sapiens
  misc_RNA (1)...(19): siRNA sense strand
ugaaguagaaguauuugag

SEQ ID NO: 1301253 - RNA, 19 nt, Homo sapiens
  misc_RNA (1)...(19): siRNA sense strand
cuugacaguuuggauguuu

SEQ ID NO: 1301254 - RNA, 19 nt, Homo sapiens
  misc_RNA (1)...(19): siRNA sense strand
cauauauacgggauccuuu

SEQ ID NO: 1301255 - RNA, 19 nt, Homo sapiens
  misc_RNA (1)...(19): siRNA sense strand
auauauacgggauccuuua

SEQ ID NO: 1301256 - RNA, 19 nt, Homo sapiens
  misc_RNA (1)...(19): siRNA sense strand
cuuaaaggaucaguagcaa

SEQ ID NO: 1301257 - RNA, 19 nt, Homo sapiens
  misc_RNA (1)...(19): siRNA sense strand
uaaaccugaggaaggaaua

SEQ ID NO: 1301258 - RNA, 19 nt, Homo sapiens
  misc_RNA (1)...(19): siRNA sense strand
agaugacgccuguuauaga

SEQ ID NO: 1301259 - RNA, 19 nt, Homo sapiens
  misc_RNA (1)...(19): siRNA sense strand
ugugauuguuauugccaua

SEQ ID NO: 1301260 - RNA, 19 nt, Homo sapiens
  misc_RNA (1)...(19): siRNA sense strand
gagagcacgauuuauugug

SEQ ID NO: 1301261 - RNA, 19 nt, Homo sapiens
  misc_RNA (1)...(19): siRNA sense strand
gaaguauuugaguaucuug

SEQ ID NO: 1301262 - RNA, 19 nt, Homo sapiens
  misc_RNA (1)...(19): siRNA sense strand
ggcuaccugucucagauga

SEQ ID NO: 1301263 - RNA, 19 nt, Homo sapiens
  misc_RNA (1)...(19): siRNA sense strand
gauaucaggauuuggaaaa

SEQ ID NO: 1301264 - RNA, 19 nt, Homo sapiens
  misc_RNA (1)...(19): siRNA sense strand
ccucuugccacccauacua

SEQ ID NO: 1301265 - RNA, 19 nt, Homo sapiens
  misc_RNA (1)...(19): siRNA sense strand
ccaugguguugcugcugua

SEQ ID NO: 1301266 - RNA, 19 nt, Homo sapiens
  misc_RNA (1)...(19): siRNA sense strand
cagaugacgccuguuauag

SEQ ID NO: 1301267 - RNA, 19 nt, Homo sapiens
  misc_RNA (1)...(19): siRNA sense strand
uuggugaacgaguagauua

SEQ ID NO: 1301268 - RNA, 19 nt, Homo sapiens
  misc_RNA (1)...(19): siRNA sense strand
gucauugcugugauuguua

SEQ ID NO: 1301269 - RNA, 19 nt, Homo sapiens
  misc_RNA (1)...(19): siRNA sense strand
ggagccaccaacauuugaa

SEQ ID NO: 1301270 - RNA, 19 nt, Homo sapiens
  misc_RNA (1)...(19): siRNA sense strand
gcgcuuuccuggguugcuu

SEQ ID NO: 1301271 - RNA, 19 nt, Homo sapiens
  misc_RNA (1)...(19): siRNA sense strand
uacuacaaagcaacaguua

SEQ ID NO: 1301272 - RNA, 19 nt, Homo sapiens
  misc_RNA (1)...(19): siRNA sense strand
cuugaugcaguaacuuaua

SEQ ID NO: 1301273 - RNA, 19 nt, Homo sapiens
  misc_RNA (1)...(19): siRNA sense strand
aaacauguccauauauacg

SEQ ID NO: 1301274 - RNA, 19 nt, Homo sapiens
  misc_RNA (1)...(19): siRNA sense strand
guguaaaguggucaaaugu

SEQ ID NO: 1301275 - RNA, 19 nt, Homo sapiens
  misc_RNA (1)...(19): siRNA sense strand
cuuacgaguuugguuauca

SEQ ID NO: 1301276 - RNA, 19 nt, Homo sapiens
  misc_RNA (1)...(19): siRNA sense strand
uacgggauccuuuaaaugg

SEQ ID NO: 1301277 - RNA, 19 nt, Homo sapiens
  misc_RNA (1)...(19): siRNA sense strand
aaccaaaacccuacuauga

SEQ ID NO: 1301278 - RNA, 19 nt, Homo sapiens
  misc_RNA (1)...(19): siRNA sense strand
cccaauaugugaaaagguu

SEQ ID NO: 1301279 - RNA, 19 nt, Homo sapiens
  misc_RNA (1)...(19): siRNA sense strand
cgauggcagcgacacaauu

SEQ ID NO: 1301280 - RNA, 19 nt, Homo sapiens
  misc_RNA (1)...(19): siRNA sense strand
gauccauuuucacuuauug

SEQ ID NO: 1301281 - RNA, 19 nt, Homo sapiens
  misc_RNA (1)...(19): siRNA sense strand
uugaugcaguaacuuauag

SEQ ID NO: 1301282 - RNA, 19 nt, Homo sapiens
  misc_RNA (1)...(19): siRNA sense strand
guaucuugaugcaguaacu

SEQ ID NO: 1301283 - RNA, 19 nt, Homo sapiens
  misc_RNA (1)...(19): siRNA sense strand
caacauuugaagcuaugga

SEQ ID NO: 1301284 - RNA, 19 nt, Homo sapiens
  misc_RNA (1)...(19): siRNA sense strand
gagauuggugaacgaguag

SEQ ID NO: 1301285 - RNA, 19 nt, Homo sapiens
  misc_RNA (1)...(19): siRNA sense strand
ggagagagcacgauuuauu

SEQ ID NO: 1301286 - RNA, 19 nt, Homo sapiens
  misc_RNA (1)...(19): siRNA sense strand
agagaaacauguccauaua

SEQ ID NO: 1301287 - RNA, 19 nt, Homo sapiens
  misc_RNA (1)...(19): siRNA sense strand
cagaugcacuuuauuugua

SEQ ID NO: 1301288 - RNA, 19 nt, Homo sapiens
  misc_RNA (1)...(19): siRNA sense strand
ggacuuacgaguuugguua

SEQ ID NO: 1301289 - RNA, 19 nt, Homo sapiens
  misc_RNA (1)...(19): siRNA sense strand
aaacagauaucaggauuug

SEQ ID NO: 1301290 - RNA, 19 nt, Homo sapiens
  misc_RNA (1)...(19): siRNA sense strand
cuauggagcucauugguaa

SEQ ID NO: 1301291 - RNA, 19 nt, Homo sapiens
  misc_RNA (1)...(19): siRNA sense strand
aaacacaccuuuagugaag

SEQ ID NO: 1301292 - RNA, 19 nt, Homo sapiens
  misc_RNA (1)...(19): siRNA sense strand
gaacuuaaaggaucaguag

SEQ ID NO: 1301293 - RNA, 19 nt, Homo sapiens
  misc_RNA (1)...(19): siRNA sense strand
gaaaacagauaucaggauu

SEQ ID NO: 1301294 - RNA, 19 nt, Homo sapiens
  misc_RNA (1)...(19): siRNA sense strand
uaaaggaucaguagcaauu

SEQ ID NO: 1301295 - RNA, 19 nt, Homo sapiens
  misc_RNA (1)...(19): siRNA sense strand
aaaugggacuuacgaguuu

SEQ ID NO: 1301296 - RNA, 19 nt, Homo sapiens
  misc_RNA (1)...(19): siRNA sense strand
guuaucagaugcacuuuau

SEQ ID NO: 1301297 - RNA, 19 nt, Homo sapiens
  misc_RNA (1)...(19): siRNA sense strand
gagcugaauaugccacuua

SEQ ID NO: 1301298 - RNA, 19 nt, Homo sapiens
  misc_RNA (1)...(19): siRNA sense strand
ugagauuggugaacgagua

SEQ ID NO: 1301299 - RNA, 19 nt, Homo sapiens
  misc_RNA (1)...(19): siRNA sense strand
gugaacgaguagauuauaa

SEQ ID NO: 1301300 - RNA, 19 nt, Homo sapiens
  misc_RNA (1)...(19): siRNA sense strand
gagagagcacgauuuauug

SEQ ID NO: 1301301 - RNA, 19 nt, Homo sapiens
  misc_RNA (1)...(19): siRNA sense strand
caaaugggacuuacgaguu

SEQ ID NO: 1301302 - RNA, 19 nt, Homo sapiens
  misc_RNA (1)...(19): siRNA sense strand
ggucauugcugugauuguu

SEQ ID NO: 1301303 - RNA, 19 nt, Homo sapiens
  misc_RNA (1)...(19): siRNA sense strand
ccagauccauuuucacuua

SEQ ID NO: 1301304 - RNA, 19 nt, Homo sapiens
  misc_RNA (1)...(19): siRNA sense strand
gaaggaauacuugacaguu

SEQ ID NO: 1301305 - RNA, 19 nt, Homo sapiens
  misc_RNA (1)...(19): siRNA sense strand
aaggaauacuugacaguuu

SEQ ID NO: 1301306 - RNA, 19 nt, Homo sapiens
  misc_RNA (1)...(19): siRNA sense strand
ucagaugacgccuguuaua

SEQ ID NO: 1301307 - RNA, 19 nt, Homo sapiens
  misc_RNA (1)...(19): siRNA sense strand
gaaaacacaccuuuaguga

SEQ ID NO: 1301308 - RNA, 19 nt, Homo sapiens
  misc_RNA (1)...(19): siRNA sense strand
gaugacgccuguuauagag

SEQ ID NO: 1301309 - RNA, 19 nt, Homo sapiens
  misc_RNA (1)...(19): siRNA sense strand
gagaaacauguccauauau

SEQ ID NO: 1301310 - RNA, 19 nt, Homo sapiens
  misc_RNA (1)...(19): siRNA sense strand
ccacuuaccagacuaaauc

SEQ ID NO: 1301311 - RNA, 19 nt, Homo sapiens
  misc_RNA (1)...(19): siRNA sense strand
acgaguagauuauaagugu

SEQ ID NO: 1301312 - RNA, 19 nt, Homo sapiens
  misc_RNA (1)...(19): siRNA sense strand
cuacaaagcaacaguuaug

SEQ ID NO: 1301313 - RNA, 19 nt, Homo sapiens
  misc_RNA (1)...(19): siRNA sense strand
ccaccaacauuugaagcua

SEQ ID NO: 1301314 - RNA, 19 nt, Homo sapiens
  misc_RNA (1)...(19): siRNA sense strand
uauacgggauccuuuaaau

SEQ ID NO: 1301315 - RNA, 19 nt, Homo sapiens
  misc_RNA (1)...(19): siRNA sense strand
cgaguuugguuaucagaug

SEQ ID NO: 1301316 - RNA, 19 nt, Homo sapiens
  misc_RNA (1)...(19): siRNA sense strand
gaacgaguagauuauaagu

SEQ ID NO: 1301317 - RNA, 19 nt, Homo sapiens
  misc_RNA (1)...(19): siRNA sense strand
gugaggagccaccaacauu

SEQ ID NO: 1301318 - RNA, 19 nt, Homo sapiens
  misc_RNA (1)...(19): siRNA sense strand
gauggcagcgacacaauug

SEQ ID NO: 1301319 - RNA, 19 nt, Homo sapiens
  misc_RNA (1)...(19): siRNA sense strand
ucucagaugacgccuguua

SEQ ID NO: 1301320 - RNA, 19 nt, Homo sapiens
  misc_RNA (1)...(19): siRNA sense strand
gaggagccaccaacauuug

SEQ ID NO: 1301321 - RNA, 19 nt, Homo sapiens
  misc_RNA (1)...(19): siRNA sense strand
gcuauggagcucauuggua

SEQ ID NO: 1301322 - RNA, 19 nt, Homo sapiens
  misc_RNA (1)...(19): siRNA sense strand
acacaccuuuagugaagua

SEQ ID NO: 1301323 - RNA, 19 nt, Homo sapiens
  misc_RNA (1)...(19): siRNA sense strand
uagagaaacauguccauau

SEQ ID NO: 1301324 - RNA, 19 nt, Homo sapiens
  misc_RNA (1)...(19): siRNA sense strand
ggugaacgaguagauuaua

SEQ ID NO: 1301325 - RNA, 19 nt, Homo sapiens
  misc_RNA (1)...(19): siRNA sense strand
gaaguagaaguauuugagu

SEQ ID NO: 1301326 - RNA, 19 nt, Homo sapiens
  misc_RNA (1)...(19): siRNA sense strand
gaaacauguccauauauac

SEQ ID NO: 1301327 - RNA, 19 nt, Homo sapiens
  misc_RNA (1)...(19): siRNA sense strand
ugacgccuguuauagagaa

SEQ ID NO: 1301328 - RNA, 19 nt, Homo sapiens
  misc_RNA (1)...(19): siRNA sense strand
cgaguagauuauaagugua

SEQ ID NO: 1301329 - RNA, 19 nt, Homo sapiens
  misc_RNA (1)...(19): siRNA sense strand
gcacuuuauuuguaaugag

SEQ ID NO: 1301330 - RNA, 19 nt, Homo sapiens
  misc_RNA (1)...(19): siRNA sense strand
guagaaguauuugaguauc

SEQ ID NO: 1301331 - RNA, 19 nt, Homo sapiens
  misc_RNA (1)...(19): siRNA sense strand
guauuugaguaucuugaug

SEQ ID NO: 1301332 - RNA, 19 nt, Homo sapiens
  misc_RNA (1)...(19): siRNA sense strand
aggaauacuugacaguuug

SEQ ID NO: 1301333 - RNA, 19 nt, Homo sapiens
  misc_RNA (1)...(19): siRNA sense strand
ccaaaacccuacuaugaga

SEQ ID NO: 1301334 - RNA, 19 nt, Homo sapiens
  misc_RNA (1)...(19): siRNA sense strand
aguguaaaguggucaaaug

SEQ ID NO: 1301335 - RNA, 19 nt, Homo sapiens
  misc_RNA (1)...(19): siRNA sense strand
ccacccauacuauuuguga

SEQ ID NO: 1301336 - RNA, 19 nt, Homo sapiens
  misc_RNA (1)...(19): siRNA sense strand
uuggagagagcacgauuua

SEQ ID NO: 1301337 - RNA, 19 nt, Homo sapiens
  misc_RNA (1)...(19): siRNA sense strand
gguuaucagaugcacuuua

SEQ ID NO: 1301338 - RNA, 19 nt, Homo sapiens
  misc_RNA (1)...(19): siRNA sense strand
caccaacauuugaagcuau

SEQ ID NO: 1301339 - RNA, 19 nt, Homo sapiens
  misc_RNA (1)...(19): siRNA sense strand
ugaggagccaccaacauuu

SEQ ID NO: 1301340 - RNA, 19 nt, Homo sapiens
  misc_RNA (1)...(19): siRNA sense strand
ggaaggaauacuugacagu

SEQ ID NO: 1301341 - RNA, 19 nt, Homo sapiens
  misc_RNA (1)...(19): siRNA sense strand
gaggaaggaauacuugaca

SEQ ID NO: 1301342 - RNA, 19 nt, Homo sapiens
  misc_RNA (1)...(19): siRNA sense strand
ugaguaucuugaugcagua

SEQ ID NO: 1301343 - RNA, 19 nt, Homo sapiens
  misc_RNA (1)...(19): siRNA sense strand
caccuuuagugaaguagaa

SEQ ID NO: 1301344 - RNA, 19 nt, Homo sapiens
  misc_RNA (1)...(19): siRNA sense strand
acagauaucaggauuugga

SEQ ID NO: 1301345 - RNA, 19 nt, Homo sapiens
  misc_RNA (1)...(19): siRNA sense strand
ucauugcugugauuguuau

SEQ ID NO: 1301346 - RNA, 19 nt, Homo sapiens
  misc_RNA (1)...(19): siRNA sense strand
ucagaugcacuuuauuugu

SEQ ID NO: 1301347 - RNA, 19 nt, Homo sapiens
  misc_RNA (1)...(19): siRNA sense strand
gugcugcuccagaguguaa

SEQ ID NO: 1301348 - RNA, 19 nt, Homo sapiens
  misc_RNA (1)...(19): siRNA sense strand
ggaaaacacaccuuuagug

SEQ ID NO: 1301349 - RNA, 19 nt, Homo sapiens
  misc_RNA (1)...(19): siRNA sense strand
aaggaucaguagcaauuug

SEQ ID NO: 1301350 - RNA, 19 nt, Homo sapiens
  misc_RNA (1)...(19): siRNA sense strand
uauauacgggauccuuuaa

SEQ ID NO: 1301351 - RNA, 19 nt, Homo sapiens
  misc_RNA (1)...(19): siRNA sense strand
ugaaguagaaguauuugag

SEQ ID NO: 1301352 - RNA, 19 nt, Homo sapiens
  misc_RNA (1)...(19): siRNA sense strand
cuugacaguuuggauguuu

SEQ ID NO: 1301353 - RNA, 19 nt, Homo sapiens
  misc_RNA (1)...(19): siRNA sense strand
cauauauacgggauccuuu

SEQ ID NO: 1301354 - RNA, 19 nt, Homo sapiens
  misc_RNA (1)...(19): siRNA sense strand
auauauacgggauccuuua

SEQ ID NO: 1301355 - RNA, 19 nt, Homo sapiens
  misc_RNA (1)...(19): siRNA sense strand
cuuaaaggaucaguagcaa

SEQ ID NO: 1301356 - RNA, 19 nt, Homo sapiens
  misc_RNA (1)...(19): siRNA sense strand
uaaaccugaggaaggaaua

SEQ ID NO: 1301357 - RNA, 19 nt, Homo sapiens
  misc_RNA (1)...(19): siRNA sense strand
agaugacgccuguuauaga

SEQ ID NO: 1301358 - RNA, 19 nt, Homo sapiens
  misc_RNA (1)...(19): siRNA sense strand
ugugauuguuauugccaua

SEQ ID NO: 1301359 - RNA, 19 nt, Homo sapiens
  misc_RNA (1)...(19): siRNA sense strand
gagagcacgauuuauugug

SEQ ID NO: 1301360 - RNA, 19 nt, Homo sapiens
  misc_RNA (1)...(19): siRNA sense strand
gaaguauuugaguaucuug

SEQ ID NO: 1301361 - RNA, 19 nt, Homo sapiens
  misc_RNA (1)...(19): siRNA sense strand
ggcuaccugucucagauga

SEQ ID NO: 1301362 - RNA, 19 nt, Homo sapiens
  misc_RNA (1)...(19): siRNA sense strand
gauaucaggauuuggaaaa

SEQ ID NO: 1301363 - RNA, 19 nt, Homo sapiens
  misc_RNA (1)...(19): siRNA sense strand
ccucuugccacccauacua

SEQ ID NO: 1301364 - RNA, 19 nt, Homo sapiens
  misc_RNA (1)...(19): siRNA sense strand
ccaugguguugcugcugua

SEQ ID NO: 1301365 - RNA, 19 nt, Homo sapiens
  misc_RNA (1)...(19): siRNA sense strand
cagaugacgccuguuauag

SEQ ID NO: 1301366 - RNA, 19 nt, Homo sapiens
  misc_RNA (1)...(19): siRNA sense strand
cagaugguggagcugaaua

SEQ ID NO: 1301367 - RNA, 19 nt, Homo sapiens
  misc_RNA (1)...(19): siRNA sense strand
uuggugaacgaguagauua

SEQ ID NO: 1301368 - RNA, 19 nt, Homo sapiens
  misc_RNA (1)...(19): siRNA sense strand
gucauugcugugauuguua

SEQ ID NO: 1301369 - RNA, 19 nt, Homo sapiens
  misc_RNA (1)...(19): siRNA sense strand
ggagccaccaacauuugaa

SEQ ID NO: 1301370 - RNA, 19 nt, Homo sapiens
  misc_RNA (1)...(19): siRNA sense strand
gcgcuuuccuggguugcuu

SEQ ID NO: 1301371 - RNA, 19 nt, Homo sapiens
  misc_RNA (1)...(19): siRNA sense strand
uacuacaaagcaacaguua

SEQ ID NO: 1301372 - RNA, 19 nt, Homo sapiens
  misc_RNA (1)...(19): siRNA sense strand
cuugaugcaguaacuuaua

SEQ ID NO: 1301373 - RNA, 19 nt, Homo sapiens
  misc_RNA (1)...(19): siRNA sense strand
aaacauguccauauauacg

SEQ ID NO: 1301374 - RNA, 19 nt, Homo sapiens
  misc_RNA (1)...(19): siRNA sense strand
guguaaaguggucaaaugu

SEQ ID NO: 1301375 - RNA, 19 nt, Homo sapiens
  misc_RNA (1)...(19): siRNA sense strand
cuuacgaguuugguuauca

SEQ ID NO: 1301376 - RNA, 19 nt, Homo sapiens
  misc_RNA (1)...(19): siRNA sense strand
uacgggauccuuuaaaugg

SEQ ID NO: 1301377 - RNA, 19 nt, Homo sapiens
  misc_RNA (1)...(19): siRNA sense strand
gcagaugguggagcugaau

SEQ ID NO: 1301378 - RNA, 19 nt, Homo sapiens
  misc_RNA (1)...(19): siRNA sense strand
aaccaaaacccuacuauga

SEQ ID NO: 1301379 - RNA, 19 nt, Homo sapiens
  misc_RNA (1)...(19): siRNA sense strand
cccaauaugugaaaagguu

SEQ ID NO: 1301380 - RNA, 19 nt, Homo sapiens
  misc_RNA (1)...(19): siRNA sense strand
ggagcugaauaugccacuu

SEQ ID NO: 1301381 - RNA, 19 nt, Homo sapiens
  misc_RNA (1)...(19): siRNA sense strand
cgauggcagcgacacaauu

SEQ ID NO: 1301382 - RNA, 19 nt, Homo sapiens
  misc_RNA (1)...(19): siRNA sense strand
gauccauuuucacuuauug

SEQ ID NO: 1301383 - RNA, 19 nt, Homo sapiens
  misc_RNA (1)...(19): siRNA sense strand
uugaugcaguaacuuauag

SEQ ID NO: 1301384 - RNA, 19 nt, Homo sapiens
  misc_RNA (1)...(19): siRNA sense strand
guaucuugaugcaguaacu

SEQ ID NO: 1301385 - RNA, 19 nt, Homo sapiens
  misc_RNA (1)...(19): siRNA sense strand
ggagagagcacgauuuauu

SEQ ID NO: 1301386 - RNA, 19 nt, Homo sapiens
  misc_RNA (1)...(19): siRNA sense strand
agagaaacauguccauaua

SEQ ID NO: 1301387 - RNA, 19 nt, Homo sapiens
  misc_RNA (1)...(19): siRNA sense strand
cagaugcacuuuauuugua

SEQ ID NO: 1301388 - RNA, 19 nt, Homo sapiens
  misc_RNA (1)...(19): siRNA sense strand
ggacuuacgaguuugguua

SEQ ID NO: 1301389 - RNA, 19 nt, Homo sapiens
  misc_RNA (1)...(19): siRNA sense strand
aaacagauaucaggauuug

SEQ ID NO: 1301390 - RNA, 19 nt, Homo sapiens
  misc_RNA (1)...(19): siRNA sense strand
cuauggagcucauugguaa

SEQ ID NO: 1301391 - RNA, 19 nt, Homo sapiens
  misc_RNA (1)...(19): siRNA sense strand
aaacacaccuuuagugaag

SEQ ID NO: 1301392 - RNA, 19 nt, Homo sapiens
  misc_RNA (1)...(19): siRNA sense strand
gaacuuaaaggaucaguag

SEQ ID NO: 1301393 - RNA, 19 nt, Homo sapiens
  misc_RNA (1)...(19): siRNA sense strand
gaaaacagauaucaggauu

SEQ ID NO: 1301394 - RNA, 19 nt, Homo sapiens
  misc_RNA (1)...(19): siRNA sense strand
uaaaggaucaguagcaauu

SEQ ID NO: 1301395 - RNA, 19 nt, Homo sapiens
  misc_RNA (1)...(19): siRNA sense strand
aaaugggacuuacgaguuu

SEQ ID NO: 1301396 - RNA, 19 nt, Homo sapiens
  misc_RNA (1)...(19): siRNA sense strand
guuaucagaugcacuuuau

SEQ ID NO: 1301397 - RNA, 19 nt, Homo sapiens
  misc_RNA (1)...(19): siRNA sense strand
gagcugaauaugccacuua

SEQ ID NO: 1301398 - RNA, 19 nt, Homo sapiens
  misc_RNA (1)...(19): siRNA sense strand
gagcagagaggcugaauag

SEQ ID NO: 1301399 - RNA, 19 nt, Homo sapiens
  misc_RNA (1)...(19): siRNA sense strand
ugagauuggugaacgagua

SEQ ID NO: 1301400 - RNA, 19 nt, Homo sapiens
  misc_RNA (1)...(19): siRNA sense strand
gugaacgaguagauuauaa

SEQ ID NO: 1301401 - RNA, 19 nt, Homo sapiens
  misc_RNA (1)...(19): siRNA sense strand
gagagagcacgauuuauug

SEQ ID NO: 1301402 - RNA, 19 nt, Homo sapiens
  misc_RNA (1)...(19): siRNA sense strand
caaaugggacuuacgaguu

SEQ ID NO: 1301403 - RNA, 19 nt, Homo sapiens
  misc_RNA (1)...(19): siRNA sense strand
ggucauugcugugauuguu

SEQ ID NO: 1301404 - RNA, 19 nt, Homo sapiens
  misc_RNA (1)...(19): siRNA sense strand
ccagauccauuuucacuua

SEQ ID NO: 1301405 - RNA, 19 nt, Homo sapiens
  misc_RNA (1)...(19): siRNA sense strand
gaaggaauacuugacaguu

SEQ ID NO: 1301406 - RNA, 19 nt, Homo sapiens
  misc_RNA (1)...(19): siRNA sense strand
aaggaauacuugacaguuu

SEQ ID NO: 1301407 - RNA, 19 nt, Homo sapiens
  misc_RNA (1)...(19): siRNA sense strand
ucagaugacgccuguuaua

SEQ ID NO: 1301408 - RNA, 19 nt, Homo sapiens
  misc_RNA (1)...(19): siRNA sense strand
gaaaacacaccuuuaguga

SEQ ID NO: 1301409 - RNA, 19 nt, Homo sapiens
  misc_RNA (1)...(19): siRNA sense strand
gaugacgccuguuauagag

SEQ ID NO: 1301410 - RNA, 19 nt, Homo sapiens
  misc_RNA (1)...(19): siRNA sense strand
gagaaacauguccauauau

SEQ ID NO: 1301411 - RNA, 19 nt, Homo sapiens
  misc_RNA (1)...(19): siRNA sense strand
ccacuuaccagacuaaauc

SEQ ID NO: 1301412 - RNA, 19 nt, Homo sapiens
  misc_RNA (1)...(19): siRNA sense strand
acgaguagauuauaagugu

SEQ ID NO: 1301413 - RNA, 19 nt, Homo sapiens
  misc_RNA (1)...(19): siRNA sense strand
cuacaaagcaacaguuaug

SEQ ID NO: 1301414 - RNA, 19 nt, Homo sapiens
  misc_RNA (1)...(19): siRNA sense strand
ccaccaacauuugaagcua

SEQ ID NO: 1301415 - RNA, 19 nt, Homo sapiens
  misc_RNA (1)...(19): siRNA sense strand
uauacgggauccuuuaaau

SEQ ID NO: 1301416 - RNA, 19 nt, Homo sapiens
  misc_RNA (1)...(19): siRNA sense strand
cgaguuugguuaucagaug

SEQ ID NO: 1301417 - RNA, 19 nt, Homo sapiens
  misc_RNA (1)...(19): siRNA sense strand
gaacgaguagauuauaagu

SEQ ID NO: 1301418 - RNA, 19 nt, Homo sapiens
  misc_RNA (1)...(19): siRNA sense strand
gugaggagccaccaacauu

SEQ ID NO: 1301419 - RNA, 19 nt, Homo sapiens
  misc_RNA (1)...(19): siRNA sense strand
gauggcagcgacacaauug

SEQ ID NO: 1301420 - RNA, 19 nt, Homo sapiens
  misc_RNA (1)...(19): siRNA sense strand
ucucagaugacgccuguua

SEQ ID NO: 1301421 - RNA, 19 nt, Homo sapiens
  misc_RNA (1)...(19): siRNA sense strand
acacaccuuuagugaagua

SEQ ID NO: 1301422 - RNA, 19 nt, Homo sapiens
  misc_RNA (1)...(19): siRNA sense strand
gcuauggagcucauuggua

SEQ ID NO: 1301423 - RNA, 19 nt, Homo sapiens
  misc_RNA (1)...(19): siRNA sense strand
gaggagccaccaacauuug

SEQ ID NO: 1301424 - RNA, 19 nt, Homo sapiens
  misc_RNA (1)...(19): siRNA sense strand
uagagaaacauguccauau

SEQ ID NO: 1301425 - RNA, 19 nt, Homo sapiens
  misc_RNA (1)...(19): siRNA sense strand
guuccaaagugucuuaaag

SEQ ID NO: 1301426 - RNA, 19 nt, Homo sapiens
  misc_RNA (1)...(19): siRNA sense strand
ggugaacgaguagauuaua

SEQ ID NO: 1301427 - RNA, 19 nt, Homo sapiens
  misc_RNA (1)...(19): siRNA sense strand
gaaguagaaguauuugagu

SEQ ID NO: 1301428 - RNA, 19 nt, Homo sapiens
  misc_RNA (1)...(19): siRNA sense strand
gaaacauguccauauauac

SEQ ID NO: 1301429 - RNA, 19 nt, Homo sapiens
  misc_RNA (1)...(19): siRNA sense strand
ugacgccuguuauagagaa

SEQ ID NO: 1301430 - RNA, 19 nt, Homo sapiens
  misc_RNA (1)...(19): siRNA sense strand
cgaguagauuauaagugua

SEQ ID NO: 1301431 - RNA, 19 nt, Homo sapiens
  misc_RNA (1)...(19): siRNA sense strand
gcacuuuauuuguaaugag

SEQ ID NO: 1301432 - RNA, 19 nt, Homo sapiens
  misc_RNA (1)...(19): siRNA sense strand
guagaaguauuugaguauc

SEQ ID NO: 1301433 - RNA, 19 nt, Homo sapiens
  misc_RNA (1)...(19): siRNA sense strand
guauuugaguaucuugaug

SEQ ID NO: 1301434 - RNA, 19 nt, Homo sapiens
  misc_RNA (1)...(19): siRNA sense strand
aggaauacuugacaguuug

SEQ ID NO: 1301435 - RNA, 19 nt, Homo sapiens
  misc_RNA (1)...(19): siRNA sense strand
ccaaaacccuacuaugaga

SEQ ID NO: 1301436 - RNA, 19 nt, Homo sapiens
  misc_RNA (1)...(19): siRNA sense strand
aguguaaaguggucaaaug

SEQ ID NO: 1301437 - RNA, 19 nt, Homo sapiens
  misc_RNA (1)...(19): siRNA sense strand
ccacccauacuauuuguga

SEQ ID NO: 1301438 - RNA, 19 nt, Homo sapiens
  misc_RNA (1)...(19): siRNA sense strand
uuggagagagcacgauuua

SEQ ID NO: 1301439 - RNA, 19 nt, Homo sapiens
  misc_RNA (1)...(19): siRNA sense strand
gguuaucagaugcacuuua

SEQ ID NO: 1301440 - RNA, 19 nt, Homo sapiens
  misc_RNA (1)...(19): siRNA sense strand
caccaacauuugaagcuau

SEQ ID NO: 1301441 - RNA, 19 nt, Homo sapiens
  misc_RNA (1)...(19): siRNA sense strand
ugaggagccaccaacauuu

SEQ ID NO: 1301442 - RNA, 19 nt, Homo sapiens
  misc_RNA (1)...(19): siRNA sense strand
ggaaggaauacuugacagu

SEQ ID NO: 1301443 - RNA, 19 nt, Homo sapiens
  misc_RNA (1)...(19): siRNA sense strand
gaggaaggaauacuugaca

SEQ ID NO: 1301444 - RNA, 19 nt, Homo sapiens
  misc_RNA (1)...(19): siRNA sense strand
ccaguuccaaagugucuua

SEQ ID NO: 1301445 - RNA, 19 nt, Homo sapiens
  misc_RNA (1)...(19): siRNA sense strand
ugaguaucuugaugcagua

SEQ ID NO: 1301446 - RNA, 19 nt, Homo sapiens
  misc_RNA (1)...(19): siRNA sense strand
caccuuuagugaaguagaa

SEQ ID NO: 1301447 - RNA, 19 nt, Homo sapiens
  misc_RNA (1)...(19): siRNA sense strand
acagauaucaggauuugga

SEQ ID NO: 1301448 - RNA, 19 nt, Homo sapiens
  misc_RNA (1)...(19): siRNA sense strand
ucauugcugugauuguuau

SEQ ID NO: 1301449 - RNA, 19 nt, Homo sapiens
  misc_RNA (1)...(19): siRNA sense strand
ucagaugcacuuuauuugu

SEQ ID NO: 1301450 - RNA, 19 nt, Homo sapiens
  misc_RNA (1)...(19): siRNA sense strand
gugcugcuccagaguguaa

SEQ ID NO: 1301451 - RNA, 19 nt, Homo sapiens
  misc_RNA (1)...(19): siRNA sense strand
ggaaaacacaccuuuagug

SEQ ID NO: 1301452 - RNA, 19 nt, Homo sapiens
  misc_RNA (1)...(19): siRNA sense strand
aaggaucaguagcaauuug

SEQ ID NO: 1301453 - RNA, 19 nt, Homo sapiens
  misc_RNA (1)...(19): siRNA sense strand
uauauacgggauccuuuaa

SEQ ID NO: 1301454 - RNA, 19 nt, Homo sapiens
  misc_RNA (1)...(19): siRNA sense strand
ugaaguagaaguauuugag

SEQ ID NO: 1301455 - RNA, 19 nt, Homo sapiens
  misc_RNA (1)...(19): siRNA sense strand
cuugacaguuuggauguuu

SEQ ID NO: 1301456 - RNA, 19 nt, Homo sapiens
  misc_RNA (1)...(19): siRNA sense strand
cauauauacgggauccuuu

SEQ ID NO: 1301457 - RNA, 19 nt, Homo sapiens
  misc_RNA (1)...(19): siRNA sense strand
auauauacgggauccuuua

SEQ ID NO: 1301458 - RNA, 19 nt, Homo sapiens
  misc_RNA (1)...(19): siRNA sense strand
cuuaaaggaucaguagcaa

SEQ ID NO: 1301459 - RNA, 19 nt, Homo sapiens
  misc_RNA (1)...(19): siRNA sense strand
uaaaccugaggaaggaaua

SEQ ID NO: 1301460 - RNA, 19 nt, Homo sapiens
  misc_RNA (1)...(19): siRNA sense strand
agaugacgccuguuauaga

SEQ ID NO: 1301461 - RNA, 19 nt, Homo sapiens
  misc_RNA (1)...(19): siRNA sense strand
ugugauuguuauugccaua

SEQ ID NO: 1301462 - RNA, 19 nt, Homo sapiens
  misc_RNA (1)...(19): siRNA sense strand
gagagcacgauuuauugug

SEQ ID NO: 1301463 - RNA, 19 nt, Homo sapiens
  misc_RNA (1)...(19): siRNA sense strand
gaaguauuugaguaucuug

SEQ ID NO: 1301464 - RNA, 19 nt, Homo sapiens
  misc_RNA (1)...(19): siRNA sense strand
ggcuaccugucucagauga

SEQ ID NO: 1301465 - RNA, 19 nt, Homo sapiens
  misc_RNA (1)...(19): siRNA sense strand
ccucuugccacccauacua

SEQ ID NO: 1301466 - RNA, 19 nt, Homo sapiens
  misc_RNA (1)...(19): siRNA sense strand
gauaucaggauuuggaaaa

SEQ ID NO: 1301467 - RNA, 19 nt, Homo sapiens
  misc_RNA (1)...(19): siRNA sense strand
ccaugguguugcugcugua

SEQ ID NO: 1301468 - RNA, 19 nt, Homo sapiens
  misc_RNA (1)...(19): siRNA sense strand
cagaugacgccuguuauag

SEQ ID NO: 1301469 - RNA, 19 nt, Homo sapiens
  misc_RNA (1)...(19): siRNA sense strand
cagaugguggagcugaaua

SEQ ID NO: 1301470 - RNA, 19 nt, Homo sapiens
  misc_RNA (1)...(19): siRNA sense strand
gucauugcugugauuguua

SEQ ID NO: 1301471 - RNA, 19 nt, Homo sapiens
  misc_RNA (1)...(19): siRNA sense strand
uuggugaacgaguagauua

SEQ ID NO: 1301472 - RNA, 19 nt, Homo sapiens
  misc_RNA (1)...(19): siRNA sense strand
ggagccaccaacauuugaa

SEQ ID NO: 1301473 - RNA, 19 nt, Homo sapiens
  misc_RNA (1)...(19): siRNA sense strand
gcgcuuuccuggguugcuu

SEQ ID NO: 1301474 - RNA, 19 nt, Homo sapiens
  misc_RNA (1)...(19): siRNA sense strand
uacuacaaagcaacaguua

SEQ ID NO: 1301475 - RNA, 19 nt, Homo sapiens
  misc_RNA (1)...(19): siRNA sense strand
cuugaugcaguaacuuaua

SEQ ID NO: 1301476 - RNA, 19 nt, Homo sapiens
  misc_RNA (1)...(19): siRNA sense strand
aaacauguccauauauacg

SEQ ID NO: 1301477 - RNA, 19 nt, Homo sapiens
  misc_RNA (1)...(19): siRNA sense strand
guguaaaguggucaaaugu

SEQ ID NO: 1301478 - RNA, 19 nt, Homo sapiens
  misc_RNA (1)...(19): siRNA sense strand
cuuacgaguuugguuauca

SEQ ID NO: 1301479 - RNA, 19 nt, Homo sapiens
  misc_RNA (1)...(19): siRNA sense strand
aaccaaaacccuacuauga

SEQ ID NO: 1301480 - RNA, 19 nt, Homo sapiens
  misc_RNA (1)...(19): siRNA sense strand
gcagaugguggagcugaau

SEQ ID NO: 1301481 - RNA, 19 nt, Homo sapiens
  misc_RNA (1)...(19): siRNA sense strand
uacgggauccuuuaaaugg

SEQ ID NO: 1301482 - RNA, 19 nt, Homo sapiens
  misc_RNA (1)...(19): siRNA sense strand
cgauggcagcgacacaauu

SEQ ID NO: 1301483 - RNA, 19 nt, Homo sapiens
  misc_RNA (1)...(19): siRNA sense strand
ggagcugaauaugccacuu

SEQ ID NO: 1301484 - RNA, 19 nt, Homo sapiens
  misc_RNA (1)...(19): siRNA sense strand
caacauuugaagcuaugga

SEQ ID NO: 1301485 - RNA, 19 nt, Homo sapiens
  misc_RNA (1)...(19): siRNA sense strand
ggagagagcacgauuuauu

SEQ ID NO: 1301486 - RNA, 19 nt, Homo sapiens
  misc_RNA (1)...(19): siRNA sense strand
agagaaacauguccauaua

SEQ ID NO: 1301487 - RNA, 19 nt, Homo sapiens
  misc_RNA (1)...(19): siRNA sense strand
cagaugcacuuuauuugua

SEQ ID NO: 1301488 - RNA, 19 nt, Homo sapiens
  misc_RNA (1)...(19): siRNA sense strand
ggacuuacgaguuugguua

SEQ ID NO: 1301489 - RNA, 19 nt, Homo sapiens
  misc_RNA (1)...(19): siRNA sense strand
aaacagauaucaggauuug

SEQ ID NO: 1301490 - RNA, 19 nt, Homo sapiens
  misc_RNA (1)...(19): siRNA sense strand
cuauggagcucauugguaa

SEQ ID NO: 1301491 - RNA, 19 nt, Homo sapiens
  misc_RNA (1)...(19): siRNA sense strand
aaacacaccuuuagugaag

SEQ ID NO: 1301492 - RNA, 19 nt, Homo sapiens
  misc_RNA (1)...(19): siRNA sense strand
gaacuuaaaggaucaguag

SEQ ID NO: 1301493 - RNA, 19 nt, Homo sapiens
  misc_RNA (1)...(19): siRNA sense strand
gaaaacagauaucaggauu

SEQ ID NO: 1301494 - RNA, 19 nt, Homo sapiens
  misc_RNA (1)...(19): siRNA sense strand
uaaaggaucaguagcaauu

SEQ ID NO: 1301495 - RNA, 19 nt, Homo sapiens
  misc_RNA (1)...(19): siRNA sense strand
aaaugggacuuacgaguuu

SEQ ID NO: 1301496 - RNA, 19 nt, Homo sapiens
  misc_RNA (1)...(19): siRNA sense strand
guuaucagaugcacuuuau

SEQ ID NO: 1301497 - RNA, 19 nt, Homo sapiens
  misc_RNA (1)...(19): siRNA sense strand
ugagauuggugaacgagua

SEQ ID NO: 1301498 - RNA, 19 nt, Homo sapiens
  misc_RNA (1)...(19): siRNA sense strand
gugaacgaguagauuauaa

SEQ ID NO: 1301499 - RNA, 19 nt, Homo sapiens
  misc_RNA (1)...(19): siRNA sense strand
gagagagcacgauuuauug

SEQ ID NO: 1301500 - RNA, 19 nt, Homo sapiens
  misc_RNA (1)...(19): siRNA sense strand
caaaugggacuuacgaguu

SEQ ID NO: 1301501 - RNA, 19 nt, Homo sapiens
  misc_RNA (1)...(19): siRNA sense strand
ggucauugcugugauuguu

SEQ ID NO: 1301502 - RNA, 19 nt, Homo sapiens
  misc_RNA (1)...(19): siRNA sense strand
ccagauccauuuucacuua

SEQ ID NO: 1301503 - RNA, 19 nt, Homo sapiens
  misc_RNA (1)...(19): siRNA sense strand
gaaggaauacuugacaguu

SEQ ID NO: 1301504 - RNA, 19 nt, Homo sapiens
  misc_RNA (1)...(19): siRNA sense strand
aaggaauacuugacaguuu

SEQ ID NO: 1301505 - RNA, 19 nt, Homo sapiens
  misc_RNA (1)...(19): siRNA sense strand
ucagaugacgccuguuaua

SEQ ID NO: 1301506 - RNA, 19 nt, Homo sapiens
  misc_RNA (1)...(19): siRNA sense strand
gaaaacacaccuuuaguga

SEQ ID NO: 1301507 - RNA, 19 nt, Homo sapiens
  misc_RNA (1)...(19): siRNA sense strand
gaugacgccuguuauagag

SEQ ID NO: 1301508 - RNA, 19 nt, Homo sapiens
  misc_RNA (1)...(19): siRNA sense strand
gagaaacauguccauauau

SEQ ID NO: 1301509 - RNA, 19 nt, Homo sapiens
  misc_RNA (1)...(19): siRNA sense strand
acgaguagauuauaagugu

SEQ ID NO: 1301510 - RNA, 19 nt, Homo sapiens
  misc_RNA (1)...(19): siRNA sense strand
cuacaaagcaacaguuaug

SEQ ID NO: 1301511 - RNA, 19 nt, Homo sapiens
  misc_RNA (1)...(19): siRNA sense strand
ccaccaacauuugaagcua

SEQ ID NO: 1301512 - RNA, 19 nt, Homo sapiens
  misc_RNA (1)...(19): siRNA sense strand
uauacgggauccuuuaaau

SEQ ID NO: 1301513 - RNA, 19 nt, Homo sapiens
  misc_RNA (1)...(19): siRNA sense strand
cgaguuugguuaucagaug

SEQ ID NO: 1301514 - RNA, 19 nt, Homo sapiens
  misc_RNA (1)...(19): siRNA sense strand
gaacgaguagauuauaagu

SEQ ID NO: 1301515 - RNA, 19 nt, Homo sapiens
  misc_RNA (1)...(19): siRNA sense strand
gugaggagccaccaacauu

SEQ ID NO: 1301516 - RNA, 19 nt, Homo sapiens
  misc_RNA (1)...(19): siRNA sense strand
gauggcagcgacacaauug

SEQ ID NO: 1301517 - RNA, 19 nt, Homo sapiens
  misc_RNA (1)...(19): siRNA sense strand
gcuauggagcucauuggua

SEQ ID NO: 1301518 - RNA, 19 nt, Homo sapiens
  misc_RNA (1)...(19): siRNA sense strand
gaggagccaccaacauuug

SEQ ID NO: 1301519 - RNA, 19 nt, Homo sapiens
  misc_RNA (1)...(19): siRNA sense strand
acacaccuuuagugaagua

SEQ ID NO: 1301520 - RNA, 19 nt, Homo sapiens
  misc_RNA (1)...(19): siRNA sense strand
ucucagaugacgccuguua

SEQ ID NO: 1301521 - RNA, 19 nt, Homo sapiens
  misc_RNA (1)...(19): siRNA sense strand
uagagaaacauguccauau

SEQ ID NO: 1301522 - RNA, 19 nt, Homo sapiens
  misc_RNA (1)...(19): siRNA sense strand
ggugaacgaguagauuaua

SEQ ID NO: 1301523 - RNA, 19 nt, Homo sapiens
  misc_RNA (1)...(19): siRNA sense strand
gaaguagaaguauuugagu

SEQ ID NO: 1301524 - RNA, 19 nt, Homo sapiens
  misc_RNA (1)...(19): siRNA sense strand
gaaacauguccauauauac

SEQ ID NO: 1301525 - RNA, 19 nt, Homo sapiens
  misc_RNA (1)...(19): siRNA sense strand
ugacgccuguuauagagaa

SEQ ID NO: 1301526 - RNA, 19 nt, Homo sapiens
  misc_RNA (1)...(19): siRNA sense strand
cgaguagauuauaagugua

SEQ ID NO: 1301527 - RNA, 19 nt, Homo sapiens
  misc_RNA (1)...(19): siRNA sense strand
gcacuuuauuuguaaugag

SEQ ID NO: 1301528 - RNA, 19 nt, Homo sapiens
  misc_RNA (1)...(19): siRNA sense strand
guagaaguauuugaguauc

SEQ ID NO: 1301529 - RNA, 19 nt, Homo sapiens
  misc_RNA (1)...(19): siRNA sense strand
guauuugaguaucuugaug

SEQ ID NO: 1301530 - RNA, 19 nt, Homo sapiens
  misc_RNA (1)...(19): siRNA sense strand
aggaauacuugacaguuug

SEQ ID NO: 1301531 - RNA, 19 nt, Homo sapiens
  misc_RNA (1)...(19): siRNA sense strand
aguguaaaguggucaaaug

SEQ ID NO: 1301532 - RNA, 19 nt, Homo sapiens
  misc_RNA (1)...(19): siRNA sense strand
ccaaaacccuacuaugaga

SEQ ID NO: 1301533 - RNA, 19 nt, Homo sapiens
  misc_RNA (1)...(19): siRNA sense strand
ccacccauacuauuuguga

SEQ ID NO: 1301534 - RNA, 19 nt, Homo sapiens
  misc_RNA (1)...(19): siRNA sense strand
caccaacauuugaagcuau

SEQ ID NO: 1301535 - RNA, 19 nt, Homo sapiens
  misc_RNA (1)...(19): siRNA sense strand
uuggagagagcacgauuua

SEQ ID NO: 1301536 - RNA, 19 nt, Homo sapiens
  misc_RNA (1)...(19): siRNA sense strand
gguuaucagaugcacuuua

SEQ ID NO: 1301537 - RNA, 19 nt, Homo sapiens
  misc_RNA (1)...(19): siRNA sense strand
ugaggagccaccaacauuu

SEQ ID NO: 1301538 - RNA, 19 nt, Homo sapiens
  misc_RNA (1)...(19): siRNA sense strand
ggaaggaauacuugacagu

SEQ ID NO: 1301539 - RNA, 19 nt, Homo sapiens
  misc_RNA (1)...(19): siRNA sense strand
gaggaaggaauacuugaca

SEQ ID NO: 1301540 - RNA, 19 nt, Homo sapiens
  misc_RNA (1)...(19): siRNA sense strand
ugaguaucuugaugcagua

SEQ ID NO: 1301541 - RNA, 19 nt, Homo sapiens
  misc_RNA (1)...(19): siRNA sense strand
caccuuuagugaaguagaa

SEQ ID NO: 1301542 - RNA, 19 nt, Homo sapiens
  misc_RNA (1)...(19): siRNA sense strand
acagauaucaggauuugga

SEQ ID NO: 1301543 - RNA, 19 nt, Homo sapiens
  misc_RNA (1)...(19): siRNA sense strand
ucauugcugugauuguuau

SEQ ID NO: 1301544 - RNA, 19 nt, Homo sapiens
  misc_RNA (1)...(19): siRNA sense strand
ucagaugcacuuuauuugu

SEQ ID NO: 1301545 - RNA, 19 nt, Homo sapiens
  misc_RNA (1)...(19): siRNA sense strand
gugcugcuccagaguguaa

SEQ ID NO: 1301546 - RNA, 19 nt, Homo sapiens
  misc_RNA (1)...(19): siRNA sense strand
ggaaaacacaccuuuagug

SEQ ID NO: 1301547 - RNA, 19 nt, Homo sapiens
  misc_RNA (1)...(19): siRNA sense strand
aaggaucaguagcaauuug

SEQ ID NO: 1301548 - RNA, 19 nt, Homo sapiens
  misc_RNA (1)...(19): siRNA sense strand
uauauacgggauccuuuaa

SEQ ID NO: 1301549 - RNA, 19 nt, Homo sapiens
  misc_RNA (1)...(19): siRNA sense strand
ugaaguagaaguauuugag

SEQ ID NO: 1301550 - RNA, 19 nt, Homo sapiens
  misc_RNA (1)...(19): siRNA sense strand
cuugacaguuuggauguuu

SEQ ID NO: 1301551 - RNA, 19 nt, Homo sapiens
  misc_RNA (1)...(19): siRNA sense strand
cauauauacgggauccuuu

SEQ ID NO: 1301552 - RNA, 19 nt, Homo sapiens
  misc_RNA (1)...(19): siRNA sense strand
auauauacgggauccuuua

SEQ ID NO: 1301553 - RNA, 19 nt, Homo sapiens
  misc_RNA (1)...(19): siRNA sense strand
cuuaaaggaucaguagcaa

SEQ ID NO: 1301554 - RNA, 19 nt, Homo sapiens
  misc_RNA (1)...(19): siRNA sense strand
uaaaccugaggaaggaaua

SEQ ID NO: 1301555 - RNA, 19 nt, Homo sapiens
  misc_RNA (1)...(19): siRNA sense strand
agaugacgccuguuauaga

SEQ ID NO: 1301556 - RNA, 19 nt, Homo sapiens
  misc_RNA (1)...(19): siRNA sense strand
ugugauuguuauugccaua

SEQ ID NO: 1301557 - RNA, 19 nt, Homo sapiens
  misc_RNA (1)...(19): siRNA sense strand
gagagcacgauuuauugug

SEQ ID NO: 1301558 - RNA, 19 nt, Homo sapiens
  misc_RNA (1)...(19): siRNA sense strand
gaaguauuugaguaucuug

SEQ ID NO: 1301559 - RNA, 19 nt, Homo sapiens
  misc_RNA (1)...(19): siRNA sense strand
ccucuugccacccauacua

SEQ ID NO: 1301560 - RNA, 19 nt, Homo sapiens
  misc_RNA (1)...(19): siRNA sense strand
gauaucaggauuuggaaaa

SEQ ID NO: 1301561 - RNA, 19 nt, Homo sapiens
  misc_RNA (1)...(19): siRNA sense strand
ggcuaccugucucagauga

SEQ ID NO: 1301562 - RNA, 19 nt, Homo sapiens
  misc_RNA (1)...(19): siRNA sense strand
ccaugguguugcugcugua

SEQ ID NO: 1301563 - RNA, 19 nt, Homo sapiens
  misc_RNA (1)...(19): siRNA sense strand
cagaugacgccuguuauag

SEQ ID NO: 1301564 - RNA, 19 nt, Homo sapiens
  misc_RNA (1)...(19): siRNA sense strand
gucauugcugugauuguua

SEQ ID NO: 1301565 - RNA, 19 nt, Homo sapiens
  misc_RNA (1)...(19): siRNA sense strand
uuggugaacgaguagauua

SEQ ID NO: 1301566 - RNA, 19 nt, Homo sapiens
  misc_RNA (1)...(19): siRNA sense strand
ggagccaccaacauuugaa

SEQ ID NO: 1301567 - RNA, 19 nt, Homo sapiens
  misc_RNA (1)...(19): siRNA sense strand
gcgcuuuccuggguugcuu

SEQ ID NO: 1301568 - RNA, 19 nt, Homo sapiens
  misc_RNA (1)...(19): siRNA sense strand
uacuacaaagcaacaguua

SEQ ID NO: 1301569 - RNA, 19 nt, Homo sapiens
  misc_RNA (1)...(19): siRNA sense strand
cuugaugcaguaacuuaua

SEQ ID NO: 1301570 - RNA, 19 nt, Homo sapiens
  misc_RNA (1)...(19): siRNA sense strand
aaacauguccauauauacg

SEQ ID NO: 1301571 - RNA, 19 nt, Homo sapiens
  misc_RNA (1)...(19): siRNA sense strand
guguaaaguggucaaaugu

SEQ ID NO: 1301572 - RNA, 19 nt, Homo sapiens
  misc_RNA (1)...(19): siRNA sense strand
cuuacgaguuugguuauca

SEQ ID NO: 1301573 - RNA, 19 nt, Homo sapiens
  misc_RNA (1)...(19): siRNA sense strand
uacgggauccuuuaaaugg

SEQ ID NO: 1301574 - RNA, 19 nt, Homo sapiens
  misc_RNA (1)...(19): siRNA sense strand
aaccaaaacccuacuauga

SEQ ID NO: 1301575 - RNA, 19 nt, Homo sapiens
  misc_RNA (1)...(19): siRNA sense strand
cccaauaugugaaaagguu

SEQ ID NO: 1301576 - RNA, 19 nt, Homo sapiens
  misc_RNA (1)...(19): siRNA sense strand
cgauggcagcgacacaauu

SEQ ID NO: 1301577 - RNA, 19 nt, Homo sapiens
  misc_RNA (1)...(19): siRNA sense strand
gauccauuuucacuuauug

SEQ ID NO: 1301578 - RNA, 19 nt, Homo sapiens
  misc_RNA (1)...(19): siRNA sense strand
uugaugcaguaacuuauag

SEQ ID NO: 1301579 - RNA, 19 nt, Homo sapiens
  misc_RNA (1)...(19): siRNA sense strand
guaucuugaugcaguaacu

SEQ ID NO: 1301580 - RNA, 19 nt, Homo sapiens
  misc_RNA (1)...(19): siRNA sense strand
caacauuugaagcuaugga

SEQ ID NO: 1301581 - RNA, 19 nt, Homo sapiens
  misc_RNA (1)...(19): siRNA sense strand
gagauuggugaacgaguag

SEQ ID NO: 1301582 - RNA, 19 nt, Homo sapiens
  misc_RNA (1)...(19): siRNA sense strand
ggagagagcacgauuuauu

SEQ ID NO: 1301583 - RNA, 19 nt, Homo sapiens
  misc_RNA (1)...(19): siRNA sense strand
agagaaacauguccauaua

SEQ ID NO: 1301584 - RNA, 19 nt, Homo sapiens
  misc_RNA (1)...(19): siRNA sense strand
cagaugcacuuuauuugua

SEQ ID NO: 1301585 - RNA, 19 nt, Homo sapiens
  misc_RNA (1)...(19): siRNA sense strand
ggacuuacgaguuugguua

SEQ ID NO: 1301586 - RNA, 19 nt, Homo sapiens
  misc_RNA (1)...(19): siRNA sense strand
aaacagauaucaggauuug

SEQ ID NO: 1301587 - RNA, 19 nt, Homo sapiens
  misc_RNA (1)...(19): siRNA sense strand
cuauggagcucauugguaa

SEQ ID NO: 1301588 - RNA, 19 nt, Homo sapiens
  misc_RNA (1)...(19): siRNA sense strand
aaacacaccuuuagugaag

SEQ ID NO: 1301589 - RNA, 19 nt, Homo sapiens
  misc_RNA (1)...(19): siRNA sense strand
gaacuuaaaggaucaguag

SEQ ID NO: 1301590 - RNA, 19 nt, Homo sapiens
  misc_RNA (1)...(19): siRNA sense strand
gaaaacagauaucaggauu

SEQ ID NO: 1301591 - RNA, 19 nt, Homo sapiens
  misc_RNA (1)...(19): siRNA sense strand
uaaaggaucaguagcaauu

SEQ ID NO: 1301592 - RNA, 19 nt, Homo sapiens
  misc_RNA (1)...(19): siRNA sense strand
aaaugggacuuacgaguuu

SEQ ID NO: 1301593 - RNA, 19 nt, Homo sapiens
  misc_RNA (1)...(19): siRNA sense strand
guuaucagaugcacuuuau

SEQ ID NO: 1301594 - RNA, 19 nt, Homo sapiens
  misc_RNA (1)...(19): siRNA sense strand
ugagauuggugaacgagua

SEQ ID NO: 1301595 - RNA, 19 nt, Homo sapiens
  misc_RNA (1)...(19): siRNA sense strand
gugaacgaguagauuauaa

SEQ ID NO: 1301596 - RNA, 19 nt, Homo sapiens
  misc_RNA (1)...(19): siRNA sense strand
gagagagcacgauuuauug

SEQ ID NO: 1301597 - RNA, 19 nt, Homo sapiens
  misc_RNA (1)...(19): siRNA sense strand
caaaugggacuuacgaguu

SEQ ID NO: 1301598 - RNA, 19 nt, Homo sapiens
  misc_RNA (1)...(19): siRNA sense strand
ggucauugcugugauuguu

SEQ ID NO: 1301599 - RNA, 19 nt, Homo sapiens
  misc_RNA (1)...(19): siRNA sense strand
ccagauccauuuucacuua

SEQ ID NO: 1301600 - RNA, 19 nt, Homo sapiens
  misc_RNA (1)...(19): siRNA sense strand
gaaggaauacuugacaguu

SEQ ID NO: 1301601 - RNA, 19 nt, Homo sapiens
  misc_RNA (1)...(19): siRNA sense strand
aaggaauacuugacaguuu

SEQ ID NO: 1301602 - RNA, 19 nt, Homo sapiens
  misc_RNA (1)...(19): siRNA sense strand
ucagaugacgccuguuaua

SEQ ID NO: 1301603 - RNA, 19 nt, Homo sapiens
  misc_RNA (1)...(19): siRNA sense strand
gaaaacacaccuuuaguga

SEQ ID NO: 1301604 - RNA, 19 nt, Homo sapiens
  misc_RNA (1)...(19): siRNA sense strand
gaugacgccuguuauagag

SEQ ID NO: 1301605 - RNA, 19 nt, Homo sapiens
  misc_RNA (1)...(19): siRNA sense strand
gagaaacauguccauauau

SEQ ID NO: 1301606 - RNA, 19 nt, Homo sapiens
  misc_RNA (1)...(19): siRNA sense strand
acgaguagauuauaagugu

SEQ ID NO: 1301607 - RNA, 19 nt, Homo sapiens
  misc_RNA (1)...(19): siRNA sense strand
cuacaaagcaacaguuaug

SEQ ID NO: 1301608 - RNA, 19 nt, Homo sapiens
  misc_RNA (1)...(19): siRNA sense strand
ccaccaacauuugaagcua

SEQ ID NO: 1301609 - RNA, 19 nt, Homo sapiens
  misc_RNA (1)...(19): siRNA sense strand
uauacgggauccuuuaaau

SEQ ID NO: 1301610 - RNA, 19 nt, Homo sapiens
  misc_RNA (1)...(19): siRNA sense strand
cgaguuugguuaucagaug

SEQ ID NO: 1301611 - RNA, 19 nt, Homo sapiens
  misc_RNA (1)...(19): siRNA sense strand
gaacgaguagauuauaagu

SEQ ID NO: 1301612 - RNA, 19 nt, Homo sapiens
  misc_RNA (1)...(19): siRNA sense strand
gugaggagccaccaacauu

SEQ ID NO: 1301613 - RNA, 19 nt, Homo sapiens
  misc_RNA (1)...(19): siRNA sense strand
gauggcagcgacacaauug

SEQ ID NO: 1301614 - RNA, 19 nt, Homo sapiens
  misc_RNA (1)...(19): siRNA sense strand
gcuauggagcucauuggua

SEQ ID NO: 1301615 - RNA, 19 nt, Homo sapiens
  misc_RNA (1)...(19): siRNA sense strand
gaggagccaccaacauuug

SEQ ID NO: 1301616 - RNA, 19 nt, Homo sapiens
  misc_RNA (1)...(19): siRNA sense strand
acacaccuuuagugaagua

SEQ ID NO: 1301617 - RNA, 19 nt, Homo sapiens
  misc_RNA (1)...(19): siRNA sense strand
ucucagaugacgccuguua

SEQ ID NO: 1301618 - RNA, 19 nt, Homo sapiens
  misc_RNA (1)...(19): siRNA sense strand
uagagaaacauguccauau

SEQ ID NO: 1301619 - RNA, 19 nt, Homo sapiens
  misc_RNA (1)...(19): siRNA sense strand
guuccaaagugucuuaaag

SEQ ID NO: 1301620 - RNA, 19 nt, Homo sapiens
  misc_RNA (1)...(19): siRNA sense strand
ggugaacgaguagauuaua

SEQ ID NO: 1301621 - RNA, 19 nt, Homo sapiens
  misc_RNA (1)...(19): siRNA sense strand
gaaguagaaguauuugagu

SEQ ID NO: 1301622 - RNA, 19 nt, Homo sapiens
  misc_RNA (1)...(19): siRNA sense strand
gaaacauguccauauauac

SEQ ID NO: 1301623 - RNA, 19 nt, Homo sapiens
  misc_RNA (1)...(19): siRNA sense strand
ugacgccuguuauagagaa

SEQ ID NO: 1301624 - RNA, 19 nt, Homo sapiens
  misc_RNA (1)...(19): siRNA sense strand
cgaguagauuauaagugua

SEQ ID NO: 1301625 - RNA, 19 nt, Homo sapiens
  misc_RNA (1)...(19): siRNA sense strand
gcacuuuauuuguaaugag

SEQ ID NO: 1301626 - RNA, 19 nt, Homo sapiens
  misc_RNA (1)...(19): siRNA sense strand
guagaaguauuugaguauc

SEQ ID NO: 1301627 - RNA, 19 nt, Homo sapiens
  misc_RNA (1)...(19): siRNA sense strand
guauuugaguaucuugaug

SEQ ID NO: 1301628 - RNA, 19 nt, Homo sapiens
  misc_RNA (1)...(19): siRNA sense strand
aggaauacuugacaguuug

SEQ ID NO: 1301629 - RNA, 19 nt, Homo sapiens
  misc_RNA (1)...(19): siRNA sense strand
ccaaaacccuacuaugaga

SEQ ID NO: 1301630 - RNA, 19 nt, Homo sapiens
  misc_RNA (1)...(19): siRNA sense strand
aguguaaaguggucaaaug

SEQ ID NO: 1301631 - RNA, 19 nt, Homo sapiens
  misc_RNA (1)...(19): siRNA sense strand
ccacccauacuauuuguga

SEQ ID NO: 1301632 - RNA, 19 nt, Homo sapiens
  misc_RNA (1)...(19): siRNA sense strand
caccaacauuugaagcuau

SEQ ID NO: 1301633 - RNA, 19 nt, Homo sapiens
  misc_RNA (1)...(19): siRNA sense strand
uuggagagagcacgauuua

SEQ ID NO: 1301634 - RNA, 19 nt, Homo sapiens
  misc_RNA (1)...(19): siRNA sense strand
gguuaucagaugcacuuua

SEQ ID NO: 1301635 - RNA, 19 nt, Homo sapiens
  misc_RNA (1)...(19): siRNA sense strand
ugaggagccaccaacauuu

SEQ ID NO: 1301636 - RNA, 19 nt, Homo sapiens
  misc_RNA (1)...(19): siRNA sense strand
ggaaggaauacuugacagu

SEQ ID NO: 1301637 - RNA, 19 nt, Homo sapiens
  misc_RNA (1)...(19): siRNA sense strand
gaggaaggaauacuugaca

SEQ ID NO: 1301638 - RNA, 19 nt, Homo sapiens
  misc_RNA (1)...(19): siRNA sense strand
ccaguuccaaagugucuua

SEQ ID NO: 1301639 - RNA, 19 nt, Homo sapiens
  misc_RNA (1)...(19): siRNA sense strand
ugaguaucuugaugcagua

SEQ ID NO: 1301640 - RNA, 19 nt, Homo sapiens
  misc_RNA (1)...(19): siRNA sense strand
caccuuuagugaaguagaa

SEQ ID NO: 1301641 - RNA, 19 nt, Homo sapiens
  misc_RNA (1)...(19): siRNA sense strand
acagauaucaggauuugga

SEQ ID NO: 1301642 - RNA, 19 nt, Homo sapiens
  misc_RNA (1)...(19): siRNA sense strand
ucauugcugugauuguuau

SEQ ID NO: 1301643 - RNA, 19 nt, Homo sapiens
  misc_RNA (1)...(19): siRNA sense strand
ucagaugcacuuuauuugu

SEQ ID NO: 1301644 - RNA, 19 nt, Homo sapiens
  misc_RNA (1)...(19): siRNA sense strand
gugcugcuccagaguguaa

SEQ ID NO: 1301645 - RNA, 19 nt, Homo sapiens
  misc_RNA (1)...(19): siRNA sense strand
ggaaaacacaccuuuagug

SEQ ID NO: 1301646 - RNA, 19 nt, Homo sapiens
  misc_RNA (1)...(19): siRNA sense strand
aaggaucaguagcaauuug

SEQ ID NO: 1301647 - RNA, 19 nt, Homo sapiens
  misc_RNA (1)...(19): siRNA sense strand
uauauacgggauccuuuaa

SEQ ID NO: 1301648 - RNA, 19 nt, Homo sapiens
  misc_RNA (1)...(19): siRNA sense strand
ugaaguagaaguauuugag

SEQ ID NO: 1301649 - RNA, 19 nt, Homo sapiens
  misc_RNA (1)...(19): siRNA sense strand
cuugacaguuuggauguuu

SEQ ID NO: 1301650 - RNA, 19 nt, Homo sapiens
  misc_RNA (1)...(19): siRNA sense strand
cauauauacgggauccuuu

SEQ ID NO: 1301651 - RNA, 19 nt, Homo sapiens
  misc_RNA (1)...(19): siRNA sense strand
auauauacgggauccuuua

SEQ ID NO: 1301652 - RNA, 19 nt, Homo sapiens
  misc_RNA (1)...(19): siRNA sense strand
cuuaaaggaucaguagcaa

SEQ ID NO: 1301653 - RNA, 19 nt, Homo sapiens
  misc_RNA (1)...(19): siRNA sense strand
uaaaccugaggaaggaaua

SEQ ID NO: 1301654 - RNA, 19 nt, Homo sapiens
  misc_RNA (1)...(19): siRNA sense strand
agaugacgccuguuauaga

SEQ ID NO: 1301655 - RNA, 19 nt, Homo sapiens
  misc_RNA (1)...(19): siRNA sense strand
ugugauuguuauugccaua

SEQ ID NO: 1301656 - RNA, 19 nt, Homo sapiens
  misc_RNA (1)...(19): siRNA sense strand
gagagcacgauuuauugug

SEQ ID NO: 1301657 - RNA, 19 nt, Homo sapiens
  misc_RNA (1)...(19): siRNA sense strand
gaaguauuugaguaucuug

SEQ ID NO: 1301658 - RNA, 19 nt, Homo sapiens
  misc_RNA (1)...(19): siRNA sense strand
ggcuaccugucucagauga

SEQ ID NO: 1301659 - RNA, 19 nt, Homo sapiens
  misc_RNA (1)...(19): siRNA sense strand
gauaucaggauuuggaaaa

SEQ ID NO: 1301660 - RNA, 19 nt, Homo sapiens
  misc_RNA (1)...(19): siRNA sense strand
ccucuugccacccauacua

SEQ ID NO: 1301661 - RNA, 19 nt, Homo sapiens
  misc_RNA (1)...(19): siRNA sense strand
ccaugguguugcugcugua

SEQ ID NO: 1301662 - RNA, 19 nt, Homo sapiens
  misc_RNA (1)...(19): siRNA sense strand
cagaugacgccuguuauag

SEQ ID NO: 1301663 - RNA, 19 nt, Homo sapiens
  misc_RNA (1)...(19): siRNA sense strand
uuggugaacgaguagauua

SEQ ID NO: 1301664 - RNA, 19 nt, Homo sapiens
  misc_RNA (1)...(19): siRNA sense strand
gucauugcugugauuguua

SEQ ID NO: 1301665 - RNA, 19 nt, Homo sapiens
  misc_RNA (1)...(19): siRNA sense strand
ggagccaccaacauuugaa

SEQ ID NO: 1301666 - RNA, 19 nt, Homo sapiens
  misc_RNA (1)...(19): siRNA sense strand
gcgcuuuccuggguugcuu

SEQ ID NO: 1301667 - RNA, 19 nt, Homo sapiens
  misc_RNA (1)...(19): siRNA sense strand
uacuacaaagcaacaguua

SEQ ID NO: 1301668 - RNA, 19 nt, Homo sapiens
  misc_RNA (1)...(19): siRNA sense strand
cuugaugcaguaacuuaua

SEQ ID NO: 1301669 - RNA, 19 nt, Homo sapiens
  misc_RNA (1)...(19): siRNA sense strand
aaacauguccauauauacg

SEQ ID NO: 1301670 - RNA, 19 nt, Homo sapiens
  misc_RNA (1)...(19): siRNA sense strand
guguaaaguggucaaaugu

SEQ ID NO: 1301671 - RNA, 19 nt, Homo sapiens
  misc_RNA (1)...(19): siRNA sense strand
cuuacgaguuugguuauca

SEQ ID NO: 1301672 - RNA, 19 nt, Homo sapiens
  misc_RNA (1)...(19): siRNA sense strand
uacgggauccuuuaaaugg

SEQ ID NO: 1301673 - RNA, 19 nt, Homo sapiens
  misc_RNA (1)...(19): siRNA sense strand
aaccaaaacccuacuauga

SEQ ID NO: 1301674 - RNA, 19 nt, Homo sapiens
  misc_RNA (1)...(19): siRNA sense strand
cccaauaugugaaaagguu

SEQ ID NO: 1301675 - RNA, 19 nt, Homo sapiens
  misc_RNA (1)...(19): siRNA sense strand
cgauggcagcgacacaauu

SEQ ID NO: 1301676 - RNA, 19 nt, Homo sapiens
  misc_RNA (1)...(19): siRNA sense strand
gauccauuuucacuuauug

SEQ ID NO: 1301677 - RNA, 19 nt, Homo sapiens
  misc_RNA (1)...(19): siRNA sense strand
uugaugcaguaacuuauag

SEQ ID NO: 1301678 - RNA, 19 nt, Homo sapiens
  misc_RNA (1)...(19): siRNA sense strand
guaucuugaugcaguaacu

SEQ ID NO: 1301679 - RNA, 19 nt, Homo sapiens
  misc_RNA (1)...(19): siRNA sense strand
caacauuugaagcuaugga

SEQ ID NO: 1301680 - RNA, 19 nt, Homo sapiens
  misc_RNA (1)...(19): siRNA sense strand
gagauuggugaacgaguag

SEQ ID NO: 1301681 - RNA, 19 nt, Homo sapiens
  misc_RNA (1)...(19): siRNA sense strand
ggagagagcacgauuuauu

SEQ ID NO: 1301682 - RNA, 19 nt, Homo sapiens
  misc_RNA (1)...(19): siRNA sense strand
agagaaacauguccauaua

SEQ ID NO: 1301683 - RNA, 19 nt, Homo sapiens
  misc_RNA (1)...(19): siRNA sense strand
cagaugcacuuuauuugua

SEQ ID NO: 1301684 - RNA, 19 nt, Homo sapiens
  misc_RNA (1)...(19): siRNA sense strand
ggacuuacgaguuugguua

SEQ ID NO: 1301685 - RNA, 19 nt, Homo sapiens
  misc_RNA (1)...(19): siRNA sense strand
aaacagauaucaggauuug

SEQ ID NO: 1301686 - RNA, 19 nt, Homo sapiens
  misc_RNA (1)...(19): siRNA sense strand
cuauggagcucauugguaa

SEQ ID NO: 1301687 - RNA, 19 nt, Homo sapiens
  misc_RNA (1)...(19): siRNA sense strand
aaacacaccuuuagugaag

SEQ ID NO: 1301688 - RNA, 19 nt, Homo sapiens
  misc_RNA (1)...(19): siRNA sense strand
gaacuuaaaggaucaguag

SEQ ID NO: 1301689 - RNA, 19 nt, Homo sapiens
  misc_RNA (1)...(19): siRNA sense strand
gaaaacagauaucaggauu

SEQ ID NO: 1301690 - RNA, 19 nt, Homo sapiens
  misc_RNA (1)...(19): siRNA sense strand
uaaaggaucaguagcaauu

SEQ ID NO: 1301691 - RNA, 19 nt, Homo sapiens
  misc_RNA (1)...(19): siRNA sense strand
aaaugggacuuacgaguuu

SEQ ID NO: 1301692 - RNA, 19 nt, Homo sapiens
  misc_RNA (1)...(19): siRNA sense strand
guuaucagaugcacuuuau

SEQ ID NO: 1301693 - RNA, 19 nt, Homo sapiens
  misc_RNA (1)...(19): siRNA sense strand
gagcugaauaugccacuua

SEQ ID NO: 1301694 - RNA, 19 nt, Homo sapiens
  misc_RNA (1)...(19): siRNA sense strand
ugagauuggugaacgagua

SEQ ID NO: 1301695 - RNA, 19 nt, Homo sapiens
  misc_RNA (1)...(19): siRNA sense strand
gugaacgaguagauuauaa

SEQ ID NO: 1301696 - RNA, 19 nt, Homo sapiens
  misc_RNA (1)...(19): siRNA sense strand
gagagagcacgauuuauug

SEQ ID NO: 1301697 - RNA, 19 nt, Homo sapiens
  misc_RNA (1)...(19): siRNA sense strand
caaaugggacuuacgaguu

SEQ ID NO: 1301698 - RNA, 19 nt, Homo sapiens
  misc_RNA (1)...(19): siRNA sense strand
ggucauugcugugauuguu

SEQ ID NO: 1301699 - RNA, 19 nt, Homo sapiens
  misc_RNA (1)...(19): siRNA sense strand
ccagauccauuuucacuua

SEQ ID NO: 1301700 - RNA, 19 nt, Homo sapiens
  misc_RNA (1)...(19): siRNA sense strand
gaaggaauacuugacaguu

SEQ ID NO: 1301701 - RNA, 19 nt, Homo sapiens
  misc_RNA (1)...(19): siRNA sense strand
aaggaauacuugacaguuu

SEQ ID NO: 1301702 - RNA, 19 nt, Homo sapiens
  misc_RNA (1)...(19): siRNA sense strand
ucagaugacgccuguuaua

SEQ ID NO: 1301703 - RNA, 19 nt, Homo sapiens
  misc_RNA (1)...(19): siRNA sense strand
gaaaacacaccuuuaguga

SEQ ID NO: 1301704 - RNA, 19 nt, Homo sapiens
  misc_RNA (1)...(19): siRNA sense strand
gaugacgccuguuauagag

SEQ ID NO: 1301705 - RNA, 19 nt, Homo sapiens
  misc_RNA (1)...(19): siRNA sense strand
gagaaacauguccauauau

SEQ ID NO: 1301706 - RNA, 19 nt, Homo sapiens
  misc_RNA (1)...(19): siRNA sense strand
ccacuuaccagacuaaauc

SEQ ID NO: 1301707 - RNA, 19 nt, Homo sapiens
  misc_RNA (1)...(19): siRNA sense strand
acgaguagauuauaagugu

SEQ ID NO: 1301708 - RNA, 19 nt, Homo sapiens
  misc_RNA (1)...(19): siRNA sense strand
cuacaaagcaacaguuaug

SEQ ID NO: 1301709 - RNA, 19 nt, Homo sapiens
  misc_RNA (1)...(19): siRNA sense strand
ccaccaacauuugaagcua

SEQ ID NO: 1301710 - RNA, 19 nt, Homo sapiens
  misc_RNA (1)...(19): siRNA sense strand
uauacgggauccuuuaaau

SEQ ID NO: 1301711 - RNA, 19 nt, Homo sapiens
  misc_RNA (1)...(19): siRNA sense strand
cgaguuugguuaucagaug

SEQ ID NO: 1301712 - RNA, 19 nt, Homo sapiens
  misc_RNA (1)...(19): siRNA sense strand
gaacgaguagauuauaagu

SEQ ID NO: 1301713 - RNA, 19 nt, Homo sapiens
  misc_RNA (1)...(19): siRNA sense strand
gugaggagccaccaacauu

SEQ ID NO: 1301714 - RNA, 19 nt, Homo sapiens
  misc_RNA (1)...(19): siRNA sense strand
gauggcagcgacacaauug

SEQ ID NO: 1301715 - RNA, 19 nt, Homo sapiens
  misc_RNA (1)...(19): siRNA sense strand
ucucagaugacgccuguua

SEQ ID NO: 1301716 - RNA, 19 nt, Homo sapiens
  misc_RNA (1)...(19): siRNA sense strand
gaggagccaccaacauuug

SEQ ID NO: 1301717 - RNA, 19 nt, Homo sapiens
  misc_RNA (1)...(19): siRNA sense strand
gcuauggagcucauuggua

SEQ ID NO: 1301718 - RNA, 19 nt, Homo sapiens
  misc_RNA (1)...(19): siRNA sense strand
acacaccuuuagugaagua

SEQ ID NO: 1301719 - RNA, 19 nt, Homo sapiens
  misc_RNA (1)...(19): siRNA sense strand
uagagaaacauguccauau

SEQ ID NO: 1301720 - RNA, 19 nt, Homo sapiens
  misc_RNA (1)...(19): siRNA sense strand
guuccaaagugucuuaaag

SEQ ID NO: 1301721 - RNA, 19 nt, Homo sapiens
  misc_RNA (1)...(19): siRNA sense strand
ggugaacgaguagauuaua

SEQ ID NO: 1301722 - RNA, 19 nt, Homo sapiens
  misc_RNA (1)...(19): siRNA sense strand
gaaguagaaguauuugagu

SEQ ID NO: 1301723 - RNA, 19 nt, Homo sapiens
  misc_RNA (1)...(19): siRNA sense strand
gaaacauguccauauauac

SEQ ID NO: 1301724 - RNA, 19 nt, Homo sapiens
  misc_RNA (1)...(19): siRNA sense strand
ugacgccuguuauagagaa

SEQ ID NO: 1301725 - RNA, 19 nt, Homo sapiens
  misc_RNA (1)...(19): siRNA sense strand
cgaguagauuauaagugua

SEQ ID NO: 1301726 - RNA, 19 nt, Homo sapiens
  misc_RNA (1)...(19): siRNA sense strand
gcacuuuauuuguaaugag

SEQ ID NO: 1301727 - RNA, 19 nt, Homo sapiens
  misc_RNA (1)...(19): siRNA sense strand
guagaaguauuugaguauc

SEQ ID NO: 1301728 - RNA, 19 nt, Homo sapiens
  misc_RNA (1)...(19): siRNA sense strand
guauuugaguaucuugaug

SEQ ID NO: 1301729 - RNA, 19 nt, Homo sapiens
  misc_RNA (1)...(19): siRNA sense strand
aggaauacuugacaguuug

SEQ ID NO: 1301730 - RNA, 19 nt, Homo sapiens
  misc_RNA (1)...(19): siRNA sense strand
ccaaaacccuacuaugaga

SEQ ID NO: 1301731 - RNA, 19 nt, Homo sapiens
  misc_RNA (1)...(19): siRNA sense strand
aguguaaaguggucaaaug

SEQ ID NO: 1301732 - RNA, 19 nt, Homo sapiens
  misc_RNA (1)...(19): siRNA sense strand
ccacccauacuauuuguga

SEQ ID NO: 1301733 - RNA, 19 nt, Homo sapiens
  misc_RNA (1)...(19): siRNA sense strand
uuggagagagcacgauuua

SEQ ID NO: 1301734 - RNA, 19 nt, Homo sapiens
  misc_RNA (1)...(19): siRNA sense strand
gguuaucagaugcacuuua

SEQ ID NO: 1301735 - RNA, 19 nt, Homo sapiens
  misc_RNA (1)...(19): siRNA sense strand
caccaacauuugaagcuau

SEQ ID NO: 1301736 - RNA, 19 nt, Homo sapiens
  misc_RNA (1)...(19): siRNA sense strand
ugaggagccaccaacauuu

SEQ ID NO: 1301737 - RNA, 19 nt, Homo sapiens
  misc_RNA (1)...(19): siRNA sense strand
ggaaggaauacuugacagu

SEQ ID NO: 1301738 - RNA, 19 nt, Homo sapiens
  misc_RNA (1)...(19): siRNA sense strand
gaggaaggaauacuugaca

SEQ ID NO: 1301739 - RNA, 19 nt, Homo sapiens
  misc_RNA (1)...(19): siRNA sense strand
ccaguuccaaagugucuua

SEQ ID NO: 1301740 - RNA, 19 nt, Homo sapiens
  misc_RNA (1)...(19): siRNA sense strand
ugaguaucuugaugcagua

SEQ ID NO: 1301741 - RNA, 19 nt, Homo sapiens
  misc_RNA (1)...(19): siRNA sense strand
caccuuuagugaaguagaa

SEQ ID NO: 1301742 - RNA, 19 nt, Homo sapiens
  misc_RNA (1)...(19): siRNA sense strand
acagauaucaggauuugga

SEQ ID NO: 1301743 - RNA, 19 nt, Homo sapiens
  misc_RNA (1)...(19): siRNA sense strand
ucauugcugugauuguuau

SEQ ID NO: 1301744 - RNA, 19 nt, Homo sapiens
  misc_RNA (1)...(19): siRNA sense strand
ucagaugcacuuuauuugu

SEQ ID NO: 1301745 - RNA, 19 nt, Homo sapiens
  misc_RNA (1)...(19): siRNA sense strand
gugcugcuccagaguguaa

SEQ ID NO: 1301746 - RNA, 19 nt, Homo sapiens
  misc_RNA (1)...(19): siRNA sense strand
ggaaaacacaccuuuagug

SEQ ID NO: 1301747 - RNA, 19 nt, Homo sapiens
  misc_RNA (1)...(19): siRNA sense strand
aaggaucaguagcaauuug

SEQ ID NO: 1301748 - RNA, 19 nt, Homo sapiens
  misc_RNA (1)...(19): siRNA sense strand
uauauacgggauccuuuaa

SEQ ID NO: 1301749 - RNA, 19 nt, Homo sapiens
  misc_RNA (1)...(19): siRNA sense strand
ugaaguagaaguauuugag

SEQ ID NO: 1301750 - RNA, 19 nt, Homo sapiens
  misc_RNA (1)...(19): siRNA sense strand
cuugacaguuuggauguuu

SEQ ID NO: 1301751 - RNA, 19 nt, Homo sapiens
  misc_RNA (1)...(19): siRNA sense strand
cauauauacgggauccuuu

SEQ ID NO: 1301752 - RNA, 19 nt, Homo sapiens
  misc_RNA (1)...(19): siRNA sense strand
auauauacgggauccuuua

SEQ ID NO: 1301753 - RNA, 19 nt, Homo sapiens
  misc_RNA (1)...(19): siRNA sense strand
cuuaaaggaucaguagcaa

SEQ ID NO: 1301754 - RNA, 19 nt, Homo sapiens
  misc_RNA (1)...(19): siRNA sense strand
uaaaccugaggaaggaaua

SEQ ID NO: 1301755 - RNA, 19 nt, Homo sapiens
  misc_RNA (1)...(19): siRNA sense strand
agaugacgccuguuauaga

SEQ ID NO: 1301756 - RNA, 19 nt, Homo sapiens
  misc_RNA (1)...(19): siRNA sense strand
ugugauuguuauugccaua

SEQ ID NO: 1301757 - RNA, 19 nt, Homo sapiens
  misc_RNA (1)...(19): siRNA sense strand
gagagcacgauuuauugug

SEQ ID NO: 1301758 - RNA, 19 nt, Homo sapiens
  misc_RNA (1)...(19): siRNA sense strand
gaaguauuugaguaucuug

SEQ ID NO: 1301759 - RNA, 19 nt, Homo sapiens
  misc_RNA (1)...(19): siRNA sense strand
ggcuaccugucucagauga

SEQ ID NO: 1301760 - RNA, 19 nt, Homo sapiens
  misc_RNA (1)...(19): siRNA sense strand
gauaucaggauuuggaaaa

SEQ ID NO: 1301761 - RNA, 19 nt, Homo sapiens
  misc_RNA (1)...(19): siRNA sense strand
ccucuugccacccauacua

SEQ ID NO: 1301762 - RNA, 19 nt, Homo sapiens
  misc_RNA (1)...(19): siRNA sense strand
ccaugguguugcugcugua

SEQ ID NO: 1301763 - RNA, 19 nt, Homo sapiens
  misc_RNA (1)...(19): siRNA sense strand
cagaugacgccuguuauag

SEQ ID NO: 1301764 - RNA, 19 nt, Homo sapiens
  misc_RNA (1)...(19): siRNA sense strand
cagaugguggagcugaaua

SEQ ID NO: 1301765 - RNA, 19 nt, Homo sapiens
  misc_RNA (1)...(19): siRNA sense strand
gucauugcugugauuguua

SEQ ID NO: 1301766 - RNA, 19 nt, Homo sapiens
  misc_RNA (1)...(19): siRNA sense strand
ggagccaccaacauuugaa

SEQ ID NO: 1301767 - RNA, 19 nt, Homo sapiens
  misc_RNA (1)...(19): siRNA sense strand
uuggugaacgaguagauua

SEQ ID NO: 1301768 - RNA, 19 nt, Homo sapiens
  misc_RNA (1)...(19): siRNA sense strand
gcgcuuuccuggguugcuu

SEQ ID NO: 1301769 - RNA, 19 nt, Homo sapiens
  misc_RNA (1)...(19): siRNA sense strand
uacuacaaagcaacaguua

SEQ ID NO: 1301770 - RNA, 19 nt, Homo sapiens
  misc_RNA (1)...(19): siRNA sense strand
cuugaugcaguaacuuaua

SEQ ID NO: 1301771 - RNA, 19 nt, Homo sapiens
  misc_RNA (1)...(19): siRNA sense strand
aaacauguccauauauacg

SEQ ID NO: 1301772 - RNA, 19 nt, Homo sapiens
  misc_RNA (1)...(19): siRNA sense strand
guguaaaguggucaaaugu

SEQ ID NO: 1301773 - RNA, 19 nt, Homo sapiens
  misc_RNA (1)...(19): siRNA sense strand
cuuacgaguuugguuauca

SEQ ID NO: 1301774 - RNA, 19 nt, Homo sapiens
  misc_RNA (1)...(19): siRNA sense strand
uacgggauccuuuaaaugg

SEQ ID NO: 1301775 - RNA, 19 nt, Homo sapiens
  misc_RNA (1)...(19): siRNA sense strand
gcagaugguggagcugaau

SEQ ID NO: 1301776 - RNA, 19 nt, Homo sapiens
  misc_RNA (1)...(19): siRNA sense strand
aaccaaaacccuacuauga

SEQ ID NO: 1301777 - RNA, 19 nt, Homo sapiens
  misc_RNA (1)...(19): siRNA sense strand
uugaugcaguaacuuauag

SEQ ID NO: 1301778 - RNA, 19 nt, Homo sapiens
  misc_RNA (1)...(19): siRNA sense strand
ggagcugaauaugccacuu

SEQ ID NO: 1301779 - RNA, 19 nt, Homo sapiens
  misc_RNA (1)...(19): siRNA sense strand
cgauggcagcgacacaauu

SEQ ID NO: 1301780 - RNA, 19 nt, Homo sapiens
  misc_RNA (1)...(19): siRNA sense strand
gauccauuuucacuuauug

SEQ ID NO: 1301781 - RNA, 19 nt, Homo sapiens
  misc_RNA (1)...(19): siRNA sense strand
ggagagagcacgauuuauu

SEQ ID NO: 1301782 - RNA, 19 nt, Homo sapiens
  misc_RNA (1)...(19): siRNA sense strand
agagaaacauguccauaua

SEQ ID NO: 1301783 - RNA, 19 nt, Homo sapiens
  misc_RNA (1)...(19): siRNA sense strand
cagaugcacuuuauuugua

SEQ ID NO: 1301784 - RNA, 19 nt, Homo sapiens
  misc_RNA (1)...(19): siRNA sense strand
ggacuuacgaguuugguua

SEQ ID NO: 1301785 - RNA, 19 nt, Homo sapiens
  misc_RNA (1)...(19): siRNA sense strand
aaacagauaucaggauuug

SEQ ID NO: 1301786 - RNA, 19 nt, Homo sapiens
  misc_RNA (1)...(19): siRNA sense strand
cuauggagcucauugguaa

SEQ ID NO: 1301787 - RNA, 19 nt, Homo sapiens
  misc_RNA (1)...(19): siRNA sense strand
aaacacaccuuuagugaag

SEQ ID NO: 1301788 - RNA, 19 nt, Homo sapiens
  misc_RNA (1)...(19): siRNA sense strand
gaacuuaaaggaucaguag

SEQ ID NO: 1301789 - RNA, 19 nt, Homo sapiens
  misc_RNA (1)...(19): siRNA sense strand
gaaaacagauaucaggauu

SEQ ID NO: 1301790 - RNA, 19 nt, Homo sapiens
  misc_RNA (1)...(19): siRNA sense strand
uaaaggaucaguagcaauu

SEQ ID NO: 1301791 - RNA, 19 nt, Homo sapiens
  misc_RNA (1)...(19): siRNA sense strand
aaaugggacuuacgaguuu

SEQ ID NO: 1301792 - RNA, 19 nt, Homo sapiens
  misc_RNA (1)...(19): siRNA sense strand
guuaucagaugcacuuuau

SEQ ID NO: 1301793 - RNA, 19 nt, Homo sapiens
  misc_RNA (1)...(19): siRNA sense strand
ugagauuggugaacgagua

SEQ ID NO: 1301794 - RNA, 19 nt, Homo sapiens
  misc_RNA (1)...(19): siRNA sense strand
gugaacgaguagauuauaa

SEQ ID NO: 1301795 - RNA, 19 nt, Homo sapiens
  misc_RNA (1)...(19): siRNA sense strand
gagagagcacgauuuauug

SEQ ID NO: 1301796 - RNA, 19 nt, Homo sapiens
  misc_RNA (1)...(19): siRNA sense strand
caaaugggacuuacgaguu

SEQ ID NO: 1301797 - RNA, 19 nt, Homo sapiens
  misc_RNA (1)...(19): siRNA sense strand
ggucauugcugugauuguu

SEQ ID NO: 1301798 - RNA, 19 nt, Homo sapiens
  misc_RNA (1)...(19): siRNA sense strand
ccagauccauuuucacuua

SEQ ID NO: 1301799 - RNA, 19 nt, Homo sapiens
  misc_RNA (1)...(19): siRNA sense strand
gaaggaauacuugacaguu

SEQ ID NO: 1301800 - RNA, 19 nt, Homo sapiens
  misc_RNA (1)...(19): siRNA sense strand
aaggaauacuugacaguuu

SEQ ID NO: 1301801 - RNA, 19 nt, Homo sapiens
  misc_RNA (1)...(19): siRNA sense strand
ucagaugacgccuguuaua

SEQ ID NO: 1301802 - RNA, 19 nt, Homo sapiens
  misc_RNA (1)...(19): siRNA sense strand
gaaaacacaccuuuaguga

SEQ ID NO: 1301803 - RNA, 19 nt, Homo sapiens
  misc_RNA (1)...(19): siRNA sense strand
gaugacgccuguuauagag

SEQ ID NO: 1301804 - RNA, 19 nt, Homo sapiens
  misc_RNA (1)...(19): siRNA sense strand
gagaaacauguccauauau

SEQ ID NO: 1301805 - RNA, 19 nt, Homo sapiens
  misc_RNA (1)...(19): siRNA sense strand
acgaguagauuauaagugu

SEQ ID NO: 1301806 - RNA, 19 nt, Homo sapiens
  misc_RNA (1)...(19): siRNA sense strand
cuacaaagcaacaguuaug

SEQ ID NO: 1301807 - RNA, 19 nt, Homo sapiens
  misc_RNA (1)...(19): siRNA sense strand
ccaccaacauuugaagcua

SEQ ID NO: 1301808 - RNA, 19 nt, Homo sapiens
  misc_RNA (1)...(19): siRNA sense strand
uauacgggauccuuuaaau

SEQ ID NO: 1301809 - RNA, 19 nt, Homo sapiens
  misc_RNA (1)...(19): siRNA sense strand
cgaguuugguuaucagaug

SEQ ID NO: 1301810 - RNA, 19 nt, Homo sapiens
  misc_RNA (1)...(19): siRNA sense strand
gaacgaguagauuauaagu

SEQ ID NO: 1301811 - RNA, 19 nt, Homo sapiens
  misc_RNA (1)...(19): siRNA sense strand
gugaggagccaccaacauu

SEQ ID NO: 1301812 - RNA, 19 nt, Homo sapiens
  misc_RNA (1)...(19): siRNA sense strand
gauggcagcgacacaauug

SEQ ID NO: 1301813 - RNA, 19 nt, Homo sapiens
  misc_RNA (1)...(19): siRNA sense strand
gcuauggagcucauuggua

SEQ ID NO: 1301814 - RNA, 19 nt, Homo sapiens
  misc_RNA (1)...(19): siRNA sense strand
gaggagccaccaacauuug

SEQ ID NO: 1301815 - RNA, 19 nt, Homo sapiens
  misc_RNA (1)...(19): siRNA sense strand
acacaccuuuagugaagua

SEQ ID NO: 1301816 - RNA, 19 nt, Homo sapiens
  misc_RNA (1)...(19): siRNA sense strand
ucucagaugacgccuguua

SEQ ID NO: 1301817 - RNA, 19 nt, Homo sapiens
  misc_RNA (1)...(19): siRNA sense strand
uagagaaacauguccauau

SEQ ID NO: 1301818 - RNA, 19 nt, Homo sapiens
  misc_RNA (1)...(19): siRNA sense strand
guuccaaagugucuuaaag

SEQ ID NO: 1301819 - RNA, 19 nt, Homo sapiens
  misc_RNA (1)...(19): siRNA sense strand
ggugaacgaguagauuaua

SEQ ID NO: 1301820 - RNA, 19 nt, Homo sapiens
  misc_RNA (1)...(19): siRNA sense strand
gaaguagaaguauuugagu

SEQ ID NO: 1301821 - RNA, 19 nt, Homo sapiens
  misc_RNA (1)...(19): siRNA sense strand
gaaacauguccauauauac

SEQ ID NO: 1301822 - RNA, 19 nt, Homo sapiens
  misc_RNA (1)...(19): siRNA sense strand
ugacgccuguuauagagaa

SEQ ID NO: 1301823 - RNA, 19 nt, Homo sapiens
  misc_RNA (1)...(19): siRNA sense strand
cgaguagauuauaagugua

SEQ ID NO: 1301824 - RNA, 19 nt, Homo sapiens
  misc_RNA (1)...(19): siRNA sense strand
gcacuuuauuuguaaugag

SEQ ID NO: 1301825 - RNA, 19 nt, Homo sapiens
  misc_RNA (1)...(19): siRNA sense strand
guagaaguauuugaguauc

SEQ ID NO: 1301826 - RNA, 19 nt, Homo sapiens
  misc_RNA (1)...(19): siRNA sense strand
guauuugaguaucuugaug

SEQ ID NO: 1301827 - RNA, 19 nt, Homo sapiens
  misc_RNA (1)...(19): siRNA sense strand
aggaauacuugacaguuug

SEQ ID NO: 1301828 - RNA, 19 nt, Homo sapiens
  misc_RNA (1)...(19): siRNA sense strand
ccaaaacccuacuaugaga

SEQ ID NO: 1301829 - RNA, 19 nt, Homo sapiens
  misc_RNA (1)...(19): siRNA sense strand
aguguaaaguggucaaaug

SEQ ID NO: 1301830 - RNA, 19 nt, Homo sapiens
  misc_RNA (1)...(19): siRNA sense strand
ccacccauacuauuuguga

SEQ ID NO: 1301831 - RNA, 19 nt, Homo sapiens
  misc_RNA (1)...(19): siRNA sense strand
caccaacauuugaagcuau

SEQ ID NO: 1301832 - RNA, 19 nt, Homo sapiens
  misc_RNA (1)...(19): siRNA sense strand
uuggagagagcacgauuua

SEQ ID NO: 1301833 - RNA, 19 nt, Homo sapiens
  misc_RNA (1)...(19): siRNA sense strand
gguuaucagaugcacuuua

SEQ ID NO: 1301834 - RNA, 19 nt, Homo sapiens
  misc_RNA (1)...(19): siRNA sense strand
ugaggagccaccaacauuu

SEQ ID NO: 1301835 - RNA, 19 nt, Homo sapiens
  misc_RNA (1)...(19): siRNA sense strand
ggaaggaauacuugacagu

SEQ ID NO: 1301836 - RNA, 19 nt, Homo sapiens
  misc_RNA (1)...(19): siRNA sense strand
gaggaaggaauacuugaca

SEQ ID NO: 1301837 - RNA, 19 nt, Homo sapiens
  misc_RNA (1)...(19): siRNA sense strand
ccaguuccaaagugucuua

SEQ ID NO: 1301838 - RNA, 19 nt, Homo sapiens
  misc_RNA (1)...(19): siRNA sense strand
ugaguaucuugaugcagua

SEQ ID NO: 1301839 - RNA, 19 nt, Homo sapiens
  misc_RNA (1)...(19): siRNA sense strand
caccuuuagugaaguagaa

SEQ ID NO: 1301840 - RNA, 19 nt, Homo sapiens
  misc_RNA (1)...(19): siRNA sense strand
acagauaucaggauuugga

SEQ ID NO: 1301841 - RNA, 19 nt, Homo sapiens
  misc_RNA (1)...(19): siRNA sense strand
ucauugcugugauuguuau

SEQ ID NO: 1301842 - RNA, 19 nt, Homo sapiens
  misc_RNA (1)...(19): siRNA sense strand
ucagaugcacuuuauuugu

SEQ ID NO: 1301843 - RNA, 19 nt, Homo sapiens
  misc_RNA (1)...(19): siRNA sense strand
gugcugcuccagaguguaa

SEQ ID NO: 1301844 - RNA, 19 nt, Homo sapiens
  misc_RNA (1)...(19): siRNA sense strand
ggaaaacacaccuuuagug

SEQ ID NO: 1301845 - RNA, 19 nt, Homo sapiens
  misc_RNA (1)...(19): siRNA sense strand
aaggaucaguagcaauuug

SEQ ID NO: 1301846 - RNA, 19 nt, Homo sapiens
  misc_RNA (1)...(19): siRNA sense strand
uauauacgggauccuuuaa

SEQ ID NO: 1301847 - RNA, 19 nt, Homo sapiens
  misc_RNA (1)...(19): siRNA sense strand
ugaaguagaaguauuugag

SEQ ID NO: 1301848 - RNA, 19 nt, Homo sapiens
  misc_RNA (1)...(19): siRNA sense strand
cuugacaguuuggauguuu

SEQ ID NO: 1301849 - RNA, 19 nt, Homo sapiens
  misc_RNA (1)...(19): siRNA sense strand
cauauauacgggauccuuu

SEQ ID NO: 1301850 - RNA, 19 nt, Homo sapiens
  misc_RNA (1)...(19): siRNA sense strand
auauauacgggauccuuua

SEQ ID NO: 1301851 - RNA, 19 nt, Homo sapiens
  misc_RNA (1)...(19): siRNA sense strand
cuuaaaggaucaguagcaa

SEQ ID NO: 1301852 - RNA, 19 nt, Homo sapiens
  misc_RNA (1)...(19): siRNA sense strand
uaaaccugaggaaggaaua

SEQ ID NO: 1301853 - RNA, 19 nt, Homo sapiens
  misc_RNA (1)...(19): siRNA sense strand
agaugacgccuguuauaga

SEQ ID NO: 1301854 - RNA, 19 nt, Homo sapiens
  misc_RNA (1)...(19): siRNA sense strand
ugugauuguuauugccaua

SEQ ID NO: 1301855 - RNA, 19 nt, Homo sapiens
  misc_RNA (1)...(19): siRNA sense strand
gagagcacgauuuauugug

SEQ ID NO: 1301856 - RNA, 19 nt, Homo sapiens
  misc_RNA (1)...(19): siRNA sense strand
gaaguauuugaguaucuug

SEQ ID NO: 1301857 - RNA, 19 nt, Homo sapiens
  misc_RNA (1)...(19): siRNA sense strand
ggcuaccugucucagauga

SEQ ID NO: 1301858 - RNA, 19 nt, Homo sapiens
  misc_RNA (1)...(19): siRNA sense strand
gauaucaggauuuggaaaa

SEQ ID NO: 1301859 - RNA, 19 nt, Homo sapiens
  misc_RNA (1)...(19): siRNA sense strand
ccucuugccacccauacua

SEQ ID NO: 1301860 - RNA, 19 nt, Homo sapiens
  misc_RNA (1)...(19): siRNA sense strand
ccaugguguugcugcugua

SEQ ID NO: 1301861 - RNA, 19 nt, Homo sapiens
  misc_RNA (1)...(19): siRNA sense strand
cagaugacgccuguuauag

SEQ ID NO: 1301862 - RNA, 19 nt, Homo sapiens
  misc_RNA (1)...(19): siRNA sense strand
uuggugaacgaguagauua

SEQ ID NO: 1301863 - RNA, 19 nt, Homo sapiens
  misc_RNA (1)...(19): siRNA sense strand
gucauugcugugauuguua

SEQ ID NO: 1301864 - RNA, 19 nt, Homo sapiens
  misc_RNA (1)...(19): siRNA sense strand
ggagccaccaacauuugaa

SEQ ID NO: 1301865 - RNA, 19 nt, Homo sapiens
  misc_RNA (1)...(19): siRNA sense strand
gcgcuuuccuggguugcuu

SEQ ID NO: 1301866 - RNA, 19 nt, Homo sapiens
  misc_RNA (1)...(19): siRNA sense strand
uacuacaaagcaacaguua

SEQ ID NO: 1301867 - RNA, 19 nt, Homo sapiens
  misc_RNA (1)...(19): siRNA sense strand
cuugaugcaguaacuuaua

SEQ ID NO: 1301868 - RNA, 19 nt, Homo sapiens
  misc_RNA (1)...(19): siRNA sense strand
aaacauguccauauauacg

SEQ ID NO: 1301869 - RNA, 19 nt, Homo sapiens
  misc_RNA (1)...(19): siRNA sense strand
guguaaaguggucaaaugu

SEQ ID NO: 1301870 - RNA, 19 nt, Homo sapiens
  misc_RNA (1)...(19): siRNA sense strand
cuuacgaguuugguuauca

SEQ ID NO: 1301871 - RNA, 19 nt, Homo sapiens
  misc_RNA (1)...(19): siRNA sense strand
uacgggauccuuuaaaugg

SEQ ID NO: 1301872 - RNA, 19 nt, Homo sapiens
  misc_RNA (1)...(19): siRNA sense strand
aaccaaaacccuacuauga

SEQ ID NO: 1301873 - RNA, 19 nt, Homo sapiens
  misc_RNA (1)...(19): siRNA sense strand
cccaauaugugaaaagguu

SEQ ID NO: 1301874 - RNA, 19 nt, Homo sapiens
  misc_RNA (1)...(19): siRNA sense strand
cgauggcagcgacacaauu

SEQ ID NO: 1301875 - RNA, 19 nt, Homo sapiens
  misc_RNA (1)...(19): siRNA sense strand
gauccauuuucacuuauug

SEQ ID NO: 1301876 - RNA, 19 nt, Homo sapiens
  misc_RNA (1)...(19): siRNA sense strand
uugaugcaguaacuuauag

SEQ ID NO: 1301877 - RNA, 19 nt, Homo sapiens
  misc_RNA (1)...(19): siRNA sense strand
guaucuugaugcaguaacu

SEQ ID NO: 1301878 - RNA, 19 nt, Homo sapiens
  misc_RNA (1)...(19): siRNA sense strand
caacauuugaagcuaugga

SEQ ID NO: 1301879 - RNA, 19 nt, Homo sapiens
  misc_RNA (1)...(19): siRNA sense strand
gagauuggugaacgaguag

SEQ ID NO: 1301880 - RNA, 19 nt, Homo sapiens
  misc_RNA (1)...(19): siRNA sense strand
ggagagagcacgauuuauu

SEQ ID NO: 1301881 - RNA, 19 nt, Homo sapiens
  misc_RNA (1)...(19): siRNA sense strand
agagaaacauguccauaua

SEQ ID NO: 1301882 - RNA, 19 nt, Homo sapiens
  misc_RNA (1)...(19): siRNA sense strand
cagaugcacuuuauuugua

SEQ ID NO: 1301883 - RNA, 19 nt, Homo sapiens
  misc_RNA (1)...(19): siRNA sense strand
ggacuuacgaguuugguua

SEQ ID NO: 1301884 - RNA, 19 nt, Homo sapiens
  misc_RNA (1)...(19): siRNA sense strand
aaacagauaucaggauuug

SEQ ID NO: 1301885 - RNA, 19 nt, Homo sapiens
  misc_RNA (1)...(19): siRNA sense strand
cuauggagcucauugguaa

SEQ ID NO: 1301886 - RNA, 19 nt, Homo sapiens
  misc_RNA (1)...(19): siRNA sense strand
aaacacaccuuuagugaag

SEQ ID NO: 1301887 - RNA, 19 nt, Homo sapiens
  misc_RNA (1)...(19): siRNA sense strand
gaacuuaaaggaucaguag

SEQ ID NO: 1301888 - RNA, 19 nt, Homo sapiens
  misc_RNA (1)...(19): siRNA sense strand
gaaaacagauaucaggauu

SEQ ID NO: 1301889 - RNA, 19 nt, Homo sapiens
  misc_RNA (1)...(19): siRNA sense strand
uaaaggaucaguagcaauu

SEQ ID NO: 1301890 - RNA, 19 nt, Homo sapiens
  misc_RNA (1)...(19): siRNA sense strand
aaaugggacuuacgaguuu

SEQ ID NO: 1301891 - RNA, 19 nt, Homo sapiens
  misc_RNA (1)...(19): siRNA sense strand
guuaucagaugcacuuuau

SEQ ID NO: 1301892 - RNA, 19 nt, Homo sapiens
  misc_RNA (1)...(19): siRNA sense strand
ugagauuggugaacgagua

SEQ ID NO: 1301893 - RNA, 19 nt, Homo sapiens
  misc_RNA (1)...(19): siRNA sense strand
gugaacgaguagauuauaa

SEQ ID NO: 1301894 - RNA, 19 nt, Homo sapiens
  misc_RNA (1)...(19): siRNA sense strand
gagagagcacgauuuauug

SEQ ID NO: 1301895 - RNA, 19 nt, Homo sapiens
  misc_RNA (1)...(19): siRNA sense strand
caaaugggacuuacgaguu

SEQ ID NO: 1301896 - RNA, 19 nt, Homo sapiens
  misc_RNA (1)...(19): siRNA sense strand
ggucauugcugugauuguu

SEQ ID NO: 1301897 - RNA, 19 nt, Homo sapiens
  misc_RNA (1)...(19): siRNA sense strand
ccagauccauuuucacuua

SEQ ID NO: 1301898 - RNA, 19 nt, Homo sapiens
  misc_RNA (1)...(19): siRNA sense strand
gaaggaauacuugacaguu

SEQ ID NO: 1301899 - RNA, 19 nt, Homo sapiens
  misc_RNA (1)...(19): siRNA sense strand
aaggaauacuugacaguuu

SEQ ID NO: 1301900 - RNA, 19 nt, Homo sapiens
  misc_RNA (1)...(19): siRNA sense strand
ucagaugacgccuguuaua

SEQ ID NO: 1301901 - RNA, 19 nt, Homo sapiens
  misc_RNA (1)...(19): siRNA sense strand
gaaaacacaccuuuaguga

SEQ ID NO: 1301902 - RNA, 19 nt, Homo sapiens
  misc_RNA (1)...(19): siRNA sense strand
gaugacgccuguuauagag

SEQ ID NO: 1301903 - RNA, 19 nt, Homo sapiens
  misc_RNA (1)...(19): siRNA sense strand
gagaaacauguccauauau

SEQ ID NO: 1301904 - RNA, 19 nt, Homo sapiens
  misc_RNA (1)...(19): siRNA sense strand
acgaguagauuauaagugu

SEQ ID NO: 1301905 - RNA, 19 nt, Homo sapiens
  misc_RNA (1)...(19): siRNA sense strand
cuacaaagcaacaguuaug

SEQ ID NO: 1301906 - RNA, 19 nt, Homo sapiens
  misc_RNA (1)...(19): siRNA sense strand
ccaccaacauuugaagcua

SEQ ID NO: 1301907 - RNA, 19 nt, Homo sapiens
  misc_RNA (1)...(19): siRNA sense strand
uauacgggauccuuuaaau

SEQ ID NO: 1301908 - RNA, 19 nt, Homo sapiens
  misc_RNA (1)...(19): siRNA sense strand
cgaguuugguuaucagaug

SEQ ID NO: 1301909 - RNA, 19 nt, Homo sapiens
  misc_RNA (1)...(19): siRNA sense strand
gaacgaguagauuauaagu

SEQ ID NO: 1301910 - RNA, 19 nt, Homo sapiens
  misc_RNA (1)...(19): siRNA sense strand
gugaggagccaccaacauu

SEQ ID NO: 1301911 - RNA, 19 nt, Homo sapiens
  misc_RNA (1)...(19): siRNA sense strand
gauggcagcgacacaauug

SEQ ID NO: 1301912 - RNA, 19 nt, Homo sapiens
  misc_RNA (1)...(19): siRNA sense strand
gcuauggagcucauuggua

SEQ ID NO: 1301913 - RNA, 19 nt, Homo sapiens
  misc_RNA (1)...(19): siRNA sense strand
gaggagccaccaacauuug

SEQ ID NO: 1301914 - RNA, 19 nt, Homo sapiens
  misc_RNA (1)...(19): siRNA sense strand
acacaccuuuagugaagua

SEQ ID NO: 1301915 - RNA, 19 nt, Homo sapiens
  misc_RNA (1)...(19): siRNA sense strand
ucucagaugacgccuguua

SEQ ID NO: 1301916 - RNA, 19 nt, Homo sapiens
  misc_RNA (1)...(19): siRNA sense strand
uagagaaacauguccauau

SEQ ID NO: 1301917 - RNA, 19 nt, Homo sapiens
  misc_RNA (1)...(19): siRNA sense strand
ggugaacgaguagauuaua

SEQ ID NO: 1301918 - RNA, 19 nt, Homo sapiens
  misc_RNA (1)...(19): siRNA sense strand
gaaguagaaguauuugagu

SEQ ID NO: 1301919 - RNA, 19 nt, Homo sapiens
  misc_RNA (1)...(19): siRNA sense strand
gaaacauguccauauauac

SEQ ID NO: 1301920 - RNA, 19 nt, Homo sapiens
  misc_RNA (1)...(19): siRNA sense strand
ugacgccuguuauagagaa

SEQ ID NO: 1301921 - RNA, 19 nt, Homo sapiens
  misc_RNA (1)...(19): siRNA sense strand
cgaguagauuauaagugua

SEQ ID NO: 1301922 - RNA, 19 nt, Homo sapiens
  misc_RNA (1)...(19): siRNA sense strand
gcacuuuauuuguaaugag

SEQ ID NO: 1301923 - RNA, 19 nt, Homo sapiens
  misc_RNA (1)...(19): siRNA sense strand
guagaaguauuugaguauc

SEQ ID NO: 1301924 - RNA, 19 nt, Homo sapiens
  misc_RNA (1)...(19): siRNA sense strand
guauuugaguaucuugaug

SEQ ID NO: 1301925 - RNA, 19 nt, Homo sapiens
  misc_RNA (1)...(19): siRNA sense strand
aggaauacuugacaguuug

SEQ ID NO: 1301926 - RNA, 19 nt, Homo sapiens
  misc_RNA (1)...(19): siRNA sense strand
aguguaaaguggucaaaug

SEQ ID NO: 1301927 - RNA, 19 nt, Homo sapiens
  misc_RNA (1)...(19): siRNA sense strand
ccaaaacccuacuaugaga

SEQ ID NO: 1301928 - RNA, 19 nt, Homo sapiens
  misc_RNA (1)...(19): siRNA sense strand
ccacccauacuauuuguga

SEQ ID NO: 1301929 - RNA, 19 nt, Homo sapiens
  misc_RNA (1)...(19): siRNA sense strand
caccaacauuugaagcuau

SEQ ID NO: 1301930 - RNA, 19 nt, Homo sapiens
  misc_RNA (1)...(19): siRNA sense strand
uuggagagagcacgauuua

SEQ ID NO: 1301931 - RNA, 19 nt, Homo sapiens
  misc_RNA (1)...(19): siRNA sense strand
gguuaucagaugcacuuua

SEQ ID NO: 1301932 - RNA, 19 nt, Homo sapiens
  misc_RNA (1)...(19): siRNA sense strand
ugaggagccaccaacauuu

SEQ ID NO: 1301933 - RNA, 19 nt, Homo sapiens
  misc_RNA (1)...(19): siRNA sense strand
ggaaggaauacuugacagu

SEQ ID NO: 1301934 - RNA, 19 nt, Homo sapiens
  misc_RNA (1)...(19): siRNA sense strand
gaggaaggaauacuugaca

SEQ ID NO: 1301935 - RNA, 19 nt, Homo sapiens
  misc_RNA (1)...(19): siRNA sense strand
ugaguaucuugaugcagua

SEQ ID NO: 1301936 - RNA, 19 nt, Homo sapiens
  misc_RNA (1)...(19): siRNA sense strand
caccuuuagugaaguagaa

SEQ ID NO: 1301937 - RNA, 19 nt, Homo sapiens
  misc_RNA (1)...(19): siRNA sense strand
acagauaucaggauuugga

SEQ ID NO: 1301938 - RNA, 19 nt, Homo sapiens
  misc_RNA (1)...(19): siRNA sense strand
ucauugcugugauuguuau

SEQ ID NO: 1301939 - RNA, 19 nt, Homo sapiens
  misc_RNA (1)...(19): siRNA sense strand
ucagaugcacuuuauuugu

SEQ ID NO: 1301940 - RNA, 19 nt, Homo sapiens
  misc_RNA (1)...(19): siRNA sense strand
gugcugcuccagaguguaa

SEQ ID NO: 1301941 - RNA, 19 nt, Homo sapiens
  misc_RNA (1)...(19): siRNA sense strand
ggaaaacacaccuuuagug

SEQ ID NO: 1301942 - RNA, 19 nt, Homo sapiens
  misc_RNA (1)...(19): siRNA sense strand
aaggaucaguagcaauuug

SEQ ID NO: 1301943 - RNA, 19 nt, Homo sapiens
  misc_RNA (1)...(19): siRNA sense strand
uauauacgggauccuuuaa

SEQ ID NO: 1301944 - RNA, 19 nt, Homo sapiens
  misc_RNA (1)...(19): siRNA sense strand
ugaaguagaaguauuugag

SEQ ID NO: 1301945 - RNA, 19 nt, Homo sapiens
  misc_RNA (1)...(19): siRNA sense strand
cuugacaguuuggauguuu

SEQ ID NO: 1301946 - RNA, 19 nt, Homo sapiens
  misc_RNA (1)...(19): siRNA sense strand
cauauauacgggauccuuu

SEQ ID NO: 1301947 - RNA, 19 nt, Homo sapiens
  misc_RNA (1)...(19): siRNA sense strand
auauauacgggauccuuua

SEQ ID NO: 1301948 - RNA, 19 nt, Homo sapiens
  misc_RNA (1)...(19): siRNA sense strand
cuuaaaggaucaguagcaa

SEQ ID NO: 1301949 - RNA, 19 nt, Homo sapiens
  misc_RNA (1)...(19): siRNA sense strand
uaaaccugaggaaggaaua

SEQ ID NO: 1301950 - RNA, 19 nt, Homo sapiens
  misc_RNA (1)...(19): siRNA sense strand
agaugacgccuguuauaga

SEQ ID NO: 1301951 - RNA, 19 nt, Homo sapiens
  misc_RNA (1)...(19): siRNA sense strand
ugugauuguuauugccaua

SEQ ID NO: 1301952 - RNA, 19 nt, Homo sapiens
  misc_RNA (1)...(19): siRNA sense strand
gagagcacgauuuauugug

SEQ ID NO: 1301953 - RNA, 19 nt, Homo sapiens
  misc_RNA (1)...(19): siRNA sense strand
gaaguauuugaguaucuug

SEQ ID NO: 1301954 - RNA, 19 nt, Homo sapiens
  misc_RNA (1)...(19): siRNA sense strand
ccucuugccacccauacua

SEQ ID NO: 1301955 - RNA, 19 nt, Homo sapiens
  misc_RNA (1)...(19): siRNA sense strand
gauaucaggauuuggaaaa

SEQ ID NO: 1301956 - RNA, 19 nt, Homo sapiens
  misc_RNA (1)...(19): siRNA sense strand
ggcuaccugucucagauga

SEQ ID NO: 1301957 - RNA, 19 nt, Homo sapiens
  misc_RNA (1)...(19): siRNA sense strand
ccaugguguugcugcugua

SEQ ID NO: 1301958 - RNA, 19 nt, Homo sapiens
  misc_RNA (1)...(19): siRNA sense strand
cagaugacgccuguuauag

SEQ ID NO: 1301959 - RNA, 19 nt, Homo sapiens
  misc_RNA (1)...(19): siRNA sense strand
gucauugcugugauuguua

SEQ ID NO: 1301960 - RNA, 19 nt, Homo sapiens
  misc_RNA (1)...(19): siRNA sense strand
uuggugaacgaguagauua

SEQ ID NO: 1301961 - RNA, 19 nt, Homo sapiens
  misc_RNA (1)...(19): siRNA sense strand
ggagccaccaacauuugaa

SEQ ID NO: 1301962 - RNA, 19 nt, Homo sapiens
  misc_RNA (1)...(19): siRNA sense strand
gcgcuuuccuggguugcuu

SEQ ID NO: 1301963 - RNA, 19 nt, Homo sapiens
  misc_RNA (1)...(19): siRNA sense strand
uacuacaaagcaacaguua

SEQ ID NO: 1301964 - RNA, 19 nt, Homo sapiens
  misc_RNA (1)...(19): siRNA sense strand
cuugaugcaguaacuuaua

SEQ ID NO: 1301965 - RNA, 19 nt, Homo sapiens
  misc_RNA (1)...(19): siRNA sense strand
aaacauguccauauauacg

SEQ ID NO: 1301966 - RNA, 19 nt, Homo sapiens
  misc_RNA (1)...(19): siRNA sense strand
guguaaaguggucaaaugu

SEQ ID NO: 1301967 - RNA, 19 nt, Homo sapiens
  misc_RNA (1)...(19): siRNA sense strand
cuuacgaguuugguuauca

SEQ ID NO: 1301968 - RNA, 19 nt, Homo sapiens
  misc_RNA (1)...(19): siRNA sense strand
uacgggauccuuuaaaugg

SEQ ID NO: 1301969 - RNA, 19 nt, Homo sapiens
  misc_RNA (1)...(19): siRNA sense strand
aaccaaaacccuacuauga

SEQ ID NO: 1301970 - RNA, 19 nt, Homo sapiens
  misc_RNA (1)...(19): siRNA sense strand
cccaauaugugaaaagguu

SEQ ID NO: 1301971 - RNA, 19 nt, Homo sapiens
  misc_RNA (1)...(19): siRNA sense strand
cgauggcagcgacacaauu

SEQ ID NO: 1301972 - RNA, 19 nt, Homo sapiens
  misc_RNA (1)...(19): siRNA sense strand
gauccauuuucacuuauug

SEQ ID NO: 1301973 - RNA, 19 nt, Homo sapiens
  misc_RNA (1)...(19): siRNA sense strand
uugaugcaguaacuuauag

SEQ ID NO: 1301974 - RNA, 19 nt, Homo sapiens
  misc_RNA (1)...(19): siRNA sense strand
guaucuugaugcaguaacu

SEQ ID NO: 1301975 - RNA, 19 nt, Homo sapiens
  misc_RNA (1)...(19): siRNA sense strand
caacauuugaagcuaugga

SEQ ID NO: 1301976 - RNA, 19 nt, Homo sapiens
  misc_RNA (1)...(19): siRNA sense strand
gagauuggugaacgaguag

SEQ ID NO: 1301977 - RNA, 19 nt, Homo sapiens
  misc_RNA (1)...(19): siRNA sense strand
ggagagagcacgauuuauu

SEQ ID NO: 1301978 - RNA, 19 nt, Homo sapiens
  misc_RNA (1)...(19): siRNA sense strand
agagaaacauguccauaua

SEQ ID NO: 1301979 - RNA, 19 nt, Homo sapiens
  misc_RNA (1)...(19): siRNA sense strand
cagaugcacuuuauuugua

SEQ ID NO: 1301980 - RNA, 19 nt, Homo sapiens
  misc_RNA (1)...(19): siRNA sense strand
ggacuuacgaguuugguua

SEQ ID NO: 1301981 - RNA, 19 nt, Homo sapiens
  misc_RNA (1)...(19): siRNA sense strand
aaacagauaucaggauuug

SEQ ID NO: 1301982 - RNA, 19 nt, Homo sapiens
  misc_RNA (1)...(19): siRNA sense strand
cuauggagcucauugguaa

SEQ ID NO: 1301983 - RNA, 19 nt, Homo sapiens
  misc_RNA (1)...(19): siRNA sense strand
aaacacaccuuuagugaag

SEQ ID NO: 1301984 - RNA, 19 nt, Homo sapiens
  misc_RNA (1)...(19): siRNA sense strand
gaacuuaaaggaucaguag

SEQ ID NO: 1301985 - RNA, 19 nt, Homo sapiens
  misc_RNA (1)...(19): siRNA sense strand
gaaaacagauaucaggauu

SEQ ID NO: 1301986 - RNA, 19 nt, Homo sapiens
  misc_RNA (1)...(19): siRNA sense strand
uaaaggaucaguagcaauu

SEQ ID NO: 1301987 - RNA, 19 nt, Homo sapiens
  misc_RNA (1)...(19): siRNA sense strand
aaaugggacuuacgaguuu

SEQ ID NO: 1301988 - RNA, 19 nt, Homo sapiens
  misc_RNA (1)...(19): siRNA sense strand
guuaucagaugcacuuuau

SEQ ID NO: 1301989 - RNA, 19 nt, Homo sapiens
  misc_RNA (1)...(19): siRNA sense strand
gagcugaauaugccacuua

SEQ ID NO: 1301990 - RNA, 19 nt, Homo sapiens
  misc_RNA (1)...(19): siRNA sense strand
ugagauuggugaacgagua

SEQ ID NO: 1301991 - RNA, 19 nt, Homo sapiens
  misc_RNA (1)...(19): siRNA sense strand
gugaacgaguagauuauaa

SEQ ID NO: 1301992 - RNA, 19 nt, Homo sapiens
  misc_RNA (1)...(19): siRNA sense strand
gagagagcacgauuuauug

SEQ ID NO: 1301993 - RNA, 19 nt, Homo sapiens
  misc_RNA (1)...(19): siRNA sense strand
caaaugggacuuacgaguu

SEQ ID NO: 1301994 - RNA, 19 nt, Homo sapiens
  misc_RNA (1)...(19): siRNA sense strand
ggucauugcugugauuguu

SEQ ID NO: 1301995 - RNA, 19 nt, Homo sapiens
  misc_RNA (1)...(19): siRNA sense strand
ccagauccauuuucacuua

SEQ ID NO: 1301996 - RNA, 19 nt, Homo sapiens
  misc_RNA (1)...(19): siRNA sense strand
gaaggaauacuugacaguu

SEQ ID NO: 1301997 - RNA, 19 nt, Homo sapiens
  misc_RNA (1)...(19): siRNA sense strand
aaggaauacuugacaguuu

SEQ ID NO: 1301998 - RNA, 19 nt, Homo sapiens
  misc_RNA (1)...(19): siRNA sense strand
ucagaugacgccuguuaua

SEQ ID NO: 1301999 - RNA, 19 nt, Homo sapiens
  misc_RNA (1)...(19): siRNA sense strand
gaaaacacaccuuuaguga

SEQ ID NO: 1302000 - RNA, 19 nt, Homo sapiens
  misc_RNA (1)...(19): siRNA sense strand
gaugacgccuguuauagag

SEQ ID NO: 1302001 - RNA, 19 nt, Homo sapiens
  misc_RNA (1)...(19): siRNA sense strand
gagaaacauguccauauau

SEQ ID NO: 1302002 - RNA, 19 nt, Homo sapiens
  misc_RNA (1)...(19): siRNA sense strand
ccacuuaccagacuaaauc

SEQ ID NO: 1302003 - RNA, 19 nt, Homo sapiens
  misc_RNA (1)...(19): siRNA sense strand
acgaguagauuauaagugu

SEQ ID NO: 1302004 - RNA, 19 nt, Homo sapiens
  misc_RNA (1)...(19): siRNA sense strand
cuacaaagcaacaguuaug

SEQ ID NO: 1302005 - RNA, 19 nt, Homo sapiens
  misc_RNA (1)...(19): siRNA sense strand
ccaccaacauuugaagcua

SEQ ID NO: 1302006 - RNA, 19 nt, Homo sapiens
  misc_RNA (1)...(19): siRNA sense strand
uauacgggauccuuuaaau

SEQ ID NO: 1302007 - RNA, 19 nt, Homo sapiens
  misc_RNA (1)...(19): siRNA sense strand
cgaguuugguuaucagaug

SEQ ID NO: 1302008 - RNA, 19 nt, Homo sapiens
  misc_RNA (1)...(19): siRNA sense strand
gaacgaguagauuauaagu

SEQ ID NO: 1302009 - RNA, 19 nt, Homo sapiens
  misc_RNA (1)...(19): siRNA sense strand
gugaggagccaccaacauu

SEQ ID NO: 1302010 - RNA, 19 nt, Homo sapiens
  misc_RNA (1)...(19): siRNA sense strand
gauggcagcgacacaauug

SEQ ID NO: 1302011 - RNA, 19 nt, Homo sapiens
  misc_RNA (1)...(19): siRNA sense strand
ucucagaugacgccuguua

SEQ ID NO: 1302012 - RNA, 19 nt, Homo sapiens
  misc_RNA (1)...(19): siRNA sense strand
gaggagccaccaacauuug

SEQ ID NO: 1302013 - RNA, 19 nt, Homo sapiens
  misc_RNA (1)...(19): siRNA sense strand
gcuauggagcucauuggua

SEQ ID NO: 1302014 - RNA, 19 nt, Homo sapiens
  misc_RNA (1)...(19): siRNA sense strand
acacaccuuuagugaagua

SEQ ID NO: 1302015 - RNA, 19 nt, Homo sapiens
  misc_RNA (1)...(19): siRNA sense strand
uagagaaacauguccauau

SEQ ID NO: 1302016 - RNA, 19 nt, Homo sapiens
  misc_RNA (1)...(19): siRNA sense strand
ggugaacgaguagauuaua

SEQ ID NO: 1302017 - RNA, 19 nt, Homo sapiens
  misc_RNA (1)...(19): siRNA sense strand
gaaguagaaguauuugagu

SEQ ID NO: 1302018 - RNA, 19 nt, Homo sapiens
  misc_RNA (1)...(19): siRNA sense strand
gaaacauguccauauauac

SEQ ID NO: 1302019 - RNA, 19 nt, Homo sapiens
  misc_RNA (1)...(19): siRNA sense strand
ugacgccuguuauagagaa

SEQ ID NO: 1302020 - RNA, 19 nt, Homo sapiens
  misc_RNA (1)...(19): siRNA sense strand
cgaguagauuauaagugua

SEQ ID NO: 1302021 - RNA, 19 nt, Homo sapiens
  misc_RNA (1)...(19): siRNA sense strand
gcacuuuauuuguaaugag

SEQ ID NO: 1302022 - RNA, 19 nt, Homo sapiens
  misc_RNA (1)...(19): siRNA sense strand
guagaaguauuugaguauc

SEQ ID NO: 1302023 - RNA, 19 nt, Homo sapiens
  misc_RNA (1)...(19): siRNA sense strand
guauuugaguaucuugaug

SEQ ID NO: 1302024 - RNA, 19 nt, Homo sapiens
  misc_RNA (1)...(19): siRNA sense strand
aggaauacuugacaguuug

SEQ ID NO: 1302025 - RNA, 19 nt, Homo sapiens
  misc_RNA (1)...(19): siRNA sense strand
ccaaaacccuacuaugaga

SEQ ID NO: 1302026 - RNA, 19 nt, Homo sapiens
  misc_RNA (1)...(19): siRNA sense strand
aguguaaaguggucaaaug

SEQ ID NO: 1302027 - RNA, 19 nt, Homo sapiens
  misc_RNA (1)...(19): siRNA sense strand
ccacccauacuauuuguga

SEQ ID NO: 1302028 - RNA, 19 nt, Homo sapiens
  misc_RNA (1)...(19): siRNA sense strand
uuggagagagcacgauuua

SEQ ID NO: 1302029 - RNA, 19 nt, Homo sapiens
  misc_RNA (1)...(19): siRNA sense strand
gguuaucagaugcacuuua

SEQ ID NO: 1302030 - RNA, 19 nt, Homo sapiens
  misc_RNA (1)...(19): siRNA sense strand
caccaacauuugaagcuau

SEQ ID NO: 1302031 - RNA, 19 nt, Homo sapiens
  misc_RNA (1)...(19): siRNA sense strand
ugaggagccaccaacauuu

SEQ ID NO: 1302032 - RNA, 19 nt, Homo sapiens
  misc_RNA (1)...(19): siRNA sense strand
ggaaggaauacuugacagu

SEQ ID NO: 1302033 - RNA, 19 nt, Homo sapiens
  misc_RNA (1)...(19): siRNA sense strand
gaggaaggaauacuugaca

SEQ ID NO: 1302034 - RNA, 19 nt, Homo sapiens
  misc_RNA (1)...(19): siRNA sense strand
ugaguaucuugaugcagua

SEQ ID NO: 1302035 - RNA, 19 nt, Homo sapiens
  misc_RNA (1)...(19): siRNA sense strand
caccuuuagugaaguagaa

SEQ ID NO: 1302036 - RNA, 19 nt, Homo sapiens
  misc_RNA (1)...(19): siRNA sense strand
acagauaucaggauuugga

SEQ ID NO: 1302037 - RNA, 19 nt, Homo sapiens
  misc_RNA (1)...(19): siRNA sense strand
ucauugcugugauuguuau

SEQ ID NO: 1302038 - RNA, 19 nt, Homo sapiens
  misc_RNA (1)...(19): siRNA sense strand
ucagaugcacuuuauuugu

SEQ ID NO: 1302039 - RNA, 19 nt, Homo sapiens
  misc_RNA (1)...(19): siRNA sense strand
gugcugcuccagaguguaa

SEQ ID NO: 1302040 - RNA, 19 nt, Homo sapiens
  misc_RNA (1)...(19): siRNA sense strand
ggaaaacacaccuuuagug

SEQ ID NO: 1302041 - RNA, 19 nt, Homo sapiens
  misc_RNA (1)...(19): siRNA sense strand
aaggaucaguagcaauuug

SEQ ID NO: 1302042 - RNA, 19 nt, Homo sapiens
  misc_RNA (1)...(19): siRNA sense strand
uauauacgggauccuuuaa

SEQ ID NO: 1302043 - RNA, 19 nt, Homo sapiens
  misc_RNA (1)...(19): siRNA sense strand
ugaaguagaaguauuugag

SEQ ID NO: 1302044 - RNA, 19 nt, Homo sapiens
  misc_RNA (1)...(19): siRNA sense strand
cuugacaguuuggauguuu

SEQ ID NO: 1302045 - RNA, 19 nt, Homo sapiens
  misc_RNA (1)...(19): siRNA sense strand
cauauauacgggauccuuu

SEQ ID NO: 1302046 - RNA, 19 nt, Homo sapiens
  misc_RNA (1)...(19): siRNA sense strand
auauauacgggauccuuua

SEQ ID NO: 1302047 - RNA, 19 nt, Homo sapiens
  misc_RNA (1)...(19): siRNA sense strand
cuuaaaggaucaguagcaa

SEQ ID NO: 1302048 - RNA, 19 nt, Homo sapiens
  misc_RNA (1)...(19): siRNA sense strand
uaaaccugaggaaggaaua

SEQ ID NO: 1302049 - RNA, 19 nt, Homo sapiens
  misc_RNA (1)...(19): siRNA sense strand
agaugacgccuguuauaga

SEQ ID NO: 1302050 - RNA, 19 nt, Homo sapiens
  misc_RNA (1)...(19): siRNA sense strand
ugugauuguuauugccaua

SEQ ID NO: 1302051 - RNA, 19 nt, Homo sapiens
  misc_RNA (1)...(19): siRNA sense strand
gagagcacgauuuauugug

SEQ ID NO: 1302052 - RNA, 19 nt, Homo sapiens
  misc_RNA (1)...(19): siRNA sense strand
gaaguauuugaguaucuug

SEQ ID NO: 1302053 - RNA, 19 nt, Homo sapiens
  misc_RNA (1)...(19): siRNA sense strand
ggcuaccugucucagauga

SEQ ID NO: 1302054 - RNA, 19 nt, Homo sapiens
  misc_RNA (1)...(19): siRNA sense strand
gauaucaggauuuggaaaa

SEQ ID NO: 1302055 - RNA, 19 nt, Homo sapiens
  misc_RNA (1)...(19): siRNA sense strand
ccucuugccacccauacua

SEQ ID NO: 1302056 - RNA, 19 nt, Homo sapiens
  misc_RNA (1)...(19): siRNA sense strand
ccaugguguugcugcugua

SEQ ID NO: 1302057 - RNA, 19 nt, Homo sapiens
  misc_RNA (1)...(19): siRNA sense strand
cagaugacgccuguuauag

SEQ ID NO: 1302058 - RNA, 19 nt, Homo sapiens
  misc_RNA (1)...(19): siRNA sense strand
cagaugguggagcugaaua

SEQ ID NO: 1302059 - RNA, 19 nt, Homo sapiens
  misc_RNA (1)...(19): siRNA sense strand
uuggugaacgaguagauua

SEQ ID NO: 1302060 - RNA, 19 nt, Homo sapiens
  misc_RNA (1)...(19): siRNA sense strand
gucauugcugugauuguua

SEQ ID NO: 1302061 - RNA, 19 nt, Homo sapiens
  misc_RNA (1)...(19): siRNA sense strand
ggagccaccaacauuugaa

SEQ ID NO: 1302062 - RNA, 19 nt, Homo sapiens
  misc_RNA (1)...(19): siRNA sense strand
gcgcuuuccuggguugcuu

SEQ ID NO: 1302063 - RNA, 19 nt, Homo sapiens
  misc_RNA (1)...(19): siRNA sense strand
uacuacaaagcaacaguua

SEQ ID NO: 1302064 - RNA, 19 nt, Homo sapiens
  misc_RNA (1)...(19): siRNA sense strand
cuugaugcaguaacuuaua

SEQ ID NO: 1302065 - RNA, 19 nt, Homo sapiens
  misc_RNA (1)...(19): siRNA sense strand
aaacauguccauauauacg

SEQ ID NO: 1302066 - RNA, 19 nt, Homo sapiens
  misc_RNA (1)...(19): siRNA sense strand
guguaaaguggucaaaugu

SEQ ID NO: 1302067 - RNA, 19 nt, Homo sapiens
  misc_RNA (1)...(19): siRNA sense strand
cuuacgaguuugguuauca

SEQ ID NO: 1302068 - RNA, 19 nt, Homo sapiens
  misc_RNA (1)...(19): siRNA sense strand
uacgggauccuuuaaaugg

SEQ ID NO: 1302069 - RNA, 19 nt, Homo sapiens
  misc_RNA (1)...(19): siRNA sense strand
gcagaugguggagcugaau

SEQ ID NO: 1302070 - RNA, 19 nt, Homo sapiens
  misc_RNA (1)...(19): siRNA sense strand
aaccaaaacccuacuauga

SEQ ID NO: 1302071 - RNA, 19 nt, Homo sapiens
  misc_RNA (1)...(19): siRNA sense strand
cccaauaugugaaaagguu

SEQ ID NO: 1302072 - RNA, 19 nt, Homo sapiens
  misc_RNA (1)...(19): siRNA sense strand
ggagcugaauaugccacuu

SEQ ID NO: 1302073 - RNA, 19 nt, Homo sapiens
  misc_RNA (1)...(19): siRNA sense strand
cgauggcagcgacacaauu

SEQ ID NO: 1302074 - RNA, 19 nt, Homo sapiens
  misc_RNA (1)...(19): siRNA sense strand
gauccauuuucacuuauug

SEQ ID NO: 1302075 - RNA, 19 nt, Homo sapiens
  misc_RNA (1)...(19): siRNA sense strand
uugaugcaguaacuuauag

SEQ ID NO: 1302076 - RNA, 19 nt, Homo sapiens
  misc_RNA (1)...(19): siRNA sense strand
guaucuugaugcaguaacu

SEQ ID NO: 1302077 - RNA, 19 nt, Homo sapiens
  misc_RNA (1)...(19): siRNA sense strand
ggagagagcacgauuuauu

SEQ ID NO: 1302078 - RNA, 19 nt, Homo sapiens
  misc_RNA (1)...(19): siRNA sense strand
agagaaacauguccauaua

SEQ ID NO: 1302079 - RNA, 19 nt, Homo sapiens
  misc_RNA (1)...(19): siRNA sense strand
cagaugcacuuuauuugua

SEQ ID NO: 1302080 - RNA, 19 nt, Homo sapiens
  misc_RNA (1)...(19): siRNA sense strand
ggacuuacgaguuugguua

SEQ ID NO: 1302081 - RNA, 19 nt, Homo sapiens
  misc_RNA (1)...(19): siRNA sense strand
aaacagauaucaggauuug

SEQ ID NO: 1302082 - RNA, 19 nt, Homo sapiens
  misc_RNA (1)...(19): siRNA sense strand
cuauggagcucauugguaa

SEQ ID NO: 1302083 - RNA, 19 nt, Homo sapiens
  misc_RNA (1)...(19): siRNA sense strand
aaacacaccuuuagugaag

SEQ ID NO: 1302084 - RNA, 19 nt, Homo sapiens
  misc_RNA (1)...(19): siRNA sense strand
gaacuuaaaggaucaguag

SEQ ID NO: 1302085 - RNA, 19 nt, Homo sapiens
  misc_RNA (1)...(19): siRNA sense strand
gaaaacagauaucaggauu

SEQ ID NO: 1302086 - RNA, 19 nt, Homo sapiens
  misc_RNA (1)...(19): siRNA sense strand
uaaaggaucaguagcaauu

SEQ ID NO: 1302087 - RNA, 19 nt, Homo sapiens
  misc_RNA (1)...(19): siRNA sense strand
aaaugggacuuacgaguuu

SEQ ID NO: 1302088 - RNA, 19 nt, Homo sapiens
  misc_RNA (1)...(19): siRNA sense strand
guuaucagaugcacuuuau

SEQ ID NO: 1302089 - RNA, 19 nt, Homo sapiens
  misc_RNA (1)...(19): siRNA sense strand
ugagauuggugaacgagua

SEQ ID NO: 1302090 - RNA, 19 nt, Homo sapiens
  misc_RNA (1)...(19): siRNA sense strand
gugaacgaguagauuauaa

SEQ ID NO: 1302091 - RNA, 19 nt, Homo sapiens
  misc_RNA (1)...(19): siRNA sense strand
gagagagcacgauuuauug

SEQ ID NO: 1302092 - RNA, 19 nt, Homo sapiens
  misc_RNA (1)...(19): siRNA sense strand
caaaugggacuuacgaguu

SEQ ID NO: 1302093 - RNA, 19 nt, Homo sapiens
  misc_RNA (1)...(19): siRNA sense strand
ggucauugcugugauuguu

SEQ ID NO: 1302094 - RNA, 19 nt, Homo sapiens
  misc_RNA (1)...(19): siRNA sense strand
ccagauccauuuucacuua

SEQ ID NO: 1302095 - RNA, 19 nt, Homo sapiens
  misc_RNA (1)...(19): siRNA sense strand
gaaggaauacuugacaguu

SEQ ID NO: 1302096 - RNA, 19 nt, Homo sapiens
  misc_RNA (1)...(19): siRNA sense strand
aaggaauacuugacaguuu

SEQ ID NO: 1302097 - RNA, 19 nt, Homo sapiens
  misc_RNA (1)...(19): siRNA sense strand
ucagaugacgccuguuaua

SEQ ID NO: 1302098 - RNA, 19 nt, Homo sapiens
  misc_RNA (1)...(19): siRNA sense strand
gaaaacacaccuuuaguga

SEQ ID NO: 1302099 - RNA, 19 nt, Homo sapiens
  misc_RNA (1)...(19): siRNA sense strand
gaugacgccuguuauagag

SEQ ID NO: 1302100 - RNA, 19 nt, Homo sapiens
  misc_RNA (1)...(19): siRNA sense strand
gagaaacauguccauauau

SEQ ID NO: 1302101 - RNA, 19 nt, Homo sapiens
  misc_RNA (1)...(19): siRNA sense strand
acgaguagauuauaagugu

SEQ ID NO: 1302102 - RNA, 19 nt, Homo sapiens
  misc_RNA (1)...(19): siRNA sense strand
cuacaaagcaacaguuaug

SEQ ID NO: 1302103 - RNA, 19 nt, Homo sapiens
  misc_RNA (1)...(19): siRNA sense strand
ccaccaacauuugaagcua

SEQ ID NO: 1302104 - RNA, 19 nt, Homo sapiens
  misc_RNA (1)...(19): siRNA sense strand
uauacgggauccuuuaaau

SEQ ID NO: 1302105 - RNA, 19 nt, Homo sapiens
  misc_RNA (1)...(19): siRNA sense strand
cgaguuugguuaucagaug

SEQ ID NO: 1302106 - RNA, 19 nt, Homo sapiens
  misc_RNA (1)...(19): siRNA sense strand
gaacgaguagauuauaagu

SEQ ID NO: 1302107 - RNA, 19 nt, Homo sapiens
  misc_RNA (1)...(19): siRNA sense strand
gugaggagccaccaacauu

SEQ ID NO: 1302108 - RNA, 19 nt, Homo sapiens
  misc_RNA (1)...(19): siRNA sense strand
gauggcagcgacacaauug

SEQ ID NO: 1302109 - RNA, 19 nt, Homo sapiens
  misc_RNA (1)...(19): siRNA sense strand
gcuauggagcucauuggua

SEQ ID NO: 1302110 - RNA, 19 nt, Homo sapiens
  misc_RNA (1)...(19): siRNA sense strand
gaggagccaccaacauuug

SEQ ID NO: 1302111 - RNA, 19 nt, Homo sapiens
  misc_RNA (1)...(19): siRNA sense strand
acacaccuuuagugaagua

SEQ ID NO: 1302112 - RNA, 19 nt, Homo sapiens
  misc_RNA (1)...(19): siRNA sense strand
ucucagaugacgccuguua

SEQ ID NO: 1302113 - RNA, 19 nt, Homo sapiens
  misc_RNA (1)...(19): siRNA sense strand
uagagaaacauguccauau

SEQ ID NO: 1302114 - RNA, 19 nt, Homo sapiens
  misc_RNA (1)...(19): siRNA sense strand
guuccaaagugucuuaaag

SEQ ID NO: 1302115 - RNA, 19 nt, Homo sapiens
  misc_RNA (1)...(19): siRNA sense strand
ggugaacgaguagauuaua

SEQ ID NO: 1302116 - RNA, 19 nt, Homo sapiens
  misc_RNA (1)...(19): siRNA sense strand
gaaguagaaguauuugagu

SEQ ID NO: 1302117 - RNA, 19 nt, Homo sapiens
  misc_RNA (1)...(19): siRNA sense strand
gaaacauguccauauauac

SEQ ID NO: 1302118 - RNA, 19 nt, Homo sapiens
  misc_RNA (1)...(19): siRNA sense strand
ugacgccuguuauagagaa

SEQ ID NO: 1302119 - RNA, 19 nt, Homo sapiens
  misc_RNA (1)...(19): siRNA sense strand
cgaguagauuauaagugua

SEQ ID NO: 1302120 - RNA, 19 nt, Homo sapiens
  misc_RNA (1)...(19): siRNA sense strand
gcacuuuauuuguaaugag

SEQ ID NO: 1302121 - RNA, 19 nt, Homo sapiens
  misc_RNA (1)...(19): siRNA sense strand
guagaaguauuugaguauc

SEQ ID NO: 1302122 - RNA, 19 nt, Homo sapiens
  misc_RNA (1)...(19): siRNA sense strand
guauuugaguaucuugaug

SEQ ID NO: 1302123 - RNA, 19 nt, Homo sapiens
  misc_RNA (1)...(19): siRNA sense strand
aggaauacuugacaguuug

SEQ ID NO: 1302124 - RNA, 19 nt, Homo sapiens
  misc_RNA (1)...(19): siRNA sense strand
ccaaaacccuacuaugaga

SEQ ID NO: 1302125 - RNA, 19 nt, Homo sapiens
  misc_RNA (1)...(19): siRNA sense strand
aguguaaaguggucaaaug

SEQ ID NO: 1302126 - RNA, 19 nt, Homo sapiens
  misc_RNA (1)...(19): siRNA sense strand
ccacccauacuauuuguga

SEQ ID NO: 1302127 - RNA, 19 nt, Homo sapiens
  misc_RNA (1)...(19): siRNA sense strand
caccaacauuugaagcuau

SEQ ID NO: 1302128 - RNA, 19 nt, Homo sapiens
  misc_RNA (1)...(19): siRNA sense strand
uuggagagagcacgauuua

SEQ ID NO: 1302129 - RNA, 19 nt, Homo sapiens
  misc_RNA (1)...(19): siRNA sense strand
gguuaucagaugcacuuua

SEQ ID NO: 1302130 - RNA, 19 nt, Homo sapiens
  misc_RNA (1)...(19): siRNA sense strand
ugaggagccaccaacauuu

SEQ ID NO: 1302131 - RNA, 19 nt, Homo sapiens
  misc_RNA (1)...(19): siRNA sense strand
ggaaggaauacuugacagu

SEQ ID NO: 1302132 - RNA, 19 nt, Homo sapiens
  misc_RNA (1)...(19): siRNA sense strand
gaggaaggaauacuugaca

SEQ ID NO: 1302133 - RNA, 19 nt, Homo sapiens
  misc_RNA (1)...(19): siRNA sense strand
ccaguuccaaagugucuua

SEQ ID NO: 1302134 - RNA, 19 nt, Homo sapiens
  misc_RNA (1)...(19): siRNA sense strand
ugaguaucuugaugcagua

SEQ ID NO: 1302135 - RNA, 19 nt, Homo sapiens
  misc_RNA (1)...(19): siRNA sense strand
caccuuuagugaaguagaa

SEQ ID NO: 1302136 - RNA, 19 nt, Homo sapiens
  misc_RNA (1)...(19): siRNA sense strand
acagauaucaggauuugga

SEQ ID NO: 1302137 - RNA, 19 nt, Homo sapiens
  misc_RNA (1)...(19): siRNA sense strand
ucauugcugugauuguuau

SEQ ID NO: 1302138 - RNA, 19 nt, Homo sapiens
  misc_RNA (1)...(19): siRNA sense strand
ucagaugcacuuuauuugu

SEQ ID NO: 1302139 - RNA, 19 nt, Homo sapiens
  misc_RNA (1)...(19): siRNA sense strand
gugcugcuccagaguguaa

SEQ ID NO: 1302140 - RNA, 19 nt, Homo sapiens
  misc_RNA (1)...(19): siRNA sense strand
ggaaaacacaccuuuagug

SEQ ID NO: 1302141 - RNA, 19 nt, Homo sapiens
  misc_RNA (1)...(19): siRNA sense strand
aaggaucaguagcaauuug

SEQ ID NO: 1302142 - RNA, 19 nt, Homo sapiens
  misc_RNA (1)...(19): siRNA sense strand
uauauacgggauccuuuaa

SEQ ID NO: 1302143 - RNA, 19 nt, Homo sapiens
  misc_RNA (1)...(19): siRNA sense strand
ugaaguagaaguauuugag

SEQ ID NO: 1302144 - RNA, 19 nt, Homo sapiens
  misc_RNA (1)...(19): siRNA sense strand
cuugacaguuuggauguuu

SEQ ID NO: 1302145 - RNA, 19 nt, Homo sapiens
  misc_RNA (1)...(19): siRNA sense strand
cauauauacgggauccuuu

SEQ ID NO: 1302146 - RNA, 19 nt, Homo sapiens
  misc_RNA (1)...(19): siRNA sense strand
auauauacgggauccuuua

SEQ ID NO: 1302147 - RNA, 19 nt, Homo sapiens
  misc_RNA (1)...(19): siRNA sense strand
cuuaaaggaucaguagcaa

SEQ ID NO: 1302148 - RNA, 19 nt, Homo sapiens
  misc_RNA (1)...(19): siRNA sense strand
uaaaccugaggaaggaaua

SEQ ID NO: 1302149 - RNA, 19 nt, Homo sapiens
  misc_RNA (1)...(19): siRNA sense strand
agaugacgccuguuauaga

SEQ ID NO: 1302150 - RNA, 19 nt, Homo sapiens
  misc_RNA (1)...(19): siRNA sense strand
ugugauuguuauugccaua

SEQ ID NO: 1302151 - RNA, 19 nt, Homo sapiens
  misc_RNA (1)...(19): siRNA sense strand
gagagcacgauuuauugug

SEQ ID NO: 1302152 - RNA, 19 nt, Homo sapiens
  misc_RNA (1)...(19): siRNA sense strand
gaaguauuugaguaucuug

SEQ ID NO: 1302153 - RNA, 19 nt, Homo sapiens
  misc_RNA (1)...(19): siRNA sense strand
ggcuaccugucucagauga

SEQ ID NO: 1302154 - RNA, 19 nt, Homo sapiens
  misc_RNA (1)...(19): siRNA sense strand
gauaucaggauuuggaaaa

SEQ ID NO: 1302155 - RNA, 19 nt, Homo sapiens
  misc_RNA (1)...(19): siRNA sense strand
ccucuugccacccauacua

SEQ ID NO: 1302156 - RNA, 19 nt, Homo sapiens
  misc_RNA (1)...(19): siRNA sense strand
ccaugguguugcugcugua

SEQ ID NO: 1302157 - RNA, 19 nt, Homo sapiens
  misc_RNA (1)...(19): siRNA sense strand
cagaugacgccuguuauag

SEQ ID NO: 1302158 - RNA, 19 nt, Homo sapiens
  misc_RNA (1)...(19): siRNA sense strand
uuggugaacgaguagauua

SEQ ID NO: 1302159 - RNA, 19 nt, Homo sapiens
  misc_RNA (1)...(19): siRNA sense strand
gucauugcugugauuguua

SEQ ID NO: 1302160 - RNA, 19 nt, Homo sapiens
  misc_RNA (1)...(19): siRNA sense strand
ggagccaccaacauuugaa

SEQ ID NO: 1302161 - RNA, 19 nt, Homo sapiens
  misc_RNA (1)...(19): siRNA sense strand
gcgcuuuccuggguugcuu

SEQ ID NO: 1302162 - RNA, 19 nt, Homo sapiens
  misc_RNA (1)...(19): siRNA sense strand
uacuacaaagcaacaguua

SEQ ID NO: 1302163 - RNA, 19 nt, Homo sapiens
  misc_RNA (1)...(19): siRNA sense strand
cuugaugcaguaacuuaua

SEQ ID NO: 1302164 - RNA, 19 nt, Homo sapiens
  misc_RNA (1)...(19): siRNA sense strand
aaacauguccauauauacg

SEQ ID NO: 1302165 - RNA, 19 nt, Homo sapiens
  misc_RNA (1)...(19): siRNA sense strand
guguaaaguggucaaaugu

SEQ ID NO: 1302166 - RNA, 19 nt, Homo sapiens
  misc_RNA (1)...(19): siRNA sense strand
cuuacgaguuugguuauca

SEQ ID NO: 1302167 - RNA, 19 nt, Homo sapiens
  misc_RNA (1)...(19): siRNA sense strand
uacgggauccuuuaaaugg

SEQ ID NO: 1302168 - RNA, 19 nt, Homo sapiens
  misc_RNA (1)...(19): siRNA sense strand
aaccaaaacccuacuauga

SEQ ID NO: 1302169 - RNA, 19 nt, Homo sapiens
  misc_RNA (1)...(19): siRNA sense strand
cccaauaugugaaaagguu

SEQ ID NO: 1302170 - RNA, 19 nt, Homo sapiens
  misc_RNA (1)...(19): siRNA sense strand
cgauggcagcgacacaauu

SEQ ID NO: 1302171 - RNA, 19 nt, Homo sapiens
  misc_RNA (1)...(19): siRNA sense strand
gauccauuuucacuuauug

SEQ ID NO: 1302172 - RNA, 19 nt, Homo sapiens
  misc_RNA (1)...(19): siRNA sense strand
uugaugcaguaacuuauag

SEQ ID NO: 1302173 - RNA, 19 nt, Homo sapiens
  misc_RNA (1)...(19): siRNA sense strand
guaucuugaugcaguaacu

SEQ ID NO: 1302174 - RNA, 19 nt, Homo sapiens
  misc_RNA (1)...(19): siRNA sense strand
caacauuugaagcuaugga

SEQ ID NO: 1302175 - RNA, 19 nt, Homo sapiens
  misc_RNA (1)...(19): siRNA sense strand
gagauuggugaacgaguag

SEQ ID NO: 1302176 - RNA, 19 nt, Homo sapiens
  misc_RNA (1)...(19): siRNA sense strand
ggagagagcacgauuuauu

SEQ ID NO: 1302177 - RNA, 19 nt, Homo sapiens
  misc_RNA (1)...(19): siRNA sense strand
agagaaacauguccauaua

SEQ ID NO: 1302178 - RNA, 19 nt, Homo sapiens
  misc_RNA (1)...(19): siRNA sense strand
cagaugcacuuuauuugua

SEQ ID NO: 1302179 - RNA, 19 nt, Homo sapiens
  misc_RNA (1)...(19): siRNA sense strand
ggacuuacgaguuugguua

SEQ ID NO: 1302180 - RNA, 19 nt, Homo sapiens
  misc_RNA (1)...(19): siRNA sense strand
aaacagauaucaggauuug

SEQ ID NO: 1302181 - RNA, 19 nt, Homo sapiens
  misc_RNA (1)...(19): siRNA sense strand
cuauggagcucauugguaa

SEQ ID NO: 1302182 - RNA, 19 nt, Homo sapiens
  misc_RNA (1)...(19): siRNA sense strand
aaacacaccuuuagugaag

SEQ ID NO: 1302183 - RNA, 19 nt, Homo sapiens
  misc_RNA (1)...(19): siRNA sense strand
gaacuuaaaggaucaguag

SEQ ID NO: 1302184 - RNA, 19 nt, Homo sapiens
  misc_RNA (1)...(19): siRNA sense strand
gaaaacagauaucaggauu

SEQ ID NO: 1302185 - RNA, 19 nt, Homo sapiens
  misc_RNA (1)...(19): siRNA sense strand
uaaaggaucaguagcaauu

SEQ ID NO: 1302186 - RNA, 19 nt, Homo sapiens
  misc_RNA (1)...(19): siRNA sense strand
aaaugggacuuacgaguuu

SEQ ID NO: 1302187 - RNA, 19 nt, Homo sapiens
  misc_RNA (1)...(19): siRNA sense strand
guuaucagaugcacuuuau

SEQ ID NO: 1302188 - RNA, 19 nt, Homo sapiens
  misc_RNA (1)...(19): siRNA sense strand
gagcugaauaugccacuua

SEQ ID NO: 1302189 - RNA, 19 nt, Homo sapiens
  misc_RNA (1)...(19): siRNA sense strand
gagcagagaggcugaauag

SEQ ID NO: 1302190 - RNA, 19 nt, Homo sapiens
  misc_RNA (1)...(19): siRNA sense strand
ugagauuggugaacgagua

SEQ ID NO: 1302191 - RNA, 19 nt, Homo sapiens
  misc_RNA (1)...(19): siRNA sense strand
gugaacgaguagauuauaa

SEQ ID NO: 1302192 - RNA, 19 nt, Homo sapiens
  misc_RNA (1)...(19): siRNA sense strand
gagagagcacgauuuauug

SEQ ID NO: 1302193 - RNA, 19 nt, Homo sapiens
  misc_RNA (1)...(19): siRNA sense strand
caaaugggacuuacgaguu

SEQ ID NO: 1302194 - RNA, 19 nt, Homo sapiens
  misc_RNA (1)...(19): siRNA sense strand
ggucauugcugugauuguu

SEQ ID NO: 1302195 - RNA, 19 nt, Homo sapiens
  misc_RNA (1)...(19): siRNA sense strand
ccagauccauuuucacuua

SEQ ID NO: 1302196 - RNA, 19 nt, Homo sapiens
  misc_RNA (1)...(19): siRNA sense strand
gaaggaauacuugacaguu

SEQ ID NO: 1302197 - RNA, 19 nt, Homo sapiens
  misc_RNA (1)...(19): siRNA sense strand
aaggaauacuugacaguuu

SEQ ID NO: 1302198 - RNA, 19 nt, Homo sapiens
  misc_RNA (1)...(19): siRNA sense strand
ucagaugacgccuguuaua

SEQ ID NO: 1302199 - RNA, 19 nt, Homo sapiens
  misc_RNA (1)...(19): siRNA sense strand
gaaaacacaccuuuaguga

SEQ ID NO: 1302200 - RNA, 19 nt, Homo sapiens
  misc_RNA (1)...(19): siRNA sense strand
gaugacgccuguuauagag

SEQ ID NO: 1302201 - RNA, 19 nt, Homo sapiens
  misc_RNA (1)...(19): siRNA sense strand
gagaaacauguccauauau

SEQ ID NO: 1302202 - RNA, 19 nt, Homo sapiens
  misc_RNA (1)...(19): siRNA sense strand
ccacuuaccagacuaaauc

SEQ ID NO: 1302203 - RNA, 19 nt, Homo sapiens
  misc_RNA (1)...(19): siRNA sense strand
acgaguagauuauaagugu

SEQ ID NO: 1302204 - RNA, 19 nt, Homo sapiens
  misc_RNA (1)...(19): siRNA sense strand
cuacaaagcaacaguuaug

SEQ ID NO: 1302205 - RNA, 19 nt, Homo sapiens
  misc_RNA (1)...(19): siRNA sense strand
ccaccaacauuugaagcua

SEQ ID NO: 1302206 - RNA, 19 nt, Homo sapiens
  misc_RNA (1)...(19): siRNA sense strand
uauacgggauccuuuaaau

SEQ ID NO: 1302207 - RNA, 19 nt, Homo sapiens
  misc_RNA (1)...(19): siRNA sense strand
cgaguuugguuaucagaug

SEQ ID NO: 1302208 - RNA, 19 nt, Homo sapiens
  misc_RNA (1)...(19): siRNA sense strand
gaacgaguagauuauaagu

SEQ ID NO: 1302209 - RNA, 19 nt, Homo sapiens
  misc_RNA (1)...(19): siRNA sense strand
gugaggagccaccaacauu

SEQ ID NO: 1302210 - RNA, 19 nt, Homo sapiens
  misc_RNA (1)...(19): siRNA sense strand
gauggcagcgacacaauug

SEQ ID NO: 1302211 - RNA, 19 nt, Homo sapiens
  misc_RNA (1)...(19): siRNA sense strand
ucucagaugacgccuguua

SEQ ID NO: 1302212 - RNA, 19 nt, Homo sapiens
  misc_RNA (1)...(19): siRNA sense strand
acacaccuuuagugaagua

SEQ ID NO: 1302213 - RNA, 19 nt, Homo sapiens
  misc_RNA (1)...(19): siRNA sense strand
gcuauggagcucauuggua

SEQ ID NO: 1302214 - RNA, 19 nt, Homo sapiens
  misc_RNA (1)...(19): siRNA sense strand
gaggagccaccaacauuug

SEQ ID NO: 1302215 - RNA, 19 nt, Homo sapiens
  misc_RNA (1)...(19): siRNA sense strand
uagagaaacauguccauau

SEQ ID NO: 1302216 - RNA, 19 nt, Homo sapiens
  misc_RNA (1)...(19): siRNA sense strand
ggugaacgaguagauuaua

SEQ ID NO: 1302217 - RNA, 19 nt, Homo sapiens
  misc_RNA (1)...(19): siRNA sense strand
gaaguagaaguauuugagu

SEQ ID NO: 1302218 - RNA, 19 nt, Homo sapiens
  misc_RNA (1)...(19): siRNA sense strand
gaaacauguccauauauac

SEQ ID NO: 1302219 - RNA, 19 nt, Homo sapiens
  misc_RNA (1)...(19): siRNA sense strand
ugacgccuguuauagagaa

SEQ ID NO: 1302220 - RNA, 19 nt, Homo sapiens
  misc_RNA (1)...(19): siRNA sense strand
cgaguagauuauaagugua

SEQ ID NO: 1302221 - RNA, 19 nt, Homo sapiens
  misc_RNA (1)...(19): siRNA sense strand
gcacuuuauuuguaaugag

SEQ ID NO: 1302222 - RNA, 19 nt, Homo sapiens
  misc_RNA (1)...(19): siRNA sense strand
guagaaguauuugaguauc

SEQ ID NO: 1302223 - RNA, 19 nt, Homo sapiens
  misc_RNA (1)...(19): siRNA sense strand
guauuugaguaucuugaug

SEQ ID NO: 1302224 - RNA, 19 nt, Homo sapiens
  misc_RNA (1)...(19): siRNA sense strand
aggaauacuugacaguuug

SEQ ID NO: 1302225 - RNA, 19 nt, Homo sapiens
  misc_RNA (1)...(19): siRNA sense strand
ccaaaacccuacuaugaga

SEQ ID NO: 1302226 - RNA, 19 nt, Homo sapiens
  misc_RNA (1)...(19): siRNA sense strand
aguguaaaguggucaaaug

SEQ ID NO: 1302227 - RNA, 19 nt, Homo sapiens
  misc_RNA (1)...(19): siRNA sense strand
ccacccauacuauuuguga

SEQ ID NO: 1302228 - RNA, 19 nt, Homo sapiens
  misc_RNA (1)...(19): siRNA sense strand
uuggagagagcacgauuua

SEQ ID NO: 1302229 - RNA, 19 nt, Homo sapiens
  misc_RNA (1)...(19): siRNA sense strand
gguuaucagaugcacuuua

SEQ ID NO: 1302230 - RNA, 19 nt, Homo sapiens
  misc_RNA (1)...(19): siRNA sense strand
caccaacauuugaagcuau

SEQ ID NO: 1302231 - RNA, 19 nt, Homo sapiens
  misc_RNA (1)...(19): siRNA sense strand
ugaggagccaccaacauuu

SEQ ID NO: 1302232 - RNA, 19 nt, Homo sapiens
  misc_RNA (1)...(19): siRNA sense strand
ggaaggaauacuugacagu

SEQ ID NO: 1302233 - RNA, 19 nt, Homo sapiens
  misc_RNA (1)...(19): siRNA sense strand
gaggaaggaauacuugaca

SEQ ID NO: 1302234 - RNA, 19 nt, Homo sapiens
  misc_RNA (1)...(19): siRNA sense strand
ugaguaucuugaugcagua

SEQ ID NO: 1302235 - RNA, 19 nt, Homo sapiens
  misc_RNA (1)...(19): siRNA sense strand
caccuuuagugaaguagaa

SEQ ID NO: 1302236 - RNA, 19 nt, Homo sapiens
  misc_RNA (1)...(19): siRNA sense strand
acagauaucaggauuugga

SEQ ID NO: 1302237 - RNA, 19 nt, Homo sapiens
  misc_RNA (1)...(19): siRNA sense strand
ucauugcugugauuguuau

SEQ ID NO: 1302238 - RNA, 19 nt, Homo sapiens
  misc_RNA (1)...(19): siRNA sense strand
ucagaugcacuuuauuugu

SEQ ID NO: 1302239 - RNA, 19 nt, Homo sapiens
  misc_RNA (1)...(19): siRNA sense strand
gugcugcuccagaguguaa

SEQ ID NO: 1302240 - RNA, 19 nt, Homo sapiens
  misc_RNA (1)...(19): siRNA sense strand
ggaaaacacaccuuuagug

SEQ ID NO: 1302241 - RNA, 19 nt, Homo sapiens
  misc_RNA (1)...(19): siRNA sense strand
aaggaucaguagcaauuug

SEQ ID NO: 1302242 - RNA, 19 nt, Homo sapiens
  misc_RNA (1)...(19): siRNA sense strand
uauauacgggauccuuuaa

SEQ ID NO: 1302243 - RNA, 19 nt, Homo sapiens
  misc_RNA (1)...(19): siRNA sense strand
ugaaguagaaguauuugag

SEQ ID NO: 1302244 - RNA, 19 nt, Homo sapiens
  misc_RNA (1)...(19): siRNA sense strand
cuugacaguuuggauguuu

SEQ ID NO: 1302245 - RNA, 19 nt, Homo sapiens
  misc_RNA (1)...(19): siRNA sense strand
cauauauacgggauccuuu

SEQ ID NO: 1302246 - RNA, 19 nt, Homo sapiens
  misc_RNA (1)...(19): siRNA sense strand
auauauacgggauccuuua

SEQ ID NO: 1302247 - RNA, 19 nt, Homo sapiens
  misc_RNA (1)...(19): siRNA sense strand
cuuaaaggaucaguagcaa

SEQ ID NO: 1302248 - RNA, 19 nt, Homo sapiens
  misc_RNA (1)...(19): siRNA sense strand
uaaaccugaggaaggaaua

SEQ ID NO: 1302249 - RNA, 19 nt, Homo sapiens
  misc_RNA (1)...(19): siRNA sense strand
agaugacgccuguuauaga

SEQ ID NO: 1302250 - RNA, 19 nt, Homo sapiens
  misc_RNA (1)...(19): siRNA sense strand
ugugauuguuauugccaua

SEQ ID NO: 1302251 - RNA, 19 nt, Homo sapiens
  misc_RNA (1)...(19): siRNA sense strand
gagagcacgauuuauugug

SEQ ID NO: 1302252 - RNA, 19 nt, Homo sapiens
  misc_RNA (1)...(19): siRNA sense strand
gaaguauuugaguaucuug

SEQ ID NO: 1302253 - RNA, 19 nt, Homo sapiens
  misc_RNA (1)...(19): siRNA sense strand
ggcuaccugucucagauga

SEQ ID NO: 1302254 - RNA, 19 nt, Homo sapiens
  misc_RNA (1)...(19): siRNA sense strand
gauaucaggauuuggaaaa

SEQ ID NO: 1302255 - RNA, 19 nt, Homo sapiens
  misc_RNA (1)...(19): siRNA sense strand
ccucuugccacccauacua

SEQ ID NO: 1302256 - RNA, 19 nt, Homo sapiens
  misc_RNA (1)...(19): siRNA sense strand
ccaugguguugcugcugua

SEQ ID NO: 1302257 - RNA, 19 nt, Homo sapiens
  misc_RNA (1)...(19): siRNA sense strand
cagaugacgccuguuauag

SEQ ID NO: 1302258 - RNA, 19 nt, Homo sapiens
  misc_RNA (1)...(19): siRNA sense strand
cagaugguggagcugaaua

SEQ ID NO: 1302259 - RNA, 19 nt, Homo sapiens
  misc_RNA (1)...(19): siRNA sense strand
gucauugcugugauuguua

SEQ ID NO: 1302260 - RNA, 19 nt, Homo sapiens
  misc_RNA (1)...(19): siRNA sense strand
ggagccaccaacauuugaa

SEQ ID NO: 1302261 - RNA, 19 nt, Homo sapiens
  misc_RNA (1)...(19): siRNA sense strand
uuggugaacgaguagauua

SEQ ID NO: 1302262 - RNA, 19 nt, Homo sapiens
  misc_RNA (1)...(19): siRNA sense strand
gcgcuuuccuggguugcuu

SEQ ID NO: 1302263 - RNA, 19 nt, Homo sapiens
  misc_RNA (1)...(19): siRNA sense strand
uacuacaaagcaacaguua

SEQ ID NO: 1302264 - RNA, 19 nt, Homo sapiens
  misc_RNA (1)...(19): siRNA sense strand
cuugaugcaguaacuuaua

SEQ ID NO: 1302265 - RNA, 19 nt, Homo sapiens
  misc_RNA (1)...(19): siRNA sense strand
aaacauguccauauauacg

SEQ ID NO: 1302266 - RNA, 19 nt, Homo sapiens
  misc_RNA (1)...(19): siRNA sense strand
guguaaaguggucaaaugu

SEQ ID NO: 1302267 - RNA, 19 nt, Homo sapiens
  misc_RNA (1)...(19): siRNA sense strand
cuuacgaguuugguuauca

SEQ ID NO: 1302268 - RNA, 19 nt, Homo sapiens
  misc_RNA (1)...(19): siRNA sense strand
uacgggauccuuuaaaugg

SEQ ID NO: 1302269 - RNA, 19 nt, Homo sapiens
  misc_RNA (1)...(19): siRNA sense strand
gcagaugguggagcugaau

SEQ ID NO: 1302270 - RNA, 19 nt, Homo sapiens
  misc_RNA (1)...(19): siRNA sense strand
aaccaaaacccuacuauga

SEQ ID NO: 1302271 - RNA, 19 nt, Homo sapiens
  misc_RNA (1)...(19): siRNA sense strand
uugaugcaguaacuuauag

SEQ ID NO: 1302272 - RNA, 19 nt, Homo sapiens
  misc_RNA (1)...(19): siRNA sense strand
ggagcugaauaugccacuu

SEQ ID NO: 1302273 - RNA, 19 nt, Homo sapiens
  misc_RNA (1)...(19): siRNA sense strand
caacauuugaagcuaugga

SEQ ID NO: 1302274 - RNA, 19 nt, Homo sapiens
  misc_RNA (1)...(19): siRNA sense strand
cgauggcagcgacacaauu

SEQ ID NO: 1302275 - RNA, 19 nt, Homo sapiens
  misc_RNA (1)...(19): siRNA sense strand
gauccauuuucacuuauug

SEQ ID NO: 1302276 - RNA, 19 nt, Homo sapiens
  misc_RNA (1)...(19): siRNA sense strand
ggagagagcacgauuuauu

SEQ ID NO: 1302277 - RNA, 19 nt, Homo sapiens
  misc_RNA (1)...(19): siRNA sense strand
agagaaacauguccauaua

SEQ ID NO: 1302278 - RNA, 19 nt, Homo sapiens
  misc_RNA (1)...(19): siRNA sense strand
cagaugcacuuuauuugua

SEQ ID NO: 1302279 - RNA, 19 nt, Homo sapiens
  misc_RNA (1)...(19): siRNA sense strand
ggacuuacgaguuugguua

SEQ ID NO: 1302280 - RNA, 19 nt, Homo sapiens
  misc_RNA (1)...(19): siRNA sense strand
aaacagauaucaggauuug

SEQ ID NO: 1302281 - RNA, 19 nt, Homo sapiens
  misc_RNA (1)...(19): siRNA sense strand
cuauggagcucauugguaa

SEQ ID NO: 1302282 - RNA, 19 nt, Homo sapiens
  misc_RNA (1)...(19): siRNA sense strand
aaacacaccuuuagugaag

SEQ ID NO: 1302283 - RNA, 19 nt, Homo sapiens
  misc_RNA (1)...(19): siRNA sense strand
gaacuuaaaggaucaguag

SEQ ID NO: 1302284 - RNA, 19 nt, Homo sapiens
  misc_RNA (1)...(19): siRNA sense strand
gaaaacagauaucaggauu

SEQ ID NO: 1302285 - RNA, 19 nt, Homo sapiens
  misc_RNA (1)...(19): siRNA sense strand
uaaaggaucaguagcaauu

SEQ ID NO: 1302286 - RNA, 19 nt, Homo sapiens
  misc_RNA (1)...(19): siRNA sense strand
aaaugggacuuacgaguuu

SEQ ID NO: 1302287 - RNA, 19 nt, Homo sapiens
  misc_RNA (1)...(19): siRNA sense strand
guuaucagaugcacuuuau

SEQ ID NO: 1302288 - RNA, 19 nt, Homo sapiens
  misc_RNA (1)...(19): siRNA sense strand
gagcugaauaugccacuua

SEQ ID NO: 1302289 - RNA, 19 nt, Homo sapiens
  misc_RNA (1)...(19): siRNA sense strand
ugagauuggugaacgagua

SEQ ID NO: 1302290 - RNA, 19 nt, Homo sapiens
  misc_RNA (1)...(19): siRNA sense strand
gugaacgaguagauuauaa

SEQ ID NO: 1302291 - RNA, 19 nt, Homo sapiens
  misc_RNA (1)...(19): siRNA sense strand
gagagagcacgauuuauug

SEQ ID NO: 1302292 - RNA, 19 nt, Homo sapiens
  misc_RNA (1)...(19): siRNA sense strand
caaaugggacuuacgaguu

SEQ ID NO: 1302293 - RNA, 19 nt, Homo sapiens
  misc_RNA (1)...(19): siRNA sense strand
ggucauugcugugauuguu

SEQ ID NO: 1302294 - RNA, 19 nt, Homo sapiens
  misc_RNA (1)...(19): siRNA sense strand
ccagauccauuuucacuua

SEQ ID NO: 1302295 - RNA, 19 nt, Homo sapiens
  misc_RNA (1)...(19): siRNA sense strand
gaaggaauacuugacaguu

SEQ ID NO: 1302296 - RNA, 19 nt, Homo sapiens
  misc_RNA (1)...(19): siRNA sense strand
aaggaauacuugacaguuu

SEQ ID NO: 1302297 - RNA, 19 nt, Homo sapiens
  misc_RNA (1)...(19): siRNA sense strand
ucagaugacgccuguuaua

SEQ ID NO: 1302298 - RNA, 19 nt, Homo sapiens
  misc_RNA (1)...(19): siRNA sense strand
gaaaacacaccuuuaguga

SEQ ID NO: 1302299 - RNA, 19 nt, Homo sapiens
  misc_RNA (1)...(19): siRNA sense strand
gaugacgccuguuauagag

SEQ ID NO: 1302300 - RNA, 19 nt, Homo sapiens
  misc_RNA (1)...(19): siRNA sense strand
gagaaacauguccauauau

SEQ ID NO: 1302301 - RNA, 19 nt, Homo sapiens
  misc_RNA (1)...(19): siRNA sense strand
ccacuuaccagacuaaauc

SEQ ID NO: 1302302 - RNA, 19 nt, Homo sapiens
  misc_RNA (1)...(19): siRNA sense strand
acgaguagauuauaagugu

SEQ ID NO: 1302303 - RNA, 19 nt, Homo sapiens
  misc_RNA (1)...(19): siRNA sense strand
cuacaaagcaacaguuaug

SEQ ID NO: 1302304 - RNA, 19 nt, Homo sapiens
  misc_RNA (1)...(19): siRNA sense strand
ccaccaacauuugaagcua

SEQ ID NO: 1302305 - RNA, 19 nt, Homo sapiens
  misc_RNA (1)...(19): siRNA sense strand
uauacgggauccuuuaaau

SEQ ID NO: 1302306 - RNA, 19 nt, Homo sapiens
  misc_RNA (1)...(19): siRNA sense strand
cgaguuugguuaucagaug

SEQ ID NO: 1302307 - RNA, 19 nt, Homo sapiens
  misc_RNA (1)...(19): siRNA sense strand
gaacgaguagauuauaagu

SEQ ID NO: 1302308 - RNA, 19 nt, Homo sapiens
  misc_RNA (1)...(19): siRNA sense strand
gugaggagccaccaacauu

SEQ ID NO: 1302309 - RNA, 19 nt, Homo sapiens
  misc_RNA (1)...(19): siRNA sense strand
gauggcagcgacacaauug

SEQ ID NO: 1302310 - RNA, 19 nt, Homo sapiens
  misc_RNA (1)...(19): siRNA sense strand
ucucagaugacgccuguua

SEQ ID NO: 1302311 - RNA, 19 nt, Homo sapiens
  misc_RNA (1)...(19): siRNA sense strand
gaggagccaccaacauuug

SEQ ID NO: 1302312 - RNA, 19 nt, Homo sapiens
  misc_RNA (1)...(19): siRNA sense strand
gcuauggagcucauuggua

SEQ ID NO: 1302313 - RNA, 19 nt, Homo sapiens
  misc_RNA (1)...(19): siRNA sense strand
acacaccuuuagugaagua

SEQ ID NO: 1302314 - RNA, 19 nt, Homo sapiens
  misc_RNA (1)...(19): siRNA sense strand
uagagaaacauguccauau

SEQ ID NO: 1302315 - RNA, 19 nt, Homo sapiens
  misc_RNA (1)...(19): siRNA sense strand
guuccaaagugucuuaaag

SEQ ID NO: 1302316 - RNA, 19 nt, Homo sapiens
  misc_RNA (1)...(19): siRNA sense strand
ggugaacgaguagauuaua

SEQ ID NO: 1302317 - RNA, 19 nt, Homo sapiens
  misc_RNA (1)...(19): siRNA sense strand
gaaguagaaguauuugagu

SEQ ID NO: 1302318 - RNA, 19 nt, Homo sapiens
  misc_RNA (1)...(19): siRNA sense strand
gaaacauguccauauauac

SEQ ID NO: 1302319 - RNA, 19 nt, Homo sapiens
  misc_RNA (1)...(19): siRNA sense strand
ugacgccuguuauagagaa

SEQ ID NO: 1302320 - RNA, 19 nt, Homo sapiens
  misc_RNA (1)...(19): siRNA sense strand
cgaguagauuauaagugua

SEQ ID NO: 1302321 - RNA, 19 nt, Homo sapiens
  misc_RNA (1)...(19): siRNA sense strand
gcacuuuauuuguaaugag

SEQ ID NO: 1302322 - RNA, 19 nt, Homo sapiens
  misc_RNA (1)...(19): siRNA sense strand
guagaaguauuugaguauc

SEQ ID NO: 1302323 - RNA, 19 nt, Homo sapiens
  misc_RNA (1)...(19): siRNA sense strand
guauuugaguaucuugaug

SEQ ID NO: 1302324 - RNA, 19 nt, Homo sapiens
  misc_RNA (1)...(19): siRNA sense strand
aggaauacuugacaguuug

SEQ ID NO: 1302325 - RNA, 19 nt, Homo sapiens
  misc_RNA (1)...(19): siRNA sense strand
ccaaaacccuacuaugaga

SEQ ID NO: 1302326 - RNA, 19 nt, Homo sapiens
  misc_RNA (1)...(19): siRNA sense strand
aguguaaaguggucaaaug

SEQ ID NO: 1302327 - RNA, 19 nt, Homo sapiens
  misc_RNA (1)...(19): siRNA sense strand
ccacccauacuauuuguga

SEQ ID NO: 1302328 - RNA, 19 nt, Homo sapiens
  misc_RNA (1)...(19): siRNA sense strand
uuggagagagcacgauuua

SEQ ID NO: 1302329 - RNA, 19 nt, Homo sapiens
  misc_RNA (1)...(19): siRNA sense strand
gguuaucagaugcacuuua

SEQ ID NO: 1302330 - RNA, 19 nt, Homo sapiens
  misc_RNA (1)...(19): siRNA sense strand
caccaacauuugaagcuau

SEQ ID NO: 1302331 - RNA, 19 nt, Homo sapiens
  misc_RNA (1)...(19): siRNA sense strand
ugaggagccaccaacauuu

SEQ ID NO: 1302332 - RNA, 19 nt, Homo sapiens
  misc_RNA (1)...(19): siRNA sense strand
ggaaggaauacuugacagu

SEQ ID NO: 1302333 - RNA, 19 nt, Homo sapiens
  misc_RNA (1)...(19): siRNA sense strand
gaggaaggaauacuugaca

SEQ ID NO: 1302334 - RNA, 19 nt, Homo sapiens
  misc_RNA (1)...(19): siRNA sense strand
ccaguuccaaagugucuua

SEQ ID NO: 1302335 - RNA, 19 nt, Homo sapiens
  misc_RNA (1)...(19): siRNA sense strand
ugaguaucuugaugcagua

SEQ ID NO: 1302336 - RNA, 19 nt, Homo sapiens
  misc_RNA (1)...(19): siRNA sense strand
caccuuuagugaaguagaa

SEQ ID NO: 1302337 - RNA, 19 nt, Homo sapiens
  misc_RNA (1)...(19): siRNA sense strand
acagauaucaggauuugga

SEQ ID NO: 1302338 - RNA, 19 nt, Homo sapiens
  misc_RNA (1)...(19): siRNA sense strand
ucauugcugugauuguuau

SEQ ID NO: 1302339 - RNA, 19 nt, Homo sapiens
  misc_RNA (1)...(19): siRNA sense strand
ucagaugcacuuuauuugu

SEQ ID NO: 1302340 - RNA, 19 nt, Homo sapiens
  misc_RNA (1)...(19): siRNA sense strand
gugcugcuccagaguguaa

SEQ ID NO: 1302341 - RNA, 19 nt, Homo sapiens
  misc_RNA (1)...(19): siRNA sense strand
ggaaaacacaccuuuagug

SEQ ID NO: 1302342 - RNA, 19 nt, Homo sapiens
  misc_RNA (1)...(19): siRNA sense strand
aaggaucaguagcaauuug

SEQ ID NO: 1302343 - RNA, 19 nt, Homo sapiens
  misc_RNA (1)...(19): siRNA sense strand
uauauacgggauccuuuaa

SEQ ID NO: 1302344 - RNA, 19 nt, Homo sapiens
  misc_RNA (1)...(19): siRNA sense strand
ugaaguagaaguauuugag

SEQ ID NO: 1302345 - RNA, 19 nt, Homo sapiens
  misc_RNA (1)...(19): siRNA sense strand
cuugacaguuuggauguuu

SEQ ID NO: 1302346 - RNA, 19 nt, Homo sapiens
  misc_RNA (1)...(19): siRNA sense strand
cauauauacgggauccuuu

SEQ ID NO: 1302347 - RNA, 19 nt, Homo sapiens
  misc_RNA (1)...(19): siRNA sense strand
auauauacgggauccuuua

SEQ ID NO: 1302348 - RNA, 19 nt, Homo sapiens
  misc_RNA (1)...(19): siRNA sense strand
cuuaaaggaucaguagcaa

SEQ ID NO: 1302349 - RNA, 19 nt, Homo sapiens
  misc_RNA (1)...(19): siRNA sense strand
uaaaccugaggaaggaaua

SEQ ID NO: 1302350 - RNA, 19 nt, Homo sapiens
  misc_RNA (1)...(19): siRNA sense strand
agaugacgccuguuauaga

SEQ ID NO: 1302351 - RNA, 19 nt, Homo sapiens
  misc_RNA (1)...(19): siRNA sense strand
ugugauuguuauugccaua

SEQ ID NO: 1302352 - RNA, 19 nt, Homo sapiens
  misc_RNA (1)...(19): siRNA sense strand
gagagcacgauuuauugug

SEQ ID NO: 1302353 - RNA, 19 nt, Homo sapiens
  misc_RNA (1)...(19): siRNA sense strand
gaaguauuugaguaucuug

SEQ ID NO: 1302354 - RNA, 19 nt, Homo sapiens
  misc_RNA (1)...(19): siRNA sense strand
ggcuaccugucucagauga

SEQ ID NO: 1302355 - RNA, 19 nt, Homo sapiens
  misc_RNA (1)...(19): siRNA sense strand
gauaucaggauuuggaaaa

SEQ ID NO: 1302356 - RNA, 19 nt, Homo sapiens
  misc_RNA (1)...(19): siRNA sense strand
ccucuugccacccauacua

SEQ ID NO: 1302357 - RNA, 19 nt, Homo sapiens
  misc_RNA (1)...(19): siRNA sense strand
ccaugguguugcugcugua

SEQ ID NO: 1302358 - RNA, 19 nt, Homo sapiens
  misc_RNA (1)...(19): siRNA sense strand
cagaugacgccuguuauag

SEQ ID NO: 1302359 - RNA, 19 nt, Homo sapiens
  misc_RNA (1)...(19): siRNA sense strand
cagaugguggagcugaaua

SEQ ID NO: 1302360 - RNA, 19 nt, Homo sapiens
  misc_RNA (1)...(19): siRNA sense strand
gucauugcugugauuguua

SEQ ID NO: 1302361 - RNA, 19 nt, Homo sapiens
  misc_RNA (1)...(19): siRNA sense strand
ggagccaccaacauuugaa

SEQ ID NO: 1302362 - RNA, 19 nt, Homo sapiens
  misc_RNA (1)...(19): siRNA sense strand
uuggugaacgaguagauua

SEQ ID NO: 1302363 - RNA, 19 nt, Homo sapiens
  misc_RNA (1)...(19): siRNA sense strand
gcgcuuuccuggguugcuu

SEQ ID NO: 1302364 - RNA, 19 nt, Homo sapiens
  misc_RNA (1)...(19): siRNA sense strand
uacuacaaagcaacaguua

SEQ ID NO: 1302365 - RNA, 19 nt, Homo sapiens
  misc_RNA (1)...(19): siRNA sense strand
cuugaugcaguaacuuaua

SEQ ID NO: 1302366 - RNA, 19 nt, Homo sapiens
  misc_RNA (1)...(19): siRNA sense strand
aaacauguccauauauacg

SEQ ID NO: 1302367 - RNA, 19 nt, Homo sapiens
  misc_RNA (1)...(19): siRNA sense strand
guguaaaguggucaaaugu

SEQ ID NO: 1302368 - RNA, 19 nt, Homo sapiens
  misc_RNA (1)...(19): siRNA sense strand
cuuacgaguuugguuauca

SEQ ID NO: 1302369 - RNA, 19 nt, Homo sapiens
  misc_RNA (1)...(19): siRNA sense strand
uacgggauccuuuaaaugg

SEQ ID NO: 1302370 - RNA, 19 nt, Homo sapiens
  misc_RNA (1)...(19): siRNA sense strand
gcagaugguggagcugaau

SEQ ID NO: 1302371 - RNA, 19 nt, Homo sapiens
  misc_RNA (1)...(19): siRNA sense strand
aaccaaaacccuacuauga

SEQ ID NO: 1302372 - RNA, 19 nt, Homo sapiens
  misc_RNA (1)...(19): siRNA sense strand
uugaugcaguaacuuauag

SEQ ID NO: 1302373 - RNA, 19 nt, Homo sapiens
  misc_RNA (1)...(19): siRNA sense strand
ggagcugaauaugccacuu

SEQ ID NO: 1302374 - RNA, 19 nt, Homo sapiens
  misc_RNA (1)...(19): siRNA sense strand
cgauggcagcgacacaauu

SEQ ID NO: 1302375 - RNA, 19 nt, Homo sapiens
  misc_RNA (1)...(19): siRNA sense strand
gauccauuuucacuuauug

SEQ ID NO: 1302376 - RNA, 19 nt, Homo sapiens
  misc_RNA (1)...(19): siRNA sense strand
ggagagagcacgauuuauu

SEQ ID NO: 1302377 - RNA, 19 nt, Homo sapiens
  misc_RNA (1)...(19): siRNA sense strand
agagaaacauguccauaua

SEQ ID NO: 1302378 - RNA, 19 nt, Homo sapiens
  misc_RNA (1)...(19): siRNA sense strand
cagaugcacuuuauuugua

SEQ ID NO: 1302379 - RNA, 19 nt, Homo sapiens
  misc_RNA (1)...(19): siRNA sense strand
ggacuuacgaguuugguua

SEQ ID NO: 1302380 - RNA, 19 nt, Homo sapiens
  misc_RNA (1)...(19): siRNA sense strand
aaacagauaucaggauuug

SEQ ID NO: 1302381 - RNA, 19 nt, Homo sapiens
  misc_RNA (1)...(19): siRNA sense strand
cuauggagcucauugguaa

SEQ ID NO: 1302382 - RNA, 19 nt, Homo sapiens
  misc_RNA (1)...(19): siRNA sense strand
aaacacaccuuuagugaag

SEQ ID NO: 1302383 - RNA, 19 nt, Homo sapiens
  misc_RNA (1)...(19): siRNA sense strand
gaacuuaaaggaucaguag

SEQ ID NO: 1302384 - RNA, 19 nt, Homo sapiens
  misc_RNA (1)...(19): siRNA sense strand
gaaaacagauaucaggauu

SEQ ID NO: 1302385 - RNA, 19 nt, Homo sapiens
  misc_RNA (1)...(19): siRNA sense strand
uaaaggaucaguagcaauu

SEQ ID NO: 1302386 - RNA, 19 nt, Homo sapiens
  misc_RNA (1)...(19): siRNA sense strand
aaaugggacuuacgaguuu

SEQ ID NO: 1302387 - RNA, 19 nt, Homo sapiens
  misc_RNA (1)...(19): siRNA sense strand
guuaucagaugcacuuuau

SEQ ID NO: 1302388 - RNA, 19 nt, Homo sapiens
  misc_RNA (1)...(19): siRNA sense strand
gagcugaauaugccacuua

SEQ ID NO: 1302389 - RNA, 19 nt, Homo sapiens
  misc_RNA (1)...(19): siRNA sense strand
ugagauuggugaacgagua

SEQ ID NO: 1302390 - RNA, 19 nt, Homo sapiens
  misc_RNA (1)...(19): siRNA sense strand
gugaacgaguagauuauaa

SEQ ID NO: 1302391 - RNA, 19 nt, Homo sapiens
  misc_RNA (1)...(19): siRNA sense strand
gagagagcacgauuuauug

SEQ ID NO: 1302392 - RNA, 19 nt, Homo sapiens
  misc_RNA (1)...(19): siRNA sense strand
caaaugggacuuacgaguu

SEQ ID NO: 1302393 - RNA, 19 nt, Homo sapiens
  misc_RNA (1)...(19): siRNA sense strand
ggucauugcugugauuguu

SEQ ID NO: 1302394 - RNA, 19 nt, Homo sapiens
  misc_RNA (1)...(19): siRNA sense strand
ccagauccauuuucacuua

SEQ ID NO: 1302395 - RNA, 19 nt, Homo sapiens
  misc_RNA (1)...(19): siRNA sense strand
gaaggaauacuugacaguu

SEQ ID NO: 1302396 - RNA, 19 nt, Homo sapiens
  misc_RNA (1)...(19): siRNA sense strand
aaggaauacuugacaguuu

SEQ ID NO: 1302397 - RNA, 19 nt, Homo sapiens
  misc_RNA (1)...(19): siRNA sense strand
ucagaugacgccuguuaua

SEQ ID NO: 1302398 - RNA, 19 nt, Homo sapiens
  misc_RNA (1)...(19): siRNA sense strand
gaaaacacaccuuuaguga

SEQ ID NO: 1302399 - RNA, 19 nt, Homo sapiens
  misc_RNA (1)...(19): siRNA sense strand
gaugacgccuguuauagag

SEQ ID NO: 1302400 - RNA, 19 nt, Homo sapiens
  misc_RNA (1)...(19): siRNA sense strand
gagaaacauguccauauau

SEQ ID NO: 1302401 - RNA, 19 nt, Homo sapiens
  misc_RNA (1)...(19): siRNA sense strand
ccacuuaccagacuaaauc

SEQ ID NO: 1302402 - RNA, 19 nt, Homo sapiens
  misc_RNA (1)...(19): siRNA sense strand
acgaguagauuauaagugu

SEQ ID NO: 1302403 - RNA, 19 nt, Homo sapiens
  misc_RNA (1)...(19): siRNA sense strand
cuacaaagcaacaguuaug

SEQ ID NO: 1302404 - RNA, 19 nt, Homo sapiens
  misc_RNA (1)...(19): siRNA sense strand
ccaccaacauuugaagcua

SEQ ID NO: 1302405 - RNA, 19 nt, Homo sapiens
  misc_RNA (1)...(19): siRNA sense strand
uauacgggauccuuuaaau

SEQ ID NO: 1302406 - RNA, 19 nt, Homo sapiens
  misc_RNA (1)...(19): siRNA sense strand
cgaguuugguuaucagaug

SEQ ID NO: 1302407 - RNA, 19 nt, Homo sapiens
  misc_RNA (1)...(19): siRNA sense strand
gaacgaguagauuauaagu

SEQ ID NO: 1302408 - RNA, 19 nt, Homo sapiens
  misc_RNA (1)...(19): siRNA sense strand
gugaggagccaccaacauu

SEQ ID NO: 1302409 - RNA, 19 nt, Homo sapiens
  misc_RNA (1)...(19): siRNA sense strand
gauggcagcgacacaauug

SEQ ID NO: 1302410 - RNA, 19 nt, Homo sapiens
  misc_RNA (1)...(19): siRNA sense strand
ucucagaugacgccuguua

SEQ ID NO: 1302411 - RNA, 19 nt, Homo sapiens
  misc_RNA (1)...(19): siRNA sense strand
gaggagccaccaacauuug

SEQ ID NO: 1302412 - RNA, 19 nt, Homo sapiens
  misc_RNA (1)...(19): siRNA sense strand
gcuauggagcucauuggua

SEQ ID NO: 1302413 - RNA, 19 nt, Homo sapiens
  misc_RNA (1)...(19): siRNA sense strand
acacaccuuuagugaagua

SEQ ID NO: 1302414 - RNA, 19 nt, Homo sapiens
  misc_RNA (1)...(19): siRNA sense strand
uagagaaacauguccauau

SEQ ID NO: 1302415 - RNA, 19 nt, Homo sapiens
  misc_RNA (1)...(19): siRNA sense strand
guuccaaagugucuuaaag

SEQ ID NO: 1302416 - RNA, 19 nt, Homo sapiens
  misc_RNA (1)...(19): siRNA sense strand
ggugaacgaguagauuaua

SEQ ID NO: 1302417 - RNA, 19 nt, Homo sapiens
  misc_RNA (1)...(19): siRNA sense strand
gaaguagaaguauuugagu

SEQ ID NO: 1302418 - RNA, 19 nt, Homo sapiens
  misc_RNA (1)...(19): siRNA sense strand
gaaacauguccauauauac

SEQ ID NO: 1302419 - RNA, 19 nt, Homo sapiens
  misc_RNA (1)...(19): siRNA sense strand
ugacgccuguuauagagaa

SEQ ID NO: 1302420 - RNA, 19 nt, Homo sapiens
  misc_RNA (1)...(19): siRNA sense strand
cgaguagauuauaagugua

SEQ ID NO: 1302421 - RNA, 19 nt, Homo sapiens
  misc_RNA (1)...(19): siRNA sense strand
gcacuuuauuuguaaugag

SEQ ID NO: 1302422 - RNA, 19 nt, Homo sapiens
  misc_RNA (1)...(19): siRNA sense strand
guagaaguauuugaguauc

SEQ ID NO: 1302423 - RNA, 19 nt, Homo sapiens
  misc_RNA (1)...(19): siRNA sense strand
guauuugaguaucuugaug

SEQ ID NO: 1302424 - RNA, 19 nt, Homo sapiens
  misc_RNA (1)...(19): siRNA sense strand
aggaauacuugacaguuug

SEQ ID NO: 1302425 - RNA, 19 nt, Homo sapiens
  misc_RNA (1)...(19): siRNA sense strand
ccaaaacccuacuaugaga

SEQ ID NO: 1302426 - RNA, 19 nt, Homo sapiens
  misc_RNA (1)...(19): siRNA sense strand
aguguaaaguggucaaaug

SEQ ID NO: 1302427 - RNA, 19 nt, Homo sapiens
  misc_RNA (1)...(19): siRNA sense strand
ccacccauacuauuuguga

SEQ ID NO: 1302428 - RNA, 19 nt, Homo sapiens
  misc_RNA (1)...(19): siRNA sense strand
uuggagagagcacgauuua

SEQ ID NO: 1302429 - RNA, 19 nt, Homo sapiens
  misc_RNA (1)...(19): siRNA sense strand
gguuaucagaugcacuuua

SEQ ID NO: 1302430 - RNA, 19 nt, Homo sapiens
  misc_RNA (1)...(19): siRNA sense strand
caccaacauuugaagcuau

SEQ ID NO: 1302431 - RNA, 19 nt, Homo sapiens
  misc_RNA (1)...(19): siRNA sense strand
ugaggagccaccaacauuu

SEQ ID NO: 1302432 - RNA, 19 nt, Homo sapiens
  misc_RNA (1)...(19): siRNA sense strand
ggaaggaauacuugacagu

SEQ ID NO: 1302433 - RNA, 19 nt, Homo sapiens
  misc_RNA (1)...(19): siRNA sense strand
gaggaaggaauacuugaca

SEQ ID NO: 1302434 - RNA, 19 nt, Homo sapiens
  misc_RNA (1)...(19): siRNA sense strand
ccaguuccaaagugucuua

SEQ ID NO: 1302435 - RNA, 19 nt, Homo sapiens
  misc_RNA (1)...(19): siRNA sense strand
ugaguaucuugaugcagua

SEQ ID NO: 1302436 - RNA, 19 nt, Homo sapiens
  misc_RNA (1)...(19): siRNA sense strand
caccuuuagugaaguagaa

SEQ ID NO: 1302437 - RNA, 19 nt, Homo sapiens
  misc_RNA (1)...(19): siRNA sense strand
acagauaucaggauuugga

SEQ ID NO: 1302438 - RNA, 19 nt, Homo sapiens
  misc_RNA (1)...(19): siRNA sense strand
ucauugcugugauuguuau

SEQ ID NO: 1302439 - RNA, 19 nt, Homo sapiens
  misc_RNA (1)...(19): siRNA sense strand
ucagaugcacuuuauuugu

SEQ ID NO: 1302440 - RNA, 19 nt, Homo sapiens
  misc_RNA (1)...(19): siRNA sense strand
gugcugcuccagaguguaa

SEQ ID NO: 1302441 - RNA, 19 nt, Homo sapiens
  misc_RNA (1)...(19): siRNA sense strand
ggaaaacacaccuuuagug

SEQ ID NO: 1302442 - RNA, 19 nt, Homo sapiens
  misc_RNA (1)...(19): siRNA sense strand
aaggaucaguagcaauuug

SEQ ID NO: 1302443 - RNA, 19 nt, Homo sapiens
  misc_RNA (1)...(19): siRNA sense strand
uauauacgggauccuuuaa

SEQ ID NO: 1302444 - RNA, 19 nt, Homo sapiens
  misc_RNA (1)...(19): siRNA sense strand
ugaaguagaaguauuugag

SEQ ID NO: 1302445 - RNA, 19 nt, Homo sapiens
  misc_RNA (1)...(19): siRNA sense strand
cuugacaguuuggauguuu

SEQ ID NO: 1302446 - RNA, 19 nt, Homo sapiens
  misc_RNA (1)...(19): siRNA sense strand
cauauauacgggauccuuu

SEQ ID NO: 1302447 - RNA, 19 nt, Homo sapiens
  misc_RNA (1)...(19): siRNA sense strand
auauauacgggauccuuua

SEQ ID NO: 1302448 - RNA, 19 nt, Homo sapiens
  misc_RNA (1)...(19): siRNA sense strand
cuuaaaggaucaguagcaa

SEQ ID NO: 1302449 - RNA, 19 nt, Homo sapiens
  misc_RNA (1)...(19): siRNA sense strand
uaaaccugaggaaggaaua

SEQ ID NO: 1302450 - RNA, 19 nt, Homo sapiens
  misc_RNA (1)...(19): siRNA sense strand
agaugacgccuguuauaga

SEQ ID NO: 1302451 - RNA, 19 nt, Homo sapiens
  misc_RNA (1)...(19): siRNA sense strand
ugugauuguuauugccaua

SEQ ID NO: 1302452 - RNA, 19 nt, Homo sapiens
  misc_RNA (1)...(19): siRNA sense strand
gagagcacgauuuauugug

SEQ ID NO: 1302453 - RNA, 19 nt, Homo sapiens
  misc_RNA (1)...(19): siRNA sense strand
gaaguauuugaguaucuug

SEQ ID NO: 1302454 - RNA, 19 nt, Homo sapiens
  misc_RNA (1)...(19): siRNA sense strand
ggcuaccugucucagauga

SEQ ID NO: 1302455 - RNA, 19 nt, Homo sapiens
  misc_RNA (1)...(19): siRNA sense strand
gauaucaggauuuggaaaa

SEQ ID NO: 1302456 - RNA, 19 nt, Homo sapiens
  misc_RNA (1)...(19): siRNA sense strand
ccucuugccacccauacua

SEQ ID NO: 1302457 - RNA, 19 nt, Homo sapiens
  misc_RNA (1)...(19): siRNA sense strand
ccaugguguugcugcugua

SEQ ID NO: 1302458 - RNA, 19 nt, Homo sapiens
  misc_RNA (1)...(19): siRNA sense strand
cagaugacgccuguuauag

SEQ ID NO: 1302459 - RNA, 19 nt, Homo sapiens
  misc_RNA (1)...(19): siRNA sense strand
cagaugguggagcugaaua

SEQ ID NO: 1302460 - RNA, 19 nt, Homo sapiens
  misc_RNA (1)...(19): siRNA sense strand
gucauugcugugauuguua

SEQ ID NO: 1302461 - RNA, 19 nt, Homo sapiens
  misc_RNA (1)...(19): siRNA sense strand
ggagccaccaacauuugaa

SEQ ID NO: 1302462 - RNA, 19 nt, Homo sapiens
  misc_RNA (1)...(19): siRNA sense strand
uuggugaacgaguagauua

SEQ ID NO: 1302463 - RNA, 19 nt, Homo sapiens
  misc_RNA (1)...(19): siRNA sense strand
gcgcuuuccuggguugcuu

SEQ ID NO: 1302464 - RNA, 19 nt, Homo sapiens
  misc_RNA (1)...(19): siRNA sense strand
uacuacaaagcaacaguua

SEQ ID NO: 1302465 - RNA, 19 nt, Homo sapiens
  misc_RNA (1)...(19): siRNA sense strand
cuugaugcaguaacuuaua

SEQ ID NO: 1302466 - RNA, 19 nt, Homo sapiens
  misc_RNA (1)...(19): siRNA sense strand
aaacauguccauauauacg

SEQ ID NO: 1302467 - RNA, 19 nt, Homo sapiens
  misc_RNA (1)...(19): siRNA sense strand
guguaaaguggucaaaugu

SEQ ID NO: 1302468 - RNA, 19 nt, Homo sapiens
  misc_RNA (1)...(19): siRNA sense strand
cuuacgaguuugguuauca

SEQ ID NO: 1302469 - RNA, 19 nt, Homo sapiens
  misc_RNA (1)...(19): siRNA sense strand
uacgggauccuuuaaaugg

SEQ ID NO: 1302470 - RNA, 19 nt, Homo sapiens
  misc_RNA (1)...(19): siRNA sense strand
gcagaugguggagcugaau

SEQ ID NO: 1302471 - RNA, 19 nt, Homo sapiens
  misc_RNA (1)...(19): siRNA sense strand
aaccaaaacccuacuauga

SEQ ID NO: 1302472 - RNA, 19 nt, Homo sapiens
  misc_RNA (1)...(19): siRNA sense strand
uugaugcaguaacuuauag

SEQ ID NO: 1302473 - RNA, 19 nt, Homo sapiens
  misc_RNA (1)...(19): siRNA sense strand
ggagcugaauaugccacuu

SEQ ID NO: 1302474 - RNA, 19 nt, Homo sapiens
  misc_RNA (1)...(19): siRNA sense strand
cgauggcagcgacacaauu

SEQ ID NO: 1302475 - RNA, 19 nt, Homo sapiens
  misc_RNA (1)...(19): siRNA sense strand
gauccauuuucacuuauug

SEQ ID NO: 1302476 - RNA, 19 nt, Homo sapiens
  misc_RNA (1)...(19): siRNA sense strand
ggagagagcacgauuuauu

SEQ ID NO: 1302477 - RNA, 19 nt, Homo sapiens
  misc_RNA (1)...(19): siRNA sense strand
agagaaacauguccauaua

SEQ ID NO: 1302478 - RNA, 19 nt, Homo sapiens
  misc_RNA (1)...(19): siRNA sense strand
cagaugcacuuuauuugua

SEQ ID NO: 1302479 - RNA, 19 nt, Homo sapiens
  misc_RNA (1)...(19): siRNA sense strand
ggacuuacgaguuugguua

SEQ ID NO: 1302480 - RNA, 19 nt, Homo sapiens
  misc_RNA (1)...(19): siRNA sense strand
aaacagauaucaggauuug

SEQ ID NO: 1302481 - RNA, 19 nt, Homo sapiens
  misc_RNA (1)...(19): siRNA sense strand
cuauggagcucauugguaa

SEQ ID NO: 1302482 - RNA, 19 nt, Homo sapiens
  misc_RNA (1)...(19): siRNA sense strand
aaacacaccuuuagugaag

SEQ ID NO: 1302483 - RNA, 19 nt, Homo sapiens
  misc_RNA (1)...(19): siRNA sense strand
gaacuuaaaggaucaguag

SEQ ID NO: 1302484 - RNA, 19 nt, Homo sapiens
  misc_RNA (1)...(19): siRNA sense strand
gaaaacagauaucaggauu

SEQ ID NO: 1302485 - RNA, 19 nt, Homo sapiens
  misc_RNA (1)...(19): siRNA sense strand
uaaaggaucaguagcaauu

SEQ ID NO: 1302486 - RNA, 19 nt, Homo sapiens
  misc_RNA (1)...(19): siRNA sense strand
aaaugggacuuacgaguuu

SEQ ID NO: 1302487 - RNA, 19 nt, Homo sapiens
  misc_RNA (1)...(19): siRNA sense strand
guuaucagaugcacuuuau

SEQ ID NO: 1302488 - RNA, 19 nt, Homo sapiens
  misc_RNA (1)...(19): siRNA sense strand
gagcugaauaugccacuua

SEQ ID NO: 1302489 - RNA, 19 nt, Homo sapiens
  misc_RNA (1)...(19): siRNA sense strand
ugagauuggugaacgagua

SEQ ID NO: 1302490 - RNA, 19 nt, Homo sapiens
  misc_RNA (1)...(19): siRNA sense strand
gugaacgaguagauuauaa

SEQ ID NO: 1302491 - RNA, 19 nt, Homo sapiens
  misc_RNA (1)...(19): siRNA sense strand
gagagagcacgauuuauug

SEQ ID NO: 1302492 - RNA, 19 nt, Homo sapiens
  misc_RNA (1)...(19): siRNA sense strand
caaaugggacuuacgaguu

SEQ ID NO: 1302493 - RNA, 19 nt, Homo sapiens
  misc_RNA (1)...(19): siRNA sense strand
ggucauugcugugauuguu

SEQ ID NO: 1302494 - RNA, 19 nt, Homo sapiens
  misc_RNA (1)...(19): siRNA sense strand
ccagauccauuuucacuua

SEQ ID NO: 1302495 - RNA, 19 nt, Homo sapiens
  misc_RNA (1)...(19): siRNA sense strand
gaaggaauacuugacaguu

SEQ ID NO: 1302496 - RNA, 19 nt, Homo sapiens
  misc_RNA (1)...(19): siRNA sense strand
aaggaauacuugacaguuu

SEQ ID NO: 1302497 - RNA, 19 nt, Homo sapiens
  misc_RNA (1)...(19): siRNA sense strand
ucagaugacgccuguuaua

SEQ ID NO: 1302498 - RNA, 19 nt, Homo sapiens
  misc_RNA (1)...(19): siRNA sense strand
gaaaacacaccuuuaguga

SEQ ID NO: 1302499 - RNA, 19 nt, Homo sapiens
  misc_RNA (1)...(19): siRNA sense strand
gaugacgccuguuauagag

SEQ ID NO: 1302500 - RNA, 19 nt, Homo sapiens
  misc_RNA (1)...(19): siRNA sense strand
gagaaacauguccauauau

SEQ ID NO: 1302501 - RNA, 19 nt, Homo sapiens
  misc_RNA (1)...(19): siRNA sense strand
ccacuuaccagacuaaauc

SEQ ID NO: 1302502 - RNA, 19 nt, Homo sapiens
  misc_RNA (1)...(19): siRNA sense strand
acgaguagauuauaagugu

SEQ ID NO: 1302503 - RNA, 19 nt, Homo sapiens
  misc_RNA (1)...(19): siRNA sense strand
cuacaaagcaacaguuaug

SEQ ID NO: 1302504 - RNA, 19 nt, Homo sapiens
  misc_RNA (1)...(19): siRNA sense strand
ccaccaacauuugaagcua

SEQ ID NO: 1302505 - RNA, 19 nt, Homo sapiens
  misc_RNA (1)...(19): siRNA sense strand
uauacgggauccuuuaaau

SEQ ID NO: 1302506 - RNA, 19 nt, Homo sapiens
  misc_RNA (1)...(19): siRNA sense strand
cgaguuugguuaucagaug

SEQ ID NO: 1302507 - RNA, 19 nt, Homo sapiens
  misc_RNA (1)...(19): siRNA sense strand
gaacgaguagauuauaagu

SEQ ID NO: 1302508 - RNA, 19 nt, Homo sapiens
  misc_RNA (1)...(19): siRNA sense strand
gugaggagccaccaacauu

SEQ ID NO: 1302509 - RNA, 19 nt, Homo sapiens
  misc_RNA (1)...(19): siRNA sense strand
gauggcagcgacacaauug

SEQ ID NO: 1302510 - RNA, 19 nt, Homo sapiens
  misc_RNA (1)...(19): siRNA sense strand
ucucagaugacgccuguua

SEQ ID NO: 1302511 - RNA, 19 nt, Homo sapiens
  misc_RNA (1)...(19): siRNA sense strand
gaggagccaccaacauuug

SEQ ID NO: 1302512 - RNA, 19 nt, Homo sapiens
  misc_RNA (1)...(19): siRNA sense strand
gcuauggagcucauuggua

SEQ ID NO: 1302513 - RNA, 19 nt, Homo sapiens
  misc_RNA (1)...(19): siRNA sense strand
acacaccuuuagugaagua

SEQ ID NO: 1302514 - RNA, 19 nt, Homo sapiens
  misc_RNA (1)...(19): siRNA sense strand
uagagaaacauguccauau

SEQ ID NO: 1302515 - RNA, 19 nt, Homo sapiens
  misc_RNA (1)...(19): siRNA sense strand
guuccaaagugucuuaaag

SEQ ID NO: 1302516 - RNA, 19 nt, Homo sapiens
  misc_RNA (1)...(19): siRNA sense strand
ggugaacgaguagauuaua

SEQ ID NO: 1302517 - RNA, 19 nt, Homo sapiens
  misc_RNA (1)...(19): siRNA sense strand
gaaguagaaguauuugagu

SEQ ID NO: 1302518 - RNA, 19 nt, Homo sapiens
  misc_RNA (1)...(19): siRNA sense strand
gaaacauguccauauauac

SEQ ID NO: 1302519 - RNA, 19 nt, Homo sapiens
  misc_RNA (1)...(19): siRNA sense strand
ugacgccuguuauagagaa

SEQ ID NO: 1302520 - RNA, 19 nt, Homo sapiens
  misc_RNA (1)...(19): siRNA sense strand
cgaguagauuauaagugua

SEQ ID NO: 1302521 - RNA, 19 nt, Homo sapiens
  misc_RNA (1)...(19): siRNA sense strand
gcacuuuauuuguaaugag

SEQ ID NO: 1302522 - RNA, 19 nt, Homo sapiens
  misc_RNA (1)...(19): siRNA sense strand
guagaaguauuugaguauc

SEQ ID NO: 1302523 - RNA, 19 nt, Homo sapiens
  misc_RNA (1)...(19): siRNA sense strand
guauuugaguaucuugaug

SEQ ID NO: 1302524 - RNA, 19 nt, Homo sapiens
  misc_RNA (1)...(19): siRNA sense strand
aggaauacuugacaguuug

SEQ ID NO: 1302525 - RNA, 19 nt, Homo sapiens
  misc_RNA (1)...(19): siRNA sense strand
ccaaaacccuacuaugaga

SEQ ID NO: 1302526 - RNA, 19 nt, Homo sapiens
  misc_RNA (1)...(19): siRNA sense strand
aguguaaaguggucaaaug

SEQ ID NO: 1302527 - RNA, 19 nt, Homo sapiens
  misc_RNA (1)...(19): siRNA sense strand
ccacccauacuauuuguga

SEQ ID NO: 1302528 - RNA, 19 nt, Homo sapiens
  misc_RNA (1)...(19): siRNA sense strand
uuggagagagcacgauuua

SEQ ID NO: 1302529 - RNA, 19 nt, Homo sapiens
  misc_RNA (1)...(19): siRNA sense strand
gguuaucagaugcacuuua

SEQ ID NO: 1302530 - RNA, 19 nt, Homo sapiens
  misc_RNA (1)...(19): siRNA sense strand
caccaacauuugaagcuau

SEQ ID NO: 1302531 - RNA, 19 nt, Homo sapiens
  misc_RNA (1)...(19): siRNA sense strand
ugaggagccaccaacauuu

SEQ ID NO: 1302532 - RNA, 19 nt, Homo sapiens
  misc_RNA (1)...(19): siRNA sense strand
ggaaggaauacuugacagu

SEQ ID NO: 1302533 - RNA, 19 nt, Homo sapiens
  misc_RNA (1)...(19): siRNA sense strand
gaggaaggaauacuugaca

SEQ ID NO: 1302534 - RNA, 19 nt, Homo sapiens
  misc_RNA (1)...(19): siRNA sense strand
ccaguuccaaagugucuua

SEQ ID NO: 1302535 - RNA, 19 nt, Homo sapiens
  misc_RNA (1)...(19): siRNA sense strand
ugaguaucuugaugcagua

SEQ ID NO: 1302536 - RNA, 19 nt, Homo sapiens
  misc_RNA (1)...(19): siRNA sense strand
caccuuuagugaaguagaa

SEQ ID NO: 1302537 - RNA, 19 nt, Homo sapiens
  misc_RNA (1)...(19): siRNA sense strand
acagauaucaggauuugga

SEQ ID NO: 1302538 - RNA, 19 nt, Homo sapiens
  misc_RNA (1)...(19): siRNA sense strand
ucauugcugugauuguuau

SEQ ID NO: 1302539 - RNA, 19 nt, Homo sapiens
  misc_RNA (1)...(19): siRNA sense strand
ucagaugcacuuuauuugu

SEQ ID NO: 1302540 - RNA, 19 nt, Homo sapiens
  misc_RNA (1)...(19): siRNA sense strand
gugcugcuccagaguguaa

SEQ ID NO: 1302541 - RNA, 19 nt, Homo sapiens
  misc_RNA (1)...(19): siRNA sense strand
ggaaaacacaccuuuagug

SEQ ID NO: 1302542 - RNA, 19 nt, Homo sapiens
  misc_RNA (1)...(19): siRNA sense strand
aaggaucaguagcaauuug

SEQ ID NO: 1302543 - RNA, 19 nt, Homo sapiens
  misc_RNA (1)...(19): siRNA sense strand
uauauacgggauccuuuaa

SEQ ID NO: 1302544 - RNA, 19 nt, Homo sapiens
  misc_RNA (1)...(19): siRNA sense strand
ugaaguagaaguauuugag

SEQ ID NO: 1302545 - RNA, 19 nt, Homo sapiens
  misc_RNA (1)...(19): siRNA sense strand
cuugacaguuuggauguuu

SEQ ID NO: 1302546 - RNA, 19 nt, Homo sapiens
  misc_RNA (1)...(19): siRNA sense strand
cauauauacgggauccuuu

SEQ ID NO: 1302547 - RNA, 19 nt, Homo sapiens
  misc_RNA (1)...(19): siRNA sense strand
auauauacgggauccuuua

SEQ ID NO: 1302548 - RNA, 19 nt, Homo sapiens
  misc_RNA (1)...(19): siRNA sense strand
cuuaaaggaucaguagcaa

SEQ ID NO: 1302549 - RNA, 19 nt, Homo sapiens
  misc_RNA (1)...(19): siRNA sense strand
uaaaccugaggaaggaaua

SEQ ID NO: 1302550 - RNA, 19 nt, Homo sapiens
  misc_RNA (1)...(19): siRNA sense strand
agaugacgccuguuauaga

SEQ ID NO: 1302551 - RNA, 19 nt, Homo sapiens
  misc_RNA (1)...(19): siRNA sense strand
ugugauuguuauugccaua

SEQ ID NO: 1302552 - RNA, 19 nt, Homo sapiens
  misc_RNA (1)...(19): siRNA sense strand
gagagcacgauuuauugug

SEQ ID NO: 1302553 - RNA, 19 nt, Homo sapiens
  misc_RNA (1)...(19): siRNA sense strand
gaaguauuugaguaucuug

SEQ ID NO: 1302554 - RNA, 19 nt, Homo sapiens
  misc_RNA (1)...(19): siRNA sense strand
ggcuaccugucucagauga

SEQ ID NO: 1302555 - RNA, 19 nt, Homo sapiens
  misc_RNA (1)...(19): siRNA sense strand
gauaucaggauuuggaaaa

SEQ ID NO: 1302556 - RNA, 19 nt, Homo sapiens
  misc_RNA (1)...(19): siRNA sense strand
ccucuugccacccauacua

SEQ ID NO: 1302557 - RNA, 19 nt, Homo sapiens
  misc_RNA (1)...(19): siRNA sense strand
ccaugguguugcugcugua

SEQ ID NO: 1302558 - RNA, 19 nt, Homo sapiens
  misc_RNA (1)...(19): siRNA sense strand
cagaugacgccuguuauag

SEQ ID NO: 1302559 - RNA, 19 nt, Homo sapiens
  misc_RNA (1)...(19): siRNA sense strand
cagaugguggagcugaaua

SEQ ID NO: 1302560 - RNA, 19 nt, Homo sapiens
  misc_RNA (1)...(19): siRNA sense strand
gucauugcugugauuguua

SEQ ID NO: 1302561 - RNA, 19 nt, Homo sapiens
  misc_RNA (1)...(19): siRNA sense strand
ggagccaccaacauuugaa

SEQ ID NO: 1302562 - RNA, 19 nt, Homo sapiens
  misc_RNA (1)...(19): siRNA sense strand
uuggugaacgaguagauua

SEQ ID NO: 1302563 - RNA, 19 nt, Homo sapiens
  misc_RNA (1)...(19): siRNA sense strand
gcgcuuuccuggguugcuu

SEQ ID NO: 1302564 - RNA, 19 nt, Homo sapiens
  misc_RNA (1)...(19): siRNA sense strand
uacuacaaagcaacaguua

SEQ ID NO: 1302565 - RNA, 19 nt, Homo sapiens
  misc_RNA (1)...(19): siRNA sense strand
cuugaugcaguaacuuaua

SEQ ID NO: 1302566 - RNA, 19 nt, Homo sapiens
  misc_RNA (1)...(19): siRNA sense strand
aaacauguccauauauacg

SEQ ID NO: 1302567 - RNA, 19 nt, Homo sapiens
  misc_RNA (1)...(19): siRNA sense strand
guguaaaguggucaaaugu

SEQ ID NO: 1302568 - RNA, 19 nt, Homo sapiens
  misc_RNA (1)...(19): siRNA sense strand
cuuacgaguuugguuauca

SEQ ID NO: 1302569 - RNA, 19 nt, Homo sapiens
  misc_RNA (1)...(19): siRNA sense strand
uacgggauccuuuaaaugg

SEQ ID NO: 1302570 - RNA, 19 nt, Homo sapiens
  misc_RNA (1)...(19): siRNA sense strand
gcagaugguggagcugaau

SEQ ID NO: 1302571 - RNA, 19 nt, Homo sapiens
  misc_RNA (1)...(19): siRNA sense strand
aaccaaaacccuacuauga

SEQ ID NO: 1302572 - RNA, 19 nt, Homo sapiens
  misc_RNA (1)...(19): siRNA sense strand
uugaugcaguaacuuauag

SEQ ID NO: 1302573 - RNA, 19 nt, Homo sapiens
  misc_RNA (1)...(19): siRNA sense strand
ggagcugaauaugccacuu

SEQ ID NO: 1302574 - RNA, 19 nt, Homo sapiens
  misc_RNA (1)...(19): siRNA sense strand
cgauggcagcgacacaauu

SEQ ID NO: 1302575 - RNA, 19 nt, Homo sapiens
  misc_RNA (1)...(19): siRNA sense strand
gauccauuuucacuuauug

SEQ ID NO: 1302576 - RNA, 19 nt, Homo sapiens
  misc_RNA (1)...(19): siRNA sense strand
ggagagagcacgauuuauu

SEQ ID NO: 1302577 - RNA, 19 nt, Homo sapiens
  misc_RNA (1)...(19): siRNA sense strand
agagaaacauguccauaua

SEQ ID NO: 1302578 - RNA, 19 nt, Homo sapiens
  misc_RNA (1)...(19): siRNA sense strand
cagaugcacuuuauuugua

SEQ ID NO: 1302579 - RNA, 19 nt, Homo sapiens
  misc_RNA (1)...(19): siRNA sense strand
ggacuuacgaguuugguua

SEQ ID NO: 1302580 - RNA, 19 nt, Homo sapiens
  misc_RNA (1)...(19): siRNA sense strand
aaacagauaucaggauuug

SEQ ID NO: 1302581 - RNA, 19 nt, Homo sapiens
  misc_RNA (1)...(19): siRNA sense strand
cuauggagcucauugguaa

SEQ ID NO: 1302582 - RNA, 19 nt, Homo sapiens
  misc_RNA (1)...(19): siRNA sense strand
aaacacaccuuuagugaag

SEQ ID NO: 1302583 - RNA, 19 nt, Homo sapiens
  misc_RNA (1)...(19): siRNA sense strand
gaacuuaaaggaucaguag

SEQ ID NO: 1302584 - RNA, 19 nt, Homo sapiens
  misc_RNA (1)...(19): siRNA sense strand
gaaaacagauaucaggauu

SEQ ID NO: 1302585 - RNA, 19 nt, Homo sapiens
  misc_RNA (1)...(19): siRNA sense strand
uaaaggaucaguagcaauu

SEQ ID NO: 1302586 - RNA, 19 nt, Homo sapiens
  misc_RNA (1)...(19): siRNA sense strand
aaaugggacuuacgaguuu

SEQ ID NO: 1302587 - RNA, 19 nt, Homo sapiens
  misc_RNA (1)...(19): siRNA sense strand
guuaucagaugcacuuuau

SEQ ID NO: 1302588 - RNA, 19 nt, Homo sapiens
  misc_RNA (1)...(19): siRNA sense strand
ugagauuggugaacgagua

SEQ ID NO: 1302589 - RNA, 19 nt, Homo sapiens
  misc_RNA (1)...(19): siRNA sense strand
gugaacgaguagauuauaa

SEQ ID NO: 1302590 - RNA, 19 nt, Homo sapiens
  misc_RNA (1)...(19): siRNA sense strand
gagagagcacgauuuauug

SEQ ID NO: 1302591 - RNA, 19 nt, Homo sapiens
  misc_RNA (1)...(19): siRNA sense strand
caaaugggacuuacgaguu

SEQ ID NO: 1302592 - RNA, 19 nt, Homo sapiens
  misc_RNA (1)...(19): siRNA sense strand
ggucauugcugugauuguu

SEQ ID NO: 1302593 - RNA, 19 nt, Homo sapiens
  misc_RNA (1)...(19): siRNA sense strand
ccagauccauuuucacuua

SEQ ID NO: 1302594 - RNA, 19 nt, Homo sapiens
  misc_RNA (1)...(19): siRNA sense strand
gaaggaauacuugacaguu

SEQ ID NO: 1302595 - RNA, 19 nt, Homo sapiens
  misc_RNA (1)...(19): siRNA sense strand
aaggaauacuugacaguuu

SEQ ID NO: 1302596 - RNA, 19 nt, Homo sapiens
  misc_RNA (1)...(19): siRNA sense strand
ucagaugacgccuguuaua

SEQ ID NO: 1302597 - RNA, 19 nt, Homo sapiens
  misc_RNA (1)...(19): siRNA sense strand
gaaaacacaccuuuaguga

SEQ ID NO: 1302598 - RNA, 19 nt, Homo sapiens
  misc_RNA (1)...(19): siRNA sense strand
gaugacgccuguuauagag

SEQ ID NO: 1302599 - RNA, 19 nt, Homo sapiens
  misc_RNA (1)...(19): siRNA sense strand
gagaaacauguccauauau

SEQ ID NO: 1302600 - RNA, 19 nt, Homo sapiens
  misc_RNA (1)...(19): siRNA sense strand
acgaguagauuauaagugu

SEQ ID NO: 1302601 - RNA, 19 nt, Homo sapiens
  misc_RNA (1)...(19): siRNA sense strand
cuacaaagcaacaguuaug

SEQ ID NO: 1302602 - RNA, 19 nt, Homo sapiens
  misc_RNA (1)...(19): siRNA sense strand
ccaccaacauuugaagcua

SEQ ID NO: 1302603 - RNA, 19 nt, Homo sapiens
  misc_RNA (1)...(19): siRNA sense strand
uauacgggauccuuuaaau

SEQ ID NO: 1302604 - RNA, 19 nt, Homo sapiens
  misc_RNA (1)...(19): siRNA sense strand
cgaguuugguuaucagaug

SEQ ID NO: 1302605 - RNA, 19 nt, Homo sapiens
  misc_RNA (1)...(19): siRNA sense strand
gaacgaguagauuauaagu

SEQ ID NO: 1302606 - RNA, 19 nt, Homo sapiens
  misc_RNA (1)...(19): siRNA sense strand
gugaggagccaccaacauu

SEQ ID NO: 1302607 - RNA, 19 nt, Homo sapiens
  misc_RNA (1)...(19): siRNA sense strand
gauggcagcgacacaauug

SEQ ID NO: 1302608 - RNA, 19 nt, Homo sapiens
  misc_RNA (1)...(19): siRNA sense strand
gcuauggagcucauuggua

SEQ ID NO: 1302609 - RNA, 19 nt, Homo sapiens
  misc_RNA (1)...(19): siRNA sense strand
gaggagccaccaacauuug

SEQ ID NO: 1302610 - RNA, 19 nt, Homo sapiens
  misc_RNA (1)...(19): siRNA sense strand
acacaccuuuagugaagua

SEQ ID NO: 1302611 - RNA, 19 nt, Homo sapiens
  misc_RNA (1)...(19): siRNA sense strand
ucucagaugacgccuguua

SEQ ID NO: 1302612 - RNA, 19 nt, Homo sapiens
  misc_RNA (1)...(19): siRNA sense strand
uagagaaacauguccauau

SEQ ID NO: 1302613 - RNA, 19 nt, Homo sapiens
  misc_RNA (1)...(19): siRNA sense strand
guuccaaagugucuuaaag

SEQ ID NO: 1302614 - RNA, 19 nt, Homo sapiens
  misc_RNA (1)...(19): siRNA sense strand
ggugaacgaguagauuaua

SEQ ID NO: 1302615 - RNA, 19 nt, Homo sapiens
  misc_RNA (1)...(19): siRNA sense strand
gaaguagaaguauuugagu

SEQ ID NO: 1302616 - RNA, 19 nt, Homo sapiens
  misc_RNA (1)...(19): siRNA sense strand
gaaacauguccauauauac

SEQ ID NO: 1302617 - RNA, 19 nt, Homo sapiens
  misc_RNA (1)...(19): siRNA sense strand
ugacgccuguuauagagaa

SEQ ID NO: 1302618 - RNA, 19 nt, Homo sapiens
  misc_RNA (1)...(19): siRNA sense strand
cgaguagauuauaagugua

SEQ ID NO: 1302619 - RNA, 19 nt, Homo sapiens
  misc_RNA (1)...(19): siRNA sense strand
gcacuuuauuuguaaugag

SEQ ID NO: 1302620 - RNA, 19 nt, Homo sapiens
  misc_RNA (1)...(19): siRNA sense strand
guagaaguauuugaguauc

SEQ ID NO: 1302621 - RNA, 19 nt, Homo sapiens
  misc_RNA (1)...(19): siRNA sense strand
guauuugaguaucuugaug

SEQ ID NO: 1302622 - RNA, 19 nt, Homo sapiens
  misc_RNA (1)...(19): siRNA sense strand
aggaauacuugacaguuug

SEQ ID NO: 1302623 - RNA, 19 nt, Homo sapiens
  misc_RNA (1)...(19): siRNA sense strand
ccaaaacccuacuaugaga

SEQ ID NO: 1302624 - RNA, 19 nt, Homo sapiens
  misc_RNA (1)...(19): siRNA sense strand
aguguaaaguggucaaaug

SEQ ID NO: 1302625 - RNA, 19 nt, Homo sapiens
  misc_RNA (1)...(19): siRNA sense strand
ccacccauacuauuuguga

SEQ ID NO: 1302626 - RNA, 19 nt, Homo sapiens
  misc_RNA (1)...(19): siRNA sense strand
caccaacauuugaagcuau

SEQ ID NO: 1302627 - RNA, 19 nt, Homo sapiens
  misc_RNA (1)...(19): siRNA sense strand
uuggagagagcacgauuua

SEQ ID NO: 1302628 - RNA, 19 nt, Homo sapiens
  misc_RNA (1)...(19): siRNA sense strand
gguuaucagaugcacuuua

SEQ ID NO: 1302629 - RNA, 19 nt, Homo sapiens
  misc_RNA (1)...(19): siRNA sense strand
ugaggagccaccaacauuu

SEQ ID NO: 1302630 - RNA, 19 nt, Homo sapiens
  misc_RNA (1)...(19): siRNA sense strand
ggaaggaauacuugacagu

SEQ ID NO: 1302631 - RNA, 19 nt, Homo sapiens
  misc_RNA (1)...(19): siRNA sense strand
gaggaaggaauacuugaca

SEQ ID NO: 1302632 - RNA, 19 nt, Homo sapiens
  misc_RNA (1)...(19): siRNA sense strand
ccaguuccaaagugucuua

SEQ ID NO: 1302633 - RNA, 19 nt, Homo sapiens
  misc_RNA (1)...(19): siRNA sense strand
ugaguaucuugaugcagua

SEQ ID NO: 1302634 - RNA, 19 nt, Homo sapiens
  misc_RNA (1)...(19): siRNA sense strand
caccuuuagugaaguagaa

SEQ ID NO: 1302635 - RNA, 19 nt, Homo sapiens
  misc_RNA (1)...(19): siRNA sense strand
acagauaucaggauuugga

SEQ ID NO: 1302636 - RNA, 19 nt, Homo sapiens
  misc_RNA (1)...(19): siRNA sense strand
ucauugcugugauuguuau

SEQ ID NO: 1302637 - RNA, 19 nt, Homo sapiens
  misc_RNA (1)...(19): siRNA sense strand
ucagaugcacuuuauuugu

SEQ ID NO: 1302638 - RNA, 19 nt, Homo sapiens
  misc_RNA (1)...(19): siRNA sense strand
gugcugcuccagaguguaa

SEQ ID NO: 1302639 - RNA, 19 nt, Homo sapiens
  misc_RNA (1)...(19): siRNA sense strand
ggaaaacacaccuuuagug

SEQ ID NO: 1302640 - RNA, 19 nt, Homo sapiens
  misc_RNA (1)...(19): siRNA sense strand
aaggaucaguagcaauuug

SEQ ID NO: 1302641 - RNA, 19 nt, Homo sapiens
  misc_RNA (1)...(19): siRNA sense strand
uauauacgggauccuuuaa

SEQ ID NO: 1302642 - RNA, 19 nt, Homo sapiens
  misc_RNA (1)...(19): siRNA sense strand
ugaaguagaaguauuugag

SEQ ID NO: 1302643 - RNA, 19 nt, Homo sapiens
  misc_RNA (1)...(19): siRNA sense strand
cuugacaguuuggauguuu

SEQ ID NO: 1302644 - RNA, 19 nt, Homo sapiens
  misc_RNA (1)...(19): siRNA sense strand
cauauauacgggauccuuu

SEQ ID NO: 1302645 - RNA, 19 nt, Homo sapiens
  misc_RNA (1)...(19): siRNA sense strand
auauauacgggauccuuua

SEQ ID NO: 1302646 - RNA, 19 nt, Homo sapiens
  misc_RNA (1)...(19): siRNA sense strand
cuuaaaggaucaguagcaa

SEQ ID NO: 1302647 - RNA, 19 nt, Homo sapiens
  misc_RNA (1)...(19): siRNA sense strand
uaaaccugaggaaggaaua

SEQ ID NO: 1302648 - RNA, 19 nt, Homo sapiens
  misc_RNA (1)...(19): siRNA sense strand
agaugacgccuguuauaga

SEQ ID NO: 1302649 - RNA, 19 nt, Homo sapiens
  misc_RNA (1)...(19): siRNA sense strand
ugugauuguuauugccaua

SEQ ID NO: 1302650 - RNA, 19 nt, Homo sapiens
  misc_RNA (1)...(19): siRNA sense strand
gagagcacgauuuauugug

SEQ ID NO: 1302651 - RNA, 19 nt, Homo sapiens
  misc_RNA (1)...(19): siRNA sense strand
gaaguauuugaguaucuug

SEQ ID NO: 1302652 - RNA, 19 nt, Homo sapiens
  misc_RNA (1)...(19): siRNA sense strand
ggcuaccugucucagauga

SEQ ID NO: 1302653 - RNA, 19 nt, Homo sapiens
  misc_RNA (1)...(19): siRNA sense strand
gauaucaggauuuggaaaa

SEQ ID NO: 1302654 - RNA, 19 nt, Homo sapiens
  misc_RNA (1)...(19): siRNA sense strand
ccucuugccacccauacua

SEQ ID NO: 1302655 - RNA, 19 nt, Homo sapiens
  misc_RNA (1)...(19): siRNA sense strand
ccaugguguugcugcugua

SEQ ID NO: 1302656 - RNA, 19 nt, Homo sapiens
  misc_RNA (1)...(19): siRNA sense strand
cagaugacgccuguuauag

SEQ ID NO: 1302657 - RNA, 19 nt, Homo sapiens
  misc_RNA (1)...(19): siRNA sense strand
uuggugaacgaguagauua

SEQ ID NO: 1302658 - RNA, 19 nt, Homo sapiens
  misc_RNA (1)...(19): siRNA sense strand
gucauugcugugauuguua

SEQ ID NO: 1302659 - RNA, 19 nt, Homo sapiens
  misc_RNA (1)...(19): siRNA sense strand
ggagccaccaacauuugaa

SEQ ID NO: 1302660 - RNA, 19 nt, Homo sapiens
  misc_RNA (1)...(19): siRNA sense strand
gcgcuuuccuggguugcuu

SEQ ID NO: 1302661 - RNA, 19 nt, Homo sapiens
  misc_RNA (1)...(19): siRNA sense strand
uacuacaaagcaacaguua

SEQ ID NO: 1302662 - RNA, 19 nt, Homo sapiens
  misc_RNA (1)...(19): siRNA sense strand
cuugaugcaguaacuuaua

SEQ ID NO: 1302663 - RNA, 19 nt, Homo sapiens
  misc_RNA (1)...(19): siRNA sense strand
aaacauguccauauauacg

SEQ ID NO: 1302664 - RNA, 19 nt, Homo sapiens
  misc_RNA (1)...(19): siRNA sense strand
guguaaaguggucaaaugu

SEQ ID NO: 1302665 - RNA, 19 nt, Homo sapiens
  misc_RNA (1)...(19): siRNA sense strand
cuuacgaguuugguuauca

SEQ ID NO: 1302666 - RNA, 19 nt, Homo sapiens
  misc_RNA (1)...(19): siRNA sense strand
uacgggauccuuuaaaugg

SEQ ID NO: 1302667 - RNA, 19 nt, Homo sapiens
  misc_RNA (1)...(19): siRNA sense strand
aaccaaaacccuacuauga

SEQ ID NO: 1302668 - RNA, 19 nt, Homo sapiens
  misc_RNA (1)...(19): siRNA sense strand
cccaauaugugaaaagguu

SEQ ID NO: 1302669 - RNA, 19 nt, Homo sapiens
  misc_RNA (1)...(19): siRNA sense strand
cgauggcagcgacacaauu

SEQ ID NO: 1302670 - RNA, 19 nt, Homo sapiens
  misc_RNA (1)...(19): siRNA sense strand
gauccauuuucacuuauug

SEQ ID NO: 1302671 - RNA, 19 nt, Homo sapiens
  misc_RNA (1)...(19): siRNA sense strand
uugaugcaguaacuuauag

SEQ ID NO: 1302672 - RNA, 19 nt, Homo sapiens
  misc_RNA (1)...(19): siRNA sense strand
guaucuugaugcaguaacu

SEQ ID NO: 1302673 - RNA, 19 nt, Homo sapiens
  misc_RNA (1)...(19): siRNA sense strand
caacauuugaagcuaugga

SEQ ID NO: 1302674 - RNA, 19 nt, Homo sapiens
  misc_RNA (1)...(19): siRNA sense strand
gagauuggugaacgaguag

SEQ ID NO: 1302675 - RNA, 19 nt, Homo sapiens
  misc_RNA (1)...(19): siRNA sense strand
ggagagagcacgauuuauu

SEQ ID NO: 1302676 - RNA, 19 nt, Homo sapiens
  misc_RNA (1)...(19): siRNA sense strand
agagaaacauguccauaua

SEQ ID NO: 1302677 - RNA, 19 nt, Homo sapiens
  misc_RNA (1)...(19): siRNA sense strand
cagaugcacuuuauuugua

SEQ ID NO: 1302678 - RNA, 19 nt, Homo sapiens
  misc_RNA (1)...(19): siRNA sense strand
ggacuuacgaguuugguua

SEQ ID NO: 1302679 - RNA, 19 nt, Homo sapiens
  misc_RNA (1)...(19): siRNA sense strand
aaacagauaucaggauuug

SEQ ID NO: 1302680 - RNA, 19 nt, Homo sapiens
  misc_RNA (1)...(19): siRNA sense strand
cuauggagcucauugguaa

SEQ ID NO: 1302681 - RNA, 19 nt, Homo sapiens
  misc_RNA (1)...(19): siRNA sense strand
aaacacaccuuuagugaag

SEQ ID NO: 1302682 - RNA, 19 nt, Homo sapiens
  misc_RNA (1)...(19): siRNA sense strand
gaacuuaaaggaucaguag

SEQ ID NO: 1302683 - RNA, 19 nt, Homo sapiens
  misc_RNA (1)...(19): siRNA sense strand
gaaaacagauaucaggauu

SEQ ID NO: 1302684 - RNA, 19 nt, Homo sapiens
  misc_RNA (1)...(19): siRNA sense strand
uaaaggaucaguagcaauu

SEQ ID NO: 1302685 - RNA, 19 nt, Homo sapiens
  misc_RNA (1)...(19): siRNA sense strand
aaaugggacuuacgaguuu

SEQ ID NO: 1302686 - RNA, 19 nt, Homo sapiens
  misc_RNA (1)...(19): siRNA sense strand
guuaucagaugcacuuuau

SEQ ID NO: 1302687 - RNA, 19 nt, Homo sapiens
  misc_RNA (1)...(19): siRNA sense strand
gagcugaauaugccacuua

SEQ ID NO: 1302688 - RNA, 19 nt, Homo sapiens
  misc_RNA (1)...(19): siRNA sense strand
ugagauuggugaacgagua

SEQ ID NO: 1302689 - RNA, 19 nt, Homo sapiens
  misc_RNA (1)...(19): siRNA sense strand
gugaacgaguagauuauaa

SEQ ID NO: 1302690 - RNA, 19 nt, Homo sapiens
  misc_RNA (1)...(19): siRNA sense strand
gagagagcacgauuuauug

SEQ ID NO: 1302691 - RNA, 19 nt, Homo sapiens
  misc_RNA (1)...(19): siRNA sense strand
caaaugggacuuacgaguu

SEQ ID NO: 1302692 - RNA, 19 nt, Homo sapiens
  misc_RNA (1)...(19): siRNA sense strand
ggucauugcugugauuguu

SEQ ID NO: 1302693 - RNA, 19 nt, Homo sapiens
  misc_RNA (1)...(19): siRNA sense strand
ccagauccauuuucacuua

SEQ ID NO: 1302694 - RNA, 19 nt, Homo sapiens
  misc_RNA (1)...(19): siRNA sense strand
gaaggaauacuugacaguu

SEQ ID NO: 1302695 - RNA, 19 nt, Homo sapiens
  misc_RNA (1)...(19): siRNA sense strand
aaggaauacuugacaguuu

SEQ ID NO: 1302696 - RNA, 19 nt, Homo sapiens
  misc_RNA (1)...(19): siRNA sense strand
ucagaugacgccuguuaua

SEQ ID NO: 1302697 - RNA, 19 nt, Homo sapiens
  misc_RNA (1)...(19): siRNA sense strand
gaaaacacaccuuuaguga

SEQ ID NO: 1302698 - RNA, 19 nt, Homo sapiens
  misc_RNA (1)...(19): siRNA sense strand
gaugacgccuguuauagag

SEQ ID NO: 1302699 - RNA, 19 nt, Homo sapiens
  misc_RNA (1)...(19): siRNA sense strand
gagaaacauguccauauau

SEQ ID NO: 1302700 - RNA, 19 nt, Homo sapiens
  misc_RNA (1)...(19): siRNA sense strand
ccacuuaccagacuaaauc

SEQ ID NO: 1302701 - RNA, 19 nt, Homo sapiens
  misc_RNA (1)...(19): siRNA sense strand
acgaguagauuauaagugu

SEQ ID NO: 1302702 - RNA, 19 nt, Homo sapiens
  misc_RNA (1)...(19): siRNA sense strand
cuacaaagcaacaguuaug

SEQ ID NO: 1302703 - RNA, 19 nt, Homo sapiens
  misc_RNA (1)...(19): siRNA sense strand
ccaccaacauuugaagcua

SEQ ID NO: 1302704 - RNA, 19 nt, Homo sapiens
  misc_RNA (1)...(19): siRNA sense strand
uauacgggauccuuuaaau

SEQ ID NO: 1302705 - RNA, 19 nt, Homo sapiens
  misc_RNA (1)...(19): siRNA sense strand
cgaguuugguuaucagaug

SEQ ID NO: 1302706 - RNA, 19 nt, Homo sapiens
  misc_RNA (1)...(19): siRNA sense strand
gaacgaguagauuauaagu

SEQ ID NO: 1302707 - RNA, 19 nt, Homo sapiens
  misc_RNA (1)...(19): siRNA sense strand
gugaggagccaccaacauu

SEQ ID NO: 1302708 - RNA, 19 nt, Homo sapiens
  misc_RNA (1)...(19): siRNA sense strand
gauggcagcgacacaauug

SEQ ID NO: 1302709 - RNA, 19 nt, Homo sapiens
  misc_RNA (1)...(19): siRNA sense strand
ucucagaugacgccuguua

SEQ ID NO: 1302710 - RNA, 19 nt, Homo sapiens
  misc_RNA (1)...(19): siRNA sense strand
gaggagccaccaacauuug

SEQ ID NO: 1302711 - RNA, 19 nt, Homo sapiens
  misc_RNA (1)...(19): siRNA sense strand
gcuauggagcucauuggua

SEQ ID NO: 1302712 - RNA, 19 nt, Homo sapiens
  misc_RNA (1)...(19): siRNA sense strand
acacaccuuuagugaagua

SEQ ID NO: 1302713 - RNA, 19 nt, Homo sapiens
  misc_RNA (1)...(19): siRNA sense strand
uagagaaacauguccauau

SEQ ID NO: 1302714 - RNA, 19 nt, Homo sapiens
  misc_RNA (1)...(19): siRNA sense strand
ggugaacgaguagauuaua

SEQ ID NO: 1302715 - RNA, 19 nt, Homo sapiens
  misc_RNA (1)...(19): siRNA sense strand
gaaguagaaguauuugagu

SEQ ID NO: 1302716 - RNA, 19 nt, Homo sapiens
  misc_RNA (1)...(19): siRNA sense strand
gaaacauguccauauauac

SEQ ID NO: 1302717 - RNA, 19 nt, Homo sapiens
  misc_RNA (1)...(19): siRNA sense strand
ugacgccuguuauagagaa

SEQ ID NO: 1302718 - RNA, 19 nt, Homo sapiens
  misc_RNA (1)...(19): siRNA sense strand
cgaguagauuauaagugua

SEQ ID NO: 1302719 - RNA, 19 nt, Homo sapiens
  misc_RNA (1)...(19): siRNA sense strand
gcacuuuauuuguaaugag

SEQ ID NO: 1302720 - RNA, 19 nt, Homo sapiens
  misc_RNA (1)...(19): siRNA sense strand
guagaaguauuugaguauc

SEQ ID NO: 1302721 - RNA, 19 nt, Homo sapiens
  misc_RNA (1)...(19): siRNA sense strand
guauuugaguaucuugaug

SEQ ID NO: 1302722 - RNA, 19 nt, Homo sapiens
  misc_RNA (1)...(19): siRNA sense strand
aggaauacuugacaguuug

SEQ ID NO: 1302723 - RNA, 19 nt, Homo sapiens
  misc_RNA (1)...(19): siRNA sense strand
ccaaaacccuacuaugaga

SEQ ID NO: 1302724 - RNA, 19 nt, Homo sapiens
  misc_RNA (1)...(19): siRNA sense strand
aguguaaaguggucaaaug

SEQ ID NO: 1302725 - RNA, 19 nt, Homo sapiens
  misc_RNA (1)...(19): siRNA sense strand
ccacccauacuauuuguga

SEQ ID NO: 1302726 - RNA, 19 nt, Homo sapiens
  misc_RNA (1)...(19): siRNA sense strand
uuggagagagcacgauuua

SEQ ID NO: 1302727 - RNA, 19 nt, Homo sapiens
  misc_RNA (1)...(19): siRNA sense strand
gguuaucagaugcacuuua

SEQ ID NO: 1302728 - RNA, 19 nt, Homo sapiens
  misc_RNA (1)...(19): siRNA sense strand
caccaacauuugaagcuau

SEQ ID NO: 1302729 - RNA, 19 nt, Homo sapiens
  misc_RNA (1)...(19): siRNA sense strand
ugaggagccaccaacauuu

SEQ ID NO: 1302730 - RNA, 19 nt, Homo sapiens
  misc_RNA (1)...(19): siRNA sense strand
ggaaggaauacuugacagu

SEQ ID NO: 1302731 - RNA, 19 nt, Homo sapiens
  misc_RNA (1)...(19): siRNA sense strand
gaggaaggaauacuugaca

SEQ ID NO: 1302732 - RNA, 19 nt, Homo sapiens
  misc_RNA (1)...(19): siRNA sense strand
ugaguaucuugaugcagua

SEQ ID NO: 1302733 - RNA, 19 nt, Homo sapiens
  misc_RNA (1)...(19): siRNA sense strand
caccuuuagugaaguagaa

SEQ ID NO: 1302734 - RNA, 19 nt, Homo sapiens
  misc_RNA (1)...(19): siRNA sense strand
acagauaucaggauuugga

SEQ ID NO: 1302735 - RNA, 19 nt, Homo sapiens
  misc_RNA (1)...(19): siRNA sense strand
ucauugcugugauuguuau

SEQ ID NO: 1302736 - RNA, 19 nt, Homo sapiens
  misc_RNA (1)...(19): siRNA sense strand
ucagaugcacuuuauuugu

SEQ ID NO: 1302737 - RNA, 19 nt, Homo sapiens
  misc_RNA (1)...(19): siRNA sense strand
gugcugcuccagaguguaa

SEQ ID NO: 1302738 - RNA, 19 nt, Homo sapiens
  misc_RNA (1)...(19): siRNA sense strand
ggaaaacacaccuuuagug

SEQ ID NO: 1302739 - RNA, 19 nt, Homo sapiens
  misc_RNA (1)...(19): siRNA sense strand
aaggaucaguagcaauuug

SEQ ID NO: 1302740 - RNA, 19 nt, Homo sapiens
  misc_RNA (1)...(19): siRNA sense strand
uauauacgggauccuuuaa

SEQ ID NO: 1302741 - RNA, 19 nt, Homo sapiens
  misc_RNA (1)...(19): siRNA sense strand
ugaaguagaaguauuugag

SEQ ID NO: 1302742 - RNA, 19 nt, Homo sapiens
  misc_RNA (1)...(19): siRNA sense strand
cuugacaguuuggauguuu

SEQ ID NO: 1302743 - RNA, 19 nt, Homo sapiens
  misc_RNA (1)...(19): siRNA sense strand
cauauauacgggauccuuu

SEQ ID NO: 1302744 - RNA, 19 nt, Homo sapiens
  misc_RNA (1)...(19): siRNA sense strand
auauauacgggauccuuua

SEQ ID NO: 1302745 - RNA, 19 nt, Homo sapiens
  misc_RNA (1)...(19): siRNA sense strand
cuuaaaggaucaguagcaa

SEQ ID NO: 1302746 - RNA, 19 nt, Homo sapiens
  misc_RNA (1)...(19): siRNA sense strand
uaaaccugaggaaggaaua

SEQ ID NO: 1302747 - RNA, 19 nt, Homo sapiens
  misc_RNA (1)...(19): siRNA sense strand
agaugacgccuguuauaga

SEQ ID NO: 1302748 - RNA, 19 nt, Homo sapiens
  misc_RNA (1)...(19): siRNA sense strand
ugugauuguuauugccaua

SEQ ID NO: 1302749 - RNA, 19 nt, Homo sapiens
  misc_RNA (1)...(19): siRNA sense strand
gagagcacgauuuauugug

SEQ ID NO: 1302750 - RNA, 19 nt, Homo sapiens
  misc_RNA (1)...(19): siRNA sense strand
gaaguauuugaguaucuug

SEQ ID NO: 1302751 - RNA, 19 nt, Homo sapiens
  misc_RNA (1)...(19): siRNA sense strand
ggcuaccugucucagauga

SEQ ID NO: 1302752 - RNA, 19 nt, Homo sapiens
  misc_RNA (1)...(19): siRNA sense strand
gauaucaggauuuggaaaa

SEQ ID NO: 1302753 - RNA, 19 nt, Homo sapiens
  misc_RNA (1)...(19): siRNA sense strand
ccucuugccacccauacua

SEQ ID NO: 1302754 - RNA, 19 nt, Homo sapiens
  misc_RNA (1)...(19): siRNA sense strand
ccaugguguugcugcugua

SEQ ID NO: 1302755 - RNA, 19 nt, Homo sapiens
  misc_RNA (1)...(19): siRNA sense strand
cagaugacgccuguuauag

SEQ ID NO: 1302756 - RNA, 19 nt, Homo sapiens
  misc_RNA (1)...(19): siRNA sense strand
cagaugguggagcugaaua

SEQ ID NO: 1302757 - RNA, 19 nt, Homo sapiens
  misc_RNA (1)...(19): siRNA sense strand
uuggugaacgaguagauua

SEQ ID NO: 1302758 - RNA, 19 nt, Homo sapiens
  misc_RNA (1)...(19): siRNA sense strand
gucauugcugugauuguua

SEQ ID NO: 1302759 - RNA, 19 nt, Homo sapiens
  misc_RNA (1)...(19): siRNA sense strand
ggagccaccaacauuugaa

SEQ ID NO: 1302760 - RNA, 19 nt, Homo sapiens
  misc_RNA (1)...(19): siRNA sense strand
gcgcuuuccuggguugcuu

SEQ ID NO: 1302761 - RNA, 19 nt, Homo sapiens
  misc_RNA (1)...(19): siRNA sense strand
uacuacaaagcaacaguua

SEQ ID NO: 1302762 - RNA, 19 nt, Homo sapiens
  misc_RNA (1)...(19): siRNA sense strand
cuugaugcaguaacuuaua

SEQ ID NO: 1302763 - RNA, 19 nt, Homo sapiens
  misc_RNA (1)...(19): siRNA sense strand
aaacauguccauauauacg

SEQ ID NO: 1302764 - RNA, 19 nt, Homo sapiens
  misc_RNA (1)...(19): siRNA sense strand
guguaaaguggucaaaugu

SEQ ID NO: 1302765 - RNA, 19 nt, Homo sapiens
  misc_RNA (1)...(19): siRNA sense strand
cuuacgaguuugguuauca

SEQ ID NO: 1302766 - RNA, 19 nt, Homo sapiens
  misc_RNA (1)...(19): siRNA sense strand
uacgggauccuuuaaaugg

SEQ ID NO: 1302767 - RNA, 19 nt, Homo sapiens
  misc_RNA (1)...(19): siRNA sense strand
gcagaugguggagcugaau

SEQ ID NO: 1302768 - RNA, 19 nt, Homo sapiens
  misc_RNA (1)...(19): siRNA sense strand
aaccaaaacccuacuauga

SEQ ID NO: 1302769 - RNA, 19 nt, Homo sapiens
  misc_RNA (1)...(19): siRNA sense strand
cccaauaugugaaaagguu

SEQ ID NO: 1302770 - RNA, 19 nt, Homo sapiens
  misc_RNA (1)...(19): siRNA sense strand
ggagcugaauaugccacuu

SEQ ID NO: 1302771 - RNA, 19 nt, Homo sapiens
  misc_RNA (1)...(19): siRNA sense strand
cgauggcagcgacacaauu

SEQ ID NO: 1302772 - RNA, 19 nt, Homo sapiens
  misc_RNA (1)...(19): siRNA sense strand
gauccauuuucacuuauug

SEQ ID NO: 1302773 - RNA, 19 nt, Homo sapiens
  misc_RNA (1)...(19): siRNA sense strand
uugaugcaguaacuuauag

SEQ ID NO: 1302774 - RNA, 19 nt, Homo sapiens
  misc_RNA (1)...(19): siRNA sense strand
guaucuugaugcaguaacu

SEQ ID NO: 1302775 - RNA, 19 nt, Homo sapiens
  misc_RNA (1)...(19): siRNA sense strand
ggagagagcacgauuuauu

SEQ ID NO: 1302776 - RNA, 19 nt, Homo sapiens
  misc_RNA (1)...(19): siRNA sense strand
agagaaacauguccauaua

SEQ ID NO: 1302777 - RNA, 19 nt, Homo sapiens
  misc_RNA (1)...(19): siRNA sense strand
cagaugcacuuuauuugua

SEQ ID NO: 1302778 - RNA, 19 nt, Homo sapiens
  misc_RNA (1)...(19): siRNA sense strand
ggacuuacgaguuugguua

SEQ ID NO: 1302779 - RNA, 19 nt, Homo sapiens
  misc_RNA (1)...(19): siRNA sense strand
aaacagauaucaggauuug

SEQ ID NO: 1302780 - RNA, 19 nt, Homo sapiens
  misc_RNA (1)...(19): siRNA sense strand
cuauggagcucauugguaa

SEQ ID NO: 1302781 - RNA, 19 nt, Homo sapiens
  misc_RNA (1)...(19): siRNA sense strand
aaacacaccuuuagugaag

SEQ ID NO: 1302782 - RNA, 19 nt, Homo sapiens
  misc_RNA (1)...(19): siRNA sense strand
gaacuuaaaggaucaguag

SEQ ID NO: 1302783 - RNA, 19 nt, Homo sapiens
  misc_RNA (1)...(19): siRNA sense strand
gaaaacagauaucaggauu

SEQ ID NO: 1302784 - RNA, 19 nt, Homo sapiens
  misc_RNA (1)...(19): siRNA sense strand
uaaaggaucaguagcaauu

SEQ ID NO: 1302785 - RNA, 19 nt, Homo sapiens
  misc_RNA (1)...(19): siRNA sense strand
aaaugggacuuacgaguuu

SEQ ID NO: 1302786 - RNA, 19 nt, Homo sapiens
  misc_RNA (1)...(19): siRNA sense strand
guuaucagaugcacuuuau

SEQ ID NO: 1302787 - RNA, 19 nt, Homo sapiens
  misc_RNA (1)...(19): siRNA sense strand
gagcugaauaugccacuua

SEQ ID NO: 1302788 - RNA, 19 nt, Homo sapiens
  misc_RNA (1)...(19): siRNA sense strand
gagcagagaggcugaauag

SEQ ID NO: 1302789 - RNA, 19 nt, Homo sapiens
  misc_RNA (1)...(19): siRNA sense strand
ugagauuggugaacgagua

SEQ ID NO: 1302790 - RNA, 19 nt, Homo sapiens
  misc_RNA (1)...(19): siRNA sense strand
gugaacgaguagauuauaa

SEQ ID NO: 1302791 - RNA, 19 nt, Homo sapiens
  misc_RNA (1)...(19): siRNA sense strand
gagagagcacgauuuauug

SEQ ID NO: 1302792 - RNA, 19 nt, Homo sapiens
  misc_RNA (1)...(19): siRNA sense strand
caaaugggacuuacgaguu

SEQ ID NO: 1302793 - RNA, 19 nt, Homo sapiens
  misc_RNA (1)...(19): siRNA sense strand
ggucauugcugugauuguu

SEQ ID NO: 1302794 - RNA, 19 nt, Homo sapiens
  misc_RNA (1)...(19): siRNA sense strand
ccagauccauuuucacuua

SEQ ID NO: 1302795 - RNA, 19 nt, Homo sapiens
  misc_RNA (1)...(19): siRNA sense strand
gaaggaauacuugacaguu

SEQ ID NO: 1302796 - RNA, 19 nt, Homo sapiens
  misc_RNA (1)...(19): siRNA sense strand
aaggaauacuugacaguuu

SEQ ID NO: 1302797 - RNA, 19 nt, Homo sapiens
  misc_RNA (1)...(19): siRNA sense strand
ucagaugacgccuguuaua

SEQ ID NO: 1302798 - RNA, 19 nt, Homo sapiens
  misc_RNA (1)...(19): siRNA sense strand
gaaaacacaccuuuaguga

SEQ ID NO: 1302799 - RNA, 19 nt, Homo sapiens
  misc_RNA (1)...(19): siRNA sense strand
gaugacgccuguuauagag

SEQ ID NO: 1302800 - RNA, 19 nt, Homo sapiens
  misc_RNA (1)...(19): siRNA sense strand
gagaaacauguccauauau

SEQ ID NO: 1302801 - RNA, 19 nt, Homo sapiens
  misc_RNA (1)...(19): siRNA sense strand
ccacuuaccagacuaaauc

SEQ ID NO: 1302802 - RNA, 19 nt, Homo sapiens
  misc_RNA (1)...(19): siRNA sense strand
acgaguagauuauaagugu

SEQ ID NO: 1302803 - RNA, 19 nt, Homo sapiens
  misc_RNA (1)...(19): siRNA sense strand
cuacaaagcaacaguuaug

SEQ ID NO: 1302804 - RNA, 19 nt, Homo sapiens
  misc_RNA (1)...(19): siRNA sense strand
ccaccaacauuugaagcua

SEQ ID NO: 1302805 - RNA, 19 nt, Homo sapiens
  misc_RNA (1)...(19): siRNA sense strand
uauacgggauccuuuaaau

SEQ ID NO: 1302806 - RNA, 19 nt, Homo sapiens
  misc_RNA (1)...(19): siRNA sense strand
cgaguuugguuaucagaug

SEQ ID NO: 1302807 - RNA, 19 nt, Homo sapiens
  misc_RNA (1)...(19): siRNA sense strand
gaacgaguagauuauaagu

SEQ ID NO: 1302808 - RNA, 19 nt, Homo sapiens
  misc_RNA (1)...(19): siRNA sense strand
gugaggagccaccaacauu

SEQ ID NO: 1302809 - RNA, 19 nt, Homo sapiens
  misc_RNA (1)...(19): siRNA sense strand
gauggcagcgacacaauug

SEQ ID NO: 1302810 - RNA, 19 nt, Homo sapiens
  misc_RNA (1)...(19): siRNA sense strand
ucucagaugacgccuguua

SEQ ID NO: 1302811 - RNA, 19 nt, Homo sapiens
  misc_RNA (1)...(19): siRNA sense strand
acacaccuuuagugaagua

SEQ ID NO: 1302812 - RNA, 19 nt, Homo sapiens
  misc_RNA (1)...(19): siRNA sense strand
gcuauggagcucauuggua

SEQ ID NO: 1302813 - RNA, 19 nt, Homo sapiens
  misc_RNA (1)...(19): siRNA sense strand
gaggagccaccaacauuug

SEQ ID NO: 1302814 - RNA, 19 nt, Homo sapiens
  misc_RNA (1)...(19): siRNA sense strand
uagagaaacauguccauau

SEQ ID NO: 1302815 - RNA, 19 nt, Homo sapiens
  misc_RNA (1)...(19): siRNA sense strand
guuccaaagugucuuaaag

SEQ ID NO: 1302816 - RNA, 19 nt, Homo sapiens
  misc_RNA (1)...(19): siRNA sense strand
ggugaacgaguagauuaua

SEQ ID NO: 1302817 - RNA, 19 nt, Homo sapiens
  misc_RNA (1)...(19): siRNA sense strand
gaaguagaaguauuugagu

SEQ ID NO: 1302818 - RNA, 19 nt, Homo sapiens
  misc_RNA (1)...(19): siRNA sense strand
gaaacauguccauauauac

SEQ ID NO: 1302819 - RNA, 19 nt, Homo sapiens
  misc_RNA (1)...(19): siRNA sense strand
ugacgccuguuauagagaa

SEQ ID NO: 1302820 - RNA, 19 nt, Homo sapiens
  misc_RNA (1)...(19): siRNA sense strand
cgaguagauuauaagugua

SEQ ID NO: 1302821 - RNA, 19 nt, Homo sapiens
  misc_RNA (1)...(19): siRNA sense strand
gcacuuuauuuguaaugag

SEQ ID NO: 1302822 - RNA, 19 nt, Homo sapiens
  misc_RNA (1)...(19): siRNA sense strand
guagaaguauuugaguauc

SEQ ID NO: 1302823 - RNA, 19 nt, Homo sapiens
  misc_RNA (1)...(19): siRNA sense strand
guauuugaguaucuugaug

SEQ ID NO: 1302824 - RNA, 19 nt, Homo sapiens
  misc_RNA (1)...(19): siRNA sense strand
aggaauacuugacaguuug

SEQ ID NO: 1302825 - RNA, 19 nt, Homo sapiens
  misc_RNA (1)...(19): siRNA sense strand
ccaaaacccuacuaugaga

SEQ ID NO: 1302826 - RNA, 19 nt, Homo sapiens
  misc_RNA (1)...(19): siRNA sense strand
aguguaaaguggucaaaug

SEQ ID NO: 1302827 - RNA, 19 nt, Homo sapiens
  misc_RNA (1)...(19): siRNA sense strand
ccacccauacuauuuguga

SEQ ID NO: 1302828 - RNA, 19 nt, Homo sapiens
  misc_RNA (1)...(19): siRNA sense strand
uuggagagagcacgauuua

SEQ ID NO: 1302829 - RNA, 19 nt, Homo sapiens
  misc_RNA (1)...(19): siRNA sense strand
gguuaucagaugcacuuua

SEQ ID NO: 1302830 - RNA, 19 nt, Homo sapiens
  misc_RNA (1)...(19): siRNA sense strand
caccaacauuugaagcuau

SEQ ID NO: 1302831 - RNA, 19 nt, Homo sapiens
  misc_RNA (1)...(19): siRNA sense strand
ugaggagccaccaacauuu

SEQ ID NO: 1302832 - RNA, 19 nt, Homo sapiens
  misc_RNA (1)...(19): siRNA sense strand
ggaaggaauacuugacagu

SEQ ID NO: 1302833 - RNA, 19 nt, Homo sapiens
  misc_RNA (1)...(19): siRNA sense strand
gaggaaggaauacuugaca

SEQ ID NO: 1302834 - RNA, 19 nt, Homo sapiens
  misc_RNA (1)...(19): siRNA sense strand
ccaguuccaaagugucuua

SEQ ID NO: 1302835 - RNA, 19 nt, Homo sapiens
  misc_RNA (1)...(19): siRNA sense strand
ugaguaucuugaugcagua

SEQ ID NO: 1302836 - RNA, 19 nt, Homo sapiens
  misc_RNA (1)...(19): siRNA sense strand
caccuuuagugaaguagaa

SEQ ID NO: 1302837 - RNA, 19 nt, Homo sapiens
  misc_RNA (1)...(19): siRNA sense strand
acagauaucaggauuugga

SEQ ID NO: 1302838 - RNA, 19 nt, Homo sapiens
  misc_RNA (1)...(19): siRNA sense strand
ucauugcugugauuguuau

SEQ ID NO: 1302839 - RNA, 19 nt, Homo sapiens
  misc_RNA (1)...(19): siRNA sense strand
ucagaugcacuuuauuugu

SEQ ID NO: 1302840 - RNA, 19 nt, Homo sapiens
  misc_RNA (1)...(19): siRNA sense strand
gugcugcuccagaguguaa

SEQ ID NO: 1302841 - RNA, 19 nt, Homo sapiens
  misc_RNA (1)...(19): siRNA sense strand
ggaaaacacaccuuuagug

SEQ ID NO: 1302842 - RNA, 19 nt, Homo sapiens
  misc_RNA (1)...(19): siRNA sense strand
aaggaucaguagcaauuug

SEQ ID NO: 1302843 - RNA, 19 nt, Homo sapiens
  misc_RNA (1)...(19): siRNA sense strand
uauauacgggauccuuuaa

SEQ ID NO: 1302844 - RNA, 19 nt, Homo sapiens
  misc_RNA (1)...(19): siRNA sense strand
ugaaguagaaguauuugag

SEQ ID NO: 1302845 - RNA, 19 nt, Homo sapiens
  misc_RNA (1)...(19): siRNA sense strand
cuugacaguuuggauguuu

SEQ ID NO: 1302846 - RNA, 19 nt, Homo sapiens
  misc_RNA (1)...(19): siRNA sense strand
cauauauacgggauccuuu

SEQ ID NO: 1302847 - RNA, 19 nt, Homo sapiens
  misc_RNA (1)...(19): siRNA sense strand
auauauacgggauccuuua

SEQ ID NO: 1302848 - RNA, 19 nt, Homo sapiens
  misc_RNA (1)...(19): siRNA sense strand
cuuaaaggaucaguagcaa

SEQ ID NO: 1302849 - RNA, 19 nt, Homo sapiens
  misc_RNA (1)...(19): siRNA sense strand
uaaaccugaggaaggaaua

SEQ ID NO: 1302850 - RNA, 19 nt, Homo sapiens
  misc_RNA (1)...(19): siRNA sense strand
agaugacgccuguuauaga

SEQ ID NO: 1302851 - RNA, 19 nt, Homo sapiens
  misc_RNA (1)...(19): siRNA sense strand
ugugauuguuauugccaua

SEQ ID NO: 1302852 - RNA, 19 nt, Homo sapiens
  misc_RNA (1)...(19): siRNA sense strand
gagagcacgauuuauugug

SEQ ID NO: 1302853 - RNA, 19 nt, Homo sapiens
  misc_RNA (1)...(19): siRNA sense strand
gaaguauuugaguaucuug

SEQ ID NO: 1302854 - RNA, 19 nt, Homo sapiens
  misc_RNA (1)...(19): siRNA sense strand
ggcuaccugucucagauga

SEQ ID NO: 1302855 - RNA, 19 nt, Homo sapiens
  misc_RNA (1)...(19): siRNA sense strand
ccucuugccacccauacua

SEQ ID NO: 1302856 - RNA, 19 nt, Homo sapiens
  misc_RNA (1)...(19): siRNA sense strand
gauaucaggauuuggaaaa

SEQ ID NO: 1302857 - RNA, 19 nt, Homo sapiens
  misc_RNA (1)...(19): siRNA sense strand
ccaugguguugcugcugua

SEQ ID NO: 1302858 - RNA, 19 nt, Homo sapiens
  misc_RNA (1)...(19): siRNA sense strand
cagaugacgccuguuauag

SEQ ID NO: 1302859 - RNA, 19 nt, Homo sapiens
  misc_RNA (1)...(19): siRNA sense strand
cagaugguggagcugaaua

SEQ ID NO: 1302860 - RNA, 19 nt, Homo sapiens
  misc_RNA (1)...(19): siRNA sense strand
gucauugcugugauuguua

SEQ ID NO: 1302861 - RNA, 19 nt, Homo sapiens
  misc_RNA (1)...(19): siRNA sense strand
uuggugaacgaguagauua

SEQ ID NO: 1302862 - RNA, 19 nt, Homo sapiens
  misc_RNA (1)...(19): siRNA sense strand
ggagccaccaacauuugaa

SEQ ID NO: 1302863 - RNA, 19 nt, Homo sapiens
  misc_RNA (1)...(19): siRNA sense strand
gcgcuuuccuggguugcuu

SEQ ID NO: 1302864 - RNA, 19 nt, Homo sapiens
  misc_RNA (1)...(19): siRNA sense strand
uacuacaaagcaacaguua

SEQ ID NO: 1302865 - RNA, 19 nt, Homo sapiens
  misc_RNA (1)...(19): siRNA sense strand
cuugaugcaguaacuuaua

SEQ ID NO: 1302866 - RNA, 19 nt, Homo sapiens
  misc_RNA (1)...(19): siRNA sense strand
aaacauguccauauauacg

SEQ ID NO: 1302867 - RNA, 19 nt, Homo sapiens
  misc_RNA (1)...(19): siRNA sense strand
guguaaaguggucaaaugu

SEQ ID NO: 1302868 - RNA, 19 nt, Homo sapiens
  misc_RNA (1)...(19): siRNA sense strand
cuuacgaguuugguuauca

SEQ ID NO: 1302869 - RNA, 19 nt, Homo sapiens
  misc_RNA (1)...(19): siRNA sense strand
aaccaaaacccuacuauga

SEQ ID NO: 1302870 - RNA, 19 nt, Homo sapiens
  misc_RNA (1)...(19): siRNA sense strand
gcagaugguggagcugaau

SEQ ID NO: 1302871 - RNA, 19 nt, Homo sapiens
  misc_RNA (1)...(19): siRNA sense strand
uacgggauccuuuaaaugg

SEQ ID NO: 1302872 - RNA, 19 nt, Homo sapiens
  misc_RNA (1)...(19): siRNA sense strand
cgauggcagcgacacaauu

SEQ ID NO: 1302873 - RNA, 19 nt, Homo sapiens
  misc_RNA (1)...(19): siRNA sense strand
ggagcugaauaugccacuu

SEQ ID NO: 1302874 - RNA, 19 nt, Homo sapiens
  misc_RNA (1)...(19): siRNA sense strand
caacauuugaagcuaugga

SEQ ID NO: 1302875 - RNA, 19 nt, Homo sapiens
  misc_RNA (1)...(19): siRNA sense strand
ggagagagcacgauuuauu

SEQ ID NO: 1302876 - RNA, 19 nt, Homo sapiens
  misc_RNA (1)...(19): siRNA sense strand
agagaaacauguccauaua

SEQ ID NO: 1302877 - RNA, 19 nt, Homo sapiens
  misc_RNA (1)...(19): siRNA sense strand
cagaugcacuuuauuugua

SEQ ID NO: 1302878 - RNA, 19 nt, Homo sapiens
  misc_RNA (1)...(19): siRNA sense strand
ggacuuacgaguuugguua

SEQ ID NO: 1302879 - RNA, 19 nt, Homo sapiens
  misc_RNA (1)...(19): siRNA sense strand
aaacagauaucaggauuug

SEQ ID NO: 1302880 - RNA, 19 nt, Homo sapiens
  misc_RNA (1)...(19): siRNA sense strand
cuauggagcucauugguaa

SEQ ID NO: 1302881 - RNA, 19 nt, Homo sapiens
  misc_RNA (1)...(19): siRNA sense strand
aaacacaccuuuagugaag

SEQ ID NO: 1302882 - RNA, 19 nt, Homo sapiens
  misc_RNA (1)...(19): siRNA sense strand
gaacuuaaaggaucaguag

SEQ ID NO: 1302883 - RNA, 19 nt, Homo sapiens
  misc_RNA (1)...(19): siRNA sense strand
gaaaacagauaucaggauu

SEQ ID NO: 1302884 - RNA, 19 nt, Homo sapiens
  misc_RNA (1)...(19): siRNA sense strand
uaaaggaucaguagcaauu

SEQ ID NO: 1302885 - RNA, 19 nt, Homo sapiens
  misc_RNA (1)...(19): siRNA sense strand
aaaugggacuuacgaguuu

SEQ ID NO: 1302886 - RNA, 19 nt, Homo sapiens
  misc_RNA (1)...(19): siRNA sense strand
guuaucagaugcacuuuau

SEQ ID NO: 1302887 - RNA, 19 nt, Homo sapiens
  misc_RNA (1)...(19): siRNA sense strand
ugagauuggugaacgagua

SEQ ID NO: 1302888 - RNA, 19 nt, Homo sapiens
  misc_RNA (1)...(19): siRNA sense strand
gugaacgaguagauuauaa

SEQ ID NO: 1302889 - RNA, 19 nt, Homo sapiens
  misc_RNA (1)...(19): siRNA sense strand
gagagagcacgauuuauug

SEQ ID NO: 1302890 - RNA, 19 nt, Homo sapiens
  misc_RNA (1)...(19): siRNA sense strand
caaaugggacuuacgaguu

SEQ ID NO: 1302891 - RNA, 19 nt, Homo sapiens
  misc_RNA (1)...(19): siRNA sense strand
ggucauugcugugauuguu

SEQ ID NO: 1302892 - RNA, 19 nt, Homo sapiens
  misc_RNA (1)...(19): siRNA sense strand
ccagauccauuuucacuua

SEQ ID NO: 1302893 - RNA, 19 nt, Homo sapiens
  misc_RNA (1)...(19): siRNA sense strand
gaaggaauacuugacaguu

SEQ ID NO: 1302894 - RNA, 19 nt, Homo sapiens
  misc_RNA (1)...(19): siRNA sense strand
aaggaauacuugacaguuu

SEQ ID NO: 1302895 - RNA, 19 nt, Homo sapiens
  misc_RNA (1)...(19): siRNA sense strand
ucagaugacgccuguuaua

SEQ ID NO: 1302896 - RNA, 19 nt, Homo sapiens
  misc_RNA (1)...(19): siRNA sense strand
gaaaacacaccuuuaguga

SEQ ID NO: 1302897 - RNA, 19 nt, Homo sapiens
  misc_RNA (1)...(19): siRNA sense strand
gaugacgccuguuauagag

SEQ ID NO: 1302898 - RNA, 19 nt, Homo sapiens
  misc_RNA (1)...(19): siRNA sense strand
gagaaacauguccauauau

SEQ ID NO: 1302899 - RNA, 19 nt, Homo sapiens
  misc_RNA (1)...(19): siRNA sense strand
acgaguagauuauaagugu

SEQ ID NO: 1302900 - RNA, 19 nt, Homo sapiens
  misc_RNA (1)...(19): siRNA sense strand
cuacaaagcaacaguuaug

SEQ ID NO: 1302901 - RNA, 19 nt, Homo sapiens
  misc_RNA (1)...(19): siRNA sense strand
ccaccaacauuugaagcua

SEQ ID NO: 1302902 - RNA, 19 nt, Homo sapiens
  misc_RNA (1)...(19): siRNA sense strand
uauacgggauccuuuaaau

SEQ ID NO: 1302903 - RNA, 19 nt, Homo sapiens
  misc_RNA (1)...(19): siRNA sense strand
cgaguuugguuaucagaug

SEQ ID NO: 1302904 - RNA, 19 nt, Homo sapiens
  misc_RNA (1)...(19): siRNA sense strand
gaacgaguagauuauaagu

SEQ ID NO: 1302905 - RNA, 19 nt, Homo sapiens
  misc_RNA (1)...(19): siRNA sense strand
gugaggagccaccaacauu

SEQ ID NO: 1302906 - RNA, 19 nt, Homo sapiens
  misc_RNA (1)...(19): siRNA sense strand
gauggcagcgacacaauug

SEQ ID NO: 1302907 - RNA, 19 nt, Homo sapiens
  misc_RNA (1)...(19): siRNA sense strand
gcuauggagcucauuggua

SEQ ID NO: 1302908 - RNA, 19 nt, Homo sapiens
  misc_RNA (1)...(19): siRNA sense strand
gaggagccaccaacauuug

SEQ ID NO: 1302909 - RNA, 19 nt, Homo sapiens
  misc_RNA (1)...(19): siRNA sense strand
acacaccuuuagugaagua

SEQ ID NO: 1302910 - RNA, 19 nt, Homo sapiens
  misc_RNA (1)...(19): siRNA sense strand
ucucagaugacgccuguua

SEQ ID NO: 1302911 - RNA, 19 nt, Homo sapiens
  misc_RNA (1)...(19): siRNA sense strand
uagagaaacauguccauau

SEQ ID NO: 1302912 - RNA, 19 nt, Homo sapiens
  misc_RNA (1)...(19): siRNA sense strand
ggugaacgaguagauuaua

SEQ ID NO: 1302913 - RNA, 19 nt, Homo sapiens
  misc_RNA (1)...(19): siRNA sense strand
gaaguagaaguauuugagu

SEQ ID NO: 1302914 - RNA, 19 nt, Homo sapiens
  misc_RNA (1)...(19): siRNA sense strand
gaaacauguccauauauac

SEQ ID NO: 1302915 - RNA, 19 nt, Homo sapiens
  misc_RNA (1)...(19): siRNA sense strand
ugacgccuguuauagagaa

SEQ ID NO: 1302916 - RNA, 19 nt, Homo sapiens
  misc_RNA (1)...(19): siRNA sense strand
cgaguagauuauaagugua

SEQ ID NO: 1302917 - RNA, 19 nt, Homo sapiens
  misc_RNA (1)...(19): siRNA sense strand
gcacuuuauuuguaaugag

SEQ ID NO: 1302918 - RNA, 19 nt, Homo sapiens
  misc_RNA (1)...(19): siRNA sense strand
guagaaguauuugaguauc

SEQ ID NO: 1302919 - RNA, 19 nt, Homo sapiens
  misc_RNA (1)...(19): siRNA sense strand
guauuugaguaucuugaug

SEQ ID NO: 1302920 - RNA, 19 nt, Homo sapiens
  misc_RNA (1)...(19): siRNA sense strand
aggaauacuugacaguuug

SEQ ID NO: 1302921 - RNA, 19 nt, Homo sapiens
  misc_RNA (1)...(19): siRNA sense strand
aguguaaaguggucaaaug

SEQ ID NO: 1302922 - RNA, 19 nt, Homo sapiens
  misc_RNA (1)...(19): siRNA sense strand
ccaaaacccuacuaugaga

SEQ ID NO: 1302923 - RNA, 19 nt, Homo sapiens
  misc_RNA (1)...(19): siRNA sense strand
ccacccauacuauuuguga

SEQ ID NO: 1302924 - RNA, 19 nt, Homo sapiens
  misc_RNA (1)...(19): siRNA sense strand
caccaacauuugaagcuau

SEQ ID NO: 1302925 - RNA, 19 nt, Homo sapiens
  misc_RNA (1)...(19): siRNA sense strand
uuggagagagcacgauuua

SEQ ID NO: 1302926 - RNA, 19 nt, Homo sapiens
  misc_RNA (1)...(19): siRNA sense strand
gguuaucagaugcacuuua

SEQ ID NO: 1302927 - RNA, 19 nt, Homo sapiens
  misc_RNA (1)...(19): siRNA sense strand
ugaggagccaccaacauuu

SEQ ID NO: 1302928 - RNA, 19 nt, Homo sapiens
  misc_RNA (1)...(19): siRNA sense strand
ggaaggaauacuugacagu

SEQ ID NO: 1302929 - RNA, 19 nt, Homo sapiens
  misc_RNA (1)...(19): siRNA sense strand
gaggaaggaauacuugaca

SEQ ID NO: 1302930 - RNA, 19 nt, Homo sapiens
  misc_RNA (1)...(19): siRNA sense strand
ugaguaucuugaugcagua

SEQ ID NO: 1302931 - RNA, 19 nt, Homo sapiens
  misc_RNA (1)...(19): siRNA sense strand
caccuuuagugaaguagaa

SEQ ID NO: 1302932 - RNA, 19 nt, Homo sapiens
  misc_RNA (1)...(19): siRNA sense strand
acagauaucaggauuugga

SEQ ID NO: 1302933 - RNA, 19 nt, Homo sapiens
  misc_RNA (1)...(19): siRNA sense strand
ucauugcugugauuguuau

SEQ ID NO: 1302934 - RNA, 19 nt, Homo sapiens
  misc_RNA (1)...(19): siRNA sense strand
ucagaugcacuuuauuugu

SEQ ID NO: 1302935 - RNA, 19 nt, Homo sapiens
  misc_RNA (1)...(19): siRNA sense strand
gugcugcuccagaguguaa

SEQ ID NO: 1302936 - RNA, 19 nt, Homo sapiens
  misc_RNA (1)...(19): siRNA sense strand
ggaaaacacaccuuuagug

SEQ ID NO: 1302937 - RNA, 19 nt, Homo sapiens
  misc_RNA (1)...(19): siRNA sense strand
aaggaucaguagcaauuug

SEQ ID NO: 1302938 - RNA, 19 nt, Homo sapiens
  misc_RNA (1)...(19): siRNA sense strand
uauauacgggauccuuuaa

SEQ ID NO: 1302939 - RNA, 19 nt, Homo sapiens
  misc_RNA (1)...(19): siRNA sense strand
ugaaguagaaguauuugag

SEQ ID NO: 1302940 - RNA, 19 nt, Homo sapiens
  misc_RNA (1)...(19): siRNA sense strand
cuugacaguuuggauguuu

SEQ ID NO: 1302941 - RNA, 19 nt, Homo sapiens
  misc_RNA (1)...(19): siRNA sense strand
cauauauacgggauccuuu

SEQ ID NO: 1302942 - RNA, 19 nt, Homo sapiens
  misc_RNA (1)...(19): siRNA sense strand
auauauacgggauccuuua

SEQ ID NO: 1302943 - RNA, 19 nt, Homo sapiens
  misc_RNA (1)...(19): siRNA sense strand
cuuaaaggaucaguagcaa

SEQ ID NO: 1302944 - RNA, 19 nt, Homo sapiens
  misc_RNA (1)...(19): siRNA sense strand
uaaaccugaggaaggaaua

SEQ ID NO: 1302945 - RNA, 19 nt, Homo sapiens
  misc_RNA (1)...(19): siRNA sense strand
agaugacgccuguuauaga

SEQ ID NO: 1302946 - RNA, 19 nt, Homo sapiens
  misc_RNA (1)...(19): siRNA sense strand
ugugauuguuauugccaua

SEQ ID NO: 1302947 - RNA, 19 nt, Homo sapiens
  misc_RNA (1)...(19): siRNA sense strand
gagagcacgauuuauugug

SEQ ID NO: 1302948 - RNA, 19 nt, Homo sapiens
  misc_RNA (1)...(19): siRNA sense strand
gaaguauuugaguaucuug

SEQ ID NO: 1302949 - RNA, 19 nt, Homo sapiens
  misc_RNA (1)...(19): siRNA sense strand
ccucuugccacccauacua

SEQ ID NO: 1302950 - RNA, 19 nt, Homo sapiens
  misc_RNA (1)...(19): siRNA sense strand
gauaucaggauuuggaaaa

SEQ ID NO: 1302951 - RNA, 19 nt, Homo sapiens
  misc_RNA (1)...(19): siRNA sense strand
ggcuaccugucucagauga

SEQ ID NO: 1302952 - RNA, 19 nt, Homo sapiens
  misc_RNA (1)...(19): siRNA sense strand
ccaugguguugcugcugua

SEQ ID NO: 1302953 - RNA, 19 nt, Homo sapiens
  misc_RNA (1)...(19): siRNA sense strand
cagaugacgccuguuauag

SEQ ID NO: 1302954 - RNA, 19 nt, Homo sapiens
  misc_RNA (1)...(19): siRNA sense strand
gucauugcugugauuguua

SEQ ID NO: 1302955 - RNA, 19 nt, Homo sapiens
  misc_RNA (1)...(19): siRNA sense strand
uuggugaacgaguagauua

SEQ ID NO: 1302956 - RNA, 19 nt, Homo sapiens
  misc_RNA (1)...(19): siRNA sense strand
ggagccaccaacauuugaa

SEQ ID NO: 1302957 - RNA, 19 nt, Homo sapiens
  misc_RNA (1)...(19): siRNA sense strand
gcgcuuuccuggguugcuu

SEQ ID NO: 1302958 - RNA, 19 nt, Homo sapiens
  misc_RNA (1)...(19): siRNA sense strand
uacuacaaagcaacaguua

SEQ ID NO: 1302959 - RNA, 19 nt, Homo sapiens
  misc_RNA (1)...(19): siRNA sense strand
cuugaugcaguaacuuaua

SEQ ID NO: 1302960 - RNA, 19 nt, Homo sapiens
  misc_RNA (1)...(19): siRNA sense strand
aaacauguccauauauacg

SEQ ID NO: 1302961 - RNA, 19 nt, Homo sapiens
  misc_RNA (1)...(19): siRNA sense strand
guguaaaguggucaaaugu

SEQ ID NO: 1302962 - RNA, 19 nt, Homo sapiens
  misc_RNA (1)...(19): siRNA sense strand
cuuacgaguuugguuauca

SEQ ID NO: 1302963 - RNA, 19 nt, Homo sapiens
  misc_RNA (1)...(19): siRNA sense strand
uacgggauccuuuaaaugg

SEQ ID NO: 1302964 - RNA, 19 nt, Homo sapiens
  misc_RNA (1)...(19): siRNA sense strand
aaccaaaacccuacuauga

SEQ ID NO: 1302965 - RNA, 19 nt, Homo sapiens
  misc_RNA (1)...(19): siRNA sense strand
cccaauaugugaaaagguu

SEQ ID NO: 1302966 - RNA, 19 nt, Homo sapiens
  misc_RNA (1)...(19): siRNA sense strand
cgauggcagcgacacaauu

SEQ ID NO: 1302967 - RNA, 19 nt, Homo sapiens
  misc_RNA (1)...(19): siRNA sense strand
gauccauuuucacuuauug

SEQ ID NO: 1302968 - RNA, 19 nt, Homo sapiens
  misc_RNA (1)...(19): siRNA sense strand
uugaugcaguaacuuauag

SEQ ID NO: 1302969 - RNA, 19 nt, Homo sapiens
  misc_RNA (1)...(19): siRNA sense strand
guaucuugaugcaguaacu

SEQ ID NO: 1302970 - RNA, 19 nt, Homo sapiens
  misc_RNA (1)...(19): siRNA sense strand
caacauuugaagcuaugga

SEQ ID NO: 1302971 - RNA, 19 nt, Homo sapiens
  misc_RNA (1)...(19): siRNA sense strand
gagauuggugaacgaguag

SEQ ID NO: 1302972 - RNA, 19 nt, Homo sapiens
  misc_RNA (1)...(19): siRNA sense strand
ggagagagcacgauuuauu

SEQ ID NO: 1302973 - RNA, 19 nt, Homo sapiens
  misc_RNA (1)...(19): siRNA sense strand
agagaaacauguccauaua

SEQ ID NO: 1302974 - RNA, 19 nt, Homo sapiens
  misc_RNA (1)...(19): siRNA sense strand
cagaugcacuuuauuugua

SEQ ID NO: 1302975 - RNA, 19 nt, Homo sapiens
  misc_RNA (1)...(19): siRNA sense strand
ggacuuacgaguuugguua

SEQ ID NO: 1302976 - RNA, 19 nt, Homo sapiens
  misc_RNA (1)...(19): siRNA sense strand
aaacagauaucaggauuug

SEQ ID NO: 1302977 - RNA, 19 nt, Homo sapiens
  misc_RNA (1)...(19): siRNA sense strand
cuauggagcucauugguaa

SEQ ID NO: 1302978 - RNA, 19 nt, Homo sapiens
  misc_RNA (1)...(19): siRNA sense strand
aaacacaccuuuagugaag

SEQ ID NO: 1302979 - RNA, 19 nt, Homo sapiens
  misc_RNA (1)...(19): siRNA sense strand
gaacuuaaaggaucaguag

SEQ ID NO: 1302980 - RNA, 19 nt, Homo sapiens
  misc_RNA (1)...(19): siRNA sense strand
gaaaacagauaucaggauu

SEQ ID NO: 1302981 - RNA, 19 nt, Homo sapiens
  misc_RNA (1)...(19): siRNA sense strand
uaaaggaucaguagcaauu

SEQ ID NO: 1302982 - RNA, 19 nt, Homo sapiens
  misc_RNA (1)...(19): siRNA sense strand
aaaugggacuuacgaguuu

SEQ ID NO: 1302983 - RNA, 19 nt, Homo sapiens
  misc_RNA (1)...(19): siRNA sense strand
guuaucagaugcacuuuau

SEQ ID NO: 1302984 - RNA, 19 nt, Homo sapiens
  misc_RNA (1)...(19): siRNA sense strand
ugagauuggugaacgagua

SEQ ID NO: 1302985 - RNA, 19 nt, Homo sapiens
  misc_RNA (1)...(19): siRNA sense strand
gugaacgaguagauuauaa

SEQ ID NO: 1302986 - RNA, 19 nt, Homo sapiens
  misc_RNA (1)...(19): siRNA sense strand
gagagagcacgauuuauug

SEQ ID NO: 1302987 - RNA, 19 nt, Homo sapiens
  misc_RNA (1)...(19): siRNA sense strand
caaaugggacuuacgaguu

SEQ ID NO: 1302988 - RNA, 19 nt, Homo sapiens
  misc_RNA (1)...(19): siRNA sense strand
ggucauugcugugauuguu

SEQ ID NO: 1302989 - RNA, 19 nt, Homo sapiens
  misc_RNA (1)...(19): siRNA sense strand
ccagauccauuuucacuua

SEQ ID NO: 1302990 - RNA, 19 nt, Homo sapiens
  misc_RNA (1)...(19): siRNA sense strand
gaaggaauacuugacaguu

SEQ ID NO: 1302991 - RNA, 19 nt, Homo sapiens
  misc_RNA (1)...(19): siRNA sense strand
aaggaauacuugacaguuu

SEQ ID NO: 1302992 - RNA, 19 nt, Homo sapiens
  misc_RNA (1)...(19): siRNA sense strand
ucagaugacgccuguuaua

SEQ ID NO: 1302993 - RNA, 19 nt, Homo sapiens
  misc_RNA (1)...(19): siRNA sense strand
gaaaacacaccuuuaguga

SEQ ID NO: 1302994 - RNA, 19 nt, Homo sapiens
  misc_RNA (1)...(19): siRNA sense strand
gaugacgccuguuauagag

SEQ ID NO: 1302995 - RNA, 19 nt, Homo sapiens
  misc_RNA (1)...(19): siRNA sense strand
gagaaacauguccauauau

SEQ ID NO: 1302996 - RNA, 19 nt, Homo sapiens
  misc_RNA (1)...(19): siRNA sense strand
acgaguagauuauaagugu

SEQ ID NO: 1302997 - RNA, 19 nt, Homo sapiens
  misc_RNA (1)...(19): siRNA sense strand
cuacaaagcaacaguuaug

SEQ ID NO: 1302998 - RNA, 19 nt, Homo sapiens
  misc_RNA (1)...(19): siRNA sense strand
ccaccaacauuugaagcua

SEQ ID NO: 1302999 - RNA, 19 nt, Homo sapiens
  misc_RNA (1)...(19): siRNA sense strand
uauacgggauccuuuaaau

SEQ ID NO: 1303000 - RNA, 19 nt, Homo sapiens
  misc_RNA (1)...(19): siRNA sense strand
cgaguuugguuaucagaug

SEQ ID NO: 1303001 - RNA, 19 nt, Homo sapiens
  misc_RNA (1)...(19): siRNA sense strand
gaacgaguagauuauaagu

SEQ ID NO: 1303002 - RNA, 19 nt, Homo sapiens
  misc_RNA (1)...(19): siRNA sense strand
gugaggagccaccaacauu

SEQ ID NO: 1303003 - RNA, 19 nt, Homo sapiens
  misc_RNA (1)...(19): siRNA sense strand
gauggcagcgacacaauug

SEQ ID NO: 1303004 - RNA, 19 nt, Homo sapiens
  misc_RNA (1)...(19): siRNA sense strand
gcuauggagcucauuggua

SEQ ID NO: 1303005 - RNA, 19 nt, Homo sapiens
  misc_RNA (1)...(19): siRNA sense strand
gaggagccaccaacauuug

SEQ ID NO: 1303006 - RNA, 19 nt, Homo sapiens
  misc_RNA (1)...(19): siRNA sense strand
acacaccuuuagugaagua

SEQ ID NO: 1303007 - RNA, 19 nt, Homo sapiens
  misc_RNA (1)...(19): siRNA sense strand
ucucagaugacgccuguua

SEQ ID NO: 1303008 - RNA, 19 nt, Homo sapiens
  misc_RNA (1)...(19): siRNA sense strand
uagagaaacauguccauau

SEQ ID NO: 1303009 - RNA, 19 nt, Homo sapiens
  misc_RNA (1)...(19): siRNA sense strand
guuccaaagugucuuaaag

SEQ ID NO: 1303010 - RNA, 19 nt, Homo sapiens
  misc_RNA (1)...(19): siRNA sense strand
ggugaacgaguagauuaua

SEQ ID NO: 1303011 - RNA, 19 nt, Homo sapiens
  misc_RNA (1)...(19): siRNA sense strand
gaaguagaaguauuugagu

SEQ ID NO: 1303012 - RNA, 19 nt, Homo sapiens
  misc_RNA (1)...(19): siRNA sense strand
gaaacauguccauauauac

SEQ ID NO: 1303013 - RNA, 19 nt, Homo sapiens
  misc_RNA (1)...(19): siRNA sense strand
ugacgccuguuauagagaa

SEQ ID NO: 1303014 - RNA, 19 nt, Homo sapiens
  misc_RNA (1)...(19): siRNA sense strand
cgaguagauuauaagugua

SEQ ID NO: 1303015 - RNA, 19 nt, Homo sapiens
  misc_RNA (1)...(19): siRNA sense strand
gcacuuuauuuguaaugag

SEQ ID NO: 1303016 - RNA, 19 nt, Homo sapiens
  misc_RNA (1)...(19): siRNA sense strand
guagaaguauuugaguauc

SEQ ID NO: 1303017 - RNA, 19 nt, Homo sapiens
  misc_RNA (1)...(19): siRNA sense strand
guauuugaguaucuugaug

SEQ ID NO: 1303018 - RNA, 19 nt, Homo sapiens
  misc_RNA (1)...(19): siRNA sense strand
aggaauacuugacaguuug

SEQ ID NO: 1303019 - RNA, 19 nt, Homo sapiens
  misc_RNA (1)...(19): siRNA sense strand
ccaaaacccuacuaugaga

SEQ ID NO: 1303020 - RNA, 19 nt, Homo sapiens
  misc_RNA (1)...(19): siRNA sense strand
aguguaaaguggucaaaug

SEQ ID NO: 1303021 - RNA, 19 nt, Homo sapiens
  misc_RNA (1)...(19): siRNA sense strand
ccacccauacuauuuguga

SEQ ID NO: 1303022 - RNA, 19 nt, Homo sapiens
  misc_RNA (1)...(19): siRNA sense strand
caccaacauuugaagcuau

SEQ ID NO: 1303023 - RNA, 19 nt, Homo sapiens
  misc_RNA (1)...(19): siRNA sense strand
uuggagagagcacgauuua

SEQ ID NO: 1303024 - RNA, 19 nt, Homo sapiens
  misc_RNA (1)...(19): siRNA sense strand
gguuaucagaugcacuuua

SEQ ID NO: 1303025 - RNA, 19 nt, Homo sapiens
  misc_RNA (1)...(19): siRNA sense strand
ugaggagccaccaacauuu

SEQ ID NO: 1303026 - RNA, 19 nt, Homo sapiens
  misc_RNA (1)...(19): siRNA sense strand
ggaaggaauacuugacagu

SEQ ID NO: 1303027 - RNA, 19 nt, Homo sapiens
  misc_RNA (1)...(19): siRNA sense strand
gaggaaggaauacuugaca

SEQ ID NO: 1303028 - RNA, 19 nt, Homo sapiens
  misc_RNA (1)...(19): siRNA sense strand
ccaguuccaaagugucuua

SEQ ID NO: 1303029 - RNA, 19 nt, Homo sapiens
  misc_RNA (1)...(19): siRNA sense strand
ugaguaucuugaugcagua

SEQ ID NO: 1303030 - RNA, 19 nt, Homo sapiens
  misc_RNA (1)...(19): siRNA sense strand
caccuuuagugaaguagaa

SEQ ID NO: 1303031 - RNA, 19 nt, Homo sapiens
  misc_RNA (1)...(19): siRNA sense strand
acagauaucaggauuugga

SEQ ID NO: 1303032 - RNA, 19 nt, Homo sapiens
  misc_RNA (1)...(19): siRNA sense strand
ucauugcugugauuguuau

SEQ ID NO: 1303033 - RNA, 19 nt, Homo sapiens
  misc_RNA (1)...(19): siRNA sense strand
ucagaugcacuuuauuugu

SEQ ID NO: 1303034 - RNA, 19 nt, Homo sapiens
  misc_RNA (1)...(19): siRNA sense strand
gugcugcuccagaguguaa

SEQ ID NO: 1303035 - RNA, 19 nt, Homo sapiens
  misc_RNA (1)...(19): siRNA sense strand
ggaaaacacaccuuuagug

SEQ ID NO: 1303036 - RNA, 19 nt, Homo sapiens
  misc_RNA (1)...(19): siRNA sense strand
aaggaucaguagcaauuug

SEQ ID NO: 1303037 - RNA, 19 nt, Homo sapiens
  misc_RNA (1)...(19): siRNA sense strand
uauauacgggauccuuuaa

SEQ ID NO: 1303038 - RNA, 19 nt, Homo sapiens
  misc_RNA (1)...(19): siRNA sense strand
ugaaguagaaguauuugag

SEQ ID NO: 1303039 - RNA, 19 nt, Homo sapiens
  misc_RNA (1)...(19): siRNA sense strand
cuugacaguuuggauguuu

SEQ ID NO: 1303040 - RNA, 19 nt, Homo sapiens
  misc_RNA (1)...(19): siRNA sense strand
cauauauacgggauccuuu

SEQ ID NO: 1303041 - RNA, 19 nt, Homo sapiens
  misc_RNA (1)...(19): siRNA sense strand
auauauacgggauccuuua

SEQ ID NO: 1303042 - RNA, 19 nt, Homo sapiens
  misc_RNA (1)...(19): siRNA sense strand
cuuaaaggaucaguagcaa

SEQ ID NO: 1303043 - RNA, 19 nt, Homo sapiens
  misc_RNA (1)...(19): siRNA sense strand
uaaaccugaggaaggaaua

SEQ ID NO: 1303044 - RNA, 19 nt, Homo sapiens
  misc_RNA (1)...(19): siRNA sense strand
agaugacgccuguuauaga

SEQ ID NO: 1303045 - RNA, 19 nt, Homo sapiens
  misc_RNA (1)...(19): siRNA sense strand
ugugauuguuauugccaua

SEQ ID NO: 1303046 - RNA, 19 nt, Homo sapiens
  misc_RNA (1)...(19): siRNA sense strand
gagagcacgauuuauugug

SEQ ID NO: 1303047 - RNA, 19 nt, Homo sapiens
  misc_RNA (1)...(19): siRNA sense strand
gaaguauuugaguaucuug

SEQ ID NO: 1303048 - RNA, 19 nt, Homo sapiens
  misc_RNA (1)...(19): siRNA sense strand
ggcuaccugucucagauga

SEQ ID NO: 1303049 - RNA, 19 nt, Homo sapiens
  misc_RNA (1)...(19): siRNA sense strand
gauaucaggauuuggaaaa

SEQ ID NO: 1303050 - RNA, 19 nt, Homo sapiens
  misc_RNA (1)...(19): siRNA sense strand
ccucuugccacccauacua

SEQ ID NO: 1303051 - RNA, 19 nt, Homo sapiens
  misc_RNA (1)...(19): siRNA sense strand
ccaugguguugcugcugua

SEQ ID NO: 1303052 - RNA, 19 nt, Homo sapiens
  misc_RNA (1)...(19): siRNA sense strand
cagaugacgccuguuauag

SEQ ID NO: 1303053 - RNA, 19 nt, Homo sapiens
  misc_RNA (1)...(19): siRNA sense strand
uuggugaacgaguagauua

SEQ ID NO: 1303054 - RNA, 19 nt, Homo sapiens
  misc_RNA (1)...(19): siRNA sense strand
gucauugcugugauuguua

SEQ ID NO: 1303055 - RNA, 19 nt, Homo sapiens
  misc_RNA (1)...(19): siRNA sense strand
ggagccaccaacauuugaa

SEQ ID NO: 1303056 - RNA, 19 nt, Homo sapiens
  misc_RNA (1)...(19): siRNA sense strand
gcgcuuuccuggguugcuu

SEQ ID NO: 1303057 - RNA, 19 nt, Homo sapiens
  misc_RNA (1)...(19): siRNA sense strand
uacuacaaagcaacaguua

SEQ ID NO: 1303058 - RNA, 19 nt, Homo sapiens
  misc_RNA (1)...(19): siRNA sense strand
cuugaugcaguaacuuaua

SEQ ID NO: 1303059 - RNA, 19 nt, Homo sapiens
  misc_RNA (1)...(19): siRNA sense strand
aaacauguccauauauacg

SEQ ID NO: 1303060 - RNA, 19 nt, Homo sapiens
  misc_RNA (1)...(19): siRNA sense strand
guguaaaguggucaaaugu

SEQ ID NO: 1303061 - RNA, 19 nt, Homo sapiens
  misc_RNA (1)...(19): siRNA sense strand
cuuacgaguuugguuauca

SEQ ID NO: 1303062 - RNA, 19 nt, Homo sapiens
  misc_RNA (1)...(19): siRNA sense strand
uacgggauccuuuaaaugg

SEQ ID NO: 1303063 - RNA, 19 nt, Homo sapiens
  misc_RNA (1)...(19): siRNA sense strand
aaccaaaacccuacuauga

SEQ ID NO: 1303064 - RNA, 19 nt, Homo sapiens
  misc_RNA (1)...(19): siRNA sense strand
cccaauaugugaaaagguu

SEQ ID NO: 1303065 - RNA, 19 nt, Homo sapiens
  misc_RNA (1)...(19): siRNA sense strand
cgauggcagcgacacaauu

SEQ ID NO: 1303066 - RNA, 19 nt, Homo sapiens
  misc_RNA (1)...(19): siRNA sense strand
gauccauuuucacuuauug

SEQ ID NO: 1303067 - RNA, 19 nt, Homo sapiens
  misc_RNA (1)...(19): siRNA sense strand
uugaugcaguaacuuauag

SEQ ID NO: 1303068 - RNA, 19 nt, Homo sapiens
  misc_RNA (1)...(19): siRNA sense strand
guaucuugaugcaguaacu

SEQ ID NO: 1303069 - RNA, 19 nt, Homo sapiens
  misc_RNA (1)...(19): siRNA sense strand
caacauuugaagcuaugga

SEQ ID NO: 1303070 - RNA, 19 nt, Homo sapiens
  misc_RNA (1)...(19): siRNA sense strand
gagauuggugaacgaguag

SEQ ID NO: 1303071 - RNA, 19 nt, Homo sapiens
  misc_RNA (1)...(19): siRNA sense strand
ggagagagcacgauuuauu

SEQ ID NO: 1303072 - RNA, 19 nt, Homo sapiens
  misc_RNA (1)...(19): siRNA sense strand
agagaaacauguccauaua

SEQ ID NO: 1303073 - RNA, 19 nt, Homo sapiens
  misc_RNA (1)...(19): siRNA sense strand
cagaugcacuuuauuugua

SEQ ID NO: 1303074 - RNA, 19 nt, Homo sapiens
  misc_RNA (1)...(19): siRNA sense strand
ggacuuacgaguuugguua

SEQ ID NO: 1303075 - RNA, 19 nt, Homo sapiens
  misc_RNA (1)...(19): siRNA sense strand
aaacagauaucaggauuug

SEQ ID NO: 1303076 - RNA, 19 nt, Homo sapiens
  misc_RNA (1)...(19): siRNA sense strand
cuauggagcucauugguaa

SEQ ID NO: 1303077 - RNA, 19 nt, Homo sapiens
  misc_RNA (1)...(19): siRNA sense strand
aaacacaccuuuagugaag

SEQ ID NO: 1303078 - RNA, 19 nt, Homo sapiens
  misc_RNA (1)...(19): siRNA sense strand
gaacuuaaaggaucaguag

SEQ ID NO: 1303079 - RNA, 19 nt, Homo sapiens
  misc_RNA (1)...(19): siRNA sense strand
gaaaacagauaucaggauu

SEQ ID NO: 1303080 - RNA, 19 nt, Homo sapiens
  misc_RNA (1)...(19): siRNA sense strand
uaaaggaucaguagcaauu

SEQ ID NO: 1303081 - RNA, 19 nt, Homo sapiens
  misc_RNA (1)...(19): siRNA sense strand
aaaugggacuuacgaguuu

SEQ ID NO: 1303082 - RNA, 19 nt, Homo sapiens
  misc_RNA (1)...(19): siRNA sense strand
guuaucagaugcacuuuau

SEQ ID NO: 1303083 - RNA, 19 nt, Homo sapiens
  misc_RNA (1)...(19): siRNA sense strand
gagcugaauaugccacuua

SEQ ID NO: 1303084 - RNA, 19 nt, Homo sapiens
  misc_RNA (1)...(19): siRNA sense strand
ugagauuggugaacgagua

SEQ ID NO: 1303085 - RNA, 19 nt, Homo sapiens
  misc_RNA (1)...(19): siRNA sense strand
gugaacgaguagauuauaa

SEQ ID NO: 1303086 - RNA, 19 nt, Homo sapiens
  misc_RNA (1)...(19): siRNA sense strand
gagagagcacgauuuauug

SEQ ID NO: 1303087 - RNA, 19 nt, Homo sapiens
  misc_RNA (1)...(19): siRNA sense strand
caaaugggacuuacgaguu

SEQ ID NO: 1303088 - RNA, 19 nt, Homo sapiens
  misc_RNA (1)...(19): siRNA sense strand
ggucauugcugugauuguu

SEQ ID NO: 1303089 - RNA, 19 nt, Homo sapiens
  misc_RNA (1)...(19): siRNA sense strand
ccagauccauuuucacuua

SEQ ID NO: 1303090 - RNA, 19 nt, Homo sapiens
  misc_RNA (1)...(19): siRNA sense strand
gaaggaauacuugacaguu

SEQ ID NO: 1303091 - RNA, 19 nt, Homo sapiens
  misc_RNA (1)...(19): siRNA sense strand
aaggaauacuugacaguuu

SEQ ID NO: 1303092 - RNA, 19 nt, Homo sapiens
  misc_RNA (1)...(19): siRNA sense strand
ucagaugacgccuguuaua

SEQ ID NO: 1303093 - RNA, 19 nt, Homo sapiens
  misc_RNA (1)...(19): siRNA sense strand
gaaaacacaccuuuaguga

SEQ ID NO: 1303094 - RNA, 19 nt, Homo sapiens
  misc_RNA (1)...(19): siRNA sense strand
gaugacgccuguuauagag

SEQ ID NO: 1303095 - RNA, 19 nt, Homo sapiens
  misc_RNA (1)...(19): siRNA sense strand
gagaaacauguccauauau

SEQ ID NO: 1303096 - RNA, 19 nt, Homo sapiens
  misc_RNA (1)...(19): siRNA sense strand
ccacuuaccagacuaaauc

SEQ ID NO: 1303097 - RNA, 19 nt, Homo sapiens
  misc_RNA (1)...(19): siRNA sense strand
acgaguagauuauaagugu

SEQ ID NO: 1303098 - RNA, 19 nt, Homo sapiens
  misc_RNA (1)...(19): siRNA sense strand
cuacaaagcaacaguuaug

SEQ ID NO: 1303099 - RNA, 19 nt, Homo sapiens
  misc_RNA (1)...(19): siRNA sense strand
ccaccaacauuugaagcua

SEQ ID NO: 1303100 - RNA, 19 nt, Homo sapiens
  misc_RNA (1)...(19): siRNA sense strand
uauacgggauccuuuaaau

SEQ ID NO: 1303101 - RNA, 19 nt, Homo sapiens
  misc_RNA (1)...(19): siRNA sense strand
cgaguuugguuaucagaug

SEQ ID NO: 1303102 - RNA, 19 nt, Homo sapiens
  misc_RNA (1)...(19): siRNA sense strand
gaacgaguagauuauaagu

SEQ ID NO: 1303103 - RNA, 19 nt, Homo sapiens
  misc_RNA (1)...(19): siRNA sense strand
gugaggagccaccaacauu

SEQ ID NO: 1303104 - RNA, 19 nt, Homo sapiens
  misc_RNA (1)...(19): siRNA sense strand
gauggcagcgacacaauug

SEQ ID NO: 1303105 - RNA, 19 nt, Homo sapiens
  misc_RNA (1)...(19): siRNA sense strand
ucucagaugacgccuguua

SEQ ID NO: 1303106 - RNA, 19 nt, Homo sapiens
  misc_RNA (1)...(19): siRNA sense strand
gaggagccaccaacauuug

SEQ ID NO: 1303107 - RNA, 19 nt, Homo sapiens
  misc_RNA (1)...(19): siRNA sense strand
gcuauggagcucauuggua

SEQ ID NO: 1303108 - RNA, 19 nt, Homo sapiens
  misc_RNA (1)...(19): siRNA sense strand
acacaccuuuagugaagua

SEQ ID NO: 1303109 - RNA, 19 nt, Homo sapiens
  misc_RNA (1)...(19): siRNA sense strand
uagagaaacauguccauau

SEQ ID NO: 1303110 - RNA, 19 nt, Homo sapiens
  misc_RNA (1)...(19): siRNA sense strand
guuccaaagugucuuaaag

SEQ ID NO: 1303111 - RNA, 19 nt, Homo sapiens
  misc_RNA (1)...(19): siRNA sense strand
ggugaacgaguagauuaua

SEQ ID NO: 1303112 - RNA, 19 nt, Homo sapiens
  misc_RNA (1)...(19): siRNA sense strand
gaaguagaaguauuugagu

SEQ ID NO: 1303113 - RNA, 19 nt, Homo sapiens
  misc_RNA (1)...(19): siRNA sense strand
gaaacauguccauauauac

SEQ ID NO: 1303114 - RNA, 19 nt, Homo sapiens
  misc_RNA (1)...(19): siRNA sense strand
ugacgccuguuauagagaa

SEQ ID NO: 1303115 - RNA, 19 nt, Homo sapiens
  misc_RNA (1)...(19): siRNA sense strand
cgaguagauuauaagugua

SEQ ID NO: 1303116 - RNA, 19 nt, Homo sapiens
  misc_RNA (1)...(19): siRNA sense strand
gcacuuuauuuguaaugag

SEQ ID NO: 1303117 - RNA, 19 nt, Homo sapiens
  misc_RNA (1)...(19): siRNA sense strand
guagaaguauuugaguauc

SEQ ID NO: 1303118 - RNA, 19 nt, Homo sapiens
  misc_RNA (1)...(19): siRNA sense strand
guauuugaguaucuugaug

SEQ ID NO: 1303119 - RNA, 19 nt, Homo sapiens
  misc_RNA (1)...(19): siRNA sense strand
aggaauacuugacaguuug

SEQ ID NO: 1303120 - RNA, 19 nt, Homo sapiens
  misc_RNA (1)...(19): siRNA sense strand
ccaaaacccuacuaugaga

SEQ ID NO: 1303121 - RNA, 19 nt, Homo sapiens
  misc_RNA (1)...(19): siRNA sense strand
aguguaaaguggucaaaug

SEQ ID NO: 1303122 - RNA, 19 nt, Homo sapiens
  misc_RNA (1)...(19): siRNA sense strand
ccacccauacuauuuguga

SEQ ID NO: 1303123 - RNA, 19 nt, Homo sapiens
  misc_RNA (1)...(19): siRNA sense strand
uuggagagagcacgauuua

SEQ ID NO: 1303124 - RNA, 19 nt, Homo sapiens
  misc_RNA (1)...(19): siRNA sense strand
gguuaucagaugcacuuua

SEQ ID NO: 1303125 - RNA, 19 nt, Homo sapiens
  misc_RNA (1)...(19): siRNA sense strand
caccaacauuugaagcuau

SEQ ID NO: 1303126 - RNA, 19 nt, Homo sapiens
  misc_RNA (1)...(19): siRNA sense strand
ugaggagccaccaacauuu

SEQ ID NO: 1303127 - RNA, 19 nt, Homo sapiens
  misc_RNA (1)...(19): siRNA sense strand
ggaaggaauacuugacagu

SEQ ID NO: 1303128 - RNA, 19 nt, Homo sapiens
  misc_RNA (1)...(19): siRNA sense strand
gaggaaggaauacuugaca

SEQ ID NO: 1303129 - RNA, 19 nt, Homo sapiens
  misc_RNA (1)...(19): siRNA sense strand
ccaguuccaaagugucuua

SEQ ID NO: 1303130 - RNA, 19 nt, Homo sapiens
  misc_RNA (1)...(19): siRNA sense strand
ugaguaucuugaugcagua

SEQ ID NO: 1303131 - RNA, 19 nt, Homo sapiens
  misc_RNA (1)...(19): siRNA sense strand
caccuuuagugaaguagaa

SEQ ID NO: 1303132 - RNA, 19 nt, Homo sapiens
  misc_RNA (1)...(19): siRNA sense strand
acagauaucaggauuugga

SEQ ID NO: 1303133 - RNA, 19 nt, Homo sapiens
  misc_RNA (1)...(19): siRNA sense strand
ucauugcugugauuguuau

SEQ ID NO: 1303134 - RNA, 19 nt, Homo sapiens
  misc_RNA (1)...(19): siRNA sense strand
ucagaugcacuuuauuugu

SEQ ID NO: 1303135 - RNA, 19 nt, Homo sapiens
  misc_RNA (1)...(19): siRNA sense strand
gugcugcuccagaguguaa

SEQ ID NO: 1303136 - RNA, 19 nt, Homo sapiens
  misc_RNA (1)...(19): siRNA sense strand
ggaaaacacaccuuuagug

SEQ ID NO: 1303137 - RNA, 19 nt, Homo sapiens
  misc_RNA (1)...(19): siRNA sense strand
aaggaucaguagcaauuug

SEQ ID NO: 1303138 - RNA, 19 nt, Homo sapiens
  misc_RNA (1)...(19): siRNA sense strand
uauauacgggauccuuuaa

SEQ ID NO: 1303139 - RNA, 19 nt, Homo sapiens
  misc_RNA (1)...(19): siRNA sense strand
ugaaguagaaguauuugag

SEQ ID NO: 1303140 - RNA, 19 nt, Homo sapiens
  misc_RNA (1)...(19): siRNA sense strand
cuugacaguuuggauguuu

SEQ ID NO: 1303141 - RNA, 19 nt, Homo sapiens
  misc_RNA (1)...(19): siRNA sense strand
cauauauacgggauccuuu

SEQ ID NO: 1303142 - RNA, 19 nt, Homo sapiens
  misc_RNA (1)...(19): siRNA sense strand
auauauacgggauccuuua

SEQ ID NO: 1303143 - RNA, 19 nt, Homo sapiens
  misc_RNA (1)...(19): siRNA sense strand
cuuaaaggaucaguagcaa

SEQ ID NO: 1303144 - RNA, 19 nt, Homo sapiens
  misc_RNA (1)...(19): siRNA sense strand
uaaaccugaggaaggaaua

SEQ ID NO: 1303145 - RNA, 19 nt, Homo sapiens
  misc_RNA (1)...(19): siRNA sense strand
agaugacgccuguuauaga

SEQ ID NO: 1303146 - RNA, 19 nt, Homo sapiens
  misc_RNA (1)...(19): siRNA sense strand
ugugauuguuauugccaua

SEQ ID NO: 1303147 - RNA, 19 nt, Homo sapiens
  misc_RNA (1)...(19): siRNA sense strand
gagagcacgauuuauugug

SEQ ID NO: 1303148 - RNA, 19 nt, Homo sapiens
  misc_RNA (1)...(19): siRNA sense strand
gaaguauuugaguaucuug

SEQ ID NO: 1303149 - RNA, 19 nt, Homo sapiens
  misc_RNA (1)...(19): siRNA sense strand
ggcuaccugucucagauga

SEQ ID NO: 1303150 - RNA, 19 nt, Homo sapiens
  misc_RNA (1)...(19): siRNA sense strand
gauaucaggauuuggaaaa

SEQ ID NO: 1303151 - RNA, 19 nt, Homo sapiens
  misc_RNA (1)...(19): siRNA sense strand
ccucuugccacccauacua

SEQ ID NO: 1303152 - RNA, 19 nt, Homo sapiens
  misc_RNA (1)...(19): siRNA sense strand
ccaugguguugcugcugua

SEQ ID NO: 1303153 - RNA, 19 nt, Homo sapiens
  misc_RNA (1)...(19): siRNA sense strand
cagaugacgccuguuauag

SEQ ID NO: 1303154 - RNA, 19 nt, Homo sapiens
  misc_RNA (1)...(19): siRNA sense strand
cagaugguggagcugaaua

SEQ ID NO: 1303155 - RNA, 19 nt, Homo sapiens
  misc_RNA (1)...(19): siRNA sense strand
gucauugcugugauuguua

SEQ ID NO: 1303156 - RNA, 19 nt, Homo sapiens
  misc_RNA (1)...(19): siRNA sense strand
ggagccaccaacauuugaa

SEQ ID NO: 1303157 - RNA, 19 nt, Homo sapiens
  misc_RNA (1)...(19): siRNA sense strand
uuggugaacgaguagauua

SEQ ID NO: 1303158 - RNA, 19 nt, Homo sapiens
  misc_RNA (1)...(19): siRNA sense strand
gcgcuuuccuggguugcuu

SEQ ID NO: 1303159 - RNA, 19 nt, Homo sapiens
  misc_RNA (1)...(19): siRNA sense strand
uacuacaaagcaacaguua

SEQ ID NO: 1303160 - RNA, 19 nt, Homo sapiens
  misc_RNA (1)...(19): siRNA sense strand
cuugaugcaguaacuuaua

SEQ ID NO: 1303161 - RNA, 19 nt, Homo sapiens
  misc_RNA (1)...(19): siRNA sense strand
aaacauguccauauauacg

SEQ ID NO: 1303162 - RNA, 19 nt, Homo sapiens
  misc_RNA (1)...(19): siRNA sense strand
guguaaaguggucaaaugu

SEQ ID NO: 1303163 - RNA, 19 nt, Homo sapiens
  misc_RNA (1)...(19): siRNA sense strand
cuuacgaguuugguuauca

SEQ ID NO: 1303164 - RNA, 19 nt, Homo sapiens
  misc_RNA (1)...(19): siRNA sense strand
uacgggauccuuuaaaugg

SEQ ID NO: 1303165 - RNA, 19 nt, Homo sapiens
  misc_RNA (1)...(19): siRNA sense strand
gcagaugguggagcugaau

SEQ ID NO: 1303166 - RNA, 19 nt, Homo sapiens
  misc_RNA (1)...(19): siRNA sense strand
aaccaaaacccuacuauga

SEQ ID NO: 1303167 - RNA, 19 nt, Homo sapiens
  misc_RNA (1)...(19): siRNA sense strand
uugaugcaguaacuuauag

SEQ ID NO: 1303168 - RNA, 19 nt, Homo sapiens
  misc_RNA (1)...(19): siRNA sense strand
ggagcugaauaugccacuu

SEQ ID NO: 1303169 - RNA, 19 nt, Homo sapiens
  misc_RNA (1)...(19): siRNA sense strand
cgauggcagcgacacaauu

SEQ ID NO: 1303170 - RNA, 19 nt, Homo sapiens
  misc_RNA (1)...(19): siRNA sense strand
gauccauuuucacuuauug

SEQ ID NO: 1303171 - RNA, 19 nt, Homo sapiens
  misc_RNA (1)...(19): siRNA sense strand
ggagagagcacgauuuauu

SEQ ID NO: 1303172 - RNA, 19 nt, Homo sapiens
  misc_RNA (1)...(19): siRNA sense strand
agagaaacauguccauaua

SEQ ID NO: 1303173 - RNA, 19 nt, Homo sapiens
  misc_RNA (1)...(19): siRNA sense strand
cagaugcacuuuauuugua

SEQ ID NO: 1303174 - RNA, 19 nt, Homo sapiens
  misc_RNA (1)...(19): siRNA sense strand
ggacuuacgaguuugguua

SEQ ID NO: 1303175 - RNA, 19 nt, Homo sapiens
  misc_RNA (1)...(19): siRNA sense strand
aaacagauaucaggauuug

SEQ ID NO: 1303176 - RNA, 19 nt, Homo sapiens
  misc_RNA (1)...(19): siRNA sense strand
cuauggagcucauugguaa

SEQ ID NO: 1303177 - RNA, 19 nt, Homo sapiens
  misc_RNA (1)...(19): siRNA sense strand
aaacacaccuuuagugaag

SEQ ID NO: 1303178 - RNA, 19 nt, Homo sapiens
  misc_RNA (1)...(19): siRNA sense strand
gaacuuaaaggaucaguag

SEQ ID NO: 1303179 - RNA, 19 nt, Homo sapiens
  misc_RNA (1)...(19): siRNA sense strand
gaaaacagauaucaggauu

SEQ ID NO: 1303180 - RNA, 19 nt, Homo sapiens
  misc_RNA (1)...(19): siRNA sense strand
uaaaggaucaguagcaauu

SEQ ID NO: 1303181 - RNA, 19 nt, Homo sapiens
  misc_RNA (1)...(19): siRNA sense strand
aaaugggacuuacgaguuu

SEQ ID NO: 1303182 - RNA, 19 nt, Homo sapiens
  misc_RNA (1)...(19): siRNA sense strand
guuaucagaugcacuuuau

SEQ ID NO: 1303183 - RNA, 19 nt, Homo sapiens
  misc_RNA (1)...(19): siRNA sense strand
ugagauuggugaacgagua

SEQ ID NO: 1303184 - RNA, 19 nt, Homo sapiens
  misc_RNA (1)...(19): siRNA sense strand
gugaacgaguagauuauaa

SEQ ID NO: 1303185 - RNA, 19 nt, Homo sapiens
  misc_RNA (1)...(19): siRNA sense strand
gagagagcacgauuuauug

SEQ ID NO: 1303186 - RNA, 19 nt, Homo sapiens
  misc_RNA (1)...(19): siRNA sense strand
caaaugggacuuacgaguu

SEQ ID NO: 1303187 - RNA, 19 nt, Homo sapiens
  misc_RNA (1)...(19): siRNA sense strand
ggucauugcugugauuguu

SEQ ID NO: 1303188 - RNA, 19 nt, Homo sapiens
  misc_RNA (1)...(19): siRNA sense strand
ccagauccauuuucacuua

SEQ ID NO: 1303189 - RNA, 19 nt, Homo sapiens
  misc_RNA (1)...(19): siRNA sense strand
gaaggaauacuugacaguu

SEQ ID NO: 1303190 - RNA, 19 nt, Homo sapiens
  misc_RNA (1)...(19): siRNA sense strand
aaggaauacuugacaguuu

SEQ ID NO: 1303191 - RNA, 19 nt, Homo sapiens
  misc_RNA (1)...(19): siRNA sense strand
ucagaugacgccuguuaua

SEQ ID NO: 1303192 - RNA, 19 nt, Homo sapiens
  misc_RNA (1)...(19): siRNA sense strand
gaaaacacaccuuuaguga

SEQ ID NO: 1303193 - RNA, 19 nt, Homo sapiens
  misc_RNA (1)...(19): siRNA sense strand
gaugacgccuguuauagag

SEQ ID NO: 1303194 - RNA, 19 nt, Homo sapiens
  misc_RNA (1)...(19): siRNA sense strand
gagaaacauguccauauau

SEQ ID NO: 1303195 - RNA, 19 nt, Homo sapiens
  misc_RNA (1)...(19): siRNA sense strand
acgaguagauuauaagugu

SEQ ID NO: 1303196 - RNA, 19 nt, Homo sapiens
  misc_RNA (1)...(19): siRNA sense strand
cuacaaagcaacaguuaug

SEQ ID NO: 1303197 - RNA, 19 nt, Homo sapiens
  misc_RNA (1)...(19): siRNA sense strand
ccaccaacauuugaagcua

SEQ ID NO: 1303198 - RNA, 19 nt, Homo sapiens
  misc_RNA (1)...(19): siRNA sense strand
uauacgggauccuuuaaau

SEQ ID NO: 1303199 - RNA, 19 nt, Homo sapiens
  misc_RNA (1)...(19): siRNA sense strand
cgaguuugguuaucagaug

SEQ ID NO: 1303200 - RNA, 19 nt, Homo sapiens
  misc_RNA (1)...(19): siRNA sense strand
gaacgaguagauuauaagu

SEQ ID NO: 1303201 - RNA, 19 nt, Homo sapiens
  misc_RNA (1)...(19): siRNA sense strand
gugaggagccaccaacauu

SEQ ID NO: 1303202 - RNA, 19 nt, Homo sapiens
  misc_RNA (1)...(19): siRNA sense strand
gauggcagcgacacaauug

SEQ ID NO: 1303203 - RNA, 19 nt, Homo sapiens
  misc_RNA (1)...(19): siRNA sense strand
gcuauggagcucauuggua

SEQ ID NO: 1303204 - RNA, 19 nt, Homo sapiens
  misc_RNA (1)...(19): siRNA sense strand
gaggagccaccaacauuug

SEQ ID NO: 1303205 - RNA, 19 nt, Homo sapiens
  misc_RNA (1)...(19): siRNA sense strand
acacaccuuuagugaagua

SEQ ID NO: 1303206 - RNA, 19 nt, Homo sapiens
  misc_RNA (1)...(19): siRNA sense strand
ucucagaugacgccuguua

SEQ ID NO: 1303207 - RNA, 19 nt, Homo sapiens
  misc_RNA (1)...(19): siRNA sense strand
uagagaaacauguccauau

SEQ ID NO: 1303208 - RNA, 19 nt, Homo sapiens
  misc_RNA (1)...(19): siRNA sense strand
guuccaaagugucuuaaag

SEQ ID NO: 1303209 - RNA, 19 nt, Homo sapiens
  misc_RNA (1)...(19): siRNA sense strand
ggugaacgaguagauuaua

SEQ ID NO: 1303210 - RNA, 19 nt, Homo sapiens
  misc_RNA (1)...(19): siRNA sense strand
gaaguagaaguauuugagu

SEQ ID NO: 1303211 - RNA, 19 nt, Homo sapiens
  misc_RNA (1)...(19): siRNA sense strand
gaaacauguccauauauac

SEQ ID NO: 1303212 - RNA, 19 nt, Homo sapiens
  misc_RNA (1)...(19): siRNA sense strand
ugacgccuguuauagagaa

SEQ ID NO: 1303213 - RNA, 19 nt, Homo sapiens
  misc_RNA (1)...(19): siRNA sense strand
cgaguagauuauaagugua

SEQ ID NO: 1303214 - RNA, 19 nt, Homo sapiens
  misc_RNA (1)...(19): siRNA sense strand
gcacuuuauuuguaaugag

SEQ ID NO: 1303215 - RNA, 19 nt, Homo sapiens
  misc_RNA (1)...(19): siRNA sense strand
guagaaguauuugaguauc

SEQ ID NO: 1303216 - RNA, 19 nt, Homo sapiens
  misc_RNA (1)...(19): siRNA sense strand
guauuugaguaucuugaug

SEQ ID NO: 1303217 - RNA, 19 nt, Homo sapiens
  misc_RNA (1)...(19): siRNA sense strand
aggaauacuugacaguuug

SEQ ID NO: 1303218 - RNA, 19 nt, Homo sapiens
  misc_RNA (1)...(19): siRNA sense strand
ccaaaacccuacuaugaga

SEQ ID NO: 1303219 - RNA, 19 nt, Homo sapiens
  misc_RNA (1)...(19): siRNA sense strand
aguguaaaguggucaaaug

SEQ ID NO: 1303220 - RNA, 19 nt, Homo sapiens
  misc_RNA (1)...(19): siRNA sense strand
ccacccauacuauuuguga

SEQ ID NO: 1303221 - RNA, 19 nt, Homo sapiens
  misc_RNA (1)...(19): siRNA sense strand
caccaacauuugaagcuau

SEQ ID NO: 1303222 - RNA, 19 nt, Homo sapiens
  misc_RNA (1)...(19): siRNA sense strand
uuggagagagcacgauuua

SEQ ID NO: 1303223 - RNA, 19 nt, Homo sapiens
  misc_RNA (1)...(19): siRNA sense strand
gguuaucagaugcacuuua

SEQ ID NO: 1303224 - RNA, 19 nt, Homo sapiens
  misc_RNA (1)...(19): siRNA sense strand
ugaggagccaccaacauuu

SEQ ID NO: 1303225 - RNA, 19 nt, Homo sapiens
  misc_RNA (1)...(19): siRNA sense strand
ggaaggaauacuugacagu

SEQ ID NO: 1303226 - RNA, 19 nt, Homo sapiens
  misc_RNA (1)...(19): siRNA sense strand
gaggaaggaauacuugaca

SEQ ID NO: 1303227 - RNA, 19 nt, Homo sapiens
  misc_RNA (1)...(19): siRNA sense strand
ccaguuccaaagugucuua

SEQ ID NO: 1303228 - RNA, 19 nt, Homo sapiens
  misc_RNA (1)...(19): siRNA sense strand
ugaguaucuugaugcagua

SEQ ID NO: 1303229 - RNA, 19 nt, Homo sapiens
  misc_RNA (1)...(19): siRNA sense strand
caccuuuagugaaguagaa

SEQ ID NO: 1303230 - RNA, 19 nt, Homo sapiens
  misc_RNA (1)...(19): siRNA sense strand
acagauaucaggauuugga

SEQ ID NO: 1303231 - RNA, 19 nt, Homo sapiens
  misc_RNA (1)...(19): siRNA sense strand
ucauugcugugauuguuau

SEQ ID NO: 1303232 - RNA, 19 nt, Homo sapiens
  misc_RNA (1)...(19): siRNA sense strand
ucagaugcacuuuauuugu

SEQ ID NO: 1303233 - RNA, 19 nt, Homo sapiens
  misc_RNA (1)...(19): siRNA sense strand
gugcugcuccagaguguaa

SEQ ID NO: 1303234 - RNA, 19 nt, Homo sapiens
  misc_RNA (1)...(19): siRNA sense strand
ggaaaacacaccuuuagug

SEQ ID NO: 1303235 - RNA, 19 nt, Homo sapiens
  misc_RNA (1)...(19): siRNA sense strand
aaggaucaguagcaauuug

SEQ ID NO: 1303236 - RNA, 19 nt, Homo sapiens
  misc_RNA (1)...(19): siRNA sense strand
uauauacgggauccuuuaa

SEQ ID NO: 1303237 - RNA, 19 nt, Homo sapiens
  misc_RNA (1)...(19): siRNA sense strand
ugaaguagaaguauuugag

SEQ ID NO: 1303238 - RNA, 19 nt, Homo sapiens
  misc_RNA (1)...(19): siRNA sense strand
cuugacaguuuggauguuu

SEQ ID NO: 1303239 - RNA, 19 nt, Homo sapiens
  misc_RNA (1)...(19): siRNA sense strand
cauauauacgggauccuuu

SEQ ID NO: 1303240 - RNA, 19 nt, Homo sapiens
  misc_RNA (1)...(19): siRNA sense strand
auauauacgggauccuuua

SEQ ID NO: 1303241 - RNA, 19 nt, Homo sapiens
  misc_RNA (1)...(19): siRNA sense strand
cuuaaaggaucaguagcaa

SEQ ID NO: 1303242 - RNA, 19 nt, Homo sapiens
  misc_RNA (1)...(19): siRNA sense strand
uaaaccugaggaaggaaua

SEQ ID NO: 1303243 - RNA, 19 nt, Homo sapiens
  misc_RNA (1)...(19): siRNA sense strand
agaugacgccuguuauaga

SEQ ID NO: 1303244 - RNA, 19 nt, Homo sapiens
  misc_RNA (1)...(19): siRNA sense strand
ugugauuguuauugccaua

SEQ ID NO: 1303245 - RNA, 19 nt, Homo sapiens
  misc_RNA (1)...(19): siRNA sense strand
gagagcacgauuuauugug

SEQ ID NO: 1303246 - RNA, 19 nt, Homo sapiens
  misc_RNA (1)...(19): siRNA sense strand
gaaguauuugaguaucuug

SEQ ID NO: 1303247 - RNA, 19 nt, Homo sapiens
  misc_RNA (1)...(19): siRNA sense strand
ggcuaccugucucagauga

SEQ ID NO: 1303248 - RNA, 19 nt, Homo sapiens
  misc_RNA (1)...(19): siRNA sense strand
gauaucaggauuuggaaaa

SEQ ID NO: 1303249 - RNA, 19 nt, Homo sapiens
  misc_RNA (1)...(19): siRNA sense strand
ccucuugccacccauacua

SEQ ID NO: 1303250 - RNA, 19 nt, Homo sapiens
  misc_RNA (1)...(19): siRNA sense strand
ccaugguguugcugcugua

SEQ ID NO: 1303251 - RNA, 19 nt, Homo sapiens
  misc_RNA (1)...(19): siRNA sense strand
cagaugacgccuguuauag

SEQ ID NO: 1303252 - RNA, 19 nt, Homo sapiens
  misc_RNA (1)...(19): siRNA sense strand
uuggugaacgaguagauua

SEQ ID NO: 1303253 - RNA, 19 nt, Homo sapiens
  misc_RNA (1)...(19): siRNA sense strand
gucauugcugugauuguua

SEQ ID NO: 1303254 - RNA, 19 nt, Homo sapiens
  misc_RNA (1)...(19): siRNA sense strand
ggagccaccaacauuugaa

SEQ ID NO: 1303255 - RNA, 19 nt, Homo sapiens
  misc_RNA (1)...(19): siRNA sense strand
gcgcuuuccuggguugcuu

SEQ ID NO: 1303256 - RNA, 19 nt, Homo sapiens
  misc_RNA (1)...(19): siRNA sense strand
uacuacaaagcaacaguua

SEQ ID NO: 1303257 - RNA, 19 nt, Homo sapiens
  misc_RNA (1)...(19): siRNA sense strand
cuugaugcaguaacuuaua

SEQ ID NO: 1303258 - RNA, 19 nt, Homo sapiens
  misc_RNA (1)...(19): siRNA sense strand
aaacauguccauauauacg

SEQ ID NO: 1303259 - RNA, 19 nt, Homo sapiens
  misc_RNA (1)...(19): siRNA sense strand
guguaaaguggucaaaugu

SEQ ID NO: 1303260 - RNA, 19 nt, Homo sapiens
  misc_RNA (1)...(19): siRNA sense strand
cuuacgaguuugguuauca

SEQ ID NO: 1303261 - RNA, 19 nt, Homo sapiens
  misc_RNA (1)...(19): siRNA sense strand
uacgggauccuuuaaaugg

SEQ ID NO: 1303262 - RNA, 19 nt, Homo sapiens
  misc_RNA (1)...(19): siRNA sense strand
aaccaaaacccuacuauga

SEQ ID NO: 1303263 - RNA, 19 nt, Homo sapiens
  misc_RNA (1)...(19): siRNA sense strand
cccaauaugugaaaagguu

SEQ ID NO: 1303264 - RNA, 19 nt, Homo sapiens
  misc_RNA (1)...(19): siRNA sense strand
cgauggcagcgacacaauu

SEQ ID NO: 1303265 - RNA, 19 nt, Homo sapiens
  misc_RNA (1)...(19): siRNA sense strand
gauccauuuucacuuauug

SEQ ID NO: 1303266 - RNA, 19 nt, Homo sapiens
  misc_RNA (1)...(19): siRNA sense strand
uugaugcaguaacuuauag

SEQ ID NO: 1303267 - RNA, 19 nt, Homo sapiens
  misc_RNA (1)...(19): siRNA sense strand
guaucuugaugcaguaacu

SEQ ID NO: 1303268 - RNA, 19 nt, Homo sapiens
  misc_RNA (1)...(19): siRNA sense strand
caacauuugaagcuaugga

SEQ ID NO: 1303269 - RNA, 19 nt, Homo sapiens
  misc_RNA (1)...(19): siRNA sense strand
gagauuggugaacgaguag

SEQ ID NO: 1303270 - RNA, 19 nt, Homo sapiens
  misc_RNA (1)...(19): siRNA sense strand
ggagagagcacgauuuauu

SEQ ID NO: 1303271 - RNA, 19 nt, Homo sapiens
  misc_RNA (1)...(19): siRNA sense strand
agagaaacauguccauaua

SEQ ID NO: 1303272 - RNA, 19 nt, Homo sapiens
  misc_RNA (1)...(19): siRNA sense strand
cagaugcacuuuauuugua

SEQ ID NO: 1303273 - RNA, 19 nt, Homo sapiens
  misc_RNA (1)...(19): siRNA sense strand
ggacuuacgaguuugguua

SEQ ID NO: 1303274 - RNA, 19 nt, Homo sapiens
  misc_RNA (1)...(19): siRNA sense strand
aaacagauaucaggauuug

SEQ ID NO: 1303275 - RNA, 19 nt, Homo sapiens
  misc_RNA (1)...(19): siRNA sense strand
cuauggagcucauugguaa

SEQ ID NO: 1303276 - RNA, 19 nt, Homo sapiens
  misc_RNA (1)...(19): siRNA sense strand
aaacacaccuuuagugaag

SEQ ID NO: 1303277 - RNA, 19 nt, Homo sapiens
  misc_RNA (1)...(19): siRNA sense strand
gaacuuaaaggaucaguag

SEQ ID NO: 1303278 - RNA, 19 nt, Homo sapiens
  misc_RNA (1)...(19): siRNA sense strand
gaaaacagauaucaggauu

SEQ ID NO: 1303279 - RNA, 19 nt, Homo sapiens
  misc_RNA (1)...(19): siRNA sense strand
uaaaggaucaguagcaauu

SEQ ID NO: 1303280 - RNA, 19 nt, Homo sapiens
  misc_RNA (1)...(19): siRNA sense strand
aaaugggacuuacgaguuu

SEQ ID NO: 1303281 - RNA, 19 nt, Homo sapiens
  misc_RNA (1)...(19): siRNA sense strand
guuaucagaugcacuuuau

SEQ ID NO: 1303282 - RNA, 19 nt, Homo sapiens
  misc_RNA (1)...(19): siRNA sense strand
ugagauuggugaacgagua

SEQ ID NO: 1303283 - RNA, 19 nt, Homo sapiens
  misc_RNA (1)...(19): siRNA sense strand
gugaacgaguagauuauaa

SEQ ID NO: 1303284 - RNA, 19 nt, Homo sapiens
  misc_RNA (1)...(19): siRNA sense strand
gagagagcacgauuuauug

SEQ ID NO: 1303285 - RNA, 19 nt, Homo sapiens
  misc_RNA (1)...(19): siRNA sense strand
caaaugggacuuacgaguu

SEQ ID NO: 1303286 - RNA, 19 nt, Homo sapiens
  misc_RNA (1)...(19): siRNA sense strand
ggucauugcugugauuguu

SEQ ID NO: 1303287 - RNA, 19 nt, Homo sapiens
  misc_RNA (1)...(19): siRNA sense strand
ccagauccauuuucacuua

SEQ ID NO: 1303288 - RNA, 19 nt, Homo sapiens
  misc_RNA (1)...(19): siRNA sense strand
gaaggaauacuugacaguu

SEQ ID NO: 1303289 - RNA, 19 nt, Homo sapiens
  misc_RNA (1)...(19): siRNA sense strand
aaggaauacuugacaguuu

SEQ ID NO: 1303290 - RNA, 19 nt, Homo sapiens
  misc_RNA (1)...(19): siRNA sense strand
ucagaugacgccuguuaua

SEQ ID NO: 1303291 - RNA, 19 nt, Homo sapiens
  misc_RNA (1)...(19): siRNA sense strand
gaaaacacaccuuuaguga

SEQ ID NO: 1303292 - RNA, 19 nt, Homo sapiens
  misc_RNA (1)...(19): siRNA sense strand
gaugacgccuguuauagag

SEQ ID NO: 1303293 - RNA, 19 nt, Homo sapiens
  misc_RNA (1)...(19): siRNA sense strand
gagaaacauguccauauau

SEQ ID NO: 1303294 - RNA, 19 nt, Homo sapiens
  misc_RNA (1)...(19): siRNA sense strand
acgaguagauuauaagugu

SEQ ID NO: 1303295 - RNA, 19 nt, Homo sapiens
  misc_RNA (1)...(19): siRNA sense strand
cuacaaagcaacaguuaug

SEQ ID NO: 1303296 - RNA, 19 nt, Homo sapiens
  misc_RNA (1)...(19): siRNA sense strand
ccaccaacauuugaagcua

SEQ ID NO: 1303297 - RNA, 19 nt, Homo sapiens
  misc_RNA (1)...(19): siRNA sense strand
uauacgggauccuuuaaau

SEQ ID NO: 1303298 - RNA, 19 nt, Homo sapiens
  misc_RNA (1)...(19): siRNA sense strand
cgaguuugguuaucagaug

SEQ ID NO: 1303299 - RNA, 19 nt, Homo sapiens
  misc_RNA (1)...(19): siRNA sense strand
gaacgaguagauuauaagu

SEQ ID NO: 1303300 - RNA, 19 nt, Homo sapiens
  misc_RNA (1)...(19): siRNA sense strand
gugaggagccaccaacauu

SEQ ID NO: 1303301 - RNA, 19 nt, Homo sapiens
  misc_RNA (1)...(19): siRNA sense strand
gauggcagcgacacaauug

SEQ ID NO: 1303302 - RNA, 19 nt, Homo sapiens
  misc_RNA (1)...(19): siRNA sense strand
gcuauggagcucauuggua

SEQ ID NO: 1303303 - RNA, 19 nt, Homo sapiens
  misc_RNA (1)...(19): siRNA sense strand
gaggagccaccaacauuug

SEQ ID NO: 1303304 - RNA, 19 nt, Homo sapiens
  misc_RNA (1)...(19): siRNA sense strand
acacaccuuuagugaagua

SEQ ID NO: 1303305 - RNA, 19 nt, Homo sapiens
  misc_RNA (1)...(19): siRNA sense strand
ucucagaugacgccuguua

SEQ ID NO: 1303306 - RNA, 19 nt, Homo sapiens
  misc_RNA (1)...(19): siRNA sense strand
uagagaaacauguccauau

SEQ ID NO: 1303307 - RNA, 19 nt, Homo sapiens
  misc_RNA (1)...(19): siRNA sense strand
ggugaacgaguagauuaua

SEQ ID NO: 1303308 - RNA, 19 nt, Homo sapiens
  misc_RNA (1)...(19): siRNA sense strand
gaaguagaaguauuugagu

SEQ ID NO: 1303309 - RNA, 19 nt, Homo sapiens
  misc_RNA (1)...(19): siRNA sense strand
gaaacauguccauauauac

SEQ ID NO: 1303310 - RNA, 19 nt, Homo sapiens
  misc_RNA (1)...(19): siRNA sense strand
ugacgccuguuauagagaa

SEQ ID NO: 1303311 - RNA, 19 nt, Homo sapiens
  misc_RNA (1)...(19): siRNA sense strand
cgaguagauuauaagugua

SEQ ID NO: 1303312 - RNA, 19 nt, Homo sapiens
  misc_RNA (1)...(19): siRNA sense strand
gcacuuuauuuguaaugag

SEQ ID NO: 1303313 - RNA, 19 nt, Homo sapiens
  misc_RNA (1)...(19): siRNA sense strand
guagaaguauuugaguauc

SEQ ID NO: 1303314 - RNA, 19 nt, Homo sapiens
  misc_RNA (1)...(19): siRNA sense strand
guauuugaguaucuugaug

SEQ ID NO: 1303315 - RNA, 19 nt, Homo sapiens
  misc_RNA (1)...(19): siRNA sense strand
aggaauacuugacaguuug

SEQ ID NO: 1303316 - RNA, 19 nt, Homo sapiens
  misc_RNA (1)...(19): siRNA sense strand
aguguaaaguggucaaaug

SEQ ID NO: 1303317 - RNA, 19 nt, Homo sapiens
  misc_RNA (1)...(19): siRNA sense strand
ccaaaacccuacuaugaga

SEQ ID NO: 1303318 - RNA, 19 nt, Homo sapiens
  misc_RNA (1)...(19): siRNA sense strand
ccacccauacuauuuguga

SEQ ID NO: 1303319 - RNA, 19 nt, Homo sapiens
  misc_RNA (1)...(19): siRNA sense strand
caccaacauuugaagcuau

SEQ ID NO: 1303320 - RNA, 19 nt, Homo sapiens
  misc_RNA (1)...(19): siRNA sense strand
uuggagagagcacgauuua

SEQ ID NO: 1303321 - RNA, 19 nt, Homo sapiens
  misc_RNA (1)...(19): siRNA sense strand
gguuaucagaugcacuuua

SEQ ID NO: 1303322 - RNA, 19 nt, Homo sapiens
  misc_RNA (1)...(19): siRNA sense strand
ugaggagccaccaacauuu

SEQ ID NO: 1303323 - RNA, 19 nt, Homo sapiens
  misc_RNA (1)...(19): siRNA sense strand
ggaaggaauacuugacagu

SEQ ID NO: 1303324 - RNA, 19 nt, Homo sapiens
  misc_RNA (1)...(19): siRNA sense strand
gaggaaggaauacuugaca

SEQ ID NO: 1303325 - RNA, 19 nt, Homo sapiens
  misc_RNA (1)...(19): siRNA sense strand
ugaguaucuugaugcagua

SEQ ID NO: 1303326 - RNA, 19 nt, Homo sapiens
  misc_RNA (1)...(19): siRNA sense strand
caccuuuagugaaguagaa

SEQ ID NO: 1303327 - RNA, 19 nt, Homo sapiens
  misc_RNA (1)...(19): siRNA sense strand
acagauaucaggauuugga

SEQ ID NO: 1303328 - RNA, 19 nt, Homo sapiens
  misc_RNA (1)...(19): siRNA sense strand
ucauugcugugauuguuau

SEQ ID NO: 1303329 - RNA, 19 nt, Homo sapiens
  misc_RNA (1)...(19): siRNA sense strand
ucagaugcacuuuauuugu

SEQ ID NO: 1303330 - RNA, 19 nt, Homo sapiens
  misc_RNA (1)...(19): siRNA sense strand
gugcugcuccagaguguaa

SEQ ID NO: 1303331 - RNA, 19 nt, Homo sapiens
  misc_RNA (1)...(19): siRNA sense strand
ggaaaacacaccuuuagug

SEQ ID NO: 1303332 - RNA, 19 nt, Homo sapiens
  misc_RNA (1)...(19): siRNA sense strand
aaggaucaguagcaauuug

SEQ ID NO: 1303333 - RNA, 19 nt, Homo sapiens
  misc_RNA (1)...(19): siRNA sense strand
uauauacgggauccuuuaa

SEQ ID NO: 1303334 - RNA, 19 nt, Homo sapiens
  misc_RNA (1)...(19): siRNA sense strand
ugaaguagaaguauuugag

SEQ ID NO: 1303335 - RNA, 19 nt, Homo sapiens
  misc_RNA (1)...(19): siRNA sense strand
cuugacaguuuggauguuu

SEQ ID NO: 1303336 - RNA, 19 nt, Homo sapiens
  misc_RNA (1)...(19): siRNA sense strand
cauauauacgggauccuuu

SEQ ID NO: 1303337 - RNA, 19 nt, Homo sapiens
  misc_RNA (1)...(19): siRNA sense strand
auauauacgggauccuuua

SEQ ID NO: 1303338 - RNA, 19 nt, Homo sapiens
  misc_RNA (1)...(19): siRNA sense strand
cuuaaaggaucaguagcaa

SEQ ID NO: 1303339 - RNA, 19 nt, Homo sapiens
  misc_RNA (1)...(19): siRNA sense strand
uaaaccugaggaaggaaua

SEQ ID NO: 1303340 - RNA, 19 nt, Homo sapiens
  misc_RNA (1)...(19): siRNA sense strand
agaugacgccuguuauaga

SEQ ID NO: 1303341 - RNA, 19 nt, Homo sapiens
  misc_RNA (1)...(19): siRNA sense strand
ugugauuguuauugccaua

SEQ ID NO: 1303342 - RNA, 19 nt, Homo sapiens
  misc_RNA (1)...(19): siRNA sense strand
gagagcacgauuuauugug

SEQ ID NO: 1303343 - RNA, 19 nt, Homo sapiens
  misc_RNA (1)...(19): siRNA sense strand
gaaguauuugaguaucuug

SEQ ID NO: 1303344 - RNA, 19 nt, Homo sapiens
  misc_RNA (1)...(19): siRNA sense strand
ccucuugccacccauacua

SEQ ID NO: 1303345 - RNA, 19 nt, Homo sapiens
  misc_RNA (1)...(19): siRNA sense strand
gauaucaggauuuggaaaa

SEQ ID NO: 1303346 - RNA, 19 nt, Homo sapiens
  misc_RNA (1)...(19): siRNA sense strand
ggcuaccugucucagauga

SEQ ID NO: 1303347 - RNA, 19 nt, Homo sapiens
  misc_RNA (1)...(19): siRNA sense strand
ccaugguguugcugcugua

SEQ ID NO: 1303348 - RNA, 19 nt, Homo sapiens
  misc_RNA (1)...(19): siRNA sense strand
cagaugacgccuguuauag

SEQ ID NO: 1303349 - RNA, 19 nt, Homo sapiens
  misc_RNA (1)...(19): siRNA sense strand
gucauugcugugauuguua

SEQ ID NO: 1303350 - RNA, 19 nt, Homo sapiens
  misc_RNA (1)...(19): siRNA sense strand
uuggugaacgaguagauua

SEQ ID NO: 1303351 - RNA, 19 nt, Homo sapiens
  misc_RNA (1)...(19): siRNA sense strand
ggagccaccaacauuugaa

SEQ ID NO: 1303352 - RNA, 19 nt, Homo sapiens
  misc_RNA (1)...(19): siRNA sense strand
gcgcuuuccuggguugcuu

SEQ ID NO: 1303353 - RNA, 19 nt, Homo sapiens
  misc_RNA (1)...(19): siRNA sense strand
uacuacaaagcaacaguua

SEQ ID NO: 1303354 - RNA, 19 nt, Homo sapiens
  misc_RNA (1)...(19): siRNA sense strand
cuugaugcaguaacuuaua

SEQ ID NO: 1303355 - RNA, 19 nt, Homo sapiens
  misc_RNA (1)...(19): siRNA sense strand
aaacauguccauauauacg

SEQ ID NO: 1303356 - RNA, 19 nt, Homo sapiens
  misc_RNA (1)...(19): siRNA sense strand
guguaaaguggucaaaugu

SEQ ID NO: 1303357 - RNA, 19 nt, Homo sapiens
  misc_RNA (1)...(19): siRNA sense strand
cuuacgaguuugguuauca

SEQ ID NO: 1303358 - RNA, 19 nt, Homo sapiens
  misc_RNA (1)...(19): siRNA sense strand
uacgggauccuuuaaaugg

SEQ ID NO: 1303359 - RNA, 19 nt, Homo sapiens
  misc_RNA (1)...(19): siRNA sense strand
aaccaaaacccuacuauga

SEQ ID NO: 1303360 - RNA, 19 nt, Homo sapiens
  misc_RNA (1)...(19): siRNA sense strand
cccaauaugugaaaagguu

SEQ ID NO: 1303361 - RNA, 19 nt, Homo sapiens
  misc_RNA (1)...(19): siRNA sense strand
cgauggcagcgacacaauu

SEQ ID NO: 1303362 - RNA, 19 nt, Homo sapiens
  misc_RNA (1)...(19): siRNA sense strand
gauccauuuucacuuauug

SEQ ID NO: 1303363 - RNA, 19 nt, Homo sapiens
  misc_RNA (1)...(19): siRNA sense strand
uugaugcaguaacuuauag

SEQ ID NO: 1303364 - RNA, 19 nt, Homo sapiens
  misc_RNA (1)...(19): siRNA sense strand
guaucuugaugcaguaacu

SEQ ID NO: 1303365 - RNA, 19 nt, Homo sapiens
  misc_RNA (1)...(19): siRNA sense strand
caacauuugaagcuaugga

SEQ ID NO: 1303366 - RNA, 19 nt, Homo sapiens
  misc_RNA (1)...(19): siRNA sense strand
gagauuggugaacgaguag

SEQ ID NO: 1303367 - RNA, 19 nt, Homo sapiens
  misc_RNA (1)...(19): siRNA sense strand
ggagagagcacgauuuauu

SEQ ID NO: 1303368 - RNA, 19 nt, Homo sapiens
  misc_RNA (1)...(19): siRNA sense strand
agagaaacauguccauaua

SEQ ID NO: 1303369 - RNA, 19 nt, Homo sapiens
  misc_RNA (1)...(19): siRNA sense strand
cagaugcacuuuauuugua

SEQ ID NO: 1303370 - RNA, 19 nt, Homo sapiens
  misc_RNA (1)...(19): siRNA sense strand
ggacuuacgaguuugguua

SEQ ID NO: 1303371 - RNA, 19 nt, Homo sapiens
  misc_RNA (1)...(19): siRNA sense strand
aaacagauaucaggauuug

SEQ ID NO: 1303372 - RNA, 19 nt, Homo sapiens
  misc_RNA (1)...(19): siRNA sense strand
cuauggagcucauugguaa

SEQ ID NO: 1303373 - RNA, 19 nt, Homo sapiens
  misc_RNA (1)...(19): siRNA sense strand
aaacacaccuuuagugaag

SEQ ID NO: 1303374 - RNA, 19 nt, Homo sapiens
  misc_RNA (1)...(19): siRNA sense strand
gaacuuaaaggaucaguag

SEQ ID NO: 1303375 - RNA, 19 nt, Homo sapiens
  misc_RNA (1)...(19): siRNA sense strand
gaaaacagauaucaggauu

SEQ ID NO: 1303376 - RNA, 19 nt, Homo sapiens
  misc_RNA (1)...(19): siRNA sense strand
uaaaggaucaguagcaauu

SEQ ID NO: 1303377 - RNA, 19 nt, Homo sapiens
  misc_RNA (1)...(19): siRNA sense strand
aaaugggacuuacgaguuu

SEQ ID NO: 1303378 - RNA, 19 nt, Homo sapiens
  misc_RNA (1)...(19): siRNA sense strand
guuaucagaugcacuuuau

SEQ ID NO: 1303379 - RNA, 19 nt, Homo sapiens
  misc_RNA (1)...(19): siRNA sense strand
gagcugaauaugccacuua

SEQ ID NO: 1303380 - RNA, 19 nt, Homo sapiens
  misc_RNA (1)...(19): siRNA sense strand
ugagauuggugaacgagua

SEQ ID NO: 1303381 - RNA, 19 nt, Homo sapiens
  misc_RNA (1)...(19): siRNA sense strand
gugaacgaguagauuauaa

SEQ ID NO: 1303382 - RNA, 19 nt, Homo sapiens
  misc_RNA (1)...(19): siRNA sense strand
gagagagcacgauuuauug

SEQ ID NO: 1303383 - RNA, 19 nt, Homo sapiens
  misc_RNA (1)...(19): siRNA sense strand
caaaugggacuuacgaguu

SEQ ID NO: 1303384 - RNA, 19 nt, Homo sapiens
  misc_RNA (1)...(19): siRNA sense strand
ggucauugcugugauuguu

SEQ ID NO: 1303385 - RNA, 19 nt, Homo sapiens
  misc_RNA (1)...(19): siRNA sense strand
ccagauccauuuucacuua

SEQ ID NO: 1303386 - RNA, 19 nt, Homo sapiens
  misc_RNA (1)...(19): siRNA sense strand
gaaggaauacuugacaguu

SEQ ID NO: 1303387 - RNA, 19 nt, Homo sapiens
  misc_RNA (1)...(19): siRNA sense strand
aaggaauacuugacaguuu

SEQ ID NO: 1303388 - RNA, 19 nt, Homo sapiens
  misc_RNA (1)...(19): siRNA sense strand
ucagaugacgccuguuaua

SEQ ID NO: 1303389 - RNA, 19 nt, Homo sapiens
  misc_RNA (1)...(19): siRNA sense strand
gaaaacacaccuuuaguga

SEQ ID NO: 1303390 - RNA, 19 nt, Homo sapiens
  misc_RNA (1)...(19): siRNA sense strand
gaugacgccuguuauagag

SEQ ID NO: 1303391 - RNA, 19 nt, Homo sapiens
  misc_RNA (1)...(19): siRNA sense strand
gagaaacauguccauauau

SEQ ID NO: 1303392 - RNA, 19 nt, Homo sapiens
  misc_RNA (1)...(19): siRNA sense strand
ccacuuaccagacuaaauc

SEQ ID NO: 1303393 - RNA, 19 nt, Homo sapiens
  misc_RNA (1)...(19): siRNA sense strand
acgaguagauuauaagugu

SEQ ID NO: 1303394 - RNA, 19 nt, Homo sapiens
  misc_RNA (1)...(19): siRNA sense strand
cuacaaagcaacaguuaug

SEQ ID NO: 1303395 - RNA, 19 nt, Homo sapiens
  misc_RNA (1)...(19): siRNA sense strand
ccaccaacauuugaagcua

SEQ ID NO: 1303396 - RNA, 19 nt, Homo sapiens
  misc_RNA (1)...(19): siRNA sense strand
uauacgggauccuuuaaau

SEQ ID NO: 1303397 - RNA, 19 nt, Homo sapiens
  misc_RNA (1)...(19): siRNA sense strand
cgaguuugguuaucagaug

SEQ ID NO: 1303398 - RNA, 19 nt, Homo sapiens
  misc_RNA (1)...(19): siRNA sense strand
gaacgaguagauuauaagu

SEQ ID NO: 1303399 - RNA, 19 nt, Homo sapiens
  misc_RNA (1)...(19): siRNA sense strand
gugaggagccaccaacauu

SEQ ID NO: 1303400 - RNA, 19 nt, Homo sapiens
  misc_RNA (1)...(19): siRNA sense strand
gauggcagcgacacaauug

SEQ ID NO: 1303401 - RNA, 19 nt, Homo sapiens
  misc_RNA (1)...(19): siRNA sense strand
ucucagaugacgccuguua

SEQ ID NO: 1303402 - RNA, 19 nt, Homo sapiens
  misc_RNA (1)...(19): siRNA sense strand
gaggagccaccaacauuug

SEQ ID NO: 1303403 - RNA, 19 nt, Homo sapiens
  misc_RNA (1)...(19): siRNA sense strand
gcuauggagcucauuggua

SEQ ID NO: 1303404 - RNA, 19 nt, Homo sapiens
  misc_RNA (1)...(19): siRNA sense strand
acacaccuuuagugaagua

SEQ ID NO: 1303405 - RNA, 19 nt, Homo sapiens
  misc_RNA (1)...(19): siRNA sense strand
uagagaaacauguccauau

SEQ ID NO: 1303406 - RNA, 19 nt, Homo sapiens
  misc_RNA (1)...(19): siRNA sense strand
ggugaacgaguagauuaua

SEQ ID NO: 1303407 - RNA, 19 nt, Homo sapiens
  misc_RNA (1)...(19): siRNA sense strand
gaaguagaaguauuugagu

SEQ ID NO: 1303408 - RNA, 19 nt, Homo sapiens
  misc_RNA (1)...(19): siRNA sense strand
gaaacauguccauauauac

SEQ ID NO: 1303409 - RNA, 19 nt, Homo sapiens
  misc_RNA (1)...(19): siRNA sense strand
ugacgccuguuauagagaa

SEQ ID NO: 1303410 - RNA, 19 nt, Homo sapiens
  misc_RNA (1)...(19): siRNA sense strand
cgaguagauuauaagugua

SEQ ID NO: 1303411 - RNA, 19 nt, Homo sapiens
  misc_RNA (1)...(19): siRNA sense strand
gcacuuuauuuguaaugag

SEQ ID NO: 1303412 - RNA, 19 nt, Homo sapiens
  misc_RNA (1)...(19): siRNA sense strand
guagaaguauuugaguauc

SEQ ID NO: 1303413 - RNA, 19 nt, Homo sapiens
  misc_RNA (1)...(19): siRNA sense strand
guauuugaguaucuugaug

SEQ ID NO: 1303414 - RNA, 19 nt, Homo sapiens
  misc_RNA (1)...(19): siRNA sense strand
aggaauacuugacaguuug

SEQ ID NO: 1303415 - RNA, 19 nt, Homo sapiens
  misc_RNA (1)...(19): siRNA sense strand
ccaaaacccuacuaugaga

SEQ ID NO: 1303416 - RNA, 19 nt, Homo sapiens
  misc_RNA (1)...(19): siRNA sense strand
aguguaaaguggucaaaug

SEQ ID NO: 1303417 - RNA, 19 nt, Homo sapiens
  misc_RNA (1)...(19): siRNA sense strand
ccacccauacuauuuguga

SEQ ID NO: 1303418 - RNA, 19 nt, Homo sapiens
  misc_RNA (1)...(19): siRNA sense strand
uuggagagagcacgauuua

SEQ ID NO: 1303419 - RNA, 19 nt, Homo sapiens
  misc_RNA (1)...(19): siRNA sense strand
gguuaucagaugcacuuua

SEQ ID NO: 1303420 - RNA, 19 nt, Homo sapiens
  misc_RNA (1)...(19): siRNA sense strand
caccaacauuugaagcuau

SEQ ID NO: 1303421 - RNA, 19 nt, Homo sapiens
  misc_RNA (1)...(19): siRNA sense strand
ugaggagccaccaacauuu

SEQ ID NO: 1303422 - RNA, 19 nt, Homo sapiens
  misc_RNA (1)...(19): siRNA sense strand
ggaaggaauacuugacagu

SEQ ID NO: 1303423 - RNA, 19 nt, Homo sapiens
  misc_RNA (1)...(19): siRNA sense strand
gaggaaggaauacuugaca

SEQ ID NO: 1303424 - RNA, 19 nt, Homo sapiens
  misc_RNA (1)...(19): siRNA sense strand
ugaguaucuugaugcagua

SEQ ID NO: 1303425 - RNA, 19 nt, Homo sapiens
  misc_RNA (1)...(19): siRNA sense strand
caccuuuagugaaguagaa

SEQ ID NO: 1303426 - RNA, 19 nt, Homo sapiens
  misc_RNA (1)...(19): siRNA sense strand
acagauaucaggauuugga

SEQ ID NO: 1303427 - RNA, 19 nt, Homo sapiens
  misc_RNA (1)...(19): siRNA sense strand
ucauugcugugauuguuau

SEQ ID NO: 1303428 - RNA, 19 nt, Homo sapiens
  misc_RNA (1)...(19): siRNA sense strand
ucagaugcacuuuauuugu

SEQ ID NO: 1303429 - RNA, 19 nt, Homo sapiens
  misc_RNA (1)...(19): siRNA sense strand
gugcugcuccagaguguaa

SEQ ID NO: 1303430 - RNA, 19 nt, Homo sapiens
  misc_RNA (1)...(19): siRNA sense strand
ggaaaacacaccuuuagug

SEQ ID NO: 1303431 - RNA, 19 nt, Homo sapiens
  misc_RNA (1)...(19): siRNA sense strand
aaggaucaguagcaauuug

SEQ ID NO: 1303432 - RNA, 19 nt, Homo sapiens
  misc_RNA (1)...(19): siRNA sense strand
uauauacgggauccuuuaa

SEQ ID NO: 1303433 - RNA, 19 nt, Homo sapiens
  misc_RNA (1)...(19): siRNA sense strand
ugaaguagaaguauuugag

SEQ ID NO: 1303434 - RNA, 19 nt, Homo sapiens
  misc_RNA (1)...(19): siRNA sense strand
cuugacaguuuggauguuu

SEQ ID NO: 1303435 - RNA, 19 nt, Homo sapiens
  misc_RNA (1)...(19): siRNA sense strand
cauauauacgggauccuuu

SEQ ID NO: 1303436 - RNA, 19 nt, Homo sapiens
  misc_RNA (1)...(19): siRNA sense strand
auauauacgggauccuuua

SEQ ID NO: 1303437 - RNA, 19 nt, Homo sapiens
  misc_RNA (1)...(19): siRNA sense strand
cuuaaaggaucaguagcaa

SEQ ID NO: 1303438 - RNA, 19 nt, Homo sapiens
  misc_RNA (1)...(19): siRNA sense strand
uaaaccugaggaaggaaua

SEQ ID NO: 1303439 - RNA, 19 nt, Homo sapiens
  misc_RNA (1)...(19): siRNA sense strand
agaugacgccuguuauaga

SEQ ID NO: 1303440 - RNA, 19 nt, Homo sapiens
  misc_RNA (1)...(19): siRNA sense strand
ugugauuguuauugccaua

SEQ ID NO: 1303441 - RNA, 19 nt, Homo sapiens
  misc_RNA (1)...(19): siRNA sense strand
gagagcacgauuuauugug

SEQ ID NO: 1303442 - RNA, 19 nt, Homo sapiens
  misc_RNA (1)...(19): siRNA sense strand
gaaguauuugaguaucuug

SEQ ID NO: 1303443 - RNA, 19 nt, Homo sapiens
  misc_RNA (1)...(19): siRNA sense strand
ggcuaccugucucagauga

SEQ ID NO: 1303444 - RNA, 19 nt, Homo sapiens
  misc_RNA (1)...(19): siRNA sense strand
gauaucaggauuuggaaaa

SEQ ID NO: 1303445 - RNA, 19 nt, Homo sapiens
  misc_RNA (1)...(19): siRNA sense strand
ccucuugccacccauacua

SEQ ID NO: 1303446 - RNA, 19 nt, Homo sapiens
  misc_RNA (1)...(19): siRNA sense strand
ccaugguguugcugcugua

SEQ ID NO: 1303447 - RNA, 19 nt, Homo sapiens
  misc_RNA (1)...(19): siRNA sense strand
cagaugacgccuguuauag

SEQ ID NO: 1303448 - RNA, 19 nt, Homo sapiens
  misc_RNA (1)...(19): siRNA sense strand
cagaugguggagcugaaua

SEQ ID NO: 1303449 - RNA, 19 nt, Homo sapiens
  misc_RNA (1)...(19): siRNA sense strand
uuggugaacgaguagauua

SEQ ID NO: 1303450 - RNA, 19 nt, Homo sapiens
  misc_RNA (1)...(19): siRNA sense strand
gucauugcugugauuguua

SEQ ID NO: 1303451 - RNA, 19 nt, Homo sapiens
  misc_RNA (1)...(19): siRNA sense strand
ggagccaccaacauuugaa

SEQ ID NO: 1303452 - RNA, 19 nt, Homo sapiens
  misc_RNA (1)...(19): siRNA sense strand
gcgcuuuccuggguugcuu

SEQ ID NO: 1303453 - RNA, 19 nt, Homo sapiens
  misc_RNA (1)...(19): siRNA sense strand
uacuacaaagcaacaguua

SEQ ID NO: 1303454 - RNA, 19 nt, Homo sapiens
  misc_RNA (1)...(19): siRNA sense strand
cuugaugcaguaacuuaua

SEQ ID NO: 1303455 - RNA, 19 nt, Homo sapiens
  misc_RNA (1)...(19): siRNA sense strand
aaacauguccauauauacg

SEQ ID NO: 1303456 - RNA, 19 nt, Homo sapiens
  misc_RNA (1)...(19): siRNA sense strand
guguaaaguggucaaaugu

SEQ ID NO: 1303457 - RNA, 19 nt, Homo sapiens
  misc_RNA (1)...(19): siRNA sense strand
cuuacgaguuugguuauca

SEQ ID NO: 1303458 - RNA, 19 nt, Homo sapiens
  misc_RNA (1)...(19): siRNA sense strand
uacgggauccuuuaaaugg

SEQ ID NO: 1303459 - RNA, 19 nt, Homo sapiens
  misc_RNA (1)...(19): siRNA sense strand
gcagaugguggagcugaau

SEQ ID NO: 1303460 - RNA, 19 nt, Homo sapiens
  misc_RNA (1)...(19): siRNA sense strand
aaccaaaacccuacuauga

SEQ ID NO: 1303461 - RNA, 19 nt, Homo sapiens
  misc_RNA (1)...(19): siRNA sense strand
cccaauaugugaaaagguu

SEQ ID NO: 1303462 - RNA, 19 nt, Homo sapiens
  misc_RNA (1)...(19): siRNA sense strand
ggagcugaauaugccacuu

SEQ ID NO: 1303463 - RNA, 19 nt, Homo sapiens
  misc_RNA (1)...(19): siRNA sense strand
cgauggcagcgacacaauu

SEQ ID NO: 1303464 - RNA, 19 nt, Homo sapiens
  misc_RNA (1)...(19): siRNA sense strand
gauccauuuucacuuauug

SEQ ID NO: 1303465 - RNA, 19 nt, Homo sapiens
  misc_RNA (1)...(19): siRNA sense strand
uugaugcaguaacuuauag

SEQ ID NO: 1303466 - RNA, 19 nt, Homo sapiens
  misc_RNA (1)...(19): siRNA sense strand
guaucuugaugcaguaacu

SEQ ID NO: 1303467 - RNA, 19 nt, Homo sapiens
  misc_RNA (1)...(19): siRNA sense strand
ggagagagcacgauuuauu

SEQ ID NO: 1303468 - RNA, 19 nt, Homo sapiens
  misc_RNA (1)...(19): siRNA sense strand
agagaaacauguccauaua

SEQ ID NO: 1303469 - RNA, 19 nt, Homo sapiens
  misc_RNA (1)...(19): siRNA sense strand
cagaugcacuuuauuugua

SEQ ID NO: 1303470 - RNA, 19 nt, Homo sapiens
  misc_RNA (1)...(19): siRNA sense strand
ggacuuacgaguuugguua

SEQ ID NO: 1303471 - RNA, 19 nt, Homo sapiens
  misc_RNA (1)...(19): siRNA sense strand
aaacagauaucaggauuug

SEQ ID NO: 1303472 - RNA, 19 nt, Homo sapiens
  misc_RNA (1)...(19): siRNA sense strand
cuauggagcucauugguaa

SEQ ID NO: 1303473 - RNA, 19 nt, Homo sapiens
  misc_RNA (1)...(19): siRNA sense strand
aaacacaccuuuagugaag

SEQ ID NO: 1303474 - RNA, 19 nt, Homo sapiens
  misc_RNA (1)...(19): siRNA sense strand
gaacuuaaaggaucaguag

SEQ ID NO: 1303475 - RNA, 19 nt, Homo sapiens
  misc_RNA (1)...(19): siRNA sense strand
gaaaacagauaucaggauu

SEQ ID NO: 1303476 - RNA, 19 nt, Homo sapiens
  misc_RNA (1)...(19): siRNA sense strand
uaaaggaucaguagcaauu

SEQ ID NO: 1303477 - RNA, 19 nt, Homo sapiens
  misc_RNA (1)...(19): siRNA sense strand
aaaugggacuuacgaguuu

SEQ ID NO: 1303478 - RNA, 19 nt, Homo sapiens
  misc_RNA (1)...(19): siRNA sense strand
guuaucagaugcacuuuau

SEQ ID NO: 1303479 - RNA, 19 nt, Homo sapiens
  misc_RNA (1)...(19): siRNA sense strand
ugagauuggugaacgagua

SEQ ID NO: 1303480 - RNA, 19 nt, Homo sapiens
  misc_RNA (1)...(19): siRNA sense strand
gugaacgaguagauuauaa

SEQ ID NO: 1303481 - RNA, 19 nt, Homo sapiens
  misc_RNA (1)...(19): siRNA sense strand
gagagagcacgauuuauug

SEQ ID NO: 1303482 - RNA, 19 nt, Homo sapiens
  misc_RNA (1)...(19): siRNA sense strand
caaaugggacuuacgaguu

SEQ ID NO: 1303483 - RNA, 19 nt, Homo sapiens
  misc_RNA (1)...(19): siRNA sense strand
ggucauugcugugauuguu

SEQ ID NO: 1303484 - RNA, 19 nt, Homo sapiens
  misc_RNA (1)...(19): siRNA sense strand
ccagauccauuuucacuua

SEQ ID NO: 1303485 - RNA, 19 nt, Homo sapiens
  misc_RNA (1)...(19): siRNA sense strand
gaaggaauacuugacaguu

SEQ ID NO: 1303486 - RNA, 19 nt, Homo sapiens
  misc_RNA (1)...(19): siRNA sense strand
aaggaauacuugacaguuu

SEQ ID NO: 1303487 - RNA, 19 nt, Homo sapiens
  misc_RNA (1)...(19): siRNA sense strand
ucagaugacgccuguuaua

SEQ ID NO: 1303488 - RNA, 19 nt, Homo sapiens
  misc_RNA (1)...(19): siRNA sense strand
gaaaacacaccuuuaguga

SEQ ID NO: 1303489 - RNA, 19 nt, Homo sapiens
  misc_RNA (1)...(19): siRNA sense strand
gaugacgccuguuauagag

SEQ ID NO: 1303490 - RNA, 19 nt, Homo sapiens
  misc_RNA (1)...(19): siRNA sense strand
gagaaacauguccauauau

SEQ ID NO: 1303491 - RNA, 19 nt, Homo sapiens
  misc_RNA (1)...(19): siRNA sense strand
acgaguagauuauaagugu

SEQ ID NO: 1303492 - RNA, 19 nt, Homo sapiens
  misc_RNA (1)...(19): siRNA sense strand
cuacaaagcaacaguuaug

SEQ ID NO: 1303493 - RNA, 19 nt, Homo sapiens
  misc_RNA (1)...(19): siRNA sense strand
ccaccaacauuugaagcua

SEQ ID NO: 1303494 - RNA, 19 nt, Homo sapiens
  misc_RNA (1)...(19): siRNA sense strand
uauacgggauccuuuaaau

SEQ ID NO: 1303495 - RNA, 19 nt, Homo sapiens
  misc_RNA (1)...(19): siRNA sense strand
cgaguuugguuaucagaug

SEQ ID NO: 1303496 - RNA, 19 nt, Homo sapiens
  misc_RNA (1)...(19): siRNA sense strand
gaacgaguagauuauaagu

SEQ ID NO: 1303497 - RNA, 19 nt, Homo sapiens
  misc_RNA (1)...(19): siRNA sense strand
gugaggagccaccaacauu

SEQ ID NO: 1303498 - RNA, 19 nt, Homo sapiens
  misc_RNA (1)...(19): siRNA sense strand
gauggcagcgacacaauug

SEQ ID NO: 1303499 - RNA, 19 nt, Homo sapiens
  misc_RNA (1)...(19): siRNA sense strand
gcuauggagcucauuggua

SEQ ID NO: 1303500 - RNA, 19 nt, Homo sapiens
  misc_RNA (1)...(19): siRNA sense strand
gaggagccaccaacauuug

SEQ ID NO: 1303501 - RNA, 19 nt, Homo sapiens
  misc_RNA (1)...(19): siRNA sense strand
acacaccuuuagugaagua

SEQ ID NO: 1303502 - RNA, 19 nt, Homo sapiens
  misc_RNA (1)...(19): siRNA sense strand
ucucagaugacgccuguua

SEQ ID NO: 1303503 - RNA, 19 nt, Homo sapiens
  misc_RNA (1)...(19): siRNA sense strand
uagagaaacauguccauau

SEQ ID NO: 1303504 - RNA, 19 nt, Homo sapiens
  misc_RNA (1)...(19): siRNA sense strand
guuccaaagugucuuaaag

SEQ ID NO: 1303505 - RNA, 19 nt, Homo sapiens
  misc_RNA (1)...(19): siRNA sense strand
ggugaacgaguagauuaua

SEQ ID NO: 1303506 - RNA, 19 nt, Homo sapiens
  misc_RNA (1)...(19): siRNA sense strand
gaaguagaaguauuugagu

SEQ ID NO: 1303507 - RNA, 19 nt, Homo sapiens
  misc_RNA (1)...(19): siRNA sense strand
gaaacauguccauauauac

SEQ ID NO: 1303508 - RNA, 19 nt, Homo sapiens
  misc_RNA (1)...(19): siRNA sense strand
ugacgccuguuauagagaa

SEQ ID NO: 1303509 - RNA, 19 nt, Homo sapiens
  misc_RNA (1)...(19): siRNA sense strand
cgaguagauuauaagugua

SEQ ID NO: 1303510 - RNA, 19 nt, Homo sapiens
  misc_RNA (1)...(19): siRNA sense strand
gcacuuuauuuguaaugag

SEQ ID NO: 1303511 - RNA, 19 nt, Homo sapiens
  misc_RNA (1)...(19): siRNA sense strand
guagaaguauuugaguauc

SEQ ID NO: 1303512 - RNA, 19 nt, Homo sapiens
  misc_RNA (1)...(19): siRNA sense strand
guauuugaguaucuugaug

SEQ ID NO: 1303513 - RNA, 19 nt, Homo sapiens
  misc_RNA (1)...(19): siRNA sense strand
aggaauacuugacaguuug

SEQ ID NO: 1303514 - RNA, 19 nt, Homo sapiens
  misc_RNA (1)...(19): siRNA sense strand
ccaaaacccuacuaugaga

SEQ ID NO: 1303515 - RNA, 19 nt, Homo sapiens
  misc_RNA (1)...(19): siRNA sense strand
aguguaaaguggucaaaug

SEQ ID NO: 1303516 - RNA, 19 nt, Homo sapiens
  misc_RNA (1)...(19): siRNA sense strand
ccacccauacuauuuguga

SEQ ID NO: 1303517 - RNA, 19 nt, Homo sapiens
  misc_RNA (1)...(19): siRNA sense strand
caccaacauuugaagcuau

SEQ ID NO: 1303518 - RNA, 19 nt, Homo sapiens
  misc_RNA (1)...(19): siRNA sense strand
uuggagagagcacgauuua

SEQ ID NO: 1303519 - RNA, 19 nt, Homo sapiens
  misc_RNA (1)...(19): siRNA sense strand
gguuaucagaugcacuuua

SEQ ID NO: 1303520 - RNA, 19 nt, Homo sapiens
  misc_RNA (1)...(19): siRNA sense strand
ugaggagccaccaacauuu

SEQ ID NO: 1303521 - RNA, 19 nt, Homo sapiens
  misc_RNA (1)...(19): siRNA sense strand
ggaaggaauacuugacagu

SEQ ID NO: 1303522 - RNA, 19 nt, Homo sapiens
  misc_RNA (1)...(19): siRNA sense strand
gaggaaggaauacuugaca

SEQ ID NO: 1303523 - RNA, 19 nt, Homo sapiens
  misc_RNA (1)...(19): siRNA sense strand
ccaguuccaaagugucuua

SEQ ID NO: 1303524 - RNA, 19 nt, Homo sapiens
  misc_RNA (1)...(19): siRNA sense strand
ugaguaucuugaugcagua

SEQ ID NO: 1303525 - RNA, 19 nt, Homo sapiens
  misc_RNA (1)...(19): siRNA sense strand
caccuuuagugaaguagaa

SEQ ID NO: 1303526 - RNA, 19 nt, Homo sapiens
  misc_RNA (1)...(19): siRNA sense strand
acagauaucaggauuugga

SEQ ID NO: 1303527 - RNA, 19 nt, Homo sapiens
  misc_RNA (1)...(19): siRNA sense strand
ucauugcugugauuguuau

SEQ ID NO: 1303528 - RNA, 19 nt, Homo sapiens
  misc_RNA (1)...(19): siRNA sense strand
ucagaugcacuuuauuugu

SEQ ID NO: 1303529 - RNA, 19 nt, Homo sapiens
  misc_RNA (1)...(19): siRNA sense strand
gugcugcuccagaguguaa

SEQ ID NO: 1303530 - RNA, 19 nt, Homo sapiens
  misc_RNA (1)...(19): siRNA sense strand
ggaaaacacaccuuuagug

SEQ ID NO: 1303531 - RNA, 19 nt, Homo sapiens
  misc_RNA (1)...(19): siRNA sense strand
aaggaucaguagcaauuug

SEQ ID NO: 1303532 - RNA, 19 nt, Homo sapiens
  misc_RNA (1)...(19): siRNA sense strand
uauauacgggauccuuuaa

SEQ ID NO: 1303533 - RNA, 19 nt, Homo sapiens
  misc_RNA (1)...(19): siRNA sense strand
ugaaguagaaguauuugag

SEQ ID NO: 1303534 - RNA, 19 nt, Homo sapiens
  misc_RNA (1)...(19): siRNA sense strand
cuugacaguuuggauguuu

SEQ ID NO: 1303535 - RNA, 19 nt, Homo sapiens
  misc_RNA (1)...(19): siRNA sense strand
cauauauacgggauccuuu

SEQ ID NO: 1303536 - RNA, 19 nt, Homo sapiens
  misc_RNA (1)...(19): siRNA sense strand
auauauacgggauccuuua

SEQ ID NO: 1303537 - RNA, 19 nt, Homo sapiens
  misc_RNA (1)...(19): siRNA sense strand
cuuaaaggaucaguagcaa

SEQ ID NO: 1303538 - RNA, 19 nt, Homo sapiens
  misc_RNA (1)...(19): siRNA sense strand
uaaaccugaggaaggaaua

SEQ ID NO: 1303539 - RNA, 19 nt, Homo sapiens
  misc_RNA (1)...(19): siRNA sense strand
agaugacgccuguuauaga

SEQ ID NO: 1303540 - RNA, 19 nt, Homo sapiens
  misc_RNA (1)...(19): siRNA sense strand
ugugauuguuauugccaua

SEQ ID NO: 1303541 - RNA, 19 nt, Homo sapiens
  misc_RNA (1)...(19): siRNA sense strand
gagagcacgauuuauugug

SEQ ID NO: 1303542 - RNA, 19 nt, Homo sapiens
  misc_RNA (1)...(19): siRNA sense strand
gaaguauuugaguaucuug

SEQ ID NO: 1303543 - RNA, 19 nt, Homo sapiens
  misc_RNA (1)...(19): siRNA sense strand
ggcuaccugucucagauga

SEQ ID NO: 1303544 - RNA, 19 nt, Homo sapiens
  misc_RNA (1)...(19): siRNA sense strand
gauaucaggauuuggaaaa

SEQ ID NO: 1303545 - RNA, 19 nt, Homo sapiens
  misc_RNA (1)...(19): siRNA sense strand
ccucuugccacccauacua

SEQ ID NO: 1303546 - RNA, 19 nt, Homo sapiens
  misc_RNA (1)...(19): siRNA sense strand
ccaugguguugcugcugua

SEQ ID NO: 1303547 - RNA, 19 nt, Homo sapiens
  misc_RNA (1)...(19): siRNA sense strand
cagaugacgccuguuauag

SEQ ID NO: 1303548 - RNA, 19 nt, Homo sapiens
  misc_RNA (1)...(19): siRNA sense strand
uuggugaacgaguagauua

SEQ ID NO: 1303549 - RNA, 19 nt, Homo sapiens
  misc_RNA (1)...(19): siRNA sense strand
gucauugcugugauuguua

SEQ ID NO: 1303550 - RNA, 19 nt, Homo sapiens
  misc_RNA (1)...(19): siRNA sense strand
ggagccaccaacauuugaa

SEQ ID NO: 1303551 - RNA, 19 nt, Homo sapiens
  misc_RNA (1)...(19): siRNA sense strand
gcgcuuuccuggguugcuu

SEQ ID NO: 1303552 - RNA, 19 nt, Homo sapiens
  misc_RNA (1)...(19): siRNA sense strand
uacuacaaagcaacaguua

SEQ ID NO: 1303553 - RNA, 19 nt, Homo sapiens
  misc_RNA (1)...(19): siRNA sense strand
cuugaugcaguaacuuaua

SEQ ID NO: 1303554 - RNA, 19 nt, Homo sapiens
  misc_RNA (1)...(19): siRNA sense strand
aaacauguccauauauacg

SEQ ID NO: 1303555 - RNA, 19 nt, Homo sapiens
  misc_RNA (1)...(19): siRNA sense strand
guguaaaguggucaaaugu

SEQ ID NO: 1303556 - RNA, 19 nt, Homo sapiens
  misc_RNA (1)...(19): siRNA sense strand
cuuacgaguuugguuauca

SEQ ID NO: 1303557 - RNA, 19 nt, Homo sapiens
  misc_RNA (1)...(19): siRNA sense strand
uacgggauccuuuaaaugg

SEQ ID NO: 1303558 - RNA, 19 nt, Homo sapiens
  misc_RNA (1)...(19): siRNA sense strand
aaccaaaacccuacuauga

SEQ ID NO: 1303559 - RNA, 19 nt, Homo sapiens
  misc_RNA (1)...(19): siRNA sense strand
cccaauaugugaaaagguu

SEQ ID NO: 1303560 - RNA, 19 nt, Homo sapiens
  misc_RNA (1)...(19): siRNA sense strand
cgauggcagcgacacaauu

SEQ ID NO: 1303561 - RNA, 19 nt, Homo sapiens
  misc_RNA (1)...(19): siRNA sense strand
gauccauuuucacuuauug

SEQ ID NO: 1303562 - RNA, 19 nt, Homo sapiens
  misc_RNA (1)...(19): siRNA sense strand
uugaugcaguaacuuauag

SEQ ID NO: 1303563 - RNA, 19 nt, Homo sapiens
  misc_RNA (1)...(19): siRNA sense strand
guaucuugaugcaguaacu

SEQ ID NO: 1303564 - RNA, 19 nt, Homo sapiens
  misc_RNA (1)...(19): siRNA sense strand
caacauuugaagcuaugga

SEQ ID NO: 1303565 - RNA, 19 nt, Homo sapiens
  misc_RNA (1)...(19): siRNA sense strand
gagauuggugaacgaguag

SEQ ID NO: 1303566 - RNA, 19 nt, Homo sapiens
  misc_RNA (1)...(19): siRNA sense strand
ggagagagcacgauuuauu

SEQ ID NO: 1303567 - RNA, 19 nt, Homo sapiens
  misc_RNA (1)...(19): siRNA sense strand
agagaaacauguccauaua

SEQ ID NO: 1303568 - RNA, 19 nt, Homo sapiens
  misc_RNA (1)...(19): siRNA sense strand
cagaugcacuuuauuugua

SEQ ID NO: 1303569 - RNA, 19 nt, Homo sapiens
  misc_RNA (1)...(19): siRNA sense strand
ggacuuacgaguuugguua

SEQ ID NO: 1303570 - RNA, 19 nt, Homo sapiens
  misc_RNA (1)...(19): siRNA sense strand
aaacagauaucaggauuug

SEQ ID NO: 1303571 - RNA, 19 nt, Homo sapiens
  misc_RNA (1)...(19): siRNA sense strand
cuauggagcucauugguaa

SEQ ID NO: 1303572 - RNA, 19 nt, Homo sapiens
  misc_RNA (1)...(19): siRNA sense strand
aaacacaccuuuagugaag

SEQ ID NO: 1303573 - RNA, 19 nt, Homo sapiens
  misc_RNA (1)...(19): siRNA sense strand
gaacuuaaaggaucaguag

SEQ ID NO: 1303574 - RNA, 19 nt, Homo sapiens
  misc_RNA (1)...(19): siRNA sense strand
gaaaacagauaucaggauu

SEQ ID NO: 1303575 - RNA, 19 nt, Homo sapiens
  misc_RNA (1)...(19): siRNA sense strand
uaaaggaucaguagcaauu

SEQ ID NO: 1303576 - RNA, 19 nt, Homo sapiens
  misc_RNA (1)...(19): siRNA sense strand
aaaugggacuuacgaguuu

SEQ ID NO: 1303577 - RNA, 19 nt, Homo sapiens
  misc_RNA (1)...(19): siRNA sense strand
guuaucagaugcacuuuau

SEQ ID NO: 1303578 - RNA, 19 nt, Homo sapiens
  misc_RNA (1)...(19): siRNA sense strand
gagcugaauaugccacuua

SEQ ID NO: 1303579 - RNA, 19 nt, Homo sapiens
  misc_RNA (1)...(19): siRNA sense strand
gagcagagaggcugaauag

SEQ ID NO: 1303580 - RNA, 19 nt, Homo sapiens
  misc_RNA (1)...(19): siRNA sense strand
ugagauuggugaacgagua

SEQ ID NO: 1303581 - RNA, 19 nt, Homo sapiens
  misc_RNA (1)...(19): siRNA sense strand
gugaacgaguagauuauaa

SEQ ID NO: 1303582 - RNA, 19 nt, Homo sapiens
  misc_RNA (1)...(19): siRNA sense strand
gagagagcacgauuuauug

SEQ ID NO: 1303583 - RNA, 19 nt, Homo sapiens
  misc_RNA (1)...(19): siRNA sense strand
caaaugggacuuacgaguu

SEQ ID NO: 1303584 - RNA, 19 nt, Homo sapiens
  misc_RNA (1)...(19): siRNA sense strand
ggucauugcugugauuguu

SEQ ID NO: 1303585 - RNA, 19 nt, Homo sapiens
  misc_RNA (1)...(19): siRNA sense strand
ccagauccauuuucacuua

SEQ ID NO: 1303586 - RNA, 19 nt, Homo sapiens
  misc_RNA (1)...(19): siRNA sense strand
gaaggaauacuugacaguu

SEQ ID NO: 1303587 - RNA, 19 nt, Homo sapiens
  misc_RNA (1)...(19): siRNA sense strand
aaggaauacuugacaguuu

SEQ ID NO: 1303588 - RNA, 19 nt, Homo sapiens
  misc_RNA (1)...(19): siRNA sense strand
ucagaugacgccuguuaua

SEQ ID NO: 1303589 - RNA, 19 nt, Homo sapiens
  misc_RNA (1)...(19): siRNA sense strand
gaaaacacaccuuuaguga

SEQ ID NO: 1303590 - RNA, 19 nt, Homo sapiens
  misc_RNA (1)...(19): siRNA sense strand
gaugacgccuguuauagag

SEQ ID NO: 1303591 - RNA, 19 nt, Homo sapiens
  misc_RNA (1)...(19): siRNA sense strand
gagaaacauguccauauau

SEQ ID NO: 1303592 - RNA, 19 nt, Homo sapiens
  misc_RNA (1)...(19): siRNA sense strand
ccacuuaccagacuaaauc

SEQ ID NO: 1303593 - RNA, 19 nt, Homo sapiens
  misc_RNA (1)...(19): siRNA sense strand
acgaguagauuauaagugu

SEQ ID NO: 1303594 - RNA, 19 nt, Homo sapiens
  misc_RNA (1)...(19): siRNA sense strand
cuacaaagcaacaguuaug

SEQ ID NO: 1303595 - RNA, 19 nt, Homo sapiens
  misc_RNA (1)...(19): siRNA sense strand
ccaccaacauuugaagcua

SEQ ID NO: 1303596 - RNA, 19 nt, Homo sapiens
  misc_RNA (1)...(19): siRNA sense strand
uauacgggauccuuuaaau

SEQ ID NO: 1303597 - RNA, 19 nt, Homo sapiens
  misc_RNA (1)...(19): siRNA sense strand
cgaguuugguuaucagaug

SEQ ID NO: 1303598 - RNA, 19 nt, Homo sapiens
  misc_RNA (1)...(19): siRNA sense strand
gaacgaguagauuauaagu

SEQ ID NO: 1303599 - RNA, 19 nt, Homo sapiens
  misc_RNA (1)...(19): siRNA sense strand
gugaggagccaccaacauu

SEQ ID NO: 1303600 - RNA, 19 nt, Homo sapiens
  misc_RNA (1)...(19): siRNA sense strand
gauggcagcgacacaauug

SEQ ID NO: 1303601 - RNA, 19 nt, Homo sapiens
  misc_RNA (1)...(19): siRNA sense strand
ucucagaugacgccuguua

SEQ ID NO: 1303602 - RNA, 19 nt, Homo sapiens
  misc_RNA (1)...(19): siRNA sense strand
acacaccuuuagugaagua

SEQ ID NO: 1303603 - RNA, 19 nt, Homo sapiens
  misc_RNA (1)...(19): siRNA sense strand
gcuauggagcucauuggua

SEQ ID NO: 1303604 - RNA, 19 nt, Homo sapiens
  misc_RNA (1)...(19): siRNA sense strand
gaggagccaccaacauuug

SEQ ID NO: 1303605 - RNA, 19 nt, Homo sapiens
  misc_RNA (1)...(19): siRNA sense strand
uagagaaacauguccauau

SEQ ID NO: 1303606 - RNA, 19 nt, Homo sapiens
  misc_RNA (1)...(19): siRNA sense strand
ggugaacgaguagauuaua

SEQ ID NO: 1303607 - RNA, 19 nt, Homo sapiens
  misc_RNA (1)...(19): siRNA sense strand
gaaguagaaguauuugagu

SEQ ID NO: 1303608 - RNA, 19 nt, Homo sapiens
  misc_RNA (1)...(19): siRNA sense strand
gaaacauguccauauauac

SEQ ID NO: 1303609 - RNA, 19 nt, Homo sapiens
  misc_RNA (1)...(19): siRNA sense strand
ugacgccuguuauagagaa

SEQ ID NO: 1303610 - RNA, 19 nt, Homo sapiens
  misc_RNA (1)...(19): siRNA sense strand
cgaguagauuauaagugua

SEQ ID NO: 1303611 - RNA, 19 nt, Homo sapiens
  misc_RNA (1)...(19): siRNA sense strand
gcacuuuauuuguaaugag

SEQ ID NO: 1303612 - RNA, 19 nt, Homo sapiens
  misc_RNA (1)...(19): siRNA sense strand
guagaaguauuugaguauc

SEQ ID NO: 1303613 - RNA, 19 nt, Homo sapiens
  misc_RNA (1)...(19): siRNA sense strand
guauuugaguaucuugaug

SEQ ID NO: 1303614 - RNA, 19 nt, Homo sapiens
  misc_RNA (1)...(19): siRNA sense strand
aggaauacuugacaguuug

SEQ ID NO: 1303615 - RNA, 19 nt, Homo sapiens
  misc_RNA (1)...(19): siRNA sense strand
ccaaaacccuacuaugaga

SEQ ID NO: 1303616 - RNA, 19 nt, Homo sapiens
  misc_RNA (1)...(19): siRNA sense strand
aguguaaaguggucaaaug

SEQ ID NO: 1303617 - RNA, 19 nt, Homo sapiens
  misc_RNA (1)...(19): siRNA sense strand
ccacccauacuauuuguga

SEQ ID NO: 1303618 - RNA, 19 nt, Homo sapiens
  misc_RNA (1)...(19): siRNA sense strand
uuggagagagcacgauuua

SEQ ID NO: 1303619 - RNA, 19 nt, Homo sapiens
  misc_RNA (1)...(19): siRNA sense strand
gguuaucagaugcacuuua

SEQ ID NO: 1303620 - RNA, 19 nt, Homo sapiens
  misc_RNA (1)...(19): siRNA sense strand
caccaacauuugaagcuau

SEQ ID NO: 1303621 - RNA, 19 nt, Homo sapiens
  misc_RNA (1)...(19): siRNA sense strand
ugaggagccaccaacauuu

SEQ ID NO: 1303622 - RNA, 19 nt, Homo sapiens
  misc_RNA (1)...(19): siRNA sense strand
ggaaggaauacuugacagu

SEQ ID NO: 1303623 - RNA, 19 nt, Homo sapiens
  misc_RNA (1)...(19): siRNA sense strand
gaggaaggaauacuugaca

SEQ ID NO: 1303624 - RNA, 19 nt, Homo sapiens
  misc_RNA (1)...(19): siRNA sense strand
ugaguaucuugaugcagua

SEQ ID NO: 1303625 - RNA, 19 nt, Homo sapiens
  misc_RNA (1)...(19): siRNA sense strand
caccuuuagugaaguagaa

SEQ ID NO: 1303626 - RNA, 19 nt, Homo sapiens
  misc_RNA (1)...(19): siRNA sense strand
acagauaucaggauuugga

SEQ ID NO: 1303627 - RNA, 19 nt, Homo sapiens
  misc_RNA (1)...(19): siRNA sense strand
ucauugcugugauuguuau

SEQ ID NO: 1303628 - RNA, 19 nt, Homo sapiens
  misc_RNA (1)...(19): siRNA sense strand
ucagaugcacuuuauuugu

SEQ ID NO: 1303629 - RNA, 19 nt, Homo sapiens
  misc_RNA (1)...(19): siRNA sense strand
gugcugcuccagaguguaa

SEQ ID NO: 1303630 - RNA, 19 nt, Homo sapiens
  misc_RNA (1)...(19): siRNA sense strand
ggaaaacacaccuuuagug

SEQ ID NO: 1303631 - RNA, 19 nt, Homo sapiens
  misc_RNA (1)...(19): siRNA sense strand
aaggaucaguagcaauuug

SEQ ID NO: 1303632 - RNA, 19 nt, Homo sapiens
  misc_RNA (1)...(19): siRNA sense strand
uauauacgggauccuuuaa

SEQ ID NO: 1303633 - RNA, 19 nt, Homo sapiens
  misc_RNA (1)...(19): siRNA sense strand
ugaaguagaaguauuugag

SEQ ID NO: 1303634 - RNA, 19 nt, Homo sapiens
  misc_RNA (1)...(19): siRNA sense strand
cuugacaguuuggauguuu

SEQ ID NO: 1303635 - RNA, 19 nt, Homo sapiens
  misc_RNA (1)...(19): siRNA sense strand
cauauauacgggauccuuu

SEQ ID NO: 1303636 - RNA, 19 nt, Homo sapiens
  misc_RNA (1)...(19): siRNA sense strand
auauauacgggauccuuua

SEQ ID NO: 1303637 - RNA, 19 nt, Homo sapiens
  misc_RNA (1)...(19): siRNA sense strand
cuuaaaggaucaguagcaa

SEQ ID NO: 1303638 - RNA, 19 nt, Homo sapiens
  misc_RNA (1)...(19): siRNA sense strand
uaaaccugaggaaggaaua

SEQ ID NO: 1303639 - RNA, 19 nt, Homo sapiens
  misc_RNA (1)...(19): siRNA sense strand
agaugacgccuguuauaga

SEQ ID NO: 1303640 - RNA, 19 nt, Homo sapiens
  misc_RNA (1)...(19): siRNA sense strand
ugugauuguuauugccaua

SEQ ID NO: 1303641 - RNA, 19 nt, Homo sapiens
  misc_RNA (1)...(19): siRNA sense strand
gagagcacgauuuauugug

SEQ ID NO: 1303642 - RNA, 19 nt, Homo sapiens
  misc_RNA (1)...(19): siRNA sense strand
gaaguauuugaguaucuug

SEQ ID NO: 1303643 - RNA, 19 nt, Homo sapiens
  misc_RNA (1)...(19): siRNA sense strand
ggcuaccugucucagauga

SEQ ID NO: 1303644 - RNA, 19 nt, Homo sapiens
  misc_RNA (1)...(19): siRNA sense strand
gauaucaggauuuggaaaa

SEQ ID NO: 1303645 - RNA, 19 nt, Homo sapiens
  misc_RNA (1)...(19): siRNA sense strand
ccucuugccacccauacua

SEQ ID NO: 1303646 - RNA, 19 nt, Homo sapiens
  misc_RNA (1)...(19): siRNA sense strand
ccaugguguugcugcugua

SEQ ID NO: 1303647 - RNA, 19 nt, Homo sapiens
  misc_RNA (1)...(19): siRNA sense strand
cagaugacgccuguuauag

SEQ ID NO: 1303648 - RNA, 19 nt, Homo sapiens
  misc_RNA (1)...(19): siRNA sense strand
cagaugguggagcugaaua

SEQ ID NO: 1303649 - RNA, 19 nt, Homo sapiens
  misc_RNA (1)...(19): siRNA sense strand
gucauugcugugauuguua

SEQ ID NO: 1303650 - RNA, 19 nt, Homo sapiens
  misc_RNA (1)...(19): siRNA sense strand
ggagccaccaacauuugaa

SEQ ID NO: 1303651 - RNA, 19 nt, Homo sapiens
  misc_RNA (1)...(19): siRNA sense strand
uuggugaacgaguagauua

SEQ ID NO: 1303652 - RNA, 19 nt, Homo sapiens
  misc_RNA (1)...(19): siRNA sense strand
gcgcuuuccuggguugcuu

SEQ ID NO: 1303653 - RNA, 19 nt, Homo sapiens
  misc_RNA (1)...(19): siRNA sense strand
uacuacaaagcaacaguua

SEQ ID NO: 1303654 - RNA, 19 nt, Homo sapiens
  misc_RNA (1)...(19): siRNA sense strand
cuugaugcaguaacuuaua

SEQ ID NO: 1303655 - RNA, 19 nt, Homo sapiens
  misc_RNA (1)...(19): siRNA sense strand
aaacauguccauauauacg

SEQ ID NO: 1303656 - RNA, 19 nt, Homo sapiens
  misc_RNA (1)...(19): siRNA sense strand
guguaaaguggucaaaugu

SEQ ID NO: 1303657 - RNA, 19 nt, Homo sapiens
  misc_RNA (1)...(19): siRNA sense strand
cuuacgaguuugguuauca

SEQ ID NO: 1303658 - RNA, 19 nt, Homo sapiens
  misc_RNA (1)...(19): siRNA sense strand
uacgggauccuuuaaaugg

SEQ ID NO: 1303659 - RNA, 19 nt, Homo sapiens
  misc_RNA (1)...(19): siRNA sense strand
gcagaugguggagcugaau

SEQ ID NO: 1303660 - RNA, 19 nt, Homo sapiens
  misc_RNA (1)...(19): siRNA sense strand
aaccaaaacccuacuauga

SEQ ID NO: 1303661 - RNA, 19 nt, Homo sapiens
  misc_RNA (1)...(19): siRNA sense strand
uugaugcaguaacuuauag

SEQ ID NO: 1303662 - RNA, 19 nt, Homo sapiens
  misc_RNA (1)...(19): siRNA sense strand
ggagcugaauaugccacuu

SEQ ID NO: 1303663 - RNA, 19 nt, Homo sapiens
  misc_RNA (1)...(19): siRNA sense strand
caacauuugaagcuaugga

SEQ ID NO: 1303664 - RNA, 19 nt, Homo sapiens
  misc_RNA (1)...(19): siRNA sense strand
cgauggcagcgacacaauu

SEQ ID NO: 1303665 - RNA, 19 nt, Homo sapiens
  misc_RNA (1)...(19): siRNA sense strand
gauccauuuucacuuauug

SEQ ID NO: 1303666 - RNA, 19 nt, Homo sapiens
  misc_RNA (1)...(19): siRNA sense strand
ggagagagcacgauuuauu

SEQ ID NO: 1303667 - RNA, 19 nt, Homo sapiens
  misc_RNA (1)...(19): siRNA sense strand
agagaaacauguccauaua

SEQ ID NO: 1303668 - RNA, 19 nt, Homo sapiens
  misc_RNA (1)...(19): siRNA sense strand
cagaugcacuuuauuugua

SEQ ID NO: 1303669 - RNA, 19 nt, Homo sapiens
  misc_RNA (1)...(19): siRNA sense strand
ggacuuacgaguuugguua

SEQ ID NO: 1303670 - RNA, 19 nt, Homo sapiens
  misc_RNA (1)...(19): siRNA sense strand
aaacagauaucaggauuug

SEQ ID NO: 1303671 - RNA, 19 nt, Homo sapiens
  misc_RNA (1)...(19): siRNA sense strand
cuauggagcucauugguaa

SEQ ID NO: 1303672 - RNA, 19 nt, Homo sapiens
  misc_RNA (1)...(19): siRNA sense strand
aaacacaccuuuagugaag

SEQ ID NO: 1303673 - RNA, 19 nt, Homo sapiens
  misc_RNA (1)...(19): siRNA sense strand
gaacuuaaaggaucaguag

SEQ ID NO: 1303674 - RNA, 19 nt, Homo sapiens
  misc_RNA (1)...(19): siRNA sense strand
gaaaacagauaucaggauu

SEQ ID NO: 1303675 - RNA, 19 nt, Homo sapiens
  misc_RNA (1)...(19): siRNA sense strand
uaaaggaucaguagcaauu

SEQ ID NO: 1303676 - RNA, 19 nt, Homo sapiens
  misc_RNA (1)...(19): siRNA sense strand
aaaugggacuuacgaguuu

SEQ ID NO: 1303677 - RNA, 19 nt, Homo sapiens
  misc_RNA (1)...(19): siRNA sense strand
guuaucagaugcacuuuau

SEQ ID NO: 1303678 - RNA, 19 nt, Homo sapiens
  misc_RNA (1)...(19): siRNA sense strand
gagcugaauaugccacuua

SEQ ID NO: 1303679 - RNA, 19 nt, Homo sapiens
  misc_RNA (1)...(19): siRNA sense strand
ugagauuggugaacgagua

SEQ ID NO: 1303680 - RNA, 19 nt, Homo sapiens
  misc_RNA (1)...(19): siRNA sense strand
gugaacgaguagauuauaa

SEQ ID NO: 1303681 - RNA, 19 nt, Homo sapiens
  misc_RNA (1)...(19): siRNA sense strand
gagagagcacgauuuauug

SEQ ID NO: 1303682 - RNA, 19 nt, Homo sapiens
  misc_RNA (1)...(19): siRNA sense strand
caaaugggacuuacgaguu

SEQ ID NO: 1303683 - RNA, 19 nt, Homo sapiens
  misc_RNA (1)...(19): siRNA sense strand
ggucauugcugugauuguu

SEQ ID NO: 1303684 - RNA, 19 nt, Homo sapiens
  misc_RNA (1)...(19): siRNA sense strand
ccagauccauuuucacuua

SEQ ID NO: 1303685 - RNA, 19 nt, Homo sapiens
  misc_RNA (1)...(19): siRNA sense strand
gaaggaauacuugacaguu

SEQ ID NO: 1303686 - RNA, 19 nt, Homo sapiens
  misc_RNA (1)...(19): siRNA sense strand
aaggaauacuugacaguuu

SEQ ID NO: 1303687 - RNA, 19 nt, Homo sapiens
  misc_RNA (1)...(19): siRNA sense strand
ucagaugacgccuguuaua

SEQ ID NO: 1303688 - RNA, 19 nt, Homo sapiens
  misc_RNA (1)...(19): siRNA sense strand
gaaaacacaccuuuaguga

SEQ ID NO: 1303689 - RNA, 19 nt, Homo sapiens
  misc_RNA (1)...(19): siRNA sense strand
gaugacgccuguuauagag

SEQ ID NO: 1303690 - RNA, 19 nt, Homo sapiens
  misc_RNA (1)...(19): siRNA sense strand
gagaaacauguccauauau

SEQ ID NO: 1303691 - RNA, 19 nt, Homo sapiens
  misc_RNA (1)...(19): siRNA sense strand
ccacuuaccagacuaaauc

SEQ ID NO: 1303692 - RNA, 19 nt, Homo sapiens
  misc_RNA (1)...(19): siRNA sense strand
acgaguagauuauaagugu

SEQ ID NO: 1303693 - RNA, 19 nt, Homo sapiens
  misc_RNA (1)...(19): siRNA sense strand
cuacaaagcaacaguuaug

SEQ ID NO: 1303694 - RNA, 19 nt, Homo sapiens
  misc_RNA (1)...(19): siRNA sense strand
ccaccaacauuugaagcua

SEQ ID NO: 1303695 - RNA, 19 nt, Homo sapiens
  misc_RNA (1)...(19): siRNA sense strand
uauacgggauccuuuaaau

SEQ ID NO: 1303696 - RNA, 19 nt, Homo sapiens
  misc_RNA (1)...(19): siRNA sense strand
cgaguuugguuaucagaug

SEQ ID NO: 1303697 - RNA, 19 nt, Homo sapiens
  misc_RNA (1)...(19): siRNA sense strand
gaacgaguagauuauaagu

SEQ ID NO: 1303698 - RNA, 19 nt, Homo sapiens
  misc_RNA (1)...(19): siRNA sense strand
gugaggagccaccaacauu

SEQ ID NO: 1303699 - RNA, 19 nt, Homo sapiens
  misc_RNA (1)...(19): siRNA sense strand
gauggcagcgacacaauug

SEQ ID NO: 1303700 - RNA, 19 nt, Homo sapiens
  misc_RNA (1)...(19): siRNA sense strand
ucucagaugacgccuguua

SEQ ID NO: 1303701 - RNA, 19 nt, Homo sapiens
  misc_RNA (1)...(19): siRNA sense strand
gaggagccaccaacauuug

SEQ ID NO: 1303702 - RNA, 19 nt, Homo sapiens
  misc_RNA (1)...(19): siRNA sense strand
gcuauggagcucauuggua

SEQ ID NO: 1303703 - RNA, 19 nt, Homo sapiens
  misc_RNA (1)...(19): siRNA sense strand
acacaccuuuagugaagua

SEQ ID NO: 1303704 - RNA, 19 nt, Homo sapiens
  misc_RNA (1)...(19): siRNA sense strand
uagagaaacauguccauau

SEQ ID NO: 1303705 - RNA, 19 nt, Homo sapiens
  misc_RNA (1)...(19): siRNA sense strand
guuccaaagugucuuaaag

SEQ ID NO: 1303706 - RNA, 19 nt, Homo sapiens
  misc_RNA (1)...(19): siRNA sense strand
ggugaacgaguagauuaua

SEQ ID NO: 1303707 - RNA, 19 nt, Homo sapiens
  misc_RNA (1)...(19): siRNA sense strand
gaaguagaaguauuugagu

SEQ ID NO: 1303708 - RNA, 19 nt, Homo sapiens
  misc_RNA (1)...(19): siRNA sense strand
gaaacauguccauauauac

SEQ ID NO: 1303709 - RNA, 19 nt, Homo sapiens
  misc_RNA (1)...(19): siRNA sense strand
ugacgccuguuauagagaa

SEQ ID NO: 1303710 - RNA, 19 nt, Homo sapiens
  misc_RNA (1)...(19): siRNA sense strand
cgaguagauuauaagugua

SEQ ID NO: 1303711 - RNA, 19 nt, Homo sapiens
  misc_RNA (1)...(19): siRNA sense strand
gcacuuuauuuguaaugag

SEQ ID NO: 1303712 - RNA, 19 nt, Homo sapiens
  misc_RNA (1)...(19): siRNA sense strand
guagaaguauuugaguauc

SEQ ID NO: 1303713 - RNA, 19 nt, Homo sapiens
  misc_RNA (1)...(19): siRNA sense strand
guauuugaguaucuugaug

SEQ ID NO: 1303714 - RNA, 19 nt, Homo sapiens
  misc_RNA (1)...(19): siRNA sense strand
aggaauacuugacaguuug

SEQ ID NO: 1303715 - RNA, 19 nt, Homo sapiens
  misc_RNA (1)...(19): siRNA sense strand
ccaaaacccuacuaugaga

SEQ ID NO: 1303716 - RNA, 19 nt, Homo sapiens
  misc_RNA (1)...(19): siRNA sense strand
aguguaaaguggucaaaug

SEQ ID NO: 1303717 - RNA, 19 nt, Homo sapiens
  misc_RNA (1)...(19): siRNA sense strand
ccacccauacuauuuguga

SEQ ID NO: 1303718 - RNA, 19 nt, Homo sapiens
  misc_RNA (1)...(19): siRNA sense strand
uuggagagagcacgauuua

SEQ ID NO: 1303719 - RNA, 19 nt, Homo sapiens
  misc_RNA (1)...(19): siRNA sense strand
gguuaucagaugcacuuua

SEQ ID NO: 1303720 - RNA, 19 nt, Homo sapiens
  misc_RNA (1)...(19): siRNA sense strand
caccaacauuugaagcuau

SEQ ID NO: 1303721 - RNA, 19 nt, Homo sapiens
  misc_RNA (1)...(19): siRNA sense strand
ugaggagccaccaacauuu

SEQ ID NO: 1303722 - RNA, 19 nt, Homo sapiens
  misc_RNA (1)...(19): siRNA sense strand
ggaaggaauacuugacagu

SEQ ID NO: 1303723 - RNA, 19 nt, Homo sapiens
  misc_RNA (1)...(19): siRNA sense strand
gaggaaggaauacuugaca

SEQ ID NO: 1303724 - RNA, 19 nt, Homo sapiens
  misc_RNA (1)...(19): siRNA sense strand
ccaguuccaaagugucuua

SEQ ID NO: 1303725 - RNA, 19 nt, Homo sapiens
  misc_RNA (1)...(19): siRNA sense strand
ugaguaucuugaugcagua

SEQ ID NO: 1303726 - RNA, 19 nt, Homo sapiens
  misc_RNA (1)...(19): siRNA sense strand
caccuuuagugaaguagaa

SEQ ID NO: 1303727 - RNA, 19 nt, Homo sapiens
  misc_RNA (1)...(19): siRNA sense strand
acagauaucaggauuugga

SEQ ID NO: 1303728 - RNA, 19 nt, Homo sapiens
  misc_RNA (1)...(19): siRNA sense strand
ucauugcugugauuguuau

SEQ ID NO: 1303729 - RNA, 19 nt, Homo sapiens
  misc_RNA (1)...(19): siRNA sense strand
ucagaugcacuuuauuugu

SEQ ID NO: 1303730 - RNA, 19 nt, Homo sapiens
  misc_RNA (1)...(19): siRNA sense strand
gugcugcuccagaguguaa

SEQ ID NO: 1303731 - RNA, 19 nt, Homo sapiens
  misc_RNA (1)...(19): siRNA sense strand
ggaaaacacaccuuuagug

SEQ ID NO: 1303732 - RNA, 19 nt, Homo sapiens
  misc_RNA (1)...(19): siRNA sense strand
aaggaucaguagcaauuug

SEQ ID NO: 1303733 - RNA, 19 nt, Homo sapiens
  misc_RNA (1)...(19): siRNA sense strand
uauauacgggauccuuuaa

SEQ ID NO: 1303734 - RNA, 19 nt, Homo sapiens
  misc_RNA (1)...(19): siRNA sense strand
ugaaguagaaguauuugag

SEQ ID NO: 1303735 - RNA, 19 nt, Homo sapiens
  misc_RNA (1)...(19): siRNA sense strand
cuugacaguuuggauguuu

SEQ ID NO: 1303736 - RNA, 19 nt, Homo sapiens
  misc_RNA (1)...(19): siRNA sense strand
cauauauacgggauccuuu

SEQ ID NO: 1303737 - RNA, 19 nt, Homo sapiens
  misc_RNA (1)...(19): siRNA sense strand
auauauacgggauccuuua

SEQ ID NO: 1303738 - RNA, 19 nt, Homo sapiens
  misc_RNA (1)...(19): siRNA sense strand
cuuaaaggaucaguagcaa

SEQ ID NO: 1303739 - RNA, 19 nt, Homo sapiens
  misc_RNA (1)...(19): siRNA sense strand
uaaaccugaggaaggaaua

SEQ ID NO: 1303740 - RNA, 19 nt, Homo sapiens
  misc_RNA (1)...(19): siRNA sense strand
agaugacgccuguuauaga

SEQ ID NO: 1303741 - RNA, 19 nt, Homo sapiens
  misc_RNA (1)...(19): siRNA sense strand
ugugauuguuauugccaua

SEQ ID NO: 1303742 - RNA, 19 nt, Homo sapiens
  misc_RNA (1)...(19): siRNA sense strand
gagagcacgauuuauugug

SEQ ID NO: 1303743 - RNA, 19 nt, Homo sapiens
  misc_RNA (1)...(19): siRNA sense strand
gaaguauuugaguaucuug

SEQ ID NO: 1303744 - RNA, 19 nt, Homo sapiens
  misc_RNA (1)...(19): siRNA sense strand
ggcuaccugucucagauga

SEQ ID NO: 1303745 - RNA, 19 nt, Homo sapiens
  misc_RNA (1)...(19): siRNA sense strand
gauaucaggauuuggaaaa

SEQ ID NO: 1303746 - RNA, 19 nt, Homo sapiens
  misc_RNA (1)...(19): siRNA sense strand
ccucuugccacccauacua

SEQ ID NO: 1303747 - RNA, 19 nt, Homo sapiens
  misc_RNA (1)...(19): siRNA sense strand
ccaugguguugcugcugua

SEQ ID NO: 1303748 - RNA, 19 nt, Homo sapiens
  misc_RNA (1)...(19): siRNA sense strand
cagaugacgccuguuauag

SEQ ID NO: 1303749 - RNA, 19 nt, Homo sapiens
  misc_RNA (1)...(19): siRNA sense strand
cagaugguggagcugaaua

SEQ ID NO: 1303750 - RNA, 19 nt, Homo sapiens
  misc_RNA (1)...(19): siRNA sense strand
gucauugcugugauuguua

SEQ ID NO: 1303751 - RNA, 19 nt, Homo sapiens
  misc_RNA (1)...(19): siRNA sense strand
ggagccaccaacauuugaa

SEQ ID NO: 1303752 - RNA, 19 nt, Homo sapiens
  misc_RNA (1)...(19): siRNA sense strand
uuggugaacgaguagauua

SEQ ID NO: 1303753 - RNA, 19 nt, Homo sapiens
  misc_RNA (1)...(19): siRNA sense strand
gcgcuuuccuggguugcuu

SEQ ID NO: 1303754 - RNA, 19 nt, Homo sapiens
  misc_RNA (1)...(19): siRNA sense strand
uacuacaaagcaacaguua

SEQ ID NO: 1303755 - RNA, 19 nt, Homo sapiens
  misc_RNA (1)...(19): siRNA sense strand
cuugaugcaguaacuuaua

SEQ ID NO: 1303756 - RNA, 19 nt, Homo sapiens
  misc_RNA (1)...(19): siRNA sense strand
aaacauguccauauauacg

SEQ ID NO: 1303757 - RNA, 19 nt, Homo sapiens
  misc_RNA (1)...(19): siRNA sense strand
guguaaaguggucaaaugu

SEQ ID NO: 1303758 - RNA, 19 nt, Homo sapiens
  misc_RNA (1)...(19): siRNA sense strand
cuuacgaguuugguuauca

SEQ ID NO: 1303759 - RNA, 19 nt, Homo sapiens
  misc_RNA (1)...(19): siRNA sense strand
uacgggauccuuuaaaugg

SEQ ID NO: 1303760 - RNA, 19 nt, Homo sapiens
  misc_RNA (1)...(19): siRNA sense strand
gcagaugguggagcugaau

SEQ ID NO: 1303761 - RNA, 19 nt, Homo sapiens
  misc_RNA (1)...(19): siRNA sense strand
aaccaaaacccuacuauga

SEQ ID NO: 1303762 - RNA, 19 nt, Homo sapiens
  misc_RNA (1)...(19): siRNA sense strand
uugaugcaguaacuuauag

SEQ ID NO: 1303763 - RNA, 19 nt, Homo sapiens
  misc_RNA (1)...(19): siRNA sense strand
ggagcugaauaugccacuu

SEQ ID NO: 1303764 - RNA, 19 nt, Homo sapiens
  misc_RNA (1)...(19): siRNA sense strand
cgauggcagcgacacaauu

SEQ ID NO: 1303765 - RNA, 19 nt, Homo sapiens
  misc_RNA (1)...(19): siRNA sense strand
gauccauuuucacuuauug

SEQ ID NO: 1303766 - RNA, 19 nt, Homo sapiens
  misc_RNA (1)...(19): siRNA sense strand
ggagagagcacgauuuauu

SEQ ID NO: 1303767 - RNA, 19 nt, Homo sapiens
  misc_RNA (1)...(19): siRNA sense strand
agagaaacauguccauaua

SEQ ID NO: 1303768 - RNA, 19 nt, Homo sapiens
  misc_RNA (1)...(19): siRNA sense strand
cagaugcacuuuauuugua

SEQ ID NO: 1303769 - RNA, 19 nt, Homo sapiens
  misc_RNA (1)...(19): siRNA sense strand
ggacuuacgaguuugguua

SEQ ID NO: 1303770 - RNA, 19 nt, Homo sapiens
  misc_RNA (1)...(19): siRNA sense strand
aaacagauaucaggauuug

SEQ ID NO: 1303771 - RNA, 19 nt, Homo sapiens
  misc_RNA (1)...(19): siRNA sense strand
cuauggagcucauugguaa

SEQ ID NO: 1303772 - RNA, 19 nt, Homo sapiens
  misc_RNA (1)...(19): siRNA sense strand
aaacacaccuuuagugaag

SEQ ID NO: 1303773 - RNA, 19 nt, Homo sapiens
  misc_RNA (1)...(19): siRNA sense strand
gaacuuaaaggaucaguag

SEQ ID NO: 1303774 - RNA, 19 nt, Homo sapiens
  misc_RNA (1)...(19): siRNA sense strand
gaaaacagauaucaggauu

SEQ ID NO: 1303775 - RNA, 19 nt, Homo sapiens
  misc_RNA (1)...(19): siRNA sense strand
uaaaggaucaguagcaauu

SEQ ID NO: 1303776 - RNA, 19 nt, Homo sapiens
  misc_RNA (1)...(19): siRNA sense strand
aaaugggacuuacgaguuu

SEQ ID NO: 1303777 - RNA, 19 nt, Homo sapiens
  misc_RNA (1)...(19): siRNA sense strand
guuaucagaugcacuuuau

SEQ ID NO: 1303778 - RNA, 19 nt, Homo sapiens
  misc_RNA (1)...(19): siRNA sense strand
gagcugaauaugccacuua

SEQ ID NO: 1303779 - RNA, 19 nt, Homo sapiens
  misc_RNA (1)...(19): siRNA sense strand
ugagauuggugaacgagua

SEQ ID NO: 1303780 - RNA, 19 nt, Homo sapiens
  misc_RNA (1)...(19): siRNA sense strand
gugaacgaguagauuauaa

SEQ ID NO: 1303781 - RNA, 19 nt, Homo sapiens
  misc_RNA (1)...(19): siRNA sense strand
gagagagcacgauuuauug

SEQ ID NO: 1303782 - RNA, 19 nt, Homo sapiens
  misc_RNA (1)...(19): siRNA sense strand
caaaugggacuuacgaguu

SEQ ID NO: 1303783 - RNA, 19 nt, Homo sapiens
  misc_RNA (1)...(19): siRNA sense strand
ggucauugcugugauuguu

SEQ ID NO: 1303784 - RNA, 19 nt, Homo sapiens
  misc_RNA (1)...(19): siRNA sense strand
ccagauccauuuucacuua

SEQ ID NO: 1303785 - RNA, 19 nt, Homo sapiens
  misc_RNA (1)...(19): siRNA sense strand
gaaggaauacuugacaguu

SEQ ID NO: 1303786 - RNA, 19 nt, Homo sapiens
  misc_RNA (1)...(19): siRNA sense strand
aaggaauacuugacaguuu

SEQ ID NO: 1303787 - RNA, 19 nt, Homo sapiens
  misc_RNA (1)...(19): siRNA sense strand
ucagaugacgccuguuaua

SEQ ID NO: 1303788 - RNA, 19 nt, Homo sapiens
  misc_RNA (1)...(19): siRNA sense strand
gaaaacacaccuuuaguga

SEQ ID NO: 1303789 - RNA, 19 nt, Homo sapiens
  misc_RNA (1)...(19): siRNA sense strand
gaugacgccuguuauagag

SEQ ID NO: 1303790 - RNA, 19 nt, Homo sapiens
  misc_RNA (1)...(19): siRNA sense strand
gagaaacauguccauauau

SEQ ID NO: 1303791 - RNA, 19 nt, Homo sapiens
  misc_RNA (1)...(19): siRNA sense strand
ccacuuaccagacuaaauc

SEQ ID NO: 1303792 - RNA, 19 nt, Homo sapiens
  misc_RNA (1)...(19): siRNA sense strand
acgaguagauuauaagugu

SEQ ID NO: 1303793 - RNA, 19 nt, Homo sapiens
  misc_RNA (1)...(19): siRNA sense strand
cuacaaagcaacaguuaug

SEQ ID NO: 1303794 - RNA, 19 nt, Homo sapiens
  misc_RNA (1)...(19): siRNA sense strand
ccaccaacauuugaagcua

SEQ ID NO: 1303795 - RNA, 19 nt, Homo sapiens
  misc_RNA (1)...(19): siRNA sense strand
uauacgggauccuuuaaau

SEQ ID NO: 1303796 - RNA, 19 nt, Homo sapiens
  misc_RNA (1)...(19): siRNA sense strand
cgaguuugguuaucagaug

SEQ ID NO: 1303797 - RNA, 19 nt, Homo sapiens
  misc_RNA (1)...(19): siRNA sense strand
gaacgaguagauuauaagu

SEQ ID NO: 1303798 - RNA, 19 nt, Homo sapiens
  misc_RNA (1)...(19): siRNA sense strand
gugaggagccaccaacauu

SEQ ID NO: 1303799 - RNA, 19 nt, Homo sapiens
  misc_RNA (1)...(19): siRNA sense strand
gauggcagcgacacaauug

SEQ ID NO: 1303800 - RNA, 19 nt, Homo sapiens
  misc_RNA (1)...(19): siRNA sense strand
ucucagaugacgccuguua

SEQ ID NO: 1303801 - RNA, 19 nt, Homo sapiens
  misc_RNA (1)...(19): siRNA sense strand
gaggagccaccaacauuug

SEQ ID NO: 1303802 - RNA, 19 nt, Homo sapiens
  misc_RNA (1)...(19): siRNA sense strand
gcuauggagcucauuggua

SEQ ID NO: 1303803 - RNA, 19 nt, Homo sapiens
  misc_RNA (1)...(19): siRNA sense strand
acacaccuuuagugaagua

SEQ ID NO: 1303804 - RNA, 19 nt, Homo sapiens
  misc_RNA (1)...(19): siRNA sense strand
uagagaaacauguccauau

SEQ ID NO: 1303805 - RNA, 19 nt, Homo sapiens
  misc_RNA (1)...(19): siRNA sense strand
guuccaaagugucuuaaag

SEQ ID NO: 1303806 - RNA, 19 nt, Homo sapiens
  misc_RNA (1)...(19): siRNA sense strand
ggugaacgaguagauuaua

SEQ ID NO: 1303807 - RNA, 19 nt, Homo sapiens
  misc_RNA (1)...(19): siRNA sense strand
gaaguagaaguauuugagu

SEQ ID NO: 1303808 - RNA, 19 nt, Homo sapiens
  misc_RNA (1)...(19): siRNA sense strand
gaaacauguccauauauac

SEQ ID NO: 1303809 - RNA, 19 nt, Homo sapiens
  misc_RNA (1)...(19): siRNA sense strand
ugacgccuguuauagagaa

SEQ ID NO: 1303810 - RNA, 19 nt, Homo sapiens
  misc_RNA (1)...(19): siRNA sense strand
cgaguagauuauaagugua

SEQ ID NO: 1303811 - RNA, 19 nt, Homo sapiens
  misc_RNA (1)...(19): siRNA sense strand
gcacuuuauuuguaaugag

SEQ ID NO: 1303812 - RNA, 19 nt, Homo sapiens
  misc_RNA (1)...(19): siRNA sense strand
guagaaguauuugaguauc

SEQ ID NO: 1303813 - RNA, 19 nt, Homo sapiens
  misc_RNA (1)...(19): siRNA sense strand
guauuugaguaucuugaug

SEQ ID NO: 1303814 - RNA, 19 nt, Homo sapiens
  misc_RNA (1)...(19): siRNA sense strand
aggaauacuugacaguuug

SEQ ID NO: 1303815 - RNA, 19 nt, Homo sapiens
  misc_RNA (1)...(19): siRNA sense strand
ccaaaacccuacuaugaga

SEQ ID NO: 1303816 - RNA, 19 nt, Homo sapiens
  misc_RNA (1)...(19): siRNA sense strand
aguguaaaguggucaaaug

SEQ ID NO: 1303817 - RNA, 19 nt, Homo sapiens
  misc_RNA (1)...(19): siRNA sense strand
ccacccauacuauuuguga

SEQ ID NO: 1303818 - RNA, 19 nt, Homo sapiens
  misc_RNA (1)...(19): siRNA sense strand
uuggagagagcacgauuua

SEQ ID NO: 1303819 - RNA, 19 nt, Homo sapiens
  misc_RNA (1)...(19): siRNA sense strand
gguuaucagaugcacuuua

SEQ ID NO: 1303820 - RNA, 19 nt, Homo sapiens
  misc_RNA (1)...(19): siRNA sense strand
caccaacauuugaagcuau

SEQ ID NO: 1303821 - RNA, 19 nt, Homo sapiens
  misc_RNA (1)...(19): siRNA sense strand
ugaggagccaccaacauuu

SEQ ID NO: 1303822 - RNA, 19 nt, Homo sapiens
  misc_RNA (1)...(19): siRNA sense strand
ggaaggaauacuugacagu

SEQ ID NO: 1303823 - RNA, 19 nt, Homo sapiens
  misc_RNA (1)...(19): siRNA sense strand
gaggaaggaauacuugaca

SEQ ID NO: 1303824 - RNA, 19 nt, Homo sapiens
  misc_RNA (1)...(19): siRNA sense strand
ccaguuccaaagugucuua

SEQ ID NO: 1303825 - RNA, 19 nt, Homo sapiens
  misc_RNA (1)...(19): siRNA sense strand
ugaguaucuugaugcagua

SEQ ID NO: 1303826 - RNA, 19 nt, Homo sapiens
  misc_RNA (1)...(19): siRNA sense strand
caccuuuagugaaguagaa

SEQ ID NO: 1303827 - RNA, 19 nt, Homo sapiens
  misc_RNA (1)...(19): siRNA sense strand
acagauaucaggauuugga

SEQ ID NO: 1303828 - RNA, 19 nt, Homo sapiens
  misc_RNA (1)...(19): siRNA sense strand
ucauugcugugauuguuau

SEQ ID NO: 1303829 - RNA, 19 nt, Homo sapiens
  misc_RNA (1)...(19): siRNA sense strand
ucagaugcacuuuauuugu

SEQ ID NO: 1303830 - RNA, 19 nt, Homo sapiens
  misc_RNA (1)...(19): siRNA sense strand
gugcugcuccagaguguaa

SEQ ID NO: 1303831 - RNA, 19 nt, Homo sapiens
  misc_RNA (1)...(19): siRNA sense strand
ggaaaacacaccuuuagug

SEQ ID NO: 1303832 - RNA, 19 nt, Homo sapiens
  misc_RNA (1)...(19): siRNA sense strand
aaggaucaguagcaauuug

SEQ ID NO: 1303833 - RNA, 19 nt, Homo sapiens
  misc_RNA (1)...(19): siRNA sense strand
uauauacgggauccuuuaa

SEQ ID NO: 1303834 - RNA, 19 nt, Homo sapiens
  misc_RNA (1)...(19): siRNA sense strand
ugaaguagaaguauuugag

SEQ ID NO: 1303835 - RNA, 19 nt, Homo sapiens
  misc_RNA (1)...(19): siRNA sense strand
cuugacaguuuggauguuu

SEQ ID NO: 1303836 - RNA, 19 nt, Homo sapiens
  misc_RNA (1)...(19): siRNA sense strand
cauauauacgggauccuuu

SEQ ID NO: 1303837 - RNA, 19 nt, Homo sapiens
  misc_RNA (1)...(19): siRNA sense strand
auauauacgggauccuuua

SEQ ID NO: 1303838 - RNA, 19 nt, Homo sapiens
  misc_RNA (1)...(19): siRNA sense strand
cuuaaaggaucaguagcaa

SEQ ID NO: 1303839 - RNA, 19 nt, Homo sapiens
  misc_RNA (1)...(19): siRNA sense strand
uaaaccugaggaaggaaua

SEQ ID NO: 1303840 - RNA, 19 nt, Homo sapiens
  misc_RNA (1)...(19): siRNA sense strand
agaugacgccuguuauaga

SEQ ID NO: 1303841 - RNA, 19 nt, Homo sapiens
  misc_RNA (1)...(19): siRNA sense strand
ugugauuguuauugccaua

SEQ ID NO: 1303842 - RNA, 19 nt, Homo sapiens
  misc_RNA (1)...(19): siRNA sense strand
gagagcacgauuuauugug

SEQ ID NO: 1303843 - RNA, 19 nt, Homo sapiens
  misc_RNA (1)...(19): siRNA sense strand
gaaguauuugaguaucuug

SEQ ID NO: 1303844 - RNA, 19 nt, Homo sapiens
  misc_RNA (1)...(19): siRNA sense strand
ggcuaccugucucagauga

SEQ ID NO: 1303845 - RNA, 19 nt, Homo sapiens
  misc_RNA (1)...(19): siRNA sense strand
gauaucaggauuuggaaaa

SEQ ID NO: 1303846 - RNA, 19 nt, Homo sapiens
  misc_RNA (1)...(19): siRNA sense strand
ccucuugccacccauacua

SEQ ID NO: 1303847 - RNA, 19 nt, Homo sapiens
  misc_RNA (1)...(19): siRNA sense strand
ccaugguguugcugcugua

SEQ ID NO: 1303848 - RNA, 19 nt, Homo sapiens
  misc_RNA (1)...(19): siRNA sense strand
cagaugacgccuguuauag

SEQ ID NO: 1303849 - RNA, 19 nt, Homo sapiens
  misc_RNA (1)...(19): siRNA sense strand
cagaugguggagcugaaua

SEQ ID NO: 1303850 - RNA, 19 nt, Homo sapiens
  misc_RNA (1)...(19): siRNA sense strand
gucauugcugugauuguua

SEQ ID NO: 1303851 - RNA, 19 nt, Homo sapiens
  misc_RNA (1)...(19): siRNA sense strand
ggagccaccaacauuugaa

SEQ ID NO: 1303852 - RNA, 19 nt, Homo sapiens
  misc_RNA (1)...(19): siRNA sense strand
uuggugaacgaguagauua

SEQ ID NO: 1303853 - RNA, 19 nt, Homo sapiens
  misc_RNA (1)...(19): siRNA sense strand
gcgcuuuccuggguugcuu

SEQ ID NO: 1303854 - RNA, 19 nt, Homo sapiens
  misc_RNA (1)...(19): siRNA sense strand
uacuacaaagcaacaguua

SEQ ID NO: 1303855 - RNA, 19 nt, Homo sapiens
  misc_RNA (1)...(19): siRNA sense strand
cuugaugcaguaacuuaua

SEQ ID NO: 1303856 - RNA, 19 nt, Homo sapiens
  misc_RNA (1)...(19): siRNA sense strand
aaacauguccauauauacg

SEQ ID NO: 1303857 - RNA, 19 nt, Homo sapiens
  misc_RNA (1)...(19): siRNA sense strand
guguaaaguggucaaaugu

SEQ ID NO: 1303858 - RNA, 19 nt, Homo sapiens
  misc_RNA (1)...(19): siRNA sense strand
cuuacgaguuugguuauca

SEQ ID NO: 1303859 - RNA, 19 nt, Homo sapiens
  misc_RNA (1)...(19): siRNA sense strand
uacgggauccuuuaaaugg

SEQ ID NO: 1303860 - RNA, 19 nt, Homo sapiens
  misc_RNA (1)...(19): siRNA sense strand
gcagaugguggagcugaau

SEQ ID NO: 1303861 - RNA, 19 nt, Homo sapiens
  misc_RNA (1)...(19): siRNA sense strand
aaccaaaacccuacuauga

SEQ ID NO: 1303862 - RNA, 19 nt, Homo sapiens
  misc_RNA (1)...(19): siRNA sense strand
uugaugcaguaacuuauag

SEQ ID NO: 1303863 - RNA, 19 nt, Homo sapiens
  misc_RNA (1)...(19): siRNA sense strand
ggagcugaauaugccacuu

SEQ ID NO: 1303864 - RNA, 19 nt, Homo sapiens
  misc_RNA (1)...(19): siRNA sense strand
cgauggcagcgacacaauu

SEQ ID NO: 1303865 - RNA, 19 nt, Homo sapiens
  misc_RNA (1)...(19): siRNA sense strand
gauccauuuucacuuauug

SEQ ID NO: 1303866 - RNA, 19 nt, Homo sapiens
  misc_RNA (1)...(19): siRNA sense strand
ggagagagcacgauuuauu

SEQ ID NO: 1303867 - RNA, 19 nt, Homo sapiens
  misc_RNA (1)...(19): siRNA sense strand
agagaaacauguccauaua

SEQ ID NO: 1303868 - RNA, 19 nt, Homo sapiens
  misc_RNA (1)...(19): siRNA sense strand
cagaugcacuuuauuugua

SEQ ID NO: 1303869 - RNA, 19 nt, Homo sapiens
  misc_RNA (1)...(19): siRNA sense strand
ggacuuacgaguuugguua

SEQ ID NO: 1303870 - RNA, 19 nt, Homo sapiens
  misc_RNA (1)...(19): siRNA sense strand
aaacagauaucaggauuug

SEQ ID NO: 1303871 - RNA, 19 nt, Homo sapiens
  misc_RNA (1)...(19): siRNA sense strand
cuauggagcucauugguaa

SEQ ID NO: 1303872 - RNA, 19 nt, Homo sapiens
  misc_RNA (1)...(19): siRNA sense strand
aaacacaccuuuagugaag

SEQ ID NO: 1303873 - RNA, 19 nt, Homo sapiens
  misc_RNA (1)...(19): siRNA sense strand
gaacuuaaaggaucaguag

SEQ ID NO: 1303874 - RNA, 19 nt, Homo sapiens
  misc_RNA (1)...(19): siRNA sense strand
gaaaacagauaucaggauu

SEQ ID NO: 1303875 - RNA, 19 nt, Homo sapiens
  misc_RNA (1)...(19): siRNA sense strand
uaaaggaucaguagcaauu

SEQ ID NO: 1303876 - RNA, 19 nt, Homo sapiens
  misc_RNA (1)...(19): siRNA sense strand
aaaugggacuuacgaguuu

SEQ ID NO: 1303877 - RNA, 19 nt, Homo sapiens
  misc_RNA (1)...(19): siRNA sense strand
guuaucagaugcacuuuau

SEQ ID NO: 1303878 - RNA, 19 nt, Homo sapiens
  misc_RNA (1)...(19): siRNA sense strand
gagcugaauaugccacuua

SEQ ID NO: 1303879 - RNA, 19 nt, Homo sapiens
  misc_RNA (1)...(19): siRNA sense strand
ugagauuggugaacgagua

SEQ ID NO: 1303880 - RNA, 19 nt, Homo sapiens
  misc_RNA (1)...(19): siRNA sense strand
gugaacgaguagauuauaa

SEQ ID NO: 1303881 - RNA, 19 nt, Homo sapiens
  misc_RNA (1)...(19): siRNA sense strand
gagagagcacgauuuauug

SEQ ID NO: 1303882 - RNA, 19 nt, Homo sapiens
  misc_RNA (1)...(19): siRNA sense strand
caaaugggacuuacgaguu

SEQ ID NO: 1303883 - RNA, 19 nt, Homo sapiens
  misc_RNA (1)...(19): siRNA sense strand
ggucauugcugugauuguu

SEQ ID NO: 1303884 - RNA, 19 nt, Homo sapiens
  misc_RNA (1)...(19): siRNA sense strand
ccagauccauuuucacuua

SEQ ID NO: 1303885 - RNA, 19 nt, Homo sapiens
  misc_RNA (1)...(19): siRNA sense strand
gaaggaauacuugacaguu

SEQ ID NO: 1303886 - RNA, 19 nt, Homo sapiens
  misc_RNA (1)...(19): siRNA sense strand
aaggaauacuugacaguuu

SEQ ID NO: 1303887 - RNA, 19 nt, Homo sapiens
  misc_RNA (1)...(19): siRNA sense strand
ucagaugacgccuguuaua

SEQ ID NO: 1303888 - RNA, 19 nt, Homo sapiens
  misc_RNA (1)...(19): siRNA sense strand
gaaaacacaccuuuaguga

SEQ ID NO: 1303889 - RNA, 19 nt, Homo sapiens
  misc_RNA (1)...(19): siRNA sense strand
gaugacgccuguuauagag

SEQ ID NO: 1303890 - RNA, 19 nt, Homo sapiens
  misc_RNA (1)...(19): siRNA sense strand
gagaaacauguccauauau

SEQ ID NO: 1303891 - RNA, 19 nt, Homo sapiens
  misc_RNA (1)...(19): siRNA sense strand
ccacuuaccagacuaaauc

SEQ ID NO: 1303892 - RNA, 19 nt, Homo sapiens
  misc_RNA (1)...(19): siRNA sense strand
acgaguagauuauaagugu

SEQ ID NO: 1303893 - RNA, 19 nt, Homo sapiens
  misc_RNA (1)...(19): siRNA sense strand
cuacaaagcaacaguuaug

SEQ ID NO: 1303894 - RNA, 19 nt, Homo sapiens
  misc_RNA (1)...(19): siRNA sense strand
ccaccaacauuugaagcua

SEQ ID NO: 1303895 - RNA, 19 nt, Homo sapiens
  misc_RNA (1)...(19): siRNA sense strand
uauacgggauccuuuaaau

SEQ ID NO: 1303896 - RNA, 19 nt, Homo sapiens
  misc_RNA (1)...(19): siRNA sense strand
cgaguuugguuaucagaug

SEQ ID NO: 1303897 - RNA, 19 nt, Homo sapiens
  misc_RNA (1)...(19): siRNA sense strand
gaacgaguagauuauaagu

SEQ ID NO: 1303898 - RNA, 19 nt, Homo sapiens
  misc_RNA (1)...(19): siRNA sense strand
gugaggagccaccaacauu

SEQ ID NO: 1303899 - RNA, 19 nt, Homo sapiens
  misc_RNA (1)...(19): siRNA sense strand
gauggcagcgacacaauug

SEQ ID NO: 1303900 - RNA, 19 nt, Homo sapiens
  misc_RNA (1)...(19): siRNA sense strand
ucucagaugacgccuguua

SEQ ID NO: 1303901 - RNA, 19 nt, Homo sapiens
  misc_RNA (1)...(19): siRNA sense strand
gaggagccaccaacauuug

SEQ ID NO: 1303902 - RNA, 19 nt, Homo sapiens
  misc_RNA (1)...(19): siRNA sense strand
gcuauggagcucauuggua

SEQ ID NO: 1303903 - RNA, 19 nt, Homo sapiens
  misc_RNA (1)...(19): siRNA sense strand
acacaccuuuagugaagua

SEQ ID NO: 1303904 - RNA, 19 nt, Homo sapiens
  misc_RNA (1)...(19): siRNA sense strand
uagagaaacauguccauau

SEQ ID NO: 1303905 - RNA, 19 nt, Homo sapiens
  misc_RNA (1)...(19): siRNA sense strand
guuccaaagugucuuaaag

SEQ ID NO: 1303906 - RNA, 19 nt, Homo sapiens
  misc_RNA (1)...(19): siRNA sense strand
ggugaacgaguagauuaua

SEQ ID NO: 1303907 - RNA, 19 nt, Homo sapiens
  misc_RNA (1)...(19): siRNA sense strand
gaaguagaaguauuugagu

SEQ ID NO: 1303908 - RNA, 19 nt, Homo sapiens
  misc_RNA (1)...(19): siRNA sense strand
gaaacauguccauauauac

SEQ ID NO: 1303909 - RNA, 19 nt, Homo sapiens
  misc_RNA (1)...(19): siRNA sense strand
ugacgccuguuauagagaa

SEQ ID NO: 1303910 - RNA, 19 nt, Homo sapiens
  misc_RNA (1)...(19): siRNA sense strand
cgaguagauuauaagugua

SEQ ID NO: 1303911 - RNA, 19 nt, Homo sapiens
  misc_RNA (1)...(19): siRNA sense strand
gcacuuuauuuguaaugag

SEQ ID NO: 1303912 - RNA, 19 nt, Homo sapiens
  misc_RNA (1)...(19): siRNA sense strand
guagaaguauuugaguauc

SEQ ID NO: 1303913 - RNA, 19 nt, Homo sapiens
  misc_RNA (1)...(19): siRNA sense strand
guauuugaguaucuugaug

SEQ ID NO: 1303914 - RNA, 19 nt, Homo sapiens
  misc_RNA (1)...(19): siRNA sense strand
aggaauacuugacaguuug

SEQ ID NO: 1303915 - RNA, 19 nt, Homo sapiens
  misc_RNA (1)...(19): siRNA sense strand
ccaaaacccuacuaugaga

SEQ ID NO: 1303916 - RNA, 19 nt, Homo sapiens
  misc_RNA (1)...(19): siRNA sense strand
aguguaaaguggucaaaug

SEQ ID NO: 1303917 - RNA, 19 nt, Homo sapiens
  misc_RNA (1)...(19): siRNA sense strand
ccacccauacuauuuguga

SEQ ID NO: 1303918 - RNA, 19 nt, Homo sapiens
  misc_RNA (1)...(19): siRNA sense strand
uuggagagagcacgauuua

SEQ ID NO: 1303919 - RNA, 19 nt, Homo sapiens
  misc_RNA (1)...(19): siRNA sense strand
gguuaucagaugcacuuua

SEQ ID NO: 1303920 - RNA, 19 nt, Homo sapiens
  misc_RNA (1)...(19): siRNA sense strand
caccaacauuugaagcuau

SEQ ID NO: 1303921 - RNA, 19 nt, Homo sapiens
  misc_RNA (1)...(19): siRNA sense strand
ugaggagccaccaacauuu

SEQ ID NO: 1303922 - RNA, 19 nt, Homo sapiens
  misc_RNA (1)...(19): siRNA sense strand
ggaaggaauacuugacagu

SEQ ID NO: 1303923 - RNA, 19 nt, Homo sapiens
  misc_RNA (1)...(19): siRNA sense strand
gaggaaggaauacuugaca

SEQ ID NO: 1303924 - RNA, 19 nt, Homo sapiens
  misc_RNA (1)...(19): siRNA sense strand
ccaguuccaaagugucuua

SEQ ID NO: 1303925 - RNA, 19 nt, Homo sapiens
  misc_RNA (1)...(19): siRNA sense strand
ugaguaucuugaugcagua

SEQ ID NO: 1303926 - RNA, 19 nt, Homo sapiens
  misc_RNA (1)...(19): siRNA sense strand
caccuuuagugaaguagaa

SEQ ID NO: 1303927 - RNA, 19 nt, Homo sapiens
  misc_RNA (1)...(19): siRNA sense strand
acagauaucaggauuugga

SEQ ID NO: 1303928 - RNA, 19 nt, Homo sapiens
  misc_RNA (1)...(19): siRNA sense strand
ucauugcugugauuguuau

SEQ ID NO: 1303929 - RNA, 19 nt, Homo sapiens
  misc_RNA (1)...(19): siRNA sense strand
ucagaugcacuuuauuugu

SEQ ID NO: 1303930 - RNA, 19 nt, Homo sapiens
  misc_RNA (1)...(19): siRNA sense strand
gugcugcuccagaguguaa

SEQ ID NO: 1303931 - RNA, 19 nt, Homo sapiens
  misc_RNA (1)...(19): siRNA sense strand
ggaaaacacaccuuuagug

SEQ ID NO: 1303932 - RNA, 19 nt, Homo sapiens
  misc_RNA (1)...(19): siRNA sense strand
aaggaucaguagcaauuug

SEQ ID NO: 1303933 - RNA, 19 nt, Homo sapiens
  misc_RNA (1)...(19): siRNA sense strand
uauauacgggauccuuuaa

SEQ ID NO: 1303934 - RNA, 19 nt, Homo sapiens
  misc_RNA (1)...(19): siRNA sense strand
ugaaguagaaguauuugag

SEQ ID NO: 1303935 - RNA, 19 nt, Homo sapiens
  misc_RNA (1)...(19): siRNA sense strand
cuugacaguuuggauguuu

SEQ ID NO: 1303936 - RNA, 19 nt, Homo sapiens
  misc_RNA (1)...(19): siRNA sense strand
cauauauacgggauccuuu

SEQ ID NO: 1303937 - RNA, 19 nt, Homo sapiens
  misc_RNA (1)...(19): siRNA sense strand
auauauacgggauccuuua

SEQ ID NO: 1303938 - RNA, 19 nt, Homo sapiens
  misc_RNA (1)...(19): siRNA sense strand
cuuaaaggaucaguagcaa

SEQ ID NO: 1303939 - RNA, 19 nt, Homo sapiens
  misc_RNA (1)...(19): siRNA sense strand
uaaaccugaggaaggaaua

SEQ ID NO: 1303940 - RNA, 19 nt, Homo sapiens
  misc_RNA (1)...(19): siRNA sense strand
agaugacgccuguuauaga

SEQ ID NO: 1303941 - RNA, 19 nt, Homo sapiens
  misc_RNA (1)...(19): siRNA sense strand
ugugauuguuauugccaua

SEQ ID NO: 1303942 - RNA, 19 nt, Homo sapiens
  misc_RNA (1)...(19): siRNA sense strand
gagagcacgauuuauugug

SEQ ID NO: 1303943 - RNA, 19 nt, Homo sapiens
  misc_RNA (1)...(19): siRNA sense strand
gaaguauuugaguaucuug

SEQ ID NO: 1303944 - RNA, 19 nt, Homo sapiens
  misc_RNA (1)...(19): siRNA sense strand
ggcuaccugucucagauga

SEQ ID NO: 1303945 - RNA, 19 nt, Homo sapiens
  misc_RNA (1)...(19): siRNA sense strand
gauaucaggauuuggaaaa

SEQ ID NO: 1303946 - RNA, 19 nt, Homo sapiens
  misc_RNA (1)...(19): siRNA sense strand
ccucuugccacccauacua

SEQ ID NO: 1303947 - RNA, 19 nt, Homo sapiens
  misc_RNA (1)...(19): siRNA sense strand
ccaugguguugcugcugua

SEQ ID NO: 1303948 - RNA, 19 nt, Homo sapiens
  misc_RNA (1)...(19): siRNA sense strand
cagaugacgccuguuauag

SEQ ID NO: 1303949 - RNA, 19 nt, Homo sapiens
  misc_RNA (1)...(19): siRNA sense strand
cagaugguggagcugaaua

SEQ ID NO: 1303950 - RNA, 19 nt, Homo sapiens
  misc_RNA (1)...(19): siRNA sense strand
gucauugcugugauuguua

SEQ ID NO: 1303951 - RNA, 19 nt, Homo sapiens
  misc_RNA (1)...(19): siRNA sense strand
ggagccaccaacauuugaa

SEQ ID NO: 1303952 - RNA, 19 nt, Homo sapiens
  misc_RNA (1)...(19): siRNA sense strand
uuggugaacgaguagauua

SEQ ID NO: 1303953 - RNA, 19 nt, Homo sapiens
  misc_RNA (1)...(19): siRNA sense strand
gcgcuuuccuggguugcuu

SEQ ID NO: 1303954 - RNA, 19 nt, Homo sapiens
  misc_RNA (1)...(19): siRNA sense strand
uacuacaaagcaacaguua

SEQ ID NO: 1303955 - RNA, 19 nt, Homo sapiens
  misc_RNA (1)...(19): siRNA sense strand
cuugaugcaguaacuuaua

SEQ ID NO: 1303956 - RNA, 19 nt, Homo sapiens
  misc_RNA (1)...(19): siRNA sense strand
aaacauguccauauauacg

SEQ ID NO: 1303957 - RNA, 19 nt, Homo sapiens
  misc_RNA (1)...(19): siRNA sense strand
guguaaaguggucaaaugu

SEQ ID NO: 1303958 - RNA, 19 nt, Homo sapiens
  misc_RNA (1)...(19): siRNA sense strand
cuuacgaguuugguuauca

SEQ ID NO: 1303959 - RNA, 19 nt, Homo sapiens
  misc_RNA (1)...(19): siRNA sense strand
uacgggauccuuuaaaugg

SEQ ID NO: 1303960 - RNA, 19 nt, Homo sapiens
  misc_RNA (1)...(19): siRNA sense strand
gcagaugguggagcugaau

SEQ ID NO: 1303961 - RNA, 19 nt, Homo sapiens
  misc_RNA (1)...(19): siRNA sense strand
aaccaaaacccuacuauga

SEQ ID NO: 1303962 - RNA, 19 nt, Homo sapiens
  misc_RNA (1)...(19): siRNA sense strand
uugaugcaguaacuuauag

SEQ ID NO: 1303963 - RNA, 19 nt, Homo sapiens
  misc_RNA (1)...(19): siRNA sense strand
ggagcugaauaugccacuu

SEQ ID NO: 1303964 - RNA, 19 nt, Homo sapiens
  misc_RNA (1)...(19): siRNA sense strand
cgauggcagcgacacaauu

SEQ ID NO: 1303965 - RNA, 19 nt, Homo sapiens
  misc_RNA (1)...(19): siRNA sense strand
gauccauuuucacuuauug

SEQ ID NO: 1303966 - RNA, 19 nt, Homo sapiens
  misc_RNA (1)...(19): siRNA sense strand
ggagagagcacgauuuauu

SEQ ID NO: 1303967 - RNA, 19 nt, Homo sapiens
  misc_RNA (1)...(19): siRNA sense strand
agagaaacauguccauaua

SEQ ID NO: 1303968 - RNA, 19 nt, Homo sapiens
  misc_RNA (1)...(19): siRNA sense strand
cagaugcacuuuauuugua

SEQ ID NO: 1303969 - RNA, 19 nt, Homo sapiens
  misc_RNA (1)...(19): siRNA sense strand
ggacuuacgaguuugguua

SEQ ID NO: 1303970 - RNA, 19 nt, Homo sapiens
  misc_RNA (1)...(19): siRNA sense strand
aaacagauaucaggauuug

SEQ ID NO: 1303971 - RNA, 19 nt, Homo sapiens
  misc_RNA (1)...(19): siRNA sense strand
cuauggagcucauugguaa

SEQ ID NO: 1303972 - RNA, 19 nt, Homo sapiens
  misc_RNA (1)...(19): siRNA sense strand
aaacacaccuuuagugaag

SEQ ID NO: 1303973 - RNA, 19 nt, Homo sapiens
  misc_RNA (1)...(19): siRNA sense strand
gaacuuaaaggaucaguag

SEQ ID NO: 1303974 - RNA, 19 nt, Homo sapiens
  misc_RNA (1)...(19): siRNA sense strand
gaaaacagauaucaggauu

SEQ ID NO: 1303975 - RNA, 19 nt, Homo sapiens
  misc_RNA (1)...(19): siRNA sense strand
uaaaggaucaguagcaauu

SEQ ID NO: 1303976 - RNA, 19 nt, Homo sapiens
  misc_RNA (1)...(19): siRNA sense strand
aaaugggacuuacgaguuu

SEQ ID NO: 1303977 - RNA, 19 nt, Homo sapiens
  misc_RNA (1)...(19): siRNA sense strand
guuaucagaugcacuuuau

SEQ ID NO: 1303978 - RNA, 19 nt, Homo sapiens
  misc_RNA (1)...(19): siRNA sense strand
ugagauuggugaacgagua

SEQ ID NO: 1303979 - RNA, 19 nt, Homo sapiens
  misc_RNA (1)...(19): siRNA sense strand
gugaacgaguagauuauaa

SEQ ID NO: 1303980 - RNA, 19 nt, Homo sapiens
  misc_RNA (1)...(19): siRNA sense strand
gagagagcacgauuuauug

SEQ ID NO: 1303981 - RNA, 19 nt, Homo sapiens
  misc_RNA (1)...(19): siRNA sense strand
caaaugggacuuacgaguu

SEQ ID NO: 1303982 - RNA, 19 nt, Homo sapiens
  misc_RNA (1)...(19): siRNA sense strand
ggucauugcugugauuguu

SEQ ID NO: 1303983 - RNA, 19 nt, Homo sapiens
  misc_RNA (1)...(19): siRNA sense strand
ccagauccauuuucacuua

SEQ ID NO: 1303984 - RNA, 19 nt, Homo sapiens
  misc_RNA (1)...(19): siRNA sense strand
gaaggaauacuugacaguu

SEQ ID NO: 1303985 - RNA, 19 nt, Homo sapiens
  misc_RNA (1)...(19): siRNA sense strand
aaggaauacuugacaguuu

SEQ ID NO: 1303986 - RNA, 19 nt, Homo sapiens
  misc_RNA (1)...(19): siRNA sense strand
ucagaugacgccuguuaua

SEQ ID NO: 1303987 - RNA, 19 nt, Homo sapiens
  misc_RNA (1)...(19): siRNA sense strand
gaaaacacaccuuuaguga

SEQ ID NO: 1303988 - RNA, 19 nt, Homo sapiens
  misc_RNA (1)...(19): siRNA sense strand
gaugacgccuguuauagag

SEQ ID NO: 1303989 - RNA, 19 nt, Homo sapiens
  misc_RNA (1)...(19): siRNA sense strand
gagaaacauguccauauau

SEQ ID NO: 1303990 - RNA, 19 nt, Homo sapiens
  misc_RNA (1)...(19): siRNA sense strand
acgaguagauuauaagugu

SEQ ID NO: 1303991 - RNA, 19 nt, Homo sapiens
  misc_RNA (1)...(19): siRNA sense strand
cuacaaagcaacaguuaug

SEQ ID NO: 1303992 - RNA, 19 nt, Homo sapiens
  misc_RNA (1)...(19): siRNA sense strand
ccaccaacauuugaagcua

SEQ ID NO: 1303993 - RNA, 19 nt, Homo sapiens
  misc_RNA (1)...(19): siRNA sense strand
uauacgggauccuuuaaau

SEQ ID NO: 1303994 - RNA, 19 nt, Homo sapiens
  misc_RNA (1)...(19): siRNA sense strand
cgaguuugguuaucagaug

SEQ ID NO: 1303995 - RNA, 19 nt, Homo sapiens
  misc_RNA (1)...(19): siRNA sense strand
gaacgaguagauuauaagu

SEQ ID NO: 1303996 - RNA, 19 nt, Homo sapiens
  misc_RNA (1)...(19): siRNA sense strand
gugaggagccaccaacauu

SEQ ID NO: 1303997 - RNA, 19 nt, Homo sapiens
  misc_RNA (1)...(19): siRNA sense strand
gauggcagcgacacaauug

SEQ ID NO: 1303998 - RNA, 19 nt, Homo sapiens
  misc_RNA (1)...(19): siRNA sense strand
gcuauggagcucauuggua

SEQ ID NO: 1303999 - RNA, 19 nt, Homo sapiens
  misc_RNA (1)...(19): siRNA sense strand
gaggagccaccaacauuug

SEQ ID NO: 1304000 - RNA, 19 nt, Homo sapiens
  misc_RNA (1)...(19): siRNA sense strand
acacaccuuuagugaagua

SEQ ID NO: 1304001 - RNA, 19 nt, Homo sapiens
  misc_RNA (1)...(19): siRNA sense strand
ucucagaugacgccuguua

SEQ ID NO: 1304002 - RNA, 19 nt, Homo sapiens
  misc_RNA (1)...(19): siRNA sense strand
uagagaaacauguccauau

SEQ ID NO: 1304003 - RNA, 19 nt, Homo sapiens
  misc_RNA (1)...(19): siRNA sense strand
guuccaaagugucuuaaag

SEQ ID NO: 1304004 - RNA, 19 nt, Homo sapiens
  misc_RNA (1)...(19): siRNA sense strand
ggugaacgaguagauuaua

SEQ ID NO: 1304005 - RNA, 19 nt, Homo sapiens
  misc_RNA (1)...(19): siRNA sense strand
gaaguagaaguauuugagu

SEQ ID NO: 1304006 - RNA, 19 nt, Homo sapiens
  misc_RNA (1)...(19): siRNA sense strand
gaaacauguccauauauac

SEQ ID NO: 1304007 - RNA, 19 nt, Homo sapiens
  misc_RNA (1)...(19): siRNA sense strand
ugacgccuguuauagagaa

SEQ ID NO: 1304008 - RNA, 19 nt, Homo sapiens
  misc_RNA (1)...(19): siRNA sense strand
cgaguagauuauaagugua

SEQ ID NO: 1304009 - RNA, 19 nt, Homo sapiens
  misc_RNA (1)...(19): siRNA sense strand
gcacuuuauuuguaaugag

SEQ ID NO: 1304010 - RNA, 19 nt, Homo sapiens
  misc_RNA (1)...(19): siRNA sense strand
guagaaguauuugaguauc

SEQ ID NO: 1304011 - RNA, 19 nt, Homo sapiens
  misc_RNA (1)...(19): siRNA sense strand
guauuugaguaucuugaug

SEQ ID NO: 1304012 - RNA, 19 nt, Homo sapiens
  misc_RNA (1)...(19): siRNA sense strand
aggaauacuugacaguuug

SEQ ID NO: 1304013 - RNA, 19 nt, Homo sapiens
  misc_RNA (1)...(19): siRNA sense strand
ccaaaacccuacuaugaga

SEQ ID NO: 1304014 - RNA, 19 nt, Homo sapiens
  misc_RNA (1)...(19): siRNA sense strand
aguguaaaguggucaaaug

SEQ ID NO: 1304015 - RNA, 19 nt, Homo sapiens
  misc_RNA (1)...(19): siRNA sense strand
ccacccauacuauuuguga

SEQ ID NO: 1304016 - RNA, 19 nt, Homo sapiens
  misc_RNA (1)...(19): siRNA sense strand
caccaacauuugaagcuau

SEQ ID NO: 1304017 - RNA, 19 nt, Homo sapiens
  misc_RNA (1)...(19): siRNA sense strand
uuggagagagcacgauuua

SEQ ID NO: 1304018 - RNA, 19 nt, Homo sapiens
  misc_RNA (1)...(19): siRNA sense strand
gguuaucagaugcacuuua

SEQ ID NO: 1304019 - RNA, 19 nt, Homo sapiens
  misc_RNA (1)...(19): siRNA sense strand
ugaggagccaccaacauuu

SEQ ID NO: 1304020 - RNA, 19 nt, Homo sapiens
  misc_RNA (1)...(19): siRNA sense strand
ggaaggaauacuugacagu

SEQ ID NO: 1304021 - RNA, 19 nt, Homo sapiens
  misc_RNA (1)...(19): siRNA sense strand
gaggaaggaauacuugaca

SEQ ID NO: 1304022 - RNA, 19 nt, Homo sapiens
  misc_RNA (1)...(19): siRNA sense strand
ccaguuccaaagugucuua

SEQ ID NO: 1304023 - RNA, 19 nt, Homo sapiens
  misc_RNA (1)...(19): siRNA sense strand
ugaguaucuugaugcagua

SEQ ID NO: 1304024 - RNA, 19 nt, Homo sapiens
  misc_RNA (1)...(19): siRNA sense strand
caccuuuagugaaguagaa

SEQ ID NO: 1304025 - RNA, 19 nt, Homo sapiens
  misc_RNA (1)...(19): siRNA sense strand
acagauaucaggauuugga

SEQ ID NO: 1304026 - RNA, 19 nt, Homo sapiens
  misc_RNA (1)...(19): siRNA sense strand
ucauugcugugauuguuau

SEQ ID NO: 1304027 - RNA, 19 nt, Homo sapiens
  misc_RNA (1)...(19): siRNA sense strand
ucagaugcacuuuauuugu

SEQ ID NO: 1304028 - RNA, 19 nt, Homo sapiens
  misc_RNA (1)...(19): siRNA sense strand
gugcugcuccagaguguaa

SEQ ID NO: 1304029 - RNA, 19 nt, Homo sapiens
  misc_RNA (1)...(19): siRNA sense strand
ggaaaacacaccuuuagug

SEQ ID NO: 1304030 - RNA, 19 nt, Homo sapiens
  misc_RNA (1)...(19): siRNA sense strand
aaggaucaguagcaauuug

SEQ ID NO: 1304031 - RNA, 19 nt, Homo sapiens
  misc_RNA (1)...(19): siRNA sense strand
uauauacgggauccuuuaa

SEQ ID NO: 1304032 - RNA, 19 nt, Homo sapiens
  misc_RNA (1)...(19): siRNA sense strand
ugaaguagaaguauuugag

SEQ ID NO: 1304033 - RNA, 19 nt, Homo sapiens
  misc_RNA (1)...(19): siRNA sense strand
cuugacaguuuggauguuu

SEQ ID NO: 1304034 - RNA, 19 nt, Homo sapiens
  misc_RNA (1)...(19): siRNA sense strand
cauauauacgggauccuuu

SEQ ID NO: 1304035 - RNA, 19 nt, Homo sapiens
  misc_RNA (1)...(19): siRNA sense strand
auauauacgggauccuuua

SEQ ID NO: 1304036 - RNA, 19 nt, Homo sapiens
  misc_RNA (1)...(19): siRNA sense strand
cuuaaaggaucaguagcaa

SEQ ID NO: 1304037 - RNA, 19 nt, Homo sapiens
  misc_RNA (1)...(19): siRNA sense strand
uaaaccugaggaaggaaua

SEQ ID NO: 1304038 - RNA, 19 nt, Homo sapiens
  misc_RNA (1)...(19): siRNA sense strand
agaugacgccuguuauaga

SEQ ID NO: 1304039 - RNA, 19 nt, Homo sapiens
  misc_RNA (1)...(19): siRNA sense strand
ugugauuguuauugccaua

SEQ ID NO: 1304040 - RNA, 19 nt, Homo sapiens
  misc_RNA (1)...(19): siRNA sense strand
gagagcacgauuuauugug

SEQ ID NO: 1304041 - RNA, 19 nt, Homo sapiens
  misc_RNA (1)...(19): siRNA sense strand
gaaguauuugaguaucuug

SEQ ID NO: 1304042 - RNA, 19 nt, Homo sapiens
  misc_RNA (1)...(19): siRNA sense strand
ggcuaccugucucagauga

SEQ ID NO: 1304043 - RNA, 19 nt, Homo sapiens
  misc_RNA (1)...(19): siRNA sense strand
gauaucaggauuuggaaaa

SEQ ID NO: 1304044 - RNA, 19 nt, Homo sapiens
  misc_RNA (1)...(19): siRNA sense strand
ccucuugccacccauacua

SEQ ID NO: 1304045 - RNA, 19 nt, Homo sapiens
  misc_RNA (1)...(19): siRNA sense strand
ccaugguguugcugcugua

SEQ ID NO: 1304046 - RNA, 19 nt, Homo sapiens
  misc_RNA (1)...(19): siRNA sense strand
cagaugacgccuguuauag

SEQ ID NO: 1304047 - RNA, 19 nt, Homo sapiens
  misc_RNA (1)...(19): siRNA sense strand
uuggugaacgaguagauua

SEQ ID NO: 1304048 - RNA, 19 nt, Homo sapiens
  misc_RNA (1)...(19): siRNA sense strand
gucauugcugugauuguua

SEQ ID NO: 1304049 - RNA, 19 nt, Homo sapiens
  misc_RNA (1)...(19): siRNA sense strand
ggagccaccaacauuugaa

SEQ ID NO: 1304050 - RNA, 19 nt, Homo sapiens
  misc_RNA (1)...(19): siRNA sense strand
gcgcuuuccuggguugcuu

SEQ ID NO: 1304051 - RNA, 19 nt, Homo sapiens
  misc_RNA (1)...(19): siRNA sense strand
uacuacaaagcaacaguua

SEQ ID NO: 1304052 - RNA, 19 nt, Homo sapiens
  misc_RNA (1)...(19): siRNA sense strand
cuugaugcaguaacuuaua

SEQ ID NO: 1304053 - RNA, 19 nt, Homo sapiens
  misc_RNA (1)...(19): siRNA sense strand
aaacauguccauauauacg

SEQ ID NO: 1304054 - RNA, 19 nt, Homo sapiens
  misc_RNA (1)...(19): siRNA sense strand
guguaaaguggucaaaugu

SEQ ID NO: 1304055 - RNA, 19 nt, Homo sapiens
  misc_RNA (1)...(19): siRNA sense strand
cuuacgaguuugguuauca

SEQ ID NO: 1304056 - RNA, 19 nt, Homo sapiens
  misc_RNA (1)...(19): siRNA sense strand
uacgggauccuuuaaaugg

SEQ ID NO: 1304057 - RNA, 19 nt, Homo sapiens
  misc_RNA (1)...(19): siRNA sense strand
aaccaaaacccuacuauga

SEQ ID NO: 1304058 - RNA, 19 nt, Homo sapiens
  misc_RNA (1)...(19): siRNA sense strand
cccaauaugugaaaagguu

SEQ ID NO: 1304059 - RNA, 19 nt, Homo sapiens
  misc_RNA (1)...(19): siRNA sense strand
cgauggcagcgacacaauu

SEQ ID NO: 1304060 - RNA, 19 nt, Homo sapiens
  misc_RNA (1)...(19): siRNA sense strand
gauccauuuucacuuauug

SEQ ID NO: 1304061 - RNA, 19 nt, Homo sapiens
  misc_RNA (1)...(19): siRNA sense strand
uugaugcaguaacuuauag

SEQ ID NO: 1304062 - RNA, 19 nt, Homo sapiens
  misc_RNA (1)...(19): siRNA sense strand
guaucuugaugcaguaacu

SEQ ID NO: 1304063 - RNA, 19 nt, Homo sapiens
  misc_RNA (1)...(19): siRNA sense strand
caacauuugaagcuaugga

SEQ ID NO: 1304064 - RNA, 19 nt, Homo sapiens
  misc_RNA (1)...(19): siRNA sense strand
gagauuggugaacgaguag

SEQ ID NO: 1304065 - RNA, 19 nt, Homo sapiens
  misc_RNA (1)...(19): siRNA sense strand
ggagagagcacgauuuauu

SEQ ID NO: 1304066 - RNA, 19 nt, Homo sapiens
  misc_RNA (1)...(19): siRNA sense strand
agagaaacauguccauaua

SEQ ID NO: 1304067 - RNA, 19 nt, Homo sapiens
  misc_RNA (1)...(19): siRNA sense strand
cagaugcacuuuauuugua

SEQ ID NO: 1304068 - RNA, 19 nt, Homo sapiens
  misc_RNA (1)...(19): siRNA sense strand
ggacuuacgaguuugguua

SEQ ID NO: 1304069 - RNA, 19 nt, Homo sapiens
  misc_RNA (1)...(19): siRNA sense strand
aaacagauaucaggauuug

SEQ ID NO: 1304070 - RNA, 19 nt, Homo sapiens
  misc_RNA (1)...(19): siRNA sense strand
cuauggagcucauugguaa

SEQ ID NO: 1304071 - RNA, 19 nt, Homo sapiens
  misc_RNA (1)...(19): siRNA sense strand
aaacacaccuuuagugaag

SEQ ID NO: 1304072 - RNA, 19 nt, Homo sapiens
  misc_RNA (1)...(19): siRNA sense strand
gaacuuaaaggaucaguag

SEQ ID NO: 1304073 - RNA, 19 nt, Homo sapiens
  misc_RNA (1)...(19): siRNA sense strand
gaaaacagauaucaggauu

SEQ ID NO: 1304074 - RNA, 19 nt, Homo sapiens
  misc_RNA (1)...(19): siRNA sense strand
uaaaggaucaguagcaauu

SEQ ID NO: 1304075 - RNA, 19 nt, Homo sapiens
  misc_RNA (1)...(19): siRNA sense strand
aaaugggacuuacgaguuu

SEQ ID NO: 1304076 - RNA, 19 nt, Homo sapiens
  misc_RNA (1)...(19): siRNA sense strand
guuaucagaugcacuuuau

SEQ ID NO: 1304077 - RNA, 19 nt, Homo sapiens
  misc_RNA (1)...(19): siRNA sense strand
gagcugaauaugccacuua

SEQ ID NO: 1304078 - RNA, 19 nt, Homo sapiens
  misc_RNA (1)...(19): siRNA sense strand
ugagauuggugaacgagua

SEQ ID NO: 1304079 - RNA, 19 nt, Homo sapiens
  misc_RNA (1)...(19): siRNA sense strand
gugaacgaguagauuauaa

SEQ ID NO: 1304080 - RNA, 19 nt, Homo sapiens
  misc_RNA (1)...(19): siRNA sense strand
gagagagcacgauuuauug

SEQ ID NO: 1304081 - RNA, 19 nt, Homo sapiens
  misc_RNA (1)...(19): siRNA sense strand
caaaugggacuuacgaguu

SEQ ID NO: 1304082 - RNA, 19 nt, Homo sapiens
  misc_RNA (1)...(19): siRNA sense strand
ggucauugcugugauuguu

SEQ ID NO: 1304083 - RNA, 19 nt, Homo sapiens
  misc_RNA (1)...(19): siRNA sense strand
ccagauccauuuucacuua

SEQ ID NO: 1304084 - RNA, 19 nt, Homo sapiens
  misc_RNA (1)...(19): siRNA sense strand
gaaggaauacuugacaguu

SEQ ID NO: 1304085 - RNA, 19 nt, Homo sapiens
  misc_RNA (1)...(19): siRNA sense strand
aaggaauacuugacaguuu

SEQ ID NO: 1304086 - RNA, 19 nt, Homo sapiens
  misc_RNA (1)...(19): siRNA sense strand
ucagaugacgccuguuaua

SEQ ID NO: 1304087 - RNA, 19 nt, Homo sapiens
  misc_RNA (1)...(19): siRNA sense strand
gaaaacacaccuuuaguga

SEQ ID NO: 1304088 - RNA, 19 nt, Homo sapiens
  misc_RNA (1)...(19): siRNA sense strand
gaugacgccuguuauagag

SEQ ID NO: 1304089 - RNA, 19 nt, Homo sapiens
  misc_RNA (1)...(19): siRNA sense strand
gagaaacauguccauauau

SEQ ID NO: 1304090 - RNA, 19 nt, Homo sapiens
  misc_RNA (1)...(19): siRNA sense strand
ccacuuaccagacuaaauc

SEQ ID NO: 1304091 - RNA, 19 nt, Homo sapiens
  misc_RNA (1)...(19): siRNA sense strand
acgaguagauuauaagugu

SEQ ID NO: 1304092 - RNA, 19 nt, Homo sapiens
  misc_RNA (1)...(19): siRNA sense strand
cuacaaagcaacaguuaug

SEQ ID NO: 1304093 - RNA, 19 nt, Homo sapiens
  misc_RNA (1)...(19): siRNA sense strand
ccaccaacauuugaagcua

SEQ ID NO: 1304094 - RNA, 19 nt, Homo sapiens
  misc_RNA (1)...(19): siRNA sense strand
uauacgggauccuuuaaau

SEQ ID NO: 1304095 - RNA, 19 nt, Homo sapiens
  misc_RNA (1)...(19): siRNA sense strand
cgaguuugguuaucagaug

SEQ ID NO: 1304096 - RNA, 19 nt, Homo sapiens
  misc_RNA (1)...(19): siRNA sense strand
gaacgaguagauuauaagu

SEQ ID NO: 1304097 - RNA, 19 nt, Homo sapiens
  misc_RNA (1)...(19): siRNA sense strand
gugaggagccaccaacauu

SEQ ID NO: 1304098 - RNA, 19 nt, Homo sapiens
  misc_RNA (1)...(19): siRNA sense strand
gauggcagcgacacaauug

SEQ ID NO: 1304099 - RNA, 19 nt, Homo sapiens
  misc_RNA (1)...(19): siRNA sense strand
ucucagaugacgccuguua

SEQ ID NO: 1304100 - RNA, 19 nt, Homo sapiens
  misc_RNA (1)...(19): siRNA sense strand
gaggagccaccaacauuug

SEQ ID NO: 1304101 - RNA, 19 nt, Homo sapiens
  misc_RNA (1)...(19): siRNA sense strand
gcuauggagcucauuggua

SEQ ID NO: 1304102 - RNA, 19 nt, Homo sapiens
  misc_RNA (1)...(19): siRNA sense strand
acacaccuuuagugaagua

SEQ ID NO: 1304103 - RNA, 19 nt, Homo sapiens
  misc_RNA (1)...(19): siRNA sense strand
uagagaaacauguccauau

SEQ ID NO: 1304104 - RNA, 19 nt, Homo sapiens
  misc_RNA (1)...(19): siRNA sense strand
ggugaacgaguagauuaua

SEQ ID NO: 1304105 - RNA, 19 nt, Homo sapiens
  misc_RNA (1)...(19): siRNA sense strand
gaaguagaaguauuugagu

SEQ ID NO: 1304106 - RNA, 19 nt, Homo sapiens
  misc_RNA (1)...(19): siRNA sense strand
gaaacauguccauauauac

SEQ ID NO: 1304107 - RNA, 19 nt, Homo sapiens
  misc_RNA (1)...(19): siRNA sense strand
ugacgccuguuauagagaa

SEQ ID NO: 1304108 - RNA, 19 nt, Homo sapiens
  misc_RNA (1)...(19): siRNA sense strand
cgaguagauuauaagugua

SEQ ID NO: 1304109 - RNA, 19 nt, Homo sapiens
  misc_RNA (1)...(19): siRNA sense strand
gcacuuuauuuguaaugag

SEQ ID NO: 1304110 - RNA, 19 nt, Homo sapiens
  misc_RNA (1)...(19): siRNA sense strand
guagaaguauuugaguauc

SEQ ID NO: 1304111 - RNA, 19 nt, Homo sapiens
  misc_RNA (1)...(19): siRNA sense strand
guauuugaguaucuugaug

SEQ ID NO: 1304112 - RNA, 19 nt, Homo sapiens
  misc_RNA (1)...(19): siRNA sense strand
aggaauacuugacaguuug

SEQ ID NO: 1304113 - RNA, 19 nt, Homo sapiens
  misc_RNA (1)...(19): siRNA sense strand
ccaaaacccuacuaugaga

SEQ ID NO: 1304114 - RNA, 19 nt, Homo sapiens
  misc_RNA (1)...(19): siRNA sense strand
aguguaaaguggucaaaug

SEQ ID NO: 1304115 - RNA, 19 nt, Homo sapiens
  misc_RNA (1)...(19): siRNA sense strand
ccacccauacuauuuguga

SEQ ID NO: 1304116 - RNA, 19 nt, Homo sapiens
  misc_RNA (1)...(19): siRNA sense strand
uuggagagagcacgauuua

SEQ ID NO: 1304117 - RNA, 19 nt, Homo sapiens
  misc_RNA (1)...(19): siRNA sense strand
gguuaucagaugcacuuua

SEQ ID NO: 1304118 - RNA, 19 nt, Homo sapiens
  misc_RNA (1)...(19): siRNA sense strand
caccaacauuugaagcuau

SEQ ID NO: 1304119 - RNA, 19 nt, Homo sapiens
  misc_RNA (1)...(19): siRNA sense strand
ugaggagccaccaacauuu

SEQ ID NO: 1304120 - RNA, 19 nt, Homo sapiens
  misc_RNA (1)...(19): siRNA sense strand
ggaaggaauacuugacagu

SEQ ID NO: 1304121 - RNA, 19 nt, Homo sapiens
  misc_RNA (1)...(19): siRNA sense strand
gaggaaggaauacuugaca

SEQ ID NO: 1304122 - RNA, 19 nt, Homo sapiens
  misc_RNA (1)...(19): siRNA sense strand
ugaguaucuugaugcagua

SEQ ID NO: 1304123 - RNA, 19 nt, Homo sapiens
  misc_RNA (1)...(19): siRNA sense strand
caccuuuagugaaguagaa

SEQ ID NO: 1304124 - RNA, 19 nt, Homo sapiens
  misc_RNA (1)...(19): siRNA sense strand
acagauaucaggauuugga

SEQ ID NO: 1304125 - RNA, 19 nt, Homo sapiens
  misc_RNA (1)...(19): siRNA sense strand
ucauugcugugauuguuau

SEQ ID NO: 1304126 - RNA, 19 nt, Homo sapiens
  misc_RNA (1)...(19): siRNA sense strand
ucagaugcacuuuauuugu

SEQ ID NO: 1304127 - RNA, 19 nt, Homo sapiens
  misc_RNA (1)...(19): siRNA sense strand
gugcugcuccagaguguaa

SEQ ID NO: 1304128 - RNA, 19 nt, Homo sapiens
  misc_RNA (1)...(19): siRNA sense strand
ggaaaacacaccuuuagug

SEQ ID NO: 1304129 - RNA, 19 nt, Homo sapiens
  misc_RNA (1)...(19): siRNA sense strand
aaggaucaguagcaauuug

SEQ ID NO: 1304130 - RNA, 19 nt, Homo sapiens
  misc_RNA (1)...(19): siRNA sense strand
uauauacgggauccuuuaa

SEQ ID NO: 1304131 - RNA, 19 nt, Homo sapiens
  misc_RNA (1)...(19): siRNA sense strand
ugaaguagaaguauuugag

SEQ ID NO: 1304132 - RNA, 19 nt, Homo sapiens
  misc_RNA (1)...(19): siRNA sense strand
cuugacaguuuggauguuu

SEQ ID NO: 1304133 - RNA, 19 nt, Homo sapiens
  misc_RNA (1)...(19): siRNA sense strand
cauauauacgggauccuuu

SEQ ID NO: 1304134 - RNA, 19 nt, Homo sapiens
  misc_RNA (1)...(19): siRNA sense strand
auauauacgggauccuuua

SEQ ID NO: 1304135 - RNA, 19 nt, Homo sapiens
  misc_RNA (1)...(19): siRNA sense strand
cuuaaaggaucaguagcaa

SEQ ID NO: 1304136 - RNA, 19 nt, Homo sapiens
  misc_RNA (1)...(19): siRNA sense strand
uaaaccugaggaaggaaua

SEQ ID NO: 1304137 - RNA, 19 nt, Homo sapiens
  misc_RNA (1)...(19): siRNA sense strand
agaugacgccuguuauaga

SEQ ID NO: 1304138 - RNA, 19 nt, Homo sapiens
  misc_RNA (1)...(19): siRNA sense strand
ugugauuguuauugccaua

SEQ ID NO: 1304139 - RNA, 19 nt, Homo sapiens
  misc_RNA (1)...(19): siRNA sense strand
gagagcacgauuuauugug

SEQ ID NO: 1304140 - RNA, 19 nt, Homo sapiens
  misc_RNA (1)...(19): siRNA sense strand
gaaguauuugaguaucuug

SEQ ID NO: 1304141 - RNA, 19 nt, Homo sapiens
  misc_RNA (1)...(19): siRNA sense strand
ggcuaccugucucagauga

SEQ ID NO: 1304142 - RNA, 19 nt, Homo sapiens
  misc_RNA (1)...(19): siRNA sense strand
gauaucaggauuuggaaaa

SEQ ID NO: 1304143 - RNA, 19 nt, Homo sapiens
  misc_RNA (1)...(19): siRNA sense strand
ccucuugccacccauacua

SEQ ID NO: 1304144 - RNA, 19 nt, Homo sapiens
  misc_RNA (1)...(19): siRNA sense strand
ccaugguguugcugcugua

SEQ ID NO: 1304145 - RNA, 19 nt, Homo sapiens
  misc_RNA (1)...(19): siRNA sense strand
cagaugacgccuguuauag

SEQ ID NO: 1304146 - RNA, 19 nt, Homo sapiens
  misc_RNA (1)...(19): siRNA sense strand
cagaugguggagcugaaua

SEQ ID NO: 1304147 - RNA, 19 nt, Homo sapiens
  misc_RNA (1)...(19): siRNA sense strand
uuggugaacgaguagauua

SEQ ID NO: 1304148 - RNA, 19 nt, Homo sapiens
  misc_RNA (1)...(19): siRNA sense strand
gucauugcugugauuguua

SEQ ID NO: 1304149 - RNA, 19 nt, Homo sapiens
  misc_RNA (1)...(19): siRNA sense strand
ggagccaccaacauuugaa

SEQ ID NO: 1304150 - RNA, 19 nt, Homo sapiens
  misc_RNA (1)...(19): siRNA sense strand
gcgcuuuccuggguugcuu

SEQ ID NO: 1304151 - RNA, 19 nt, Homo sapiens
  misc_RNA (1)...(19): siRNA sense strand
uacuacaaagcaacaguua

SEQ ID NO: 1304152 - RNA, 19 nt, Homo sapiens
  misc_RNA (1)...(19): siRNA sense strand
cuugaugcaguaacuuaua

SEQ ID NO: 1304153 - RNA, 19 nt, Homo sapiens
  misc_RNA (1)...(19): siRNA sense strand
aaacauguccauauauacg

SEQ ID NO: 1304154 - RNA, 19 nt, Homo sapiens
  misc_RNA (1)...(19): siRNA sense strand
guguaaaguggucaaaugu

SEQ ID NO: 1304155 - RNA, 19 nt, Homo sapiens
  misc_RNA (1)...(19): siRNA sense strand
cuuacgaguuugguuauca

SEQ ID NO: 1304156 - RNA, 19 nt, Homo sapiens
  misc_RNA (1)...(19): siRNA sense strand
uacgggauccuuuaaaugg

SEQ ID NO: 1304157 - RNA, 19 nt, Homo sapiens
  misc_RNA (1)...(19): siRNA sense strand
gcagaugguggagcugaau

SEQ ID NO: 1304158 - RNA, 19 nt, Homo sapiens
  misc_RNA (1)...(19): siRNA sense strand
aaccaaaacccuacuauga

SEQ ID NO: 1304159 - RNA, 19 nt, Homo sapiens
  misc_RNA (1)...(19): siRNA sense strand
cccaauaugugaaaagguu

SEQ ID NO: 1304160 - RNA, 19 nt, Homo sapiens
  misc_RNA (1)...(19): siRNA sense strand
ggagcugaauaugccacuu

SEQ ID NO: 1304161 - RNA, 19 nt, Homo sapiens
  misc_RNA (1)...(19): siRNA sense strand
cgauggcagcgacacaauu

SEQ ID NO: 1304162 - RNA, 19 nt, Homo sapiens
  misc_RNA (1)...(19): siRNA sense strand
gauccauuuucacuuauug

SEQ ID NO: 1304163 - RNA, 19 nt, Homo sapiens
  misc_RNA (1)...(19): siRNA sense strand
uugaugcaguaacuuauag

SEQ ID NO: 1304164 - RNA, 19 nt, Homo sapiens
  misc_RNA (1)...(19): siRNA sense strand
guaucuugaugcaguaacu

SEQ ID NO: 1304165 - RNA, 19 nt, Homo sapiens
  misc_RNA (1)...(19): siRNA sense strand
ggagagagcacgauuuauu

SEQ ID NO: 1304166 - RNA, 19 nt, Homo sapiens
  misc_RNA (1)...(19): siRNA sense strand
agagaaacauguccauaua

SEQ ID NO: 1304167 - RNA, 19 nt, Homo sapiens
  misc_RNA (1)...(19): siRNA sense strand
cagaugcacuuuauuugua

SEQ ID NO: 1304168 - RNA, 19 nt, Homo sapiens
  misc_RNA (1)...(19): siRNA sense strand
ggacuuacgaguuugguua

SEQ ID NO: 1304169 - RNA, 19 nt, Homo sapiens
  misc_RNA (1)...(19): siRNA sense strand
aaacagauaucaggauuug

SEQ ID NO: 1304170 - RNA, 19 nt, Homo sapiens
  misc_RNA (1)...(19): siRNA sense strand
cuauggagcucauugguaa

SEQ ID NO: 1304171 - RNA, 19 nt, Homo sapiens
  misc_RNA (1)...(19): siRNA sense strand
aaacacaccuuuagugaag

SEQ ID NO: 1304172 - RNA, 19 nt, Homo sapiens
  misc_RNA (1)...(19): siRNA sense strand
gaacuuaaaggaucaguag

SEQ ID NO: 1304173 - RNA, 19 nt, Homo sapiens
  misc_RNA (1)...(19): siRNA sense strand
gaaaacagauaucaggauu

SEQ ID NO: 1304174 - RNA, 19 nt, Homo sapiens
  misc_RNA (1)...(19): siRNA sense strand
uaaaggaucaguagcaauu

SEQ ID NO: 1304175 - RNA, 19 nt, Homo sapiens
  misc_RNA (1)...(19): siRNA sense strand
aaaugggacuuacgaguuu

SEQ ID NO: 1304176 - RNA, 19 nt, Homo sapiens
  misc_RNA (1)...(19): siRNA sense strand
guuaucagaugcacuuuau

SEQ ID NO: 1304177 - RNA, 19 nt, Homo sapiens
  misc_RNA (1)...(19): siRNA sense strand
gagcugaauaugccacuua

SEQ ID NO: 1304178 - RNA, 19 nt, Homo sapiens
  misc_RNA (1)...(19): siRNA sense strand
gagcagagaggcugaauag

SEQ ID NO: 1304179 - RNA, 19 nt, Homo sapiens
  misc_RNA (1)...(19): siRNA sense strand
ugagauuggugaacgagua

SEQ ID NO: 1304180 - RNA, 19 nt, Homo sapiens
  misc_RNA (1)...(19): siRNA sense strand
gugaacgaguagauuauaa

SEQ ID NO: 1304181 - RNA, 19 nt, Homo sapiens
  misc_RNA (1)...(19): siRNA sense strand
gagagagcacgauuuauug

SEQ ID NO: 1304182 - RNA, 19 nt, Homo sapiens
  misc_RNA (1)...(19): siRNA sense strand
caaaugggacuuacgaguu

SEQ ID NO: 1304183 - RNA, 19 nt, Homo sapiens
  misc_RNA (1)...(19): siRNA sense strand
ggucauugcugugauuguu

SEQ ID NO: 1304184 - RNA, 19 nt, Homo sapiens
  misc_RNA (1)...(19): siRNA sense strand
ccagauccauuuucacuua

SEQ ID NO: 1304185 - RNA, 19 nt, Homo sapiens
  misc_RNA (1)...(19): siRNA sense strand
gaaggaauacuugacaguu

SEQ ID NO: 1304186 - RNA, 19 nt, Homo sapiens
  misc_RNA (1)...(19): siRNA sense strand
aaggaauacuugacaguuu

SEQ ID NO: 1304187 - RNA, 19 nt, Homo sapiens
  misc_RNA (1)...(19): siRNA sense strand
ucagaugacgccuguuaua

SEQ ID NO: 1304188 - RNA, 19 nt, Homo sapiens
  misc_RNA (1)...(19): siRNA sense strand
gaaaacacaccuuuaguga

SEQ ID NO: 1304189 - RNA, 19 nt, Homo sapiens
  misc_RNA (1)...(19): siRNA sense strand
gaugacgccuguuauagag

SEQ ID NO: 1304190 - RNA, 19 nt, Homo sapiens
  misc_RNA (1)...(19): siRNA sense strand
gagaaacauguccauauau

SEQ ID NO: 1304191 - RNA, 19 nt, Homo sapiens
  misc_RNA (1)...(19): siRNA sense strand
ccacuuaccagacuaaauc

SEQ ID NO: 1304192 - RNA, 19 nt, Homo sapiens
  misc_RNA (1)...(19): siRNA sense strand
acgaguagauuauaagugu

SEQ ID NO: 1304193 - RNA, 19 nt, Homo sapiens
  misc_RNA (1)...(19): siRNA sense strand
cuacaaagcaacaguuaug

SEQ ID NO: 1304194 - RNA, 19 nt, Homo sapiens
  misc_RNA (1)...(19): siRNA sense strand
ccaccaacauuugaagcua

SEQ ID NO: 1304195 - RNA, 19 nt, Homo sapiens
  misc_RNA (1)...(19): siRNA sense strand
uauacgggauccuuuaaau

SEQ ID NO: 1304196 - RNA, 19 nt, Homo sapiens
  misc_RNA (1)...(19): siRNA sense strand
cgaguuugguuaucagaug

SEQ ID NO: 1304197 - RNA, 19 nt, Homo sapiens
  misc_RNA (1)...(19): siRNA sense strand
gaacgaguagauuauaagu

SEQ ID NO: 1304198 - RNA, 19 nt, Homo sapiens
  misc_RNA (1)...(19): siRNA sense strand
gugaggagccaccaacauu

SEQ ID NO: 1304199 - RNA, 19 nt, Homo sapiens
  misc_RNA (1)...(19): siRNA sense strand
gauggcagcgacacaauug

SEQ ID NO: 1304200 - RNA, 19 nt, Homo sapiens
  misc_RNA (1)...(19): siRNA sense strand
ucucagaugacgccuguua

SEQ ID NO: 1304201 - RNA, 19 nt, Homo sapiens
  misc_RNA (1)...(19): siRNA sense strand
acacaccuuuagugaagua

SEQ ID NO: 1304202 - RNA, 19 nt, Homo sapiens
  misc_RNA (1)...(19): siRNA sense strand
gcuauggagcucauuggua

SEQ ID NO: 1304203 - RNA, 19 nt, Homo sapiens
  misc_RNA (1)...(19): siRNA sense strand
gaggagccaccaacauuug

SEQ ID NO: 1304204 - RNA, 19 nt, Homo sapiens
  misc_RNA (1)...(19): siRNA sense strand
uagagaaacauguccauau

SEQ ID NO: 1304205 - RNA, 19 nt, Homo sapiens
  misc_RNA (1)...(19): siRNA sense strand
guuccaaagugucuuaaag

SEQ ID NO: 1304206 - RNA, 19 nt, Homo sapiens
  misc_RNA (1)...(19): siRNA sense strand
ggugaacgaguagauuaua

SEQ ID NO: 1304207 - RNA, 19 nt, Homo sapiens
  misc_RNA (1)...(19): siRNA sense strand
gaaguagaaguauuugagu

SEQ ID NO: 1304208 - RNA, 19 nt, Homo sapiens
  misc_RNA (1)...(19): siRNA sense strand
gaaacauguccauauauac

SEQ ID NO: 1304209 - RNA, 19 nt, Homo sapiens
  misc_RNA (1)...(19): siRNA sense strand
ugacgccuguuauagagaa

SEQ ID NO: 1304210 - RNA, 19 nt, Homo sapiens
  misc_RNA (1)...(19): siRNA sense strand
cgaguagauuauaagugua

SEQ ID NO: 1304211 - RNA, 19 nt, Homo sapiens
  misc_RNA (1)...(19): siRNA sense strand
gcacuuuauuuguaaugag

SEQ ID NO: 1304212 - RNA, 19 nt, Homo sapiens
  misc_RNA (1)...(19): siRNA sense strand
guagaaguauuugaguauc

SEQ ID NO: 1304213 - RNA, 19 nt, Homo sapiens
  misc_RNA (1)...(19): siRNA sense strand
guauuugaguaucuugaug

SEQ ID NO: 1304214 - RNA, 19 nt, Homo sapiens
  misc_RNA (1)...(19): siRNA sense strand
aggaauacuugacaguuug

SEQ ID NO: 1304215 - RNA, 19 nt, Homo sapiens
  misc_RNA (1)...(19): siRNA sense strand
ccaaaacccuacuaugaga

SEQ ID NO: 1304216 - RNA, 19 nt, Homo sapiens
  misc_RNA (1)...(19): siRNA sense strand
aguguaaaguggucaaaug

SEQ ID NO: 1304217 - RNA, 19 nt, Homo sapiens
  misc_RNA (1)...(19): siRNA sense strand
ccacccauacuauuuguga

SEQ ID NO: 1304218 - RNA, 19 nt, Homo sapiens
  misc_RNA (1)...(19): siRNA sense strand
uuggagagagcacgauuua

SEQ ID NO: 1304219 - RNA, 19 nt, Homo sapiens
  misc_RNA (1)...(19): siRNA sense strand
gguuaucagaugcacuuua

SEQ ID NO: 1304220 - RNA, 19 nt, Homo sapiens
  misc_RNA (1)...(19): siRNA sense strand
caccaacauuugaagcuau

SEQ ID NO: 1304221 - RNA, 19 nt, Homo sapiens
  misc_RNA (1)...(19): siRNA sense strand
ugaggagccaccaacauuu

SEQ ID NO: 1304222 - RNA, 19 nt, Homo sapiens
  misc_RNA (1)...(19): siRNA sense strand
ggaaggaauacuugacagu

SEQ ID NO: 1304223 - RNA, 19 nt, Homo sapiens
  misc_RNA (1)...(19): siRNA sense strand
gaggaaggaauacuugaca

SEQ ID NO: 1304224 - RNA, 19 nt, Homo sapiens
  misc_RNA (1)...(19): siRNA sense strand
ccaguuccaaagugucuua

SEQ ID NO: 1304225 - RNA, 19 nt, Homo sapiens
  misc_RNA (1)...(19): siRNA sense strand
ugaguaucuugaugcagua

SEQ ID NO: 1304226 - RNA, 19 nt, Homo sapiens
  misc_RNA (1)...(19): siRNA sense strand
caccuuuagugaaguagaa

SEQ ID NO: 1304227 - RNA, 19 nt, Homo sapiens
  misc_RNA (1)...(19): siRNA sense strand
acagauaucaggauuugga

SEQ ID NO: 1304228 - RNA, 19 nt, Homo sapiens
  misc_RNA (1)...(19): siRNA sense strand
ucauugcugugauuguuau

SEQ ID NO: 1304229 - RNA, 19 nt, Homo sapiens
  misc_RNA (1)...(19): siRNA sense strand
ucagaugcacuuuauuugu

SEQ ID NO: 1304230 - RNA, 19 nt, Homo sapiens
  misc_RNA (1)...(19): siRNA sense strand
gugcugcuccagaguguaa

SEQ ID NO: 1304231 - RNA, 19 nt, Homo sapiens
  misc_RNA (1)...(19): siRNA sense strand
ggaaaacacaccuuuagug

SEQ ID NO: 1304232 - RNA, 19 nt, Homo sapiens
  misc_RNA (1)...(19): siRNA sense strand
aaggaucaguagcaauuug

SEQ ID NO: 1304233 - RNA, 19 nt, Homo sapiens
  misc_RNA (1)...(19): siRNA sense strand
uauauacgggauccuuuaa

SEQ ID NO: 1304234 - RNA, 19 nt, Homo sapiens
  misc_RNA (1)...(19): siRNA sense strand
ugaaguagaaguauuugag

SEQ ID NO: 1304235 - RNA, 19 nt, Homo sapiens
  misc_RNA (1)...(19): siRNA sense strand
cuugacaguuuggauguuu

SEQ ID NO: 1304236 - RNA, 19 nt, Homo sapiens
  misc_RNA (1)...(19): siRNA sense strand
cauauauacgggauccuuu

SEQ ID NO: 1304237 - RNA, 19 nt, Homo sapiens
  misc_RNA (1)...(19): siRNA sense strand
auauauacgggauccuuua

SEQ ID NO: 1304238 - RNA, 19 nt, Homo sapiens
  misc_RNA (1)...(19): siRNA sense strand
cuuaaaggaucaguagcaa

SEQ ID NO: 1304239 - RNA, 19 nt, Homo sapiens
  misc_RNA (1)...(19): siRNA sense strand
uaaaccugaggaaggaaua

SEQ ID NO: 1304240 - RNA, 19 nt, Homo sapiens
  misc_RNA (1)...(19): siRNA sense strand
agaugacgccuguuauaga

SEQ ID NO: 1304241 - RNA, 19 nt, Homo sapiens
  misc_RNA (1)...(19): siRNA sense strand
ugugauuguuauugccaua

SEQ ID NO: 1304242 - RNA, 19 nt, Homo sapiens
  misc_RNA (1)...(19): siRNA sense strand
gagagcacgauuuauugug

SEQ ID NO: 1304243 - RNA, 19 nt, Homo sapiens
  misc_RNA (1)...(19): siRNA sense strand
gaaguauuugaguaucuug

SEQ ID NO: 1304244 - RNA, 19 nt, Homo sapiens
  misc_RNA (1)...(19): siRNA sense strand
ggcuaccugucucagauga

SEQ ID NO: 1304245 - RNA, 19 nt, Homo sapiens
  misc_RNA (1)...(19): siRNA sense strand
ccucuugccacccauacua

SEQ ID NO: 1304246 - RNA, 19 nt, Homo sapiens
  misc_RNA (1)...(19): siRNA sense strand
gauaucaggauuuggaaaa

SEQ ID NO: 1304247 - RNA, 19 nt, Homo sapiens
  misc_RNA (1)...(19): siRNA sense strand
ccaugguguugcugcugua

SEQ ID NO: 1304248 - RNA, 19 nt, Homo sapiens
  misc_RNA (1)...(19): siRNA sense strand
cagaugacgccuguuauag

SEQ ID NO: 1304249 - RNA, 19 nt, Homo sapiens
  misc_RNA (1)...(19): siRNA sense strand
cagaugguggagcugaaua

SEQ ID NO: 1304250 - RNA, 19 nt, Homo sapiens
  misc_RNA (1)...(19): siRNA sense strand
gucauugcugugauuguua

SEQ ID NO: 1304251 - RNA, 19 nt, Homo sapiens
  misc_RNA (1)...(19): siRNA sense strand
uuggugaacgaguagauua

SEQ ID NO: 1304252 - RNA, 19 nt, Homo sapiens
  misc_RNA (1)...(19): siRNA sense strand
ggagccaccaacauuugaa

SEQ ID NO: 1304253 - RNA, 19 nt, Homo sapiens
  misc_RNA (1)...(19): siRNA sense strand
gcgcuuuccuggguugcuu

SEQ ID NO: 1304254 - RNA, 19 nt, Homo sapiens
  misc_RNA (1)...(19): siRNA sense strand
uacuacaaagcaacaguua

SEQ ID NO: 1304255 - RNA, 19 nt, Homo sapiens
  misc_RNA (1)...(19): siRNA sense strand
cuugaugcaguaacuuaua

SEQ ID NO: 1304256 - RNA, 19 nt, Homo sapiens
  misc_RNA (1)...(19): siRNA sense strand
aaacauguccauauauacg

SEQ ID NO: 1304257 - RNA, 19 nt, Homo sapiens
  misc_RNA (1)...(19): siRNA sense strand
guguaaaguggucaaaugu

SEQ ID NO: 1304258 - RNA, 19 nt, Homo sapiens
  misc_RNA (1)...(19): siRNA sense strand
cuuacgaguuugguuauca

SEQ ID NO: 1304259 - RNA, 19 nt, Homo sapiens
  misc_RNA (1)...(19): siRNA sense strand
aaccaaaacccuacuauga

SEQ ID NO: 1304260 - RNA, 19 nt, Homo sapiens
  misc_RNA (1)...(19): siRNA sense strand
gcagaugguggagcugaau

SEQ ID NO: 1304261 - RNA, 19 nt, Homo sapiens
  misc_RNA (1)...(19): siRNA sense strand
uacgggauccuuuaaaugg

SEQ ID NO: 1304262 - RNA, 19 nt, Homo sapiens
  misc_RNA (1)...(19): siRNA sense strand
cgauggcagcgacacaauu

SEQ ID NO: 1304263 - RNA, 19 nt, Homo sapiens
  misc_RNA (1)...(19): siRNA sense strand
ggagcugaauaugccacuu

SEQ ID NO: 1304264 - RNA, 19 nt, Homo sapiens
  misc_RNA (1)...(19): siRNA sense strand
caacauuugaagcuaugga

SEQ ID NO: 1304265 - RNA, 19 nt, Homo sapiens
  misc_RNA (1)...(19): siRNA sense strand
ggagagagcacgauuuauu

SEQ ID NO: 1304266 - RNA, 19 nt, Homo sapiens
  misc_RNA (1)...(19): siRNA sense strand
agagaaacauguccauaua

SEQ ID NO: 1304267 - RNA, 19 nt, Homo sapiens
  misc_RNA (1)...(19): siRNA sense strand
cagaugcacuuuauuugua

SEQ ID NO: 1304268 - RNA, 19 nt, Homo sapiens
  misc_RNA (1)...(19): siRNA sense strand
ggacuuacgaguuugguua

SEQ ID NO: 1304269 - RNA, 19 nt, Homo sapiens
  misc_RNA (1)...(19): siRNA sense strand
aaacagauaucaggauuug

SEQ ID NO: 1304270 - RNA, 19 nt, Homo sapiens
  misc_RNA (1)...(19): siRNA sense strand
cuauggagcucauugguaa

SEQ ID NO: 1304271 - RNA, 19 nt, Homo sapiens
  misc_RNA (1)...(19): siRNA sense strand
aaacacaccuuuagugaag

SEQ ID NO: 1304272 - RNA, 19 nt, Homo sapiens
  misc_RNA (1)...(19): siRNA sense strand
gaacuuaaaggaucaguag

SEQ ID NO: 1304273 - RNA, 19 nt, Homo sapiens
  misc_RNA (1)...(19): siRNA sense strand
gaaaacagauaucaggauu

SEQ ID NO: 1304274 - RNA, 19 nt, Homo sapiens
  misc_RNA (1)...(19): siRNA sense strand
uaaaggaucaguagcaauu

SEQ ID NO: 1304275 - RNA, 19 nt, Homo sapiens
  misc_RNA (1)...(19): siRNA sense strand
aaaugggacuuacgaguuu

SEQ ID NO: 1304276 - RNA, 19 nt, Homo sapiens
  misc_RNA (1)...(19): siRNA sense strand
guuaucagaugcacuuuau

SEQ ID NO: 1304277 - RNA, 19 nt, Homo sapiens
  misc_RNA (1)...(19): siRNA sense strand
ugagauuggugaacgagua

SEQ ID NO: 1304278 - RNA, 19 nt, Homo sapiens
  misc_RNA (1)...(19): siRNA sense strand
gugaacgaguagauuauaa

SEQ ID NO: 1304279 - RNA, 19 nt, Homo sapiens
  misc_RNA (1)...(19): siRNA sense strand
gagagagcacgauuuauug

SEQ ID NO: 1304280 - RNA, 19 nt, Homo sapiens
  misc_RNA (1)...(19): siRNA sense strand
caaaugggacuuacgaguu

SEQ ID NO: 1304281 - RNA, 19 nt, Homo sapiens
  misc_RNA (1)...(19): siRNA sense strand
ggucauugcugugauuguu

SEQ ID NO: 1304282 - RNA, 19 nt, Homo sapiens
  misc_RNA (1)...(19): siRNA sense strand
ccagauccauuuucacuua

SEQ ID NO: 1304283 - RNA, 19 nt, Homo sapiens
  misc_RNA (1)...(19): siRNA sense strand
gaaggaauacuugacaguu

SEQ ID NO: 1304284 - RNA, 19 nt, Homo sapiens
  misc_RNA (1)...(19): siRNA sense strand
aaggaauacuugacaguuu

SEQ ID NO: 1304285 - RNA, 19 nt, Homo sapiens
  misc_RNA (1)...(19): siRNA sense strand
ucagaugacgccuguuaua

SEQ ID NO: 1304286 - RNA, 19 nt, Homo sapiens
  misc_RNA (1)...(19): siRNA sense strand
gaaaacacaccuuuaguga

SEQ ID NO: 1304287 - RNA, 19 nt, Homo sapiens
  misc_RNA (1)...(19): siRNA sense strand
gaugacgccuguuauagag

SEQ ID NO: 1304288 - RNA, 19 nt, Homo sapiens
  misc_RNA (1)...(19): siRNA sense strand
gagaaacauguccauauau

SEQ ID NO: 1304289 - RNA, 19 nt, Homo sapiens
  misc_RNA (1)...(19): siRNA sense strand
acgaguagauuauaagugu

SEQ ID NO: 1304290 - RNA, 19 nt, Homo sapiens
  misc_RNA (1)...(19): siRNA sense strand
cuacaaagcaacaguuaug

SEQ ID NO: 1304291 - RNA, 19 nt, Homo sapiens
  misc_RNA (1)...(19): siRNA sense strand
ccaccaacauuugaagcua

SEQ ID NO: 1304292 - RNA, 19 nt, Homo sapiens
  misc_RNA (1)...(19): siRNA sense strand
uauacgggauccuuuaaau

SEQ ID NO: 1304293 - RNA, 19 nt, Homo sapiens
  misc_RNA (1)...(19): siRNA sense strand
cgaguuugguuaucagaug

SEQ ID NO: 1304294 - RNA, 19 nt, Homo sapiens
  misc_RNA (1)...(19): siRNA sense strand
gaacgaguagauuauaagu

SEQ ID NO: 1304295 - RNA, 19 nt, Homo sapiens
  misc_RNA (1)...(19): siRNA sense strand
gugaggagccaccaacauu

SEQ ID NO: 1304296 - RNA, 19 nt, Homo sapiens
  misc_RNA (1)...(19): siRNA sense strand
gauggcagcgacacaauug

SEQ ID NO: 1304297 - RNA, 19 nt, Homo sapiens
  misc_RNA (1)...(19): siRNA sense strand
gcuauggagcucauuggua

SEQ ID NO: 1304298 - RNA, 19 nt, Homo sapiens
  misc_RNA (1)...(19): siRNA sense strand
gaggagccaccaacauuug

SEQ ID NO: 1304299 - RNA, 19 nt, Homo sapiens
  misc_RNA (1)...(19): siRNA sense strand
acacaccuuuagugaagua

SEQ ID NO: 1304300 - RNA, 19 nt, Homo sapiens
  misc_RNA (1)...(19): siRNA sense strand
ucucagaugacgccuguua

SEQ ID NO: 1304301 - RNA, 19 nt, Homo sapiens
  misc_RNA (1)...(19): siRNA sense strand
uagagaaacauguccauau

SEQ ID NO: 1304302 - RNA, 19 nt, Homo sapiens
  misc_RNA (1)...(19): siRNA sense strand
ggugaacgaguagauuaua

SEQ ID NO: 1304303 - RNA, 19 nt, Homo sapiens
  misc_RNA (1)...(19): siRNA sense strand
gaaguagaaguauuugagu

SEQ ID NO: 1304304 - RNA, 19 nt, Homo sapiens
  misc_RNA (1)...(19): siRNA sense strand
gaaacauguccauauauac

SEQ ID NO: 1304305 - RNA, 19 nt, Homo sapiens
  misc_RNA (1)...(19): siRNA sense strand
ugacgccuguuauagagaa

SEQ ID NO: 1304306 - RNA, 19 nt, Homo sapiens
  misc_RNA (1)...(19): siRNA sense strand
cgaguagauuauaagugua

SEQ ID NO: 1304307 - RNA, 19 nt, Homo sapiens
  misc_RNA (1)...(19): siRNA sense strand
gcacuuuauuuguaaugag

SEQ ID NO: 1304308 - RNA, 19 nt, Homo sapiens
  misc_RNA (1)...(19): siRNA sense strand
guagaaguauuugaguauc

SEQ ID NO: 1304309 - RNA, 19 nt, Homo sapiens
  misc_RNA (1)...(19): siRNA sense strand
guauuugaguaucuugaug

SEQ ID NO: 1304310 - RNA, 19 nt, Homo sapiens
  misc_RNA (1)...(19): siRNA sense strand
aggaauacuugacaguuug

SEQ ID NO: 1304311 - RNA, 19 nt, Homo sapiens
  misc_RNA (1)...(19): siRNA sense strand
aguguaaaguggucaaaug

SEQ ID NO: 1304312 - RNA, 19 nt, Homo sapiens
  misc_RNA (1)...(19): siRNA sense strand
ccaaaacccuacuaugaga

SEQ ID NO: 1304313 - RNA, 19 nt, Homo sapiens
  misc_RNA (1)...(19): siRNA sense strand
ccacccauacuauuuguga

SEQ ID NO: 1304314 - RNA, 19 nt, Homo sapiens
  misc_RNA (1)...(19): siRNA sense strand
caccaacauuugaagcuau

SEQ ID NO: 1304315 - RNA, 19 nt, Homo sapiens
  misc_RNA (1)...(19): siRNA sense strand
uuggagagagcacgauuua

SEQ ID NO: 1304316 - RNA, 19 nt, Homo sapiens
  misc_RNA (1)...(19): siRNA sense strand
gguuaucagaugcacuuua

SEQ ID NO: 1304317 - RNA, 19 nt, Homo sapiens
  misc_RNA (1)...(19): siRNA sense strand
ugaggagccaccaacauuu

SEQ ID NO: 1304318 - RNA, 19 nt, Homo sapiens
  misc_RNA (1)...(19): siRNA sense strand
ggaaggaauacuugacagu

SEQ ID NO: 1304319 - RNA, 19 nt, Homo sapiens
  misc_RNA (1)...(19): siRNA sense strand
gaggaaggaauacuugaca

SEQ ID NO: 1304320 - RNA, 19 nt, Homo sapiens
  misc_RNA (1)...(19): siRNA sense strand
ugaguaucuugaugcagua

SEQ ID NO: 1304321 - RNA, 19 nt, Homo sapiens
  misc_RNA (1)...(19): siRNA sense strand
caccuuuagugaaguagaa

SEQ ID NO: 1304322 - RNA, 19 nt, Homo sapiens
  misc_RNA (1)...(19): siRNA sense strand
acagauaucaggauuugga

SEQ ID NO: 1304323 - RNA, 19 nt, Homo sapiens
  misc_RNA (1)...(19): siRNA sense strand
ucauugcugugauuguuau

SEQ ID NO: 1304324 - RNA, 19 nt, Homo sapiens
  misc_RNA (1)...(19): siRNA sense strand
ucagaugcacuuuauuugu

SEQ ID NO: 1304325 - RNA, 19 nt, Homo sapiens
  misc_RNA (1)...(19): siRNA sense strand
gugcugcuccagaguguaa

SEQ ID NO: 1304326 - RNA, 19 nt, Homo sapiens
  misc_RNA (1)...(19): siRNA sense strand
ggaaaacacaccuuuagug

SEQ ID NO: 1304327 - RNA, 19 nt, Homo sapiens
  misc_RNA (1)...(19): siRNA sense strand
aaggaucaguagcaauuug

SEQ ID NO: 1304328 - RNA, 19 nt, Homo sapiens
  misc_RNA (1)...(19): siRNA sense strand
uauauacgggauccuuuaa

SEQ ID NO: 1304329 - RNA, 19 nt, Homo sapiens
  misc_RNA (1)...(19): siRNA sense strand
ugaaguagaaguauuugag

SEQ ID NO: 1304330 - RNA, 19 nt, Homo sapiens
  misc_RNA (1)...(19): siRNA sense strand
cuugacaguuuggauguuu

SEQ ID NO: 1304331 - RNA, 19 nt, Homo sapiens
  misc_RNA (1)...(19): siRNA sense strand
cauauauacgggauccuuu

SEQ ID NO: 1304332 - RNA, 19 nt, Homo sapiens
  misc_RNA (1)...(19): siRNA sense strand
auauauacgggauccuuua

SEQ ID NO: 1304333 - RNA, 19 nt, Homo sapiens
  misc_RNA (1)...(19): siRNA sense strand
cuuaaaggaucaguagcaa

SEQ ID NO: 1304334 - RNA, 19 nt, Homo sapiens
  misc_RNA (1)...(19): siRNA sense strand
uaaaccugaggaaggaaua

SEQ ID NO: 1304335 - RNA, 19 nt, Homo sapiens
  misc_RNA (1)...(19): siRNA sense strand
agaugacgccuguuauaga

SEQ ID NO: 1304336 - RNA, 19 nt, Homo sapiens
  misc_RNA (1)...(19): siRNA sense strand
ugugauuguuauugccaua

SEQ ID NO: 1304337 - RNA, 19 nt, Homo sapiens
  misc_RNA (1)...(19): siRNA sense strand
gagagcacgauuuauugug

SEQ ID NO: 1304338 - RNA, 19 nt, Homo sapiens
  misc_RNA (1)...(19): siRNA sense strand
gaaguauuugaguaucuug

SEQ ID NO: 1304339 - RNA, 19 nt, Homo sapiens
  misc_RNA (1)...(19): siRNA sense strand
ccucuugccacccauacua

SEQ ID NO: 1304340 - RNA, 19 nt, Homo sapiens
  misc_RNA (1)...(19): siRNA sense strand
gauaucaggauuuggaaaa

SEQ ID NO: 1304341 - RNA, 19 nt, Homo sapiens
  misc_RNA (1)...(19): siRNA sense strand
ggcuaccugucucagauga

SEQ ID NO: 1304342 - RNA, 19 nt, Homo sapiens
  misc_RNA (1)...(19): siRNA sense strand
ccaugguguugcugcugua

SEQ ID NO: 1304343 - RNA, 19 nt, Homo sapiens
  misc_RNA (1)...(19): siRNA sense strand
cagaugacgccuguuauag

SEQ ID NO: 1304344 - RNA, 19 nt, Homo sapiens
  misc_RNA (1)...(19): siRNA sense strand
gucauugcugugauuguua

SEQ ID NO: 1304345 - RNA, 19 nt, Homo sapiens
  misc_RNA (1)...(19): siRNA sense strand
uuggugaacgaguagauua

SEQ ID NO: 1304346 - RNA, 19 nt, Homo sapiens
  misc_RNA (1)...(19): siRNA sense strand
ggagccaccaacauuugaa

SEQ ID NO: 1304347 - RNA, 19 nt, Homo sapiens
  misc_RNA (1)...(19): siRNA sense strand
gcgcuuuccuggguugcuu

SEQ ID NO: 1304348 - RNA, 19 nt, Homo sapiens
  misc_RNA (1)...(19): siRNA sense strand
uacuacaaagcaacaguua

SEQ ID NO: 1304349 - RNA, 19 nt, Homo sapiens
  misc_RNA (1)...(19): siRNA sense strand
cuugaugcaguaacuuaua

SEQ ID NO: 1304350 - RNA, 19 nt, Homo sapiens
  misc_RNA (1)...(19): siRNA sense strand
aaacauguccauauauacg

SEQ ID NO: 1304351 - RNA, 19 nt, Homo sapiens
  misc_RNA (1)...(19): siRNA sense strand
guguaaaguggucaaaugu

SEQ ID NO: 1304352 - RNA, 19 nt, Homo sapiens
  misc_RNA (1)...(19): siRNA sense strand
cuuacgaguuugguuauca

SEQ ID NO: 1304353 - RNA, 19 nt, Homo sapiens
  misc_RNA (1)...(19): siRNA sense strand
uacgggauccuuuaaaugg

SEQ ID NO: 1304354 - RNA, 19 nt, Homo sapiens
  misc_RNA (1)...(19): siRNA sense strand
aaccaaaacccuacuauga

SEQ ID NO: 1304355 - RNA, 19 nt, Homo sapiens
  misc_RNA (1)...(19): siRNA sense strand
cccaauaugugaaaagguu

SEQ ID NO: 1304356 - RNA, 19 nt, Homo sapiens
  misc_RNA (1)...(19): siRNA sense strand
cgauggcagcgacacaauu

SEQ ID NO: 1304357 - RNA, 19 nt, Homo sapiens
  misc_RNA (1)...(19): siRNA sense strand
gauccauuuucacuuauug

SEQ ID NO: 1304358 - RNA, 19 nt, Homo sapiens
  misc_RNA (1)...(19): siRNA sense strand
uugaugcaguaacuuauag

SEQ ID NO: 1304359 - RNA, 19 nt, Homo sapiens
  misc_RNA (1)...(19): siRNA sense strand
guaucuugaugcaguaacu

SEQ ID NO: 1304360 - RNA, 19 nt, Homo sapiens
  misc_RNA (1)...(19): siRNA sense strand
caacauuugaagcuaugga

SEQ ID NO: 1304361 - RNA, 19 nt, Homo sapiens
  misc_RNA (1)...(19): siRNA sense strand
gagauuggugaacgaguag

SEQ ID NO: 1304362 - RNA, 19 nt, Homo sapiens
  misc_RNA (1)...(19): siRNA sense strand
ggagagagcacgauuuauu

SEQ ID NO: 1304363 - RNA, 19 nt, Homo sapiens
  misc_RNA (1)...(19): siRNA sense strand
agagaaacauguccauaua

SEQ ID NO: 1304364 - RNA, 19 nt, Homo sapiens
  misc_RNA (1)...(19): siRNA sense strand
cagaugcacuuuauuugua

SEQ ID NO: 1304365 - RNA, 19 nt, Homo sapiens
  misc_RNA (1)...(19): siRNA sense strand
ggacuuacgaguuugguua

SEQ ID NO: 1304366 - RNA, 19 nt, Homo sapiens
  misc_RNA (1)...(19): siRNA sense strand
aaacagauaucaggauuug

SEQ ID NO: 1304367 - RNA, 19 nt, Homo sapiens
  misc_RNA (1)...(19): siRNA sense strand
cuauggagcucauugguaa

SEQ ID NO: 1304368 - RNA, 19 nt, Homo sapiens
  misc_RNA (1)...(19): siRNA sense strand
aaacacaccuuuagugaag

SEQ ID NO: 1304369 - RNA, 19 nt, Homo sapiens
  misc_RNA (1)...(19): siRNA sense strand
gaacuuaaaggaucaguag

SEQ ID NO: 1304370 - RNA, 19 nt, Homo sapiens
  misc_RNA (1)...(19): siRNA sense strand
gaaaacagauaucaggauu

SEQ ID NO: 1304371 - RNA, 19 nt, Homo sapiens
  misc_RNA (1)...(19): siRNA sense strand
uaaaggaucaguagcaauu

SEQ ID NO: 1304372 - RNA, 19 nt, Homo sapiens
  misc_RNA (1)...(19): siRNA sense strand
aaaugggacuuacgaguuu

SEQ ID NO: 1304373 - RNA, 19 nt, Homo sapiens
  misc_RNA (1)...(19): siRNA sense strand
guuaucagaugcacuuuau

SEQ ID NO: 1304374 - RNA, 19 nt, Homo sapiens
  misc_RNA (1)...(19): siRNA sense strand
ugagauuggugaacgagua

SEQ ID NO: 1304375 - RNA, 19 nt, Homo sapiens
  misc_RNA (1)...(19): siRNA sense strand
gugaacgaguagauuauaa

SEQ ID NO: 1304376 - RNA, 19 nt, Homo sapiens
  misc_RNA (1)...(19): siRNA sense strand
gagagagcacgauuuauug

SEQ ID NO: 1304377 - RNA, 19 nt, Homo sapiens
  misc_RNA (1)...(19): siRNA sense strand
caaaugggacuuacgaguu

SEQ ID NO: 1304378 - RNA, 19 nt, Homo sapiens
  misc_RNA (1)...(19): siRNA sense strand
ggucauugcugugauuguu

SEQ ID NO: 1304379 - RNA, 19 nt, Homo sapiens
  misc_RNA (1)...(19): siRNA sense strand
ccagauccauuuucacuua

SEQ ID NO: 1304380 - RNA, 19 nt, Homo sapiens
  misc_RNA (1)...(19): siRNA sense strand
gaaggaauacuugacaguu

SEQ ID NO: 1304381 - RNA, 19 nt, Homo sapiens
  misc_RNA (1)...(19): siRNA sense strand
aaggaauacuugacaguuu

SEQ ID NO: 1304382 - RNA, 19 nt, Homo sapiens
  misc_RNA (1)...(19): siRNA sense strand
ucagaugacgccuguuaua

SEQ ID NO: 1304383 - RNA, 19 nt, Homo sapiens
  misc_RNA (1)...(19): siRNA sense strand
gaaaacacaccuuuaguga

SEQ ID NO: 1304384 - RNA, 19 nt, Homo sapiens
  misc_RNA (1)...(19): siRNA sense strand
gaugacgccuguuauagag

SEQ ID NO: 1304385 - RNA, 19 nt, Homo sapiens
  misc_RNA (1)...(19): siRNA sense strand
gagaaacauguccauauau

SEQ ID NO: 1304386 - RNA, 19 nt, Homo sapiens
  misc_RNA (1)...(19): siRNA sense strand
acgaguagauuauaagugu

SEQ ID NO: 1304387 - RNA, 19 nt, Homo sapiens
  misc_RNA (1)...(19): siRNA sense strand
cuacaaagcaacaguuaug

SEQ ID NO: 1304388 - RNA, 19 nt, Homo sapiens
  misc_RNA (1)...(19): siRNA sense strand
ccaccaacauuugaagcua

SEQ ID NO: 1304389 - RNA, 19 nt, Homo sapiens
  misc_RNA (1)...(19): siRNA sense strand
uauacgggauccuuuaaau

SEQ ID NO: 1304390 - RNA, 19 nt, Homo sapiens
  misc_RNA (1)...(19): siRNA sense strand
cgaguuugguuaucagaug

SEQ ID NO: 1304391 - RNA, 19 nt, Homo sapiens
  misc_RNA (1)...(19): siRNA sense strand
gaacgaguagauuauaagu

SEQ ID NO: 1304392 - RNA, 19 nt, Homo sapiens
  misc_RNA (1)...(19): siRNA sense strand
gugaggagccaccaacauu

SEQ ID NO: 1304393 - RNA, 19 nt, Homo sapiens
  misc_RNA (1)...(19): siRNA sense strand
gauggcagcgacacaauug

SEQ ID NO: 1304394 - RNA, 19 nt, Homo sapiens
  misc_RNA (1)...(19): siRNA sense strand
gcuauggagcucauuggua

SEQ ID NO: 1304395 - RNA, 19 nt, Homo sapiens
  misc_RNA (1)...(19): siRNA sense strand
gaggagccaccaacauuug

SEQ ID NO: 1304396 - RNA, 19 nt, Homo sapiens
  misc_RNA (1)...(19): siRNA sense strand
acacaccuuuagugaagua

SEQ ID NO: 1304397 - RNA, 19 nt, Homo sapiens
  misc_RNA (1)...(19): siRNA sense strand
ucucagaugacgccuguua

SEQ ID NO: 1304398 - RNA, 19 nt, Homo sapiens
  misc_RNA (1)...(19): siRNA sense strand
uagagaaacauguccauau

SEQ ID NO: 1304399 - RNA, 19 nt, Homo sapiens
  misc_RNA (1)...(19): siRNA sense strand
guuccaaagugucuuaaag

SEQ ID NO: 1304400 - RNA, 19 nt, Homo sapiens
  misc_RNA (1)...(19): siRNA sense strand
ggugaacgaguagauuaua

SEQ ID NO: 1304401 - RNA, 19 nt, Homo sapiens
  misc_RNA (1)...(19): siRNA sense strand
gaaguagaaguauuugagu

SEQ ID NO: 1304402 - RNA, 19 nt, Homo sapiens
  misc_RNA (1)...(19): siRNA sense strand
gaaacauguccauauauac

SEQ ID NO: 1304403 - RNA, 19 nt, Homo sapiens
  misc_RNA (1)...(19): siRNA sense strand
ugacgccuguuauagagaa

SEQ ID NO: 1304404 - RNA, 19 nt, Homo sapiens
  misc_RNA (1)...(19): siRNA sense strand
cgaguagauuauaagugua

SEQ ID NO: 1304405 - RNA, 19 nt, Homo sapiens
  misc_RNA (1)...(19): siRNA sense strand
gcacuuuauuuguaaugag

SEQ ID NO: 1304406 - RNA, 19 nt, Homo sapiens
  misc_RNA (1)...(19): siRNA sense strand
guagaaguauuugaguauc

SEQ ID NO: 1304407 - RNA, 19 nt, Homo sapiens
  misc_RNA (1)...(19): siRNA sense strand
guauuugaguaucuugaug

SEQ ID NO: 1304408 - RNA, 19 nt, Homo sapiens
  misc_RNA (1)...(19): siRNA sense strand
aggaauacuugacaguuug

SEQ ID NO: 1304409 - RNA, 19 nt, Homo sapiens
  misc_RNA (1)...(19): siRNA sense strand
ccaaaacccuacuaugaga

SEQ ID NO: 1304410 - RNA, 19 nt, Homo sapiens
  misc_RNA (1)...(19): siRNA sense strand
aguguaaaguggucaaaug

SEQ ID NO: 1304411 - RNA, 19 nt, Homo sapiens
  misc_RNA (1)...(19): siRNA sense strand
ccacccauacuauuuguga

SEQ ID NO: 1304412 - RNA, 19 nt, Homo sapiens
  misc_RNA (1)...(19): siRNA sense strand
caccaacauuugaagcuau

SEQ ID NO: 1304413 - RNA, 19 nt, Homo sapiens
  misc_RNA (1)...(19): siRNA sense strand
uuggagagagcacgauuua

SEQ ID NO: 1304414 - RNA, 19 nt, Homo sapiens
  misc_RNA (1)...(19): siRNA sense strand
gguuaucagaugcacuuua

SEQ ID NO: 1304415 - RNA, 19 nt, Homo sapiens
  misc_RNA (1)...(19): siRNA sense strand
ugaggagccaccaacauuu

SEQ ID NO: 1304416 - RNA, 19 nt, Homo sapiens
  misc_RNA (1)...(19): siRNA sense strand
ggaaggaauacuugacagu

SEQ ID NO: 1304417 - RNA, 19 nt, Homo sapiens
  misc_RNA (1)...(19): siRNA sense strand
gaggaaggaauacuugaca

SEQ ID NO: 1304418 - RNA, 19 nt, Homo sapiens
  misc_RNA (1)...(19): siRNA sense strand
ccaguuccaaagugucuua

SEQ ID NO: 1304419 - RNA, 19 nt, Homo sapiens
  misc_RNA (1)...(19): siRNA sense strand
ugaguaucuugaugcagua

SEQ ID NO: 1304420 - RNA, 19 nt, Homo sapiens
  misc_RNA (1)...(19): siRNA sense strand
caccuuuagugaaguagaa

SEQ ID NO: 1304421 - RNA, 19 nt, Homo sapiens
  misc_RNA (1)...(19): siRNA sense strand
acagauaucaggauuugga

SEQ ID NO: 1304422 - RNA, 19 nt, Homo sapiens
  misc_RNA (1)...(19): siRNA sense strand
ucauugcugugauuguuau

SEQ ID NO: 1304423 - RNA, 19 nt, Homo sapiens
  misc_RNA (1)...(19): siRNA sense strand
ucagaugcacuuuauuugu

SEQ ID NO: 1304424 - RNA, 19 nt, Homo sapiens
  misc_RNA (1)...(19): siRNA sense strand
gugcugcuccagaguguaa

SEQ ID NO: 1304425 - RNA, 19 nt, Homo sapiens
  misc_RNA (1)...(19): siRNA sense strand
ggaaaacacaccuuuagug

SEQ ID NO: 1304426 - RNA, 19 nt, Homo sapiens
  misc_RNA (1)...(19): siRNA sense strand
aaggaucaguagcaauuug

SEQ ID NO: 1304427 - RNA, 19 nt, Homo sapiens
  misc_RNA (1)...(19): siRNA sense strand
uauauacgggauccuuuaa

SEQ ID NO: 1304428 - RNA, 19 nt, Homo sapiens
  misc_RNA (1)...(19): siRNA sense strand
ugaaguagaaguauuugag

SEQ ID NO: 1304429 - RNA, 19 nt, Homo sapiens
  misc_RNA (1)...(19): siRNA sense strand
cuugacaguuuggauguuu

SEQ ID NO: 1304430 - RNA, 19 nt, Homo sapiens
  misc_RNA (1)...(19): siRNA sense strand
cauauauacgggauccuuu

SEQ ID NO: 1304431 - RNA, 19 nt, Homo sapiens
  misc_RNA (1)...(19): siRNA sense strand
auauauacgggauccuuua

SEQ ID NO: 1304432 - RNA, 19 nt, Homo sapiens
  misc_RNA (1)...(19): siRNA sense strand
cuuaaaggaucaguagcaa

SEQ ID NO: 1304433 - RNA, 19 nt, Homo sapiens
  misc_RNA (1)...(19): siRNA sense strand
uaaaccugaggaaggaaua

SEQ ID NO: 1304434 - RNA, 19 nt, Homo sapiens
  misc_RNA (1)...(19): siRNA sense strand
agaugacgccuguuauaga

SEQ ID NO: 1304435 - RNA, 19 nt, Homo sapiens
  misc_RNA (1)...(19): siRNA sense strand
ugugauuguuauugccaua

SEQ ID NO: 1304436 - RNA, 19 nt, Homo sapiens
  misc_RNA (1)...(19): siRNA sense strand
gagagcacgauuuauugug

SEQ ID NO: 1304437 - RNA, 19 nt, Homo sapiens
  misc_RNA (1)...(19): siRNA sense strand
gaaguauuugaguaucuug

SEQ ID NO: 1304438 - RNA, 19 nt, Homo sapiens
  misc_RNA (1)...(19): siRNA sense strand
ggcuaccugucucagauga

SEQ ID NO: 1304439 - RNA, 19 nt, Homo sapiens
  misc_RNA (1)...(19): siRNA sense strand
gauaucaggauuuggaaaa

SEQ ID NO: 1304440 - RNA, 19 nt, Homo sapiens
  misc_RNA (1)...(19): siRNA sense strand
ccucuugccacccauacua

SEQ ID NO: 1304441 - RNA, 19 nt, Homo sapiens
  misc_RNA (1)...(19): siRNA sense strand
ccaugguguugcugcugua

SEQ ID NO: 1304442 - RNA, 19 nt, Homo sapiens
  misc_RNA (1)...(19): siRNA sense strand
cagaugacgccuguuauag

SEQ ID NO: 1304443 - RNA, 19 nt, Homo sapiens
  misc_RNA (1)...(19): siRNA sense strand
uuggugaacgaguagauua

SEQ ID NO: 1304444 - RNA, 19 nt, Homo sapiens
  misc_RNA (1)...(19): siRNA sense strand
gucauugcugugauuguua

SEQ ID NO: 1304445 - RNA, 19 nt, Homo sapiens
  misc_RNA (1)...(19): siRNA sense strand
ggagccaccaacauuugaa

SEQ ID NO: 1304446 - RNA, 19 nt, Homo sapiens
  misc_RNA (1)...(19): siRNA sense strand
gcgcuuuccuggguugcuu

SEQ ID NO: 1304447 - RNA, 19 nt, Homo sapiens
  misc_RNA (1)...(19): siRNA sense strand
uacuacaaagcaacaguua

SEQ ID NO: 1304448 - RNA, 19 nt, Homo sapiens
  misc_RNA (1)...(19): siRNA sense strand
cuugaugcaguaacuuaua

SEQ ID NO: 1304449 - RNA, 19 nt, Homo sapiens
  misc_RNA (1)...(19): siRNA sense strand
aaacauguccauauauacg

SEQ ID NO: 1304450 - RNA, 19 nt, Homo sapiens
  misc_RNA (1)...(19): siRNA sense strand
guguaaaguggucaaaugu

SEQ ID NO: 1304451 - RNA, 19 nt, Homo sapiens
  misc_RNA (1)...(19): siRNA sense strand
cuuacgaguuugguuauca

SEQ ID NO: 1304452 - RNA, 19 nt, Homo sapiens
  misc_RNA (1)...(19): siRNA sense strand
uacgggauccuuuaaaugg

SEQ ID NO: 1304453 - RNA, 19 nt, Homo sapiens
  misc_RNA (1)...(19): siRNA sense strand
aaccaaaacccuacuauga

SEQ ID NO: 1304454 - RNA, 19 nt, Homo sapiens
  misc_RNA (1)...(19): siRNA sense strand
cccaauaugugaaaagguu

SEQ ID NO: 1304455 - RNA, 19 nt, Homo sapiens
  misc_RNA (1)...(19): siRNA sense strand
cgauggcagcgacacaauu

SEQ ID NO: 1304456 - RNA, 19 nt, Homo sapiens
  misc_RNA (1)...(19): siRNA sense strand
gauccauuuucacuuauug

SEQ ID NO: 1304457 - RNA, 19 nt, Homo sapiens
  misc_RNA (1)...(19): siRNA sense strand
uugaugcaguaacuuauag

SEQ ID NO: 1304458 - RNA, 19 nt, Homo sapiens
  misc_RNA (1)...(19): siRNA sense strand
guaucuugaugcaguaacu

SEQ ID NO: 1304459 - RNA, 19 nt, Homo sapiens
  misc_RNA (1)...(19): siRNA sense strand
caacauuugaagcuaugga

SEQ ID NO: 1304460 - RNA, 19 nt, Homo sapiens
  misc_RNA (1)...(19): siRNA sense strand
gagauuggugaacgaguag

SEQ ID NO: 1304461 - RNA, 19 nt, Homo sapiens
  misc_RNA (1)...(19): siRNA sense strand
ggagagagcacgauuuauu

SEQ ID NO: 1304462 - RNA, 19 nt, Homo sapiens
  misc_RNA (1)...(19): siRNA sense strand
agagaaacauguccauaua

SEQ ID NO: 1304463 - RNA, 19 nt, Homo sapiens
  misc_RNA (1)...(19): siRNA sense strand
cagaugcacuuuauuugua

SEQ ID NO: 1304464 - RNA, 19 nt, Homo sapiens
  misc_RNA (1)...(19): siRNA sense strand
ggacuuacgaguuugguua

SEQ ID NO: 1304465 - RNA, 19 nt, Homo sapiens
  misc_RNA (1)...(19): siRNA sense strand
aaacagauaucaggauuug

SEQ ID NO: 1304466 - RNA, 19 nt, Homo sapiens
  misc_RNA (1)...(19): siRNA sense strand
cuauggagcucauugguaa

SEQ ID NO: 1304467 - RNA, 19 nt, Homo sapiens
  misc_RNA (1)...(19): siRNA sense strand
aaacacaccuuuagugaag

SEQ ID NO: 1304468 - RNA, 19 nt, Homo sapiens
  misc_RNA (1)...(19): siRNA sense strand
gaacuuaaaggaucaguag

SEQ ID NO: 1304469 - RNA, 19 nt, Homo sapiens
  misc_RNA (1)...(19): siRNA sense strand
gaaaacagauaucaggauu

SEQ ID NO: 1304470 - RNA, 19 nt, Homo sapiens
  misc_RNA (1)...(19): siRNA sense strand
uaaaggaucaguagcaauu

SEQ ID NO: 1304471 - RNA, 19 nt, Homo sapiens
  misc_RNA (1)...(19): siRNA sense strand
aaaugggacuuacgaguuu

SEQ ID NO: 1304472 - RNA, 19 nt, Homo sapiens
  misc_RNA (1)...(19): siRNA sense strand
guuaucagaugcacuuuau

SEQ ID NO: 1304473 - RNA, 19 nt, Homo sapiens
  misc_RNA (1)...(19): siRNA sense strand
gagcugaauaugccacuua

SEQ ID NO: 1304474 - RNA, 19 nt, Homo sapiens
  misc_RNA (1)...(19): siRNA sense strand
ugagauuggugaacgagua

SEQ ID NO: 1304475 - RNA, 19 nt, Homo sapiens
  misc_RNA (1)...(19): siRNA sense strand
gugaacgaguagauuauaa

SEQ ID NO: 1304476 - RNA, 19 nt, Homo sapiens
  misc_RNA (1)...(19): siRNA sense strand
gagagagcacgauuuauug

SEQ ID NO: 1304477 - RNA, 19 nt, Homo sapiens
  misc_RNA (1)...(19): siRNA sense strand
caaaugggacuuacgaguu

SEQ ID NO: 1304478 - RNA, 19 nt, Homo sapiens
  misc_RNA (1)...(19): siRNA sense strand
ggucauugcugugauuguu

SEQ ID NO: 1304479 - RNA, 19 nt, Homo sapiens
  misc_RNA (1)...(19): siRNA sense strand
ccagauccauuuucacuua

SEQ ID NO: 1304480 - RNA, 19 nt, Homo sapiens
  misc_RNA (1)...(19): siRNA sense strand
gaaggaauacuugacaguu

SEQ ID NO: 1304481 - RNA, 19 nt, Homo sapiens
  misc_RNA (1)...(19): siRNA sense strand
aaggaauacuugacaguuu

SEQ ID NO: 1304482 - RNA, 19 nt, Homo sapiens
  misc_RNA (1)...(19): siRNA sense strand
ucagaugacgccuguuaua

SEQ ID NO: 1304483 - RNA, 19 nt, Homo sapiens
  misc_RNA (1)...(19): siRNA sense strand
gaaaacacaccuuuaguga

SEQ ID NO: 1304484 - RNA, 19 nt, Homo sapiens
  misc_RNA (1)...(19): siRNA sense strand
gaugacgccuguuauagag

SEQ ID NO: 1304485 - RNA, 19 nt, Homo sapiens
  misc_RNA (1)...(19): siRNA sense strand
gagaaacauguccauauau

SEQ ID NO: 1304486 - RNA, 19 nt, Homo sapiens
  misc_RNA (1)...(19): siRNA sense strand
ccacuuaccagacuaaauc

SEQ ID NO: 1304487 - RNA, 19 nt, Homo sapiens
  misc_RNA (1)...(19): siRNA sense strand
acgaguagauuauaagugu

SEQ ID NO: 1304488 - RNA, 19 nt, Homo sapiens
  misc_RNA (1)...(19): siRNA sense strand
cuacaaagcaacaguuaug

SEQ ID NO: 1304489 - RNA, 19 nt, Homo sapiens
  misc_RNA (1)...(19): siRNA sense strand
ccaccaacauuugaagcua

SEQ ID NO: 1304490 - RNA, 19 nt, Homo sapiens
  misc_RNA (1)...(19): siRNA sense strand
uauacgggauccuuuaaau

SEQ ID NO: 1304491 - RNA, 19 nt, Homo sapiens
  misc_RNA (1)...(19): siRNA sense strand
cgaguuugguuaucagaug

SEQ ID NO: 1304492 - RNA, 19 nt, Homo sapiens
  misc_RNA (1)...(19): siRNA sense strand
gaacgaguagauuauaagu

SEQ ID NO: 1304493 - RNA, 19 nt, Homo sapiens
  misc_RNA (1)...(19): siRNA sense strand
gugaggagccaccaacauu

SEQ ID NO: 1304494 - RNA, 19 nt, Homo sapiens
  misc_RNA (1)...(19): siRNA sense strand
gauggcagcgacacaauug

SEQ ID NO: 1304495 - RNA, 19 nt, Homo sapiens
  misc_RNA (1)...(19): siRNA sense strand
ucucagaugacgccuguua

SEQ ID NO: 1304496 - RNA, 19 nt, Homo sapiens
  misc_RNA (1)...(19): siRNA sense strand
gaggagccaccaacauuug

SEQ ID NO: 1304497 - RNA, 19 nt, Homo sapiens
  misc_RNA (1)...(19): siRNA sense strand
gcuauggagcucauuggua

SEQ ID NO: 1304498 - RNA, 19 nt, Homo sapiens
  misc_RNA (1)...(19): siRNA sense strand
acacaccuuuagugaagua

SEQ ID NO: 1304499 - RNA, 19 nt, Homo sapiens
  misc_RNA (1)...(19): siRNA sense strand
uagagaaacauguccauau

SEQ ID NO: 1304500 - RNA, 19 nt, Homo sapiens
  misc_RNA (1)...(19): siRNA sense strand
guuccaaagugucuuaaag

SEQ ID NO: 1304501 - RNA, 19 nt, Homo sapiens
  misc_RNA (1)...(19): siRNA sense strand
ggugaacgaguagauuaua

SEQ ID NO: 1304502 - RNA, 19 nt, Homo sapiens
  misc_RNA (1)...(19): siRNA sense strand
gaaguagaaguauuugagu

SEQ ID NO: 1304503 - RNA, 19 nt, Homo sapiens
  misc_RNA (1)...(19): siRNA sense strand
gaaacauguccauauauac

SEQ ID NO: 1304504 - RNA, 19 nt, Homo sapiens
  misc_RNA (1)...(19): siRNA sense strand
ugacgccuguuauagagaa

SEQ ID NO: 1304505 - RNA, 19 nt, Homo sapiens
  misc_RNA (1)...(19): siRNA sense strand
cgaguagauuauaagugua

SEQ ID NO: 1304506 - RNA, 19 nt, Homo sapiens
  misc_RNA (1)...(19): siRNA sense strand
gcacuuuauuuguaaugag

SEQ ID NO: 1304507 - RNA, 19 nt, Homo sapiens
  misc_RNA (1)...(19): siRNA sense strand
guagaaguauuugaguauc

SEQ ID NO: 1304508 - RNA, 19 nt, Homo sapiens
  misc_RNA (1)...(19): siRNA sense strand
guauuugaguaucuugaug

SEQ ID NO: 1304509 - RNA, 19 nt, Homo sapiens
  misc_RNA (1)...(19): siRNA sense strand
aggaauacuugacaguuug

SEQ ID NO: 1304510 - RNA, 19 nt, Homo sapiens
  misc_RNA (1)...(19): siRNA sense strand
ccaaaacccuacuaugaga

SEQ ID NO: 1304511 - RNA, 19 nt, Homo sapiens
  misc_RNA (1)...(19): siRNA sense strand
aguguaaaguggucaaaug

SEQ ID NO: 1304512 - RNA, 19 nt, Homo sapiens
  misc_RNA (1)...(19): siRNA sense strand
ccacccauacuauuuguga

SEQ ID NO: 1304513 - RNA, 19 nt, Homo sapiens
  misc_RNA (1)...(19): siRNA sense strand
uuggagagagcacgauuua

SEQ ID NO: 1304514 - RNA, 19 nt, Homo sapiens
  misc_RNA (1)...(19): siRNA sense strand
gguuaucagaugcacuuua

SEQ ID NO: 1304515 - RNA, 19 nt, Homo sapiens
  misc_RNA (1)...(19): siRNA sense strand
caccaacauuugaagcuau

SEQ ID NO: 1304516 - RNA, 19 nt, Homo sapiens
  misc_RNA (1)...(19): siRNA sense strand
ugaggagccaccaacauuu

SEQ ID NO: 1304517 - RNA, 19 nt, Homo sapiens
  misc_RNA (1)...(19): siRNA sense strand
ggaaggaauacuugacagu

SEQ ID NO: 1304518 - RNA, 19 nt, Homo sapiens
  misc_RNA (1)...(19): siRNA sense strand
gaggaaggaauacuugaca

SEQ ID NO: 1304519 - RNA, 19 nt, Homo sapiens
  misc_RNA (1)...(19): siRNA sense strand
ccaguuccaaagugucuua

SEQ ID NO: 1304520 - RNA, 19 nt, Homo sapiens
  misc_RNA (1)...(19): siRNA sense strand
ugaguaucuugaugcagua

SEQ ID NO: 1304521 - RNA, 19 nt, Homo sapiens
  misc_RNA (1)...(19): siRNA sense strand
caccuuuagugaaguagaa

SEQ ID NO: 1304522 - RNA, 19 nt, Homo sapiens
  misc_RNA (1)...(19): siRNA sense strand
acagauaucaggauuugga

SEQ ID NO: 1304523 - RNA, 19 nt, Homo sapiens
  misc_RNA (1)...(19): siRNA sense strand
ucauugcugugauuguuau

SEQ ID NO: 1304524 - RNA, 19 nt, Homo sapiens
  misc_RNA (1)...(19): siRNA sense strand
ucagaugcacuuuauuugu

SEQ ID NO: 1304525 - RNA, 19 nt, Homo sapiens
  misc_RNA (1)...(19): siRNA sense strand
gugcugcuccagaguguaa

SEQ ID NO: 1304526 - RNA, 19 nt, Homo sapiens
  misc_RNA (1)...(19): siRNA sense strand
ggaaaacacaccuuuagug

SEQ ID NO: 1304527 - RNA, 19 nt, Homo sapiens
  misc_RNA (1)...(19): siRNA sense strand
aaggaucaguagcaauuug

SEQ ID NO: 1304528 - RNA, 19 nt, Homo sapiens
  misc_RNA (1)...(19): siRNA sense strand
uauauacgggauccuuuaa

SEQ ID NO: 1304529 - RNA, 19 nt, Homo sapiens
  misc_RNA (1)...(19): siRNA sense strand
ugaaguagaaguauuugag

SEQ ID NO: 1304530 - RNA, 19 nt, Homo sapiens
  misc_RNA (1)...(19): siRNA sense strand
cuugacaguuuggauguuu

SEQ ID NO: 1304531 - RNA, 19 nt, Homo sapiens
  misc_RNA (1)...(19): siRNA sense strand
cauauauacgggauccuuu

SEQ ID NO: 1304532 - RNA, 19 nt, Homo sapiens
  misc_RNA (1)...(19): siRNA sense strand
auauauacgggauccuuua

SEQ ID NO: 1304533 - RNA, 19 nt, Homo sapiens
  misc_RNA (1)...(19): siRNA sense strand
cuuaaaggaucaguagcaa

SEQ ID NO: 1304534 - RNA, 19 nt, Homo sapiens
  misc_RNA (1)...(19): siRNA sense strand
uaaaccugaggaaggaaua

SEQ ID NO: 1304535 - RNA, 19 nt, Homo sapiens
  misc_RNA (1)...(19): siRNA sense strand
agaugacgccuguuauaga

SEQ ID NO: 1304536 - RNA, 19 nt, Homo sapiens
  misc_RNA (1)...(19): siRNA sense strand
ugugauuguuauugccaua

SEQ ID NO: 1304537 - RNA, 19 nt, Homo sapiens
  misc_RNA (1)...(19): siRNA sense strand
gagagcacgauuuauugug

SEQ ID NO: 1304538 - RNA, 19 nt, Homo sapiens
  misc_RNA (1)...(19): siRNA sense strand
gaaguauuugaguaucuug

SEQ ID NO: 1304539 - RNA, 19 nt, Homo sapiens
  misc_RNA (1)...(19): siRNA sense strand
ggcuaccugucucagauga

SEQ ID NO: 1304540 - RNA, 19 nt, Homo sapiens
  misc_RNA (1)...(19): siRNA sense strand
gauaucaggauuuggaaaa

SEQ ID NO: 1304541 - RNA, 19 nt, Homo sapiens
  misc_RNA (1)...(19): siRNA sense strand
ccucuugccacccauacua

SEQ ID NO: 1304542 - RNA, 19 nt, Homo sapiens
  misc_RNA (1)...(19): siRNA sense strand
ccaugguguugcugcugua

SEQ ID NO: 1304543 - RNA, 19 nt, Homo sapiens
  misc_RNA (1)...(19): siRNA sense strand
cagaugacgccuguuauag

SEQ ID NO: 1304544 - RNA, 19 nt, Homo sapiens
  misc_RNA (1)...(19): siRNA sense strand
cagaugguggagcugaaua

SEQ ID NO: 1304545 - RNA, 19 nt, Homo sapiens
  misc_RNA (1)...(19): siRNA sense strand
gucauugcugugauuguua

SEQ ID NO: 1304546 - RNA, 19 nt, Homo sapiens
  misc_RNA (1)...(19): siRNA sense strand
ggagccaccaacauuugaa

SEQ ID NO: 1304547 - RNA, 19 nt, Homo sapiens
  misc_RNA (1)...(19): siRNA sense strand
uuggugaacgaguagauua

SEQ ID NO: 1304548 - RNA, 19 nt, Homo sapiens
  misc_RNA (1)...(19): siRNA sense strand
gcgcuuuccuggguugcuu

SEQ ID NO: 1304549 - RNA, 19 nt, Homo sapiens
  misc_RNA (1)...(19): siRNA sense strand
uacuacaaagcaacaguua

SEQ ID NO: 1304550 - RNA, 19 nt, Homo sapiens
  misc_RNA (1)...(19): siRNA sense strand
cuugaugcaguaacuuaua

SEQ ID NO: 1304551 - RNA, 19 nt, Homo sapiens
  misc_RNA (1)...(19): siRNA sense strand
aaacauguccauauauacg

SEQ ID NO: 1304552 - RNA, 19 nt, Homo sapiens
  misc_RNA (1)...(19): siRNA sense strand
guguaaaguggucaaaugu

SEQ ID NO: 1304553 - RNA, 19 nt, Homo sapiens
  misc_RNA (1)...(19): siRNA sense strand
cuuacgaguuugguuauca

SEQ ID NO: 1304554 - RNA, 19 nt, Homo sapiens
  misc_RNA (1)...(19): siRNA sense strand
uacgggauccuuuaaaugg

SEQ ID NO: 1304555 - RNA, 19 nt, Homo sapiens
  misc_RNA (1)...(19): siRNA sense strand
gcagaugguggagcugaau

SEQ ID NO: 1304556 - RNA, 19 nt, Homo sapiens
  misc_RNA (1)...(19): siRNA sense strand
aaccaaaacccuacuauga

SEQ ID NO: 1304557 - RNA, 19 nt, Homo sapiens
  misc_RNA (1)...(19): siRNA sense strand
uugaugcaguaacuuauag

SEQ ID NO: 1304558 - RNA, 19 nt, Homo sapiens
  misc_RNA (1)...(19): siRNA sense strand
ggagcugaauaugccacuu

SEQ ID NO: 1304559 - RNA, 19 nt, Homo sapiens
  misc_RNA (1)...(19): siRNA sense strand
cgauggcagcgacacaauu

SEQ ID NO: 1304560 - RNA, 19 nt, Homo sapiens
  misc_RNA (1)...(19): siRNA sense strand
gauccauuuucacuuauug

SEQ ID NO: 1304561 - RNA, 19 nt, Homo sapiens
  misc_RNA (1)...(19): siRNA sense strand
ggagagagcacgauuuauu

SEQ ID NO: 1304562 - RNA, 19 nt, Homo sapiens
  misc_RNA (1)...(19): siRNA sense strand
agagaaacauguccauaua

SEQ ID NO: 1304563 - RNA, 19 nt, Homo sapiens
  misc_RNA (1)...(19): siRNA sense strand
cagaugcacuuuauuugua

SEQ ID NO: 1304564 - RNA, 19 nt, Homo sapiens
  misc_RNA (1)...(19): siRNA sense strand
ggacuuacgaguuugguua

SEQ ID NO: 1304565 - RNA, 19 nt, Homo sapiens
  misc_RNA (1)...(19): siRNA sense strand
aaacagauaucaggauuug

SEQ ID NO: 1304566 - RNA, 19 nt, Homo sapiens
  misc_RNA (1)...(19): siRNA sense strand
cuauggagcucauugguaa

SEQ ID NO: 1304567 - RNA, 19 nt, Homo sapiens
  misc_RNA (1)...(19): siRNA sense strand
aaacacaccuuuagugaag

SEQ ID NO: 1304568 - RNA, 19 nt, Homo sapiens
  misc_RNA (1)...(19): siRNA sense strand
gaacuuaaaggaucaguag

SEQ ID NO: 1304569 - RNA, 19 nt, Homo sapiens
  misc_RNA (1)...(19): siRNA sense strand
gaaaacagauaucaggauu

SEQ ID NO: 1304570 - RNA, 19 nt, Homo sapiens
  misc_RNA (1)...(19): siRNA sense strand
uaaaggaucaguagcaauu

SEQ ID NO: 1304571 - RNA, 19 nt, Homo sapiens
  misc_RNA (1)...(19): siRNA sense strand
aaaugggacuuacgaguuu

SEQ ID NO: 1304572 - RNA, 19 nt, Homo sapiens
  misc_RNA (1)...(19): siRNA sense strand
guuaucagaugcacuuuau

SEQ ID NO: 1304573 - RNA, 19 nt, Homo sapiens
  misc_RNA (1)...(19): siRNA sense strand
ugagauuggugaacgagua

SEQ ID NO: 1304574 - RNA, 19 nt, Homo sapiens
  misc_RNA (1)...(19): siRNA sense strand
gugaacgaguagauuauaa

SEQ ID NO: 1304575 - RNA, 19 nt, Homo sapiens
  misc_RNA (1)...(19): siRNA sense strand
gagagagcacgauuuauug

SEQ ID NO: 1304576 - RNA, 19 nt, Homo sapiens
  misc_RNA (1)...(19): siRNA sense strand
caaaugggacuuacgaguu

SEQ ID NO: 1304577 - RNA, 19 nt, Homo sapiens
  misc_RNA (1)...(19): siRNA sense strand
ggucauugcugugauuguu

SEQ ID NO: 1304578 - RNA, 19 nt, Homo sapiens
  misc_RNA (1)...(19): siRNA sense strand
ccagauccauuuucacuua

SEQ ID NO: 1304579 - RNA, 19 nt, Homo sapiens
  misc_RNA (1)...(19): siRNA sense strand
gaaggaauacuugacaguu

SEQ ID NO: 1304580 - RNA, 19 nt, Homo sapiens
  misc_RNA (1)...(19): siRNA sense strand
aaggaauacuugacaguuu

SEQ ID NO: 1304581 - RNA, 19 nt, Homo sapiens
  misc_RNA (1)...(19): siRNA sense strand
ucagaugacgccuguuaua

SEQ ID NO: 1304582 - RNA, 19 nt, Homo sapiens
  misc_RNA (1)...(19): siRNA sense strand
gaaaacacaccuuuaguga

SEQ ID NO: 1304583 - RNA, 19 nt, Homo sapiens
  misc_RNA (1)...(19): siRNA sense strand
gaugacgccuguuauagag

SEQ ID NO: 1304584 - RNA, 19 nt, Homo sapiens
  misc_RNA (1)...(19): siRNA sense strand
gagaaacauguccauauau

SEQ ID NO: 1304585 - RNA, 19 nt, Homo sapiens
  misc_RNA (1)...(19): siRNA sense strand
acgaguagauuauaagugu

SEQ ID NO: 1304586 - RNA, 19 nt, Homo sapiens
  misc_RNA (1)...(19): siRNA sense strand
cuacaaagcaacaguuaug

SEQ ID NO: 1304587 - RNA, 19 nt, Homo sapiens
  misc_RNA (1)...(19): siRNA sense strand
ccaccaacauuugaagcua

SEQ ID NO: 1304588 - RNA, 19 nt, Homo sapiens
  misc_RNA (1)...(19): siRNA sense strand
uauacgggauccuuuaaau

SEQ ID NO: 1304589 - RNA, 19 nt, Homo sapiens
  misc_RNA (1)...(19): siRNA sense strand
cgaguuugguuaucagaug

SEQ ID NO: 1304590 - RNA, 19 nt, Homo sapiens
  misc_RNA (1)...(19): siRNA sense strand
gaacgaguagauuauaagu

SEQ ID NO: 1304591 - RNA, 19 nt, Homo sapiens
  misc_RNA (1)...(19): siRNA sense strand
gugaggagccaccaacauu

SEQ ID NO: 1304592 - RNA, 19 nt, Homo sapiens
  misc_RNA (1)...(19): siRNA sense strand
gauggcagcgacacaauug

SEQ ID NO: 1304593 - RNA, 19 nt, Homo sapiens
  misc_RNA (1)...(19): siRNA sense strand
gcuauggagcucauuggua

SEQ ID NO: 1304594 - RNA, 19 nt, Homo sapiens
  misc_RNA (1)...(19): siRNA sense strand
gaggagccaccaacauuug

SEQ ID NO: 1304595 - RNA, 19 nt, Homo sapiens
  misc_RNA (1)...(19): siRNA sense strand
acacaccuuuagugaagua

SEQ ID NO: 1304596 - RNA, 19 nt, Homo sapiens
  misc_RNA (1)...(19): siRNA sense strand
ucucagaugacgccuguua

SEQ ID NO: 1304597 - RNA, 19 nt, Homo sapiens
  misc_RNA (1)...(19): siRNA sense strand
uagagaaacauguccauau

SEQ ID NO: 1304598 - RNA, 19 nt, Homo sapiens
  misc_RNA (1)...(19): siRNA sense strand
guuccaaagugucuuaaag

SEQ ID NO: 1304599 - RNA, 19 nt, Homo sapiens
  misc_RNA (1)...(19): siRNA sense strand
ggugaacgaguagauuaua

SEQ ID NO: 1304600 - RNA, 19 nt, Homo sapiens
  misc_RNA (1)...(19): siRNA sense strand
gaaguagaaguauuugagu

SEQ ID NO: 1304601 - RNA, 19 nt, Homo sapiens
  misc_RNA (1)...(19): siRNA sense strand
gaaacauguccauauauac

SEQ ID NO: 1304602 - RNA, 19 nt, Homo sapiens
  misc_RNA (1)...(19): siRNA sense strand
ugacgccuguuauagagaa

SEQ ID NO: 1304603 - RNA, 19 nt, Homo sapiens
  misc_RNA (1)...(19): siRNA sense strand
cgaguagauuauaagugua

SEQ ID NO: 1304604 - RNA, 19 nt, Homo sapiens
  misc_RNA (1)...(19): siRNA sense strand
gcacuuuauuuguaaugag

SEQ ID NO: 1304605 - RNA, 19 nt, Homo sapiens
  misc_RNA (1)...(19): siRNA sense strand
guagaaguauuugaguauc

SEQ ID NO: 1304606 - RNA, 19 nt, Homo sapiens
  misc_RNA (1)...(19): siRNA sense strand
guauuugaguaucuugaug

SEQ ID NO: 1304607 - RNA, 19 nt, Homo sapiens
  misc_RNA (1)...(19): siRNA sense strand
aggaauacuugacaguuug

SEQ ID NO: 1304608 - RNA, 19 nt, Homo sapiens
  misc_RNA (1)...(19): siRNA sense strand
ccaaaacccuacuaugaga

SEQ ID NO: 1304609 - RNA, 19 nt, Homo sapiens
  misc_RNA (1)...(19): siRNA sense strand
aguguaaaguggucaaaug

SEQ ID NO: 1304610 - RNA, 19 nt, Homo sapiens
  misc_RNA (1)...(19): siRNA sense strand
ccacccauacuauuuguga

SEQ ID NO: 1304611 - RNA, 19 nt, Homo sapiens
  misc_RNA (1)...(19): siRNA sense strand
caccaacauuugaagcuau

SEQ ID NO: 1304612 - RNA, 19 nt, Homo sapiens
  misc_RNA (1)...(19): siRNA sense strand
uuggagagagcacgauuua

SEQ ID NO: 1304613 - RNA, 19 nt, Homo sapiens
  misc_RNA (1)...(19): siRNA sense strand
gguuaucagaugcacuuua

SEQ ID NO: 1304614 - RNA, 19 nt, Homo sapiens
  misc_RNA (1)...(19): siRNA sense strand
ugaggagccaccaacauuu

SEQ ID NO: 1304615 - RNA, 19 nt, Homo sapiens
  misc_RNA (1)...(19): siRNA sense strand
ggaaggaauacuugacagu

SEQ ID NO: 1304616 - RNA, 19 nt, Homo sapiens
  misc_RNA (1)...(19): siRNA sense strand
gaggaaggaauacuugaca

SEQ ID NO: 1304617 - RNA, 19 nt, Homo sapiens
  misc_RNA (1)...(19): siRNA sense strand
ccaguuccaaagugucuua

SEQ ID NO: 1304618 - RNA, 19 nt, Homo sapiens
  misc_RNA (1)...(19): siRNA sense strand
ugaguaucuugaugcagua

SEQ ID NO: 1304619 - RNA, 19 nt, Homo sapiens
  misc_RNA (1)...(19): siRNA sense strand
caccuuuagugaaguagaa

SEQ ID NO: 1304620 - RNA, 19 nt, Homo sapiens
  misc_RNA (1)...(19): siRNA sense strand
acagauaucaggauuugga

SEQ ID NO: 1304621 - RNA, 19 nt, Homo sapiens
  misc_RNA (1)...(19): siRNA sense strand
ucauugcugugauuguuau

SEQ ID NO: 1304622 - RNA, 19 nt, Homo sapiens
  misc_RNA (1)...(19): siRNA sense strand
ucagaugcacuuuauuugu

SEQ ID NO: 1304623 - RNA, 19 nt, Homo sapiens
  misc_RNA (1)...(19): siRNA sense strand
gugcugcuccagaguguaa

SEQ ID NO: 1304624 - RNA, 19 nt, Homo sapiens
  misc_RNA (1)...(19): siRNA sense strand
ggaaaacacaccuuuagug

SEQ ID NO: 1304625 - RNA, 19 nt, Homo sapiens
  misc_RNA (1)...(19): siRNA sense strand
aaggaucaguagcaauuug

SEQ ID NO: 1304626 - RNA, 19 nt, Homo sapiens
  misc_RNA (1)...(19): siRNA sense strand
uauauacgggauccuuuaa

SEQ ID NO: 1304627 - RNA, 19 nt, Homo sapiens
  misc_RNA (1)...(19): siRNA sense strand
ugaaguagaaguauuugag

SEQ ID NO: 1304628 - RNA, 19 nt, Homo sapiens
  misc_RNA (1)...(19): siRNA sense strand
cuugacaguuuggauguuu

SEQ ID NO: 1304629 - RNA, 19 nt, Homo sapiens
  misc_RNA (1)...(19): siRNA sense strand
cauauauacgggauccuuu

SEQ ID NO: 1304630 - RNA, 19 nt, Homo sapiens
  misc_RNA (1)...(19): siRNA sense strand
auauauacgggauccuuua

SEQ ID NO: 1304631 - RNA, 19 nt, Homo sapiens
  misc_RNA (1)...(19): siRNA sense strand
cuuaaaggaucaguagcaa

SEQ ID NO: 1304632 - RNA, 19 nt, Homo sapiens
  misc_RNA (1)...(19): siRNA sense strand
uaaaccugaggaaggaaua

SEQ ID NO: 1304633 - RNA, 19 nt, Homo sapiens
  misc_RNA (1)...(19): siRNA sense strand
agaugacgccuguuauaga

SEQ ID NO: 1304634 - RNA, 19 nt, Homo sapiens
  misc_RNA (1)...(19): siRNA sense strand
ugugauuguuauugccaua

SEQ ID NO: 1304635 - RNA, 19 nt, Homo sapiens
  misc_RNA (1)...(19): siRNA sense strand
gagagcacgauuuauugug

SEQ ID NO: 1304636 - RNA, 19 nt, Homo sapiens
  misc_RNA (1)...(19): siRNA sense strand
gaaguauuugaguaucuug

SEQ ID NO: 1304637 - RNA, 19 nt, Homo sapiens
  misc_RNA (1)...(19): siRNA sense strand
ggcuaccugucucagauga

SEQ ID NO: 1304638 - RNA, 19 nt, Homo sapiens
  misc_RNA (1)...(19): siRNA sense strand
gauaucaggauuuggaaaa

SEQ ID NO: 1304639 - RNA, 19 nt, Homo sapiens
  misc_RNA (1)...(19): siRNA sense strand
ccucuugccacccauacua

SEQ ID NO: 1304640 - RNA, 19 nt, Homo sapiens
  misc_RNA (1)...(19): siRNA sense strand
ccaugguguugcugcugua

SEQ ID NO: 1304641 - RNA, 19 nt, Homo sapiens
  misc_RNA (1)...(19): siRNA sense strand
cagaugacgccuguuauag

SEQ ID NO: 1304642 - RNA, 19 nt, Homo sapiens
  misc_RNA (1)...(19): siRNA sense strand
uuggugaacgaguagauua

SEQ ID NO: 1304643 - RNA, 19 nt, Homo sapiens
  misc_RNA (1)...(19): siRNA sense strand
gucauugcugugauuguua

SEQ ID NO: 1304644 - RNA, 19 nt, Homo sapiens
  misc_RNA (1)...(19): siRNA sense strand
ggagccaccaacauuugaa

SEQ ID NO: 1304645 - RNA, 19 nt, Homo sapiens
  misc_RNA (1)...(19): siRNA sense strand
gcgcuuuccuggguugcuu

SEQ ID NO: 1304646 - RNA, 19 nt, Homo sapiens
  misc_RNA (1)...(19): siRNA sense strand
uacuacaaagcaacaguua

SEQ ID NO: 1304647 - RNA, 19 nt, Homo sapiens
  misc_RNA (1)...(19): siRNA sense strand
cuugaugcaguaacuuaua

SEQ ID NO: 1304648 - RNA, 19 nt, Homo sapiens
  misc_RNA (1)...(19): siRNA sense strand
aaacauguccauauauacg

SEQ ID NO: 1304649 - RNA, 19 nt, Homo sapiens
  misc_RNA (1)...(19): siRNA sense strand
guguaaaguggucaaaugu

SEQ ID NO: 1304650 - RNA, 19 nt, Homo sapiens
  misc_RNA (1)...(19): siRNA sense strand
cuuacgaguuugguuauca

SEQ ID NO: 1304651 - RNA, 19 nt, Homo sapiens
  misc_RNA (1)...(19): siRNA sense strand
uacgggauccuuuaaaugg

SEQ ID NO: 1304652 - RNA, 19 nt, Homo sapiens
  misc_RNA (1)...(19): siRNA sense strand
aaccaaaacccuacuauga

SEQ ID NO: 1304653 - RNA, 19 nt, Homo sapiens
  misc_RNA (1)...(19): siRNA sense strand
cccaauaugugaaaagguu

SEQ ID NO: 1304654 - RNA, 19 nt, Homo sapiens
  misc_RNA (1)...(19): siRNA sense strand
cgauggcagcgacacaauu

SEQ ID NO: 1304655 - RNA, 19 nt, Homo sapiens
  misc_RNA (1)...(19): siRNA sense strand
gauccauuuucacuuauug

SEQ ID NO: 1304656 - RNA, 19 nt, Homo sapiens
  misc_RNA (1)...(19): siRNA sense strand
uugaugcaguaacuuauag

SEQ ID NO: 1304657 - RNA, 19 nt, Homo sapiens
  misc_RNA (1)...(19): siRNA sense strand
guaucuugaugcaguaacu

SEQ ID NO: 1304658 - RNA, 19 nt, Homo sapiens
  misc_RNA (1)...(19): siRNA sense strand
caacauuugaagcuaugga

SEQ ID NO: 1304659 - RNA, 19 nt, Homo sapiens
  misc_RNA (1)...(19): siRNA sense strand
gagauuggugaacgaguag

SEQ ID NO: 1304660 - RNA, 19 nt, Homo sapiens
  misc_RNA (1)...(19): siRNA sense strand
ggagagagcacgauuuauu

SEQ ID NO: 1304661 - RNA, 19 nt, Homo sapiens
  misc_RNA (1)...(19): siRNA sense strand
agagaaacauguccauaua

SEQ ID NO: 1304662 - RNA, 19 nt, Homo sapiens
  misc_RNA (1)...(19): siRNA sense strand
cagaugcacuuuauuugua

SEQ ID NO: 1304663 - RNA, 19 nt, Homo sapiens
  misc_RNA (1)...(19): siRNA sense strand
ggacuuacgaguuugguua

SEQ ID NO: 1304664 - RNA, 19 nt, Homo sapiens
  misc_RNA (1)...(19): siRNA sense strand
aaacagauaucaggauuug

SEQ ID NO: 1304665 - RNA, 19 nt, Homo sapiens
  misc_RNA (1)...(19): siRNA sense strand
cuauggagcucauugguaa

SEQ ID NO: 1304666 - RNA, 19 nt, Homo sapiens
  misc_RNA (1)...(19): siRNA sense strand
aaacacaccuuuagugaag

SEQ ID NO: 1304667 - RNA, 19 nt, Homo sapiens
  misc_RNA (1)...(19): siRNA sense strand
gaacuuaaaggaucaguag

SEQ ID NO: 1304668 - RNA, 19 nt, Homo sapiens
  misc_RNA (1)...(19): siRNA sense strand
gaaaacagauaucaggauu

SEQ ID NO: 1304669 - RNA, 19 nt, Homo sapiens
  misc_RNA (1)...(19): siRNA sense strand
uaaaggaucaguagcaauu

SEQ ID NO: 1304670 - RNA, 19 nt, Homo sapiens
  misc_RNA (1)...(19): siRNA sense strand
aaaugggacuuacgaguuu

SEQ ID NO: 1304671 - RNA, 19 nt, Homo sapiens
  misc_RNA (1)...(19): siRNA sense strand
guuaucagaugcacuuuau

SEQ ID NO: 1304672 - RNA, 19 nt, Homo sapiens
  misc_RNA (1)...(19): siRNA sense strand
ugagauuggugaacgagua

SEQ ID NO: 1304673 - RNA, 19 nt, Homo sapiens
  misc_RNA (1)...(19): siRNA sense strand
gugaacgaguagauuauaa

SEQ ID NO: 1304674 - RNA, 19 nt, Homo sapiens
  misc_RNA (1)...(19): siRNA sense strand
gagagagcacgauuuauug

SEQ ID NO: 1304675 - RNA, 19 nt, Homo sapiens
  misc_RNA (1)...(19): siRNA sense strand
caaaugggacuuacgaguu

SEQ ID NO: 1304676 - RNA, 19 nt, Homo sapiens
  misc_RNA (1)...(19): siRNA sense strand
ggucauugcugugauuguu

SEQ ID NO: 1304677 - RNA, 19 nt, Homo sapiens
  misc_RNA (1)...(19): siRNA sense strand
ccagauccauuuucacuua

SEQ ID NO: 1304678 - RNA, 19 nt, Homo sapiens
  misc_RNA (1)...(19): siRNA sense strand
gaaggaauacuugacaguu

SEQ ID NO: 1304679 - RNA, 19 nt, Homo sapiens
  misc_RNA (1)...(19): siRNA sense strand
aaggaauacuugacaguuu

SEQ ID NO: 1304680 - RNA, 19 nt, Homo sapiens
  misc_RNA (1)...(19): siRNA sense strand
ucagaugacgccuguuaua

SEQ ID NO: 1304681 - RNA, 19 nt, Homo sapiens
  misc_RNA (1)...(19): siRNA sense strand
gaaaacacaccuuuaguga

SEQ ID NO: 1304682 - RNA, 19 nt, Homo sapiens
  misc_RNA (1)...(19): siRNA sense strand
gaugacgccuguuauagag

SEQ ID NO: 1304683 - RNA, 19 nt, Homo sapiens
  misc_RNA (1)...(19): siRNA sense strand
gagaaacauguccauauau

SEQ ID NO: 1304684 - RNA, 19 nt, Homo sapiens
  misc_RNA (1)...(19): siRNA sense strand
acgaguagauuauaagugu

SEQ ID NO: 1304685 - RNA, 19 nt, Homo sapiens
  misc_RNA (1)...(19): siRNA sense strand
cuacaaagcaacaguuaug

SEQ ID NO: 1304686 - RNA, 19 nt, Homo sapiens
  misc_RNA (1)...(19): siRNA sense strand
ccaccaacauuugaagcua

SEQ ID NO: 1304687 - RNA, 19 nt, Homo sapiens
  misc_RNA (1)...(19): siRNA sense strand
uauacgggauccuuuaaau

SEQ ID NO: 1304688 - RNA, 19 nt, Homo sapiens
  misc_RNA (1)...(19): siRNA sense strand
cgaguuugguuaucagaug

SEQ ID NO: 1304689 - RNA, 19 nt, Homo sapiens
  misc_RNA (1)...(19): siRNA sense strand
gaacgaguagauuauaagu

SEQ ID NO: 1304690 - RNA, 19 nt, Homo sapiens
  misc_RNA (1)...(19): siRNA sense strand
gugaggagccaccaacauu

SEQ ID NO: 1304691 - RNA, 19 nt, Homo sapiens
  misc_RNA (1)...(19): siRNA sense strand
gauggcagcgacacaauug

SEQ ID NO: 1304692 - RNA, 19 nt, Homo sapiens
  misc_RNA (1)...(19): siRNA sense strand
gcuauggagcucauuggua

SEQ ID NO: 1304693 - RNA, 19 nt, Homo sapiens
  misc_RNA (1)...(19): siRNA sense strand
gaggagccaccaacauuug

SEQ ID NO: 1304694 - RNA, 19 nt, Homo sapiens
  misc_RNA (1)...(19): siRNA sense strand
acacaccuuuagugaagua

SEQ ID NO: 1304695 - RNA, 19 nt, Homo sapiens
  misc_RNA (1)...(19): siRNA sense strand
ucucagaugacgccuguua

SEQ ID NO: 1304696 - RNA, 19 nt, Homo sapiens
  misc_RNA (1)...(19): siRNA sense strand
uagagaaacauguccauau

SEQ ID NO: 1304697 - RNA, 19 nt, Homo sapiens
  misc_RNA (1)...(19): siRNA sense strand
ggugaacgaguagauuaua

SEQ ID NO: 1304698 - RNA, 19 nt, Homo sapiens
  misc_RNA (1)...(19): siRNA sense strand
gaaguagaaguauuugagu

SEQ ID NO: 1304699 - RNA, 19 nt, Homo sapiens
  misc_RNA (1)...(19): siRNA sense strand
gaaacauguccauauauac

SEQ ID NO: 1304700 - RNA, 19 nt, Homo sapiens
  misc_RNA (1)...(19): siRNA sense strand
ugacgccuguuauagagaa

SEQ ID NO: 1304701 - RNA, 19 nt, Homo sapiens
  misc_RNA (1)...(19): siRNA sense strand
cgaguagauuauaagugua

SEQ ID NO: 1304702 - RNA, 19 nt, Homo sapiens
  misc_RNA (1)...(19): siRNA sense strand
gcacuuuauuuguaaugag

SEQ ID NO: 1304703 - RNA, 19 nt, Homo sapiens
  misc_RNA (1)...(19): siRNA sense strand
guagaaguauuugaguauc

SEQ ID NO: 1304704 - RNA, 19 nt, Homo sapiens
  misc_RNA (1)...(19): siRNA sense strand
guauuugaguaucuugaug

SEQ ID NO: 1304705 - RNA, 19 nt, Homo sapiens
  misc_RNA (1)...(19): siRNA sense strand
aggaauacuugacaguuug

SEQ ID NO: 1304706 - RNA, 19 nt, Homo sapiens
  misc_RNA (1)...(19): siRNA sense strand
aguguaaaguggucaaaug

SEQ ID NO: 1304707 - RNA, 19 nt, Homo sapiens
  misc_RNA (1)...(19): siRNA sense strand
ccaaaacccuacuaugaga

SEQ ID NO: 1304708 - RNA, 19 nt, Homo sapiens
  misc_RNA (1)...(19): siRNA sense strand
ccacccauacuauuuguga

SEQ ID NO: 1304709 - RNA, 19 nt, Homo sapiens
  misc_RNA (1)...(19): siRNA sense strand
caccaacauuugaagcuau

SEQ ID NO: 1304710 - RNA, 19 nt, Homo sapiens
  misc_RNA (1)...(19): siRNA sense strand
uuggagagagcacgauuua

SEQ ID NO: 1304711 - RNA, 19 nt, Homo sapiens
  misc_RNA (1)...(19): siRNA sense strand
gguuaucagaugcacuuua

SEQ ID NO: 1304712 - RNA, 19 nt, Homo sapiens
  misc_RNA (1)...(19): siRNA sense strand
ugaggagccaccaacauuu

SEQ ID NO: 1304713 - RNA, 19 nt, Homo sapiens
  misc_RNA (1)...(19): siRNA sense strand
ggaaggaauacuugacagu

SEQ ID NO: 1304714 - RNA, 19 nt, Homo sapiens
  misc_RNA (1)...(19): siRNA sense strand
gaggaaggaauacuugaca

SEQ ID NO: 1304715 - RNA, 19 nt, Homo sapiens
  misc_RNA (1)...(19): siRNA sense strand
ugaguaucuugaugcagua

SEQ ID NO: 1304716 - RNA, 19 nt, Homo sapiens
  misc_RNA (1)...(19): siRNA sense strand
caccuuuagugaaguagaa

SEQ ID NO: 1304717 - RNA, 19 nt, Homo sapiens
  misc_RNA (1)...(19): siRNA sense strand
acagauaucaggauuugga

SEQ ID NO: 1304718 - RNA, 19 nt, Homo sapiens
  misc_RNA (1)...(19): siRNA sense strand
ucauugcugugauuguuau

SEQ ID NO: 1304719 - RNA, 19 nt, Homo sapiens
  misc_RNA (1)...(19): siRNA sense strand
ucagaugcacuuuauuugu

SEQ ID NO: 1304720 - RNA, 19 nt, Homo sapiens
  misc_RNA (1)...(19): siRNA sense strand
gugcugcuccagaguguaa

SEQ ID NO: 1304721 - RNA, 19 nt, Homo sapiens
  misc_RNA (1)...(19): siRNA sense strand
ggaaaacacaccuuuagug

SEQ ID NO: 1304722 - RNA, 19 nt, Homo sapiens
  misc_RNA (1)...(19): siRNA sense strand
aaggaucaguagcaauuug

SEQ ID NO: 1304723 - RNA, 19 nt, Homo sapiens
  misc_RNA (1)...(19): siRNA sense strand
uauauacgggauccuuuaa

SEQ ID NO: 1304724 - RNA, 19 nt, Homo sapiens
  misc_RNA (1)...(19): siRNA sense strand
ugaaguagaaguauuugag

SEQ ID NO: 1304725 - RNA, 19 nt, Homo sapiens
  misc_RNA (1)...(19): siRNA sense strand
cuugacaguuuggauguuu

SEQ ID NO: 1304726 - RNA, 19 nt, Homo sapiens
  misc_RNA (1)...(19): siRNA sense strand
cauauauacgggauccuuu

SEQ ID NO: 1304727 - RNA, 19 nt, Homo sapiens
  misc_RNA (1)...(19): siRNA sense strand
auauauacgggauccuuua

SEQ ID NO: 1304728 - RNA, 19 nt, Homo sapiens
  misc_RNA (1)...(19): siRNA sense strand
cuuaaaggaucaguagcaa

SEQ ID NO: 1304729 - RNA, 19 nt, Homo sapiens
  misc_RNA (1)...(19): siRNA sense strand
uaaaccugaggaaggaaua

SEQ ID NO: 1304730 - RNA, 19 nt, Homo sapiens
  misc_RNA (1)...(19): siRNA sense strand
agaugacgccuguuauaga

SEQ ID NO: 1304731 - RNA, 19 nt, Homo sapiens
  misc_RNA (1)...(19): siRNA sense strand
ugugauuguuauugccaua

SEQ ID NO: 1304732 - RNA, 19 nt, Homo sapiens
  misc_RNA (1)...(19): siRNA sense strand
gagagcacgauuuauugug

SEQ ID NO: 1304733 - RNA, 19 nt, Homo sapiens
  misc_RNA (1)...(19): siRNA sense strand
gaaguauuugaguaucuug

SEQ ID NO: 1304734 - RNA, 19 nt, Homo sapiens
  misc_RNA (1)...(19): siRNA sense strand
ccucuugccacccauacua

SEQ ID NO: 1304735 - RNA, 19 nt, Homo sapiens
  misc_RNA (1)...(19): siRNA sense strand
gauaucaggauuuggaaaa

SEQ ID NO: 1304736 - RNA, 19 nt, Homo sapiens
  misc_RNA (1)...(19): siRNA sense strand
ggcuaccugucucagauga

SEQ ID NO: 1304737 - RNA, 19 nt, Homo sapiens
  misc_RNA (1)...(19): siRNA sense strand
ccaugguguugcugcugua

SEQ ID NO: 1304738 - RNA, 19 nt, Homo sapiens
  misc_RNA (1)...(19): siRNA sense strand
cagaugacgccuguuauag

SEQ ID NO: 1304739 - RNA, 19 nt, Homo sapiens
  misc_RNA (1)...(19): siRNA sense strand
gucauugcugugauuguua

SEQ ID NO: 1304740 - RNA, 19 nt, Homo sapiens
  misc_RNA (1)...(19): siRNA sense strand
uuggugaacgaguagauua

SEQ ID NO: 1304741 - RNA, 19 nt, Homo sapiens
  misc_RNA (1)...(19): siRNA sense strand
ggagccaccaacauuugaa

SEQ ID NO: 1304742 - RNA, 19 nt, Homo sapiens
  misc_RNA (1)...(19): siRNA sense strand
gcgcuuuccuggguugcuu

SEQ ID NO: 1304743 - RNA, 19 nt, Homo sapiens
  misc_RNA (1)...(19): siRNA sense strand
uacuacaaagcaacaguua

SEQ ID NO: 1304744 - RNA, 19 nt, Homo sapiens
  misc_RNA (1)...(19): siRNA sense strand
cuugaugcaguaacuuaua

SEQ ID NO: 1304745 - RNA, 19 nt, Homo sapiens
  misc_RNA (1)...(19): siRNA sense strand
aaacauguccauauauacg

SEQ ID NO: 1304746 - RNA, 19 nt, Homo sapiens
  misc_RNA (1)...(19): siRNA sense strand
guguaaaguggucaaaugu

SEQ ID NO: 1304747 - RNA, 19 nt, Homo sapiens
  misc_RNA (1)...(19): siRNA sense strand
cuuacgaguuugguuauca

SEQ ID NO: 1304748 - RNA, 19 nt, Homo sapiens
  misc_RNA (1)...(19): siRNA sense strand
uacgggauccuuuaaaugg

SEQ ID NO: 1304749 - RNA, 19 nt, Homo sapiens
  misc_RNA (1)...(19): siRNA sense strand
aaccaaaacccuacuauga

SEQ ID NO: 1304750 - RNA, 19 nt, Homo sapiens
  misc_RNA (1)...(19): siRNA sense strand
cccaauaugugaaaagguu

SEQ ID NO: 1304751 - RNA, 19 nt, Homo sapiens
  misc_RNA (1)...(19): siRNA sense strand
cgauggcagcgacacaauu

SEQ ID NO: 1304752 - RNA, 19 nt, Homo sapiens
  misc_RNA (1)...(19): siRNA sense strand
gauccauuuucacuuauug

SEQ ID NO: 1304753 - RNA, 19 nt, Homo sapiens
  misc_RNA (1)...(19): siRNA sense strand
uugaugcaguaacuuauag

SEQ ID NO: 1304754 - RNA, 19 nt, Homo sapiens
  misc_RNA (1)...(19): siRNA sense strand
guaucuugaugcaguaacu

SEQ ID NO: 1304755 - RNA, 19 nt, Homo sapiens
  misc_RNA (1)...(19): siRNA sense strand
caacauuugaagcuaugga

SEQ ID NO: 1304756 - RNA, 19 nt, Homo sapiens
  misc_RNA (1)...(19): siRNA sense strand
gagauuggugaacgaguag

SEQ ID NO: 1304757 - RNA, 19 nt, Homo sapiens
  misc_RNA (1)...(19): siRNA sense strand
ggagagagcacgauuuauu

SEQ ID NO: 1304758 - RNA, 19 nt, Homo sapiens
  misc_RNA (1)...(19): siRNA sense strand
agagaaacauguccauaua

SEQ ID NO: 1304759 - RNA, 19 nt, Homo sapiens
  misc_RNA (1)...(19): siRNA sense strand
cagaugcacuuuauuugua

SEQ ID NO: 1304760 - RNA, 19 nt, Homo sapiens
  misc_RNA (1)...(19): siRNA sense strand
ggacuuacgaguuugguua

SEQ ID NO: 1304761 - RNA, 19 nt, Homo sapiens
  misc_RNA (1)...(19): siRNA sense strand
aaacagauaucaggauuug

SEQ ID NO: 1304762 - RNA, 19 nt, Homo sapiens
  misc_RNA (1)...(19): siRNA sense strand
cuauggagcucauugguaa

SEQ ID NO: 1304763 - RNA, 19 nt, Homo sapiens
  misc_RNA (1)...(19): siRNA sense strand
aaacacaccuuuagugaag

SEQ ID NO: 1304764 - RNA, 19 nt, Homo sapiens
  misc_RNA (1)...(19): siRNA sense strand
gaacuuaaaggaucaguag

SEQ ID NO: 1304765 - RNA, 19 nt, Homo sapiens
  misc_RNA (1)...(19): siRNA sense strand
gaaaacagauaucaggauu

SEQ ID NO: 1304766 - RNA, 19 nt, Homo sapiens
  misc_RNA (1)...(19): siRNA sense strand
uaaaggaucaguagcaauu

SEQ ID NO: 1304767 - RNA, 19 nt, Homo sapiens
  misc_RNA (1)...(19): siRNA sense strand
aaaugggacuuacgaguuu

SEQ ID NO: 1304768 - RNA, 19 nt, Homo sapiens
  misc_RNA (1)...(19): siRNA sense strand
guuaucagaugcacuuuau

SEQ ID NO: 1304769 - RNA, 19 nt, Homo sapiens
  misc_RNA (1)...(19): siRNA sense strand
gagcugaauaugccacuua

SEQ ID NO: 1304770 - RNA, 19 nt, Homo sapiens
  misc_RNA (1)...(19): siRNA sense strand
ugagauuggugaacgagua

SEQ ID NO: 1304771 - RNA, 19 nt, Homo sapiens
  misc_RNA (1)...(19): siRNA sense strand
gugaacgaguagauuauaa

SEQ ID NO: 1304772 - RNA, 19 nt, Homo sapiens
  misc_RNA (1)...(19): siRNA sense strand
gagagagcacgauuuauug

SEQ ID NO: 1304773 - RNA, 19 nt, Homo sapiens
  misc_RNA (1)...(19): siRNA sense strand
caaaugggacuuacgaguu

SEQ ID NO: 1304774 - RNA, 19 nt, Homo sapiens
  misc_RNA (1)...(19): siRNA sense strand
ggucauugcugugauuguu

SEQ ID NO: 1304775 - RNA, 19 nt, Homo sapiens
  misc_RNA (1)...(19): siRNA sense strand
ccagauccauuuucacuua

SEQ ID NO: 1304776 - RNA, 19 nt, Homo sapiens
  misc_RNA (1)...(19): siRNA sense strand
gaaggaauacuugacaguu

SEQ ID NO: 1304777 - RNA, 19 nt, Homo sapiens
  misc_RNA (1)...(19): siRNA sense strand
aaggaauacuugacaguuu

SEQ ID NO: 1304778 - RNA, 19 nt, Homo sapiens
  misc_RNA (1)...(19): siRNA sense strand
ucagaugacgccuguuaua

SEQ ID NO: 1304779 - RNA, 19 nt, Homo sapiens
  misc_RNA (1)...(19): siRNA sense strand
gaaaacacaccuuuaguga

SEQ ID NO: 1304780 - RNA, 19 nt, Homo sapiens
  misc_RNA (1)...(19): siRNA sense strand
gaugacgccuguuauagag

SEQ ID NO: 1304781 - RNA, 19 nt, Homo sapiens
  misc_RNA (1)...(19): siRNA sense strand
gagaaacauguccauauau

SEQ ID NO: 1304782 - RNA, 19 nt, Homo sapiens
  misc_RNA (1)...(19): siRNA sense strand
ccacuuaccagacuaaauc

SEQ ID NO: 1304783 - RNA, 19 nt, Homo sapiens
  misc_RNA (1)...(19): siRNA sense strand
acgaguagauuauaagugu

SEQ ID NO: 1304784 - RNA, 19 nt, Homo sapiens
  misc_RNA (1)...(19): siRNA sense strand
cuacaaagcaacaguuaug

SEQ ID NO: 1304785 - RNA, 19 nt, Homo sapiens
  misc_RNA (1)...(19): siRNA sense strand
ccaccaacauuugaagcua

SEQ ID NO: 1304786 - RNA, 19 nt, Homo sapiens
  misc_RNA (1)...(19): siRNA sense strand
uauacgggauccuuuaaau

SEQ ID NO: 1304787 - RNA, 19 nt, Homo sapiens
  misc_RNA (1)...(19): siRNA sense strand
cgaguuugguuaucagaug

SEQ ID NO: 1304788 - RNA, 19 nt, Homo sapiens
  misc_RNA (1)...(19): siRNA sense strand
gaacgaguagauuauaagu

SEQ ID NO: 1304789 - RNA, 19 nt, Homo sapiens
  misc_RNA (1)...(19): siRNA sense strand
gugaggagccaccaacauu

SEQ ID NO: 1304790 - RNA, 19 nt, Homo sapiens
  misc_RNA (1)...(19): siRNA sense strand
gauggcagcgacacaauug

SEQ ID NO: 1304791 - RNA, 19 nt, Homo sapiens
  misc_RNA (1)...(19): siRNA sense strand
ucucagaugacgccuguua

SEQ ID NO: 1304792 - RNA, 19 nt, Homo sapiens
  misc_RNA (1)...(19): siRNA sense strand
gaggagccaccaacauuug

SEQ ID NO: 1304793 - RNA, 19 nt, Homo sapiens
  misc_RNA (1)...(19): siRNA sense strand
gcuauggagcucauuggua

SEQ ID NO: 1304794 - RNA, 19 nt, Homo sapiens
  misc_RNA (1)...(19): siRNA sense strand
acacaccuuuagugaagua

SEQ ID NO: 1304795 - RNA, 19 nt, Homo sapiens
  misc_RNA (1)...(19): siRNA sense strand
uagagaaacauguccauau

SEQ ID NO: 1304796 - RNA, 19 nt, Homo sapiens
  misc_RNA (1)...(19): siRNA sense strand
ggugaacgaguagauuaua

SEQ ID NO: 1304797 - RNA, 19 nt, Homo sapiens
  misc_RNA (1)...(19): siRNA sense strand
gaaguagaaguauuugagu

SEQ ID NO: 1304798 - RNA, 19 nt, Homo sapiens
  misc_RNA (1)...(19): siRNA sense strand
gaaacauguccauauauac

SEQ ID NO: 1304799 - RNA, 19 nt, Homo sapiens
  misc_RNA (1)...(19): siRNA sense strand
ugacgccuguuauagagaa

SEQ ID NO: 1304800 - RNA, 19 nt, Homo sapiens
  misc_RNA (1)...(19): siRNA sense strand
cgaguagauuauaagugua

SEQ ID NO: 1304801 - RNA, 19 nt, Homo sapiens
  misc_RNA (1)...(19): siRNA sense strand
gcacuuuauuuguaaugag

SEQ ID NO: 1304802 - RNA, 19 nt, Homo sapiens
  misc_RNA (1)...(19): siRNA sense strand
guagaaguauuugaguauc

SEQ ID NO: 1304803 - RNA, 19 nt, Homo sapiens
  misc_RNA (1)...(19): siRNA sense strand
guauuugaguaucuugaug

SEQ ID NO: 1304804 - RNA, 19 nt, Homo sapiens
  misc_RNA (1)...(19): siRNA sense strand
aggaauacuugacaguuug

SEQ ID NO: 1304805 - RNA, 19 nt, Homo sapiens
  misc_RNA (1)...(19): siRNA sense strand
ccaaaacccuacuaugaga

SEQ ID NO: 1304806 - RNA, 19 nt, Homo sapiens
  misc_RNA (1)...(19): siRNA sense strand
aguguaaaguggucaaaug

SEQ ID NO: 1304807 - RNA, 19 nt, Homo sapiens
  misc_RNA (1)...(19): siRNA sense strand
ccacccauacuauuuguga

SEQ ID NO: 1304808 - RNA, 19 nt, Homo sapiens
  misc_RNA (1)...(19): siRNA sense strand
uuggagagagcacgauuua

SEQ ID NO: 1304809 - RNA, 19 nt, Homo sapiens
  misc_RNA (1)...(19): siRNA sense strand
gguuaucagaugcacuuua

SEQ ID NO: 1304810 - RNA, 19 nt, Homo sapiens
  misc_RNA (1)...(19): siRNA sense strand
caccaacauuugaagcuau

SEQ ID NO: 1304811 - RNA, 19 nt, Homo sapiens
  misc_RNA (1)...(19): siRNA sense strand
ugaggagccaccaacauuu

SEQ ID NO: 1304812 - RNA, 19 nt, Homo sapiens
  misc_RNA (1)...(19): siRNA sense strand
ggaaggaauacuugacagu

SEQ ID NO: 1304813 - RNA, 19 nt, Homo sapiens
  misc_RNA (1)...(19): siRNA sense strand
gaggaaggaauacuugaca

SEQ ID NO: 1304814 - RNA, 19 nt, Homo sapiens
  misc_RNA (1)...(19): siRNA sense strand
ugaguaucuugaugcagua

SEQ ID NO: 1304815 - RNA, 19 nt, Homo sapiens
  misc_RNA (1)...(19): siRNA sense strand
caccuuuagugaaguagaa

SEQ ID NO: 1304816 - RNA, 19 nt, Homo sapiens
  misc_RNA (1)...(19): siRNA sense strand
acagauaucaggauuugga

SEQ ID NO: 1304817 - RNA, 19 nt, Homo sapiens
  misc_RNA (1)...(19): siRNA sense strand
ucauugcugugauuguuau

SEQ ID NO: 1304818 - RNA, 19 nt, Homo sapiens
  misc_RNA (1)...(19): siRNA sense strand
ucagaugcacuuuauuugu

SEQ ID NO: 1304819 - RNA, 19 nt, Homo sapiens
  misc_RNA (1)...(19): siRNA sense strand
gugcugcuccagaguguaa

SEQ ID NO: 1304820 - RNA, 19 nt, Homo sapiens
  misc_RNA (1)...(19): siRNA sense strand
ggaaaacacaccuuuagug

SEQ ID NO: 1304821 - RNA, 19 nt, Homo sapiens
  misc_RNA (1)...(19): siRNA sense strand
aaggaucaguagcaauuug

SEQ ID NO: 1304822 - RNA, 19 nt, Homo sapiens
  misc_RNA (1)...(19): siRNA sense strand
uauauacgggauccuuuaa

SEQ ID NO: 1304823 - RNA, 19 nt, Homo sapiens
  misc_RNA (1)...(19): siRNA sense strand
ugaaguagaaguauuugag

SEQ ID NO: 1304824 - RNA, 19 nt, Homo sapiens
  misc_RNA (1)...(19): siRNA sense strand
cuugacaguuuggauguuu

SEQ ID NO: 1304825 - RNA, 19 nt, Homo sapiens
  misc_RNA (1)...(19): siRNA sense strand
cauauauacgggauccuuu

SEQ ID NO: 1304826 - RNA, 19 nt, Homo sapiens
  misc_RNA (1)...(19): siRNA sense strand
auauauacgggauccuuua

SEQ ID NO: 1304827 - RNA, 19 nt, Homo sapiens
  misc_RNA (1)...(19): siRNA sense strand
cuuaaaggaucaguagcaa

SEQ ID NO: 1304828 - RNA, 19 nt, Homo sapiens
  misc_RNA (1)...(19): siRNA sense strand
uaaaccugaggaaggaaua

SEQ ID NO: 1304829 - RNA, 19 nt, Homo sapiens
  misc_RNA (1)...(19): siRNA sense strand
agaugacgccuguuauaga

SEQ ID NO: 1304830 - RNA, 19 nt, Homo sapiens
  misc_RNA (1)...(19): siRNA sense strand
ugugauuguuauugccaua

SEQ ID NO: 1304831 - RNA, 19 nt, Homo sapiens
  misc_RNA (1)...(19): siRNA sense strand
gagagcacgauuuauugug

SEQ ID NO: 1304832 - RNA, 19 nt, Homo sapiens
  misc_RNA (1)...(19): siRNA sense strand
gaaguauuugaguaucuug

SEQ ID NO: 1304833 - RNA, 19 nt, Homo sapiens
  misc_RNA (1)...(19): siRNA sense strand
ggcuaccugucucagauga

SEQ ID NO: 1304834 - RNA, 19 nt, Homo sapiens
  misc_RNA (1)...(19): siRNA sense strand
gauaucaggauuuggaaaa

SEQ ID NO: 1304835 - RNA, 19 nt, Homo sapiens
  misc_RNA (1)...(19): siRNA sense strand
ccucuugccacccauacua

SEQ ID NO: 1304836 - RNA, 19 nt, Homo sapiens
  misc_RNA (1)...(19): siRNA sense strand
ccaugguguugcugcugua

SEQ ID NO: 1304837 - RNA, 19 nt, Homo sapiens
  misc_RNA (1)...(19): siRNA sense strand
cagaugacgccuguuauag

SEQ ID NO: 1304838 - RNA, 19 nt, Homo sapiens
  misc_RNA (1)...(19): siRNA sense strand
cagaugguggagcugaaua

SEQ ID NO: 1304839 - RNA, 19 nt, Homo sapiens
  misc_RNA (1)...(19): siRNA sense strand
uuggugaacgaguagauua

SEQ ID NO: 1304840 - RNA, 19 nt, Homo sapiens
  misc_RNA (1)...(19): siRNA sense strand
gucauugcugugauuguua

SEQ ID NO: 1304841 - RNA, 19 nt, Homo sapiens
  misc_RNA (1)...(19): siRNA sense strand
ggagccaccaacauuugaa

SEQ ID NO: 1304842 - RNA, 19 nt, Homo sapiens
  misc_RNA (1)...(19): siRNA sense strand
gcgcuuuccuggguugcuu

SEQ ID NO: 1304843 - RNA, 19 nt, Homo sapiens
  misc_RNA (1)...(19): siRNA sense strand
uacuacaaagcaacaguua

SEQ ID NO: 1304844 - RNA, 19 nt, Homo sapiens
  misc_RNA (1)...(19): siRNA sense strand
cuugaugcaguaacuuaua

SEQ ID NO: 1304845 - RNA, 19 nt, Homo sapiens
  misc_RNA (1)...(19): siRNA sense strand
aaacauguccauauauacg

SEQ ID NO: 1304846 - RNA, 19 nt, Homo sapiens
  misc_RNA (1)...(19): siRNA sense strand
guguaaaguggucaaaugu

SEQ ID NO: 1304847 - RNA, 19 nt, Homo sapiens
  misc_RNA (1)...(19): siRNA sense strand
cuuacgaguuugguuauca

SEQ ID NO: 1304848 - RNA, 19 nt, Homo sapiens
  misc_RNA (1)...(19): siRNA sense strand
uacgggauccuuuaaaugg

SEQ ID NO: 1304849 - RNA, 19 nt, Homo sapiens
  misc_RNA (1)...(19): siRNA sense strand
gcagaugguggagcugaau

SEQ ID NO: 1304850 - RNA, 19 nt, Homo sapiens
  misc_RNA (1)...(19): siRNA sense strand
aaccaaaacccuacuauga

SEQ ID NO: 1304851 - RNA, 19 nt, Homo sapiens
  misc_RNA (1)...(19): siRNA sense strand
cccaauaugugaaaagguu

SEQ ID NO: 1304852 - RNA, 19 nt, Homo sapiens
  misc_RNA (1)...(19): siRNA sense strand
ggagcugaauaugccacuu

SEQ ID NO: 1304853 - RNA, 19 nt, Homo sapiens
  misc_RNA (1)...(19): siRNA sense strand
cgauggcagcgacacaauu

SEQ ID NO: 1304854 - RNA, 19 nt, Homo sapiens
  misc_RNA (1)...(19): siRNA sense strand
gauccauuuucacuuauug

SEQ ID NO: 1304855 - RNA, 19 nt, Homo sapiens
  misc_RNA (1)...(19): siRNA sense strand
uugaugcaguaacuuauag

SEQ ID NO: 1304856 - RNA, 19 nt, Homo sapiens
  misc_RNA (1)...(19): siRNA sense strand
guaucuugaugcaguaacu

SEQ ID NO: 1304857 - RNA, 19 nt, Homo sapiens
  misc_RNA (1)...(19): siRNA sense strand
ggagagagcacgauuuauu

SEQ ID NO: 1304858 - RNA, 19 nt, Homo sapiens
  misc_RNA (1)...(19): siRNA sense strand
agagaaacauguccauaua

SEQ ID NO: 1304859 - RNA, 19 nt, Homo sapiens
  misc_RNA (1)...(19): siRNA sense strand
cagaugcacuuuauuugua

SEQ ID NO: 1304860 - RNA, 19 nt, Homo sapiens
  misc_RNA (1)...(19): siRNA sense strand
ggacuuacgaguuugguua

SEQ ID NO: 1304861 - RNA, 19 nt, Homo sapiens
  misc_RNA (1)...(19): siRNA sense strand
aaacagauaucaggauuug

SEQ ID NO: 1304862 - RNA, 19 nt, Homo sapiens
  misc_RNA (1)...(19): siRNA sense strand
cuauggagcucauugguaa

SEQ ID NO: 1304863 - RNA, 19 nt, Homo sapiens
  misc_RNA (1)...(19): siRNA sense strand
aaacacaccuuuagugaag

SEQ ID NO: 1304864 - RNA, 19 nt, Homo sapiens
  misc_RNA (1)...(19): siRNA sense strand
gaacuuaaaggaucaguag

SEQ ID NO: 1304865 - RNA, 19 nt, Homo sapiens
  misc_RNA (1)...(19): siRNA sense strand
gaaaacagauaucaggauu

SEQ ID NO: 1304866 - RNA, 19 nt, Homo sapiens
  misc_RNA (1)...(19): siRNA sense strand
uaaaggaucaguagcaauu

SEQ ID NO: 1304867 - RNA, 19 nt, Homo sapiens
  misc_RNA (1)...(19): siRNA sense strand
aaaugggacuuacgaguuu

SEQ ID NO: 1304868 - RNA, 19 nt, Homo sapiens
  misc_RNA (1)...(19): siRNA sense strand
guuaucagaugcacuuuau

SEQ ID NO: 1304869 - RNA, 19 nt, Homo sapiens
  misc_RNA (1)...(19): siRNA sense strand
ugagauuggugaacgagua

SEQ ID NO: 1304870 - RNA, 19 nt, Homo sapiens
  misc_RNA (1)...(19): siRNA sense strand
gugaacgaguagauuauaa

SEQ ID NO: 1304871 - RNA, 19 nt, Homo sapiens
  misc_RNA (1)...(19): siRNA sense strand
gagagagcacgauuuauug

SEQ ID NO: 1304872 - RNA, 19 nt, Homo sapiens
  misc_RNA (1)...(19): siRNA sense strand
caaaugggacuuacgaguu

SEQ ID NO: 1304873 - RNA, 19 nt, Homo sapiens
  misc_RNA (1)...(19): siRNA sense strand
ggucauugcugugauuguu

SEQ ID NO: 1304874 - RNA, 19 nt, Homo sapiens
  misc_RNA (1)...(19): siRNA sense strand
ccagauccauuuucacuua

SEQ ID NO: 1304875 - RNA, 19 nt, Homo sapiens
  misc_RNA (1)...(19): siRNA sense strand
gaaggaauacuugacaguu

SEQ ID NO: 1304876 - RNA, 19 nt, Homo sapiens
  misc_RNA (1)...(19): siRNA sense strand
aaggaauacuugacaguuu

SEQ ID NO: 1304877 - RNA, 19 nt, Homo sapiens
  misc_RNA (1)...(19): siRNA sense strand
ucagaugacgccuguuaua

SEQ ID NO: 1304878 - RNA, 19 nt, Homo sapiens
  misc_RNA (1)...(19): siRNA sense strand
gaaaacacaccuuuaguga

SEQ ID NO: 1304879 - RNA, 19 nt, Homo sapiens
  misc_RNA (1)...(19): siRNA sense strand
gaugacgccuguuauagag

SEQ ID NO: 1304880 - RNA, 19 nt, Homo sapiens
  misc_RNA (1)...(19): siRNA sense strand
gagaaacauguccauauau

SEQ ID NO: 1304881 - RNA, 19 nt, Homo sapiens
  misc_RNA (1)...(19): siRNA sense strand
acgaguagauuauaagugu

SEQ ID NO: 1304882 - RNA, 19 nt, Homo sapiens
  misc_RNA (1)...(19): siRNA sense strand
cuacaaagcaacaguuaug

SEQ ID NO: 1304883 - RNA, 19 nt, Homo sapiens
  misc_RNA (1)...(19): siRNA sense strand
ccaccaacauuugaagcua

SEQ ID NO: 1304884 - RNA, 19 nt, Homo sapiens
  misc_RNA (1)...(19): siRNA sense strand
uauacgggauccuuuaaau

SEQ ID NO: 1304885 - RNA, 19 nt, Homo sapiens
  misc_RNA (1)...(19): siRNA sense strand
cgaguuugguuaucagaug

SEQ ID NO: 1304886 - RNA, 19 nt, Homo sapiens
  misc_RNA (1)...(19): siRNA sense strand
gaacgaguagauuauaagu

SEQ ID NO: 1304887 - RNA, 19 nt, Homo sapiens
  misc_RNA (1)...(19): siRNA sense strand
gugaggagccaccaacauu

SEQ ID NO: 1304888 - RNA, 19 nt, Homo sapiens
  misc_RNA (1)...(19): siRNA sense strand
gauggcagcgacacaauug

SEQ ID NO: 1304889 - RNA, 19 nt, Homo sapiens
  misc_RNA (1)...(19): siRNA sense strand
gcuauggagcucauuggua

SEQ ID NO: 1304890 - RNA, 19 nt, Homo sapiens
  misc_RNA (1)...(19): siRNA sense strand
gaggagccaccaacauuug

SEQ ID NO: 1304891 - RNA, 19 nt, Homo sapiens
  misc_RNA (1)...(19): siRNA sense strand
acacaccuuuagugaagua

SEQ ID NO: 1304892 - RNA, 19 nt, Homo sapiens
  misc_RNA (1)...(19): siRNA sense strand
ucucagaugacgccuguua

SEQ ID NO: 1304893 - RNA, 19 nt, Homo sapiens
  misc_RNA (1)...(19): siRNA sense strand
uagagaaacauguccauau

SEQ ID NO: 1304894 - RNA, 19 nt, Homo sapiens
  misc_RNA (1)...(19): siRNA sense strand
guuccaaagugucuuaaag

SEQ ID NO: 1304895 - RNA, 19 nt, Homo sapiens
  misc_RNA (1)...(19): siRNA sense strand
ggugaacgaguagauuaua

SEQ ID NO: 1304896 - RNA, 19 nt, Homo sapiens
  misc_RNA (1)...(19): siRNA sense strand
gaaguagaaguauuugagu

SEQ ID NO: 1304897 - RNA, 19 nt, Homo sapiens
  misc_RNA (1)...(19): siRNA sense strand
gaaacauguccauauauac

SEQ ID NO: 1304898 - RNA, 19 nt, Homo sapiens
  misc_RNA (1)...(19): siRNA sense strand
ugacgccuguuauagagaa

SEQ ID NO: 1304899 - RNA, 19 nt, Homo sapiens
  misc_RNA (1)...(19): siRNA sense strand
cgaguagauuauaagugua

SEQ ID NO: 1304900 - RNA, 19 nt, Homo sapiens
  misc_RNA (1)...(19): siRNA sense strand
gcacuuuauuuguaaugag

SEQ ID NO: 1304901 - RNA, 19 nt, Homo sapiens
  misc_RNA (1)...(19): siRNA sense strand
guagaaguauuugaguauc

SEQ ID NO: 1304902 - RNA, 19 nt, Homo sapiens
  misc_RNA (1)...(19): siRNA sense strand
guauuugaguaucuugaug

SEQ ID NO: 1304903 - RNA, 19 nt, Homo sapiens
  misc_RNA (1)...(19): siRNA sense strand
aggaauacuugacaguuug

SEQ ID NO: 1304904 - RNA, 19 nt, Homo sapiens
  misc_RNA (1)...(19): siRNA sense strand
ccaaaacccuacuaugaga

SEQ ID NO: 1304905 - RNA, 19 nt, Homo sapiens
  misc_RNA (1)...(19): siRNA sense strand
aguguaaaguggucaaaug

SEQ ID NO: 1304906 - RNA, 19 nt, Homo sapiens
  misc_RNA (1)...(19): siRNA sense strand
ccacccauacuauuuguga

SEQ ID NO: 1304907 - RNA, 19 nt, Homo sapiens
  misc_RNA (1)...(19): siRNA sense strand
caccaacauuugaagcuau

SEQ ID NO: 1304908 - RNA, 19 nt, Homo sapiens
  misc_RNA (1)...(19): siRNA sense strand
uuggagagagcacgauuua

SEQ ID NO: 1304909 - RNA, 19 nt, Homo sapiens
  misc_RNA (1)...(19): siRNA sense strand
gguuaucagaugcacuuua

SEQ ID NO: 1304910 - RNA, 19 nt, Homo sapiens
  misc_RNA (1)...(19): siRNA sense strand
ugaggagccaccaacauuu

SEQ ID NO: 1304911 - RNA, 19 nt, Homo sapiens
  misc_RNA (1)...(19): siRNA sense strand
ggaaggaauacuugacagu

SEQ ID NO: 1304912 - RNA, 19 nt, Homo sapiens
  misc_RNA (1)...(19): siRNA sense strand
gaggaaggaauacuugaca

SEQ ID NO: 1304913 - RNA, 19 nt, Homo sapiens
  misc_RNA (1)...(19): siRNA sense strand
ccaguuccaaagugucuua

SEQ ID NO: 1304914 - RNA, 19 nt, Homo sapiens
  misc_RNA (1)...(19): siRNA sense strand
ugaguaucuugaugcagua

SEQ ID NO: 1304915 - RNA, 19 nt, Homo sapiens
  misc_RNA (1)...(19): siRNA sense strand
caccuuuagugaaguagaa

SEQ ID NO: 1304916 - RNA, 19 nt, Homo sapiens
  misc_RNA (1)...(19): siRNA sense strand
acagauaucaggauuugga

SEQ ID NO: 1304917 - RNA, 19 nt, Homo sapiens
  misc_RNA (1)...(19): siRNA sense strand
ucauugcugugauuguuau

SEQ ID NO: 1304918 - RNA, 19 nt, Homo sapiens
  misc_RNA (1)...(19): siRNA sense strand
ucagaugcacuuuauuugu

SEQ ID NO: 1304919 - RNA, 19 nt, Homo sapiens
  misc_RNA (1)...(19): siRNA sense strand
gugcugcuccagaguguaa

SEQ ID NO: 1304920 - RNA, 19 nt, Homo sapiens
  misc_RNA (1)...(19): siRNA sense strand
ggaaaacacaccuuuagug

SEQ ID NO: 1304921 - RNA, 19 nt, Homo sapiens
  misc_RNA (1)...(19): siRNA sense strand
aaggaucaguagcaauuug

SEQ ID NO: 1304922 - RNA, 19 nt, Homo sapiens
  misc_RNA (1)...(19): siRNA sense strand
uauauacgggauccuuuaa

SEQ ID NO: 1304923 - RNA, 19 nt, Homo sapiens
  misc_RNA (1)...(19): siRNA sense strand
ugaaguagaaguauuugag

SEQ ID NO: 1304924 - RNA, 19 nt, Homo sapiens
  misc_RNA (1)...(19): siRNA sense strand
cuugacaguuuggauguuu

SEQ ID NO: 1304925 - RNA, 19 nt, Homo sapiens
  misc_RNA (1)...(19): siRNA sense strand
cauauauacgggauccuuu

SEQ ID NO: 1304926 - RNA, 19 nt, Homo sapiens
  misc_RNA (1)...(19): siRNA sense strand
auauauacgggauccuuua

SEQ ID NO: 1304927 - RNA, 19 nt, Homo sapiens
  misc_RNA (1)...(19): siRNA sense strand
cuuaaaggaucaguagcaa

SEQ ID NO: 1304928 - RNA, 19 nt, Homo sapiens
  misc_RNA (1)...(19): siRNA sense strand
uaaaccugaggaaggaaua

SEQ ID NO: 1304929 - RNA, 19 nt, Homo sapiens
  misc_RNA (1)...(19): siRNA sense strand
agaugacgccuguuauaga

SEQ ID NO: 1304930 - RNA, 19 nt, Homo sapiens
  misc_RNA (1)...(19): siRNA sense strand
ugugauuguuauugccaua

SEQ ID NO: 1304931 - RNA, 19 nt, Homo sapiens
  misc_RNA (1)...(19): siRNA sense strand
gagagcacgauuuauugug

SEQ ID NO: 1304932 - RNA, 19 nt, Homo sapiens
  misc_RNA (1)...(19): siRNA sense strand
gaaguauuugaguaucuug

SEQ ID NO: 1304933 - RNA, 19 nt, Homo sapiens
  misc_RNA (1)...(19): siRNA sense strand
ggcuaccugucucagauga

SEQ ID NO: 1304934 - RNA, 19 nt, Homo sapiens
  misc_RNA (1)...(19): siRNA sense strand
gauaucaggauuuggaaaa

SEQ ID NO: 1304935 - RNA, 19 nt, Homo sapiens
  misc_RNA (1)...(19): siRNA sense strand
ccucuugccacccauacua

SEQ ID NO: 1304936 - RNA, 19 nt, Homo sapiens
  misc_RNA (1)...(19): siRNA sense strand
ccaugguguugcugcugua

SEQ ID NO: 1304937 - RNA, 19 nt, Homo sapiens
  misc_RNA (1)...(19): siRNA sense strand
cagaugacgccuguuauag

SEQ ID NO: 1304938 - RNA, 19 nt, Homo sapiens
  misc_RNA (1)...(19): siRNA sense strand
uuggugaacgaguagauua

SEQ ID NO: 1304939 - RNA, 19 nt, Homo sapiens
  misc_RNA (1)...(19): siRNA sense strand
gucauugcugugauuguua

SEQ ID NO: 1304940 - RNA, 19 nt, Homo sapiens
  misc_RNA (1)...(19): siRNA sense strand
ggagccaccaacauuugaa

SEQ ID NO: 1304941 - RNA, 19 nt, Homo sapiens
  misc_RNA (1)...(19): siRNA sense strand
gcgcuuuccuggguugcuu

SEQ ID NO: 1304942 - RNA, 19 nt, Homo sapiens
  misc_RNA (1)...(19): siRNA sense strand
uacuacaaagcaacaguua

SEQ ID NO: 1304943 - RNA, 19 nt, Homo sapiens
  misc_RNA (1)...(19): siRNA sense strand
cuugaugcaguaacuuaua

SEQ ID NO: 1304944 - RNA, 19 nt, Homo sapiens
  misc_RNA (1)...(19): siRNA sense strand
aaacauguccauauauacg

SEQ ID NO: 1304945 - RNA, 19 nt, Homo sapiens
  misc_RNA (1)...(19): siRNA sense strand
guguaaaguggucaaaugu

SEQ ID NO: 1304946 - RNA, 19 nt, Homo sapiens
  misc_RNA (1)...(19): siRNA sense strand
cuuacgaguuugguuauca

SEQ ID NO: 1304947 - RNA, 19 nt, Homo sapiens
  misc_RNA (1)...(19): siRNA sense strand
uacgggauccuuuaaaugg

SEQ ID NO: 1304948 - RNA, 19 nt, Homo sapiens
  misc_RNA (1)...(19): siRNA sense strand
aaccaaaacccuacuauga

SEQ ID NO: 1304949 - RNA, 19 nt, Homo sapiens
  misc_RNA (1)...(19): siRNA sense strand
cccaauaugugaaaagguu

SEQ ID NO: 1304950 - RNA, 19 nt, Homo sapiens
  misc_RNA (1)...(19): siRNA sense strand
cgauggcagcgacacaauu

SEQ ID NO: 1304951 - RNA, 19 nt, Homo sapiens
  misc_RNA (1)...(19): siRNA sense strand
gauccauuuucacuuauug

SEQ ID NO: 1304952 - RNA, 19 nt, Homo sapiens
  misc_RNA (1)...(19): siRNA sense strand
uugaugcaguaacuuauag

SEQ ID NO: 1304953 - RNA, 19 nt, Homo sapiens
  misc_RNA (1)...(19): siRNA sense strand
guaucuugaugcaguaacu

SEQ ID NO: 1304954 - RNA, 19 nt, Homo sapiens
  misc_RNA (1)...(19): siRNA sense strand
caacauuugaagcuaugga

SEQ ID NO: 1304955 - RNA, 19 nt, Homo sapiens
  misc_RNA (1)...(19): siRNA sense strand
gagauuggugaacgaguag

SEQ ID NO: 1304956 - RNA, 19 nt, Homo sapiens
  misc_RNA (1)...(19): siRNA sense strand
ggagagagcacgauuuauu

SEQ ID NO: 1304957 - RNA, 19 nt, Homo sapiens
  misc_RNA (1)...(19): siRNA sense strand
agagaaacauguccauaua

SEQ ID NO: 1304958 - RNA, 19 nt, Homo sapiens
  misc_RNA (1)...(19): siRNA sense strand
cagaugcacuuuauuugua

SEQ ID NO: 1304959 - RNA, 19 nt, Homo sapiens
  misc_RNA (1)...(19): siRNA sense strand
ggacuuacgaguuugguua

SEQ ID NO: 1304960 - RNA, 19 nt, Homo sapiens
  misc_RNA (1)...(19): siRNA sense strand
aaacagauaucaggauuug

SEQ ID NO: 1304961 - RNA, 19 nt, Homo sapiens
  misc_RNA (1)...(19): siRNA sense strand
cuauggagcucauugguaa

SEQ ID NO: 1304962 - RNA, 19 nt, Homo sapiens
  misc_RNA (1)...(19): siRNA sense strand
aaacacaccuuuagugaag

SEQ ID NO: 1304963 - RNA, 19 nt, Homo sapiens
  misc_RNA (1)...(19): siRNA sense strand
gaacuuaaaggaucaguag

SEQ ID NO: 1304964 - RNA, 19 nt, Homo sapiens
  misc_RNA (1)...(19): siRNA sense strand
gaaaacagauaucaggauu

SEQ ID NO: 1304965 - RNA, 19 nt, Homo sapiens
  misc_RNA (1)...(19): siRNA sense strand
uaaaggaucaguagcaauu

SEQ ID NO: 1304966 - RNA, 19 nt, Homo sapiens
  misc_RNA (1)...(19): siRNA sense strand
aaaugggacuuacgaguuu

SEQ ID NO: 1304967 - RNA, 19 nt, Homo sapiens
  misc_RNA (1)...(19): siRNA sense strand
guuaucagaugcacuuuau

SEQ ID NO: 1304968 - RNA, 19 nt, Homo sapiens
  misc_RNA (1)...(19): siRNA sense strand
gagcugaauaugccacuua

SEQ ID NO: 1304969 - RNA, 19 nt, Homo sapiens
  misc_RNA (1)...(19): siRNA sense strand
gagcagagaggcugaauag

SEQ ID NO: 1304970 - RNA, 19 nt, Homo sapiens
  misc_RNA (1)...(19): siRNA sense strand
ugagauuggugaacgagua

SEQ ID NO: 1304971 - RNA, 19 nt, Homo sapiens
  misc_RNA (1)...(19): siRNA sense strand
gugaacgaguagauuauaa

SEQ ID NO: 1304972 - RNA, 19 nt, Homo sapiens
  misc_RNA (1)...(19): siRNA sense strand
gagagagcacgauuuauug

SEQ ID NO: 1304973 - RNA, 19 nt, Homo sapiens
  misc_RNA (1)...(19): siRNA sense strand
caaaugggacuuacgaguu

SEQ ID NO: 1304974 - RNA, 19 nt, Homo sapiens
  misc_RNA (1)...(19): siRNA sense strand
ggucauugcugugauuguu

SEQ ID NO: 1304975 - RNA, 19 nt, Homo sapiens
  misc_RNA (1)...(19): siRNA sense strand
ccagauccauuuucacuua

SEQ ID NO: 1304976 - RNA, 19 nt, Homo sapiens
  misc_RNA (1)...(19): siRNA sense strand
gaaggaauacuugacaguu

SEQ ID NO: 1304977 - RNA, 19 nt, Homo sapiens
  misc_RNA (1)...(19): siRNA sense strand
aaggaauacuugacaguuu

SEQ ID NO: 1304978 - RNA, 19 nt, Homo sapiens
  misc_RNA (1)...(19): siRNA sense strand
ucagaugacgccuguuaua

SEQ ID NO: 1304979 - RNA, 19 nt, Homo sapiens
  misc_RNA (1)...(19): siRNA sense strand
gaaaacacaccuuuaguga

SEQ ID NO: 1304980 - RNA, 19 nt, Homo sapiens
  misc_RNA (1)...(19): siRNA sense strand
gaugacgccuguuauagag

SEQ ID NO: 1304981 - RNA, 19 nt, Homo sapiens
  misc_RNA (1)...(19): siRNA sense strand
gagaaacauguccauauau

SEQ ID NO: 1304982 - RNA, 19 nt, Homo sapiens
  misc_RNA (1)...(19): siRNA sense strand
ccacuuaccagacuaaauc

SEQ ID NO: 1304983 - RNA, 19 nt, Homo sapiens
  misc_RNA (1)...(19): siRNA sense strand
acgaguagauuauaagugu

SEQ ID NO: 1304984 - RNA, 19 nt, Homo sapiens
  misc_RNA (1)...(19): siRNA sense strand
cuacaaagcaacaguuaug

SEQ ID NO: 1304985 - RNA, 19 nt, Homo sapiens
  misc_RNA (1)...(19): siRNA sense strand
ccaccaacauuugaagcua

SEQ ID NO: 1304986 - RNA, 19 nt, Homo sapiens
  misc_RNA (1)...(19): siRNA sense strand
uauacgggauccuuuaaau

SEQ ID NO: 1304987 - RNA, 19 nt, Homo sapiens
  misc_RNA (1)...(19): siRNA sense strand
cgaguuugguuaucagaug

SEQ ID NO: 1304988 - RNA, 19 nt, Homo sapiens
  misc_RNA (1)...(19): siRNA sense strand
gaacgaguagauuauaagu

SEQ ID NO: 1304989 - RNA, 19 nt, Homo sapiens
  misc_RNA (1)...(19): siRNA sense strand
gugaggagccaccaacauu

SEQ ID NO: 1304990 - RNA, 19 nt, Homo sapiens
  misc_RNA (1)...(19): siRNA sense strand
gauggcagcgacacaauug

SEQ ID NO: 1304991 - RNA, 19 nt, Homo sapiens
  misc_RNA (1)...(19): siRNA sense strand
ucucagaugacgccuguua

SEQ ID NO: 1304992 - RNA, 19 nt, Homo sapiens
  misc_RNA (1)...(19): siRNA sense strand
acacaccuuuagugaagua

SEQ ID NO: 1304993 - RNA, 19 nt, Homo sapiens
  misc_RNA (1)...(19): siRNA sense strand
gcuauggagcucauuggua

SEQ ID NO: 1304994 - RNA, 19 nt, Homo sapiens
  misc_RNA (1)...(19): siRNA sense strand
gaggagccaccaacauuug

SEQ ID NO: 1304995 - RNA, 19 nt, Homo sapiens
  misc_RNA (1)...(19): siRNA sense strand
uagagaaacauguccauau

SEQ ID NO: 1304996 - RNA, 19 nt, Homo sapiens
  misc_RNA (1)...(19): siRNA sense strand
ggugaacgaguagauuaua

SEQ ID NO: 1304997 - RNA, 19 nt, Homo sapiens
  misc_RNA (1)...(19): siRNA sense strand
gaaguagaaguauuugagu

SEQ ID NO: 1304998 - RNA, 19 nt, Homo sapiens
  misc_RNA (1)...(19): siRNA sense strand
gaaacauguccauauauac

SEQ ID NO: 1304999 - RNA, 19 nt, Homo sapiens
  misc_RNA (1)...(19): siRNA sense strand
ugacgccuguuauagagaa

SEQ ID NO: 1305000 - RNA, 19 nt, Homo sapiens
  misc_RNA (1)...(19): siRNA sense strand
cgaguagauuauaagugua

SEQ ID NO: 1305001 - RNA, 19 nt, Homo sapiens
  misc_RNA (1)...(19): siRNA sense strand
gcacuuuauuuguaaugag

SEQ ID NO: 1305002 - RNA, 19 nt, Homo sapiens
  misc_RNA (1)...(19): siRNA sense strand
guagaaguauuugaguauc

SEQ ID NO: 1305003 - RNA, 19 nt, Homo sapiens
  misc_RNA (1)...(19): siRNA sense strand
guauuugaguaucuugaug

SEQ ID NO: 1305004 - RNA, 19 nt, Homo sapiens
  misc_RNA (1)...(19): siRNA sense strand
aggaauacuugacaguuug

SEQ ID NO: 1305005 - RNA, 19 nt, Homo sapiens
  misc_RNA (1)...(19): siRNA sense strand
ccaaaacccuacuaugaga

SEQ ID NO: 1305006 - RNA, 19 nt, Homo sapiens
  misc_RNA (1)...(19): siRNA sense strand
aguguaaaguggucaaaug

SEQ ID NO: 1305007 - RNA, 19 nt, Homo sapiens
  misc_RNA (1)...(19): siRNA sense strand
ccacccauacuauuuguga

SEQ ID NO: 1305008 - RNA, 19 nt, Homo sapiens
  misc_RNA (1)...(19): siRNA sense strand
uuggagagagcacgauuua

SEQ ID NO: 1305009 - RNA, 19 nt, Homo sapiens
  misc_RNA (1)...(19): siRNA sense strand
gguuaucagaugcacuuua

SEQ ID NO: 1305010 - RNA, 19 nt, Homo sapiens
  misc_RNA (1)...(19): siRNA sense strand
caccaacauuugaagcuau

SEQ ID NO: 1305011 - RNA, 19 nt, Homo sapiens
  misc_RNA (1)...(19): siRNA sense strand
ugaggagccaccaacauuu

SEQ ID NO: 1305012 - RNA, 19 nt, Homo sapiens
  misc_RNA (1)...(19): siRNA sense strand
ggaaggaauacuugacagu

SEQ ID NO: 1305013 - RNA, 19 nt, Homo sapiens
  misc_RNA (1)...(19): siRNA sense strand
gaggaaggaauacuugaca

SEQ ID NO: 1305014 - RNA, 19 nt, Homo sapiens
  misc_RNA (1)...(19): siRNA sense strand
ugaguaucuugaugcagua

SEQ ID NO: 1305015 - RNA, 19 nt, Homo sapiens
  misc_RNA (1)...(19): siRNA sense strand
caccuuuagugaaguagaa

SEQ ID NO: 1305016 - RNA, 19 nt, Homo sapiens
  misc_RNA (1)...(19): siRNA sense strand
acagauaucaggauuugga

SEQ ID NO: 1305017 - RNA, 19 nt, Homo sapiens
  misc_RNA (1)...(19): siRNA sense strand
ucauugcugugauuguuau

SEQ ID NO: 1305018 - RNA, 19 nt, Homo sapiens
  misc_RNA (1)...(19): siRNA sense strand
ucagaugcacuuuauuugu

SEQ ID NO: 1305019 - RNA, 19 nt, Homo sapiens
  misc_RNA (1)...(19): siRNA sense strand
gugcugcuccagaguguaa

SEQ ID NO: 1305020 - RNA, 19 nt, Homo sapiens
  misc_RNA (1)...(19): siRNA sense strand
ggaaaacacaccuuuagug

SEQ ID NO: 1305021 - RNA, 19 nt, Homo sapiens
  misc_RNA (1)...(19): siRNA sense strand
aaggaucaguagcaauuug

SEQ ID NO: 1305022 - RNA, 19 nt, Homo sapiens
  misc_RNA (1)...(19): siRNA sense strand
uauauacgggauccuuuaa

SEQ ID NO: 1305023 - RNA, 19 nt, Homo sapiens
  misc_RNA (1)...(19): siRNA sense strand
ugaaguagaaguauuugag

SEQ ID NO: 1305024 - RNA, 19 nt, Homo sapiens
  misc_RNA (1)...(19): siRNA sense strand
cuugacaguuuggauguuu

SEQ ID NO: 1305025 - RNA, 19 nt, Homo sapiens
  misc_RNA (1)...(19): siRNA sense strand
cauauauacgggauccuuu

SEQ ID NO: 1305026 - RNA, 19 nt, Homo sapiens
  misc_RNA (1)...(19): siRNA sense strand
auauauacgggauccuuua

SEQ ID NO: 1305027 - RNA, 19 nt, Homo sapiens
  misc_RNA (1)...(19): siRNA sense strand
cuuaaaggaucaguagcaa

SEQ ID NO: 1305028 - RNA, 19 nt, Homo sapiens
  misc_RNA (1)...(19): siRNA sense strand
uaaaccugaggaaggaaua

SEQ ID NO: 1305029 - RNA, 19 nt, Homo sapiens
  misc_RNA (1)...(19): siRNA sense strand
agaugacgccuguuauaga

SEQ ID NO: 1305030 - RNA, 19 nt, Homo sapiens
  misc_RNA (1)...(19): siRNA sense strand
ugugauuguuauugccaua

SEQ ID NO: 1305031 - RNA, 19 nt, Homo sapiens
  misc_RNA (1)...(19): siRNA sense strand
gagagcacgauuuauugug

SEQ ID NO: 1305032 - RNA, 19 nt, Homo sapiens
  misc_RNA (1)...(19): siRNA sense strand
gaaguauuugaguaucuug

SEQ ID NO: 1305033 - RNA, 19 nt, Homo sapiens
  misc_RNA (1)...(19): siRNA sense strand
ggcuaccugucucagauga

SEQ ID NO: 1305034 - RNA, 19 nt, Homo sapiens
  misc_RNA (1)...(19): siRNA sense strand
gauaucaggauuuggaaaa

SEQ ID NO: 1305035 - RNA, 19 nt, Homo sapiens
  misc_RNA (1)...(19): siRNA sense strand
ccucuugccacccauacua

SEQ ID NO: 1305036 - RNA, 19 nt, Homo sapiens
  misc_RNA (1)...(19): siRNA sense strand
ccaugguguugcugcugua

SEQ ID NO: 1305037 - RNA, 19 nt, Homo sapiens
  misc_RNA (1)...(19): siRNA sense strand
cagaugacgccuguuauag

SEQ ID NO: 1305038 - RNA, 19 nt, Homo sapiens
  misc_RNA (1)...(19): siRNA sense strand
cagaugguggagcugaaua

SEQ ID NO: 1305039 - RNA, 19 nt, Homo sapiens
  misc_RNA (1)...(19): siRNA sense strand
gucauugcugugauuguua

SEQ ID NO: 1305040 - RNA, 19 nt, Homo sapiens
  misc_RNA (1)...(19): siRNA sense strand
ggagccaccaacauuugaa

SEQ ID NO: 1305041 - RNA, 19 nt, Homo sapiens
  misc_RNA (1)...(19): siRNA sense strand
uuggugaacgaguagauua

SEQ ID NO: 1305042 - RNA, 19 nt, Homo sapiens
  misc_RNA (1)...(19): siRNA sense strand
gcgcuuuccuggguugcuu

SEQ ID NO: 1305043 - RNA, 19 nt, Homo sapiens
  misc_RNA (1)...(19): siRNA sense strand
uacuacaaagcaacaguua

SEQ ID NO: 1305044 - RNA, 19 nt, Homo sapiens
  misc_RNA (1)...(19): siRNA sense strand
cuugaugcaguaacuuaua

SEQ ID NO: 1305045 - RNA, 19 nt, Homo sapiens
  misc_RNA (1)...(19): siRNA sense strand
aaacauguccauauauacg

SEQ ID NO: 1305046 - RNA, 19 nt, Homo sapiens
  misc_RNA (1)...(19): siRNA sense strand
guguaaaguggucaaaugu

SEQ ID NO: 1305047 - RNA, 19 nt, Homo sapiens
  misc_RNA (1)...(19): siRNA sense strand
cuuacgaguuugguuauca

SEQ ID NO: 1305048 - RNA, 19 nt, Homo sapiens
  misc_RNA (1)...(19): siRNA sense strand
uacgggauccuuuaaaugg

SEQ ID NO: 1305049 - RNA, 19 nt, Homo sapiens
  misc_RNA (1)...(19): siRNA sense strand
gcagaugguggagcugaau

SEQ ID NO: 1305050 - RNA, 19 nt, Homo sapiens
  misc_RNA (1)...(19): siRNA sense strand
aaccaaaacccuacuauga

SEQ ID NO: 1305051 - RNA, 19 nt, Homo sapiens
  misc_RNA (1)...(19): siRNA sense strand
uugaugcaguaacuuauag

SEQ ID NO: 1305052 - RNA, 19 nt, Homo sapiens
  misc_RNA (1)...(19): siRNA sense strand
ggagcugaauaugccacuu

SEQ ID NO: 1305053 - RNA, 19 nt, Homo sapiens
  misc_RNA (1)...(19): siRNA sense strand
caacauuugaagcuaugga

SEQ ID NO: 1305054 - RNA, 19 nt, Homo sapiens
  misc_RNA (1)...(19): siRNA sense strand
cgauggcagcgacacaauu

SEQ ID NO: 1305055 - RNA, 19 nt, Homo sapiens
  misc_RNA (1)...(19): siRNA sense strand
gauccauuuucacuuauug

SEQ ID NO: 1305056 - RNA, 19 nt, Homo sapiens
  misc_RNA (1)...(19): siRNA sense strand
ggagagagcacgauuuauu

SEQ ID NO: 1305057 - RNA, 19 nt, Homo sapiens
  misc_RNA (1)...(19): siRNA sense strand
agagaaacauguccauaua

SEQ ID NO: 1305058 - RNA, 19 nt, Homo sapiens
  misc_RNA (1)...(19): siRNA sense strand
cagaugcacuuuauuugua

SEQ ID NO: 1305059 - RNA, 19 nt, Homo sapiens
  misc_RNA (1)...(19): siRNA sense strand
ggacuuacgaguuugguua

SEQ ID NO: 1305060 - RNA, 19 nt, Homo sapiens
  misc_RNA (1)...(19): siRNA sense strand
aaacagauaucaggauuug

SEQ ID NO: 1305061 - RNA, 19 nt, Homo sapiens
  misc_RNA (1)...(19): siRNA sense strand
cuauggagcucauugguaa

SEQ ID NO: 1305062 - RNA, 19 nt, Homo sapiens
  misc_RNA (1)...(19): siRNA sense strand
aaacacaccuuuagugaag

SEQ ID NO: 1305063 - RNA, 19 nt, Homo sapiens
  misc_RNA (1)...(19): siRNA sense strand
gaacuuaaaggaucaguag

SEQ ID NO: 1305064 - RNA, 19 nt, Homo sapiens
  misc_RNA (1)...(19): siRNA sense strand
gaaaacagauaucaggauu

SEQ ID NO: 1305065 - RNA, 19 nt, Homo sapiens
  misc_RNA (1)...(19): siRNA sense strand
uaaaggaucaguagcaauu

SEQ ID NO: 1305066 - RNA, 19 nt, Homo sapiens
  misc_RNA (1)...(19): siRNA sense strand
aaaugggacuuacgaguuu

SEQ ID NO: 1305067 - RNA, 19 nt, Homo sapiens
  misc_RNA (1)...(19): siRNA sense strand
guuaucagaugcacuuuau

SEQ ID NO: 1305068 - RNA, 19 nt, Homo sapiens
  misc_RNA (1)...(19): siRNA sense strand
gagcugaauaugccacuua

SEQ ID NO: 1305069 - RNA, 19 nt, Homo sapiens
  misc_RNA (1)...(19): siRNA sense strand
ugagauuggugaacgagua

SEQ ID NO: 1305070 - RNA, 19 nt, Homo sapiens
  misc_RNA (1)...(19): siRNA sense strand
gugaacgaguagauuauaa

SEQ ID NO: 1305071 - RNA, 19 nt, Homo sapiens
  misc_RNA (1)...(19): siRNA sense strand
gagagagcacgauuuauug

SEQ ID NO: 1305072 - RNA, 19 nt, Homo sapiens
  misc_RNA (1)...(19): siRNA sense strand
caaaugggacuuacgaguu

SEQ ID NO: 1305073 - RNA, 19 nt, Homo sapiens
  misc_RNA (1)...(19): siRNA sense strand
ggucauugcugugauuguu

SEQ ID NO: 1305074 - RNA, 19 nt, Homo sapiens
  misc_RNA (1)...(19): siRNA sense strand
ccagauccauuuucacuua

SEQ ID NO: 1305075 - RNA, 19 nt, Homo sapiens
  misc_RNA (1)...(19): siRNA sense strand
gaaggaauacuugacaguu

SEQ ID NO: 1305076 - RNA, 19 nt, Homo sapiens
  misc_RNA (1)...(19): siRNA sense strand
aaggaauacuugacaguuu

SEQ ID NO: 1305077 - RNA, 19 nt, Homo sapiens
  misc_RNA (1)...(19): siRNA sense strand
ucagaugacgccuguuaua

SEQ ID NO: 1305078 - RNA, 19 nt, Homo sapiens
  misc_RNA (1)...(19): siRNA sense strand
gaaaacacaccuuuaguga

SEQ ID NO: 1305079 - RNA, 19 nt, Homo sapiens
  misc_RNA (1)...(19): siRNA sense strand
gaugacgccuguuauagag

SEQ ID NO: 1305080 - RNA, 19 nt, Homo sapiens
  misc_RNA (1)...(19): siRNA sense strand
gagaaacauguccauauau

SEQ ID NO: 1305081 - RNA, 19 nt, Homo sapiens
  misc_RNA (1)...(19): siRNA sense strand
ccacuuaccagacuaaauc

SEQ ID NO: 1305082 - RNA, 19 nt, Homo sapiens
  misc_RNA (1)...(19): siRNA sense strand
acgaguagauuauaagugu

SEQ ID NO: 1305083 - RNA, 19 nt, Homo sapiens
  misc_RNA (1)...(19): siRNA sense strand
cuacaaagcaacaguuaug

SEQ ID NO: 1305084 - RNA, 19 nt, Homo sapiens
  misc_RNA (1)...(19): siRNA sense strand
ccaccaacauuugaagcua

SEQ ID NO: 1305085 - RNA, 19 nt, Homo sapiens
  misc_RNA (1)...(19): siRNA sense strand
uauacgggauccuuuaaau

SEQ ID NO: 1305086 - RNA, 19 nt, Homo sapiens
  misc_RNA (1)...(19): siRNA sense strand
cgaguuugguuaucagaug

SEQ ID NO: 1305087 - RNA, 19 nt, Homo sapiens
  misc_RNA (1)...(19): siRNA sense strand
gaacgaguagauuauaagu

SEQ ID NO: 1305088 - RNA, 19 nt, Homo sapiens
  misc_RNA (1)...(19): siRNA sense strand
gugaggagccaccaacauu

SEQ ID NO: 1305089 - RNA, 19 nt, Homo sapiens
  misc_RNA (1)...(19): siRNA sense strand
gauggcagcgacacaauug

SEQ ID NO: 1305090 - RNA, 19 nt, Homo sapiens
  misc_RNA (1)...(19): siRNA sense strand
ucucagaugacgccuguua

SEQ ID NO: 1305091 - RNA, 19 nt, Homo sapiens
  misc_RNA (1)...(19): siRNA sense strand
gaggagccaccaacauuug

SEQ ID NO: 1305092 - RNA, 19 nt, Homo sapiens
  misc_RNA (1)...(19): siRNA sense strand
gcuauggagcucauuggua

SEQ ID NO: 1305093 - RNA, 19 nt, Homo sapiens
  misc_RNA (1)...(19): siRNA sense strand
acacaccuuuagugaagua

SEQ ID NO: 1305094 - RNA, 19 nt, Homo sapiens
  misc_RNA (1)...(19): siRNA sense strand
uagagaaacauguccauau

SEQ ID NO: 1305095 - RNA, 19 nt, Homo sapiens
  misc_RNA (1)...(19): siRNA sense strand
guuccaaagugucuuaaag

SEQ ID NO: 1305096 - RNA, 19 nt, Homo sapiens
  misc_RNA (1)...(19): siRNA sense strand
ggugaacgaguagauuaua

SEQ ID NO: 1305097 - RNA, 19 nt, Homo sapiens
  misc_RNA (1)...(19): siRNA sense strand
gaaguagaaguauuugagu

SEQ ID NO: 1305098 - RNA, 19 nt, Homo sapiens
  misc_RNA (1)...(19): siRNA sense strand
gaaacauguccauauauac

SEQ ID NO: 1305099 - RNA, 19 nt, Homo sapiens
  misc_RNA (1)...(19): siRNA sense strand
ugacgccuguuauagagaa

SEQ ID NO: 1305100 - RNA, 19 nt, Homo sapiens
  misc_RNA (1)...(19): siRNA sense strand
cgaguagauuauaagugua

SEQ ID NO: 1305101 - RNA, 19 nt, Homo sapiens
  misc_RNA (1)...(19): siRNA sense strand
gcacuuuauuuguaaugag

SEQ ID NO: 1305102 - RNA, 19 nt, Homo sapiens
  misc_RNA (1)...(19): siRNA sense strand
guagaaguauuugaguauc

SEQ ID NO: 1305103 - RNA, 19 nt, Homo sapiens
  misc_RNA (1)...(19): siRNA sense strand
guauuugaguaucuugaug

SEQ ID NO: 1305104 - RNA, 19 nt, Homo sapiens
  misc_RNA (1)...(19): siRNA sense strand
aggaauacuugacaguuug

SEQ ID NO: 1305105 - RNA, 19 nt, Homo sapiens
  misc_RNA (1)...(19): siRNA sense strand
ccaaaacccuacuaugaga

SEQ ID NO: 1305106 - RNA, 19 nt, Homo sapiens
  misc_RNA (1)...(19): siRNA sense strand
aguguaaaguggucaaaug

SEQ ID NO: 1305107 - RNA, 19 nt, Homo sapiens
  misc_RNA (1)...(19): siRNA sense strand
ccacccauacuauuuguga

SEQ ID NO: 1305108 - RNA, 19 nt, Homo sapiens
  misc_RNA (1)...(19): siRNA sense strand
uuggagagagcacgauuua

SEQ ID NO: 1305109 - RNA, 19 nt, Homo sapiens
  misc_RNA (1)...(19): siRNA sense strand
gguuaucagaugcacuuua

SEQ ID NO: 1305110 - RNA, 19 nt, Homo sapiens
  misc_RNA (1)...(19): siRNA sense strand
caccaacauuugaagcuau

SEQ ID NO: 1305111 - RNA, 19 nt, Homo sapiens
  misc_RNA (1)...(19): siRNA sense strand
ugaggagccaccaacauuu

SEQ ID NO: 1305112 - RNA, 19 nt, Homo sapiens
  misc_RNA (1)...(19): siRNA sense strand
ggaaggaauacuugacagu

SEQ ID NO: 1305113 - RNA, 19 nt, Homo sapiens
  misc_RNA (1)...(19): siRNA sense strand
gaggaaggaauacuugaca

SEQ ID NO: 1305114 - RNA, 19 nt, Homo sapiens
  misc_RNA (1)...(19): siRNA sense strand
ccaguuccaaagugucuua

SEQ ID NO: 1305115 - RNA, 19 nt, Homo sapiens
  misc_RNA (1)...(19): siRNA sense strand
ugaguaucuugaugcagua

SEQ ID NO: 1305116 - RNA, 19 nt, Homo sapiens
  misc_RNA (1)...(19): siRNA sense strand
caccuuuagugaaguagaa

SEQ ID NO: 1305117 - RNA, 19 nt, Homo sapiens
  misc_RNA (1)...(19): siRNA sense strand
acagauaucaggauuugga

SEQ ID NO: 1305118 - RNA, 19 nt, Homo sapiens
  misc_RNA (1)...(19): siRNA sense strand
ucauugcugugauuguuau

SEQ ID NO: 1305119 - RNA, 19 nt, Homo sapiens
  misc_RNA (1)...(19): siRNA sense strand
ucagaugcacuuuauuugu

SEQ ID NO: 1305120 - RNA, 19 nt, Homo sapiens
  misc_RNA (1)...(19): siRNA sense strand
gugcugcuccagaguguaa

SEQ ID NO: 1305121 - RNA, 19 nt, Homo sapiens
  misc_RNA (1)...(19): siRNA sense strand
ggaaaacacaccuuuagug

SEQ ID NO: 1305122 - RNA, 19 nt, Homo sapiens
  misc_RNA (1)...(19): siRNA sense strand
aaggaucaguagcaauuug

SEQ ID NO: 1305123 - RNA, 19 nt, Homo sapiens
  misc_RNA (1)...(19): siRNA sense strand
uauauacgggauccuuuaa

SEQ ID NO: 1305124 - RNA, 19 nt, Homo sapiens
  misc_RNA (1)...(19): siRNA sense strand
ugaaguagaaguauuugag

SEQ ID NO: 1305125 - RNA, 19 nt, Homo sapiens
  misc_RNA (1)...(19): siRNA sense strand
cuugacaguuuggauguuu

SEQ ID NO: 1305126 - RNA, 19 nt, Homo sapiens
  misc_RNA (1)...(19): siRNA sense strand
cauauauacgggauccuuu

SEQ ID NO: 1305127 - RNA, 19 nt, Homo sapiens
  misc_RNA (1)...(19): siRNA sense strand
auauauacgggauccuuua

SEQ ID NO: 1305128 - RNA, 19 nt, Homo sapiens
  misc_RNA (1)...(19): siRNA sense strand
cuuaaaggaucaguagcaa

SEQ ID NO: 1305129 - RNA, 19 nt, Homo sapiens
  misc_RNA (1)...(19): siRNA sense strand
uaaaccugaggaaggaaua

SEQ ID NO: 1305130 - RNA, 19 nt, Homo sapiens
  misc_RNA (1)...(19): siRNA sense strand
agaugacgccuguuauaga

SEQ ID NO: 1305131 - RNA, 19 nt, Homo sapiens
  misc_RNA (1)...(19): siRNA sense strand
ugugauuguuauugccaua

SEQ ID NO: 1305132 - RNA, 19 nt, Homo sapiens
  misc_RNA (1)...(19): siRNA sense strand
gagagcacgauuuauugug

SEQ ID NO: 1305133 - RNA, 19 nt, Homo sapiens
  misc_RNA (1)...(19): siRNA sense strand
gaaguauuugaguaucuug

SEQ ID NO: 1305134 - RNA, 19 nt, Homo sapiens
  misc_RNA (1)...(19): siRNA sense strand
ggcuaccugucucagauga

SEQ ID NO: 1305135 - RNA, 19 nt, Homo sapiens
  misc_RNA (1)...(19): siRNA sense strand
gauaucaggauuuggaaaa

SEQ ID NO: 1305136 - RNA, 19 nt, Homo sapiens
  misc_RNA (1)...(19): siRNA sense strand
ccucuugccacccauacua

SEQ ID NO: 1305137 - RNA, 19 nt, Homo sapiens
  misc_RNA (1)...(19): siRNA sense strand
ccaugguguugcugcugua

SEQ ID NO: 1305138 - RNA, 19 nt, Homo sapiens
  misc_RNA (1)...(19): siRNA sense strand
cagaugacgccuguuauag

SEQ ID NO: 1305139 - RNA, 19 nt, Homo sapiens
  misc_RNA (1)...(19): siRNA sense strand
cagaugguggagcugaaua

SEQ ID NO: 1305140 - RNA, 19 nt, Homo sapiens
  misc_RNA (1)...(19): siRNA sense strand
gucauugcugugauuguua

SEQ ID NO: 1305141 - RNA, 19 nt, Homo sapiens
  misc_RNA (1)...(19): siRNA sense strand
ggagccaccaacauuugaa

SEQ ID NO: 1305142 - RNA, 19 nt, Homo sapiens
  misc_RNA (1)...(19): siRNA sense strand
uuggugaacgaguagauua

SEQ ID NO: 1305143 - RNA, 19 nt, Homo sapiens
  misc_RNA (1)...(19): siRNA sense strand
gcgcuuuccuggguugcuu

SEQ ID NO: 1305144 - RNA, 19 nt, Homo sapiens
  misc_RNA (1)...(19): siRNA sense strand
uacuacaaagcaacaguua

SEQ ID NO: 1305145 - RNA, 19 nt, Homo sapiens
  misc_RNA (1)...(19): siRNA sense strand
cuugaugcaguaacuuaua

SEQ ID NO: 1305146 - RNA, 19 nt, Homo sapiens
  misc_RNA (1)...(19): siRNA sense strand
aaacauguccauauauacg

SEQ ID NO: 1305147 - RNA, 19 nt, Homo sapiens
  misc_RNA (1)...(19): siRNA sense strand
guguaaaguggucaaaugu

SEQ ID NO: 1305148 - RNA, 19 nt, Homo sapiens
  misc_RNA (1)...(19): siRNA sense strand
cuuacgaguuugguuauca

SEQ ID NO: 1305149 - RNA, 19 nt, Homo sapiens
  misc_RNA (1)...(19): siRNA sense strand
uacgggauccuuuaaaugg

SEQ ID NO: 1305150 - RNA, 19 nt, Homo sapiens
  misc_RNA (1)...(19): siRNA sense strand
gcagaugguggagcugaau

SEQ ID NO: 1305151 - RNA, 19 nt, Homo sapiens
  misc_RNA (1)...(19): siRNA sense strand
aaccaaaacccuacuauga

SEQ ID NO: 1305152 - RNA, 19 nt, Homo sapiens
  misc_RNA (1)...(19): siRNA sense strand
uugaugcaguaacuuauag

SEQ ID NO: 1305153 - RNA, 19 nt, Homo sapiens
  misc_RNA (1)...(19): siRNA sense strand
ggagcugaauaugccacuu

SEQ ID NO: 1305154 - RNA, 19 nt, Homo sapiens
  misc_RNA (1)...(19): siRNA sense strand
cgauggcagcgacacaauu

SEQ ID NO: 1305155 - RNA, 19 nt, Homo sapiens
  misc_RNA (1)...(19): siRNA sense strand
gauccauuuucacuuauug

SEQ ID NO: 1305156 - RNA, 19 nt, Homo sapiens
  misc_RNA (1)...(19): siRNA sense strand
ggagagagcacgauuuauu

SEQ ID NO: 1305157 - RNA, 19 nt, Homo sapiens
  misc_RNA (1)...(19): siRNA sense strand
agagaaacauguccauaua

SEQ ID NO: 1305158 - RNA, 19 nt, Homo sapiens
  misc_RNA (1)...(19): siRNA sense strand
cagaugcacuuuauuugua

SEQ ID NO: 1305159 - RNA, 19 nt, Homo sapiens
  misc_RNA (1)...(19): siRNA sense strand
ggacuuacgaguuugguua

SEQ ID NO: 1305160 - RNA, 19 nt, Homo sapiens
  misc_RNA (1)...(19): siRNA sense strand
aaacagauaucaggauuug

SEQ ID NO: 1305161 - RNA, 19 nt, Homo sapiens
  misc_RNA (1)...(19): siRNA sense strand
cuauggagcucauugguaa

SEQ ID NO: 1305162 - RNA, 19 nt, Homo sapiens
  misc_RNA (1)...(19): siRNA sense strand
aaacacaccuuuagugaag

SEQ ID NO: 1305163 - RNA, 19 nt, Homo sapiens
  misc_RNA (1)...(19): siRNA sense strand
gaacuuaaaggaucaguag

SEQ ID NO: 1305164 - RNA, 19 nt, Homo sapiens
  misc_RNA (1)...(19): siRNA sense strand
gaaaacagauaucaggauu

SEQ ID NO: 1305165 - RNA, 19 nt, Homo sapiens
  misc_RNA (1)...(19): siRNA sense strand
uaaaggaucaguagcaauu

SEQ ID NO: 1305166 - RNA, 19 nt, Homo sapiens
  misc_RNA (1)...(19): siRNA sense strand
aaaugggacuuacgaguuu

SEQ ID NO: 1305167 - RNA, 19 nt, Homo sapiens
  misc_RNA (1)...(19): siRNA sense strand
guuaucagaugcacuuuau

SEQ ID NO: 1305168 - RNA, 19 nt, Homo sapiens
  misc_RNA (1)...(19): siRNA sense strand
gagcugaauaugccacuua

SEQ ID NO: 1305169 - RNA, 19 nt, Homo sapiens
  misc_RNA (1)...(19): siRNA sense strand
ugagauuggugaacgagua

SEQ ID NO: 1305170 - RNA, 19 nt, Homo sapiens
  misc_RNA (1)...(19): siRNA sense strand
gugaacgaguagauuauaa

SEQ ID NO: 1305171 - RNA, 19 nt, Homo sapiens
  misc_RNA (1)...(19): siRNA sense strand
gagagagcacgauuuauug

SEQ ID NO: 1305172 - RNA, 19 nt, Homo sapiens
  misc_RNA (1)...(19): siRNA sense strand
caaaugggacuuacgaguu

SEQ ID NO: 1305173 - RNA, 19 nt, Homo sapiens
  misc_RNA (1)...(19): siRNA sense strand
ggucauugcugugauuguu

SEQ ID NO: 1305174 - RNA, 19 nt, Homo sapiens
  misc_RNA (1)...(19): siRNA sense strand
ccagauccauuuucacuua

SEQ ID NO: 1305175 - RNA, 19 nt, Homo sapiens
  misc_RNA (1)...(19): siRNA sense strand
gaaggaauacuugacaguu

SEQ ID NO: 1305176 - RNA, 19 nt, Homo sapiens
  misc_RNA (1)...(19): siRNA sense strand
aaggaauacuugacaguuu

SEQ ID NO: 1305177 - RNA, 19 nt, Homo sapiens
  misc_RNA (1)...(19): siRNA sense strand
ucagaugacgccuguuaua

SEQ ID NO: 1305178 - RNA, 19 nt, Homo sapiens
  misc_RNA (1)...(19): siRNA sense strand
gaaaacacaccuuuaguga

SEQ ID NO: 1305179 - RNA, 19 nt, Homo sapiens
  misc_RNA (1)...(19): siRNA sense strand
gaugacgccuguuauagag

SEQ ID NO: 1305180 - RNA, 19 nt, Homo sapiens
  misc_RNA (1)...(19): siRNA sense strand
gagaaacauguccauauau

SEQ ID NO: 1305181 - RNA, 19 nt, Homo sapiens
  misc_RNA (1)...(19): siRNA sense strand
ccacuuaccagacuaaauc

SEQ ID NO: 1305182 - RNA, 19 nt, Homo sapiens
  misc_RNA (1)...(19): siRNA sense strand
acgaguagauuauaagugu

SEQ ID NO: 1305183 - RNA, 19 nt, Homo sapiens
  misc_RNA (1)...(19): siRNA sense strand
cuacaaagcaacaguuaug

SEQ ID NO: 1305184 - RNA, 19 nt, Homo sapiens
  misc_RNA (1)...(19): siRNA sense strand
ccaccaacauuugaagcua

SEQ ID NO: 1305185 - RNA, 19 nt, Homo sapiens
  misc_RNA (1)...(19): siRNA sense strand
uauacgggauccuuuaaau

SEQ ID NO: 1305186 - RNA, 19 nt, Homo sapiens
  misc_RNA (1)...(19): siRNA sense strand
cgaguuugguuaucagaug

SEQ ID NO: 1305187 - RNA, 19 nt, Homo sapiens
  misc_RNA (1)...(19): siRNA sense strand
gaacgaguagauuauaagu

SEQ ID NO: 1305188 - RNA, 19 nt, Homo sapiens
  misc_RNA (1)...(19): siRNA sense strand
gugaggagccaccaacauu

SEQ ID NO: 1305189 - RNA, 19 nt, Homo sapiens
  misc_RNA (1)...(19): siRNA sense strand
gauggcagcgacacaauug

SEQ ID NO: 1305190 - RNA, 19 nt, Homo sapiens
  misc_RNA (1)...(19): siRNA sense strand
ucucagaugacgccuguua

SEQ ID NO: 1305191 - RNA, 19 nt, Homo sapiens
  misc_RNA (1)...(19): siRNA sense strand
gaggagccaccaacauuug

SEQ ID NO: 1305192 - RNA, 19 nt, Homo sapiens
  misc_RNA (1)...(19): siRNA sense strand
gcuauggagcucauuggua

SEQ ID NO: 1305193 - RNA, 19 nt, Homo sapiens
  misc_RNA (1)...(19): siRNA sense strand
acacaccuuuagugaagua

SEQ ID NO: 1305194 - RNA, 19 nt, Homo sapiens
  misc_RNA (1)...(19): siRNA sense strand
uagagaaacauguccauau

SEQ ID NO: 1305195 - RNA, 19 nt, Homo sapiens
  misc_RNA (1)...(19): siRNA sense strand
guuccaaagugucuuaaag

SEQ ID NO: 1305196 - RNA, 19 nt, Homo sapiens
  misc_RNA (1)...(19): siRNA sense strand
ggugaacgaguagauuaua

SEQ ID NO: 1305197 - RNA, 19 nt, Homo sapiens
  misc_RNA (1)...(19): siRNA sense strand
gaaguagaaguauuugagu

SEQ ID NO: 1305198 - RNA, 19 nt, Homo sapiens
  misc_RNA (1)...(19): siRNA sense strand
gaaacauguccauauauac

SEQ ID NO: 1305199 - RNA, 19 nt, Homo sapiens
  misc_RNA (1)...(19): siRNA sense strand
ugacgccuguuauagagaa

SEQ ID NO: 1305200 - RNA, 19 nt, Homo sapiens
  misc_RNA (1)...(19): siRNA sense strand
cgaguagauuauaagugua

SEQ ID NO: 1305201 - RNA, 19 nt, Homo sapiens
  misc_RNA (1)...(19): siRNA sense strand
gcacuuuauuuguaaugag

SEQ ID NO: 1305202 - RNA, 19 nt, Homo sapiens
  misc_RNA (1)...(19): siRNA sense strand
guagaaguauuugaguauc

SEQ ID NO: 1305203 - RNA, 19 nt, Homo sapiens
  misc_RNA (1)...(19): siRNA sense strand
guauuugaguaucuugaug

SEQ ID NO: 1305204 - RNA, 19 nt, Homo sapiens
  misc_RNA (1)...(19): siRNA sense strand
aggaauacuugacaguuug

SEQ ID NO: 1305205 - RNA, 19 nt, Homo sapiens
  misc_RNA (1)...(19): siRNA sense strand
ccaaaacccuacuaugaga

SEQ ID NO: 1305206 - RNA, 19 nt, Homo sapiens
  misc_RNA (1)...(19): siRNA sense strand
aguguaaaguggucaaaug

SEQ ID NO: 1305207 - RNA, 19 nt, Homo sapiens
  misc_RNA (1)...(19): siRNA sense strand
ccacccauacuauuuguga

SEQ ID NO: 1305208 - RNA, 19 nt, Homo sapiens
  misc_RNA (1)...(19): siRNA sense strand
uuggagagagcacgauuua

SEQ ID NO: 1305209 - RNA, 19 nt, Homo sapiens
  misc_RNA (1)...(19): siRNA sense strand
gguuaucagaugcacuuua

SEQ ID NO: 1305210 - RNA, 19 nt, Homo sapiens
  misc_RNA (1)...(19): siRNA sense strand
caccaacauuugaagcuau

SEQ ID NO: 1305211 - RNA, 19 nt, Homo sapiens
  misc_RNA (1)...(19): siRNA sense strand
ugaggagccaccaacauuu

SEQ ID NO: 1305212 - RNA, 19 nt, Homo sapiens
  misc_RNA (1)...(19): siRNA sense strand
ggaaggaauacuugacagu

SEQ ID NO: 1305213 - RNA, 19 nt, Homo sapiens
  misc_RNA (1)...(19): siRNA sense strand
gaggaaggaauacuugaca

SEQ ID NO: 1305214 - RNA, 19 nt, Homo sapiens
  misc_RNA (1)...(19): siRNA sense strand
ccaguuccaaagugucuua

SEQ ID NO: 1305215 - RNA, 19 nt, Homo sapiens
  misc_RNA (1)...(19): siRNA sense strand
ugaguaucuugaugcagua

SEQ ID NO: 1305216 - RNA, 19 nt, Homo sapiens
  misc_RNA (1)...(19): siRNA sense strand
caccuuuagugaaguagaa

SEQ ID NO: 1305217 - RNA, 19 nt, Homo sapiens
  misc_RNA (1)...(19): siRNA sense strand
acagauaucaggauuugga

SEQ ID NO: 1305218 - RNA, 19 nt, Homo sapiens
  misc_RNA (1)...(19): siRNA sense strand
ucauugcugugauuguuau

SEQ ID NO: 1305219 - RNA, 19 nt, Homo sapiens
  misc_RNA (1)...(19): siRNA sense strand
ucagaugcacuuuauuugu

SEQ ID NO: 1305220 - RNA, 19 nt, Homo sapiens
  misc_RNA (1)...(19): siRNA sense strand
gugcugcuccagaguguaa

SEQ ID NO: 1305221 - RNA, 19 nt, Homo sapiens
  misc_RNA (1)...(19): siRNA sense strand
ggaaaacacaccuuuagug

SEQ ID NO: 1305222 - RNA, 19 nt, Homo sapiens
  misc_RNA (1)...(19): siRNA sense strand
aaggaucaguagcaauuug

SEQ ID NO: 1305223 - RNA, 19 nt, Homo sapiens
  misc_RNA (1)...(19): siRNA sense strand
uauauacgggauccuuuaa

SEQ ID NO: 1305224 - RNA, 19 nt, Homo sapiens
  misc_RNA (1)...(19): siRNA sense strand
ugaaguagaaguauuugag

SEQ ID NO: 1305225 - RNA, 19 nt, Homo sapiens
  misc_RNA (1)...(19): siRNA sense strand
cuugacaguuuggauguuu

SEQ ID NO: 1305226 - RNA, 19 nt, Homo sapiens
  misc_RNA (1)...(19): siRNA sense strand
cauauauacgggauccuuu

SEQ ID NO: 1305227 - RNA, 19 nt, Homo sapiens
  misc_RNA (1)...(19): siRNA sense strand
auauauacgggauccuuua

SEQ ID NO: 1305228 - RNA, 19 nt, Homo sapiens
  misc_RNA (1)...(19): siRNA sense strand
cuuaaaggaucaguagcaa

SEQ ID NO: 1305229 - RNA, 19 nt, Homo sapiens
  misc_RNA (1)...(19): siRNA sense strand
uaaaccugaggaaggaaua

SEQ ID NO: 1305230 - RNA, 19 nt, Homo sapiens
  misc_RNA (1)...(19): siRNA sense strand
agaugacgccuguuauaga

SEQ ID NO: 1305231 - RNA, 19 nt, Homo sapiens
  misc_RNA (1)...(19): siRNA sense strand
ugugauuguuauugccaua

SEQ ID NO: 1305232 - RNA, 19 nt, Homo sapiens
  misc_RNA (1)...(19): siRNA sense strand
gagagcacgauuuauugug

SEQ ID NO: 1305233 - RNA, 19 nt, Homo sapiens
  misc_RNA (1)...(19): siRNA sense strand
gaaguauuugaguaucuug

SEQ ID NO: 1305234 - RNA, 19 nt, Homo sapiens
  misc_RNA (1)...(19): siRNA sense strand
ggcuaccugucucagauga

SEQ ID NO: 1305235 - RNA, 19 nt, Homo sapiens
  misc_RNA (1)...(19): siRNA sense strand
gauaucaggauuuggaaaa

SEQ ID NO: 1305236 - RNA, 19 nt, Homo sapiens
  misc_RNA (1)...(19): siRNA sense strand
ccucuugccacccauacua

SEQ ID NO: 1305237 - RNA, 19 nt, Homo sapiens
  misc_RNA (1)...(19): siRNA sense strand
ccaugguguugcugcugua

SEQ ID NO: 1305238 - RNA, 19 nt, Homo sapiens
  misc_RNA (1)...(19): siRNA sense strand
cagaugacgccuguuauag

SEQ ID NO: 1305239 - RNA, 19 nt, Homo sapiens
  misc_RNA (1)...(19): siRNA sense strand
cagaugguggagcugaaua

SEQ ID NO: 1305240 - RNA, 19 nt, Homo sapiens
  misc_RNA (1)...(19): siRNA sense strand
gucauugcugugauuguua

SEQ ID NO: 1305241 - RNA, 19 nt, Homo sapiens
  misc_RNA (1)...(19): siRNA sense strand
ggagccaccaacauuugaa

SEQ ID NO: 1305242 - RNA, 19 nt, Homo sapiens
  misc_RNA (1)...(19): siRNA sense strand
uuggugaacgaguagauua

SEQ ID NO: 1305243 - RNA, 19 nt, Homo sapiens
  misc_RNA (1)...(19): siRNA sense strand
gcgcuuuccuggguugcuu

SEQ ID NO: 1305244 - RNA, 19 nt, Homo sapiens
  misc_RNA (1)...(19): siRNA sense strand
uacuacaaagcaacaguua

SEQ ID NO: 1305245 - RNA, 19 nt, Homo sapiens
  misc_RNA (1)...(19): siRNA sense strand
cuugaugcaguaacuuaua

SEQ ID NO: 1305246 - RNA, 19 nt, Homo sapiens
  misc_RNA (1)...(19): siRNA sense strand
aaacauguccauauauacg

SEQ ID NO: 1305247 - RNA, 19 nt, Homo sapiens
  misc_RNA (1)...(19): siRNA sense strand
guguaaaguggucaaaugu

SEQ ID NO: 1305248 - RNA, 19 nt, Homo sapiens
  misc_RNA (1)...(19): siRNA sense strand
cuuacgaguuugguuauca

SEQ ID NO: 1305249 - RNA, 19 nt, Homo sapiens
  misc_RNA (1)...(19): siRNA sense strand
uacgggauccuuuaaaugg

SEQ ID NO: 1305250 - RNA, 19 nt, Homo sapiens
  misc_RNA (1)...(19): siRNA sense strand
gcagaugguggagcugaau

SEQ ID NO: 1305251 - RNA, 19 nt, Homo sapiens
  misc_RNA (1)...(19): siRNA sense strand
aaccaaaacccuacuauga

SEQ ID NO: 1305252 - RNA, 19 nt, Homo sapiens
  misc_RNA (1)...(19): siRNA sense strand
uugaugcaguaacuuauag

SEQ ID NO: 1305253 - RNA, 19 nt, Homo sapiens
  misc_RNA (1)...(19): siRNA sense strand
ggagcugaauaugccacuu

SEQ ID NO: 1305254 - RNA, 19 nt, Homo sapiens
  misc_RNA (1)...(19): siRNA sense strand
cgauggcagcgacacaauu

SEQ ID NO: 1305255 - RNA, 19 nt, Homo sapiens
  misc_RNA (1)...(19): siRNA sense strand
gauccauuuucacuuauug

SEQ ID NO: 1305256 - RNA, 19 nt, Homo sapiens
  misc_RNA (1)...(19): siRNA sense strand
ggagagagcacgauuuauu

SEQ ID NO: 1305257 - RNA, 19 nt, Homo sapiens
  misc_RNA (1)...(19): siRNA sense strand
agagaaacauguccauaua

SEQ ID NO: 1305258 - RNA, 19 nt, Homo sapiens
  misc_RNA (1)...(19): siRNA sense strand
cagaugcacuuuauuugua

SEQ ID NO: 1305259 - RNA, 19 nt, Homo sapiens
  misc_RNA (1)...(19): siRNA sense strand
ggacuuacgaguuugguua

SEQ ID NO: 1305260 - RNA, 19 nt, Homo sapiens
  misc_RNA (1)...(19): siRNA sense strand
aaacagauaucaggauuug

SEQ ID NO: 1305261 - RNA, 19 nt, Homo sapiens
  misc_RNA (1)...(19): siRNA sense strand
cuauggagcucauugguaa

SEQ ID NO: 1305262 - RNA, 19 nt, Homo sapiens
  misc_RNA (1)...(19): siRNA sense strand
aaacacaccuuuagugaag

SEQ ID NO: 1305263 - RNA, 19 nt, Homo sapiens
  misc_RNA (1)...(19): siRNA sense strand
gaacuuaaaggaucaguag

SEQ ID NO: 1305264 - RNA, 19 nt, Homo sapiens
  misc_RNA (1)...(19): siRNA sense strand
gaaaacagauaucaggauu

SEQ ID NO: 1305265 - RNA, 19 nt, Homo sapiens
  misc_RNA (1)...(19): siRNA sense strand
uaaaggaucaguagcaauu

SEQ ID NO: 1305266 - RNA, 19 nt, Homo sapiens
  misc_RNA (1)...(19): siRNA sense strand
aaaugggacuuacgaguuu

SEQ ID NO: 1305267 - RNA, 19 nt, Homo sapiens
  misc_RNA (1)...(19): siRNA sense strand
guuaucagaugcacuuuau

SEQ ID NO: 1305268 - RNA, 19 nt, Homo sapiens
  misc_RNA (1)...(19): siRNA sense strand
gagcugaauaugccacuua

SEQ ID NO: 1305269 - RNA, 19 nt, Homo sapiens
  misc_RNA (1)...(19): siRNA sense strand
ugagauuggugaacgagua

SEQ ID NO: 1305270 - RNA, 19 nt, Homo sapiens
  misc_RNA (1)...(19): siRNA sense strand
gugaacgaguagauuauaa

SEQ ID NO: 1305271 - RNA, 19 nt, Homo sapiens
  misc_RNA (1)...(19): siRNA sense strand
gagagagcacgauuuauug

SEQ ID NO: 1305272 - RNA, 19 nt, Homo sapiens
  misc_RNA (1)...(19): siRNA sense strand
caaaugggacuuacgaguu

SEQ ID NO: 1305273 - RNA, 19 nt, Homo sapiens
  misc_RNA (1)...(19): siRNA sense strand
ggucauugcugugauuguu

SEQ ID NO: 1305274 - RNA, 19 nt, Homo sapiens
  misc_RNA (1)...(19): siRNA sense strand
ccagauccauuuucacuua

SEQ ID NO: 1305275 - RNA, 19 nt, Homo sapiens
  misc_RNA (1)...(19): siRNA sense strand
gaaggaauacuugacaguu

SEQ ID NO: 1305276 - RNA, 19 nt, Homo sapiens
  misc_RNA (1)...(19): siRNA sense strand
aaggaauacuugacaguuu

SEQ ID NO: 1305277 - RNA, 19 nt, Homo sapiens
  misc_RNA (1)...(19): siRNA sense strand
ucagaugacgccuguuaua

SEQ ID NO: 1305278 - RNA, 19 nt, Homo sapiens
  misc_RNA (1)...(19): siRNA sense strand
gaaaacacaccuuuaguga

SEQ ID NO: 1305279 - RNA, 19 nt, Homo sapiens
  misc_RNA (1)...(19): siRNA sense strand
gaugacgccuguuauagag

SEQ ID NO: 1305280 - RNA, 19 nt, Homo sapiens
  misc_RNA (1)...(19): siRNA sense strand
gagaaacauguccauauau

SEQ ID NO: 1305281 - RNA, 19 nt, Homo sapiens
  misc_RNA (1)...(19): siRNA sense strand
ccacuuaccagacuaaauc

SEQ ID NO: 1305282 - RNA, 19 nt, Homo sapiens
  misc_RNA (1)...(19): siRNA sense strand
acgaguagauuauaagugu

SEQ ID NO: 1305283 - RNA, 19 nt, Homo sapiens
  misc_RNA (1)...(19): siRNA sense strand
cuacaaagcaacaguuaug

SEQ ID NO: 1305284 - RNA, 19 nt, Homo sapiens
  misc_RNA (1)...(19): siRNA sense strand
ccaccaacauuugaagcua

SEQ ID NO: 1305285 - RNA, 19 nt, Homo sapiens
  misc_RNA (1)...(19): siRNA sense strand
uauacgggauccuuuaaau

SEQ ID NO: 1305286 - RNA, 19 nt, Homo sapiens
  misc_RNA (1)...(19): siRNA sense strand
cgaguuugguuaucagaug

SEQ ID NO: 1305287 - RNA, 19 nt, Homo sapiens
  misc_RNA (1)...(19): siRNA sense strand
gaacgaguagauuauaagu

SEQ ID NO: 1305288 - RNA, 19 nt, Homo sapiens
  misc_RNA (1)...(19): siRNA sense strand
gugaggagccaccaacauu

SEQ ID NO: 1305289 - RNA, 19 nt, Homo sapiens
  misc_RNA (1)...(19): siRNA sense strand
gauggcagcgacacaauug

SEQ ID NO: 1305290 - RNA, 19 nt, Homo sapiens
  misc_RNA (1)...(19): siRNA sense strand
ucucagaugacgccuguua

SEQ ID NO: 1305291 - RNA, 19 nt, Homo sapiens
  misc_RNA (1)...(19): siRNA sense strand
gaggagccaccaacauuug

SEQ ID NO: 1305292 - RNA, 19 nt, Homo sapiens
  misc_RNA (1)...(19): siRNA sense strand
gcuauggagcucauuggua

SEQ ID NO: 1305293 - RNA, 19 nt, Homo sapiens
  misc_RNA (1)...(19): siRNA sense strand
acacaccuuuagugaagua

SEQ ID NO: 1305294 - RNA, 19 nt, Homo sapiens
  misc_RNA (1)...(19): siRNA sense strand
uagagaaacauguccauau

SEQ ID NO: 1305295 - RNA, 19 nt, Homo sapiens
  misc_RNA (1)...(19): siRNA sense strand
guuccaaagugucuuaaag

SEQ ID NO: 1305296 - RNA, 19 nt, Homo sapiens
  misc_RNA (1)...(19): siRNA sense strand
ggugaacgaguagauuaua

SEQ ID NO: 1305297 - RNA, 19 nt, Homo sapiens
  misc_RNA (1)...(19): siRNA sense strand
gaaguagaaguauuugagu

SEQ ID NO: 1305298 - RNA, 19 nt, Homo sapiens
  misc_RNA (1)...(19): siRNA sense strand
gaaacauguccauauauac

SEQ ID NO: 1305299 - RNA, 19 nt, Homo sapiens
  misc_RNA (1)...(19): siRNA sense strand
ugacgccuguuauagagaa

SEQ ID NO: 1305300 - RNA, 19 nt, Homo sapiens
  misc_RNA (1)...(19): siRNA sense strand
cgaguagauuauaagugua

SEQ ID NO: 1305301 - RNA, 19 nt, Homo sapiens
  misc_RNA (1)...(19): siRNA sense strand
gcacuuuauuuguaaugag

SEQ ID NO: 1305302 - RNA, 19 nt, Homo sapiens
  misc_RNA (1)...(19): siRNA sense strand
guagaaguauuugaguauc

SEQ ID NO: 1305303 - RNA, 19 nt, Homo sapiens
  misc_RNA (1)...(19): siRNA sense strand
guauuugaguaucuugaug

SEQ ID NO: 1305304 - RNA, 19 nt, Homo sapiens
  misc_RNA (1)...(19): siRNA sense strand
aggaauacuugacaguuug

SEQ ID NO: 1305305 - RNA, 19 nt, Homo sapiens
  misc_RNA (1)...(19): siRNA sense strand
ccaaaacccuacuaugaga

SEQ ID NO: 1305306 - RNA, 19 nt, Homo sapiens
  misc_RNA (1)...(19): siRNA sense strand
aguguaaaguggucaaaug

SEQ ID NO: 1305307 - RNA, 19 nt, Homo sapiens
  misc_RNA (1)...(19): siRNA sense strand
ccacccauacuauuuguga

SEQ ID NO: 1305308 - RNA, 19 nt, Homo sapiens
  misc_RNA (1)...(19): siRNA sense strand
uuggagagagcacgauuua

SEQ ID NO: 1305309 - RNA, 19 nt, Homo sapiens
  misc_RNA (1)...(19): siRNA sense strand
gguuaucagaugcacuuua

SEQ ID NO: 1305310 - RNA, 19 nt, Homo sapiens
  misc_RNA (1)...(19): siRNA sense strand
caccaacauuugaagcuau

SEQ ID NO: 1305311 - RNA, 19 nt, Homo sapiens
  misc_RNA (1)...(19): siRNA sense strand
ugaggagccaccaacauuu

SEQ ID NO: 1305312 - RNA, 19 nt, Homo sapiens
  misc_RNA (1)...(19): siRNA sense strand
ggaaggaauacuugacagu

SEQ ID NO: 1305313 - RNA, 19 nt, Homo sapiens
  misc_RNA (1)...(19): siRNA sense strand
gaggaaggaauacuugaca

SEQ ID NO: 1305314 - RNA, 19 nt, Homo sapiens
  misc_RNA (1)...(19): siRNA sense strand
ccaguuccaaagugucuua

SEQ ID NO: 1305315 - RNA, 19 nt, Homo sapiens
  misc_RNA (1)...(19): siRNA sense strand
ugaguaucuugaugcagua

SEQ ID NO: 1305316 - RNA, 19 nt, Homo sapiens
  misc_RNA (1)...(19): siRNA sense strand
caccuuuagugaaguagaa

SEQ ID NO: 1305317 - RNA, 19 nt, Homo sapiens
  misc_RNA (1)...(19): siRNA sense strand
acagauaucaggauuugga

SEQ ID NO: 1305318 - RNA, 19 nt, Homo sapiens
  misc_RNA (1)...(19): siRNA sense strand
ucauugcugugauuguuau

SEQ ID NO: 1305319 - RNA, 19 nt, Homo sapiens
  misc_RNA (1)...(19): siRNA sense strand
ucagaugcacuuuauuugu

SEQ ID NO: 1305320 - RNA, 19 nt, Homo sapiens
  misc_RNA (1)...(19): siRNA sense strand
gugcugcuccagaguguaa

SEQ ID NO: 1305321 - RNA, 19 nt, Homo sapiens
  misc_RNA (1)...(19): siRNA sense strand
ggaaaacacaccuuuagug

SEQ ID NO: 1305322 - RNA, 19 nt, Homo sapiens
  misc_RNA (1)...(19): siRNA sense strand
aaggaucaguagcaauuug

SEQ ID NO: 1305323 - RNA, 19 nt, Homo sapiens
  misc_RNA (1)...(19): siRNA sense strand
uauauacgggauccuuuaa

SEQ ID NO: 1305324 - RNA, 19 nt, Homo sapiens
  misc_RNA (1)...(19): siRNA sense strand
ugaaguagaaguauuugag

SEQ ID NO: 1305325 - RNA, 19 nt, Homo sapiens
  misc_RNA (1)...(19): siRNA sense strand
cuugacaguuuggauguuu

SEQ ID NO: 1305326 - RNA, 19 nt, Homo sapiens
  misc_RNA (1)...(19): siRNA sense strand
cauauauacgggauccuuu

SEQ ID NO: 1305327 - RNA, 19 nt, Homo sapiens
  misc_RNA (1)...(19): siRNA sense strand
auauauacgggauccuuua

SEQ ID NO: 1305328 - RNA, 19 nt, Homo sapiens
  misc_RNA (1)...(19): siRNA sense strand
cuuaaaggaucaguagcaa

SEQ ID NO: 1305329 - RNA, 19 nt, Homo sapiens
  misc_RNA (1)...(19): siRNA sense strand
uaaaccugaggaaggaaua

SEQ ID NO: 1305330 - RNA, 19 nt, Homo sapiens
  misc_RNA (1)...(19): siRNA sense strand
agaugacgccuguuauaga

SEQ ID NO: 1305331 - RNA, 19 nt, Homo sapiens
  misc_RNA (1)...(19): siRNA sense strand
ugugauuguuauugccaua

SEQ ID NO: 1305332 - RNA, 19 nt, Homo sapiens
  misc_RNA (1)...(19): siRNA sense strand
gagagcacgauuuauugug

SEQ ID NO: 1305333 - RNA, 19 nt, Homo sapiens
  misc_RNA (1)...(19): siRNA sense strand
gaaguauuugaguaucuug

SEQ ID NO: 1305334 - RNA, 19 nt, Homo sapiens
  misc_RNA (1)...(19): siRNA sense strand
ggcuaccugucucagauga

SEQ ID NO: 1305335 - RNA, 19 nt, Homo sapiens
  misc_RNA (1)...(19): siRNA sense strand
gauaucaggauuuggaaaa

SEQ ID NO: 1305336 - RNA, 19 nt, Homo sapiens
  misc_RNA (1)...(19): siRNA sense strand
ccucuugccacccauacua

SEQ ID NO: 1305337 - RNA, 19 nt, Homo sapiens
  misc_RNA (1)...(19): siRNA sense strand
ccaugguguugcugcugua

SEQ ID NO: 1305338 - RNA, 19 nt, Homo sapiens
  misc_RNA (1)...(19): siRNA sense strand
cagaugacgccuguuauag

SEQ ID NO: 1305339 - RNA, 19 nt, Homo sapiens
  misc_RNA (1)...(19): siRNA sense strand
cagaugguggagcugaaua

SEQ ID NO: 1305340 - RNA, 19 nt, Homo sapiens
  misc_RNA (1)...(19): siRNA sense strand
gucauugcugugauuguua

SEQ ID NO: 1305341 - RNA, 19 nt, Homo sapiens
  misc_RNA (1)...(19): siRNA sense strand
ggagccaccaacauuugaa

SEQ ID NO: 1305342 - RNA, 19 nt, Homo sapiens
  misc_RNA (1)...(19): siRNA sense strand
uuggugaacgaguagauua

SEQ ID NO: 1305343 - RNA, 19 nt, Homo sapiens
  misc_RNA (1)...(19): siRNA sense strand
gcgcuuuccuggguugcuu

SEQ ID NO: 1305344 - RNA, 19 nt, Homo sapiens
  misc_RNA (1)...(19): siRNA sense strand
uacuacaaagcaacaguua

SEQ ID NO: 1305345 - RNA, 19 nt, Homo sapiens
  misc_RNA (1)...(19): siRNA sense strand
cuugaugcaguaacuuaua

SEQ ID NO: 1305346 - RNA, 19 nt, Homo sapiens
  misc_RNA (1)...(19): siRNA sense strand
aaacauguccauauauacg

SEQ ID NO: 1305347 - RNA, 19 nt, Homo sapiens
  misc_RNA (1)...(19): siRNA sense strand
guguaaaguggucaaaugu

SEQ ID NO: 1305348 - RNA, 19 nt, Homo sapiens
  misc_RNA (1)...(19): siRNA sense strand
cuuacgaguuugguuauca

SEQ ID NO: 1305349 - RNA, 19 nt, Homo sapiens
  misc_RNA (1)...(19): siRNA sense strand
uacgggauccuuuaaaugg

SEQ ID NO: 1305350 - RNA, 19 nt, Homo sapiens
  misc_RNA (1)...(19): siRNA sense strand
gcagaugguggagcugaau

SEQ ID NO: 1305351 - RNA, 19 nt, Homo sapiens
  misc_RNA (1)...(19): siRNA sense strand
aaccaaaacccuacuauga

SEQ ID NO: 1305352 - RNA, 19 nt, Homo sapiens
  misc_RNA (1)...(19): siRNA sense strand
uugaugcaguaacuuauag

SEQ ID NO: 1305353 - RNA, 19 nt, Homo sapiens
  misc_RNA (1)...(19): siRNA sense strand
ggagcugaauaugccacuu

SEQ ID NO: 1305354 - RNA, 19 nt, Homo sapiens
  misc_RNA (1)...(19): siRNA sense strand
cgauggcagcgacacaauu

SEQ ID NO: 1305355 - RNA, 19 nt, Homo sapiens
  misc_RNA (1)...(19): siRNA sense strand
gauccauuuucacuuauug

SEQ ID NO: 1305356 - RNA, 19 nt, Homo sapiens
  misc_RNA (1)...(19): siRNA sense strand
ggagagagcacgauuuauu

SEQ ID NO: 1305357 - RNA, 19 nt, Homo sapiens
  misc_RNA (1)...(19): siRNA sense strand
agagaaacauguccauaua

SEQ ID NO: 1305358 - RNA, 19 nt, Homo sapiens
  misc_RNA (1)...(19): siRNA sense strand
cagaugcacuuuauuugua

SEQ ID NO: 1305359 - RNA, 19 nt, Homo sapiens
  misc_RNA (1)...(19): siRNA sense strand
ggacuuacgaguuugguua

SEQ ID NO: 1305360 - RNA, 19 nt, Homo sapiens
  misc_RNA (1)...(19): siRNA sense strand
aaacagauaucaggauuug

SEQ ID NO: 1305361 - RNA, 19 nt, Homo sapiens
  misc_RNA (1)...(19): siRNA sense strand
cuauggagcucauugguaa

SEQ ID NO: 1305362 - RNA, 19 nt, Homo sapiens
  misc_RNA (1)...(19): siRNA sense strand
aaacacaccuuuagugaag

SEQ ID NO: 1305363 - RNA, 19 nt, Homo sapiens
  misc_RNA (1)...(19): siRNA sense strand
gaacuuaaaggaucaguag

SEQ ID NO: 1305364 - RNA, 19 nt, Homo sapiens
  misc_RNA (1)...(19): siRNA sense strand
gaaaacagauaucaggauu

SEQ ID NO: 1305365 - RNA, 19 nt, Homo sapiens
  misc_RNA (1)...(19): siRNA sense strand
uaaaggaucaguagcaauu

SEQ ID NO: 1305366 - RNA, 19 nt, Homo sapiens
  misc_RNA (1)...(19): siRNA sense strand
aaaugggacuuacgaguuu

SEQ ID NO: 1305367 - RNA, 19 nt, Homo sapiens
  misc_RNA (1)...(19): siRNA sense strand
guuaucagaugcacuuuau

SEQ ID NO: 1305368 - RNA, 19 nt, Homo sapiens
  misc_RNA (1)...(19): siRNA sense strand
ugagauuggugaacgagua

SEQ ID NO: 1305369 - RNA, 19 nt, Homo sapiens
  misc_RNA (1)...(19): siRNA sense strand
gugaacgaguagauuauaa

SEQ ID NO: 1305370 - RNA, 19 nt, Homo sapiens
  misc_RNA (1)...(19): siRNA sense strand
gagagagcacgauuuauug

SEQ ID NO: 1305371 - RNA, 19 nt, Homo sapiens
  misc_RNA (1)...(19): siRNA sense strand
caaaugggacuuacgaguu

SEQ ID NO: 1305372 - RNA, 19 nt, Homo sapiens
  misc_RNA (1)...(19): siRNA sense strand
ggucauugcugugauuguu

SEQ ID NO: 1305373 - RNA, 19 nt, Homo sapiens
  misc_RNA (1)...(19): siRNA sense strand
ccagauccauuuucacuua

SEQ ID NO: 1305374 - RNA, 19 nt, Homo sapiens
  misc_RNA (1)...(19): siRNA sense strand
gaaggaauacuugacaguu

SEQ ID NO: 1305375 - RNA, 19 nt, Homo sapiens
  misc_RNA (1)...(19): siRNA sense strand
aaggaauacuugacaguuu

SEQ ID NO: 1305376 - RNA, 19 nt, Homo sapiens
  misc_RNA (1)...(19): siRNA sense strand
ucagaugacgccuguuaua

SEQ ID NO: 1305377 - RNA, 19 nt, Homo sapiens
  misc_RNA (1)...(19): siRNA sense strand
gaaaacacaccuuuaguga

SEQ ID NO: 1305378 - RNA, 19 nt, Homo sapiens
  misc_RNA (1)...(19): siRNA sense strand
gaugacgccuguuauagag

SEQ ID NO: 1305379 - RNA, 19 nt, Homo sapiens
  misc_RNA (1)...(19): siRNA sense strand
gagaaacauguccauauau

SEQ ID NO: 1305380 - RNA, 19 nt, Homo sapiens
  misc_RNA (1)...(19): siRNA sense strand
acgaguagauuauaagugu

SEQ ID NO: 1305381 - RNA, 19 nt, Homo sapiens
  misc_RNA (1)...(19): siRNA sense strand
cuacaaagcaacaguuaug

SEQ ID NO: 1305382 - RNA, 19 nt, Homo sapiens
  misc_RNA (1)...(19): siRNA sense strand
ccaccaacauuugaagcua

SEQ ID NO: 1305383 - RNA, 19 nt, Homo sapiens
  misc_RNA (1)...(19): siRNA sense strand
uauacgggauccuuuaaau

SEQ ID NO: 1305384 - RNA, 19 nt, Homo sapiens
  misc_RNA (1)...(19): siRNA sense strand
cgaguuugguuaucagaug

SEQ ID NO: 1305385 - RNA, 19 nt, Homo sapiens
  misc_RNA (1)...(19): siRNA sense strand
gaacgaguagauuauaagu

SEQ ID NO: 1305386 - RNA, 19 nt, Homo sapiens
  misc_RNA (1)...(19): siRNA sense strand
gugaggagccaccaacauu

SEQ ID NO: 1305387 - RNA, 19 nt, Homo sapiens
  misc_RNA (1)...(19): siRNA sense strand
gauggcagcgacacaauug

SEQ ID NO: 1305388 - RNA, 19 nt, Homo sapiens
  misc_RNA (1)...(19): siRNA sense strand
gcuauggagcucauuggua

SEQ ID NO: 1305389 - RNA, 19 nt, Homo sapiens
  misc_RNA (1)...(19): siRNA sense strand
gaggagccaccaacauuug

SEQ ID NO: 1305390 - RNA, 19 nt, Homo sapiens
  misc_RNA (1)...(19): siRNA sense strand
acacaccuuuagugaagua

SEQ ID NO: 1305391 - RNA, 19 nt, Homo sapiens
  misc_RNA (1)...(19): siRNA sense strand
ucucagaugacgccuguua

SEQ ID NO: 1305392 - RNA, 19 nt, Homo sapiens
  misc_RNA (1)...(19): siRNA sense strand
uagagaaacauguccauau

SEQ ID NO: 1305393 - RNA, 19 nt, Homo sapiens
  misc_RNA (1)...(19): siRNA sense strand
guuccaaagugucuuaaag

SEQ ID NO: 1305394 - RNA, 19 nt, Homo sapiens
  misc_RNA (1)...(19): siRNA sense strand
ggugaacgaguagauuaua

SEQ ID NO: 1305395 - RNA, 19 nt, Homo sapiens
  misc_RNA (1)...(19): siRNA sense strand
gaaguagaaguauuugagu

SEQ ID NO: 1305396 - RNA, 19 nt, Homo sapiens
  misc_RNA (1)...(19): siRNA sense strand
gaaacauguccauauauac

SEQ ID NO: 1305397 - RNA, 19 nt, Homo sapiens
  misc_RNA (1)...(19): siRNA sense strand
ugacgccuguuauagagaa

SEQ ID NO: 1305398 - RNA, 19 nt, Homo sapiens
  misc_RNA (1)...(19): siRNA sense strand
cgaguagauuauaagugua

SEQ ID NO: 1305399 - RNA, 19 nt, Homo sapiens
  misc_RNA (1)...(19): siRNA sense strand
gcacuuuauuuguaaugag

SEQ ID NO: 1305400 - RNA, 19 nt, Homo sapiens
  misc_RNA (1)...(19): siRNA sense strand
guagaaguauuugaguauc

SEQ ID NO: 1305401 - RNA, 19 nt, Homo sapiens
  misc_RNA (1)...(19): siRNA sense strand
guauuugaguaucuugaug

SEQ ID NO: 1305402 - RNA, 19 nt, Homo sapiens
  misc_RNA (1)...(19): siRNA sense strand
aggaauacuugacaguuug

SEQ ID NO: 1305403 - RNA, 19 nt, Homo sapiens
  misc_RNA (1)...(19): siRNA sense strand
ccaaaacccuacuaugaga

SEQ ID NO: 1305404 - RNA, 19 nt, Homo sapiens
  misc_RNA (1)...(19): siRNA sense strand
aguguaaaguggucaaaug

SEQ ID NO: 1305405 - RNA, 19 nt, Homo sapiens
  misc_RNA (1)...(19): siRNA sense strand
ccacccauacuauuuguga

SEQ ID NO: 1305406 - RNA, 19 nt, Homo sapiens
  misc_RNA (1)...(19): siRNA sense strand
caccaacauuugaagcuau

SEQ ID NO: 1305407 - RNA, 19 nt, Homo sapiens
  misc_RNA (1)...(19): siRNA sense strand
uuggagagagcacgauuua

SEQ ID NO: 1305408 - RNA, 19 nt, Homo sapiens
  misc_RNA (1)...(19): siRNA sense strand
gguuaucagaugcacuuua

SEQ ID NO: 1305409 - RNA, 19 nt, Homo sapiens
  misc_RNA (1)...(19): siRNA sense strand
ugaggagccaccaacauuu

SEQ ID NO: 1305410 - RNA, 19 nt, Homo sapiens
  misc_RNA (1)...(19): siRNA sense strand
ggaaggaauacuugacagu

SEQ ID NO: 1305411 - RNA, 19 nt, Homo sapiens
  misc_RNA (1)...(19): siRNA sense strand
gaggaaggaauacuugaca

SEQ ID NO: 1305412 - RNA, 19 nt, Homo sapiens
  misc_RNA (1)...(19): siRNA sense strand
ccaguuccaaagugucuua

SEQ ID NO: 1305413 - RNA, 19 nt, Homo sapiens
  misc_RNA (1)...(19): siRNA sense strand
ugaguaucuugaugcagua

SEQ ID NO: 1305414 - RNA, 19 nt, Homo sapiens
  misc_RNA (1)...(19): siRNA sense strand
caccuuuagugaaguagaa

SEQ ID NO: 1305415 - RNA, 19 nt, Homo sapiens
  misc_RNA (1)...(19): siRNA sense strand
acagauaucaggauuugga

SEQ ID NO: 1305416 - RNA, 19 nt, Homo sapiens
  misc_RNA (1)...(19): siRNA sense strand
ucauugcugugauuguuau

SEQ ID NO: 1305417 - RNA, 19 nt, Homo sapiens
  misc_RNA (1)...(19): siRNA sense strand
ucagaugcacuuuauuugu

SEQ ID NO: 1305418 - RNA, 19 nt, Homo sapiens
  misc_RNA (1)...(19): siRNA sense strand
gugcugcuccagaguguaa

SEQ ID NO: 1305419 - RNA, 19 nt, Homo sapiens
  misc_RNA (1)...(19): siRNA sense strand
ggaaaacacaccuuuagug

SEQ ID NO: 1305420 - RNA, 19 nt, Homo sapiens
  misc_RNA (1)...(19): siRNA sense strand
aaggaucaguagcaauuug

SEQ ID NO: 1305421 - RNA, 19 nt, Homo sapiens
  misc_RNA (1)...(19): siRNA sense strand
uauauacgggauccuuuaa

SEQ ID NO: 1305422 - RNA, 19 nt, Homo sapiens
  misc_RNA (1)...(19): siRNA sense strand
ugaaguagaaguauuugag

SEQ ID NO: 1305423 - RNA, 19 nt, Homo sapiens
  misc_RNA (1)...(19): siRNA sense strand
cuugacaguuuggauguuu

SEQ ID NO: 1305424 - RNA, 19 nt, Homo sapiens
  misc_RNA (1)...(19): siRNA sense strand
cauauauacgggauccuuu

SEQ ID NO: 1305425 - RNA, 19 nt, Homo sapiens
  misc_RNA (1)...(19): siRNA sense strand
auauauacgggauccuuua

SEQ ID NO: 1305426 - RNA, 19 nt, Homo sapiens
  misc_RNA (1)...(19): siRNA sense strand
cuuaaaggaucaguagcaa

SEQ ID NO: 1305427 - RNA, 19 nt, Homo sapiens
  misc_RNA (1)...(19): siRNA sense strand
uaaaccugaggaaggaaua

SEQ ID NO: 1305428 - RNA, 19 nt, Homo sapiens
  misc_RNA (1)...(19): siRNA sense strand
agaugacgccuguuauaga

SEQ ID NO: 1305429 - RNA, 19 nt, Homo sapiens
  misc_RNA (1)...(19): siRNA sense strand
ugugauuguuauugccaua

SEQ ID NO: 1305430 - RNA, 19 nt, Homo sapiens
  misc_RNA (1)...(19): siRNA sense strand
gagagcacgauuuauugug

SEQ ID NO: 1305431 - RNA, 19 nt, Homo sapiens
  misc_RNA (1)...(19): siRNA sense strand
gaaguauuugaguaucuug

SEQ ID NO: 1305432 - RNA, 19 nt, Homo sapiens
  misc_RNA (1)...(19): siRNA sense strand
ggcuaccugucucagauga

SEQ ID NO: 1305433 - RNA, 19 nt, Homo sapiens
  misc_RNA (1)...(19): siRNA sense strand
gauaucaggauuuggaaaa

SEQ ID NO: 1305434 - RNA, 19 nt, Homo sapiens
  misc_RNA (1)...(19): siRNA sense strand
ccucuugccacccauacua

SEQ ID NO: 1305435 - RNA, 19 nt, Homo sapiens
  misc_RNA (1)...(19): siRNA sense strand
ccaugguguugcugcugua

SEQ ID NO: 1305436 - RNA, 19 nt, Homo sapiens
  misc_RNA (1)...(19): siRNA sense strand
cagaugacgccuguuauag

SEQ ID NO: 1305437 - RNA, 19 nt, Homo sapiens
  misc_RNA (1)...(19): siRNA sense strand
uuggugaacgaguagauua

SEQ ID NO: 1305438 - RNA, 19 nt, Homo sapiens
  misc_RNA (1)...(19): siRNA sense strand
gucauugcugugauuguua

SEQ ID NO: 1305439 - RNA, 19 nt, Homo sapiens
  misc_RNA (1)...(19): siRNA sense strand
ggagccaccaacauuugaa

SEQ ID NO: 1305440 - RNA, 19 nt, Homo sapiens
  misc_RNA (1)...(19): siRNA sense strand
gcgcuuuccuggguugcuu

SEQ ID NO: 1305441 - RNA, 19 nt, Homo sapiens
  misc_RNA (1)...(19): siRNA sense strand
uacuacaaagcaacaguua

SEQ ID NO: 1305442 - RNA, 19 nt, Homo sapiens
  misc_RNA (1)...(19): siRNA sense strand
cuugaugcaguaacuuaua

SEQ ID NO: 1305443 - RNA, 19 nt, Homo sapiens
  misc_RNA (1)...(19): siRNA sense strand
aaacauguccauauauacg

SEQ ID NO: 1305444 - RNA, 19 nt, Homo sapiens
  misc_RNA (1)...(19): siRNA sense strand
guguaaaguggucaaaugu

SEQ ID NO: 1305445 - RNA, 19 nt, Homo sapiens
  misc_RNA (1)...(19): siRNA sense strand
cuuacgaguuugguuauca

SEQ ID NO: 1305446 - RNA, 19 nt, Homo sapiens
  misc_RNA (1)...(19): siRNA sense strand
uacgggauccuuuaaaugg

SEQ ID NO: 1305447 - RNA, 19 nt, Homo sapiens
  misc_RNA (1)...(19): siRNA sense strand
aaccaaaacccuacuauga

SEQ ID NO: 1305448 - RNA, 19 nt, Homo sapiens
  misc_RNA (1)...(19): siRNA sense strand
cccaauaugugaaaagguu

SEQ ID NO: 1305449 - RNA, 19 nt, Homo sapiens
  misc_RNA (1)...(19): siRNA sense strand
cgauggcagcgacacaauu

SEQ ID NO: 1305450 - RNA, 19 nt, Homo sapiens
  misc_RNA (1)...(19): siRNA sense strand
gauccauuuucacuuauug

SEQ ID NO: 1305451 - RNA, 19 nt, Homo sapiens
  misc_RNA (1)...(19): siRNA sense strand
uugaugcaguaacuuauag

SEQ ID NO: 1305452 - RNA, 19 nt, Homo sapiens
  misc_RNA (1)...(19): siRNA sense strand
guaucuugaugcaguaacu

SEQ ID NO: 1305453 - RNA, 19 nt, Homo sapiens
  misc_RNA (1)...(19): siRNA sense strand
caacauuugaagcuaugga

SEQ ID NO: 1305454 - RNA, 19 nt, Homo sapiens
  misc_RNA (1)...(19): siRNA sense strand
gagauuggugaacgaguag

SEQ ID NO: 1305455 - RNA, 19 nt, Homo sapiens
  misc_RNA (1)...(19): siRNA sense strand
ggagagagcacgauuuauu

SEQ ID NO: 1305456 - RNA, 19 nt, Homo sapiens
  misc_RNA (1)...(19): siRNA sense strand
agagaaacauguccauaua

SEQ ID NO: 1305457 - RNA, 19 nt, Homo sapiens
  misc_RNA (1)...(19): siRNA sense strand
cagaugcacuuuauuugua

SEQ ID NO: 1305458 - RNA, 19 nt, Homo sapiens
  misc_RNA (1)...(19): siRNA sense strand
ggacuuacgaguuugguua

SEQ ID NO: 1305459 - RNA, 19 nt, Homo sapiens
  misc_RNA (1)...(19): siRNA sense strand
aaacagauaucaggauuug

SEQ ID NO: 1305460 - RNA, 19 nt, Homo sapiens
  misc_RNA (1)...(19): siRNA sense strand
cuauggagcucauugguaa

SEQ ID NO: 1305461 - RNA, 19 nt, Homo sapiens
  misc_RNA (1)...(19): siRNA sense strand
aaacacaccuuuagugaag

SEQ ID NO: 1305462 - RNA, 19 nt, Homo sapiens
  misc_RNA (1)...(19): siRNA sense strand
gaacuuaaaggaucaguag

SEQ ID NO: 1305463 - RNA, 19 nt, Homo sapiens
  misc_RNA (1)...(19): siRNA sense strand
gaaaacagauaucaggauu

SEQ ID NO: 1305464 - RNA, 19 nt, Homo sapiens
  misc_RNA (1)...(19): siRNA sense strand
uaaaggaucaguagcaauu

SEQ ID NO: 1305465 - RNA, 19 nt, Homo sapiens
  misc_RNA (1)...(19): siRNA sense strand
aaaugggacuuacgaguuu

SEQ ID NO: 1305466 - RNA, 19 nt, Homo sapiens
  misc_RNA (1)...(19): siRNA sense strand
guuaucagaugcacuuuau

SEQ ID NO: 1305467 - RNA, 19 nt, Homo sapiens
  misc_RNA (1)...(19): siRNA sense strand
gagcugaauaugccacuua

SEQ ID NO: 1305468 - RNA, 19 nt, Homo sapiens
  misc_RNA (1)...(19): siRNA sense strand
ugagauuggugaacgagua

SEQ ID NO: 1305469 - RNA, 19 nt, Homo sapiens
  misc_RNA (1)...(19): siRNA sense strand
gugaacgaguagauuauaa

SEQ ID NO: 1305470 - RNA, 19 nt, Homo sapiens
  misc_RNA (1)...(19): siRNA sense strand
gagagagcacgauuuauug

SEQ ID NO: 1305471 - RNA, 19 nt, Homo sapiens
  misc_RNA (1)...(19): siRNA sense strand
caaaugggacuuacgaguu

SEQ ID NO: 1305472 - RNA, 19 nt, Homo sapiens
  misc_RNA (1)...(19): siRNA sense strand
ggucauugcugugauuguu

SEQ ID NO: 1305473 - RNA, 19 nt, Homo sapiens
  misc_RNA (1)...(19): siRNA sense strand
ccagauccauuuucacuua

SEQ ID NO: 1305474 - RNA, 19 nt, Homo sapiens
  misc_RNA (1)...(19): siRNA sense strand
gaaggaauacuugacaguu

SEQ ID NO: 1305475 - RNA, 19 nt, Homo sapiens
  misc_RNA (1)...(19): siRNA sense strand
aaggaauacuugacaguuu

SEQ ID NO: 1305476 - RNA, 19 nt, Homo sapiens
  misc_RNA (1)...(19): siRNA sense strand
ucagaugacgccuguuaua

SEQ ID NO: 1305477 - RNA, 19 nt, Homo sapiens
  misc_RNA (1)...(19): siRNA sense strand
gaaaacacaccuuuaguga

SEQ ID NO: 1305478 - RNA, 19 nt, Homo sapiens
  misc_RNA (1)...(19): siRNA sense strand
gaugacgccuguuauagag

SEQ ID NO: 1305479 - RNA, 19 nt, Homo sapiens
  misc_RNA (1)...(19): siRNA sense strand
gagaaacauguccauauau

SEQ ID NO: 1305480 - RNA, 19 nt, Homo sapiens
  misc_RNA (1)...(19): siRNA sense strand
ccacuuaccagacuaaauc

SEQ ID NO: 1305481 - RNA, 19 nt, Homo sapiens
  misc_RNA (1)...(19): siRNA sense strand
acgaguagauuauaagugu

SEQ ID NO: 1305482 - RNA, 19 nt, Homo sapiens
  misc_RNA (1)...(19): siRNA sense strand
cuacaaagcaacaguuaug

SEQ ID NO: 1305483 - RNA, 19 nt, Homo sapiens
  misc_RNA (1)...(19): siRNA sense strand
ccaccaacauuugaagcua

SEQ ID NO: 1305484 - RNA, 19 nt, Homo sapiens
  misc_RNA (1)...(19): siRNA sense strand
uauacgggauccuuuaaau

SEQ ID NO: 1305485 - RNA, 19 nt, Homo sapiens
  misc_RNA (1)...(19): siRNA sense strand
cgaguuugguuaucagaug

SEQ ID NO: 1305486 - RNA, 19 nt, Homo sapiens
  misc_RNA (1)...(19): siRNA sense strand
gaacgaguagauuauaagu

SEQ ID NO: 1305487 - RNA, 19 nt, Homo sapiens
  misc_RNA (1)...(19): siRNA sense strand
gugaggagccaccaacauu

SEQ ID NO: 1305488 - RNA, 19 nt, Homo sapiens
  misc_RNA (1)...(19): siRNA sense strand
gauggcagcgacacaauug

SEQ ID NO: 1305489 - RNA, 19 nt, Homo sapiens
  misc_RNA (1)...(19): siRNA sense strand
ucucagaugacgccuguua

SEQ ID NO: 1305490 - RNA, 19 nt, Homo sapiens
  misc_RNA (1)...(19): siRNA sense strand
gaggagccaccaacauuug

SEQ ID NO: 1305491 - RNA, 19 nt, Homo sapiens
  misc_RNA (1)...(19): siRNA sense strand
gcuauggagcucauuggua

SEQ ID NO: 1305492 - RNA, 19 nt, Homo sapiens
  misc_RNA (1)...(19): siRNA sense strand
acacaccuuuagugaagua

SEQ ID NO: 1305493 - RNA, 19 nt, Homo sapiens
  misc_RNA (1)...(19): siRNA sense strand
uagagaaacauguccauau

SEQ ID NO: 1305494 - RNA, 19 nt, Homo sapiens
  misc_RNA (1)...(19): siRNA sense strand
ggugaacgaguagauuaua

SEQ ID NO: 1305495 - RNA, 19 nt, Homo sapiens
  misc_RNA (1)...(19): siRNA sense strand
gaaguagaaguauuugagu

SEQ ID NO: 1305496 - RNA, 19 nt, Homo sapiens
  misc_RNA (1)...(19): siRNA sense strand
gaaacauguccauauauac

SEQ ID NO: 1305497 - RNA, 19 nt, Homo sapiens
  misc_RNA (1)...(19): siRNA sense strand
ugacgccuguuauagagaa

SEQ ID NO: 1305498 - RNA, 19 nt, Homo sapiens
  misc_RNA (1)...(19): siRNA sense strand
cgaguagauuauaagugua

SEQ ID NO: 1305499 - RNA, 19 nt, Homo sapiens
  misc_RNA (1)...(19): siRNA sense strand
gcacuuuauuuguaaugag

SEQ ID NO: 1305500 - RNA, 19 nt, Homo sapiens
  misc_RNA (1)...(19): siRNA sense strand
guagaaguauuugaguauc

SEQ ID NO: 1305501 - RNA, 19 nt, Homo sapiens
  misc_RNA (1)...(19): siRNA sense strand
guauuugaguaucuugaug

SEQ ID NO: 1305502 - RNA, 19 nt, Homo sapiens
  misc_RNA (1)...(19): siRNA sense strand
aggaauacuugacaguuug

SEQ ID NO: 1305503 - RNA, 19 nt, Homo sapiens
  misc_RNA (1)...(19): siRNA sense strand
ccaaaacccuacuaugaga

SEQ ID NO: 1305504 - RNA, 19 nt, Homo sapiens
  misc_RNA (1)...(19): siRNA sense strand
aguguaaaguggucaaaug

SEQ ID NO: 1305505 - RNA, 19 nt, Homo sapiens
  misc_RNA (1)...(19): siRNA sense strand
ccacccauacuauuuguga

SEQ ID NO: 1305506 - RNA, 19 nt, Homo sapiens
  misc_RNA (1)...(19): siRNA sense strand
uuggagagagcacgauuua

SEQ ID NO: 1305507 - RNA, 19 nt, Homo sapiens
  misc_RNA (1)...(19): siRNA sense strand
gguuaucagaugcacuuua

SEQ ID NO: 1305508 - RNA, 19 nt, Homo sapiens
  misc_RNA (1)...(19): siRNA sense strand
caccaacauuugaagcuau

SEQ ID NO: 1305509 - RNA, 19 nt, Homo sapiens
  misc_RNA (1)...(19): siRNA sense strand
ugaggagccaccaacauuu

SEQ ID NO: 1305510 - RNA, 19 nt, Homo sapiens
  misc_RNA (1)...(19): siRNA sense strand
ggaaggaauacuugacagu

SEQ ID NO: 1305511 - RNA, 19 nt, Homo sapiens
  misc_RNA (1)...(19): siRNA sense strand
gaggaaggaauacuugaca

SEQ ID NO: 1305512 - RNA, 19 nt, Homo sapiens
  misc_RNA (1)...(19): siRNA sense strand
ugaguaucuugaugcagua

SEQ ID NO: 1305513 - RNA, 19 nt, Homo sapiens
  misc_RNA (1)...(19): siRNA sense strand
caccuuuagugaaguagaa

SEQ ID NO: 1305514 - RNA, 19 nt, Homo sapiens
  misc_RNA (1)...(19): siRNA sense strand
acagauaucaggauuugga

SEQ ID NO: 1305515 - RNA, 19 nt, Homo sapiens
  misc_RNA (1)...(19): siRNA sense strand
ucauugcugugauuguuau

SEQ ID NO: 1305516 - RNA, 19 nt, Homo sapiens
  misc_RNA (1)...(19): siRNA sense strand
ucagaugcacuuuauuugu

SEQ ID NO: 1305517 - RNA, 19 nt, Homo sapiens
  misc_RNA (1)...(19): siRNA sense strand
gugcugcuccagaguguaa

SEQ ID NO: 1305518 - RNA, 19 nt, Homo sapiens
  misc_RNA (1)...(19): siRNA sense strand
ggaaaacacaccuuuagug

SEQ ID NO: 1305519 - RNA, 19 nt, Homo sapiens
  misc_RNA (1)...(19): siRNA sense strand
aaggaucaguagcaauuug

SEQ ID NO: 1305520 - RNA, 19 nt, Homo sapiens
  misc_RNA (1)...(19): siRNA sense strand
uauauacgggauccuuuaa

SEQ ID NO: 1305521 - RNA, 19 nt, Homo sapiens
  misc_RNA (1)...(19): siRNA sense strand
ugaaguagaaguauuugag

SEQ ID NO: 1305522 - RNA, 19 nt, Homo sapiens
  misc_RNA (1)...(19): siRNA sense strand
cuugacaguuuggauguuu

SEQ ID NO: 1305523 - RNA, 19 nt, Homo sapiens
  misc_RNA (1)...(19): siRNA sense strand
cauauauacgggauccuuu

SEQ ID NO: 1305524 - RNA, 19 nt, Homo sapiens
  misc_RNA (1)...(19): siRNA sense strand
auauauacgggauccuuua

SEQ ID NO: 1305525 - RNA, 19 nt, Homo sapiens
  misc_RNA (1)...(19): siRNA sense strand
cuuaaaggaucaguagcaa

SEQ ID NO: 1305526 - RNA, 19 nt, Homo sapiens
  misc_RNA (1)...(19): siRNA sense strand
uaaaccugaggaaggaaua

SEQ ID NO: 1305527 - RNA, 19 nt, Homo sapiens
  misc_RNA (1)...(19): siRNA sense strand
agaugacgccuguuauaga

SEQ ID NO: 1305528 - RNA, 19 nt, Homo sapiens
  misc_RNA (1)...(19): siRNA sense strand
ugugauuguuauugccaua

SEQ ID NO: 1305529 - RNA, 19 nt, Homo sapiens
  misc_RNA (1)...(19): siRNA sense strand
gagagcacgauuuauugug

SEQ ID NO: 1305530 - RNA, 19 nt, Homo sapiens
  misc_RNA (1)...(19): siRNA sense strand
gaaguauuugaguaucuug

SEQ ID NO: 1305531 - RNA, 19 nt, Homo sapiens
  misc_RNA (1)...(19): siRNA sense strand
ggcuaccugucucagauga

SEQ ID NO: 1305532 - RNA, 19 nt, Homo sapiens
  misc_RNA (1)...(19): siRNA sense strand
gauaucaggauuuggaaaa

SEQ ID NO: 1305533 - RNA, 19 nt, Homo sapiens
  misc_RNA (1)...(19): siRNA sense strand
ccucuugccacccauacua

SEQ ID NO: 1305534 - RNA, 19 nt, Homo sapiens
  misc_RNA (1)...(19): siRNA sense strand
ccaugguguugcugcugua

SEQ ID NO: 1305535 - RNA, 19 nt, Homo sapiens
  misc_RNA (1)...(19): siRNA sense strand
cagaugacgccuguuauag

SEQ ID NO: 1305536 - RNA, 19 nt, Homo sapiens
  misc_RNA (1)...(19): siRNA sense strand
cagaugguggagcugaaua

SEQ ID NO: 1305537 - RNA, 19 nt, Homo sapiens
  misc_RNA (1)...(19): siRNA sense strand
uuggugaacgaguagauua

SEQ ID NO: 1305538 - RNA, 19 nt, Homo sapiens
  misc_RNA (1)...(19): siRNA sense strand
gucauugcugugauuguua

SEQ ID NO: 1305539 - RNA, 19 nt, Homo sapiens
  misc_RNA (1)...(19): siRNA sense strand
ggagccaccaacauuugaa

SEQ ID NO: 1305540 - RNA, 19 nt, Homo sapiens
  misc_RNA (1)...(19): siRNA sense strand
gcgcuuuccuggguugcuu

SEQ ID NO: 1305541 - RNA, 19 nt, Homo sapiens
  misc_RNA (1)...(19): siRNA sense strand
uacuacaaagcaacaguua

SEQ ID NO: 1305542 - RNA, 19 nt, Homo sapiens
  misc_RNA (1)...(19): siRNA sense strand
cuugaugcaguaacuuaua

SEQ ID NO: 1305543 - RNA, 19 nt, Homo sapiens
  misc_RNA (1)...(19): siRNA sense strand
aaacauguccauauauacg

SEQ ID NO: 1305544 - RNA, 19 nt, Homo sapiens
  misc_RNA (1)...(19): siRNA sense strand
guguaaaguggucaaaugu

SEQ ID NO: 1305545 - RNA, 19 nt, Homo sapiens
  misc_RNA (1)...(19): siRNA sense strand
cuuacgaguuugguuauca

SEQ ID NO: 1305546 - RNA, 19 nt, Homo sapiens
  misc_RNA (1)...(19): siRNA sense strand
uacgggauccuuuaaaugg

SEQ ID NO: 1305547 - RNA, 19 nt, Homo sapiens
  misc_RNA (1)...(19): siRNA sense strand
gcagaugguggagcugaau

SEQ ID NO: 1305548 - RNA, 19 nt, Homo sapiens
  misc_RNA (1)...(19): siRNA sense strand
aaccaaaacccuacuauga

SEQ ID NO: 1305549 - RNA, 19 nt, Homo sapiens
  misc_RNA (1)...(19): siRNA sense strand
cccaauaugugaaaagguu

SEQ ID NO: 1305550 - RNA, 19 nt, Homo sapiens
  misc_RNA (1)...(19): siRNA sense strand
ggagcugaauaugccacuu

SEQ ID NO: 1305551 - RNA, 19 nt, Homo sapiens
  misc_RNA (1)...(19): siRNA sense strand
cgauggcagcgacacaauu

SEQ ID NO: 1305552 - RNA, 19 nt, Homo sapiens
  misc_RNA (1)...(19): siRNA sense strand
gauccauuuucacuuauug

SEQ ID NO: 1305553 - RNA, 19 nt, Homo sapiens
  misc_RNA (1)...(19): siRNA sense strand
uugaugcaguaacuuauag

SEQ ID NO: 1305554 - RNA, 19 nt, Homo sapiens
  misc_RNA (1)...(19): siRNA sense strand
guaucuugaugcaguaacu

SEQ ID NO: 1305555 - RNA, 19 nt, Homo sapiens
  misc_RNA (1)...(19): siRNA sense strand
ggagagagcacgauuuauu

SEQ ID NO: 1305556 - RNA, 19 nt, Homo sapiens
  misc_RNA (1)...(19): siRNA sense strand
agagaaacauguccauaua

SEQ ID NO: 1305557 - RNA, 19 nt, Homo sapiens
  misc_RNA (1)...(19): siRNA sense strand
cagaugcacuuuauuugua

SEQ ID NO: 1305558 - RNA, 19 nt, Homo sapiens
  misc_RNA (1)...(19): siRNA sense strand
ggacuuacgaguuugguua

SEQ ID NO: 1305559 - RNA, 19 nt, Homo sapiens
  misc_RNA (1)...(19): siRNA sense strand
aaacagauaucaggauuug

SEQ ID NO: 1305560 - RNA, 19 nt, Homo sapiens
  misc_RNA (1)...(19): siRNA sense strand
cuauggagcucauugguaa

SEQ ID NO: 1305561 - RNA, 19 nt, Homo sapiens
  misc_RNA (1)...(19): siRNA sense strand
aaacacaccuuuagugaag

SEQ ID NO: 1305562 - RNA, 19 nt, Homo sapiens
  misc_RNA (1)...(19): siRNA sense strand
gaacuuaaaggaucaguag

SEQ ID NO: 1305563 - RNA, 19 nt, Homo sapiens
  misc_RNA (1)...(19): siRNA sense strand
gaaaacagauaucaggauu

SEQ ID NO: 1305564 - RNA, 19 nt, Homo sapiens
  misc_RNA (1)...(19): siRNA sense strand
uaaaggaucaguagcaauu

SEQ ID NO: 1305565 - RNA, 19 nt, Homo sapiens
  misc_RNA (1)...(19): siRNA sense strand
aaaugggacuuacgaguuu

SEQ ID NO: 1305566 - RNA, 19 nt, Homo sapiens
  misc_RNA (1)...(19): siRNA sense strand
guuaucagaugcacuuuau

SEQ ID NO: 1305567 - RNA, 19 nt, Homo sapiens
  misc_RNA (1)...(19): siRNA sense strand
gagcugaauaugccacuua

SEQ ID NO: 1305568 - RNA, 19 nt, Homo sapiens
  misc_RNA (1)...(19): siRNA sense strand
gagcagagaggcugaauag

SEQ ID NO: 1305569 - RNA, 19 nt, Homo sapiens
  misc_RNA (1)...(19): siRNA sense strand
ugagauuggugaacgagua

SEQ ID NO: 1305570 - RNA, 19 nt, Homo sapiens
  misc_RNA (1)...(19): siRNA sense strand
gugaacgaguagauuauaa

SEQ ID NO: 1305571 - RNA, 19 nt, Homo sapiens
  misc_RNA (1)...(19): siRNA sense strand
gagagagcacgauuuauug

SEQ ID NO: 1305572 - RNA, 19 nt, Homo sapiens
  misc_RNA (1)...(19): siRNA sense strand
caaaugggacuuacgaguu

SEQ ID NO: 1305573 - RNA, 19 nt, Homo sapiens
  misc_RNA (1)...(19): siRNA sense strand
ggucauugcugugauuguu

SEQ ID NO: 1305574 - RNA, 19 nt, Homo sapiens
  misc_RNA (1)...(19): siRNA sense strand
ccagauccauuuucacuua

SEQ ID NO: 1305575 - RNA, 19 nt, Homo sapiens
  misc_RNA (1)...(19): siRNA sense strand
gaaggaauacuugacaguu

SEQ ID NO: 1305576 - RNA, 19 nt, Homo sapiens
  misc_RNA (1)...(19): siRNA sense strand
aaggaauacuugacaguuu

SEQ ID NO: 1305577 - RNA, 19 nt, Homo sapiens
  misc_RNA (1)...(19): siRNA sense strand
ucagaugacgccuguuaua

SEQ ID NO: 1305578 - RNA, 19 nt, Homo sapiens
  misc_RNA (1)...(19): siRNA sense strand
gaaaacacaccuuuaguga

SEQ ID NO: 1305579 - RNA, 19 nt, Homo sapiens
  misc_RNA (1)...(19): siRNA sense strand
gaugacgccuguuauagag

SEQ ID NO: 1305580 - RNA, 19 nt, Homo sapiens
  misc_RNA (1)...(19): siRNA sense strand
gagaaacauguccauauau

SEQ ID NO: 1305581 - RNA, 19 nt, Homo sapiens
  misc_RNA (1)...(19): siRNA sense strand
ccacuuaccagacuaaauc

SEQ ID NO: 1305582 - RNA, 19 nt, Homo sapiens
  misc_RNA (1)...(19): siRNA sense strand
acgaguagauuauaagugu

SEQ ID NO: 1305583 - RNA, 19 nt, Homo sapiens
  misc_RNA (1)...(19): siRNA sense strand
cuacaaagcaacaguuaug

SEQ ID NO: 1305584 - RNA, 19 nt, Homo sapiens
  misc_RNA (1)...(19): siRNA sense strand
ccaccaacauuugaagcua

SEQ ID NO: 1305585 - RNA, 19 nt, Homo sapiens
  misc_RNA (1)...(19): siRNA sense strand
uauacgggauccuuuaaau

SEQ ID NO: 1305586 - RNA, 19 nt, Homo sapiens
  misc_RNA (1)...(19): siRNA sense strand
cgaguuugguuaucagaug

SEQ ID NO: 1305587 - RNA, 19 nt, Homo sapiens
  misc_RNA (1)...(19): siRNA sense strand
gaacgaguagauuauaagu

SEQ ID NO: 1305588 - RNA, 19 nt, Homo sapiens
  misc_RNA (1)...(19): siRNA sense strand
gugaggagccaccaacauu

SEQ ID NO: 1305589 - RNA, 19 nt, Homo sapiens
  misc_RNA (1)...(19): siRNA sense strand
gauggcagcgacacaauug

SEQ ID NO: 1305590 - RNA, 19 nt, Homo sapiens
  misc_RNA (1)...(19): siRNA sense strand
ucucagaugacgccuguua

SEQ ID NO: 1305591 - RNA, 19 nt, Homo sapiens
  misc_RNA (1)...(19): siRNA sense strand
acacaccuuuagugaagua

SEQ ID NO: 1305592 - RNA, 19 nt, Homo sapiens
  misc_RNA (1)...(19): siRNA sense strand
gcuauggagcucauuggua

SEQ ID NO: 1305593 - RNA, 19 nt, Homo sapiens
  misc_RNA (1)...(19): siRNA sense strand
gaggagccaccaacauuug

SEQ ID NO: 1305594 - RNA, 19 nt, Homo sapiens
  misc_RNA (1)...(19): siRNA sense strand
uagagaaacauguccauau

SEQ ID NO: 1305595 - RNA, 19 nt, Homo sapiens
  misc_RNA (1)...(19): siRNA sense strand
guuccaaagugucuuaaag

SEQ ID NO: 1305596 - RNA, 19 nt, Homo sapiens
  misc_RNA (1)...(19): siRNA sense strand
ggugaacgaguagauuaua

SEQ ID NO: 1305597 - RNA, 19 nt, Homo sapiens
  misc_RNA (1)...(19): siRNA sense strand
gaaguagaaguauuugagu

SEQ ID NO: 1305598 - RNA, 19 nt, Homo sapiens
  misc_RNA (1)...(19): siRNA sense strand
gaaacauguccauauauac

SEQ ID NO: 1305599 - RNA, 19 nt, Homo sapiens
  misc_RNA (1)...(19): siRNA sense strand
ugacgccuguuauagagaa

SEQ ID NO: 1305600 - RNA, 19 nt, Homo sapiens
  misc_RNA (1)...(19): siRNA sense strand
cgaguagauuauaagugua

SEQ ID NO: 1305601 - RNA, 19 nt, Homo sapiens
  misc_RNA (1)...(19): siRNA sense strand
gcacuuuauuuguaaugag

SEQ ID NO: 1305602 - RNA, 19 nt, Homo sapiens
  misc_RNA (1)...(19): siRNA sense strand
guagaaguauuugaguauc

SEQ ID NO: 1305603 - RNA, 19 nt, Homo sapiens
  misc_RNA (1)...(19): siRNA sense strand
guauuugaguaucuugaug

SEQ ID NO: 1305604 - RNA, 19 nt, Homo sapiens
  misc_RNA (1)...(19): siRNA sense strand
aggaauacuugacaguuug

SEQ ID NO: 1305605 - RNA, 19 nt, Homo sapiens
  misc_RNA (1)...(19): siRNA sense strand
ccaaaacccuacuaugaga

SEQ ID NO: 1305606 - RNA, 19 nt, Homo sapiens
  misc_RNA (1)...(19): siRNA sense strand
aguguaaaguggucaaaug

SEQ ID NO: 1305607 - RNA, 19 nt, Homo sapiens
  misc_RNA (1)...(19): siRNA sense strand
ccacccauacuauuuguga

SEQ ID NO: 1305608 - RNA, 19 nt, Homo sapiens
  misc_RNA (1)...(19): siRNA sense strand
uuggagagagcacgauuua

SEQ ID NO: 1305609 - RNA, 19 nt, Homo sapiens
  misc_RNA (1)...(19): siRNA sense strand
gguuaucagaugcacuuua

SEQ ID NO: 1305610 - RNA, 19 nt, Homo sapiens
  misc_RNA (1)...(19): siRNA sense strand
caccaacauuugaagcuau

SEQ ID NO: 1305611 - RNA, 19 nt, Homo sapiens
  misc_RNA (1)...(19): siRNA sense strand
ugaggagccaccaacauuu

SEQ ID NO: 1305612 - RNA, 19 nt, Homo sapiens
  misc_RNA (1)...(19): siRNA sense strand
ggaaggaauacuugacagu

SEQ ID NO: 1305613 - RNA, 19 nt, Homo sapiens
  misc_RNA (1)...(19): siRNA sense strand
gaggaaggaauacuugaca

SEQ ID NO: 1305614 - RNA, 19 nt, Homo sapiens
  misc_RNA (1)...(19): siRNA sense strand
ccaguuccaaagugucuua

SEQ ID NO: 1305615 - RNA, 19 nt, Homo sapiens
  misc_RNA (1)...(19): siRNA sense strand
ugaguaucuugaugcagua

SEQ ID NO: 1305616 - RNA, 19 nt, Homo sapiens
  misc_RNA (1)...(19): siRNA sense strand
caccuuuagugaaguagaa

SEQ ID NO: 1305617 - RNA, 19 nt, Homo sapiens
  misc_RNA (1)...(19): siRNA sense strand
acagauaucaggauuugga

SEQ ID NO: 1305618 - RNA, 19 nt, Homo sapiens
  misc_RNA (1)...(19): siRNA sense strand
ucauugcugugauuguuau

SEQ ID NO: 1305619 - RNA, 19 nt, Homo sapiens
  misc_RNA (1)...(19): siRNA sense strand
ucagaugcacuuuauuugu

SEQ ID NO: 1305620 - RNA, 19 nt, Homo sapiens
  misc_RNA (1)...(19): siRNA sense strand
gugcugcuccagaguguaa

SEQ ID NO: 1305621 - RNA, 19 nt, Homo sapiens
  misc_RNA (1)...(19): siRNA sense strand
ggaaaacacaccuuuagug

SEQ ID NO: 1305622 - RNA, 19 nt, Homo sapiens
  misc_RNA (1)...(19): siRNA sense strand
aaggaucaguagcaauuug

SEQ ID NO: 1305623 - RNA, 19 nt, Homo sapiens
  misc_RNA (1)...(19): siRNA sense strand
uauauacgggauccuuuaa

SEQ ID NO: 1305624 - RNA, 19 nt, Homo sapiens
  misc_RNA (1)...(19): siRNA sense strand
ugaaguagaaguauuugag

SEQ ID NO: 1305625 - RNA, 19 nt, Homo sapiens
  misc_RNA (1)...(19): siRNA sense strand
cuugacaguuuggauguuu

SEQ ID NO: 1305626 - RNA, 19 nt, Homo sapiens
  misc_RNA (1)...(19): siRNA sense strand
cauauauacgggauccuuu

SEQ ID NO: 1305627 - RNA, 19 nt, Homo sapiens
  misc_RNA (1)...(19): siRNA sense strand
auauauacgggauccuuua

SEQ ID NO: 1305628 - RNA, 19 nt, Homo sapiens
  misc_RNA (1)...(19): siRNA sense strand
cuuaaaggaucaguagcaa

SEQ ID NO: 1305629 - RNA, 19 nt, Homo sapiens
  misc_RNA (1)...(19): siRNA sense strand
uaaaccugaggaaggaaua

SEQ ID NO: 1305630 - RNA, 19 nt, Homo sapiens
  misc_RNA (1)...(19): siRNA sense strand
agaugacgccuguuauaga

SEQ ID NO: 1305631 - RNA, 19 nt, Homo sapiens
  misc_RNA (1)...(19): siRNA sense strand
ugugauuguuauugccaua

SEQ ID NO: 1305632 - RNA, 19 nt, Homo sapiens
  misc_RNA (1)...(19): siRNA sense strand
gagagcacgauuuauugug

SEQ ID NO: 1305633 - RNA, 19 nt, Homo sapiens
  misc_RNA (1)...(19): siRNA sense strand
gaaguauuugaguaucuug

SEQ ID NO: 1305634 - RNA, 19 nt, Homo sapiens
  misc_RNA (1)...(19): siRNA sense strand
ggcuaccugucucagauga

SEQ ID NO: 1305635 - RNA, 19 nt, Homo sapiens
  misc_RNA (1)...(19): siRNA sense strand
ccucuugccacccauacua

SEQ ID NO: 1305636 - RNA, 19 nt, Homo sapiens
  misc_RNA (1)...(19): siRNA sense strand
gauaucaggauuuggaaaa

SEQ ID NO: 1305637 - RNA, 19 nt, Homo sapiens
  misc_RNA (1)...(19): siRNA sense strand
ccaugguguugcugcugua

SEQ ID NO: 1305638 - RNA, 19 nt, Homo sapiens
  misc_RNA (1)...(19): siRNA sense strand
cagaugacgccuguuauag

SEQ ID NO: 1305639 - RNA, 19 nt, Homo sapiens
  misc_RNA (1)...(19): siRNA sense strand
cagaugguggagcugaaua

SEQ ID NO: 1305640 - RNA, 19 nt, Homo sapiens
  misc_RNA (1)...(19): siRNA sense strand
gucauugcugugauuguua

SEQ ID NO: 1305641 - RNA, 19 nt, Homo sapiens
  misc_RNA (1)...(19): siRNA sense strand
uuggugaacgaguagauua

SEQ ID NO: 1305642 - RNA, 19 nt, Homo sapiens
  misc_RNA (1)...(19): siRNA sense strand
ggagccaccaacauuugaa

SEQ ID NO: 1305643 - RNA, 19 nt, Homo sapiens
  misc_RNA (1)...(19): siRNA sense strand
gcgcuuuccuggguugcuu

SEQ ID NO: 1305644 - RNA, 19 nt, Homo sapiens
  misc_RNA (1)...(19): siRNA sense strand
uacuacaaagcaacaguua

SEQ ID NO: 1305645 - RNA, 19 nt, Homo sapiens
  misc_RNA (1)...(19): siRNA sense strand
cuugaugcaguaacuuaua

SEQ ID NO: 1305646 - RNA, 19 nt, Homo sapiens
  misc_RNA (1)...(19): siRNA sense strand
aaacauguccauauauacg

SEQ ID NO: 1305647 - RNA, 19 nt, Homo sapiens
  misc_RNA (1)...(19): siRNA sense strand
guguaaaguggucaaaugu

SEQ ID NO: 1305648 - RNA, 19 nt, Homo sapiens
  misc_RNA (1)...(19): siRNA sense strand
cuuacgaguuugguuauca

SEQ ID NO: 1305649 - RNA, 19 nt, Homo sapiens
  misc_RNA (1)...(19): siRNA sense strand
aaccaaaacccuacuauga

SEQ ID NO: 1305650 - RNA, 19 nt, Homo sapiens
  misc_RNA (1)...(19): siRNA sense strand
gcagaugguggagcugaau

SEQ ID NO: 1305651 - RNA, 19 nt, Homo sapiens
  misc_RNA (1)...(19): siRNA sense strand
uacgggauccuuuaaaugg

SEQ ID NO: 1305652 - RNA, 19 nt, Homo sapiens
  misc_RNA (1)...(19): siRNA sense strand
cgauggcagcgacacaauu

SEQ ID NO: 1305653 - RNA, 19 nt, Homo sapiens
  misc_RNA (1)...(19): siRNA sense strand
ggagcugaauaugccacuu

SEQ ID NO: 1305654 - RNA, 19 nt, Homo sapiens
  misc_RNA (1)...(19): siRNA sense strand
caacauuugaagcuaugga

SEQ ID NO: 1305655 - RNA, 19 nt, Homo sapiens
  misc_RNA (1)...(19): siRNA sense strand
ggagagagcacgauuuauu

SEQ ID NO: 1305656 - RNA, 19 nt, Homo sapiens
  misc_RNA (1)...(19): siRNA sense strand
agagaaacauguccauaua

SEQ ID NO: 1305657 - RNA, 19 nt, Homo sapiens
  misc_RNA (1)...(19): siRNA sense strand
cagaugcacuuuauuugua

SEQ ID NO: 1305658 - RNA, 19 nt, Homo sapiens
  misc_RNA (1)...(19): siRNA sense strand
ggacuuacgaguuugguua

SEQ ID NO: 1305659 - RNA, 19 nt, Homo sapiens
  misc_RNA (1)...(19): siRNA sense strand
aaacagauaucaggauuug

SEQ ID NO: 1305660 - RNA, 19 nt, Homo sapiens
  misc_RNA (1)...(19): siRNA sense strand
cuauggagcucauugguaa

SEQ ID NO: 1305661 - RNA, 19 nt, Homo sapiens
  misc_RNA (1)...(19): siRNA sense strand
aaacacaccuuuagugaag

SEQ ID NO: 1305662 - RNA, 19 nt, Homo sapiens
  misc_RNA (1)...(19): siRNA sense strand
gaacuuaaaggaucaguag

SEQ ID NO: 1305663 - RNA, 19 nt, Homo sapiens
  misc_RNA (1)...(19): siRNA sense strand
gaaaacagauaucaggauu

SEQ ID NO: 1305664 - RNA, 19 nt, Homo sapiens
  misc_RNA (1)...(19): siRNA sense strand
uaaaggaucaguagcaauu

SEQ ID NO: 1305665 - RNA, 19 nt, Homo sapiens
  misc_RNA (1)...(19): siRNA sense strand
aaaugggacuuacgaguuu

SEQ ID NO: 1305666 - RNA, 19 nt, Homo sapiens
  misc_RNA (1)...(19): siRNA sense strand
guuaucagaugcacuuuau

SEQ ID NO: 1305667 - RNA, 19 nt, Homo sapiens
  misc_RNA (1)...(19): siRNA sense strand
ugagauuggugaacgagua

SEQ ID NO: 1305668 - RNA, 19 nt, Homo sapiens
  misc_RNA (1)...(19): siRNA sense strand
gugaacgaguagauuauaa

SEQ ID NO: 1305669 - RNA, 19 nt, Homo sapiens
  misc_RNA (1)...(19): siRNA sense strand
gagagagcacgauuuauug

SEQ ID NO: 1305670 - RNA, 19 nt, Homo sapiens
  misc_RNA (1)...(19): siRNA sense strand
caaaugggacuuacgaguu

SEQ ID NO: 1305671 - RNA, 19 nt, Homo sapiens
  misc_RNA (1)...(19): siRNA sense strand
ggucauugcugugauuguu

SEQ ID NO: 1305672 - RNA, 19 nt, Homo sapiens
  misc_RNA (1)...(19): siRNA sense strand
ccagauccauuuucacuua

SEQ ID NO: 1305673 - RNA, 19 nt, Homo sapiens
  misc_RNA (1)...(19): siRNA sense strand
gaaggaauacuugacaguu

SEQ ID NO: 1305674 - RNA, 19 nt, Homo sapiens
  misc_RNA (1)...(19): siRNA sense strand
aaggaauacuugacaguuu

SEQ ID NO: 1305675 - RNA, 19 nt, Homo sapiens
  misc_RNA (1)...(19): siRNA sense strand
ucagaugacgccuguuaua

SEQ ID NO: 1305676 - RNA, 19 nt, Homo sapiens
  misc_RNA (1)...(19): siRNA sense strand
gaaaacacaccuuuaguga

SEQ ID NO: 1305677 - RNA, 19 nt, Homo sapiens
  misc_RNA (1)...(19): siRNA sense strand
gaugacgccuguuauagag

SEQ ID NO: 1305678 - RNA, 19 nt, Homo sapiens
  misc_RNA (1)...(19): siRNA sense strand
gagaaacauguccauauau

SEQ ID NO: 1305679 - RNA, 19 nt, Homo sapiens
  misc_RNA (1)...(19): siRNA sense strand
acgaguagauuauaagugu

SEQ ID NO: 1305680 - RNA, 19 nt, Homo sapiens
  misc_RNA (1)...(19): siRNA sense strand
cuacaaagcaacaguuaug

SEQ ID NO: 1305681 - RNA, 19 nt, Homo sapiens
  misc_RNA (1)...(19): siRNA sense strand
ccaccaacauuugaagcua

SEQ ID NO: 1305682 - RNA, 19 nt, Homo sapiens
  misc_RNA (1)...(19): siRNA sense strand
uauacgggauccuuuaaau

SEQ ID NO: 1305683 - RNA, 19 nt, Homo sapiens
  misc_RNA (1)...(19): siRNA sense strand
cgaguuugguuaucagaug

SEQ ID NO: 1305684 - RNA, 19 nt, Homo sapiens
  misc_RNA (1)...(19): siRNA sense strand
gaacgaguagauuauaagu

SEQ ID NO: 1305685 - RNA, 19 nt, Homo sapiens
  misc_RNA (1)...(19): siRNA sense strand
gugaggagccaccaacauu

SEQ ID NO: 1305686 - RNA, 19 nt, Homo sapiens
  misc_RNA (1)...(19): siRNA sense strand
gauggcagcgacacaauug

SEQ ID NO: 1305687 - RNA, 19 nt, Homo sapiens
  misc_RNA (1)...(19): siRNA sense strand
gcuauggagcucauuggua

SEQ ID NO: 1305688 - RNA, 19 nt, Homo sapiens
  misc_RNA (1)...(19): siRNA sense strand
gaggagccaccaacauuug

SEQ ID NO: 1305689 - RNA, 19 nt, Homo sapiens
  misc_RNA (1)...(19): siRNA sense strand
acacaccuuuagugaagua

SEQ ID NO: 1305690 - RNA, 19 nt, Homo sapiens
  misc_RNA (1)...(19): siRNA sense strand
ucucagaugacgccuguua

SEQ ID NO: 1305691 - RNA, 19 nt, Homo sapiens
  misc_RNA (1)...(19): siRNA sense strand
uagagaaacauguccauau

SEQ ID NO: 1305692 - RNA, 19 nt, Homo sapiens
  misc_RNA (1)...(19): siRNA sense strand
ggugaacgaguagauuaua

SEQ ID NO: 1305693 - RNA, 19 nt, Homo sapiens
  misc_RNA (1)...(19): siRNA sense strand
gaaguagaaguauuugagu

SEQ ID NO: 1305694 - RNA, 19 nt, Homo sapiens
  misc_RNA (1)...(19): siRNA sense strand
gaaacauguccauauauac

SEQ ID NO: 1305695 - RNA, 19 nt, Homo sapiens
  misc_RNA (1)...(19): siRNA sense strand
ugacgccuguuauagagaa

SEQ ID NO: 1305696 - RNA, 19 nt, Homo sapiens
  misc_RNA (1)...(19): siRNA sense strand
cgaguagauuauaagugua

SEQ ID NO: 1305697 - RNA, 19 nt, Homo sapiens
  misc_RNA (1)...(19): siRNA sense strand
gcacuuuauuuguaaugag

SEQ ID NO: 1305698 - RNA, 19 nt, Homo sapiens
  misc_RNA (1)...(19): siRNA sense strand
guagaaguauuugaguauc

SEQ ID NO: 1305699 - RNA, 19 nt, Homo sapiens
  misc_RNA (1)...(19): siRNA sense strand
guauuugaguaucuugaug

SEQ ID NO: 1305700 - RNA, 19 nt, Homo sapiens
  misc_RNA (1)...(19): siRNA sense strand
aggaauacuugacaguuug

SEQ ID NO: 1305701 - RNA, 19 nt, Homo sapiens
  misc_RNA (1)...(19): siRNA sense strand
aguguaaaguggucaaaug

SEQ ID NO: 1305702 - RNA, 19 nt, Homo sapiens
  misc_RNA (1)...(19): siRNA sense strand
ccaaaacccuacuaugaga

SEQ ID NO: 1305703 - RNA, 19 nt, Homo sapiens
  misc_RNA (1)...(19): siRNA sense strand
ccacccauacuauuuguga

SEQ ID NO: 1305704 - RNA, 19 nt, Homo sapiens
  misc_RNA (1)...(19): siRNA sense strand
caccaacauuugaagcuau

SEQ ID NO: 1305705 - RNA, 19 nt, Homo sapiens
  misc_RNA (1)...(19): siRNA sense strand
uuggagagagcacgauuua

SEQ ID NO: 1305706 - RNA, 19 nt, Homo sapiens
  misc_RNA (1)...(19): siRNA sense strand
gguuaucagaugcacuuua

SEQ ID NO: 1305707 - RNA, 19 nt, Homo sapiens
  misc_RNA (1)...(19): siRNA sense strand
ugaggagccaccaacauuu

SEQ ID NO: 1305708 - RNA, 19 nt, Homo sapiens
  misc_RNA (1)...(19): siRNA sense strand
ggaaggaauacuugacagu

SEQ ID NO: 1305709 - RNA, 19 nt, Homo sapiens
  misc_RNA (1)...(19): siRNA sense strand
gaggaaggaauacuugaca

SEQ ID NO: 1305710 - RNA, 19 nt, Homo sapiens
  misc_RNA (1)...(19): siRNA sense strand
ugaguaucuugaugcagua

SEQ ID NO: 1305711 - RNA, 19 nt, Homo sapiens
  misc_RNA (1)...(19): siRNA sense strand
caccuuuagugaaguagaa

SEQ ID NO: 1305712 - RNA, 19 nt, Homo sapiens
  misc_RNA (1)...(19): siRNA sense strand
acagauaucaggauuugga

SEQ ID NO: 1305713 - RNA, 19 nt, Homo sapiens
  misc_RNA (1)...(19): siRNA sense strand
ucauugcugugauuguuau

SEQ ID NO: 1305714 - RNA, 19 nt, Homo sapiens
  misc_RNA (1)...(19): siRNA sense strand
ucagaugcacuuuauuugu

SEQ ID NO: 1305715 - RNA, 19 nt, Homo sapiens
  misc_RNA (1)...(19): siRNA sense strand
gugcugcuccagaguguaa

SEQ ID NO: 1305716 - RNA, 19 nt, Homo sapiens
  misc_RNA (1)...(19): siRNA sense strand
ggaaaacacaccuuuagug

SEQ ID NO: 1305717 - RNA, 19 nt, Homo sapiens
  misc_RNA (1)...(19): siRNA sense strand
aaggaucaguagcaauuug

SEQ ID NO: 1305718 - RNA, 19 nt, Homo sapiens
  misc_RNA (1)...(19): siRNA sense strand
uauauacgggauccuuuaa

SEQ ID NO: 1305719 - RNA, 19 nt, Homo sapiens
  misc_RNA (1)...(19): siRNA sense strand
ugaaguagaaguauuugag

SEQ ID NO: 1305720 - RNA, 19 nt, Homo sapiens
  misc_RNA (1)...(19): siRNA sense strand
cuugacaguuuggauguuu

SEQ ID NO: 1305721 - RNA, 19 nt, Homo sapiens
  misc_RNA (1)...(19): siRNA sense strand
cauauauacgggauccuuu

SEQ ID NO: 1305722 - RNA, 19 nt, Homo sapiens
  misc_RNA (1)...(19): siRNA sense strand
auauauacgggauccuuua

SEQ ID NO: 1305723 - RNA, 19 nt, Homo sapiens
  misc_RNA (1)...(19): siRNA sense strand
cuuaaaggaucaguagcaa

SEQ ID NO: 1305724 - RNA, 19 nt, Homo sapiens
  misc_RNA (1)...(19): siRNA sense strand
uaaaccugaggaaggaaua

SEQ ID NO: 1305725 - RNA, 19 nt, Homo sapiens
  misc_RNA (1)...(19): siRNA sense strand
agaugacgccuguuauaga

SEQ ID NO: 1305726 - RNA, 19 nt, Homo sapiens
  misc_RNA (1)...(19): siRNA sense strand
ugugauuguuauugccaua

SEQ ID NO: 1305727 - RNA, 19 nt, Homo sapiens
  misc_RNA (1)...(19): siRNA sense strand
gagagcacgauuuauugug

SEQ ID NO: 1305728 - RNA, 19 nt, Homo sapiens
  misc_RNA (1)...(19): siRNA sense strand
gaaguauuugaguaucuug

SEQ ID NO: 1305729 - RNA, 19 nt, Homo sapiens
  misc_RNA (1)...(19): siRNA sense strand
ccucuugccacccauacua

SEQ ID NO: 1305730 - RNA, 19 nt, Homo sapiens
  misc_RNA (1)...(19): siRNA sense strand
gauaucaggauuuggaaaa

SEQ ID NO: 1305731 - RNA, 19 nt, Homo sapiens
  misc_RNA (1)...(19): siRNA sense strand
ggcuaccugucucagauga

SEQ ID NO: 1305732 - RNA, 19 nt, Homo sapiens
  misc_RNA (1)...(19): siRNA sense strand
ccaugguguugcugcugua

SEQ ID NO: 1305733 - RNA, 19 nt, Homo sapiens
  misc_RNA (1)...(19): siRNA sense strand
cagaugacgccuguuauag

SEQ ID NO: 1305734 - RNA, 19 nt, Homo sapiens
  misc_RNA (1)...(19): siRNA sense strand
gucauugcugugauuguua

SEQ ID NO: 1305735 - RNA, 19 nt, Homo sapiens
  misc_RNA (1)...(19): siRNA sense strand
uuggugaacgaguagauua

SEQ ID NO: 1305736 - RNA, 19 nt, Homo sapiens
  misc_RNA (1)...(19): siRNA sense strand
ggagccaccaacauuugaa

SEQ ID NO: 1305737 - RNA, 19 nt, Homo sapiens
  misc_RNA (1)...(19): siRNA sense strand
gcgcuuuccuggguugcuu

SEQ ID NO: 1305738 - RNA, 19 nt, Homo sapiens
  misc_RNA (1)...(19): siRNA sense strand
uacuacaaagcaacaguua

SEQ ID NO: 1305739 - RNA, 19 nt, Homo sapiens
  misc_RNA (1)...(19): siRNA sense strand
cuugaugcaguaacuuaua

SEQ ID NO: 1305740 - RNA, 19 nt, Homo sapiens
  misc_RNA (1)...(19): siRNA sense strand
aaacauguccauauauacg

SEQ ID NO: 1305741 - RNA, 19 nt, Homo sapiens
  misc_RNA (1)...(19): siRNA sense strand
guguaaaguggucaaaugu

SEQ ID NO: 1305742 - RNA, 19 nt, Homo sapiens
  misc_RNA (1)...(19): siRNA sense strand
cuuacgaguuugguuauca

SEQ ID NO: 1305743 - RNA, 19 nt, Homo sapiens
  misc_RNA (1)...(19): siRNA sense strand
uacgggauccuuuaaaugg

SEQ ID NO: 1305744 - RNA, 19 nt, Homo sapiens
  misc_RNA (1)...(19): siRNA sense strand
aaccaaaacccuacuauga

SEQ ID NO: 1305745 - RNA, 19 nt, Homo sapiens
  misc_RNA (1)...(19): siRNA sense strand
cccaauaugugaaaagguu

SEQ ID NO: 1305746 - RNA, 19 nt, Homo sapiens
  misc_RNA (1)...(19): siRNA sense strand
cgauggcagcgacacaauu

SEQ ID NO: 1305747 - RNA, 19 nt, Homo sapiens
  misc_RNA (1)...(19): siRNA sense strand
gauccauuuucacuuauug

SEQ ID NO: 1305748 - RNA, 19 nt, Homo sapiens
  misc_RNA (1)...(19): siRNA sense strand
uugaugcaguaacuuauag

SEQ ID NO: 1305749 - RNA, 19 nt, Homo sapiens
  misc_RNA (1)...(19): siRNA sense strand
guaucuugaugcaguaacu

SEQ ID NO: 1305750 - RNA, 19 nt, Homo sapiens
  misc_RNA (1)...(19): siRNA sense strand
caacauuugaagcuaugga

SEQ ID NO: 1305751 - RNA, 19 nt, Homo sapiens
  misc_RNA (1)...(19): siRNA sense strand
gagauuggugaacgaguag

SEQ ID NO: 1305752 - RNA, 19 nt, Homo sapiens
  misc_RNA (1)...(19): siRNA sense strand
ggagagagcacgauuuauu

SEQ ID NO: 1305753 - RNA, 19 nt, Homo sapiens
  misc_RNA (1)...(19): siRNA sense strand
agagaaacauguccauaua

SEQ ID NO: 1305754 - RNA, 19 nt, Homo sapiens
  misc_RNA (1)...(19): siRNA sense strand
cagaugcacuuuauuugua

SEQ ID NO: 1305755 - RNA, 19 nt, Homo sapiens
  misc_RNA (1)...(19): siRNA sense strand
ggacuuacgaguuugguua

SEQ ID NO: 1305756 - RNA, 19 nt, Homo sapiens
  misc_RNA (1)...(19): siRNA sense strand
aaacagauaucaggauuug

SEQ ID NO: 1305757 - RNA, 19 nt, Homo sapiens
  misc_RNA (1)...(19): siRNA sense strand
cuauggagcucauugguaa

SEQ ID NO: 1305758 - RNA, 19 nt, Homo sapiens
  misc_RNA (1)...(19): siRNA sense strand
aaacacaccuuuagugaag

SEQ ID NO: 1305759 - RNA, 19 nt, Homo sapiens
  misc_RNA (1)...(19): siRNA sense strand
gaacuuaaaggaucaguag

SEQ ID NO: 1305760 - RNA, 19 nt, Homo sapiens
  misc_RNA (1)...(19): siRNA sense strand
gaaaacagauaucaggauu

SEQ ID NO: 1305761 - RNA, 19 nt, Homo sapiens
  misc_RNA (1)...(19): siRNA sense strand
uaaaggaucaguagcaauu

SEQ ID NO: 1305762 - RNA, 19 nt, Homo sapiens
  misc_RNA (1)...(19): siRNA sense strand
aaaugggacuuacgaguuu

SEQ ID NO: 1305763 - RNA, 19 nt, Homo sapiens
  misc_RNA (1)...(19): siRNA sense strand
guuaucagaugcacuuuau

SEQ ID NO: 1305764 - RNA, 19 nt, Homo sapiens
  misc_RNA (1)...(19): siRNA sense strand
ugagauuggugaacgagua

SEQ ID NO: 1305765 - RNA, 19 nt, Homo sapiens
  misc_RNA (1)...(19): siRNA sense strand
gugaacgaguagauuauaa

SEQ ID NO: 1305766 - RNA, 19 nt, Homo sapiens
  misc_RNA (1)...(19): siRNA sense strand
gagagagcacgauuuauug

SEQ ID NO: 1305767 - RNA, 19 nt, Homo sapiens
  misc_RNA (1)...(19): siRNA sense strand
caaaugggacuuacgaguu

SEQ ID NO: 1305768 - RNA, 19 nt, Homo sapiens
  misc_RNA (1)...(19): siRNA sense strand
ggucauugcugugauuguu

SEQ ID NO: 1305769 - RNA, 19 nt, Homo sapiens
  misc_RNA (1)...(19): siRNA sense strand
ccagauccauuuucacuua

SEQ ID NO: 1305770 - RNA, 19 nt, Homo sapiens
  misc_RNA (1)...(19): siRNA sense strand
gaaggaauacuugacaguu

SEQ ID NO: 1305771 - RNA, 19 nt, Homo sapiens
  misc_RNA (1)...(19): siRNA sense strand
aaggaauacuugacaguuu

SEQ ID NO: 1305772 - RNA, 19 nt, Homo sapiens
  misc_RNA (1)...(19): siRNA sense strand
ucagaugacgccuguuaua

SEQ ID NO: 1305773 - RNA, 19 nt, Homo sapiens
  misc_RNA (1)...(19): siRNA sense strand
gaaaacacaccuuuaguga

SEQ ID NO: 1305774 - RNA, 19 nt, Homo sapiens
  misc_RNA (1)...(19): siRNA sense strand
gaugacgccuguuauagag

SEQ ID NO: 1305775 - RNA, 19 nt, Homo sapiens
  misc_RNA (1)...(19): siRNA sense strand
gagaaacauguccauauau

SEQ ID NO: 1305776 - RNA, 19 nt, Homo sapiens
  misc_RNA (1)...(19): siRNA sense strand
acgaguagauuauaagugu

SEQ ID NO: 1305777 - RNA, 19 nt, Homo sapiens
  misc_RNA (1)...(19): siRNA sense strand
cuacaaagcaacaguuaug

SEQ ID NO: 1305778 - RNA, 19 nt, Homo sapiens
  misc_RNA (1)...(19): siRNA sense strand
ccaccaacauuugaagcua

SEQ ID NO: 1305779 - RNA, 19 nt, Homo sapiens
  misc_RNA (1)...(19): siRNA sense strand
uauacgggauccuuuaaau

SEQ ID NO: 1305780 - RNA, 19 nt, Homo sapiens
  misc_RNA (1)...(19): siRNA sense strand
cgaguuugguuaucagaug

SEQ ID NO: 1305781 - RNA, 19 nt, Homo sapiens
  misc_RNA (1)...(19): siRNA sense strand
gaacgaguagauuauaagu

SEQ ID NO: 1305782 - RNA, 19 nt, Homo sapiens
  misc_RNA (1)...(19): siRNA sense strand
gugaggagccaccaacauu

SEQ ID NO: 1305783 - RNA, 19 nt, Homo sapiens
  misc_RNA (1)...(19): siRNA sense strand
gauggcagcgacacaauug

SEQ ID NO: 1305784 - RNA, 19 nt, Homo sapiens
  misc_RNA (1)...(19): siRNA sense strand
gcuauggagcucauuggua

SEQ ID NO: 1305785 - RNA, 19 nt, Homo sapiens
  misc_RNA (1)...(19): siRNA sense strand
gaggagccaccaacauuug

SEQ ID NO: 1305786 - RNA, 19 nt, Homo sapiens
  misc_RNA (1)...(19): siRNA sense strand
acacaccuuuagugaagua

SEQ ID NO: 1305787 - RNA, 19 nt, Homo sapiens
  misc_RNA (1)...(19): siRNA sense strand
ucucagaugacgccuguua

SEQ ID NO: 1305788 - RNA, 19 nt, Homo sapiens
  misc_RNA (1)...(19): siRNA sense strand
uagagaaacauguccauau

SEQ ID NO: 1305789 - RNA, 19 nt, Homo sapiens
  misc_RNA (1)...(19): siRNA sense strand
guuccaaagugucuuaaag

SEQ ID NO: 1305790 - RNA, 19 nt, Homo sapiens
  misc_RNA (1)...(19): siRNA sense strand
ggugaacgaguagauuaua

SEQ ID NO: 1305791 - RNA, 19 nt, Homo sapiens
  misc_RNA (1)...(19): siRNA sense strand
gaaguagaaguauuugagu

SEQ ID NO: 1305792 - RNA, 19 nt, Homo sapiens
  misc_RNA (1)...(19): siRNA sense strand
gaaacauguccauauauac

SEQ ID NO: 1305793 - RNA, 19 nt, Homo sapiens
  misc_RNA (1)...(19): siRNA sense strand
ugacgccuguuauagagaa

SEQ ID NO: 1305794 - RNA, 19 nt, Homo sapiens
  misc_RNA (1)...(19): siRNA sense strand
cgaguagauuauaagugua

SEQ ID NO: 1305795 - RNA, 19 nt, Homo sapiens
  misc_RNA (1)...(19): siRNA sense strand
gcacuuuauuuguaaugag

SEQ ID NO: 1305796 - RNA, 19 nt, Homo sapiens
  misc_RNA (1)...(19): siRNA sense strand
guagaaguauuugaguauc

SEQ ID NO: 1305797 - RNA, 19 nt, Homo sapiens
  misc_RNA (1)...(19): siRNA sense strand
guauuugaguaucuugaug

SEQ ID NO: 1305798 - RNA, 19 nt, Homo sapiens
  misc_RNA (1)...(19): siRNA sense strand
aggaauacuugacaguuug

SEQ ID NO: 1305799 - RNA, 19 nt, Homo sapiens
  misc_RNA (1)...(19): siRNA sense strand
ccaaaacccuacuaugaga

SEQ ID NO: 1305800 - RNA, 19 nt, Homo sapiens
  misc_RNA (1)...(19): siRNA sense strand
aguguaaaguggucaaaug

SEQ ID NO: 1305801 - RNA, 19 nt, Homo sapiens
  misc_RNA (1)...(19): siRNA sense strand
ccacccauacuauuuguga

SEQ ID NO: 1305802 - RNA, 19 nt, Homo sapiens
  misc_RNA (1)...(19): siRNA sense strand
caccaacauuugaagcuau

SEQ ID NO: 1305803 - RNA, 19 nt, Homo sapiens
  misc_RNA (1)...(19): siRNA sense strand
uuggagagagcacgauuua

SEQ ID NO: 1305804 - RNA, 19 nt, Homo sapiens
  misc_RNA (1)...(19): siRNA sense strand
gguuaucagaugcacuuua

SEQ ID NO: 1305805 - RNA, 19 nt, Homo sapiens
  misc_RNA (1)...(19): siRNA sense strand
ugaggagccaccaacauuu

SEQ ID NO: 1305806 - RNA, 19 nt, Homo sapiens
  misc_RNA (1)...(19): siRNA sense strand
ggaaggaauacuugacagu

SEQ ID NO: 1305807 - RNA, 19 nt, Homo sapiens
  misc_RNA (1)...(19): siRNA sense strand
gaggaaggaauacuugaca

SEQ ID NO: 1305808 - RNA, 19 nt, Homo sapiens
  misc_RNA (1)...(19): siRNA sense strand
ccaguuccaaagugucuua

SEQ ID NO: 1305809 - RNA, 19 nt, Homo sapiens
  misc_RNA (1)...(19): siRNA sense strand
ugaguaucuugaugcagua

SEQ ID NO: 1305810 - RNA, 19 nt, Homo sapiens
  misc_RNA (1)...(19): siRNA sense strand
caccuuuagugaaguagaa

SEQ ID NO: 1305811 - RNA, 19 nt, Homo sapiens
  misc_RNA (1)...(19): siRNA sense strand
acagauaucaggauuugga

SEQ ID NO: 1305812 - RNA, 19 nt, Homo sapiens
  misc_RNA (1)...(19): siRNA sense strand
ucauugcugugauuguuau

SEQ ID NO: 1305813 - RNA, 19 nt, Homo sapiens
  misc_RNA (1)...(19): siRNA sense strand
ucagaugcacuuuauuugu

SEQ ID NO: 1305814 - RNA, 19 nt, Homo sapiens
  misc_RNA (1)...(19): siRNA sense strand
gugcugcuccagaguguaa

SEQ ID NO: 1305815 - RNA, 19 nt, Homo sapiens
  misc_RNA (1)...(19): siRNA sense strand
ggaaaacacaccuuuagug

SEQ ID NO: 1305816 - RNA, 19 nt, Homo sapiens
  misc_RNA (1)...(19): siRNA sense strand
aaggaucaguagcaauuug

SEQ ID NO: 1305817 - RNA, 19 nt, Homo sapiens
  misc_RNA (1)...(19): siRNA sense strand
uauauacgggauccuuuaa

SEQ ID NO: 1305818 - RNA, 19 nt, Homo sapiens
  misc_RNA (1)...(19): siRNA sense strand
ugaaguagaaguauuugag

SEQ ID NO: 1305819 - RNA, 19 nt, Homo sapiens
  misc_RNA (1)...(19): siRNA sense strand
cuugacaguuuggauguuu

SEQ ID NO: 1305820 - RNA, 19 nt, Homo sapiens
  misc_RNA (1)...(19): siRNA sense strand
cauauauacgggauccuuu

SEQ ID NO: 1305821 - RNA, 19 nt, Homo sapiens
  misc_RNA (1)...(19): siRNA sense strand
auauauacgggauccuuua

SEQ ID NO: 1305822 - RNA, 19 nt, Homo sapiens
  misc_RNA (1)...(19): siRNA sense strand
cuuaaaggaucaguagcaa

SEQ ID NO: 1305823 - RNA, 19 nt, Homo sapiens
  misc_RNA (1)...(19): siRNA sense strand
uaaaccugaggaaggaaua

SEQ ID NO: 1305824 - RNA, 19 nt, Homo sapiens
  misc_RNA (1)...(19): siRNA sense strand
agaugacgccuguuauaga

SEQ ID NO: 1305825 - RNA, 19 nt, Homo sapiens
  misc_RNA (1)...(19): siRNA sense strand
ugugauuguuauugccaua

SEQ ID NO: 1305826 - RNA, 19 nt, Homo sapiens
  misc_RNA (1)...(19): siRNA sense strand
gagagcacgauuuauugug

SEQ ID NO: 1305827 - RNA, 19 nt, Homo sapiens
  misc_RNA (1)...(19): siRNA sense strand
gaaguauuugaguaucuug

SEQ ID NO: 1305828 - RNA, 19 nt, Homo sapiens
  misc_RNA (1)...(19): siRNA sense strand
ggcuaccugucucagauga

SEQ ID NO: 1305829 - RNA, 19 nt, Homo sapiens
  misc_RNA (1)...(19): siRNA sense strand
gauaucaggauuuggaaaa

SEQ ID NO: 1305830 - RNA, 19 nt, Homo sapiens
  misc_RNA (1)...(19): siRNA sense strand
ccucuugccacccauacua

SEQ ID NO: 1305831 - RNA, 19 nt, Homo sapiens
  misc_RNA (1)...(19): siRNA sense strand
ccaugguguugcugcugua

SEQ ID NO: 1305832 - RNA, 19 nt, Homo sapiens
  misc_RNA (1)...(19): siRNA sense strand
cagaugacgccuguuauag

SEQ ID NO: 1305833 - RNA, 19 nt, Homo sapiens
  misc_RNA (1)...(19): siRNA sense strand
uuggugaacgaguagauua

SEQ ID NO: 1305834 - RNA, 19 nt, Homo sapiens
  misc_RNA (1)...(19): siRNA sense strand
gucauugcugugauuguua

SEQ ID NO: 1305835 - RNA, 19 nt, Homo sapiens
  misc_RNA (1)...(19): siRNA sense strand
ggagccaccaacauuugaa

SEQ ID NO: 1305836 - RNA, 19 nt, Homo sapiens
  misc_RNA (1)...(19): siRNA sense strand
gcgcuuuccuggguugcuu

SEQ ID NO: 1305837 - RNA, 19 nt, Homo sapiens
  misc_RNA (1)...(19): siRNA sense strand
uacuacaaagcaacaguua

SEQ ID NO: 1305838 - RNA, 19 nt, Homo sapiens
  misc_RNA (1)...(19): siRNA sense strand
cuugaugcaguaacuuaua

SEQ ID NO: 1305839 - RNA, 19 nt, Homo sapiens
  misc_RNA (1)...(19): siRNA sense strand
aaacauguccauauauacg

SEQ ID NO: 1305840 - RNA, 19 nt, Homo sapiens
  misc_RNA (1)...(19): siRNA sense strand
guguaaaguggucaaaugu

SEQ ID NO: 1305841 - RNA, 19 nt, Homo sapiens
  misc_RNA (1)...(19): siRNA sense strand
cuuacgaguuugguuauca

SEQ ID NO: 1305842 - RNA, 19 nt, Homo sapiens
  misc_RNA (1)...(19): siRNA sense strand
uacgggauccuuuaaaugg

SEQ ID NO: 1305843 - RNA, 19 nt, Homo sapiens
  misc_RNA (1)...(19): siRNA sense strand
aaccaaaacccuacuauga

SEQ ID NO: 1305844 - RNA, 19 nt, Homo sapiens
  misc_RNA (1)...(19): siRNA sense strand
cccaauaugugaaaagguu

SEQ ID NO: 1305845 - RNA, 19 nt, Homo sapiens
  misc_RNA (1)...(19): siRNA sense strand
cgauggcagcgacacaauu

SEQ ID NO: 1305846 - RNA, 19 nt, Homo sapiens
  misc_RNA (1)...(19): siRNA sense strand
gauccauuuucacuuauug

SEQ ID NO: 1305847 - RNA, 19 nt, Homo sapiens
  misc_RNA (1)...(19): siRNA sense strand
uugaugcaguaacuuauag

SEQ ID NO: 1305848 - RNA, 19 nt, Homo sapiens
  misc_RNA (1)...(19): siRNA sense strand
guaucuugaugcaguaacu

SEQ ID NO: 1305849 - RNA, 19 nt, Homo sapiens
  misc_RNA (1)...(19): siRNA sense strand
caacauuugaagcuaugga

SEQ ID NO: 1305850 - RNA, 19 nt, Homo sapiens
  misc_RNA (1)...(19): siRNA sense strand
gagauuggugaacgaguag

SEQ ID NO: 1305851 - RNA, 19 nt, Homo sapiens
  misc_RNA (1)...(19): siRNA sense strand
ggagagagcacgauuuauu

SEQ ID NO: 1305852 - RNA, 19 nt, Homo sapiens
  misc_RNA (1)...(19): siRNA sense strand
agagaaacauguccauaua

SEQ ID NO: 1305853 - RNA, 19 nt, Homo sapiens
  misc_RNA (1)...(19): siRNA sense strand
cagaugcacuuuauuugua

SEQ ID NO: 1305854 - RNA, 19 nt, Homo sapiens
  misc_RNA (1)...(19): siRNA sense strand
ggacuuacgaguuugguua

SEQ ID NO: 1305855 - RNA, 19 nt, Homo sapiens
  misc_RNA (1)...(19): siRNA sense strand
aaacagauaucaggauuug

SEQ ID NO: 1305856 - RNA, 19 nt, Homo sapiens
  misc_RNA (1)...(19): siRNA sense strand
cuauggagcucauugguaa

SEQ ID NO: 1305857 - RNA, 19 nt, Homo sapiens
  misc_RNA (1)...(19): siRNA sense strand
aaacacaccuuuagugaag

SEQ ID NO: 1305858 - RNA, 19 nt, Homo sapiens
  misc_RNA (1)...(19): siRNA sense strand
gaacuuaaaggaucaguag

SEQ ID NO: 1305859 - RNA, 19 nt, Homo sapiens
  misc_RNA (1)...(19): siRNA sense strand
gaaaacagauaucaggauu

SEQ ID NO: 1305860 - RNA, 19 nt, Homo sapiens
  misc_RNA (1)...(19): siRNA sense strand
uaaaggaucaguagcaauu

SEQ ID NO: 1305861 - RNA, 19 nt, Homo sapiens
  misc_RNA (1)...(19): siRNA sense strand
aaaugggacuuacgaguuu

SEQ ID NO: 1305862 - RNA, 19 nt, Homo sapiens
  misc_RNA (1)...(19): siRNA sense strand
guuaucagaugcacuuuau

SEQ ID NO: 1305863 - RNA, 19 nt, Homo sapiens
  misc_RNA (1)...(19): siRNA sense strand
gagcugaauaugccacuua

SEQ ID NO: 1305864 - RNA, 19 nt, Homo sapiens
  misc_RNA (1)...(19): siRNA sense strand
ugagauuggugaacgagua

SEQ ID NO: 1305865 - RNA, 19 nt, Homo sapiens
  misc_RNA (1)...(19): siRNA sense strand
gugaacgaguagauuauaa

SEQ ID NO: 1305866 - RNA, 19 nt, Homo sapiens
  misc_RNA (1)...(19): siRNA sense strand
gagagagcacgauuuauug

SEQ ID NO: 1305867 - RNA, 19 nt, Homo sapiens
  misc_RNA (1)...(19): siRNA sense strand
caaaugggacuuacgaguu

SEQ ID NO: 1305868 - RNA, 19 nt, Homo sapiens
  misc_RNA (1)...(19): siRNA sense strand
ggucauugcugugauuguu

SEQ ID NO: 1305869 - RNA, 19 nt, Homo sapiens
  misc_RNA (1)...(19): siRNA sense strand
ccagauccauuuucacuua

SEQ ID NO: 1305870 - RNA, 19 nt, Homo sapiens
  misc_RNA (1)...(19): siRNA sense strand
gaaggaauacuugacaguu

SEQ ID NO: 1305871 - RNA, 19 nt, Homo sapiens
  misc_RNA (1)...(19): siRNA sense strand
aaggaauacuugacaguuu

SEQ ID NO: 1305872 - RNA, 19 nt, Homo sapiens
  misc_RNA (1)...(19): siRNA sense strand
ucagaugacgccuguuaua

SEQ ID NO: 1305873 - RNA, 19 nt, Homo sapiens
  misc_RNA (1)...(19): siRNA sense strand
gaaaacacaccuuuaguga

SEQ ID NO: 1305874 - RNA, 19 nt, Homo sapiens
  misc_RNA (1)...(19): siRNA sense strand
gaugacgccuguuauagag

SEQ ID NO: 1305875 - RNA, 19 nt, Homo sapiens
  misc_RNA (1)...(19): siRNA sense strand
gagaaacauguccauauau

SEQ ID NO: 1305876 - RNA, 19 nt, Homo sapiens
  misc_RNA (1)...(19): siRNA sense strand
ccacuuaccagacuaaauc

SEQ ID NO: 1305877 - RNA, 19 nt, Homo sapiens
  misc_RNA (1)...(19): siRNA sense strand
acgaguagauuauaagugu

SEQ ID NO: 1305878 - RNA, 19 nt, Homo sapiens
  misc_RNA (1)...(19): siRNA sense strand
cuacaaagcaacaguuaug

SEQ ID NO: 1305879 - RNA, 19 nt, Homo sapiens
  misc_RNA (1)...(19): siRNA sense strand
ccaccaacauuugaagcua

SEQ ID NO: 1305880 - RNA, 19 nt, Homo sapiens
  misc_RNA (1)...(19): siRNA sense strand
uauacgggauccuuuaaau

SEQ ID NO: 1305881 - RNA, 19 nt, Homo sapiens
  misc_RNA (1)...(19): siRNA sense strand
cgaguuugguuaucagaug

SEQ ID NO: 1305882 - RNA, 19 nt, Homo sapiens
  misc_RNA (1)...(19): siRNA sense strand
gaacgaguagauuauaagu

SEQ ID NO: 1305883 - RNA, 19 nt, Homo sapiens
  misc_RNA (1)...(19): siRNA sense strand
gugaggagccaccaacauu

SEQ ID NO: 1305884 - RNA, 19 nt, Homo sapiens
  misc_RNA (1)...(19): siRNA sense strand
gauggcagcgacacaauug

SEQ ID NO: 1305885 - RNA, 19 nt, Homo sapiens
  misc_RNA (1)...(19): siRNA sense strand
ucucagaugacgccuguua

SEQ ID NO: 1305886 - RNA, 19 nt, Homo sapiens
  misc_RNA (1)...(19): siRNA sense strand
gaggagccaccaacauuug

SEQ ID NO: 1305887 - RNA, 19 nt, Homo sapiens
  misc_RNA (1)...(19): siRNA sense strand
gcuauggagcucauuggua

SEQ ID NO: 1305888 - RNA, 19 nt, Homo sapiens
  misc_RNA (1)...(19): siRNA sense strand
acacaccuuuagugaagua

SEQ ID NO: 1305889 - RNA, 19 nt, Homo sapiens
  misc_RNA (1)...(19): siRNA sense strand
uagagaaacauguccauau

SEQ ID NO: 1305890 - RNA, 19 nt, Homo sapiens
  misc_RNA (1)...(19): siRNA sense strand
guuccaaagugucuuaaag

SEQ ID NO: 1305891 - RNA, 19 nt, Homo sapiens
  misc_RNA (1)...(19): siRNA sense strand
ggugaacgaguagauuaua

SEQ ID NO: 1305892 - RNA, 19 nt, Homo sapiens
  misc_RNA (1)...(19): siRNA sense strand
gaaguagaaguauuugagu

SEQ ID NO: 1305893 - RNA, 19 nt, Homo sapiens
  misc_RNA (1)...(19): siRNA sense strand
gaaacauguccauauauac

SEQ ID NO: 1305894 - RNA, 19 nt, Homo sapiens
  misc_RNA (1)...(19): siRNA sense strand
ugacgccuguuauagagaa

SEQ ID NO: 1305895 - RNA, 19 nt, Homo sapiens
  misc_RNA (1)...(19): siRNA sense strand
cgaguagauuauaagugua

SEQ ID NO: 1305896 - RNA, 19 nt, Homo sapiens
  misc_RNA (1)...(19): siRNA sense strand
gcacuuuauuuguaaugag

SEQ ID NO: 1305897 - RNA, 19 nt, Homo sapiens
  misc_RNA (1)...(19): siRNA sense strand
guagaaguauuugaguauc

SEQ ID NO: 1305898 - RNA, 19 nt, Homo sapiens
  misc_RNA (1)...(19): siRNA sense strand
guauuugaguaucuugaug

SEQ ID NO: 1305899 - RNA, 19 nt, Homo sapiens
  misc_RNA (1)...(19): siRNA sense strand
aggaauacuugacaguuug

SEQ ID NO: 1305900 - RNA, 19 nt, Homo sapiens
  misc_RNA (1)...(19): siRNA sense strand
ccaaaacccuacuaugaga

SEQ ID NO: 1305901 - RNA, 19 nt, Homo sapiens
  misc_RNA (1)...(19): siRNA sense strand
aguguaaaguggucaaaug

SEQ ID NO: 1305902 - RNA, 19 nt, Homo sapiens
  misc_RNA (1)...(19): siRNA sense strand
ccacccauacuauuuguga

SEQ ID NO: 1305903 - RNA, 19 nt, Homo sapiens
  misc_RNA (1)...(19): siRNA sense strand
uuggagagagcacgauuua

SEQ ID NO: 1305904 - RNA, 19 nt, Homo sapiens
  misc_RNA (1)...(19): siRNA sense strand
gguuaucagaugcacuuua

SEQ ID NO: 1305905 - RNA, 19 nt, Homo sapiens
  misc_RNA (1)...(19): siRNA sense strand
caccaacauuugaagcuau

SEQ ID NO: 1305906 - RNA, 19 nt, Homo sapiens
  misc_RNA (1)...(19): siRNA sense strand
ugaggagccaccaacauuu

SEQ ID NO: 1305907 - RNA, 19 nt, Homo sapiens
  misc_RNA (1)...(19): siRNA sense strand
ggaaggaauacuugacagu

SEQ ID NO: 1305908 - RNA, 19 nt, Homo sapiens
  misc_RNA (1)...(19): siRNA sense strand
gaggaaggaauacuugaca

SEQ ID NO: 1305909 - RNA, 19 nt, Homo sapiens
  misc_RNA (1)...(19): siRNA sense strand
ccaguuccaaagugucuua

SEQ ID NO: 1305910 - RNA, 19 nt, Homo sapiens
  misc_RNA (1)...(19): siRNA sense strand
ugaguaucuugaugcagua

SEQ ID NO: 1305911 - RNA, 19 nt, Homo sapiens
  misc_RNA (1)...(19): siRNA sense strand
caccuuuagugaaguagaa

SEQ ID NO: 1305912 - RNA, 19 nt, Homo sapiens
  misc_RNA (1)...(19): siRNA sense strand
acagauaucaggauuugga

SEQ ID NO: 1305913 - RNA, 19 nt, Homo sapiens
  misc_RNA (1)...(19): siRNA sense strand
ucauugcugugauuguuau

SEQ ID NO: 1305914 - RNA, 19 nt, Homo sapiens
  misc_RNA (1)...(19): siRNA sense strand
ucagaugcacuuuauuugu

SEQ ID NO: 1305915 - RNA, 19 nt, Homo sapiens
  misc_RNA (1)...(19): siRNA sense strand
gugcugcuccagaguguaa

SEQ ID NO: 1305916 - RNA, 19 nt, Homo sapiens
  misc_RNA (1)...(19): siRNA sense strand
ggaaaacacaccuuuagug

SEQ ID NO: 1305917 - RNA, 19 nt, Homo sapiens
  misc_RNA (1)...(19): siRNA sense strand
aaggaucaguagcaauuug

SEQ ID NO: 1305918 - RNA, 19 nt, Homo sapiens
  misc_RNA (1)...(19): siRNA sense strand
uauauacgggauccuuuaa

SEQ ID NO: 1305919 - RNA, 19 nt, Homo sapiens
  misc_RNA (1)...(19): siRNA sense strand
ugaaguagaaguauuugag

SEQ ID NO: 1305920 - RNA, 19 nt, Homo sapiens
  misc_RNA (1)...(19): siRNA sense strand
cuugacaguuuggauguuu

SEQ ID NO: 1305921 - RNA, 19 nt, Homo sapiens
  misc_RNA (1)...(19): siRNA sense strand
cauauauacgggauccuuu

SEQ ID NO: 1305922 - RNA, 19 nt, Homo sapiens
  misc_RNA (1)...(19): siRNA sense strand
auauauacgggauccuuua

SEQ ID NO: 1305923 - RNA, 19 nt, Homo sapiens
  misc_RNA (1)...(19): siRNA sense strand
cuuaaaggaucaguagcaa

SEQ ID NO: 1305924 - RNA, 19 nt, Homo sapiens
  misc_RNA (1)...(19): siRNA sense strand
uaaaccugaggaaggaaua

SEQ ID NO: 1305925 - RNA, 19 nt, Homo sapiens
  misc_RNA (1)...(19): siRNA sense strand
agaugacgccuguuauaga

SEQ ID NO: 1305926 - RNA, 19 nt, Homo sapiens
  misc_RNA (1)...(19): siRNA sense strand
ugugauuguuauugccaua

SEQ ID NO: 1305927 - RNA, 19 nt, Homo sapiens
  misc_RNA (1)...(19): siRNA sense strand
gagagcacgauuuauugug

SEQ ID NO: 1305928 - RNA, 19 nt, Homo sapiens
  misc_RNA (1)...(19): siRNA sense strand
gaaguauuugaguaucuug

SEQ ID NO: 1305929 - RNA, 19 nt, Homo sapiens
  misc_RNA (1)...(19): siRNA sense strand
ggcuaccugucucagauga

SEQ ID NO: 1305930 - RNA, 19 nt, Homo sapiens
  misc_RNA (1)...(19): siRNA sense strand
gauaucaggauuuggaaaa

SEQ ID NO: 1305931 - RNA, 19 nt, Homo sapiens
  misc_RNA (1)...(19): siRNA sense strand
ccucuugccacccauacua

SEQ ID NO: 1305932 - RNA, 19 nt, Homo sapiens
  misc_RNA (1)...(19): siRNA sense strand
ccaugguguugcugcugua

SEQ ID NO: 1305933 - RNA, 19 nt, Homo sapiens
  misc_RNA (1)...(19): siRNA sense strand
cagaugacgccuguuauag

SEQ ID NO: 1305934 - RNA, 19 nt, Homo sapiens
  misc_RNA (1)...(19): siRNA sense strand
cagaugguggagcugaaua

SEQ ID NO: 1305935 - RNA, 19 nt, Homo sapiens
  misc_RNA (1)...(19): siRNA sense strand
gucauugcugugauuguua

SEQ ID NO: 1305936 - RNA, 19 nt, Homo sapiens
  misc_RNA (1)...(19): siRNA sense strand
ggagccaccaacauuugaa

SEQ ID NO: 1305937 - RNA, 19 nt, Homo sapiens
  misc_RNA (1)...(19): siRNA sense strand
uuggugaacgaguagauua

SEQ ID NO: 1305938 - RNA, 19 nt, Homo sapiens
  misc_RNA (1)...(19): siRNA sense strand
gcgcuuuccuggguugcuu

SEQ ID NO: 1305939 - RNA, 19 nt, Homo sapiens
  misc_RNA (1)...(19): siRNA sense strand
uacuacaaagcaacaguua

SEQ ID NO: 1305940 - RNA, 19 nt, Homo sapiens
  misc_RNA (1)...(19): siRNA sense strand
cuugaugcaguaacuuaua

SEQ ID NO: 1305941 - RNA, 19 nt, Homo sapiens
  misc_RNA (1)...(19): siRNA sense strand
aaacauguccauauauacg

SEQ ID NO: 1305942 - RNA, 19 nt, Homo sapiens
  misc_RNA (1)...(19): siRNA sense strand
guguaaaguggucaaaugu

SEQ ID NO: 1305943 - RNA, 19 nt, Homo sapiens
  misc_RNA (1)...(19): siRNA sense strand
cuuacgaguuugguuauca

SEQ ID NO: 1305944 - RNA, 19 nt, Homo sapiens
  misc_RNA (1)...(19): siRNA sense strand
uacgggauccuuuaaaugg

SEQ ID NO: 1305945 - RNA, 19 nt, Homo sapiens
  misc_RNA (1)...(19): siRNA sense strand
gcagaugguggagcugaau

SEQ ID NO: 1305946 - RNA, 19 nt, Homo sapiens
  misc_RNA (1)...(19): siRNA sense strand
aaccaaaacccuacuauga

SEQ ID NO: 1305947 - RNA, 19 nt, Homo sapiens
  misc_RNA (1)...(19): siRNA sense strand
uugaugcaguaacuuauag

SEQ ID NO: 1305948 - RNA, 19 nt, Homo sapiens
  misc_RNA (1)...(19): siRNA sense strand
ggagcugaauaugccacuu

SEQ ID NO: 1305949 - RNA, 19 nt, Homo sapiens
  misc_RNA (1)...(19): siRNA sense strand
cgauggcagcgacacaauu

SEQ ID NO: 1305950 - RNA, 19 nt, Homo sapiens
  misc_RNA (1)...(19): siRNA sense strand
gauccauuuucacuuauug

SEQ ID NO: 1305951 - RNA, 19 nt, Homo sapiens
  misc_RNA (1)...(19): siRNA sense strand
ggagagagcacgauuuauu

SEQ ID NO: 1305952 - RNA, 19 nt, Homo sapiens
  misc_RNA (1)...(19): siRNA sense strand
agagaaacauguccauaua

SEQ ID NO: 1305953 - RNA, 19 nt, Homo sapiens
  misc_RNA (1)...(19): siRNA sense strand
cagaugcacuuuauuugua

SEQ ID NO: 1305954 - RNA, 19 nt, Homo sapiens
  misc_RNA (1)...(19): siRNA sense strand
ggacuuacgaguuugguua

SEQ ID NO: 1305955 - RNA, 19 nt, Homo sapiens
  misc_RNA (1)...(19): siRNA sense strand
aaacagauaucaggauuug

SEQ ID NO: 1305956 - RNA, 19 nt, Homo sapiens
  misc_RNA (1)...(19): siRNA sense strand
cuauggagcucauugguaa

SEQ ID NO: 1305957 - RNA, 19 nt, Homo sapiens
  misc_RNA (1)...(19): siRNA sense strand
aaacacaccuuuagugaag

SEQ ID NO: 1305958 - RNA, 19 nt, Homo sapiens
  misc_RNA (1)...(19): siRNA sense strand
gaacuuaaaggaucaguag

SEQ ID NO: 1305959 - RNA, 19 nt, Homo sapiens
  misc_RNA (1)...(19): siRNA sense strand
gaaaacagauaucaggauu

SEQ ID NO: 1305960 - RNA, 19 nt, Homo sapiens
  misc_RNA (1)...(19): siRNA sense strand
uaaaggaucaguagcaauu

SEQ ID NO: 1305961 - RNA, 19 nt, Homo sapiens
  misc_RNA (1)...(19): siRNA sense strand
aaaugggacuuacgaguuu

SEQ ID NO: 1305962 - RNA, 19 nt, Homo sapiens
  misc_RNA (1)...(19): siRNA sense strand
guuaucagaugcacuuuau

SEQ ID NO: 1305963 - RNA, 19 nt, Homo sapiens
  misc_RNA (1)...(19): siRNA sense strand
ugagauuggugaacgagua

SEQ ID NO: 1305964 - RNA, 19 nt, Homo sapiens
  misc_RNA (1)...(19): siRNA sense strand
gugaacgaguagauuauaa

SEQ ID NO: 1305965 - RNA, 19 nt, Homo sapiens
  misc_RNA (1)...(19): siRNA sense strand
gagagagcacgauuuauug

SEQ ID NO: 1305966 - RNA, 19 nt, Homo sapiens
  misc_RNA (1)...(19): siRNA sense strand
caaaugggacuuacgaguu

SEQ ID NO: 1305967 - RNA, 19 nt, Homo sapiens
  misc_RNA (1)...(19): siRNA sense strand
ggucauugcugugauuguu

SEQ ID NO: 1305968 - RNA, 19 nt, Homo sapiens
  misc_RNA (1)...(19): siRNA sense strand
ccagauccauuuucacuua

SEQ ID NO: 1305969 - RNA, 19 nt, Homo sapiens
  misc_RNA (1)...(19): siRNA sense strand
gaaggaauacuugacaguu

SEQ ID NO: 1305970 - RNA, 19 nt, Homo sapiens
  misc_RNA (1)...(19): siRNA sense strand
aaggaauacuugacaguuu

SEQ ID NO: 1305971 - RNA, 19 nt, Homo sapiens
  misc_RNA (1)...(19): siRNA sense strand
ucagaugacgccuguuaua

SEQ ID NO: 1305972 - RNA, 19 nt, Homo sapiens
  misc_RNA (1)...(19): siRNA sense strand
gaaaacacaccuuuaguga

SEQ ID NO: 1305973 - RNA, 19 nt, Homo sapiens
  misc_RNA (1)...(19): siRNA sense strand
gaugacgccuguuauagag

SEQ ID NO: 1305974 - RNA, 19 nt, Homo sapiens
  misc_RNA (1)...(19): siRNA sense strand
gagaaacauguccauauau

SEQ ID NO: 1305975 - RNA, 19 nt, Homo sapiens
  misc_RNA (1)...(19): siRNA sense strand
acgaguagauuauaagugu

SEQ ID NO: 1305976 - RNA, 19 nt, Homo sapiens
  misc_RNA (1)...(19): siRNA sense strand
cuacaaagcaacaguuaug

SEQ ID NO: 1305977 - RNA, 19 nt, Homo sapiens
  misc_RNA (1)...(19): siRNA sense strand
ccaccaacauuugaagcua

SEQ ID NO: 1305978 - RNA, 19 nt, Homo sapiens
  misc_RNA (1)...(19): siRNA sense strand
uauacgggauccuuuaaau

SEQ ID NO: 1305979 - RNA, 19 nt, Homo sapiens
  misc_RNA (1)...(19): siRNA sense strand
cgaguuugguuaucagaug

SEQ ID NO: 1305980 - RNA, 19 nt, Homo sapiens
  misc_RNA (1)...(19): siRNA sense strand
gaacgaguagauuauaagu

SEQ ID NO: 1305981 - RNA, 19 nt, Homo sapiens
  misc_RNA (1)...(19): siRNA sense strand
gugaggagccaccaacauu

SEQ ID NO: 1305982 - RNA, 19 nt, Homo sapiens
  misc_RNA (1)...(19): siRNA sense strand
gauggcagcgacacaauug

SEQ ID NO: 1305983 - RNA, 19 nt, Homo sapiens
  misc_RNA (1)...(19): siRNA sense strand
gcuauggagcucauuggua

SEQ ID NO: 1305984 - RNA, 19 nt, Homo sapiens
  misc_RNA (1)...(19): siRNA sense strand
gaggagccaccaacauuug

SEQ ID NO: 1305985 - RNA, 19 nt, Homo sapiens
  misc_RNA (1)...(19): siRNA sense strand
acacaccuuuagugaagua

SEQ ID NO: 1305986 - RNA, 19 nt, Homo sapiens
  misc_RNA (1)...(19): siRNA sense strand
ucucagaugacgccuguua

SEQ ID NO: 1305987 - RNA, 19 nt, Homo sapiens
  misc_RNA (1)...(19): siRNA sense strand
uagagaaacauguccauau

SEQ ID NO: 1305988 - RNA, 19 nt, Homo sapiens
  misc_RNA (1)...(19): siRNA sense strand
guuccaaagugucuuaaag

SEQ ID NO: 1305989 - RNA, 19 nt, Homo sapiens
  misc_RNA (1)...(19): siRNA sense strand
ggugaacgaguagauuaua

SEQ ID NO: 1305990 - RNA, 19 nt, Homo sapiens
  misc_RNA (1)...(19): siRNA sense strand
gaaguagaaguauuugagu

SEQ ID NO: 1305991 - RNA, 19 nt, Homo sapiens
  misc_RNA (1)...(19): siRNA sense strand
gaaacauguccauauauac

SEQ ID NO: 1305992 - RNA, 19 nt, Homo sapiens
  misc_RNA (1)...(19): siRNA sense strand
ugacgccuguuauagagaa

SEQ ID NO: 1305993 - RNA, 19 nt, Homo sapiens
  misc_RNA (1)...(19): siRNA sense strand
cgaguagauuauaagugua

SEQ ID NO: 1305994 - RNA, 19 nt, Homo sapiens
  misc_RNA (1)...(19): siRNA sense strand
gcacuuuauuuguaaugag

SEQ ID NO: 1305995 - RNA, 19 nt, Homo sapiens
  misc_RNA (1)...(19): siRNA sense strand
guagaaguauuugaguauc

SEQ ID NO: 1305996 - RNA, 19 nt, Homo sapiens
  misc_RNA (1)...(19): siRNA sense strand
guauuugaguaucuugaug

SEQ ID NO: 1305997 - RNA, 19 nt, Homo sapiens
  misc_RNA (1)...(19): siRNA sense strand
aggaauacuugacaguuug

SEQ ID NO: 1305998 - RNA, 19 nt, Homo sapiens
  misc_RNA (1)...(19): siRNA sense strand
ccaaaacccuacuaugaga

SEQ ID NO: 1305999 - RNA, 19 nt, Homo sapiens
  misc_RNA (1)...(19): siRNA sense strand
aguguaaaguggucaaaug

SEQ ID NO: 1306000 - RNA, 19 nt, Homo sapiens
  misc_RNA (1)...(19): siRNA sense strand
ccacccauacuauuuguga

SEQ ID NO: 1306001 - RNA, 19 nt, Homo sapiens
  misc_RNA (1)...(19): siRNA sense strand
caccaacauuugaagcuau

SEQ ID NO: 1306002 - RNA, 19 nt, Homo sapiens
  misc_RNA (1)...(19): siRNA sense strand
uuggagagagcacgauuua

SEQ ID NO: 1306003 - RNA, 19 nt, Homo sapiens
  misc_RNA (1)...(19): siRNA sense strand
gguuaucagaugcacuuua

SEQ ID NO: 1306004 - RNA, 19 nt, Homo sapiens
  misc_RNA (1)...(19): siRNA sense strand
ugaggagccaccaacauuu

SEQ ID NO: 1306005 - RNA, 19 nt, Homo sapiens
  misc_RNA (1)...(19): siRNA sense strand
ggaaggaauacuugacagu

SEQ ID NO: 1306006 - RNA, 19 nt, Homo sapiens
  misc_RNA (1)...(19): siRNA sense strand
gaggaaggaauacuugaca

SEQ ID NO: 1306007 - RNA, 19 nt, Homo sapiens
  misc_RNA (1)...(19): siRNA sense strand
ccaguuccaaagugucuua

SEQ ID NO: 1306008 - RNA, 19 nt, Homo sapiens
  misc_RNA (1)...(19): siRNA sense strand
ugaguaucuugaugcagua

SEQ ID NO: 1306009 - RNA, 19 nt, Homo sapiens
  misc_RNA (1)...(19): siRNA sense strand
caccuuuagugaaguagaa

SEQ ID NO: 1306010 - RNA, 19 nt, Homo sapiens
  misc_RNA (1)...(19): siRNA sense strand
acagauaucaggauuugga

SEQ ID NO: 1306011 - RNA, 19 nt, Homo sapiens
  misc_RNA (1)...(19): siRNA sense strand
ucauugcugugauuguuau

SEQ ID NO: 1306012 - RNA, 19 nt, Homo sapiens
  misc_RNA (1)...(19): siRNA sense strand
ucagaugcacuuuauuugu

SEQ ID NO: 1306013 - RNA, 19 nt, Homo sapiens
  misc_RNA (1)...(19): siRNA sense strand
gugcugcuccagaguguaa

SEQ ID NO: 1306014 - RNA, 19 nt, Homo sapiens
  misc_RNA (1)...(19): siRNA sense strand
ggaaaacacaccuuuagug

SEQ ID NO: 1306015 - RNA, 19 nt, Homo sapiens
  misc_RNA (1)...(19): siRNA sense strand
aaggaucaguagcaauuug

SEQ ID NO: 1306016 - RNA, 19 nt, Homo sapiens
  misc_RNA (1)...(19): siRNA sense strand
uauauacgggauccuuuaa

SEQ ID NO: 1306017 - RNA, 19 nt, Homo sapiens
  misc_RNA (1)...(19): siRNA sense strand
ugaaguagaaguauuugag

SEQ ID NO: 1306018 - RNA, 19 nt, Homo sapiens
  misc_RNA (1)...(19): siRNA sense strand
cuugacaguuuggauguuu

SEQ ID NO: 1306019 - RNA, 19 nt, Homo sapiens
  misc_RNA (1)...(19): siRNA sense strand
cauauauacgggauccuuu

SEQ ID NO: 1306020 - RNA, 19 nt, Homo sapiens
  misc_RNA (1)...(19): siRNA sense strand
auauauacgggauccuuua

SEQ ID NO: 1306021 - RNA, 19 nt, Homo sapiens
  misc_RNA (1)...(19): siRNA sense strand
cuuaaaggaucaguagcaa

SEQ ID NO: 1306022 - RNA, 19 nt, Homo sapiens
  misc_RNA (1)...(19): siRNA sense strand
uaaaccugaggaaggaaua

SEQ ID NO: 1306023 - RNA, 19 nt, Homo sapiens
  misc_RNA (1)...(19): siRNA sense strand
agaugacgccuguuauaga

SEQ ID NO: 1306024 - RNA, 19 nt, Homo sapiens
  misc_RNA (1)...(19): siRNA sense strand
ugugauuguuauugccaua

SEQ ID NO: 1306025 - RNA, 19 nt, Homo sapiens
  misc_RNA (1)...(19): siRNA sense strand
gagagcacgauuuauugug

SEQ ID NO: 1306026 - RNA, 19 nt, Homo sapiens
  misc_RNA (1)...(19): siRNA sense strand
gaaguauuugaguaucuug

SEQ ID NO: 1306027 - RNA, 19 nt, Homo sapiens
  misc_RNA (1)...(19): siRNA sense strand
ggcuaccugucucagauga

SEQ ID NO: 1306028 - RNA, 19 nt, Homo sapiens
  misc_RNA (1)...(19): siRNA sense strand
gauaucaggauuuggaaaa

SEQ ID NO: 1306029 - RNA, 19 nt, Homo sapiens
  misc_RNA (1)...(19): siRNA sense strand
ccucuugccacccauacua

SEQ ID NO: 1306030 - RNA, 19 nt, Homo sapiens
  misc_RNA (1)...(19): siRNA sense strand
ccaugguguugcugcugua

SEQ ID NO: 1306031 - RNA, 19 nt, Homo sapiens
  misc_RNA (1)...(19): siRNA sense strand
cagaugacgccuguuauag

SEQ ID NO: 1306032 - RNA, 19 nt, Homo sapiens
  misc_RNA (1)...(19): siRNA sense strand
uuggugaacgaguagauua

SEQ ID NO: 1306033 - RNA, 19 nt, Homo sapiens
  misc_RNA (1)...(19): siRNA sense strand
gucauugcugugauuguua

SEQ ID NO: 1306034 - RNA, 19 nt, Homo sapiens
  misc_RNA (1)...(19): siRNA sense strand
ggagccaccaacauuugaa

SEQ ID NO: 1306035 - RNA, 19 nt, Homo sapiens
  misc_RNA (1)...(19): siRNA sense strand
gcgcuuuccuggguugcuu

SEQ ID NO: 1306036 - RNA, 19 nt, Homo sapiens
  misc_RNA (1)...(19): siRNA sense strand
uacuacaaagcaacaguua

SEQ ID NO: 1306037 - RNA, 19 nt, Homo sapiens
  misc_RNA (1)...(19): siRNA sense strand
cuugaugcaguaacuuaua

SEQ ID NO: 1306038 - RNA, 19 nt, Homo sapiens
  misc_RNA (1)...(19): siRNA sense strand
aaacauguccauauauacg

SEQ ID NO: 1306039 - RNA, 19 nt, Homo sapiens
  misc_RNA (1)...(19): siRNA sense strand
guguaaaguggucaaaugu

SEQ ID NO: 1306040 - RNA, 19 nt, Homo sapiens
  misc_RNA (1)...(19): siRNA sense strand
cuuacgaguuugguuauca

SEQ ID NO: 1306041 - RNA, 19 nt, Homo sapiens
  misc_RNA (1)...(19): siRNA sense strand
uacgggauccuuuaaaugg

SEQ ID NO: 1306042 - RNA, 19 nt, Homo sapiens
  misc_RNA (1)...(19): siRNA sense strand
aaccaaaacccuacuauga

SEQ ID NO: 1306043 - RNA, 19 nt, Homo sapiens
  misc_RNA (1)...(19): siRNA sense strand
cccaauaugugaaaagguu

SEQ ID NO: 1306044 - RNA, 19 nt, Homo sapiens
  misc_RNA (1)...(19): siRNA sense strand
cgauggcagcgacacaauu

SEQ ID NO: 1306045 - RNA, 19 nt, Homo sapiens
  misc_RNA (1)...(19): siRNA sense strand
gauccauuuucacuuauug

SEQ ID NO: 1306046 - RNA, 19 nt, Homo sapiens
  misc_RNA (1)...(19): siRNA sense strand
uugaugcaguaacuuauag

SEQ ID NO: 1306047 - RNA, 19 nt, Homo sapiens
  misc_RNA (1)...(19): siRNA sense strand
guaucuugaugcaguaacu

SEQ ID NO: 1306048 - RNA, 19 nt, Homo sapiens
  misc_RNA (1)...(19): siRNA sense strand
caacauuugaagcuaugga

SEQ ID NO: 1306049 - RNA, 19 nt, Homo sapiens
  misc_RNA (1)...(19): siRNA sense strand
gagauuggugaacgaguag

SEQ ID NO: 1306050 - RNA, 19 nt, Homo sapiens
  misc_RNA (1)...(19): siRNA sense strand
ggagagagcacgauuuauu

SEQ ID NO: 1306051 - RNA, 19 nt, Homo sapiens
  misc_RNA (1)...(19): siRNA sense strand
agagaaacauguccauaua

SEQ ID NO: 1306052 - RNA, 19 nt, Homo sapiens
  misc_RNA (1)...(19): siRNA sense strand
cagaugcacuuuauuugua

SEQ ID NO: 1306053 - RNA, 19 nt, Homo sapiens
  misc_RNA (1)...(19): siRNA sense strand
ggacuuacgaguuugguua

SEQ ID NO: 1306054 - RNA, 19 nt, Homo sapiens
  misc_RNA (1)...(19): siRNA sense strand
aaacagauaucaggauuug

SEQ ID NO: 1306055 - RNA, 19 nt, Homo sapiens
  misc_RNA (1)...(19): siRNA sense strand
cuauggagcucauugguaa

SEQ ID NO: 1306056 - RNA, 19 nt, Homo sapiens
  misc_RNA (1)...(19): siRNA sense strand
aaacacaccuuuagugaag

SEQ ID NO: 1306057 - RNA, 19 nt, Homo sapiens
  misc_RNA (1)...(19): siRNA sense strand
gaacuuaaaggaucaguag

SEQ ID NO: 1306058 - RNA, 19 nt, Homo sapiens
  misc_RNA (1)...(19): siRNA sense strand
gaaaacagauaucaggauu

SEQ ID NO: 1306059 - RNA, 19 nt, Homo sapiens
  misc_RNA (1)...(19): siRNA sense strand
uaaaggaucaguagcaauu

SEQ ID NO: 1306060 - RNA, 19 nt, Homo sapiens
  misc_RNA (1)...(19): siRNA sense strand
aaaugggacuuacgaguuu

SEQ ID NO: 1306061 - RNA, 19 nt, Homo sapiens
  misc_RNA (1)...(19): siRNA sense strand
guuaucagaugcacuuuau

SEQ ID NO: 1306062 - RNA, 19 nt, Homo sapiens
  misc_RNA (1)...(19): siRNA sense strand
ugagauuggugaacgagua

SEQ ID NO: 1306063 - RNA, 19 nt, Homo sapiens
  misc_RNA (1)...(19): siRNA sense strand
gugaacgaguagauuauaa

SEQ ID NO: 1306064 - RNA, 19 nt, Homo sapiens
  misc_RNA (1)...(19): siRNA sense strand
gagagagcacgauuuauug

SEQ ID NO: 1306065 - RNA, 19 nt, Homo sapiens
  misc_RNA (1)...(19): siRNA sense strand
caaaugggacuuacgaguu

SEQ ID NO: 1306066 - RNA, 19 nt, Homo sapiens
  misc_RNA (1)...(19): siRNA sense strand
ggucauugcugugauuguu

SEQ ID NO: 1306067 - RNA, 19 nt, Homo sapiens
  misc_RNA (1)...(19): siRNA sense strand
ccagauccauuuucacuua

SEQ ID NO: 1306068 - RNA, 19 nt, Homo sapiens
  misc_RNA (1)...(19): siRNA sense strand
gaaggaauacuugacaguu

SEQ ID NO: 1306069 - RNA, 19 nt, Homo sapiens
  misc_RNA (1)...(19): siRNA sense strand
aaggaauacuugacaguuu

SEQ ID NO: 1306070 - RNA, 19 nt, Homo sapiens
  misc_RNA (1)...(19): siRNA sense strand
ucagaugacgccuguuaua

SEQ ID NO: 1306071 - RNA, 19 nt, Homo sapiens
  misc_RNA (1)...(19): siRNA sense strand
gaaaacacaccuuuaguga

SEQ ID NO: 1306072 - RNA, 19 nt, Homo sapiens
  misc_RNA (1)...(19): siRNA sense strand
gaugacgccuguuauagag

SEQ ID NO: 1306073 - RNA, 19 nt, Homo sapiens
  misc_RNA (1)...(19): siRNA sense strand
gagaaacauguccauauau

SEQ ID NO: 1306074 - RNA, 19 nt, Homo sapiens
  misc_RNA (1)...(19): siRNA sense strand
acgaguagauuauaagugu

SEQ ID NO: 1306075 - RNA, 19 nt, Homo sapiens
  misc_RNA (1)...(19): siRNA sense strand
cuacaaagcaacaguuaug

SEQ ID NO: 1306076 - RNA, 19 nt, Homo sapiens
  misc_RNA (1)...(19): siRNA sense strand
ccaccaacauuugaagcua

SEQ ID NO: 1306077 - RNA, 19 nt, Homo sapiens
  misc_RNA (1)...(19): siRNA sense strand
uauacgggauccuuuaaau

SEQ ID NO: 1306078 - RNA, 19 nt, Homo sapiens
  misc_RNA (1)...(19): siRNA sense strand
cgaguuugguuaucagaug

SEQ ID NO: 1306079 - RNA, 19 nt, Homo sapiens
  misc_RNA (1)...(19): siRNA sense strand
gaacgaguagauuauaagu

SEQ ID NO: 1306080 - RNA, 19 nt, Homo sapiens
  misc_RNA (1)...(19): siRNA sense strand
gugaggagccaccaacauu

SEQ ID NO: 1306081 - RNA, 19 nt, Homo sapiens
  misc_RNA (1)...(19): siRNA sense strand
gauggcagcgacacaauug

SEQ ID NO: 1306082 - RNA, 19 nt, Homo sapiens
  misc_RNA (1)...(19): siRNA sense strand
gcuauggagcucauuggua

SEQ ID NO: 1306083 - RNA, 19 nt, Homo sapiens
  misc_RNA (1)...(19): siRNA sense strand
gaggagccaccaacauuug

SEQ ID NO: 1306084 - RNA, 19 nt, Homo sapiens
  misc_RNA (1)...(19): siRNA sense strand
acacaccuuuagugaagua

SEQ ID NO: 1306085 - RNA, 19 nt, Homo sapiens
  misc_RNA (1)...(19): siRNA sense strand
ucucagaugacgccuguua

SEQ ID NO: 1306086 - RNA, 19 nt, Homo sapiens
  misc_RNA (1)...(19): siRNA sense strand
uagagaaacauguccauau

SEQ ID NO: 1306087 - RNA, 19 nt, Homo sapiens
  misc_RNA (1)...(19): siRNA sense strand
ggugaacgaguagauuaua

SEQ ID NO: 1306088 - RNA, 19 nt, Homo sapiens
  misc_RNA (1)...(19): siRNA sense strand
gaaguagaaguauuugagu

SEQ ID NO: 1306089 - RNA, 19 nt, Homo sapiens
  misc_RNA (1)...(19): siRNA sense strand
gaaacauguccauauauac

SEQ ID NO: 1306090 - RNA, 19 nt, Homo sapiens
  misc_RNA (1)...(19): siRNA sense strand
ugacgccuguuauagagaa

SEQ ID NO: 1306091 - RNA, 19 nt, Homo sapiens
  misc_RNA (1)...(19): siRNA sense strand
cgaguagauuauaagugua

SEQ ID NO: 1306092 - RNA, 19 nt, Homo sapiens
  misc_RNA (1)...(19): siRNA sense strand
gcacuuuauuuguaaugag

SEQ ID NO: 1306093 - RNA, 19 nt, Homo sapiens
  misc_RNA (1)...(19): siRNA sense strand
guagaaguauuugaguauc

SEQ ID NO: 1306094 - RNA, 19 nt, Homo sapiens
  misc_RNA (1)...(19): siRNA sense strand
guauuugaguaucuugaug

SEQ ID NO: 1306095 - RNA, 19 nt, Homo sapiens
  misc_RNA (1)...(19): siRNA sense strand
aggaauacuugacaguuug

SEQ ID NO: 1306096 - RNA, 19 nt, Homo sapiens
  misc_RNA (1)...(19): siRNA sense strand
aguguaaaguggucaaaug

SEQ ID NO: 1306097 - RNA, 19 nt, Homo sapiens
  misc_RNA (1)...(19): siRNA sense strand
ccaaaacccuacuaugaga

SEQ ID NO: 1306098 - RNA, 19 nt, Homo sapiens
  misc_RNA (1)...(19): siRNA sense strand
ccacccauacuauuuguga

SEQ ID NO: 1306099 - RNA, 19 nt, Homo sapiens
  misc_RNA (1)...(19): siRNA sense strand
caccaacauuugaagcuau

SEQ ID NO: 1306100 - RNA, 19 nt, Homo sapiens
  misc_RNA (1)...(19): siRNA sense strand
uuggagagagcacgauuua

SEQ ID NO: 1306101 - RNA, 19 nt, Homo sapiens
  misc_RNA (1)...(19): siRNA sense strand
gguuaucagaugcacuuua

SEQ ID NO: 1306102 - RNA, 19 nt, Homo sapiens
  misc_RNA (1)...(19): siRNA sense strand
ugaggagccaccaacauuu

SEQ ID NO: 1306103 - RNA, 19 nt, Homo sapiens
  misc_RNA (1)...(19): siRNA sense strand
ggaaggaauacuugacagu

SEQ ID NO: 1306104 - RNA, 19 nt, Homo sapiens
  misc_RNA (1)...(19): siRNA sense strand
gaggaaggaauacuugaca

SEQ ID NO: 1306105 - RNA, 19 nt, Homo sapiens
  misc_RNA (1)...(19): siRNA sense strand
ugaguaucuugaugcagua

SEQ ID NO: 1306106 - RNA, 19 nt, Homo sapiens
  misc_RNA (1)...(19): siRNA sense strand
caccuuuagugaaguagaa

SEQ ID NO: 1306107 - RNA, 19 nt, Homo sapiens
  misc_RNA (1)...(19): siRNA sense strand
acagauaucaggauuugga

SEQ ID NO: 1306108 - RNA, 19 nt, Homo sapiens
  misc_RNA (1)...(19): siRNA sense strand
ucauugcugugauuguuau

SEQ ID NO: 1306109 - RNA, 19 nt, Homo sapiens
  misc_RNA (1)...(19): siRNA sense strand
ucagaugcacuuuauuugu

SEQ ID NO: 1306110 - RNA, 19 nt, Homo sapiens
  misc_RNA (1)...(19): siRNA sense strand
gugcugcuccagaguguaa

SEQ ID NO: 1306111 - RNA, 19 nt, Homo sapiens
  misc_RNA (1)...(19): siRNA sense strand
ggaaaacacaccuuuagug

SEQ ID NO: 1306112 - RNA, 19 nt, Homo sapiens
  misc_RNA (1)...(19): siRNA sense strand
aaggaucaguagcaauuug

SEQ ID NO: 1306113 - RNA, 19 nt, Homo sapiens
  misc_RNA (1)...(19): siRNA sense strand
uauauacgggauccuuuaa

SEQ ID NO: 1306114 - RNA, 19 nt, Homo sapiens
  misc_RNA (1)...(19): siRNA sense strand
ugaaguagaaguauuugag

SEQ ID NO: 1306115 - RNA, 19 nt, Homo sapiens
  misc_RNA (1)...(19): siRNA sense strand
cuugacaguuuggauguuu

SEQ ID NO: 1306116 - RNA, 19 nt, Homo sapiens
  misc_RNA (1)...(19): siRNA sense strand
cauauauacgggauccuuu

SEQ ID NO: 1306117 - RNA, 19 nt, Homo sapiens
  misc_RNA (1)...(19): siRNA sense strand
auauauacgggauccuuua

SEQ ID NO: 1306118 - RNA, 19 nt, Homo sapiens
  misc_RNA (1)...(19): siRNA sense strand
cuuaaaggaucaguagcaa

SEQ ID NO: 1306119 - RNA, 19 nt, Homo sapiens
  misc_RNA (1)...(19): siRNA sense strand
uaaaccugaggaaggaaua

SEQ ID NO: 1306120 - RNA, 19 nt, Homo sapiens
  misc_RNA (1)...(19): siRNA sense strand
agaugacgccuguuauaga

SEQ ID NO: 1306121 - RNA, 19 nt, Homo sapiens
  misc_RNA (1)...(19): siRNA sense strand
ugugauuguuauugccaua

SEQ ID NO: 1306122 - RNA, 19 nt, Homo sapiens
  misc_RNA (1)...(19): siRNA sense strand
gagagcacgauuuauugug

SEQ ID NO: 1306123 - RNA, 19 nt, Homo sapiens
  misc_RNA (1)...(19): siRNA sense strand
gaaguauuugaguaucuug

SEQ ID NO: 1306124 - RNA, 19 nt, Homo sapiens
  misc_RNA (1)...(19): siRNA sense strand
ccucuugccacccauacua

SEQ ID NO: 1306125 - RNA, 19 nt, Homo sapiens
  misc_RNA (1)...(19): siRNA sense strand
gauaucaggauuuggaaaa

SEQ ID NO: 1306126 - RNA, 19 nt, Homo sapiens
  misc_RNA (1)...(19): siRNA sense strand
ggcuaccugucucagauga

SEQ ID NO: 1306127 - RNA, 19 nt, Homo sapiens
  misc_RNA (1)...(19): siRNA sense strand
ccaugguguugcugcugua

SEQ ID NO: 1306128 - RNA, 19 nt, Homo sapiens
  misc_RNA (1)...(19): siRNA sense strand
cagaugacgccuguuauag

SEQ ID NO: 1306129 - RNA, 19 nt, Homo sapiens
  misc_RNA (1)...(19): siRNA sense strand
gucauugcugugauuguua

SEQ ID NO: 1306130 - RNA, 19 nt, Homo sapiens
  misc_RNA (1)...(19): siRNA sense strand
uuggugaacgaguagauua

SEQ ID NO: 1306131 - RNA, 19 nt, Homo sapiens
  misc_RNA (1)...(19): siRNA sense strand
ggagccaccaacauuugaa

SEQ ID NO: 1306132 - RNA, 19 nt, Homo sapiens
  misc_RNA (1)...(19): siRNA sense strand
gcgcuuuccuggguugcuu

SEQ ID NO: 1306133 - RNA, 19 nt, Homo sapiens
  misc_RNA (1)...(19): siRNA sense strand
uacuacaaagcaacaguua

SEQ ID NO: 1306134 - RNA, 19 nt, Homo sapiens
  misc_RNA (1)...(19): siRNA sense strand
cuugaugcaguaacuuaua

SEQ ID NO: 1306135 - RNA, 19 nt, Homo sapiens
  misc_RNA (1)...(19): siRNA sense strand
aaacauguccauauauacg

SEQ ID NO: 1306136 - RNA, 19 nt, Homo sapiens
  misc_RNA (1)...(19): siRNA sense strand
guguaaaguggucaaaugu

SEQ ID NO: 1306137 - RNA, 19 nt, Homo sapiens
  misc_RNA (1)...(19): siRNA sense strand
cuuacgaguuugguuauca

SEQ ID NO: 1306138 - RNA, 19 nt, Homo sapiens
  misc_RNA (1)...(19): siRNA sense strand
uacgggauccuuuaaaugg

SEQ ID NO: 1306139 - RNA, 19 nt, Homo sapiens
  misc_RNA (1)...(19): siRNA sense strand
aaccaaaacccuacuauga

SEQ ID NO: 1306140 - RNA, 19 nt, Homo sapiens
  misc_RNA (1)...(19): siRNA sense strand
cccaauaugugaaaagguu

SEQ ID NO: 1306141 - RNA, 19 nt, Homo sapiens
  misc_RNA (1)...(19): siRNA sense strand
cgauggcagcgacacaauu

SEQ ID NO: 1306142 - RNA, 19 nt, Homo sapiens
  misc_RNA (1)...(19): siRNA sense strand
gauccauuuucacuuauug

SEQ ID NO: 1306143 - RNA, 19 nt, Homo sapiens
  misc_RNA (1)...(19): siRNA sense strand
uugaugcaguaacuuauag

SEQ ID NO: 1306144 - RNA, 19 nt, Homo sapiens
  misc_RNA (1)...(19): siRNA sense strand
guaucuugaugcaguaacu

SEQ ID NO: 1306145 - RNA, 19 nt, Homo sapiens
  misc_RNA (1)...(19): siRNA sense strand
caacauuugaagcuaugga

SEQ ID NO: 1306146 - RNA, 19 nt, Homo sapiens
  misc_RNA (1)...(19): siRNA sense strand
gagauuggugaacgaguag

SEQ ID NO: 1306147 - RNA, 19 nt, Homo sapiens
  misc_RNA (1)...(19): siRNA sense strand
ggagagagcacgauuuauu

SEQ ID NO: 1306148 - RNA, 19 nt, Homo sapiens
  misc_RNA (1)...(19): siRNA sense strand
agagaaacauguccauaua

SEQ ID NO: 1306149 - RNA, 19 nt, Homo sapiens
  misc_RNA (1)...(19): siRNA sense strand
cagaugcacuuuauuugua

SEQ ID NO: 1306150 - RNA, 19 nt, Homo sapiens
  misc_RNA (1)...(19): siRNA sense strand
ggacuuacgaguuugguua

SEQ ID NO: 1306151 - RNA, 19 nt, Homo sapiens
  misc_RNA (1)...(19): siRNA sense strand
aaacagauaucaggauuug

SEQ ID NO: 1306152 - RNA, 19 nt, Homo sapiens
  misc_RNA (1)...(19): siRNA sense strand
cuauggagcucauugguaa

SEQ ID NO: 1306153 - RNA, 19 nt, Homo sapiens
  misc_RNA (1)...(19): siRNA sense strand
aaacacaccuuuagugaag

SEQ ID NO: 1306154 - RNA, 19 nt, Homo sapiens
  misc_RNA (1)...(19): siRNA sense strand
gaacuuaaaggaucaguag

SEQ ID NO: 1306155 - RNA, 19 nt, Homo sapiens
  misc_RNA (1)...(19): siRNA sense strand
gaaaacagauaucaggauu

SEQ ID NO: 1306156 - RNA, 19 nt, Homo sapiens
  misc_RNA (1)...(19): siRNA sense strand
uaaaggaucaguagcaauu

SEQ ID NO: 1306157 - RNA, 19 nt, Homo sapiens
  misc_RNA (1)...(19): siRNA sense strand
aaaugggacuuacgaguuu

SEQ ID NO: 1306158 - RNA, 19 nt, Homo sapiens
  misc_RNA (1)...(19): siRNA sense strand
guuaucagaugcacuuuau

SEQ ID NO: 1306159 - RNA, 19 nt, Homo sapiens
  misc_RNA (1)...(19): siRNA sense strand
gagcugaauaugccacuua

SEQ ID NO: 1306160 - RNA, 19 nt, Homo sapiens
  misc_RNA (1)...(19): siRNA sense strand
ugagauuggugaacgagua

SEQ ID NO: 1306161 - RNA, 19 nt, Homo sapiens
  misc_RNA (1)...(19): siRNA sense strand
gugaacgaguagauuauaa

SEQ ID NO: 1306162 - RNA, 19 nt, Homo sapiens
  misc_RNA (1)...(19): siRNA sense strand
gagagagcacgauuuauug

SEQ ID NO: 1306163 - RNA, 19 nt, Homo sapiens
  misc_RNA (1)...(19): siRNA sense strand
caaaugggacuuacgaguu

SEQ ID NO: 1306164 - RNA, 19 nt, Homo sapiens
  misc_RNA (1)...(19): siRNA sense strand
ggucauugcugugauuguu

SEQ ID NO: 1306165 - RNA, 19 nt, Homo sapiens
  misc_RNA (1)...(19): siRNA sense strand
ccagauccauuuucacuua

SEQ ID NO: 1306166 - RNA, 19 nt, Homo sapiens
  misc_RNA (1)...(19): siRNA sense strand
gaaggaauacuugacaguu

SEQ ID NO: 1306167 - RNA, 19 nt, Homo sapiens
  misc_RNA (1)...(19): siRNA sense strand
aaggaauacuugacaguuu

SEQ ID NO: 1306168 - RNA, 19 nt, Homo sapiens
  misc_RNA (1)...(19): siRNA sense strand
ucagaugacgccuguuaua

SEQ ID NO: 1306169 - RNA, 19 nt, Homo sapiens
  misc_RNA (1)...(19): siRNA sense strand
gaaaacacaccuuuaguga

SEQ ID NO: 1306170 - RNA, 19 nt, Homo sapiens
  misc_RNA (1)...(19): siRNA sense strand
gaugacgccuguuauagag

SEQ ID NO: 1306171 - RNA, 19 nt, Homo sapiens
  misc_RNA (1)...(19): siRNA sense strand
gagaaacauguccauauau

SEQ ID NO: 1306172 - RNA, 19 nt, Homo sapiens
  misc_RNA (1)...(19): siRNA sense strand
ccacuuaccagacuaaauc

SEQ ID NO: 1306173 - RNA, 19 nt, Homo sapiens
  misc_RNA (1)...(19): siRNA sense strand
acgaguagauuauaagugu

SEQ ID NO: 1306174 - RNA, 19 nt, Homo sapiens
  misc_RNA (1)...(19): siRNA sense strand
cuacaaagcaacaguuaug

SEQ ID NO: 1306175 - RNA, 19 nt, Homo sapiens
  misc_RNA (1)...(19): siRNA sense strand
ccaccaacauuugaagcua

SEQ ID NO: 1306176 - RNA, 19 nt, Homo sapiens
  misc_RNA (1)...(19): siRNA sense strand
uauacgggauccuuuaaau

SEQ ID NO: 1306177 - RNA, 19 nt, Homo sapiens
  misc_RNA (1)...(19): siRNA sense strand
cgaguuugguuaucagaug

SEQ ID NO: 1306178 - RNA, 19 nt, Homo sapiens
  misc_RNA (1)...(19): siRNA sense strand
gaacgaguagauuauaagu

SEQ ID NO: 1306179 - RNA, 19 nt, Homo sapiens
  misc_RNA (1)...(19): siRNA sense strand
gugaggagccaccaacauu

SEQ ID NO: 1306180 - RNA, 19 nt, Homo sapiens
  misc_RNA (1)...(19): siRNA sense strand
gauggcagcgacacaauug

SEQ ID NO: 1306181 - RNA, 19 nt, Homo sapiens
  misc_RNA (1)...(19): siRNA sense strand
ucucagaugacgccuguua

SEQ ID NO: 1306182 - RNA, 19 nt, Homo sapiens
  misc_RNA (1)...(19): siRNA sense strand
gaggagccaccaacauuug

SEQ ID NO: 1306183 - RNA, 19 nt, Homo sapiens
  misc_RNA (1)...(19): siRNA sense strand
gcuauggagcucauuggua

SEQ ID NO: 1306184 - RNA, 19 nt, Homo sapiens
  misc_RNA (1)...(19): siRNA sense strand
acacaccuuuagugaagua

SEQ ID NO: 1306185 - RNA, 19 nt, Homo sapiens
  misc_RNA (1)...(19): siRNA sense strand
uagagaaacauguccauau

SEQ ID NO: 1306186 - RNA, 19 nt, Homo sapiens
  misc_RNA (1)...(19): siRNA sense strand
ggugaacgaguagauuaua

SEQ ID NO: 1306187 - RNA, 19 nt, Homo sapiens
  misc_RNA (1)...(19): siRNA sense strand
gaaguagaaguauuugagu

SEQ ID NO: 1306188 - RNA, 19 nt, Homo sapiens
  misc_RNA (1)...(19): siRNA sense strand
gaaacauguccauauauac

SEQ ID NO: 1306189 - RNA, 19 nt, Homo sapiens
  misc_RNA (1)...(19): siRNA sense strand
ugacgccuguuauagagaa

SEQ ID NO: 1306190 - RNA, 19 nt, Homo sapiens
  misc_RNA (1)...(19): siRNA sense strand
cgaguagauuauaagugua

SEQ ID NO: 1306191 - RNA, 19 nt, Homo sapiens
  misc_RNA (1)...(19): siRNA sense strand
gcacuuuauuuguaaugag

SEQ ID NO: 1306192 - RNA, 19 nt, Homo sapiens
  misc_RNA (1)...(19): siRNA sense strand
guagaaguauuugaguauc

SEQ ID NO: 1306193 - RNA, 19 nt, Homo sapiens
  misc_RNA (1)...(19): siRNA sense strand
guauuugaguaucuugaug

SEQ ID NO: 1306194 - RNA, 19 nt, Homo sapiens
  misc_RNA (1)...(19): siRNA sense strand
aggaauacuugacaguuug

SEQ ID NO: 1306195 - RNA, 19 nt, Homo sapiens
  misc_RNA (1)...(19): siRNA sense strand
ccaaaacccuacuaugaga

SEQ ID NO: 1306196 - RNA, 19 nt, Homo sapiens
  misc_RNA (1)...(19): siRNA sense strand
aguguaaaguggucaaaug

SEQ ID NO: 1306197 - RNA, 19 nt, Homo sapiens
  misc_RNA (1)...(19): siRNA sense strand
ccacccauacuauuuguga

SEQ ID NO: 1306198 - RNA, 19 nt, Homo sapiens
  misc_RNA (1)...(19): siRNA sense strand
uuggagagagcacgauuua

SEQ ID NO: 1306199 - RNA, 19 nt, Homo sapiens
  misc_RNA (1)...(19): siRNA sense strand
gguuaucagaugcacuuua

SEQ ID NO: 1306200 - RNA, 19 nt, Homo sapiens
  misc_RNA (1)...(19): siRNA sense strand
caccaacauuugaagcuau

SEQ ID NO: 1306201 - RNA, 19 nt, Homo sapiens
  misc_RNA (1)...(19): siRNA sense strand
ugaggagccaccaacauuu

SEQ ID NO: 1306202 - RNA, 19 nt, Homo sapiens
  misc_RNA (1)...(19): siRNA sense strand
ggaaggaauacuugacagu

SEQ ID NO: 1306203 - RNA, 19 nt, Homo sapiens
  misc_RNA (1)...(19): siRNA sense strand
gaggaaggaauacuugaca

SEQ ID NO: 1306204 - RNA, 19 nt, Homo sapiens
  misc_RNA (1)...(19): siRNA sense strand
ugaguaucuugaugcagua

SEQ ID NO: 1306205 - RNA, 19 nt, Homo sapiens
  misc_RNA (1)...(19): siRNA sense strand
caccuuuagugaaguagaa

SEQ ID NO: 1306206 - RNA, 19 nt, Homo sapiens
  misc_RNA (1)...(19): siRNA sense strand
acagauaucaggauuugga

SEQ ID NO: 1306207 - RNA, 19 nt, Homo sapiens
  misc_RNA (1)...(19): siRNA sense strand
ucauugcugugauuguuau

SEQ ID NO: 1306208 - RNA, 19 nt, Homo sapiens
  misc_RNA (1)...(19): siRNA sense strand
ucagaugcacuuuauuugu

SEQ ID NO: 1306209 - RNA, 19 nt, Homo sapiens
  misc_RNA (1)...(19): siRNA sense strand
gugcugcuccagaguguaa

SEQ ID NO: 1306210 - RNA, 19 nt, Homo sapiens
  misc_RNA (1)...(19): siRNA sense strand
ggaaaacacaccuuuagug

SEQ ID NO: 1306211 - RNA, 19 nt, Homo sapiens
  misc_RNA (1)...(19): siRNA sense strand
aaggaucaguagcaauuug

SEQ ID NO: 1306212 - RNA, 19 nt, Homo sapiens
  misc_RNA (1)...(19): siRNA sense strand
uauauacgggauccuuuaa

SEQ ID NO: 1306213 - RNA, 19 nt, Homo sapiens
  misc_RNA (1)...(19): siRNA sense strand
ugaaguagaaguauuugag

SEQ ID NO: 1306214 - RNA, 19 nt, Homo sapiens
  misc_RNA (1)...(19): siRNA sense strand
cuugacaguuuggauguuu

SEQ ID NO: 1306215 - RNA, 19 nt, Homo sapiens
  misc_RNA (1)...(19): siRNA sense strand
cauauauacgggauccuuu

SEQ ID NO: 1306216 - RNA, 19 nt, Homo sapiens
  misc_RNA (1)...(19): siRNA sense strand
auauauacgggauccuuua

SEQ ID NO: 1306217 - RNA, 19 nt, Homo sapiens
  misc_RNA (1)...(19): siRNA sense strand
cuuaaaggaucaguagcaa

SEQ ID NO: 1306218 - RNA, 19 nt, Homo sapiens
  misc_RNA (1)...(19): siRNA sense strand
uaaaccugaggaaggaaua

SEQ ID NO: 1306219 - RNA, 19 nt, Homo sapiens
  misc_RNA (1)...(19): siRNA sense strand
agaugacgccuguuauaga

SEQ ID NO: 1306220 - RNA, 19 nt, Homo sapiens
  misc_RNA (1)...(19): siRNA sense strand
ugugauuguuauugccaua

SEQ ID NO: 1306221 - RNA, 19 nt, Homo sapiens
  misc_RNA (1)...(19): siRNA sense strand
gagagcacgauuuauugug

SEQ ID NO: 1306222 - RNA, 19 nt, Homo sapiens
  misc_RNA (1)...(19): siRNA sense strand
gaaguauuugaguaucuug

SEQ ID NO: 1306223 - RNA, 19 nt, Homo sapiens
  misc_RNA (1)...(19): siRNA sense strand
ggcuaccugucucagauga

SEQ ID NO: 1306224 - RNA, 19 nt, Homo sapiens
  misc_RNA (1)...(19): siRNA sense strand
gauaucaggauuuggaaaa

SEQ ID NO: 1306225 - RNA, 19 nt, Homo sapiens
  misc_RNA (1)...(19): siRNA sense strand
ccucuugccacccauacua

SEQ ID NO: 1306226 - RNA, 19 nt, Homo sapiens
  misc_RNA (1)...(19): siRNA sense strand
ccaugguguugcugcugua

SEQ ID NO: 1306227 - RNA, 19 nt, Homo sapiens
  misc_RNA (1)...(19): siRNA sense strand
cagaugacgccuguuauag

SEQ ID NO: 1306228 - RNA, 19 nt, Homo sapiens
  misc_RNA (1)...(19): siRNA sense strand
cagaugguggagcugaaua

SEQ ID NO: 1306229 - RNA, 19 nt, Homo sapiens
  misc_RNA (1)...(19): siRNA sense strand
uuggugaacgaguagauua

SEQ ID NO: 1306230 - RNA, 19 nt, Homo sapiens
  misc_RNA (1)...(19): siRNA sense strand
gucauugcugugauuguua

SEQ ID NO: 1306231 - RNA, 19 nt, Homo sapiens
  misc_RNA (1)...(19): siRNA sense strand
ggagccaccaacauuugaa

SEQ ID NO: 1306232 - RNA, 19 nt, Homo sapiens
  misc_RNA (1)...(19): siRNA sense strand
gcgcuuuccuggguugcuu

SEQ ID NO: 1306233 - RNA, 19 nt, Homo sapiens
  misc_RNA (1)...(19): siRNA sense strand
uacuacaaagcaacaguua

SEQ ID NO: 1306234 - RNA, 19 nt, Homo sapiens
  misc_RNA (1)...(19): siRNA sense strand
cuugaugcaguaacuuaua

SEQ ID NO: 1306235 - RNA, 19 nt, Homo sapiens
  misc_RNA (1)...(19): siRNA sense strand
aaacauguccauauauacg

SEQ ID NO: 1306236 - RNA, 19 nt, Homo sapiens
  misc_RNA (1)...(19): siRNA sense strand
guguaaaguggucaaaugu

SEQ ID NO: 1306237 - RNA, 19 nt, Homo sapiens
  misc_RNA (1)...(19): siRNA sense strand
cuuacgaguuugguuauca

SEQ ID NO: 1306238 - RNA, 19 nt, Homo sapiens
  misc_RNA (1)...(19): siRNA sense strand
uacgggauccuuuaaaugg

SEQ ID NO: 1306239 - RNA, 19 nt, Homo sapiens
  misc_RNA (1)...(19): siRNA sense strand
gcagaugguggagcugaau

SEQ ID NO: 1306240 - RNA, 19 nt, Homo sapiens
  misc_RNA (1)...(19): siRNA sense strand
aaccaaaacccuacuauga

SEQ ID NO: 1306241 - RNA, 19 nt, Homo sapiens
  misc_RNA (1)...(19): siRNA sense strand
cccaauaugugaaaagguu

SEQ ID NO: 1306242 - RNA, 19 nt, Homo sapiens
  misc_RNA (1)...(19): siRNA sense strand
ggagcugaauaugccacuu

SEQ ID NO: 1306243 - RNA, 19 nt, Homo sapiens
  misc_RNA (1)...(19): siRNA sense strand
cgauggcagcgacacaauu

SEQ ID NO: 1306244 - RNA, 19 nt, Homo sapiens
  misc_RNA (1)...(19): siRNA sense strand
gauccauuuucacuuauug

SEQ ID NO: 1306245 - RNA, 19 nt, Homo sapiens
  misc_RNA (1)...(19): siRNA sense strand
uugaugcaguaacuuauag

SEQ ID NO: 1306246 - RNA, 19 nt, Homo sapiens
  misc_RNA (1)...(19): siRNA sense strand
guaucuugaugcaguaacu

SEQ ID NO: 1306247 - RNA, 19 nt, Homo sapiens
  misc_RNA (1)...(19): siRNA sense strand
ggagagagcacgauuuauu

SEQ ID NO: 1306248 - RNA, 19 nt, Homo sapiens
  misc_RNA (1)...(19): siRNA sense strand
agagaaacauguccauaua

SEQ ID NO: 1306249 - RNA, 19 nt, Homo sapiens
  misc_RNA (1)...(19): siRNA sense strand
cagaugcacuuuauuugua

SEQ ID NO: 1306250 - RNA, 19 nt, Homo sapiens
  misc_RNA (1)...(19): siRNA sense strand
ggacuuacgaguuugguua

SEQ ID NO: 1306251 - RNA, 19 nt, Homo sapiens
  misc_RNA (1)...(19): siRNA sense strand
aaacagauaucaggauuug

SEQ ID NO: 1306252 - RNA, 19 nt, Homo sapiens
  misc_RNA (1)...(19): siRNA sense strand
cuauggagcucauugguaa

SEQ ID NO: 1306253 - RNA, 19 nt, Homo sapiens
  misc_RNA (1)...(19): siRNA sense strand
aaacacaccuuuagugaag

SEQ ID NO: 1306254 - RNA, 19 nt, Homo sapiens
  misc_RNA (1)...(19): siRNA sense strand
gaacuuaaaggaucaguag

SEQ ID NO: 1306255 - RNA, 19 nt, Homo sapiens
  misc_RNA (1)...(19): siRNA sense strand
gaaaacagauaucaggauu

SEQ ID NO: 1306256 - RNA, 19 nt, Homo sapiens
  misc_RNA (1)...(19): siRNA sense strand
uaaaggaucaguagcaauu

SEQ ID NO: 1306257 - RNA, 19 nt, Homo sapiens
  misc_RNA (1)...(19): siRNA sense strand
aaaugggacuuacgaguuu

SEQ ID NO: 1306258 - RNA, 19 nt, Homo sapiens
  misc_RNA (1)...(19): siRNA sense strand
guuaucagaugcacuuuau

SEQ ID NO: 1306259 - RNA, 19 nt, Homo sapiens
  misc_RNA (1)...(19): siRNA sense strand
ugagauuggugaacgagua

SEQ ID NO: 1306260 - RNA, 19 nt, Homo sapiens
  misc_RNA (1)...(19): siRNA sense strand
gugaacgaguagauuauaa

SEQ ID NO: 1306261 - RNA, 19 nt, Homo sapiens
  misc_RNA (1)...(19): siRNA sense strand
gagagagcacgauuuauug

SEQ ID NO: 1306262 - RNA, 19 nt, Homo sapiens
  misc_RNA (1)...(19): siRNA sense strand
caaaugggacuuacgaguu

SEQ ID NO: 1306263 - RNA, 19 nt, Homo sapiens
  misc_RNA (1)...(19): siRNA sense strand
ggucauugcugugauuguu

SEQ ID NO: 1306264 - RNA, 19 nt, Homo sapiens
  misc_RNA (1)...(19): siRNA sense strand
ccagauccauuuucacuua

SEQ ID NO: 1306265 - RNA, 19 nt, Homo sapiens
  misc_RNA (1)...(19): siRNA sense strand
gaaggaauacuugacaguu

SEQ ID NO: 1306266 - RNA, 19 nt, Homo sapiens
  misc_RNA (1)...(19): siRNA sense strand
aaggaauacuugacaguuu

SEQ ID NO: 1306267 - RNA, 19 nt, Homo sapiens
  misc_RNA (1)...(19): siRNA sense strand
ucagaugacgccuguuaua

SEQ ID NO: 1306268 - RNA, 19 nt, Homo sapiens
  misc_RNA (1)...(19): siRNA sense strand
gaaaacacaccuuuaguga

SEQ ID NO: 1306269 - RNA, 19 nt, Homo sapiens
  misc_RNA (1)...(19): siRNA sense strand
gaugacgccuguuauagag

SEQ ID NO: 1306270 - RNA, 19 nt, Homo sapiens
  misc_RNA (1)...(19): siRNA sense strand
gagaaacauguccauauau

SEQ ID NO: 1306271 - RNA, 19 nt, Homo sapiens
  misc_RNA (1)...(19): siRNA sense strand
acgaguagauuauaagugu

SEQ ID NO: 1306272 - RNA, 19 nt, Homo sapiens
  misc_RNA (1)...(19): siRNA sense strand
cuacaaagcaacaguuaug

SEQ ID NO: 1306273 - RNA, 19 nt, Homo sapiens
  misc_RNA (1)...(19): siRNA sense strand
ccaccaacauuugaagcua

SEQ ID NO: 1306274 - RNA, 19 nt, Homo sapiens
  misc_RNA (1)...(19): siRNA sense strand
uauacgggauccuuuaaau

SEQ ID NO: 1306275 - RNA, 19 nt, Homo sapiens
  misc_RNA (1)...(19): siRNA sense strand
cgaguuugguuaucagaug

SEQ ID NO: 1306276 - RNA, 19 nt, Homo sapiens
  misc_RNA (1)...(19): siRNA sense strand
gaacgaguagauuauaagu

SEQ ID NO: 1306277 - RNA, 19 nt, Homo sapiens
  misc_RNA (1)...(19): siRNA sense strand
gugaggagccaccaacauu

SEQ ID NO: 1306278 - RNA, 19 nt, Homo sapiens
  misc_RNA (1)...(19): siRNA sense strand
gauggcagcgacacaauug

SEQ ID NO: 1306279 - RNA, 19 nt, Homo sapiens
  misc_RNA (1)...(19): siRNA sense strand
gcuauggagcucauuggua

SEQ ID NO: 1306280 - RNA, 19 nt, Homo sapiens
  misc_RNA (1)...(19): siRNA sense strand
gaggagccaccaacauuug

SEQ ID NO: 1306281 - RNA, 19 nt, Homo sapiens
  misc_RNA (1)...(19): siRNA sense strand
acacaccuuuagugaagua

SEQ ID NO: 1306282 - RNA, 19 nt, Homo sapiens
  misc_RNA (1)...(19): siRNA sense strand
ucucagaugacgccuguua

SEQ ID NO: 1306283 - RNA, 19 nt, Homo sapiens
  misc_RNA (1)...(19): siRNA sense strand
uagagaaacauguccauau

SEQ ID NO: 1306284 - RNA, 19 nt, Homo sapiens
  misc_RNA (1)...(19): siRNA sense strand
guuccaaagugucuuaaag

SEQ ID NO: 1306285 - RNA, 19 nt, Homo sapiens
  misc_RNA (1)...(19): siRNA sense strand
ggugaacgaguagauuaua

SEQ ID NO: 1306286 - RNA, 19 nt, Homo sapiens
  misc_RNA (1)...(19): siRNA sense strand
gaaguagaaguauuugagu

SEQ ID NO: 1306287 - RNA, 19 nt, Homo sapiens
  misc_RNA (1)...(19): siRNA sense strand
gaaacauguccauauauac

SEQ ID NO: 1306288 - RNA, 19 nt, Homo sapiens
  misc_RNA (1)...(19): siRNA sense strand
ugacgccuguuauagagaa

SEQ ID NO: 1306289 - RNA, 19 nt, Homo sapiens
  misc_RNA (1)...(19): siRNA sense strand
cgaguagauuauaagugua

SEQ ID NO: 1306290 - RNA, 19 nt, Homo sapiens
  misc_RNA (1)...(19): siRNA sense strand
gcacuuuauuuguaaugag

SEQ ID NO: 1306291 - RNA, 19 nt, Homo sapiens
  misc_RNA (1)...(19): siRNA sense strand
guagaaguauuugaguauc

SEQ ID NO: 1306292 - RNA, 19 nt, Homo sapiens
  misc_RNA (1)...(19): siRNA sense strand
guauuugaguaucuugaug

SEQ ID NO: 1306293 - RNA, 19 nt, Homo sapiens
  misc_RNA (1)...(19): siRNA sense strand
aggaauacuugacaguuug

SEQ ID NO: 1306294 - RNA, 19 nt, Homo sapiens
  misc_RNA (1)...(19): siRNA sense strand
ccaaaacccuacuaugaga

SEQ ID NO: 1306295 - RNA, 19 nt, Homo sapiens
  misc_RNA (1)...(19): siRNA sense strand
aguguaaaguggucaaaug

SEQ ID NO: 1306296 - RNA, 19 nt, Homo sapiens
  misc_RNA (1)...(19): siRNA sense strand
ccacccauacuauuuguga

SEQ ID NO: 1306297 - RNA, 19 nt, Homo sapiens
  misc_RNA (1)...(19): siRNA sense strand
caccaacauuugaagcuau

SEQ ID NO: 1306298 - RNA, 19 nt, Homo sapiens
  misc_RNA (1)...(19): siRNA sense strand
uuggagagagcacgauuua

SEQ ID NO: 1306299 - RNA, 19 nt, Homo sapiens
  misc_RNA (1)...(19): siRNA sense strand
gguuaucagaugcacuuua

SEQ ID NO: 1306300 - RNA, 19 nt, Homo sapiens
  misc_RNA (1)...(19): siRNA sense strand
ugaggagccaccaacauuu

SEQ ID NO: 1306301 - RNA, 19 nt, Homo sapiens
  misc_RNA (1)...(19): siRNA sense strand
ggaaggaauacuugacagu

SEQ ID NO: 1306302 - RNA, 19 nt, Homo sapiens
  misc_RNA (1)...(19): siRNA sense strand
gaggaaggaauacuugaca

SEQ ID NO: 1306303 - RNA, 19 nt, Homo sapiens
  misc_RNA (1)...(19): siRNA sense strand
ccaguuccaaagugucuua

SEQ ID NO: 1306304 - RNA, 19 nt, Homo sapiens
  misc_RNA (1)...(19): siRNA sense strand
ugaguaucuugaugcagua

SEQ ID NO: 1306305 - RNA, 19 nt, Homo sapiens
  misc_RNA (1)...(19): siRNA sense strand
caccuuuagugaaguagaa

SEQ ID NO: 1306306 - RNA, 19 nt, Homo sapiens
  misc_RNA (1)...(19): siRNA sense strand
acagauaucaggauuugga

SEQ ID NO: 1306307 - RNA, 19 nt, Homo sapiens
  misc_RNA (1)...(19): siRNA sense strand
ucauugcugugauuguuau

SEQ ID NO: 1306308 - RNA, 19 nt, Homo sapiens
  misc_RNA (1)...(19): siRNA sense strand
ucagaugcacuuuauuugu

SEQ ID NO: 1306309 - RNA, 19 nt, Homo sapiens
  misc_RNA (1)...(19): siRNA sense strand
gugcugcuccagaguguaa

SEQ ID NO: 1306310 - RNA, 19 nt, Homo sapiens
  misc_RNA (1)...(19): siRNA sense strand
ggaaaacacaccuuuagug

SEQ ID NO: 1306311 - RNA, 19 nt, Homo sapiens
  misc_RNA (1)...(19): siRNA sense strand
aaggaucaguagcaauuug

SEQ ID NO: 1306312 - RNA, 19 nt, Homo sapiens
  misc_RNA (1)...(19): siRNA sense strand
uauauacgggauccuuuaa

SEQ ID NO: 1306313 - RNA, 19 nt, Homo sapiens
  misc_RNA (1)...(19): siRNA sense strand
ugaaguagaaguauuugag

SEQ ID NO: 1306314 - RNA, 19 nt, Homo sapiens
  misc_RNA (1)...(19): siRNA sense strand
cuugacaguuuggauguuu

SEQ ID NO: 1306315 - RNA, 19 nt, Homo sapiens
  misc_RNA (1)...(19): siRNA sense strand
cauauauacgggauccuuu

SEQ ID NO: 1306316 - RNA, 19 nt, Homo sapiens
  misc_RNA (1)...(19): siRNA sense strand
auauauacgggauccuuua

SEQ ID NO: 1306317 - RNA, 19 nt, Homo sapiens
  misc_RNA (1)...(19): siRNA sense strand
cuuaaaggaucaguagcaa

SEQ ID NO: 1306318 - RNA, 19 nt, Homo sapiens
  misc_RNA (1)...(19): siRNA sense strand
uaaaccugaggaaggaaua

SEQ ID NO: 1306319 - RNA, 19 nt, Homo sapiens
  misc_RNA (1)...(19): siRNA sense strand
agaugacgccuguuauaga

SEQ ID NO: 1306320 - RNA, 19 nt, Homo sapiens
  misc_RNA (1)...(19): siRNA sense strand
ugugauuguuauugccaua

SEQ ID NO: 1306321 - RNA, 19 nt, Homo sapiens
  misc_RNA (1)...(19): siRNA sense strand
gagagcacgauuuauugug

SEQ ID NO: 1306322 - RNA, 19 nt, Homo sapiens
  misc_RNA (1)...(19): siRNA sense strand
gaaguauuugaguaucuug

SEQ ID NO: 1306323 - RNA, 19 nt, Homo sapiens
  misc_RNA (1)...(19): siRNA sense strand
ggcuaccugucucagauga

SEQ ID NO: 1306324 - RNA, 19 nt, Homo sapiens
  misc_RNA (1)...(19): siRNA sense strand
gauaucaggauuuggaaaa

SEQ ID NO: 1306325 - RNA, 19 nt, Homo sapiens
  misc_RNA (1)...(19): siRNA sense strand
ccucuugccacccauacua

SEQ ID NO: 1306326 - RNA, 19 nt, Homo sapiens
  misc_RNA (1)...(19): siRNA sense strand
ccaugguguugcugcugua

SEQ ID NO: 1306327 - RNA, 19 nt, Homo sapiens
  misc_RNA (1)...(19): siRNA sense strand
cagaugacgccuguuauag

SEQ ID NO: 1306328 - RNA, 19 nt, Homo sapiens
  misc_RNA (1)...(19): siRNA sense strand
uuggugaacgaguagauua

SEQ ID NO: 1306329 - RNA, 19 nt, Homo sapiens
  misc_RNA (1)...(19): siRNA sense strand
gucauugcugugauuguua

SEQ ID NO: 1306330 - RNA, 19 nt, Homo sapiens
  misc_RNA (1)...(19): siRNA sense strand
ggagccaccaacauuugaa

SEQ ID NO: 1306331 - RNA, 19 nt, Homo sapiens
  misc_RNA (1)...(19): siRNA sense strand
gcgcuuuccuggguugcuu

SEQ ID NO: 1306332 - RNA, 19 nt, Homo sapiens
  misc_RNA (1)...(19): siRNA sense strand
uacuacaaagcaacaguua

SEQ ID NO: 1306333 - RNA, 19 nt, Homo sapiens
  misc_RNA (1)...(19): siRNA sense strand
cuugaugcaguaacuuaua

SEQ ID NO: 1306334 - RNA, 19 nt, Homo sapiens
  misc_RNA (1)...(19): siRNA sense strand
aaacauguccauauauacg

SEQ ID NO: 1306335 - RNA, 19 nt, Homo sapiens
  misc_RNA (1)...(19): siRNA sense strand
guguaaaguggucaaaugu

SEQ ID NO: 1306336 - RNA, 19 nt, Homo sapiens
  misc_RNA (1)...(19): siRNA sense strand
cuuacgaguuugguuauca

SEQ ID NO: 1306337 - RNA, 19 nt, Homo sapiens
  misc_RNA (1)...(19): siRNA sense strand
uacgggauccuuuaaaugg

SEQ ID NO: 1306338 - RNA, 19 nt, Homo sapiens
  misc_RNA (1)...(19): siRNA sense strand
aaccaaaacccuacuauga

SEQ ID NO: 1306339 - RNA, 19 nt, Homo sapiens
  misc_RNA (1)...(19): siRNA sense strand
cccaauaugugaaaagguu

SEQ ID NO: 1306340 - RNA, 19 nt, Homo sapiens
  misc_RNA (1)...(19): siRNA sense strand
cgauggcagcgacacaauu

SEQ ID NO: 1306341 - RNA, 19 nt, Homo sapiens
  misc_RNA (1)...(19): siRNA sense strand
gauccauuuucacuuauug

SEQ ID NO: 1306342 - RNA, 19 nt, Homo sapiens
  misc_RNA (1)...(19): siRNA sense strand
uugaugcaguaacuuauag

SEQ ID NO: 1306343 - RNA, 19 nt, Homo sapiens
  misc_RNA (1)...(19): siRNA sense strand
guaucuugaugcaguaacu

SEQ ID NO: 1306344 - RNA, 19 nt, Homo sapiens
  misc_RNA (1)...(19): siRNA sense strand
caacauuugaagcuaugga

SEQ ID NO: 1306345 - RNA, 19 nt, Homo sapiens
  misc_RNA (1)...(19): siRNA sense strand
gagauuggugaacgaguag

SEQ ID NO: 1306346 - RNA, 19 nt, Homo sapiens
  misc_RNA (1)...(19): siRNA sense strand
ggagagagcacgauuuauu

SEQ ID NO: 1306347 - RNA, 19 nt, Homo sapiens
  misc_RNA (1)...(19): siRNA sense strand
agagaaacauguccauaua

SEQ ID NO: 1306348 - RNA, 19 nt, Homo sapiens
  misc_RNA (1)...(19): siRNA sense strand
cagaugcacuuuauuugua

SEQ ID NO: 1306349 - RNA, 19 nt, Homo sapiens
  misc_RNA (1)...(19): siRNA sense strand
ggacuuacgaguuugguua

SEQ ID NO: 1306350 - RNA, 19 nt, Homo sapiens
  misc_RNA (1)...(19): siRNA sense strand
aaacagauaucaggauuug

SEQ ID NO: 1306351 - RNA, 19 nt, Homo sapiens
  misc_RNA (1)...(19): siRNA sense strand
cuauggagcucauugguaa

SEQ ID NO: 1306352 - RNA, 19 nt, Homo sapiens
  misc_RNA (1)...(19): siRNA sense strand
aaacacaccuuuagugaag

SEQ ID NO: 1306353 - RNA, 19 nt, Homo sapiens
  misc_RNA (1)...(19): siRNA sense strand
gaacuuaaaggaucaguag

SEQ ID NO: 1306354 - RNA, 19 nt, Homo sapiens
  misc_RNA (1)...(19): siRNA sense strand
gaaaacagauaucaggauu

SEQ ID NO: 1306355 - RNA, 19 nt, Homo sapiens
  misc_RNA (1)...(19): siRNA sense strand
uaaaggaucaguagcaauu

SEQ ID NO: 1306356 - RNA, 19 nt, Homo sapiens
  misc_RNA (1)...(19): siRNA sense strand
aaaugggacuuacgaguuu

SEQ ID NO: 1306357 - RNA, 19 nt, Homo sapiens
  misc_RNA (1)...(19): siRNA sense strand
guuaucagaugcacuuuau

SEQ ID NO: 1306358 - RNA, 19 nt, Homo sapiens
  misc_RNA (1)...(19): siRNA sense strand
gagcugaauaugccacuua

SEQ ID NO: 1306359 - RNA, 19 nt, Homo sapiens
  misc_RNA (1)...(19): siRNA sense strand
gagcagagaggcugaauag

SEQ ID NO: 1306360 - RNA, 19 nt, Homo sapiens
  misc_RNA (1)...(19): siRNA sense strand
ugagauuggugaacgagua

SEQ ID NO: 1306361 - RNA, 19 nt, Homo sapiens
  misc_RNA (1)...(19): siRNA sense strand
gugaacgaguagauuauaa

SEQ ID NO: 1306362 - RNA, 19 nt, Homo sapiens
  misc_RNA (1)...(19): siRNA sense strand
gagagagcacgauuuauug

SEQ ID NO: 1306363 - RNA, 19 nt, Homo sapiens
  misc_RNA (1)...(19): siRNA sense strand
caaaugggacuuacgaguu

SEQ ID NO: 1306364 - RNA, 19 nt, Homo sapiens
  misc_RNA (1)...(19): siRNA sense strand
ggucauugcugugauuguu

SEQ ID NO: 1306365 - RNA, 19 nt, Homo sapiens
  misc_RNA (1)...(19): siRNA sense strand
ccagauccauuuucacuua

SEQ ID NO: 1306366 - RNA, 19 nt, Homo sapiens
  misc_RNA (1)...(19): siRNA sense strand
gaaggaauacuugacaguu

SEQ ID NO: 1306367 - RNA, 19 nt, Homo sapiens
  misc_RNA (1)...(19): siRNA sense strand
aaggaauacuugacaguuu

SEQ ID NO: 1306368 - RNA, 19 nt, Homo sapiens
  misc_RNA (1)...(19): siRNA sense strand
ucagaugacgccuguuaua

SEQ ID NO: 1306369 - RNA, 19 nt, Homo sapiens
  misc_RNA (1)...(19): siRNA sense strand
gaaaacacaccuuuaguga

SEQ ID NO: 1306370 - RNA, 19 nt, Homo sapiens
  misc_RNA (1)...(19): siRNA sense strand
gaugacgccuguuauagag

SEQ ID NO: 1306371 - RNA, 19 nt, Homo sapiens
  misc_RNA (1)...(19): siRNA sense strand
gagaaacauguccauauau

SEQ ID NO: 1306372 - RNA, 19 nt, Homo sapiens
  misc_RNA (1)...(19): siRNA sense strand
ccacuuaccagacuaaauc

SEQ ID NO: 1306373 - RNA, 19 nt, Homo sapiens
  misc_RNA (1)...(19): siRNA sense strand
acgaguagauuauaagugu

SEQ ID NO: 1306374 - RNA, 19 nt, Homo sapiens
  misc_RNA (1)...(19): siRNA sense strand
cuacaaagcaacaguuaug

SEQ ID NO: 1306375 - RNA, 19 nt, Homo sapiens
  misc_RNA (1)...(19): siRNA sense strand
ccaccaacauuugaagcua

SEQ ID NO: 1306376 - RNA, 19 nt, Homo sapiens
  misc_RNA (1)...(19): siRNA sense strand
uauacgggauccuuuaaau

SEQ ID NO: 1306377 - RNA, 19 nt, Homo sapiens
  misc_RNA (1)...(19): siRNA sense strand
cgaguuugguuaucagaug

SEQ ID NO: 1306378 - RNA, 19 nt, Homo sapiens
  misc_RNA (1)...(19): siRNA sense strand
gaacgaguagauuauaagu

SEQ ID NO: 1306379 - RNA, 19 nt, Homo sapiens
  misc_RNA (1)...(19): siRNA sense strand
gugaggagccaccaacauu

SEQ ID NO: 1306380 - RNA, 19 nt, Homo sapiens
  misc_RNA (1)...(19): siRNA sense strand
gauggcagcgacacaauug

SEQ ID NO: 1306381 - RNA, 19 nt, Homo sapiens
  misc_RNA (1)...(19): siRNA sense strand
ucucagaugacgccuguua

SEQ ID NO: 1306382 - RNA, 19 nt, Homo sapiens
  misc_RNA (1)...(19): siRNA sense strand
acacaccuuuagugaagua

SEQ ID NO: 1306383 - RNA, 19 nt, Homo sapiens
  misc_RNA (1)...(19): siRNA sense strand
gcuauggagcucauuggua

SEQ ID NO: 1306384 - RNA, 19 nt, Homo sapiens
  misc_RNA (1)...(19): siRNA sense strand
gaggagccaccaacauuug

SEQ ID NO: 1306385 - RNA, 19 nt, Homo sapiens
  misc_RNA (1)...(19): siRNA sense strand
uagagaaacauguccauau

SEQ ID NO: 1306386 - RNA, 19 nt, Homo sapiens
  misc_RNA (1)...(19): siRNA sense strand
ggugaacgaguagauuaua

SEQ ID NO: 1306387 - RNA, 19 nt, Homo sapiens
  misc_RNA (1)...(19): siRNA sense strand
gaaguagaaguauuugagu

SEQ ID NO: 1306388 - RNA, 19 nt, Homo sapiens
  misc_RNA (1)...(19): siRNA sense strand
gaaacauguccauauauac

SEQ ID NO: 1306389 - RNA, 19 nt, Homo sapiens
  misc_RNA (1)...(19): siRNA sense strand
ugacgccuguuauagagaa

SEQ ID NO: 1306390 - RNA, 19 nt, Homo sapiens
  misc_RNA (1)...(19): siRNA sense strand
cgaguagauuauaagugua

SEQ ID NO: 1306391 - RNA, 19 nt, Homo sapiens
  misc_RNA (1)...(19): siRNA sense strand
gcacuuuauuuguaaugag

SEQ ID NO: 1306392 - RNA, 19 nt, Homo sapiens
  misc_RNA (1)...(19): siRNA sense strand
guagaaguauuugaguauc

SEQ ID NO: 1306393 - RNA, 19 nt, Homo sapiens
  misc_RNA (1)...(19): siRNA sense strand
guauuugaguaucuugaug

SEQ ID NO: 1306394 - RNA, 19 nt, Homo sapiens
  misc_RNA (1)...(19): siRNA sense strand
aggaauacuugacaguuug

SEQ ID NO: 1306395 - RNA, 19 nt, Homo sapiens
  misc_RNA (1)...(19): siRNA sense strand
ccaaaacccuacuaugaga

SEQ ID NO: 1306396 - RNA, 19 nt, Homo sapiens
  misc_RNA (1)...(19): siRNA sense strand
aguguaaaguggucaaaug

SEQ ID NO: 1306397 - RNA, 19 nt, Homo sapiens
  misc_RNA (1)...(19): siRNA sense strand
ccacccauacuauuuguga

SEQ ID NO: 1306398 - RNA, 19 nt, Homo sapiens
  misc_RNA (1)...(19): siRNA sense strand
uuggagagagcacgauuua

SEQ ID NO: 1306399 - RNA, 19 nt, Homo sapiens
  misc_RNA (1)...(19): siRNA sense strand
gguuaucagaugcacuuua

SEQ ID NO: 1306400 - RNA, 19 nt, Homo sapiens
  misc_RNA (1)...(19): siRNA sense strand
caccaacauuugaagcuau

SEQ ID NO: 1306401 - RNA, 19 nt, Homo sapiens
  misc_RNA (1)...(19): siRNA sense strand
ugaggagccaccaacauuu

SEQ ID NO: 1306402 - RNA, 19 nt, Homo sapiens
  misc_RNA (1)...(19): siRNA sense strand
ggaaggaauacuugacagu

SEQ ID NO: 1306403 - RNA, 19 nt, Homo sapiens
  misc_RNA (1)...(19): siRNA sense strand
gaggaaggaauacuugaca

SEQ ID NO: 1306404 - RNA, 19 nt, Homo sapiens
  misc_RNA (1)...(19): siRNA sense strand
ugaguaucuugaugcagua

SEQ ID NO: 1306405 - RNA, 19 nt, Homo sapiens
  misc_RNA (1)...(19): siRNA sense strand
caccuuuagugaaguagaa

SEQ ID NO: 1306406 - RNA, 19 nt, Homo sapiens
  misc_RNA (1)...(19): siRNA sense strand
acagauaucaggauuugga

SEQ ID NO: 1306407 - RNA, 19 nt, Homo sapiens
  misc_RNA (1)...(19): siRNA sense strand
ucauugcugugauuguuau

SEQ ID NO: 1306408 - RNA, 19 nt, Homo sapiens
  misc_RNA (1)...(19): siRNA sense strand
ucagaugcacuuuauuugu

SEQ ID NO: 1306409 - RNA, 19 nt, Homo sapiens
  misc_RNA (1)...(19): siRNA sense strand
gugcugcuccagaguguaa

SEQ ID NO: 1306410 - RNA, 19 nt, Homo sapiens
  misc_RNA (1)...(19): siRNA sense strand
ggaaaacacaccuuuagug

SEQ ID NO: 1306411 - RNA, 19 nt, Homo sapiens
  misc_RNA (1)...(19): siRNA sense strand
aaggaucaguagcaauuug

SEQ ID NO: 1306412 - RNA, 19 nt, Homo sapiens
  misc_RNA (1)...(19): siRNA sense strand
uauauacgggauccuuuaa

SEQ ID NO: 1306413 - RNA, 19 nt, Homo sapiens
  misc_RNA (1)...(19): siRNA sense strand
ugaaguagaaguauuugag

SEQ ID NO: 1306414 - RNA, 19 nt, Homo sapiens
  misc_RNA (1)...(19): siRNA sense strand
cuugacaguuuggauguuu

SEQ ID NO: 1306415 - RNA, 19 nt, Homo sapiens
  misc_RNA (1)...(19): siRNA sense strand
cauauauacgggauccuuu

SEQ ID NO: 1306416 - RNA, 19 nt, Homo sapiens
  misc_RNA (1)...(19): siRNA sense strand
auauauacgggauccuuua

SEQ ID NO: 1306417 - RNA, 19 nt, Homo sapiens
  misc_RNA (1)...(19): siRNA sense strand
cuuaaaggaucaguagcaa

SEQ ID NO: 1306418 - RNA, 19 nt, Homo sapiens
  misc_RNA (1)...(19): siRNA sense strand
uaaaccugaggaaggaaua

SEQ ID NO: 1306419 - RNA, 19 nt, Homo sapiens
  misc_RNA (1)...(19): siRNA sense strand
agaugacgccuguuauaga

SEQ ID NO: 1306420 - RNA, 19 nt, Homo sapiens
  misc_RNA (1)...(19): siRNA sense strand
ugugauuguuauugccaua

SEQ ID NO: 1306421 - RNA, 19 nt, Homo sapiens
  misc_RNA (1)...(19): siRNA sense strand
gagagcacgauuuauugug

SEQ ID NO: 1306422 - RNA, 19 nt, Homo sapiens
  misc_RNA (1)...(19): siRNA sense strand
gaaguauuugaguaucuug

SEQ ID NO: 1306423 - RNA, 19 nt, Homo sapiens
  misc_RNA (1)...(19): siRNA sense strand
ggcuaccugucucagauga

SEQ ID NO: 1306424 - RNA, 19 nt, Homo sapiens
  misc_RNA (1)...(19): siRNA sense strand
gauaucaggauuuggaaaa

SEQ ID NO: 1306425 - RNA, 19 nt, Homo sapiens
  misc_RNA (1)...(19): siRNA sense strand
ccucuugccacccauacua

SEQ ID NO: 1306426 - RNA, 19 nt, Homo sapiens
  misc_RNA (1)...(19): siRNA sense strand
ccaugguguugcugcugua

SEQ ID NO: 1306427 - RNA, 19 nt, Homo sapiens
  misc_RNA (1)...(19): siRNA sense strand
cagaugacgccuguuauag

SEQ ID NO: 1306428 - RNA, 19 nt, Homo sapiens
  misc_RNA (1)...(19): siRNA sense strand
cagaugguggagcugaaua

SEQ ID NO: 1306429 - RNA, 19 nt, Homo sapiens
  misc_RNA (1)...(19): siRNA sense strand
gucauugcugugauuguua

SEQ ID NO: 1306430 - RNA, 19 nt, Homo sapiens
  misc_RNA (1)...(19): siRNA sense strand
ggagccaccaacauuugaa

SEQ ID NO: 1306431 - RNA, 19 nt, Homo sapiens
  misc_RNA (1)...(19): siRNA sense strand
uuggugaacgaguagauua

SEQ ID NO: 1306432 - RNA, 19 nt, Homo sapiens
  misc_RNA (1)...(19): siRNA sense strand
gcgcuuuccuggguugcuu

SEQ ID NO: 1306433 - RNA, 19 nt, Homo sapiens
  misc_RNA (1)...(19): siRNA sense strand
uacuacaaagcaacaguua

SEQ ID NO: 1306434 - RNA, 19 nt, Homo sapiens
  misc_RNA (1)...(19): siRNA sense strand
cuugaugcaguaacuuaua

SEQ ID NO: 1306435 - RNA, 19 nt, Homo sapiens
  misc_RNA (1)...(19): siRNA sense strand
aaacauguccauauauacg

SEQ ID NO: 1306436 - RNA, 19 nt, Homo sapiens
  misc_RNA (1)...(19): siRNA sense strand
guguaaaguggucaaaugu

SEQ ID NO: 1306437 - RNA, 19 nt, Homo sapiens
  misc_RNA (1)...(19): siRNA sense strand
cuuacgaguuugguuauca

SEQ ID NO: 1306438 - RNA, 19 nt, Homo sapiens
  misc_RNA (1)...(19): siRNA sense strand
uacgggauccuuuaaaugg

SEQ ID NO: 1306439 - RNA, 19 nt, Homo sapiens
  misc_RNA (1)...(19): siRNA sense strand
gcagaugguggagcugaau

SEQ ID NO: 1306440 - RNA, 19 nt, Homo sapiens
  misc_RNA (1)...(19): siRNA sense strand
aaccaaaacccuacuauga

SEQ ID NO: 1306441 - RNA, 19 nt, Homo sapiens
  misc_RNA (1)...(19): siRNA sense strand
uugaugcaguaacuuauag

SEQ ID NO: 1306442 - RNA, 19 nt, Homo sapiens
  misc_RNA (1)...(19): siRNA sense strand
ggagcugaauaugccacuu

SEQ ID NO: 1306443 - RNA, 19 nt, Homo sapiens
  misc_RNA (1)...(19): siRNA sense strand
caacauuugaagcuaugga

SEQ ID NO: 1306444 - RNA, 19 nt, Homo sapiens
  misc_RNA (1)...(19): siRNA sense strand
cgauggcagcgacacaauu

SEQ ID NO: 1306445 - RNA, 19 nt, Homo sapiens
  misc_RNA (1)...(19): siRNA sense strand
gauccauuuucacuuauug

SEQ ID NO: 1306446 - RNA, 19 nt, Homo sapiens
  misc_RNA (1)...(19): siRNA sense strand
ggagagagcacgauuuauu

SEQ ID NO: 1306447 - RNA, 19 nt, Homo sapiens
  misc_RNA (1)...(19): siRNA sense strand
agagaaacauguccauaua

SEQ ID NO: 1306448 - RNA, 19 nt, Homo sapiens
  misc_RNA (1)...(19): siRNA sense strand
cagaugcacuuuauuugua

SEQ ID NO: 1306449 - RNA, 19 nt, Homo sapiens
  misc_RNA (1)...(19): siRNA sense strand
ggacuuacgaguuugguua

SEQ ID NO: 1306450 - RNA, 19 nt, Homo sapiens
  misc_RNA (1)...(19): siRNA sense strand
aaacagauaucaggauuug

SEQ ID NO: 1306451 - RNA, 19 nt, Homo sapiens
  misc_RNA (1)...(19): siRNA sense strand
cuauggagcucauugguaa

SEQ ID NO: 1306452 - RNA, 19 nt, Homo sapiens
  misc_RNA (1)...(19): siRNA sense strand
aaacacaccuuuagugaag

SEQ ID NO: 1306453 - RNA, 19 nt, Homo sapiens
  misc_RNA (1)...(19): siRNA sense strand
gaacuuaaaggaucaguag

SEQ ID NO: 1306454 - RNA, 19 nt, Homo sapiens
  misc_RNA (1)...(19): siRNA sense strand
gaaaacagauaucaggauu

SEQ ID NO: 1306455 - RNA, 19 nt, Homo sapiens
  misc_RNA (1)...(19): siRNA sense strand
uaaaggaucaguagcaauu

SEQ ID NO: 1306456 - RNA, 19 nt, Homo sapiens
  misc_RNA (1)...(19): siRNA sense strand
aaaugggacuuacgaguuu

SEQ ID NO: 1306457 - RNA, 19 nt, Homo sapiens
  misc_RNA (1)...(19): siRNA sense strand
guuaucagaugcacuuuau

SEQ ID NO: 1306458 - RNA, 19 nt, Homo sapiens
  misc_RNA (1)...(19): siRNA sense strand
gagcugaauaugccacuua

SEQ ID NO: 1306459 - RNA, 19 nt, Homo sapiens
  misc_RNA (1)...(19): siRNA sense strand
ugagauuggugaacgagua

SEQ ID NO: 1306460 - RNA, 19 nt, Homo sapiens
  misc_RNA (1)...(19): siRNA sense strand
gugaacgaguagauuauaa

SEQ ID NO: 1306461 - RNA, 19 nt, Homo sapiens
  misc_RNA (1)...(19): siRNA sense strand
gagagagcacgauuuauug

SEQ ID NO: 1306462 - RNA, 19 nt, Homo sapiens
  misc_RNA (1)...(19): siRNA sense strand
caaaugggacuuacgaguu

SEQ ID NO: 1306463 - RNA, 19 nt, Homo sapiens
  misc_RNA (1)...(19): siRNA sense strand
ggucauugcugugauuguu

SEQ ID NO: 1306464 - RNA, 19 nt, Homo sapiens
  misc_RNA (1)...(19): siRNA sense strand
ccagauccauuuucacuua

SEQ ID NO: 1306465 - RNA, 19 nt, Homo sapiens
  misc_RNA (1)...(19): siRNA sense strand
gaaggaauacuugacaguu

SEQ ID NO: 1306466 - RNA, 19 nt, Homo sapiens
  misc_RNA (1)...(19): siRNA sense strand
aaggaauacuugacaguuu

SEQ ID NO: 1306467 - RNA, 19 nt, Homo sapiens
  misc_RNA (1)...(19): siRNA sense strand
ucagaugacgccuguuaua

SEQ ID NO: 1306468 - RNA, 19 nt, Homo sapiens
  misc_RNA (1)...(19): siRNA sense strand
gaaaacacaccuuuaguga

SEQ ID NO: 1306469 - RNA, 19 nt, Homo sapiens
  misc_RNA (1)...(19): siRNA sense strand
gaugacgccuguuauagag

SEQ ID NO: 1306470 - RNA, 19 nt, Homo sapiens
  misc_RNA (1)...(19): siRNA sense strand
gagaaacauguccauauau

SEQ ID NO: 1306471 - RNA, 19 nt, Homo sapiens
  misc_RNA (1)...(19): siRNA sense strand
ccacuuaccagacuaaauc

SEQ ID NO: 1306472 - RNA, 19 nt, Homo sapiens
  misc_RNA (1)...(19): siRNA sense strand
acgaguagauuauaagugu

SEQ ID NO: 1306473 - RNA, 19 nt, Homo sapiens
  misc_RNA (1)...(19): siRNA sense strand
cuacaaagcaacaguuaug

SEQ ID NO: 1306474 - RNA, 19 nt, Homo sapiens
  misc_RNA (1)...(19): siRNA sense strand
ccaccaacauuugaagcua

SEQ ID NO: 1306475 - RNA, 19 nt, Homo sapiens
  misc_RNA (1)...(19): siRNA sense strand
uauacgggauccuuuaaau

SEQ ID NO: 1306476 - RNA, 19 nt, Homo sapiens
  misc_RNA (1)...(19): siRNA sense strand
cgaguuugguuaucagaug

SEQ ID NO: 1306477 - RNA, 19 nt, Homo sapiens
  misc_RNA (1)...(19): siRNA sense strand
gaacgaguagauuauaagu

SEQ ID NO: 1306478 - RNA, 19 nt, Homo sapiens
  misc_RNA (1)...(19): siRNA sense strand
gugaggagccaccaacauu

SEQ ID NO: 1306479 - RNA, 19 nt, Homo sapiens
  misc_RNA (1)...(19): siRNA sense strand
gauggcagcgacacaauug

SEQ ID NO: 1306480 - RNA, 19 nt, Homo sapiens
  misc_RNA (1)...(19): siRNA sense strand
ucucagaugacgccuguua

SEQ ID NO: 1306481 - RNA, 19 nt, Homo sapiens
  misc_RNA (1)...(19): siRNA sense strand
gaggagccaccaacauuug

SEQ ID NO: 1306482 - RNA, 19 nt, Homo sapiens
  misc_RNA (1)...(19): siRNA sense strand
gcuauggagcucauuggua

SEQ ID NO: 1306483 - RNA, 19 nt, Homo sapiens
  misc_RNA (1)...(19): siRNA sense strand
acacaccuuuagugaagua

SEQ ID NO: 1306484 - RNA, 19 nt, Homo sapiens
  misc_RNA (1)...(19): siRNA sense strand
uagagaaacauguccauau

SEQ ID NO: 1306485 - RNA, 19 nt, Homo sapiens
  misc_RNA (1)...(19): siRNA sense strand
guuccaaagugucuuaaag

SEQ ID NO: 1306486 - RNA, 19 nt, Homo sapiens
  misc_RNA (1)...(19): siRNA sense strand
ggugaacgaguagauuaua

SEQ ID NO: 1306487 - RNA, 19 nt, Homo sapiens
  misc_RNA (1)...(19): siRNA sense strand
gaaguagaaguauuugagu

SEQ ID NO: 1306488 - RNA, 19 nt, Homo sapiens
  misc_RNA (1)...(19): siRNA sense strand
gaaacauguccauauauac

SEQ ID NO: 1306489 - RNA, 19 nt, Homo sapiens
  misc_RNA (1)...(19): siRNA sense strand
ugacgccuguuauagagaa

SEQ ID NO: 1306490 - RNA, 19 nt, Homo sapiens
  misc_RNA (1)...(19): siRNA sense strand
cgaguagauuauaagugua

SEQ ID NO: 1306491 - RNA, 19 nt, Homo sapiens
  misc_RNA (1)...(19): siRNA sense strand
gcacuuuauuuguaaugag

SEQ ID NO: 1306492 - RNA, 19 nt, Homo sapiens
  misc_RNA (1)...(19): siRNA sense strand
guagaaguauuugaguauc

SEQ ID NO: 1306493 - RNA, 19 nt, Homo sapiens
  misc_RNA (1)...(19): siRNA sense strand
guauuugaguaucuugaug

SEQ ID NO: 1306494 - RNA, 19 nt, Homo sapiens
  misc_RNA (1)...(19): siRNA sense strand
aggaauacuugacaguuug

SEQ ID NO: 1306495 - RNA, 19 nt, Homo sapiens
  misc_RNA (1)...(19): siRNA sense strand
ccaaaacccuacuaugaga

SEQ ID NO: 1306496 - RNA, 19 nt, Homo sapiens
  misc_RNA (1)...(19): siRNA sense strand
aguguaaaguggucaaaug

SEQ ID NO: 1306497 - RNA, 19 nt, Homo sapiens
  misc_RNA (1)...(19): siRNA sense strand
ccacccauacuauuuguga

SEQ ID NO: 1306498 - RNA, 19 nt, Homo sapiens
  misc_RNA (1)...(19): siRNA sense strand
uuggagagagcacgauuua

SEQ ID NO: 1306499 - RNA, 19 nt, Homo sapiens
  misc_RNA (1)...(19): siRNA sense strand
gguuaucagaugcacuuua

SEQ ID NO: 1306500 - RNA, 19 nt, Homo sapiens
  misc_RNA (1)...(19): siRNA sense strand
caccaacauuugaagcuau

SEQ ID NO: 1306501 - RNA, 19 nt, Homo sapiens
  misc_RNA (1)...(19): siRNA sense strand
ugaggagccaccaacauuu

SEQ ID NO: 1306502 - RNA, 19 nt, Homo sapiens
  misc_RNA (1)...(19): siRNA sense strand
ggaaggaauacuugacagu

SEQ ID NO: 1306503 - RNA, 19 nt, Homo sapiens
  misc_RNA (1)...(19): siRNA sense strand
gaggaaggaauacuugaca

SEQ ID NO: 1306504 - RNA, 19 nt, Homo sapiens
  misc_RNA (1)...(19): siRNA sense strand
ccaguuccaaagugucuua

SEQ ID NO: 1306505 - RNA, 19 nt, Homo sapiens
  misc_RNA (1)...(19): siRNA sense strand
ugaguaucuugaugcagua

SEQ ID NO: 1306506 - RNA, 19 nt, Homo sapiens
  misc_RNA (1)...(19): siRNA sense strand
caccuuuagugaaguagaa

SEQ ID NO: 1306507 - RNA, 19 nt, Homo sapiens
  misc_RNA (1)...(19): siRNA sense strand
acagauaucaggauuugga

SEQ ID NO: 1306508 - RNA, 19 nt, Homo sapiens
  misc_RNA (1)...(19): siRNA sense strand
ucauugcugugauuguuau

SEQ ID NO: 1306509 - RNA, 19 nt, Homo sapiens
  misc_RNA (1)...(19): siRNA sense strand
ucagaugcacuuuauuugu

SEQ ID NO: 1306510 - RNA, 19 nt, Homo sapiens
  misc_RNA (1)...(19): siRNA sense strand
gugcugcuccagaguguaa

SEQ ID NO: 1306511 - RNA, 19 nt, Homo sapiens
  misc_RNA (1)...(19): siRNA sense strand
ggaaaacacaccuuuagug

SEQ ID NO: 1306512 - RNA, 19 nt, Homo sapiens
  misc_RNA (1)...(19): siRNA sense strand
aaggaucaguagcaauuug

SEQ ID NO: 1306513 - RNA, 19 nt, Homo sapiens
  misc_RNA (1)...(19): siRNA sense strand
uauauacgggauccuuuaa

SEQ ID NO: 1306514 - RNA, 19 nt, Homo sapiens
  misc_RNA (1)...(19): siRNA sense strand
ugaaguagaaguauuugag

SEQ ID NO: 1306515 - RNA, 19 nt, Homo sapiens
  misc_RNA (1)...(19): siRNA sense strand
cuugacaguuuggauguuu

SEQ ID NO: 1306516 - RNA, 19 nt, Homo sapiens
  misc_RNA (1)...(19): siRNA sense strand
cauauauacgggauccuuu

SEQ ID NO: 1306517 - RNA, 19 nt, Homo sapiens
  misc_RNA (1)...(19): siRNA sense strand
auauauacgggauccuuua

SEQ ID NO: 1306518 - RNA, 19 nt, Homo sapiens
  misc_RNA (1)...(19): siRNA sense strand
cuuaaaggaucaguagcaa

SEQ ID NO: 1306519 - RNA, 19 nt, Homo sapiens
  misc_RNA (1)...(19): siRNA sense strand
uaaaccugaggaaggaaua

SEQ ID NO: 1306520 - RNA, 19 nt, Homo sapiens
  misc_RNA (1)...(19): siRNA sense strand
agaugacgccuguuauaga

SEQ ID NO: 1306521 - RNA, 19 nt, Homo sapiens
  misc_RNA (1)...(19): siRNA sense strand
ugugauuguuauugccaua

SEQ ID NO: 1306522 - RNA, 19 nt, Homo sapiens
  misc_RNA (1)...(19): siRNA sense strand
gagagcacgauuuauugug

SEQ ID NO: 1306523 - RNA, 19 nt, Homo sapiens
  misc_RNA (1)...(19): siRNA sense strand
gaaguauuugaguaucuug

SEQ ID NO: 1306524 - RNA, 19 nt, Homo sapiens
  misc_RNA (1)...(19): siRNA sense strand
ggcuaccugucucagauga

SEQ ID NO: 1306525 - RNA, 19 nt, Homo sapiens
  misc_RNA (1)...(19): siRNA sense strand
gauaucaggauuuggaaaa

SEQ ID NO: 1306526 - RNA, 19 nt, Homo sapiens
  misc_RNA (1)...(19): siRNA sense strand
ccucuugccacccauacua

SEQ ID NO: 1306527 - RNA, 19 nt, Homo sapiens
  misc_RNA (1)...(19): siRNA sense strand
ccaugguguugcugcugua

SEQ ID NO: 1306528 - RNA, 19 nt, Homo sapiens
  misc_RNA (1)...(19): siRNA sense strand
cagaugacgccuguuauag

SEQ ID NO: 1306529 - RNA, 19 nt, Homo sapiens
  misc_RNA (1)...(19): siRNA sense strand
cagaugguggagcugaaua

SEQ ID NO: 1306530 - RNA, 19 nt, Homo sapiens
  misc_RNA (1)...(19): siRNA sense strand
gucauugcugugauuguua

SEQ ID NO: 1306531 - RNA, 19 nt, Homo sapiens
  misc_RNA (1)...(19): siRNA sense strand
ggagccaccaacauuugaa

SEQ ID NO: 1306532 - RNA, 19 nt, Homo sapiens
  misc_RNA (1)...(19): siRNA sense strand
uuggugaacgaguagauua

SEQ ID NO: 1306533 - RNA, 19 nt, Homo sapiens
  misc_RNA (1)...(19): siRNA sense strand
gcgcuuuccuggguugcuu

SEQ ID NO: 1306534 - RNA, 19 nt, Homo sapiens
  misc_RNA (1)...(19): siRNA sense strand
uacuacaaagcaacaguua

SEQ ID NO: 1306535 - RNA, 19 nt, Homo sapiens
  misc_RNA (1)...(19): siRNA sense strand
cuugaugcaguaacuuaua

SEQ ID NO: 1306536 - RNA, 19 nt, Homo sapiens
  misc_RNA (1)...(19): siRNA sense strand
aaacauguccauauauacg

SEQ ID NO: 1306537 - RNA, 19 nt, Homo sapiens
  misc_RNA (1)...(19): siRNA sense strand
guguaaaguggucaaaugu

SEQ ID NO: 1306538 - RNA, 19 nt, Homo sapiens
  misc_RNA (1)...(19): siRNA sense strand
cuuacgaguuugguuauca

SEQ ID NO: 1306539 - RNA, 19 nt, Homo sapiens
  misc_RNA (1)...(19): siRNA sense strand
uacgggauccuuuaaaugg

SEQ ID NO: 1306540 - RNA, 19 nt, Homo sapiens
  misc_RNA (1)...(19): siRNA sense strand
gcagaugguggagcugaau

SEQ ID NO: 1306541 - RNA, 19 nt, Homo sapiens
  misc_RNA (1)...(19): siRNA sense strand
aaccaaaacccuacuauga

SEQ ID NO: 1306542 - RNA, 19 nt, Homo sapiens
  misc_RNA (1)...(19): siRNA sense strand
uugaugcaguaacuuauag

SEQ ID NO: 1306543 - RNA, 19 nt, Homo sapiens
  misc_RNA (1)...(19): siRNA sense strand
ggagcugaauaugccacuu

SEQ ID NO: 1306544 - RNA, 19 nt, Homo sapiens
  misc_RNA (1)...(19): siRNA sense strand
cgauggcagcgacacaauu

SEQ ID NO: 1306545 - RNA, 19 nt, Homo sapiens
  misc_RNA (1)...(19): siRNA sense strand
gauccauuuucacuuauug

SEQ ID NO: 1306546 - RNA, 19 nt, Homo sapiens
  misc_RNA (1)...(19): siRNA sense strand
ggagagagcacgauuuauu

SEQ ID NO: 1306547 - RNA, 19 nt, Homo sapiens
  misc_RNA (1)...(19): siRNA sense strand
agagaaacauguccauaua

SEQ ID NO: 1306548 - RNA, 19 nt, Homo sapiens
  misc_RNA (1)...(19): siRNA sense strand
cagaugcacuuuauuugua

SEQ ID NO: 1306549 - RNA, 19 nt, Homo sapiens
  misc_RNA (1)...(19): siRNA sense strand
ggacuuacgaguuugguua

SEQ ID NO: 1306550 - RNA, 19 nt, Homo sapiens
  misc_RNA (1)...(19): siRNA sense strand
aaacagauaucaggauuug

SEQ ID NO: 1306551 - RNA, 19 nt, Homo sapiens
  misc_RNA (1)...(19): siRNA sense strand
cuauggagcucauugguaa

SEQ ID NO: 1306552 - RNA, 19 nt, Homo sapiens
  misc_RNA (1)...(19): siRNA sense strand
aaacacaccuuuagugaag

SEQ ID NO: 1306553 - RNA, 19 nt, Homo sapiens
  misc_RNA (1)...(19): siRNA sense strand
gaacuuaaaggaucaguag

SEQ ID NO: 1306554 - RNA, 19 nt, Homo sapiens
  misc_RNA (1)...(19): siRNA sense strand
gaaaacagauaucaggauu

SEQ ID NO: 1306555 - RNA, 19 nt, Homo sapiens
  misc_RNA (1)...(19): siRNA sense strand
uaaaggaucaguagcaauu

SEQ ID NO: 1306556 - RNA, 19 nt, Homo sapiens
  misc_RNA (1)...(19): siRNA sense strand
aaaugggacuuacgaguuu

SEQ ID NO: 1306557 - RNA, 19 nt, Homo sapiens
  misc_RNA (1)...(19): siRNA sense strand
guuaucagaugcacuuuau

SEQ ID NO: 1306558 - RNA, 19 nt, Homo sapiens
  misc_RNA (1)...(19): siRNA sense strand
gagcugaauaugccacuua

SEQ ID NO: 1306559 - RNA, 19 nt, Homo sapiens
  misc_RNA (1)...(19): siRNA sense strand
ugagauuggugaacgagua

SEQ ID NO: 1306560 - RNA, 19 nt, Homo sapiens
  misc_RNA (1)...(19): siRNA sense strand
gugaacgaguagauuauaa

SEQ ID NO: 1306561 - RNA, 19 nt, Homo sapiens
  misc_RNA (1)...(19): siRNA sense strand
gagagagcacgauuuauug

SEQ ID NO: 1306562 - RNA, 19 nt, Homo sapiens
  misc_RNA (1)...(19): siRNA sense strand
caaaugggacuuacgaguu

SEQ ID NO: 1306563 - RNA, 19 nt, Homo sapiens
  misc_RNA (1)...(19): siRNA sense strand
ggucauugcugugauuguu

SEQ ID NO: 1306564 - RNA, 19 nt, Homo sapiens
  misc_RNA (1)...(19): siRNA sense strand
ccagauccauuuucacuua

SEQ ID NO: 1306565 - RNA, 19 nt, Homo sapiens
  misc_RNA (1)...(19): siRNA sense strand
gaaggaauacuugacaguu

SEQ ID NO: 1306566 - RNA, 19 nt, Homo sapiens
  misc_RNA (1)...(19): siRNA sense strand
aaggaauacuugacaguuu

SEQ ID NO: 1306567 - RNA, 19 nt, Homo sapiens
  misc_RNA (1)...(19): siRNA sense strand
ucagaugacgccuguuaua

SEQ ID NO: 1306568 - RNA, 19 nt, Homo sapiens
  misc_RNA (1)...(19): siRNA sense strand
gaaaacacaccuuuaguga

SEQ ID NO: 1306569 - RNA, 19 nt, Homo sapiens
  misc_RNA (1)...(19): siRNA sense strand
gaugacgccuguuauagag

SEQ ID NO: 1306570 - RNA, 19 nt, Homo sapiens
  misc_RNA (1)...(19): siRNA sense strand
gagaaacauguccauauau

SEQ ID NO: 1306571 - RNA, 19 nt, Homo sapiens
  misc_RNA (1)...(19): siRNA sense strand
ccacuuaccagacuaaauc

SEQ ID NO: 1306572 - RNA, 19 nt, Homo sapiens
  misc_RNA (1)...(19): siRNA sense strand
acgaguagauuauaagugu

SEQ ID NO: 1306573 - RNA, 19 nt, Homo sapiens
  misc_RNA (1)...(19): siRNA sense strand
cuacaaagcaacaguuaug

SEQ ID NO: 1306574 - RNA, 19 nt, Homo sapiens
  misc_RNA (1)...(19): siRNA sense strand
ccaccaacauuugaagcua

SEQ ID NO: 1306575 - RNA, 19 nt, Homo sapiens
  misc_RNA (1)...(19): siRNA sense strand
uauacgggauccuuuaaau

SEQ ID NO: 1306576 - RNA, 19 nt, Homo sapiens
  misc_RNA (1)...(19): siRNA sense strand
cgaguuugguuaucagaug

SEQ ID NO: 1306577 - RNA, 19 nt, Homo sapiens
  misc_RNA (1)...(19): siRNA sense strand
gaacgaguagauuauaagu

SEQ ID NO: 1306578 - RNA, 19 nt, Homo sapiens
  misc_RNA (1)...(19): siRNA sense strand
gugaggagccaccaacauu

SEQ ID NO: 1306579 - RNA, 19 nt, Homo sapiens
  misc_RNA (1)...(19): siRNA sense strand
gauggcagcgacacaauug

SEQ ID NO: 1306580 - RNA, 19 nt, Homo sapiens
  misc_RNA (1)...(19): siRNA sense strand
ucucagaugacgccuguua

SEQ ID NO: 1306581 - RNA, 19 nt, Homo sapiens
  misc_RNA (1)...(19): siRNA sense strand
gaggagccaccaacauuug

SEQ ID NO: 1306582 - RNA, 19 nt, Homo sapiens
  misc_RNA (1)...(19): siRNA sense strand
gcuauggagcucauuggua

SEQ ID NO: 1306583 - RNA, 19 nt, Homo sapiens
  misc_RNA (1)...(19): siRNA sense strand
acacaccuuuagugaagua

SEQ ID NO: 1306584 - RNA, 19 nt, Homo sapiens
  misc_RNA (1)...(19): siRNA sense strand
uagagaaacauguccauau

SEQ ID NO: 1306585 - RNA, 19 nt, Homo sapiens
  misc_RNA (1)...(19): siRNA sense strand
guuccaaagugucuuaaag

SEQ ID NO: 1306586 - RNA, 19 nt, Homo sapiens
  misc_RNA (1)...(19): siRNA sense strand
ggugaacgaguagauuaua

SEQ ID NO: 1306587 - RNA, 19 nt, Homo sapiens
  misc_RNA (1)...(19): siRNA sense strand
gaaguagaaguauuugagu

SEQ ID NO: 1306588 - RNA, 19 nt, Homo sapiens
  misc_RNA (1)...(19): siRNA sense strand
gaaacauguccauauauac

SEQ ID NO: 1306589 - RNA, 19 nt, Homo sapiens
  misc_RNA (1)...(19): siRNA sense strand
ugacgccuguuauagagaa

SEQ ID NO: 1306590 - RNA, 19 nt, Homo sapiens
  misc_RNA (1)...(19): siRNA sense strand
cgaguagauuauaagugua

SEQ ID NO: 1306591 - RNA, 19 nt, Homo sapiens
  misc_RNA (1)...(19): siRNA sense strand
gcacuuuauuuguaaugag

SEQ ID NO: 1306592 - RNA, 19 nt, Homo sapiens
  misc_RNA (1)...(19): siRNA sense strand
guagaaguauuugaguauc

SEQ ID NO: 1306593 - RNA, 19 nt, Homo sapiens
  misc_RNA (1)...(19): siRNA sense strand
guauuugaguaucuugaug

SEQ ID NO: 1306594 - RNA, 19 nt, Homo sapiens
  misc_RNA (1)...(19): siRNA sense strand
aggaauacuugacaguuug

SEQ ID NO: 1306595 - RNA, 19 nt, Homo sapiens
  misc_RNA (1)...(19): siRNA sense strand
ccaaaacccuacuaugaga

SEQ ID NO: 1306596 - RNA, 19 nt, Homo sapiens
  misc_RNA (1)...(19): siRNA sense strand
aguguaaaguggucaaaug

SEQ ID NO: 1306597 - RNA, 19 nt, Homo sapiens
  misc_RNA (1)...(19): siRNA sense strand
ccacccauacuauuuguga

SEQ ID NO: 1306598 - RNA, 19 nt, Homo sapiens
  misc_RNA (1)...(19): siRNA sense strand
uuggagagagcacgauuua

SEQ ID NO: 1306599 - RNA, 19 nt, Homo sapiens
  misc_RNA (1)...(19): siRNA sense strand
gguuaucagaugcacuuua

SEQ ID NO: 1306600 - RNA, 19 nt, Homo sapiens
  misc_RNA (1)...(19): siRNA sense strand
caccaacauuugaagcuau

SEQ ID NO: 1306601 - RNA, 19 nt, Homo sapiens
  misc_RNA (1)...(19): siRNA sense strand
ugaggagccaccaacauuu

SEQ ID NO: 1306602 - RNA, 19 nt, Homo sapiens
  misc_RNA (1)...(19): siRNA sense strand
ggaaggaauacuugacagu

SEQ ID NO: 1306603 - RNA, 19 nt, Homo sapiens
  misc_RNA (1)...(19): siRNA sense strand
gaggaaggaauacuugaca

SEQ ID NO: 1306604 - RNA, 19 nt, Homo sapiens
  misc_RNA (1)...(19): siRNA sense strand
ccaguuccaaagugucuua

SEQ ID NO: 1306605 - RNA, 19 nt, Homo sapiens
  misc_RNA (1)...(19): siRNA sense strand
ugaguaucuugaugcagua

SEQ ID NO: 1306606 - RNA, 19 nt, Homo sapiens
  misc_RNA (1)...(19): siRNA sense strand
caccuuuagugaaguagaa

SEQ ID NO: 1306607 - RNA, 19 nt, Homo sapiens
  misc_RNA (1)...(19): siRNA sense strand
acagauaucaggauuugga

SEQ ID NO: 1306608 - RNA, 19 nt, Homo sapiens
  misc_RNA (1)...(19): siRNA sense strand
ucauugcugugauuguuau

SEQ ID NO: 1306609 - RNA, 19 nt, Homo sapiens
  misc_RNA (1)...(19): siRNA sense strand
ucagaugcacuuuauuugu

SEQ ID NO: 1306610 - RNA, 19 nt, Homo sapiens
  misc_RNA (1)...(19): siRNA sense strand
gugcugcuccagaguguaa

SEQ ID NO: 1306611 - RNA, 19 nt, Homo sapiens
  misc_RNA (1)...(19): siRNA sense strand
ggaaaacacaccuuuagug

SEQ ID NO: 1306612 - RNA, 19 nt, Homo sapiens
  misc_RNA (1)...(19): siRNA sense strand
aaggaucaguagcaauuug

SEQ ID NO: 1306613 - RNA, 19 nt, Homo sapiens
  misc_RNA (1)...(19): siRNA sense strand
uauauacgggauccuuuaa

SEQ ID NO: 1306614 - RNA, 19 nt, Homo sapiens
  misc_RNA (1)...(19): siRNA sense strand
ugaaguagaaguauuugag

SEQ ID NO: 1306615 - RNA, 19 nt, Homo sapiens
  misc_RNA (1)...(19): siRNA sense strand
cuugacaguuuggauguuu

SEQ ID NO: 1306616 - RNA, 19 nt, Homo sapiens
  misc_RNA (1)...(19): siRNA sense strand
cauauauacgggauccuuu

SEQ ID NO: 1306617 - RNA, 19 nt, Homo sapiens
  misc_RNA (1)...(19): siRNA sense strand
auauauacgggauccuuua

SEQ ID NO: 1306618 - RNA, 19 nt, Homo sapiens
  misc_RNA (1)...(19): siRNA sense strand
cuuaaaggaucaguagcaa

SEQ ID NO: 1306619 - RNA, 19 nt, Homo sapiens
  misc_RNA (1)...(19): siRNA sense strand
uaaaccugaggaaggaaua

SEQ ID NO: 1306620 - RNA, 19 nt, Homo sapiens
  misc_RNA (1)...(19): siRNA sense strand
agaugacgccuguuauaga

SEQ ID NO: 1306621 - RNA, 19 nt, Homo sapiens
  misc_RNA (1)...(19): siRNA sense strand
ugugauuguuauugccaua

SEQ ID NO: 1306622 - RNA, 19 nt, Homo sapiens
  misc_RNA (1)...(19): siRNA sense strand
gagagcacgauuuauugug

SEQ ID NO: 1306623 - RNA, 19 nt, Homo sapiens
  misc_RNA (1)...(19): siRNA sense strand
gaaguauuugaguaucuug

SEQ ID NO: 1306624 - RNA, 19 nt, Homo sapiens
  misc_RNA (1)...(19): siRNA sense strand
ggcuaccugucucagauga

SEQ ID NO: 1306625 - RNA, 19 nt, Homo sapiens
  misc_RNA (1)...(19): siRNA sense strand
gauaucaggauuuggaaaa

SEQ ID NO: 1306626 - RNA, 19 nt, Homo sapiens
  misc_RNA (1)...(19): siRNA sense strand
ccucuugccacccauacua

SEQ ID NO: 1306627 - RNA, 19 nt, Homo sapiens
  misc_RNA (1)...(19): siRNA sense strand
ccaugguguugcugcugua

SEQ ID NO: 1306628 - RNA, 19 nt, Homo sapiens
  misc_RNA (1)...(19): siRNA sense strand
cagaugacgccuguuauag

SEQ ID NO: 1306629 - RNA, 19 nt, Homo sapiens
  misc_RNA (1)...(19): siRNA sense strand
cagaugguggagcugaaua

SEQ ID NO: 1306630 - RNA, 19 nt, Homo sapiens
  misc_RNA (1)...(19): siRNA sense strand
gucauugcugugauuguua

SEQ ID NO: 1306631 - RNA, 19 nt, Homo sapiens
  misc_RNA (1)...(19): siRNA sense strand
ggagccaccaacauuugaa

SEQ ID NO: 1306632 - RNA, 19 nt, Homo sapiens
  misc_RNA (1)...(19): siRNA sense strand
uuggugaacgaguagauua

SEQ ID NO: 1306633 - RNA, 19 nt, Homo sapiens
  misc_RNA (1)...(19): siRNA sense strand
gcgcuuuccuggguugcuu

SEQ ID NO: 1306634 - RNA, 19 nt, Homo sapiens
  misc_RNA (1)...(19): siRNA sense strand
uacuacaaagcaacaguua

SEQ ID NO: 1306635 - RNA, 19 nt, Homo sapiens
  misc_RNA (1)...(19): siRNA sense strand
cuugaugcaguaacuuaua

SEQ ID NO: 1306636 - RNA, 19 nt, Homo sapiens
  misc_RNA (1)...(19): siRNA sense strand
aaacauguccauauauacg

SEQ ID NO: 1306637 - RNA, 19 nt, Homo sapiens
  misc_RNA (1)...(19): siRNA sense strand
guguaaaguggucaaaugu

SEQ ID NO: 1306638 - RNA, 19 nt, Homo sapiens
  misc_RNA (1)...(19): siRNA sense strand
cuuacgaguuugguuauca

SEQ ID NO: 1306639 - RNA, 19 nt, Homo sapiens
  misc_RNA (1)...(19): siRNA sense strand
uacgggauccuuuaaaugg

SEQ ID NO: 1306640 - RNA, 19 nt, Homo sapiens
  misc_RNA (1)...(19): siRNA sense strand
gcagaugguggagcugaau

SEQ ID NO: 1306641 - RNA, 19 nt, Homo sapiens
  misc_RNA (1)...(19): siRNA sense strand
aaccaaaacccuacuauga

SEQ ID NO: 1306642 - RNA, 19 nt, Homo sapiens
  misc_RNA (1)...(19): siRNA sense strand
uugaugcaguaacuuauag

SEQ ID NO: 1306643 - RNA, 19 nt, Homo sapiens
  misc_RNA (1)...(19): siRNA sense strand
ggagcugaauaugccacuu

SEQ ID NO: 1306644 - RNA, 19 nt, Homo sapiens
  misc_RNA (1)...(19): siRNA sense strand
cgauggcagcgacacaauu

SEQ ID NO: 1306645 - RNA, 19 nt, Homo sapiens
  misc_RNA (1)...(19): siRNA sense strand
gauccauuuucacuuauug

SEQ ID NO: 1306646 - RNA, 19 nt, Homo sapiens
  misc_RNA (1)...(19): siRNA sense strand
ggagagagcacgauuuauu

SEQ ID NO: 1306647 - RNA, 19 nt, Homo sapiens
  misc_RNA (1)...(19): siRNA sense strand
agagaaacauguccauaua

SEQ ID NO: 1306648 - RNA, 19 nt, Homo sapiens
  misc_RNA (1)...(19): siRNA sense strand
cagaugcacuuuauuugua

SEQ ID NO: 1306649 - RNA, 19 nt, Homo sapiens
  misc_RNA (1)...(19): siRNA sense strand
ggacuuacgaguuugguua

SEQ ID NO: 1306650 - RNA, 19 nt, Homo sapiens
  misc_RNA (1)...(19): siRNA sense strand
aaacagauaucaggauuug

SEQ ID NO: 1306651 - RNA, 19 nt, Homo sapiens
  misc_RNA (1)...(19): siRNA sense strand
cuauggagcucauugguaa

SEQ ID NO: 1306652 - RNA, 19 nt, Homo sapiens
  misc_RNA (1)...(19): siRNA sense strand
aaacacaccuuuagugaag

SEQ ID NO: 1306653 - RNA, 19 nt, Homo sapiens
  misc_RNA (1)...(19): siRNA sense strand
gaacuuaaaggaucaguag

SEQ ID NO: 1306654 - RNA, 19 nt, Homo sapiens
  misc_RNA (1)...(19): siRNA sense strand
gaaaacagauaucaggauu

SEQ ID NO: 1306655 - RNA, 19 nt, Homo sapiens
  misc_RNA (1)...(19): siRNA sense strand
uaaaggaucaguagcaauu

SEQ ID NO: 1306656 - RNA, 19 nt, Homo sapiens
  misc_RNA (1)...(19): siRNA sense strand
aaaugggacuuacgaguuu

SEQ ID NO: 1306657 - RNA, 19 nt, Homo sapiens
  misc_RNA (1)...(19): siRNA sense strand
guuaucagaugcacuuuau

SEQ ID NO: 1306658 - RNA, 19 nt, Homo sapiens
  misc_RNA (1)...(19): siRNA sense strand
gagcugaauaugccacuua

SEQ ID NO: 1306659 - RNA, 19 nt, Homo sapiens
  misc_RNA (1)...(19): siRNA sense strand
ugagauuggugaacgagua

SEQ ID NO: 1306660 - RNA, 19 nt, Homo sapiens
  misc_RNA (1)...(19): siRNA sense strand
gugaacgaguagauuauaa

SEQ ID NO: 1306661 - RNA, 19 nt, Homo sapiens
  misc_RNA (1)...(19): siRNA sense strand
gagagagcacgauuuauug

SEQ ID NO: 1306662 - RNA, 19 nt, Homo sapiens
  misc_RNA (1)...(19): siRNA sense strand
caaaugggacuuacgaguu

SEQ ID NO: 1306663 - RNA, 19 nt, Homo sapiens
  misc_RNA (1)...(19): siRNA sense strand
ggucauugcugugauuguu

SEQ ID NO: 1306664 - RNA, 19 nt, Homo sapiens
  misc_RNA (1)...(19): siRNA sense strand
ccagauccauuuucacuua

SEQ ID NO: 1306665 - RNA, 19 nt, Homo sapiens
  misc_RNA (1)...(19): siRNA sense strand
gaaggaauacuugacaguu

SEQ ID NO: 1306666 - RNA, 19 nt, Homo sapiens
  misc_RNA (1)...(19): siRNA sense strand
aaggaauacuugacaguuu

SEQ ID NO: 1306667 - RNA, 19 nt, Homo sapiens
  misc_RNA (1)...(19): siRNA sense strand
ucagaugacgccuguuaua

SEQ ID NO: 1306668 - RNA, 19 nt, Homo sapiens
  misc_RNA (1)...(19): siRNA sense strand
gaaaacacaccuuuaguga

SEQ ID NO: 1306669 - RNA, 19 nt, Homo sapiens
  misc_RNA (1)...(19): siRNA sense strand
gaugacgccuguuauagag

SEQ ID NO: 1306670 - RNA, 19 nt, Homo sapiens
  misc_RNA (1)...(19): siRNA sense strand
gagaaacauguccauauau

SEQ ID NO: 1306671 - RNA, 19 nt, Homo sapiens
  misc_RNA (1)...(19): siRNA sense strand
ccacuuaccagacuaaauc

SEQ ID NO: 1306672 - RNA, 19 nt, Homo sapiens
  misc_RNA (1)...(19): siRNA sense strand
acgaguagauuauaagugu

SEQ ID NO: 1306673 - RNA, 19 nt, Homo sapiens
  misc_RNA (1)...(19): siRNA sense strand
cuacaaagcaacaguuaug

SEQ ID NO: 1306674 - RNA, 19 nt, Homo sapiens
  misc_RNA (1)...(19): siRNA sense strand
ccaccaacauuugaagcua

SEQ ID NO: 1306675 - RNA, 19 nt, Homo sapiens
  misc_RNA (1)...(19): siRNA sense strand
uauacgggauccuuuaaau

SEQ ID NO: 1306676 - RNA, 19 nt, Homo sapiens
  misc_RNA (1)...(19): siRNA sense strand
cgaguuugguuaucagaug

SEQ ID NO: 1306677 - RNA, 19 nt, Homo sapiens
  misc_RNA (1)...(19): siRNA sense strand
gaacgaguagauuauaagu

SEQ ID NO: 1306678 - RNA, 19 nt, Homo sapiens
  misc_RNA (1)...(19): siRNA sense strand
gugaggagccaccaacauu

SEQ ID NO: 1306679 - RNA, 19 nt, Homo sapiens
  misc_RNA (1)...(19): siRNA sense strand
gauggcagcgacacaauug

SEQ ID NO: 1306680 - RNA, 19 nt, Homo sapiens
  misc_RNA (1)...(19): siRNA sense strand
ucucagaugacgccuguua

SEQ ID NO: 1306681 - RNA, 19 nt, Homo sapiens
  misc_RNA (1)...(19): siRNA sense strand
gaggagccaccaacauuug

SEQ ID NO: 1306682 - RNA, 19 nt, Homo sapiens
  misc_RNA (1)...(19): siRNA sense strand
gcuauggagcucauuggua

SEQ ID NO: 1306683 - RNA, 19 nt, Homo sapiens
  misc_RNA (1)...(19): siRNA sense strand
acacaccuuuagugaagua

SEQ ID NO: 1306684 - RNA, 19 nt, Homo sapiens
  misc_RNA (1)...(19): siRNA sense strand
uagagaaacauguccauau

SEQ ID NO: 1306685 - RNA, 19 nt, Homo sapiens
  misc_RNA (1)...(19): siRNA sense strand
guuccaaagugucuuaaag

SEQ ID NO: 1306686 - RNA, 19 nt, Homo sapiens
  misc_RNA (1)...(19): siRNA sense strand
ggugaacgaguagauuaua

SEQ ID NO: 1306687 - RNA, 19 nt, Homo sapiens
  misc_RNA (1)...(19): siRNA sense strand
gaaguagaaguauuugagu

SEQ ID NO: 1306688 - RNA, 19 nt, Homo sapiens
  misc_RNA (1)...(19): siRNA sense strand
gaaacauguccauauauac

SEQ ID NO: 1306689 - RNA, 19 nt, Homo sapiens
  misc_RNA (1)...(19): siRNA sense strand
ugacgccuguuauagagaa

SEQ ID NO: 1306690 - RNA, 19 nt, Homo sapiens
  misc_RNA (1)...(19): siRNA sense strand
cgaguagauuauaagugua

SEQ ID NO: 1306691 - RNA, 19 nt, Homo sapiens
  misc_RNA (1)...(19): siRNA sense strand
gcacuuuauuuguaaugag

SEQ ID NO: 1306692 - RNA, 19 nt, Homo sapiens
  misc_RNA (1)...(19): siRNA sense strand
guagaaguauuugaguauc

SEQ ID NO: 1306693 - RNA, 19 nt, Homo sapiens
  misc_RNA (1)...(19): siRNA sense strand
guauuugaguaucuugaug

SEQ ID NO: 1306694 - RNA, 19 nt, Homo sapiens
  misc_RNA (1)...(19): siRNA sense strand
aggaauacuugacaguuug

SEQ ID NO: 1306695 - RNA, 19 nt, Homo sapiens
  misc_RNA (1)...(19): siRNA sense strand
ccaaaacccuacuaugaga

SEQ ID NO: 1306696 - RNA, 19 nt, Homo sapiens
  misc_RNA (1)...(19): siRNA sense strand
aguguaaaguggucaaaug

SEQ ID NO: 1306697 - RNA, 19 nt, Homo sapiens
  misc_RNA (1)...(19): siRNA sense strand
ccacccauacuauuuguga

SEQ ID NO: 1306698 - RNA, 19 nt, Homo sapiens
  misc_RNA (1)...(19): siRNA sense strand
uuggagagagcacgauuua

SEQ ID NO: 1306699 - RNA, 19 nt, Homo sapiens
  misc_RNA (1)...(19): siRNA sense strand
gguuaucagaugcacuuua

SEQ ID NO: 1306700 - RNA, 19 nt, Homo sapiens
  misc_RNA (1)...(19): siRNA sense strand
caccaacauuugaagcuau

SEQ ID NO: 1306701 - RNA, 19 nt, Homo sapiens
  misc_RNA (1)...(19): siRNA sense strand
ugaggagccaccaacauuu

SEQ ID NO: 1306702 - RNA, 19 nt, Homo sapiens
  misc_RNA (1)...(19): siRNA sense strand
ggaaggaauacuugacagu

SEQ ID NO: 1306703 - RNA, 19 nt, Homo sapiens
  misc_RNA (1)...(19): siRNA sense strand
gaggaaggaauacuugaca

SEQ ID NO: 1306704 - RNA, 19 nt, Homo sapiens
  misc_RNA (1)...(19): siRNA sense strand
ccaguuccaaagugucuua

SEQ ID NO: 1306705 - RNA, 19 nt, Homo sapiens
  misc_RNA (1)...(19): siRNA sense strand
ugaguaucuugaugcagua

SEQ ID NO: 1306706 - RNA, 19 nt, Homo sapiens
  misc_RNA (1)...(19): siRNA sense strand
caccuuuagugaaguagaa

SEQ ID NO: 1306707 - RNA, 19 nt, Homo sapiens
  misc_RNA (1)...(19): siRNA sense strand
acagauaucaggauuugga

SEQ ID NO: 1306708 - RNA, 19 nt, Homo sapiens
  misc_RNA (1)...(19): siRNA sense strand
ucauugcugugauuguuau

SEQ ID NO: 1306709 - RNA, 19 nt, Homo sapiens
  misc_RNA (1)...(19): siRNA sense strand
ucagaugcacuuuauuugu

SEQ ID NO: 1306710 - RNA, 19 nt, Homo sapiens
  misc_RNA (1)...(19): siRNA sense strand
gugcugcuccagaguguaa

SEQ ID NO: 1306711 - RNA, 19 nt, Homo sapiens
  misc_RNA (1)...(19): siRNA sense strand
ggaaaacacaccuuuagug

SEQ ID NO: 1306712 - RNA, 19 nt, Homo sapiens
  misc_RNA (1)...(19): siRNA sense strand
aaggaucaguagcaauuug

SEQ ID NO: 1306713 - RNA, 19 nt, Homo sapiens
  misc_RNA (1)...(19): siRNA sense strand
uauauacgggauccuuuaa

SEQ ID NO: 1306714 - RNA, 19 nt, Homo sapiens
  misc_RNA (1)...(19): siRNA sense strand
ugaaguagaaguauuugag

SEQ ID NO: 1306715 - RNA, 19 nt, Homo sapiens
  misc_RNA (1)...(19): siRNA sense strand
cuugacaguuuggauguuu

SEQ ID NO: 1306716 - RNA, 19 nt, Homo sapiens
  misc_RNA (1)...(19): siRNA sense strand
cauauauacgggauccuuu

SEQ ID NO: 1306717 - RNA, 19 nt, Homo sapiens
  misc_RNA (1)...(19): siRNA sense strand
auauauacgggauccuuua

SEQ ID NO: 1306718 - RNA, 19 nt, Homo sapiens
  misc_RNA (1)...(19): siRNA sense strand
cuuaaaggaucaguagcaa

SEQ ID NO: 1306719 - RNA, 19 nt, Homo sapiens
  misc_RNA (1)...(19): siRNA sense strand
uaaaccugaggaaggaaua

SEQ ID NO: 1306720 - RNA, 19 nt, Homo sapiens
  misc_RNA (1)...(19): siRNA sense strand
agaugacgccuguuauaga

SEQ ID NO: 1306721 - RNA, 19 nt, Homo sapiens
  misc_RNA (1)...(19): siRNA sense strand
ugugauuguuauugccaua

SEQ ID NO: 1306722 - RNA, 19 nt, Homo sapiens
  misc_RNA (1)...(19): siRNA sense strand
gagagcacgauuuauugug

SEQ ID NO: 1306723 - RNA, 19 nt, Homo sapiens
  misc_RNA (1)...(19): siRNA sense strand
gaaguauuugaguaucuug

SEQ ID NO: 1306724 - RNA, 19 nt, Homo sapiens
  misc_RNA (1)...(19): siRNA sense strand
ggcuaccugucucagauga

SEQ ID NO: 1306725 - RNA, 19 nt, Homo sapiens
  misc_RNA (1)...(19): siRNA sense strand
gauaucaggauuuggaaaa

SEQ ID NO: 1306726 - RNA, 19 nt, Homo sapiens
  misc_RNA (1)...(19): siRNA sense strand
ccucuugccacccauacua

SEQ ID NO: 1306727 - RNA, 19 nt, Homo sapiens
  misc_RNA (1)...(19): siRNA sense strand
ccaugguguugcugcugua

SEQ ID NO: 1306728 - RNA, 19 nt, Homo sapiens
  misc_RNA (1)...(19): siRNA sense strand
cagaugacgccuguuauag

SEQ ID NO: 1306729 - RNA, 19 nt, Homo sapiens
  misc_RNA (1)...(19): siRNA sense strand
cagaugguggagcugaaua

SEQ ID NO: 1306730 - RNA, 19 nt, Homo sapiens
  misc_RNA (1)...(19): siRNA sense strand
gucauugcugugauuguua

SEQ ID NO: 1306731 - RNA, 19 nt, Homo sapiens
  misc_RNA (1)...(19): siRNA sense strand
ggagccaccaacauuugaa

SEQ ID NO: 1306732 - RNA, 19 nt, Homo sapiens
  misc_RNA (1)...(19): siRNA sense strand
uuggugaacgaguagauua

SEQ ID NO: 1306733 - RNA, 19 nt, Homo sapiens
  misc_RNA (1)...(19): siRNA sense strand
gcgcuuuccuggguugcuu

SEQ ID NO: 1306734 - RNA, 19 nt, Homo sapiens
  misc_RNA (1)...(19): siRNA sense strand
uacuacaaagcaacaguua

SEQ ID NO: 1306735 - RNA, 19 nt, Homo sapiens
  misc_RNA (1)...(19): siRNA sense strand
cuugaugcaguaacuuaua

SEQ ID NO: 1306736 - RNA, 19 nt, Homo sapiens
  misc_RNA (1)...(19): siRNA sense strand
aaacauguccauauauacg

SEQ ID NO: 1306737 - RNA, 19 nt, Homo sapiens
  misc_RNA (1)...(19): siRNA sense strand
guguaaaguggucaaaugu

SEQ ID NO: 1306738 - RNA, 19 nt, Homo sapiens
  misc_RNA (1)...(19): siRNA sense strand
cuuacgaguuugguuauca

SEQ ID NO: 1306739 - RNA, 19 nt, Homo sapiens
  misc_RNA (1)...(19): siRNA sense strand
uacgggauccuuuaaaugg

SEQ ID NO: 1306740 - RNA, 19 nt, Homo sapiens
  misc_RNA (1)...(19): siRNA sense strand
gcagaugguggagcugaau

SEQ ID NO: 1306741 - RNA, 19 nt, Homo sapiens
  misc_RNA (1)...(19): siRNA sense strand
aaccaaaacccuacuauga

SEQ ID NO: 1306742 - RNA, 19 nt, Homo sapiens
  misc_RNA (1)...(19): siRNA sense strand
uugaugcaguaacuuauag

SEQ ID NO: 1306743 - RNA, 19 nt, Homo sapiens
  misc_RNA (1)...(19): siRNA sense strand
ggagcugaauaugccacuu

SEQ ID NO: 1306744 - RNA, 19 nt, Homo sapiens
  misc_RNA (1)...(19): siRNA sense strand
cgauggcagcgacacaauu

SEQ ID NO: 1306745 - RNA, 19 nt, Homo sapiens
  misc_RNA (1)...(19): siRNA sense strand
gauccauuuucacuuauug

SEQ ID NO: 1306746 - RNA, 19 nt, Homo sapiens
  misc_RNA (1)...(19): siRNA sense strand
gaaccuagcugccuaugug

SEQ ID NO: 1306747 - RNA, 19 nt, Homo sapiens
  misc_RNA (1)...(19): siRNA sense strand
gaaggugaauggagagauu

SEQ ID NO: 1306748 - RNA, 19 nt, Homo sapiens
  misc_RNA (1)...(19): siRNA sense strand
ggagcaggcugaauucuca

SEQ ID NO: 1306749 - RNA, 19 nt, Homo sapiens
  misc_RNA (1)...(19): siRNA sense strand
gcaaggauggcagagauua

SEQ ID NO: 1306750 - RNA, 19 nt, Homo sapiens
  misc_RNA (1)...(19): siRNA sense strand
ggacaucugugccgucaag

SEQ ID NO: 1306751 - RNA, 19 nt, Homo sapiens
  misc_RNA (1)...(19): siRNA sense strand
ucauuaagaucuuccauuc

SEQ ID NO: 1306752 - RNA, 19 nt, Homo sapiens
  misc_RNA (1)...(19): siRNA sense strand
guggacagcugcucggaaa

SEQ ID NO: 1306753 - RNA, 19 nt, Homo sapiens
  misc_RNA (1)...(19): siRNA sense strand
ggaaagaucaaaguggaaa

SEQ ID NO: 1306754 - RNA, 19 nt, Homo sapiens
  misc_RNA (1)...(19): siRNA sense strand
uggcagagauuacaucauc

SEQ ID NO: 1306755 - RNA, 19 nt, Homo sapiens
  misc_RNA (1)...(19): siRNA sense strand
ucucucagcucauuaagau

SEQ ID NO: 1306756 - RNA, 19 nt, Homo sapiens
  misc_RNA (1)...(19): siRNA sense strand
caaccugccuaauggcuau

SEQ ID NO: 1306757 - RNA, 19 nt, Homo sapiens
  misc_RNA (1)...(19): siRNA sense strand
cagcaaggauggcagagau

SEQ ID NO: 1306758 - RNA, 19 nt, Homo sapiens
  misc_RNA (1)...(19): siRNA sense strand
gaucgaugaugcccauaca

SEQ ID NO: 1306759 - RNA, 19 nt, Homo sapiens
  misc_RNA (1)...(19): siRNA sense strand
gaguggagcaggcugaauu

SEQ ID NO: 1306760 - RNA, 19 nt, Homo sapiens
  misc_RNA (1)...(19): siRNA sense strand
gguguucucucagcucauu

SEQ ID NO: 1306761 - RNA, 19 nt, Homo sapiens
  misc_RNA (1)...(19): siRNA sense strand
ggacaugcaggucgugaga

SEQ ID NO: 1306762 - RNA, 19 nt, Homo sapiens
  misc_RNA (1)...(19): siRNA sense strand
gcugauggccgaccuuguu

SEQ ID NO: 1306763 - RNA, 19 nt, Homo sapiens
  misc_RNA (1)...(19): siRNA sense strand
ggacagcugcucggaaaug

SEQ ID NO: 1306764 - RNA, 19 nt, Homo sapiens
  misc_RNA (1)...(19): siRNA sense strand
gauccaacuacaaggcuua

SEQ ID NO: 1306765 - RNA, 19 nt, Homo sapiens
  misc_RNA (1)...(19): siRNA sense strand
gaccugcaacgcccagaua

SEQ ID NO: 1306766 - RNA, 19 nt, Homo sapiens
  misc_RNA (1)...(19): siRNA sense strand
cagcugcucggaaauguuu

SEQ ID NO: 1306767 - RNA, 19 nt, Homo sapiens
  misc_RNA (1)...(19): siRNA sense strand
acaugcaggucgugagaaa

SEQ ID NO: 1306768 - RNA, 19 nt, Homo sapiens
  misc_RNA (1)...(19): siRNA sense strand
gguaauggacagcucaaug

SEQ ID NO: 1306769 - RNA, 19 nt, Homo sapiens
  misc_RNA (1)...(19): siRNA sense strand
gaacuggaaggccaacaca

SEQ ID NO: 1306770 - RNA, 19 nt, Homo sapiens
  misc_RNA (1)...(19): siRNA sense strand
cagacuggucgaaguauuu

SEQ ID NO: 1306771 - RNA, 19 nt, Homo sapiens
  misc_RNA (1)...(19): siRNA sense strand
cgacauccgcauccagaaa

SEQ ID NO: 1306772 - RNA, 19 nt, Homo sapiens
  misc_RNA (1)...(19): siRNA sense strand
ggacaugcccacgcuggaa

SEQ ID NO: 1306773 - RNA, 19 nt, Homo sapiens
  misc_RNA (1)...(19): siRNA sense strand
gaauggagagauugagauc

SEQ ID NO: 1306774 - RNA, 19 nt, Homo sapiens
  misc_RNA (1)...(19): siRNA sense strand
cauacagacuggucgaagu

SEQ ID NO: 1306775 - RNA, 19 nt, Homo sapiens
  misc_RNA (1)...(19): siRNA sense strand
ccaaaguggugagcagauc

SEQ ID NO: 1306776 - RNA, 19 nt, Homo sapiens
  misc_RNA (1)...(19): siRNA sense strand
gauuggagagcauguggaa

SEQ ID NO: 1306777 - RNA, 19 nt, Homo sapiens
  misc_RNA (1)...(19): siRNA sense strand
cgugagaaaugggaccaaa

SEQ ID NO: 1306778 - RNA, 19 nt, Homo sapiens
  misc_RNA (1)...(19): siRNA sense strand
cgaccuuguugucuccaaa

SEQ ID NO: 1306779 - RNA, 19 nt, Homo sapiens
  misc_RNA (1)...(19): siRNA sense strand
gacagcugcucggaaaugu

SEQ ID NO: 1306780 - RNA, 19 nt, Homo sapiens
  misc_RNA (1)...(19): siRNA sense strand
gaaugggaaagaucaaagu

SEQ ID NO: 1306781 - RNA, 19 nt, Homo sapiens
  misc_RNA (1)...(19): siRNA sense strand
ggaaugggaaagaucaaag

SEQ ID NO: 1306782 - RNA, 19 nt, Homo sapiens
  misc_RNA (1)...(19): siRNA sense strand
auacagacuggucgaagua

SEQ ID NO: 1306783 - RNA, 19 nt, Homo sapiens
  misc_RNA (1)...(19): siRNA sense strand
gcaaccugaggaagucuuu

SEQ ID NO: 1306784 - RNA, 19 nt, Homo sapiens
  misc_RNA (1)...(19): siRNA sense strand
gcagagauuacaucaucga

SEQ ID NO: 1306785 - RNA, 19 nt, Homo sapiens
  misc_RNA (1)...(19): siRNA sense strand
ucuccaggauccagccuuu

SEQ ID NO: 1306786 - RNA, 19 nt, Homo sapiens
  misc_RNA (1)...(19): siRNA sense strand
gcagcaagcccuggguguu

SEQ ID NO: 1306787 - RNA, 19 nt, Homo sapiens
  misc_RNA (1)...(19): siRNA sense strand
ggucaucggccugcaguau

SEQ ID NO: 1306788 - RNA, 19 nt, Homo sapiens
  misc_RNA (1)...(19): siRNA sense strand
gcuuguggagcaaacauuu

SEQ ID NO: 1306789 - RNA, 19 nt, Homo sapiens
  misc_RNA (1)...(19): siRNA sense strand
guaauggacagcucaaugc

SEQ ID NO: 1306790 - RNA, 19 nt, Homo sapiens
  misc_RNA (1)...(19): siRNA sense strand
uggccaaccugccuaaugg

SEQ ID NO: 1306791 - RNA, 19 nt, Homo sapiens
  misc_RNA (1)...(19): siRNA sense strand
ccacgcccauuguucaaag

SEQ ID NO: 1306792 - RNA, 19 nt, Homo sapiens
  misc_RNA (1)...(19): siRNA sense strand
acagacuggucgaaguauu

SEQ ID NO: 1306793 - RNA, 19 nt, Homo sapiens
  misc_RNA (1)...(19): siRNA sense strand
ugagaaaugggaccaaagu

SEQ ID NO: 1306794 - RNA, 19 nt, Homo sapiens
  misc_RNA (1)...(19): siRNA sense strand
gcugucaacucucucuacu

SEQ ID NO: 1306795 - RNA, 19 nt, Homo sapiens
  misc_RNA (1)...(19): siRNA sense strand
gagaaaugggaccaaagug

SEQ ID NO: 1306796 - RNA, 19 nt, Homo sapiens
  misc_RNA (1)...(19): siRNA sense strand
gcuggaaugggaaagauca

SEQ ID NO: 1306797 - RNA, 19 nt, Homo sapiens
  misc_RNA (1)...(19): siRNA sense strand
gggaaagaucaaaguggaa

SEQ ID NO: 1306798 - RNA, 19 nt, Homo sapiens
  misc_RNA (1)...(19): siRNA sense strand
gugaauggagagauugaga

SEQ ID NO: 1306799 - RNA, 19 nt, Homo sapiens
  misc_RNA (1)...(19): siRNA sense strand
uugccagccuguucucuga

SEQ ID NO: 1306800 - RNA, 19 nt, Homo sapiens
  misc_RNA (1)...(19): siRNA sense strand
guggugagcagauccuuca

SEQ ID NO: 1306801 - RNA, 19 nt, Homo sapiens
  misc_RNA (1)...(19): siRNA sense strand
cugagaaguucccgcuugu

SEQ ID NO: 1306802 - RNA, 19 nt, Homo sapiens
  misc_RNA (1)...(19): siRNA sense strand
ccaccgaggccuucaucga

SEQ ID NO: 1306803 - RNA, 19 nt, Homo sapiens
  misc_RNA (1)...(19): siRNA sense strand
gaugaugcccauacagacu

SEQ ID NO: 1306804 - RNA, 19 nt, Homo sapiens
  misc_RNA (1)...(19): siRNA sense strand
ucaucggccugcaguaugg

SEQ ID NO: 1306805 - RNA, 19 nt, Homo sapiens
  misc_RNA (1)...(19): siRNA sense strand
uuggagagcauguggaaga

SEQ ID NO: 1306806 - RNA, 19 nt, Homo sapiens
  misc_RNA (1)...(19): siRNA sense strand
ucgaugaugcccauacaga

SEQ ID NO: 1306807 - RNA, 19 nt, Homo sapiens
  misc_RNA (1)...(19): siRNA sense strand
ggucacagccccacacuuc

SEQ ID NO: 1306808 - RNA, 19 nt, Homo sapiens
  misc_RNA (1)...(19): siRNA sense strand
cagcaagcccuggguguuc

SEQ ID NO: 1306809 - RNA, 19 nt, Homo sapiens
  misc_RNA (1)...(19): siRNA sense strand
ucuacuccgucuacaacuu

SEQ ID NO: 1306810 - RNA, 19 nt, Homo sapiens
  misc_RNA (1)...(19): siRNA sense strand
ggaaaaccagcuugacuuc

SEQ ID NO: 1306811 - RNA, 19 nt, Homo sapiens
  misc_RNA (1)...(19): siRNA sense strand
cagccuguucucugacuaa

SEQ ID NO: 1306812 - RNA, 19 nt, Homo sapiens
  misc_RNA (1)...(19): siRNA sense strand
cuaacagccucagcacauc

SEQ ID NO: 1306813 - RNA, 19 nt, Homo sapiens
  misc_RNA (1)...(19): siRNA sense strand
uacaaggcuuacaggagaa

SEQ ID NO: 1306814 - RNA, 19 nt, Homo sapiens
  misc_RNA (1)...(19): siRNA sense strand
cuuguugucuccaaaauga

SEQ ID NO: 1306815 - RNA, 19 nt, Homo sapiens
  misc_RNA (1)...(19): siRNA sense strand
gaaccuagcugccuaugug

SEQ ID NO: 1306816 - RNA, 19 nt, Homo sapiens
  misc_RNA (1)...(19): siRNA sense strand
gaaggugaauggagagauu

SEQ ID NO: 1306817 - RNA, 19 nt, Homo sapiens
  misc_RNA (1)...(19): siRNA sense strand
ggagcaggcugaauucuca

SEQ ID NO: 1306818 - RNA, 19 nt, Homo sapiens
  misc_RNA (1)...(19): siRNA sense strand
gcaaggauggcagagauua

SEQ ID NO: 1306819 - RNA, 19 nt, Homo sapiens
  misc_RNA (1)...(19): siRNA sense strand
ggacaucugugccgucaag

SEQ ID NO: 1306820 - RNA, 19 nt, Homo sapiens
  misc_RNA (1)...(19): siRNA sense strand
ucauuaagaucuuccauuc

SEQ ID NO: 1306821 - RNA, 19 nt, Homo sapiens
  misc_RNA (1)...(19): siRNA sense strand
guggacagcugcucggaaa

SEQ ID NO: 1306822 - RNA, 19 nt, Homo sapiens
  misc_RNA (1)...(19): siRNA sense strand
ggaaagaucaaaguggaaa

SEQ ID NO: 1306823 - RNA, 19 nt, Homo sapiens
  misc_RNA (1)...(19): siRNA sense strand
uggcagagauuacaucauc

SEQ ID NO: 1306824 - RNA, 19 nt, Homo sapiens
  misc_RNA (1)...(19): siRNA sense strand
ucucucagcucauuaagau

SEQ ID NO: 1306825 - RNA, 19 nt, Homo sapiens
  misc_RNA (1)...(19): siRNA sense strand
caaccugccuaauggcuau

SEQ ID NO: 1306826 - RNA, 19 nt, Homo sapiens
  misc_RNA (1)...(19): siRNA sense strand
cagcaaggauggcagagau

SEQ ID NO: 1306827 - RNA, 19 nt, Homo sapiens
  misc_RNA (1)...(19): siRNA sense strand
gaucgaugaugcccauaca

SEQ ID NO: 1306828 - RNA, 19 nt, Homo sapiens
  misc_RNA (1)...(19): siRNA sense strand
gaguggagcaggcugaauu

SEQ ID NO: 1306829 - RNA, 19 nt, Homo sapiens
  misc_RNA (1)...(19): siRNA sense strand
gguguucucucagcucauu

SEQ ID NO: 1306830 - RNA, 19 nt, Homo sapiens
  misc_RNA (1)...(19): siRNA sense strand
ggacaugcaggucgugaga

SEQ ID NO: 1306831 - RNA, 19 nt, Homo sapiens
  misc_RNA (1)...(19): siRNA sense strand
gcugauggccgaccuuguu

SEQ ID NO: 1306832 - RNA, 19 nt, Homo sapiens
  misc_RNA (1)...(19): siRNA sense strand
ggacagcugcucggaaaug

SEQ ID NO: 1306833 - RNA, 19 nt, Homo sapiens
  misc_RNA (1)...(19): siRNA sense strand
gauccaacuacaaggcuua

SEQ ID NO: 1306834 - RNA, 19 nt, Homo sapiens
  misc_RNA (1)...(19): siRNA sense strand
gaccugcaacgcccagaua

SEQ ID NO: 1306835 - RNA, 19 nt, Homo sapiens
  misc_RNA (1)...(19): siRNA sense strand
cagcugcucggaaauguuu

SEQ ID NO: 1306836 - RNA, 19 nt, Homo sapiens
  misc_RNA (1)...(19): siRNA sense strand
acaugcaggucgugagaaa

SEQ ID NO: 1306837 - RNA, 19 nt, Homo sapiens
  misc_RNA (1)...(19): siRNA sense strand
gguaauggacagcucaaug

SEQ ID NO: 1306838 - RNA, 19 nt, Homo sapiens
  misc_RNA (1)...(19): siRNA sense strand
gaacuggaaggccaacaca

SEQ ID NO: 1306839 - RNA, 19 nt, Homo sapiens
  misc_RNA (1)...(19): siRNA sense strand
cagacuggucgaaguauuu

SEQ ID NO: 1306840 - RNA, 19 nt, Homo sapiens
  misc_RNA (1)...(19): siRNA sense strand
cgacauccgcauccagaaa

SEQ ID NO: 1306841 - RNA, 19 nt, Homo sapiens
  misc_RNA (1)...(19): siRNA sense strand
ggacaugcccacgcuggaa

SEQ ID NO: 1306842 - RNA, 19 nt, Homo sapiens
  misc_RNA (1)...(19): siRNA sense strand
gaauggagagauugagauc

SEQ ID NO: 1306843 - RNA, 19 nt, Homo sapiens
  misc_RNA (1)...(19): siRNA sense strand
cauacagacuggucgaagu

SEQ ID NO: 1306844 - RNA, 19 nt, Homo sapiens
  misc_RNA (1)...(19): siRNA sense strand
ccaaaguggugagcagauc

SEQ ID NO: 1306845 - RNA, 19 nt, Homo sapiens
  misc_RNA (1)...(19): siRNA sense strand
gauuggagagcauguggaa

SEQ ID NO: 1306846 - RNA, 19 nt, Homo sapiens
  misc_RNA (1)...(19): siRNA sense strand
cgugagaaaugggaccaaa

SEQ ID NO: 1306847 - RNA, 19 nt, Homo sapiens
  misc_RNA (1)...(19): siRNA sense strand
cgaccuuguugucuccaaa

SEQ ID NO: 1306848 - RNA, 19 nt, Homo sapiens
  misc_RNA (1)...(19): siRNA sense strand
gacagcugcucggaaaugu

SEQ ID NO: 1306849 - RNA, 19 nt, Homo sapiens
  misc_RNA (1)...(19): siRNA sense strand
gaaugggaaagaucaaagu

SEQ ID NO: 1306850 - RNA, 19 nt, Homo sapiens
  misc_RNA (1)...(19): siRNA sense strand
ggaaugggaaagaucaaag

SEQ ID NO: 1306851 - RNA, 19 nt, Homo sapiens
  misc_RNA (1)...(19): siRNA sense strand
auacagacuggucgaagua

SEQ ID NO: 1306852 - RNA, 19 nt, Homo sapiens
  misc_RNA (1)...(19): siRNA sense strand
gcagagauuacaucaucga

SEQ ID NO: 1306853 - RNA, 19 nt, Homo sapiens
  misc_RNA (1)...(19): siRNA sense strand
ucuccaggauccagccuuu

SEQ ID NO: 1306854 - RNA, 19 nt, Homo sapiens
  misc_RNA (1)...(19): siRNA sense strand
gcagcaagcccuggguguu

SEQ ID NO: 1306855 - RNA, 19 nt, Homo sapiens
  misc_RNA (1)...(19): siRNA sense strand
ggucaucggccugcaguau

SEQ ID NO: 1306856 - RNA, 19 nt, Homo sapiens
  misc_RNA (1)...(19): siRNA sense strand
ccacgcccauuguucaaag

SEQ ID NO: 1306857 - RNA, 19 nt, Homo sapiens
  misc_RNA (1)...(19): siRNA sense strand
guaauggacagcucaaugc

SEQ ID NO: 1306858 - RNA, 19 nt, Homo sapiens
  misc_RNA (1)...(19): siRNA sense strand
uggccaaccugccuaaugg

SEQ ID NO: 1306859 - RNA, 19 nt, Homo sapiens
  misc_RNA (1)...(19): siRNA sense strand
gcuuguggagcaaacauuu

SEQ ID NO: 1306860 - RNA, 19 nt, Homo sapiens
  misc_RNA (1)...(19): siRNA sense strand
acagacuggucgaaguauu

SEQ ID NO: 1306861 - RNA, 19 nt, Homo sapiens
  misc_RNA (1)...(19): siRNA sense strand
ugagaaaugggaccaaagu

SEQ ID NO: 1306862 - RNA, 19 nt, Homo sapiens
  misc_RNA (1)...(19): siRNA sense strand
gcugucaacucucucuacu

SEQ ID NO: 1306863 - RNA, 19 nt, Homo sapiens
  misc_RNA (1)...(19): siRNA sense strand
gagaaaugggaccaaagug

SEQ ID NO: 1306864 - RNA, 19 nt, Homo sapiens
  misc_RNA (1)...(19): siRNA sense strand
gcuggaaugggaaagauca

SEQ ID NO: 1306865 - RNA, 19 nt, Homo sapiens
  misc_RNA (1)...(19): siRNA sense strand
gggaaagaucaaaguggaa

SEQ ID NO: 1306866 - RNA, 19 nt, Homo sapiens
  misc_RNA (1)...(19): siRNA sense strand
gugaauggagagauugaga

SEQ ID NO: 1306867 - RNA, 19 nt, Homo sapiens
  misc_RNA (1)...(19): siRNA sense strand
guggugagcagauccuuca

SEQ ID NO: 1306868 - RNA, 19 nt, Homo sapiens
  misc_RNA (1)...(19): siRNA sense strand
gaugaugcccauacagacu

SEQ ID NO: 1306869 - RNA, 19 nt, Homo sapiens
  misc_RNA (1)...(19): siRNA sense strand
ccaccgaggccuucaucga

SEQ ID NO: 1306870 - RNA, 19 nt, Homo sapiens
  misc_RNA (1)...(19): siRNA sense strand
cugagaaguucccgcuugu

SEQ ID NO: 1306871 - RNA, 19 nt, Homo sapiens
  misc_RNA (1)...(19): siRNA sense strand
ucaucggccugcaguaugg

SEQ ID NO: 1306872 - RNA, 19 nt, Homo sapiens
  misc_RNA (1)...(19): siRNA sense strand
uuggagagcauguggaaga

SEQ ID NO: 1306873 - RNA, 19 nt, Homo sapiens
  misc_RNA (1)...(19): siRNA sense strand
ucgaugaugcccauacaga

SEQ ID NO: 1306874 - RNA, 19 nt, Homo sapiens
  misc_RNA (1)...(19): siRNA sense strand
ggucacagccccacacuuc

SEQ ID NO: 1306875 - RNA, 19 nt, Homo sapiens
  misc_RNA (1)...(19): siRNA sense strand
cagcaagcccuggguguuc

SEQ ID NO: 1306876 - RNA, 19 nt, Homo sapiens
  misc_RNA (1)...(19): siRNA sense strand
ucuacuccgucuacaacuu

SEQ ID NO: 1306877 - RNA, 19 nt, Homo sapiens
  misc_RNA (1)...(19): siRNA sense strand
ggaaaaccagcuugacuuc

SEQ ID NO: 1306878 - RNA, 19 nt, Homo sapiens
  misc_RNA (1)...(19): siRNA sense strand
uacaaggcuuacaggagaa

SEQ ID NO: 1306879 - RNA, 19 nt, Homo sapiens
  misc_RNA (1)...(19): siRNA sense strand
cuuguugucuccaaaauga

SEQ ID NO: 1306880 - RNA, 19 nt, Homo sapiens
  misc_RNA (1)...(19): siRNA sense strand
gaaccuagcugccuaugug

SEQ ID NO: 1306881 - RNA, 19 nt, Homo sapiens
  misc_RNA (1)...(19): siRNA sense strand
gaaggugaauggagagauu

SEQ ID NO: 1306882 - RNA, 19 nt, Homo sapiens
  misc_RNA (1)...(19): siRNA sense strand
ggagcaggcugaauucuca

SEQ ID NO: 1306883 - RNA, 19 nt, Homo sapiens
  misc_RNA (1)...(19): siRNA sense strand
gcaaggauggcagagauua

SEQ ID NO: 1306884 - RNA, 19 nt, Homo sapiens
  misc_RNA (1)...(19): siRNA sense strand
ggacaucugugccgucaag

SEQ ID NO: 1306885 - RNA, 19 nt, Homo sapiens
  misc_RNA (1)...(19): siRNA sense strand
ucauuaagaucuuccauuc

SEQ ID NO: 1306886 - RNA, 19 nt, Homo sapiens
  misc_RNA (1)...(19): siRNA sense strand
guggacagcugcucggaaa

SEQ ID NO: 1306887 - RNA, 19 nt, Homo sapiens
  misc_RNA (1)...(19): siRNA sense strand
ggaaagaucaaaguggaaa

SEQ ID NO: 1306888 - RNA, 19 nt, Homo sapiens
  misc_RNA (1)...(19): siRNA sense strand
uggcagagauuacaucauc

SEQ ID NO: 1306889 - RNA, 19 nt, Homo sapiens
  misc_RNA (1)...(19): siRNA sense strand
ucucucagcucauuaagau

SEQ ID NO: 1306890 - RNA, 19 nt, Homo sapiens
  misc_RNA (1)...(19): siRNA sense strand
caaccugccuaauggcuau

SEQ ID NO: 1306891 - RNA, 19 nt, Homo sapiens
  misc_RNA (1)...(19): siRNA sense strand
cagcaaggauggcagagau

SEQ ID NO: 1306892 - RNA, 19 nt, Homo sapiens
  misc_RNA (1)...(19): siRNA sense strand
gaucgaugaugcccauaca

SEQ ID NO: 1306893 - RNA, 19 nt, Homo sapiens
  misc_RNA (1)...(19): siRNA sense strand
gaguggagcaggcugaauu

SEQ ID NO: 1306894 - RNA, 19 nt, Homo sapiens
  misc_RNA (1)...(19): siRNA sense strand
gguguucucucagcucauu

SEQ ID NO: 1306895 - RNA, 19 nt, Homo sapiens
  misc_RNA (1)...(19): siRNA sense strand
ggacaugcaggucgugaga

SEQ ID NO: 1306896 - RNA, 19 nt, Homo sapiens
  misc_RNA (1)...(19): siRNA sense strand
gcugauggccgaccuuguu

SEQ ID NO: 1306897 - RNA, 19 nt, Homo sapiens
  misc_RNA (1)...(19): siRNA sense strand
ggacagcugcucggaaaug

SEQ ID NO: 1306898 - RNA, 19 nt, Homo sapiens
  misc_RNA (1)...(19): siRNA sense strand
gauccaacuacaaggcuua

SEQ ID NO: 1306899 - RNA, 19 nt, Homo sapiens
  misc_RNA (1)...(19): siRNA sense strand
gaccugcaacgcccagaua

SEQ ID NO: 1306900 - RNA, 19 nt, Homo sapiens
  misc_RNA (1)...(19): siRNA sense strand
cagcugcucggaaauguuu

SEQ ID NO: 1306901 - RNA, 19 nt, Homo sapiens
  misc_RNA (1)...(19): siRNA sense strand
acaugcaggucgugagaaa

SEQ ID NO: 1306902 - RNA, 19 nt, Homo sapiens
  misc_RNA (1)...(19): siRNA sense strand
gguaauggacagcucaaug

SEQ ID NO: 1306903 - RNA, 19 nt, Homo sapiens
  misc_RNA (1)...(19): siRNA sense strand
gaacuggaaggccaacaca

SEQ ID NO: 1306904 - RNA, 19 nt, Homo sapiens
  misc_RNA (1)...(19): siRNA sense strand
cagacuggucgaaguauuu

SEQ ID NO: 1306905 - RNA, 19 nt, Homo sapiens
  misc_RNA (1)...(19): siRNA sense strand
cgacauccgcauccagaaa

SEQ ID NO: 1306906 - RNA, 19 nt, Homo sapiens
  misc_RNA (1)...(19): siRNA sense strand
ggacaugcccacgcuggaa

SEQ ID NO: 1306907 - RNA, 19 nt, Homo sapiens
  misc_RNA (1)...(19): siRNA sense strand
gaauggagagauugagauc

SEQ ID NO: 1306908 - RNA, 19 nt, Homo sapiens
  misc_RNA (1)...(19): siRNA sense strand
cauacagacuggucgaagu

SEQ ID NO: 1306909 - RNA, 19 nt, Homo sapiens
  misc_RNA (1)...(19): siRNA sense strand
ccaaaguggugagcagauc

SEQ ID NO: 1306910 - RNA, 19 nt, Homo sapiens
  misc_RNA (1)...(19): siRNA sense strand
gauuggagagcauguggaa

SEQ ID NO: 1306911 - RNA, 19 nt, Homo sapiens
  misc_RNA (1)...(19): siRNA sense strand
cgugagaaaugggaccaaa

SEQ ID NO: 1306912 - RNA, 19 nt, Homo sapiens
  misc_RNA (1)...(19): siRNA sense strand
cgaccuuguugucuccaaa

SEQ ID NO: 1306913 - RNA, 19 nt, Homo sapiens
  misc_RNA (1)...(19): siRNA sense strand
gacagcugcucggaaaugu

SEQ ID NO: 1306914 - RNA, 19 nt, Homo sapiens
  misc_RNA (1)...(19): siRNA sense strand
gaaugggaaagaucaaagu

SEQ ID NO: 1306915 - RNA, 19 nt, Homo sapiens
  misc_RNA (1)...(19): siRNA sense strand
ggaaugggaaagaucaaag

SEQ ID NO: 1306916 - RNA, 19 nt, Homo sapiens
  misc_RNA (1)...(19): siRNA sense strand
auacagacuggucgaagua

SEQ ID NO: 1306917 - RNA, 19 nt, Homo sapiens
  misc_RNA (1)...(19): siRNA sense strand
gcagagauuacaucaucga

SEQ ID NO: 1306918 - RNA, 19 nt, Homo sapiens
  misc_RNA (1)...(19): siRNA sense strand
ucuccaggauccagccuuu

SEQ ID NO: 1306919 - RNA, 19 nt, Homo sapiens
  misc_RNA (1)...(19): siRNA sense strand
gcagcaagcccuggguguu

SEQ ID NO: 1306920 - RNA, 19 nt, Homo sapiens
  misc_RNA (1)...(19): siRNA sense strand
ggucaucggccugcaguau

SEQ ID NO: 1306921 - RNA, 19 nt, Homo sapiens
  misc_RNA (1)...(19): siRNA sense strand
ccacgcccauuguucaaag

SEQ ID NO: 1306922 - RNA, 19 nt, Homo sapiens
  misc_RNA (1)...(19): siRNA sense strand
guaauggacagcucaaugc

SEQ ID NO: 1306923 - RNA, 19 nt, Homo sapiens
  misc_RNA (1)...(19): siRNA sense strand
uggccaaccugccuaaugg

SEQ ID NO: 1306924 - RNA, 19 nt, Homo sapiens
  misc_RNA (1)...(19): siRNA sense strand
gcuuguggagcaaacauuu

SEQ ID NO: 1306925 - RNA, 19 nt, Homo sapiens
  misc_RNA (1)...(19): siRNA sense strand
acagacuggucgaaguauu

SEQ ID NO: 1306926 - RNA, 19 nt, Homo sapiens
  misc_RNA (1)...(19): siRNA sense strand
ugagaaaugggaccaaagu

SEQ ID NO: 1306927 - RNA, 19 nt, Homo sapiens
  misc_RNA (1)...(19): siRNA sense strand
gcugucaacucucucuacu

SEQ ID NO: 1306928 - RNA, 19 nt, Homo sapiens
  misc_RNA (1)...(19): siRNA sense strand
gagaaaugggaccaaagug

SEQ ID NO: 1306929 - RNA, 19 nt, Homo sapiens
  misc_RNA (1)...(19): siRNA sense strand
gcuggaaugggaaagauca

SEQ ID NO: 1306930 - RNA, 19 nt, Homo sapiens
  misc_RNA (1)...(19): siRNA sense strand
gggaaagaucaaaguggaa

SEQ ID NO: 1306931 - RNA, 19 nt, Homo sapiens
  misc_RNA (1)...(19): siRNA sense strand
gugaauggagagauugaga

SEQ ID NO: 1306932 - RNA, 19 nt, Homo sapiens
  misc_RNA (1)...(19): siRNA sense strand
guggugagcagauccuuca

SEQ ID NO: 1306933 - RNA, 19 nt, Homo sapiens
  misc_RNA (1)...(19): siRNA sense strand
gaugaugcccauacagacu

SEQ ID NO: 1306934 - RNA, 19 nt, Homo sapiens
  misc_RNA (1)...(19): siRNA sense strand
ccaccgaggccuucaucga

SEQ ID NO: 1306935 - RNA, 19 nt, Homo sapiens
  misc_RNA (1)...(19): siRNA sense strand
cugagaaguucccgcuugu

SEQ ID NO: 1306936 - RNA, 19 nt, Homo sapiens
  misc_RNA (1)...(19): siRNA sense strand
ucaucggccugcaguaugg

SEQ ID NO: 1306937 - RNA, 19 nt, Homo sapiens
  misc_RNA (1)...(19): siRNA sense strand
uuggagagcauguggaaga

SEQ ID NO: 1306938 - RNA, 19 nt, Homo sapiens
  misc_RNA (1)...(19): siRNA sense strand
ucgaugaugcccauacaga

SEQ ID NO: 1306939 - RNA, 19 nt, Homo sapiens
  misc_RNA (1)...(19): siRNA sense strand
ggucacagccccacacuuc

SEQ ID NO: 1306940 - RNA, 19 nt, Homo sapiens
  misc_RNA (1)...(19): siRNA sense strand
cagcaagcccuggguguuc

SEQ ID NO: 1306941 - RNA, 19 nt, Homo sapiens
  misc_RNA (1)...(19): siRNA sense strand
ucuacuccgucuacaacuu

SEQ ID NO: 1306942 - RNA, 19 nt, Homo sapiens
  misc_RNA (1)...(19): siRNA sense strand
ggaaaaccagcuugacuuc

SEQ ID NO: 1306943 - RNA, 19 nt, Homo sapiens
  misc_RNA (1)...(19): siRNA sense strand
uacaaggcuuacaggagaa

SEQ ID NO: 1306944 - RNA, 19 nt, Homo sapiens
  misc_RNA (1)...(19): siRNA sense strand
cuuguugucuccaaaauga

SEQ ID NO: 1306945 - RNA, 19 nt, Homo sapiens
  misc_RNA (1)...(19): siRNA sense strand
gaaccuagcugccuaugug

SEQ ID NO: 1306946 - RNA, 19 nt, Homo sapiens
  misc_RNA (1)...(19): siRNA sense strand
gaaggugaauggagagauu

SEQ ID NO: 1306947 - RNA, 19 nt, Homo sapiens
  misc_RNA (1)...(19): siRNA sense strand
ggagcaggcugaauucuca

SEQ ID NO: 1306948 - RNA, 19 nt, Homo sapiens
  misc_RNA (1)...(19): siRNA sense strand
gcaaggauggcagagauua

SEQ ID NO: 1306949 - RNA, 19 nt, Homo sapiens
  misc_RNA (1)...(19): siRNA sense strand
ggacaucugugccgucaag

SEQ ID NO: 1306950 - RNA, 19 nt, Homo sapiens
  misc_RNA (1)...(19): siRNA sense strand
ucauuaagaucuuccauuc

SEQ ID NO: 1306951 - RNA, 19 nt, Homo sapiens
  misc_RNA (1)...(19): siRNA sense strand
guggacagcugcucggaaa

SEQ ID NO: 1306952 - RNA, 19 nt, Homo sapiens
  misc_RNA (1)...(19): siRNA sense strand
ggaaagaucaaaguggaaa

SEQ ID NO: 1306953 - RNA, 19 nt, Homo sapiens
  misc_RNA (1)...(19): siRNA sense strand
uggcagagauuacaucauc

SEQ ID NO: 1306954 - RNA, 19 nt, Homo sapiens
  misc_RNA (1)...(19): siRNA sense strand
ucucucagcucauuaagau

SEQ ID NO: 1306955 - RNA, 19 nt, Homo sapiens
  misc_RNA (1)...(19): siRNA sense strand
caaccugccuaauggcuau

SEQ ID NO: 1306956 - RNA, 19 nt, Homo sapiens
  misc_RNA (1)...(19): siRNA sense strand
cagcaaggauggcagagau

SEQ ID NO: 1306957 - RNA, 19 nt, Homo sapiens
  misc_RNA (1)...(19): siRNA sense strand
gaucgaugaugcccauaca

SEQ ID NO: 1306958 - RNA, 19 nt, Homo sapiens
  misc_RNA (1)...(19): siRNA sense strand
gaguggagcaggcugaauu

SEQ ID NO: 1306959 - RNA, 19 nt, Homo sapiens
  misc_RNA (1)...(19): siRNA sense strand
gguguucucucagcucauu

SEQ ID NO: 1306960 - RNA, 19 nt, Homo sapiens
  misc_RNA (1)...(19): siRNA sense strand
ggacaugcaggucgugaga

SEQ ID NO: 1306961 - RNA, 19 nt, Homo sapiens
  misc_RNA (1)...(19): siRNA sense strand
gcugauggccgaccuuguu

SEQ ID NO: 1306962 - RNA, 19 nt, Homo sapiens
  misc_RNA (1)...(19): siRNA sense strand
ggacagcugcucggaaaug

SEQ ID NO: 1306963 - RNA, 19 nt, Homo sapiens
  misc_RNA (1)...(19): siRNA sense strand
gauccaacuacaaggcuua

SEQ ID NO: 1306964 - RNA, 19 nt, Homo sapiens
  misc_RNA (1)...(19): siRNA sense strand
gaccugcaacgcccagaua

SEQ ID NO: 1306965 - RNA, 19 nt, Homo sapiens
  misc_RNA (1)...(19): siRNA sense strand
cagcugcucggaaauguuu

SEQ ID NO: 1306966 - RNA, 19 nt, Homo sapiens
  misc_RNA (1)...(19): siRNA sense strand
acaugcaggucgugagaaa

SEQ ID NO: 1306967 - RNA, 19 nt, Homo sapiens
  misc_RNA (1)...(19): siRNA sense strand
gguaauggacagcucaaug

SEQ ID NO: 1306968 - RNA, 19 nt, Homo sapiens
  misc_RNA (1)...(19): siRNA sense strand
gaacuggaaggccaacaca

SEQ ID NO: 1306969 - RNA, 19 nt, Homo sapiens
  misc_RNA (1)...(19): siRNA sense strand
cagacuggucgaaguauuu

SEQ ID NO: 1306970 - RNA, 19 nt, Homo sapiens
  misc_RNA (1)...(19): siRNA sense strand
cgacauccgcauccagaaa

SEQ ID NO: 1306971 - RNA, 19 nt, Homo sapiens
  misc_RNA (1)...(19): siRNA sense strand
ggacaugcccacgcuggaa

SEQ ID NO: 1306972 - RNA, 19 nt, Homo sapiens
  misc_RNA (1)...(19): siRNA sense strand
gaauggagagauugagauc

SEQ ID NO: 1306973 - RNA, 19 nt, Homo sapiens
  misc_RNA (1)...(19): siRNA sense strand
cauacagacuggucgaagu

SEQ ID NO: 1306974 - RNA, 19 nt, Homo sapiens
  misc_RNA (1)...(19): siRNA sense strand
ccaaaguggugagcagauc

SEQ ID NO: 1306975 - RNA, 19 nt, Homo sapiens
  misc_RNA (1)...(19): siRNA sense strand
gauuggagagcauguggaa

SEQ ID NO: 1306976 - RNA, 19 nt, Homo sapiens
  misc_RNA (1)...(19): siRNA sense strand
cgugagaaaugggaccaaa

SEQ ID NO: 1306977 - RNA, 19 nt, Homo sapiens
  misc_RNA (1)...(19): siRNA sense strand
cgaccuuguugucuccaaa

SEQ ID NO: 1306978 - RNA, 19 nt, Homo sapiens
  misc_RNA (1)...(19): siRNA sense strand
gacagcugcucggaaaugu

SEQ ID NO: 1306979 - RNA, 19 nt, Homo sapiens
  misc_RNA (1)...(19): siRNA sense strand
gaaugggaaagaucaaagu

SEQ ID NO: 1306980 - RNA, 19 nt, Homo sapiens
  misc_RNA (1)...(19): siRNA sense strand
ggaaugggaaagaucaaag

SEQ ID NO: 1306981 - RNA, 19 nt, Homo sapiens
  misc_RNA (1)...(19): siRNA sense strand
auacagacuggucgaagua

SEQ ID NO: 1306982 - RNA, 19 nt, Homo sapiens
  misc_RNA (1)...(19): siRNA sense strand
gcaaccugaggaagucuuu

SEQ ID NO: 1306983 - RNA, 19 nt, Homo sapiens
  misc_RNA (1)...(19): siRNA sense strand
gcagagauuacaucaucga

SEQ ID NO: 1306984 - RNA, 19 nt, Homo sapiens
  misc_RNA (1)...(19): siRNA sense strand
ucuccaggauccagccuuu

SEQ ID NO: 1306985 - RNA, 19 nt, Homo sapiens
  misc_RNA (1)...(19): siRNA sense strand
gcagcaagcccuggguguu

SEQ ID NO: 1306986 - RNA, 19 nt, Homo sapiens
  misc_RNA (1)...(19): siRNA sense strand
ggucaucggccugcaguau

SEQ ID NO: 1306987 - RNA, 19 nt, Homo sapiens
  misc_RNA (1)...(19): siRNA sense strand
gcuuguggagcaaacauuu

SEQ ID NO: 1306988 - RNA, 19 nt, Homo sapiens
  misc_RNA (1)...(19): siRNA sense strand
guaauggacagcucaaugc

SEQ ID NO: 1306989 - RNA, 19 nt, Homo sapiens
  misc_RNA (1)...(19): siRNA sense strand
uggccaaccugccuaaugg

SEQ ID NO: 1306990 - RNA, 19 nt, Homo sapiens
  misc_RNA (1)...(19): siRNA sense strand
ccacgcccauuguucaaag

SEQ ID NO: 1306991 - RNA, 19 nt, Homo sapiens
  misc_RNA (1)...(19): siRNA sense strand
acagacuggucgaaguauu

SEQ ID NO: 1306992 - RNA, 19 nt, Homo sapiens
  misc_RNA (1)...(19): siRNA sense strand
ugagaaaugggaccaaagu

SEQ ID NO: 1306993 - RNA, 19 nt, Homo sapiens
  misc_RNA (1)...(19): siRNA sense strand
gcugucaacucucucuacu

SEQ ID NO: 1306994 - RNA, 19 nt, Homo sapiens
  misc_RNA (1)...(19): siRNA sense strand
gagaaaugggaccaaagug

SEQ ID NO: 1306995 - RNA, 19 nt, Homo sapiens
  misc_RNA (1)...(19): siRNA sense strand
gcuggaaugggaaagauca

SEQ ID NO: 1306996 - RNA, 19 nt, Homo sapiens
  misc_RNA (1)...(19): siRNA sense strand
gggaaagaucaaaguggaa

SEQ ID NO: 1306997 - RNA, 19 nt, Homo sapiens
  misc_RNA (1)...(19): siRNA sense strand
gugaauggagagauugaga

SEQ ID NO: 1306998 - RNA, 19 nt, Homo sapiens
  misc_RNA (1)...(19): siRNA sense strand
uugccagccuguucucuga

SEQ ID NO: 1306999 - RNA, 19 nt, Homo sapiens
  misc_RNA (1)...(19): siRNA sense strand
guggugagcagauccuuca

SEQ ID NO: 1307000 - RNA, 19 nt, Homo sapiens
  misc_RNA (1)...(19): siRNA sense strand
cugagaaguucccgcuugu

SEQ ID NO: 1307001 - RNA, 19 nt, Homo sapiens
  misc_RNA (1)...(19): siRNA sense strand
ccaccgaggccuucaucga

SEQ ID NO: 1307002 - RNA, 19 nt, Homo sapiens
  misc_RNA (1)...(19): siRNA sense strand
gaugaugcccauacagacu

SEQ ID NO: 1307003 - RNA, 19 nt, Homo sapiens
  misc_RNA (1)...(19): siRNA sense strand
ucaucggccugcaguaugg

SEQ ID NO: 1307004 - RNA, 19 nt, Homo sapiens
  misc_RNA (1)...(19): siRNA sense strand
uuggagagcauguggaaga

SEQ ID NO: 1307005 - RNA, 19 nt, Homo sapiens
  misc_RNA (1)...(19): siRNA sense strand
ucgaugaugcccauacaga

SEQ ID NO: 1307006 - RNA, 19 nt, Homo sapiens
  misc_RNA (1)...(19): siRNA sense strand
ggucacagccccacacuuc

SEQ ID NO: 1307007 - RNA, 19 nt, Homo sapiens
  misc_RNA (1)...(19): siRNA sense strand
cagcaagcccuggguguuc

SEQ ID NO: 1307008 - RNA, 19 nt, Homo sapiens
  misc_RNA (1)...(19): siRNA sense strand
ucuacuccgucuacaacuu

SEQ ID NO: 1307009 - RNA, 19 nt, Homo sapiens
  misc_RNA (1)...(19): siRNA sense strand
ggaaaaccagcuugacuuc

SEQ ID NO: 1307010 - RNA, 19 nt, Homo sapiens
  misc_RNA (1)...(19): siRNA sense strand
cagccuguucucugacuaa

SEQ ID NO: 1307011 - RNA, 19 nt, Homo sapiens
  misc_RNA (1)...(19): siRNA sense strand
cuaacagccucagcacauc

SEQ ID NO: 1307012 - RNA, 19 nt, Homo sapiens
  misc_RNA (1)...(19): siRNA sense strand
uacaaggcuuacaggagaa

SEQ ID NO: 1307013 - RNA, 19 nt, Homo sapiens
  misc_RNA (1)...(19): siRNA sense strand
cuuguugucuccaaaauga

SEQ ID NO: 1307014 - RNA, 19 nt, Homo sapiens
  misc_RNA (1)...(19): siRNA sense strand
gaaccuagcugccuaugug

SEQ ID NO: 1307015 - RNA, 19 nt, Homo sapiens
  misc_RNA (1)...(19): siRNA sense strand
gaaggugaauggagagauu

SEQ ID NO: 1307016 - RNA, 19 nt, Homo sapiens
  misc_RNA (1)...(19): siRNA sense strand
ggagcaggcugaauucuca

SEQ ID NO: 1307017 - RNA, 19 nt, Homo sapiens
  misc_RNA (1)...(19): siRNA sense strand
gcaaggauggcagagauua

SEQ ID NO: 1307018 - RNA, 19 nt, Homo sapiens
  misc_RNA (1)...(19): siRNA sense strand
ggacaucugugccgucaag

SEQ ID NO: 1307019 - RNA, 19 nt, Homo sapiens
  misc_RNA (1)...(19): siRNA sense strand
ucauuaagaucuuccauuc

SEQ ID NO: 1307020 - RNA, 19 nt, Homo sapiens
  misc_RNA (1)...(19): siRNA sense strand
guggacagcugcucggaaa

SEQ ID NO: 1307021 - RNA, 19 nt, Homo sapiens
  misc_RNA (1)...(19): siRNA sense strand
ggaaagaucaaaguggaaa

SEQ ID NO: 1307022 - RNA, 19 nt, Homo sapiens
  misc_RNA (1)...(19): siRNA sense strand
uggcagagauuacaucauc

SEQ ID NO: 1307023 - RNA, 19 nt, Homo sapiens
  misc_RNA (1)...(19): siRNA sense strand
ucucucagcucauuaagau

SEQ ID NO: 1307024 - RNA, 19 nt, Homo sapiens
  misc_RNA (1)...(19): siRNA sense strand
caaccugccuaauggcuau

SEQ ID NO: 1307025 - RNA, 19 nt, Homo sapiens
  misc_RNA (1)...(19): siRNA sense strand
cagcaaggauggcagagau

SEQ ID NO: 1307026 - RNA, 19 nt, Homo sapiens
  misc_RNA (1)...(19): siRNA sense strand
gaucgaugaugcccauaca

SEQ ID NO: 1307027 - RNA, 19 nt, Homo sapiens
  misc_RNA (1)...(19): siRNA sense strand
gaguggagcaggcugaauu

SEQ ID NO: 1307028 - RNA, 19 nt, Homo sapiens
  misc_RNA (1)...(19): siRNA sense strand
gguguucucucagcucauu

SEQ ID NO: 1307029 - RNA, 19 nt, Homo sapiens
  misc_RNA (1)...(19): siRNA sense strand
ggacaugcaggucgugaga

SEQ ID NO: 1307030 - RNA, 19 nt, Homo sapiens
  misc_RNA (1)...(19): siRNA sense strand
gcugauggccgaccuuguu

SEQ ID NO: 1307031 - RNA, 19 nt, Homo sapiens
  misc_RNA (1)...(19): siRNA sense strand
ggacagcugcucggaaaug

SEQ ID NO: 1307032 - RNA, 19 nt, Homo sapiens
  misc_RNA (1)...(19): siRNA sense strand
gauccaacuacaaggcuua

SEQ ID NO: 1307033 - RNA, 19 nt, Homo sapiens
  misc_RNA (1)...(19): siRNA sense strand
gaccugcaacgcccagaua

SEQ ID NO: 1307034 - RNA, 19 nt, Homo sapiens
  misc_RNA (1)...(19): siRNA sense strand
cagcugcucggaaauguuu

SEQ ID NO: 1307035 - RNA, 19 nt, Homo sapiens
  misc_RNA (1)...(19): siRNA sense strand
acaugcaggucgugagaaa

SEQ ID NO: 1307036 - RNA, 19 nt, Homo sapiens
  misc_RNA (1)...(19): siRNA sense strand
gguaauggacagcucaaug

SEQ ID NO: 1307037 - RNA, 19 nt, Homo sapiens
  misc_RNA (1)...(19): siRNA sense strand
gaacuggaaggccaacaca

SEQ ID NO: 1307038 - RNA, 19 nt, Homo sapiens
  misc_RNA (1)...(19): siRNA sense strand
cagacuggucgaaguauuu

SEQ ID NO: 1307039 - RNA, 19 nt, Homo sapiens
  misc_RNA (1)...(19): siRNA sense strand
cgacauccgcauccagaaa

SEQ ID NO: 1307040 - RNA, 19 nt, Homo sapiens
  misc_RNA (1)...(19): siRNA sense strand
ggacaugcccacgcuggaa

SEQ ID NO: 1307041 - RNA, 19 nt, Homo sapiens
  misc_RNA (1)...(19): siRNA sense strand
gaauggagagauugagauc

SEQ ID NO: 1307042 - RNA, 19 nt, Homo sapiens
  misc_RNA (1)...(19): siRNA sense strand
cauacagacuggucgaagu

SEQ ID NO: 1307043 - RNA, 19 nt, Homo sapiens
  misc_RNA (1)...(19): siRNA sense strand
ccaaaguggugagcagauc

SEQ ID NO: 1307044 - RNA, 19 nt, Homo sapiens
  misc_RNA (1)...(19): siRNA sense strand
gauuggagagcauguggaa

SEQ ID NO: 1307045 - RNA, 19 nt, Homo sapiens
  misc_RNA (1)...(19): siRNA sense strand
cgugagaaaugggaccaaa

SEQ ID NO: 1307046 - RNA, 19 nt, Homo sapiens
  misc_RNA (1)...(19): siRNA sense strand
cgaccuuguugucuccaaa

SEQ ID NO: 1307047 - RNA, 19 nt, Homo sapiens
  misc_RNA (1)...(19): siRNA sense strand
gacagcugcucggaaaugu

SEQ ID NO: 1307048 - RNA, 19 nt, Homo sapiens
  misc_RNA (1)...(19): siRNA sense strand
gaaugggaaagaucaaagu

SEQ ID NO: 1307049 - RNA, 19 nt, Homo sapiens
  misc_RNA (1)...(19): siRNA sense strand
ggaaugggaaagaucaaag

SEQ ID NO: 1307050 - RNA, 19 nt, Homo sapiens
  misc_RNA (1)...(19): siRNA sense strand
auacagacuggucgaagua

SEQ ID NO: 1307051 - RNA, 19 nt, Homo sapiens
  misc_RNA (1)...(19): siRNA sense strand
gcagagauuacaucaucga

SEQ ID NO: 1307052 - RNA, 19 nt, Homo sapiens
  misc_RNA (1)...(19): siRNA sense strand
ucuccaggauccagccuuu

SEQ ID NO: 1307053 - RNA, 19 nt, Homo sapiens
  misc_RNA (1)...(19): siRNA sense strand
gcagcaagcccuggguguu

SEQ ID NO: 1307054 - RNA, 19 nt, Homo sapiens
  misc_RNA (1)...(19): siRNA sense strand
ggucaucggccugcaguau

SEQ ID NO: 1307055 - RNA, 19 nt, Homo sapiens
  misc_RNA (1)...(19): siRNA sense strand
ccacgcccauuguucaaag

SEQ ID NO: 1307056 - RNA, 19 nt, Homo sapiens
  misc_RNA (1)...(19): siRNA sense strand
guaauggacagcucaaugc

SEQ ID NO: 1307057 - RNA, 19 nt, Homo sapiens
  misc_RNA (1)...(19): siRNA sense strand
uggccaaccugccuaaugg

SEQ ID NO: 1307058 - RNA, 19 nt, Homo sapiens
  misc_RNA (1)...(19): siRNA sense strand
gcuuguggagcaaacauuu

SEQ ID NO: 1307059 - RNA, 19 nt, Homo sapiens
  misc_RNA (1)...(19): siRNA sense strand
acagacuggucgaaguauu

SEQ ID NO: 1307060 - RNA, 19 nt, Homo sapiens
  misc_RNA (1)...(19): siRNA sense strand
ugagaaaugggaccaaagu

SEQ ID NO: 1307061 - RNA, 19 nt, Homo sapiens
  misc_RNA (1)...(19): siRNA sense strand
gcugucaacucucucuacu

SEQ ID NO: 1307062 - RNA, 19 nt, Homo sapiens
  misc_RNA (1)...(19): siRNA sense strand
gagaaaugggaccaaagug

SEQ ID NO: 1307063 - RNA, 19 nt, Homo sapiens
  misc_RNA (1)...(19): siRNA sense strand
gcuggaaugggaaagauca

SEQ ID NO: 1307064 - RNA, 19 nt, Homo sapiens
  misc_RNA (1)...(19): siRNA sense strand
gggaaagaucaaaguggaa

SEQ ID NO: 1307065 - RNA, 19 nt, Homo sapiens
  misc_RNA (1)...(19): siRNA sense strand
gugaauggagagauugaga

SEQ ID NO: 1307066 - RNA, 19 nt, Homo sapiens
  misc_RNA (1)...(19): siRNA sense strand
guggugagcagauccuuca

SEQ ID NO: 1307067 - RNA, 19 nt, Homo sapiens
  misc_RNA (1)...(19): siRNA sense strand
gaugaugcccauacagacu

SEQ ID NO: 1307068 - RNA, 19 nt, Homo sapiens
  misc_RNA (1)...(19): siRNA sense strand
ccaccgaggccuucaucga

SEQ ID NO: 1307069 - RNA, 19 nt, Homo sapiens
  misc_RNA (1)...(19): siRNA sense strand
cugagaaguucccgcuugu

SEQ ID NO: 1307070 - RNA, 19 nt, Homo sapiens
  misc_RNA (1)...(19): siRNA sense strand
ucaucggccugcaguaugg

SEQ ID NO: 1307071 - RNA, 19 nt, Homo sapiens
  misc_RNA (1)...(19): siRNA sense strand
uuggagagcauguggaaga

SEQ ID NO: 1307072 - RNA, 19 nt, Homo sapiens
  misc_RNA (1)...(19): siRNA sense strand
ucgaugaugcccauacaga

SEQ ID NO: 1307073 - RNA, 19 nt, Homo sapiens
  misc_RNA (1)...(19): siRNA sense strand
ggucacagccccacacuuc

SEQ ID NO: 1307074 - RNA, 19 nt, Homo sapiens
  misc_RNA (1)...(19): siRNA sense strand
cagcaagcccuggguguuc

SEQ ID NO: 1307075 - RNA, 19 nt, Homo sapiens
  misc_RNA (1)...(19): siRNA sense strand
ucuacuccgucuacaacuu

SEQ ID NO: 1307076 - RNA, 19 nt, Homo sapiens
  misc_RNA (1)...(19): siRNA sense strand
ggaaaaccagcuugacuuc

SEQ ID NO: 1307077 - RNA, 19 nt, Homo sapiens
  misc_RNA (1)...(19): siRNA sense strand
uacaaggcuuacaggagaa

SEQ ID NO: 1307078 - RNA, 19 nt, Homo sapiens
  misc_RNA (1)...(19): siRNA sense strand
cuuguugucuccaaaauga

SEQ ID NO: 1307079 - RNA, 19 nt, Homo sapiens
  misc_RNA (1)...(19): siRNA sense strand
gaaccuagcugccuaugug

SEQ ID NO: 1307080 - RNA, 19 nt, Homo sapiens
  misc_RNA (1)...(19): siRNA sense strand
gaaggugaauggagagauu

SEQ ID NO: 1307081 - RNA, 19 nt, Homo sapiens
  misc_RNA (1)...(19): siRNA sense strand
ggagcaggcugaauucuca

SEQ ID NO: 1307082 - RNA, 19 nt, Homo sapiens
  misc_RNA (1)...(19): siRNA sense strand
gcaaggauggcagagauua

SEQ ID NO: 1307083 - RNA, 19 nt, Homo sapiens
  misc_RNA (1)...(19): siRNA sense strand
ggacaucugugccgucaag

SEQ ID NO: 1307084 - RNA, 19 nt, Homo sapiens
  misc_RNA (1)...(19): siRNA sense strand
ucauuaagaucuuccauuc

SEQ ID NO: 1307085 - RNA, 19 nt, Homo sapiens
  misc_RNA (1)...(19): siRNA sense strand
guggacagcugcucggaaa

SEQ ID NO: 1307086 - RNA, 19 nt, Homo sapiens
  misc_RNA (1)...(19): siRNA sense strand
ggaaagaucaaaguggaaa

SEQ ID NO: 1307087 - RNA, 19 nt, Homo sapiens
  misc_RNA (1)...(19): siRNA sense strand
uggcagagauuacaucauc

SEQ ID NO: 1307088 - RNA, 19 nt, Homo sapiens
  misc_RNA (1)...(19): siRNA sense strand
ucucucagcucauuaagau

SEQ ID NO: 1307089 - RNA, 19 nt, Homo sapiens
  misc_RNA (1)...(19): siRNA sense strand
caaccugccuaauggcuau

SEQ ID NO: 1307090 - RNA, 19 nt, Homo sapiens
  misc_RNA (1)...(19): siRNA sense strand
cagcaaggauggcagagau

SEQ ID NO: 1307091 - RNA, 19 nt, Homo sapiens
  misc_RNA (1)...(19): siRNA sense strand
gaucgaugaugcccauaca

SEQ ID NO: 1307092 - RNA, 19 nt, Homo sapiens
  misc_RNA (1)...(19): siRNA sense strand
gaguggagcaggcugaauu

SEQ ID NO: 1307093 - RNA, 19 nt, Homo sapiens
  misc_RNA (1)...(19): siRNA sense strand
gguguucucucagcucauu

SEQ ID NO: 1307094 - RNA, 19 nt, Homo sapiens
  misc_RNA (1)...(19): siRNA sense strand
ggacaugcaggucgugaga

SEQ ID NO: 1307095 - RNA, 19 nt, Homo sapiens
  misc_RNA (1)...(19): siRNA sense strand
gcugauggccgaccuuguu

SEQ ID NO: 1307096 - RNA, 19 nt, Homo sapiens
  misc_RNA (1)...(19): siRNA sense strand
ggacagcugcucggaaaug

SEQ ID NO: 1307097 - RNA, 19 nt, Homo sapiens
  misc_RNA (1)...(19): siRNA sense strand
gauccaacuacaaggcuua

SEQ ID NO: 1307098 - RNA, 19 nt, Homo sapiens
  misc_RNA (1)...(19): siRNA sense strand
gaccugcaacgcccagaua

SEQ ID NO: 1307099 - RNA, 19 nt, Homo sapiens
  misc_RNA (1)...(19): siRNA sense strand
cagcugcucggaaauguuu

SEQ ID NO: 1307100 - RNA, 19 nt, Homo sapiens
  misc_RNA (1)...(19): siRNA sense strand
acaugcaggucgugagaaa

SEQ ID NO: 1307101 - RNA, 19 nt, Homo sapiens
  misc_RNA (1)...(19): siRNA sense strand
gguaauggacagcucaaug

SEQ ID NO: 1307102 - RNA, 19 nt, Homo sapiens
  misc_RNA (1)...(19): siRNA sense strand
gaacuggaaggccaacaca

SEQ ID NO: 1307103 - RNA, 19 nt, Homo sapiens
  misc_RNA (1)...(19): siRNA sense strand
cagacuggucgaaguauuu

SEQ ID NO: 1307104 - RNA, 19 nt, Homo sapiens
  misc_RNA (1)...(19): siRNA sense strand
cgacauccgcauccagaaa

SEQ ID NO: 1307105 - RNA, 19 nt, Homo sapiens
  misc_RNA (1)...(19): siRNA sense strand
ggacaugcccacgcuggaa

SEQ ID NO: 1307106 - RNA, 19 nt, Homo sapiens
  misc_RNA (1)...(19): siRNA sense strand
gaauggagagauugagauc

SEQ ID NO: 1307107 - RNA, 19 nt, Homo sapiens
  misc_RNA (1)...(19): siRNA sense strand
cauacagacuggucgaagu

SEQ ID NO: 1307108 - RNA, 19 nt, Homo sapiens
  misc_RNA (1)...(19): siRNA sense strand
ccaaaguggugagcagauc

SEQ ID NO: 1307109 - RNA, 19 nt, Homo sapiens
  misc_RNA (1)...(19): siRNA sense strand
gauuggagagcauguggaa

SEQ ID NO: 1307110 - RNA, 19 nt, Homo sapiens
  misc_RNA (1)...(19): siRNA sense strand
cgugagaaaugggaccaaa

SEQ ID NO: 1307111 - RNA, 19 nt, Homo sapiens
  misc_RNA (1)...(19): siRNA sense strand
cgaccuuguugucuccaaa

SEQ ID NO: 1307112 - RNA, 19 nt, Homo sapiens
  misc_RNA (1)...(19): siRNA sense strand
gacagcugcucggaaaugu

SEQ ID NO: 1307113 - RNA, 19 nt, Homo sapiens
  misc_RNA (1)...(19): siRNA sense strand
gaaugggaaagaucaaagu

SEQ ID NO: 1307114 - RNA, 19 nt, Homo sapiens
  misc_RNA (1)...(19): siRNA sense strand
ggaaugggaaagaucaaag

SEQ ID NO: 1307115 - RNA, 19 nt, Homo sapiens
  misc_RNA (1)...(19): siRNA sense strand
auacagacuggucgaagua

SEQ ID NO: 1307116 - RNA, 19 nt, Homo sapiens
  misc_RNA (1)...(19): siRNA sense strand
gcagagauuacaucaucga

SEQ ID NO: 1307117 - RNA, 19 nt, Homo sapiens
  misc_RNA (1)...(19): siRNA sense strand
ucuccaggauccagccuuu

SEQ ID NO: 1307118 - RNA, 19 nt, Homo sapiens
  misc_RNA (1)...(19): siRNA sense strand
gcagcaagcccuggguguu

SEQ ID NO: 1307119 - RNA, 19 nt, Homo sapiens
  misc_RNA (1)...(19): siRNA sense strand
ggucaucggccugcaguau

SEQ ID NO: 1307120 - RNA, 19 nt, Homo sapiens
  misc_RNA (1)...(19): siRNA sense strand
ccacgcccauuguucaaag

SEQ ID NO: 1307121 - RNA, 19 nt, Homo sapiens
  misc_RNA (1)...(19): siRNA sense strand
guaauggacagcucaaugc

SEQ ID NO: 1307122 - RNA, 19 nt, Homo sapiens
  misc_RNA (1)...(19): siRNA sense strand
uggccaaccugccuaaugg

SEQ ID NO: 1307123 - RNA, 19 nt, Homo sapiens
  misc_RNA (1)...(19): siRNA sense strand
gcuuguggagcaaacauuu

SEQ ID NO: 1307124 - RNA, 19 nt, Homo sapiens
  misc_RNA (1)...(19): siRNA sense strand
acagacuggucgaaguauu

SEQ ID NO: 1307125 - RNA, 19 nt, Homo sapiens
  misc_RNA (1)...(19): siRNA sense strand
ugagaaaugggaccaaagu

SEQ ID NO: 1307126 - RNA, 19 nt, Homo sapiens
  misc_RNA (1)...(19): siRNA sense strand
gcugucaacucucucuacu

SEQ ID NO: 1307127 - RNA, 19 nt, Homo sapiens
  misc_RNA (1)...(19): siRNA sense strand
gagaaaugggaccaaagug

SEQ ID NO: 1307128 - RNA, 19 nt, Homo sapiens
  misc_RNA (1)...(19): siRNA sense strand
gcuggaaugggaaagauca

SEQ ID NO: 1307129 - RNA, 19 nt, Homo sapiens
  misc_RNA (1)...(19): siRNA sense strand
gggaaagaucaaaguggaa

SEQ ID NO: 1307130 - RNA, 19 nt, Homo sapiens
  misc_RNA (1)...(19): siRNA sense strand
gugaauggagagauugaga

SEQ ID NO: 1307131 - RNA, 19 nt, Homo sapiens
  misc_RNA (1)...(19): siRNA sense strand
guggugagcagauccuuca

SEQ ID NO: 1307132 - RNA, 19 nt, Homo sapiens
  misc_RNA (1)...(19): siRNA sense strand
gaugaugcccauacagacu

SEQ ID NO: 1307133 - RNA, 19 nt, Homo sapiens
  misc_RNA (1)...(19): siRNA sense strand
ccaccgaggccuucaucga

SEQ ID NO: 1307134 - RNA, 19 nt, Homo sapiens
  misc_RNA (1)...(19): siRNA sense strand
cugagaaguucccgcuugu

SEQ ID NO: 1307135 - RNA, 19 nt, Homo sapiens
  misc_RNA (1)...(19): siRNA sense strand
ucaucggccugcaguaugg

SEQ ID NO: 1307136 - RNA, 19 nt, Homo sapiens
  misc_RNA (1)...(19): siRNA sense strand
uuggagagcauguggaaga

SEQ ID NO: 1307137 - RNA, 19 nt, Homo sapiens
  misc_RNA (1)...(19): siRNA sense strand
ucgaugaugcccauacaga

SEQ ID NO: 1307138 - RNA, 19 nt, Homo sapiens
  misc_RNA (1)...(19): siRNA sense strand
ggucacagccccacacuuc

SEQ ID NO: 1307139 - RNA, 19 nt, Homo sapiens
  misc_RNA (1)...(19): siRNA sense strand
cagcaagcccuggguguuc

SEQ ID NO: 1307140 - RNA, 19 nt, Homo sapiens
  misc_RNA (1)...(19): siRNA sense strand
ucuacuccgucuacaacuu

SEQ ID NO: 1307141 - RNA, 19 nt, Homo sapiens
  misc_RNA (1)...(19): siRNA sense strand
ggaaaaccagcuugacuuc

SEQ ID NO: 1307142 - RNA, 19 nt, Homo sapiens
  misc_RNA (1)...(19): siRNA sense strand
uacaaggcuuacaggagaa

SEQ ID NO: 1307143 - RNA, 19 nt, Homo sapiens
  misc_RNA (1)...(19): siRNA sense strand
cuuguugucuccaaaauga

SEQ ID NO: 1307144 - RNA, 19 nt, Homo sapiens
  misc_RNA (1)...(19): siRNA sense strand
gaagugccaacaccuaaga

SEQ ID NO: 1307145 - RNA, 19 nt, Homo sapiens
  misc_RNA (1)...(19): siRNA sense strand
gcgaagugccaacaccuaa

SEQ ID NO: 1307146 - RNA, 19 nt, Homo sapiens
  misc_RNA (1)...(19): siRNA sense strand
gaaggagcccagcgaagug

SEQ ID NO: 1307147 - RNA, 19 nt, Homo sapiens
  misc_RNA (1)...(19): siRNA sense strand
gaaaaggacggcacugaga

SEQ ID NO: 1307148 - RNA, 19 nt, Homo sapiens
  misc_RNA (1)...(19): siRNA sense strand
ccacaacuccaggaaggaa

SEQ ID NO: 1307149 - RNA, 19 nt, Homo sapiens
  misc_RNA (1)...(19): siRNA sense strand
gaagugccaacaccuaaga

SEQ ID NO: 1307150 - RNA, 19 nt, Homo sapiens
  misc_RNA (1)...(19): siRNA sense strand
gcgaagugccaacaccuaa

SEQ ID NO: 1307151 - RNA, 19 nt, Homo sapiens
  misc_RNA (1)...(19): siRNA sense strand
gaaggagcccagcgaagug

SEQ ID NO: 1307152 - RNA, 19 nt, Homo sapiens
  misc_RNA (1)...(19): siRNA sense strand
gaaaaggacggcacugaga

SEQ ID NO: 1307153 - RNA, 19 nt, Homo sapiens
  misc_RNA (1)...(19): siRNA sense strand
ccacaacuccaggaaggaa

SEQ ID NO: 1307154 - RNA, 19 nt, Homo sapiens
  misc_RNA (1)...(19): siRNA sense strand
gaagugccaacaccuaaga

SEQ ID NO: 1307155 - RNA, 19 nt, Homo sapiens
  misc_RNA (1)...(19): siRNA sense strand
gcgaagugccaacaccuaa

SEQ ID NO: 1307156 - RNA, 19 nt, Homo sapiens
  misc_RNA (1)...(19): siRNA sense strand
gaaggagcccagcgaagug

SEQ ID NO: 1307157 - RNA, 19 nt, Homo sapiens
  misc_RNA (1)...(19): siRNA sense strand
gaaaaggacggcacugaga

SEQ ID NO: 1307158 - RNA, 19 nt, Homo sapiens
  misc_RNA (1)...(19): siRNA sense strand
ccacaacuccaggaaggaa

SEQ ID NO: 1307159 - RNA, 19 nt, Homo sapiens
  misc_RNA (1)...(19): siRNA sense strand
gaagugccaacaccuaaga

SEQ ID NO: 1307160 - RNA, 19 nt, Homo sapiens
  misc_RNA (1)...(19): siRNA sense strand
gcgaagugccaacaccuaa

SEQ ID NO: 1307161 - RNA, 19 nt, Homo sapiens
  misc_RNA (1)...(19): siRNA sense strand
gaaggagcccagcgaagug

SEQ ID NO: 1307162 - RNA, 19 nt, Homo sapiens
  misc_RNA (1)...(19): siRNA sense strand
gaaaaggacggcacugaga

SEQ ID NO: 1307163 - RNA, 19 nt, Homo sapiens
  misc_RNA (1)...(19): siRNA sense strand
ccacaacuccaggaaggaa

SEQ ID NO: 1307164 - RNA, 19 nt, Homo sapiens
  misc_RNA (1)...(19): siRNA sense strand
gaagugccaacaccuaaga

SEQ ID NO: 1307165 - RNA, 19 nt, Homo sapiens
  misc_RNA (1)...(19): siRNA sense strand
gcgaagugccaacaccuaa

SEQ ID NO: 1307166 - RNA, 19 nt, Homo sapiens
  misc_RNA (1)...(19): siRNA sense strand
gaaggagcccagcgaagug

SEQ ID NO: 1307167 - RNA, 19 nt, Homo sapiens
  misc_RNA (1)...(19): siRNA sense strand
gaaaaggacggcacugaga

SEQ ID NO: 1307168 - RNA, 19 nt, Homo sapiens
  misc_RNA (1)...(19): siRNA sense strand
ccacaacuccaggaaggaa

SEQ ID NO: 1307169 - RNA, 19 nt, Homo sapiens
  misc_RNA (1)...(19): siRNA sense strand
gaagugccaacaccuaaga

SEQ ID NO: 1307170 - RNA, 19 nt, Homo sapiens
  misc_RNA (1)...(19): siRNA sense strand
gcgaagugccaacaccuaa

SEQ ID NO: 1307171 - RNA, 19 nt, Homo sapiens
  misc_RNA (1)...(19): siRNA sense strand
gaaggagcccagcgaagug

SEQ ID NO: 1307172 - RNA, 19 nt, Homo sapiens
  misc_RNA (1)...(19): siRNA sense strand
gaaaaggacggcacugaga

SEQ ID NO: 1307173 - RNA, 19 nt, Homo sapiens
  misc_RNA (1)...(19): siRNA sense strand
ccacaacuccaggaaggaa

SEQ ID NO: 1307174 - RNA, 19 nt, Homo sapiens
  misc_RNA (1)...(19): siRNA sense strand
gaagugccaacaccuaaga

SEQ ID NO: 1307175 - RNA, 19 nt, Homo sapiens
  misc_RNA (1)...(19): siRNA sense strand
gcgaagugccaacaccuaa

SEQ ID NO: 1307176 - RNA, 19 nt, Homo sapiens
  misc_RNA (1)...(19): siRNA sense strand
gaaggagcccagcgaagug

SEQ ID NO: 1307177 - RNA, 19 nt, Homo sapiens
  misc_RNA (1)...(19): siRNA sense strand
gaaaaggacggcacugaga

SEQ ID NO: 1307178 - RNA, 19 nt, Homo sapiens
  misc_RNA (1)...(19): siRNA sense strand
ccacaacuccaggaaggaa

SEQ ID NO: 1307179 - RNA, 19 nt, Homo sapiens
  misc_RNA (1)...(19): siRNA sense strand
gaagugccaacaccuaaga

SEQ ID NO: 1307180 - RNA, 19 nt, Homo sapiens
  misc_RNA (1)...(19): siRNA sense strand
gcgaagugccaacaccuaa

SEQ ID NO: 1307181 - RNA, 19 nt, Homo sapiens
  misc_RNA (1)...(19): siRNA sense strand
gaaggagcccagcgaagug

SEQ ID NO: 1307182 - RNA, 19 nt, Homo sapiens
  misc_RNA (1)...(19): siRNA sense strand
gaaaaggacggcacugaga

SEQ ID NO: 1307183 - RNA, 19 nt, Homo sapiens
  misc_RNA (1)...(19): siRNA sense strand
ccacaacuccaggaaggaa

SEQ ID NO: 1307184 - RNA, 19 nt, Homo sapiens
  misc_RNA (1)...(19): siRNA sense strand
gaagugccaacaccuaaga

SEQ ID NO: 1307185 - RNA, 19 nt, Homo sapiens
  misc_RNA (1)...(19): siRNA sense strand
gcgaagugccaacaccuaa

SEQ ID NO: 1307186 - RNA, 19 nt, Homo sapiens
  misc_RNA (1)...(19): siRNA sense strand
gaaggagcccagcgaagug

SEQ ID NO: 1307187 - RNA, 19 nt, Homo sapiens
  misc_RNA (1)...(19): siRNA sense strand
gaaaaggacggcacugaga

SEQ ID NO: 1307188 - RNA, 19 nt, Homo sapiens
  misc_RNA (1)...(19): siRNA sense strand
ccacaacuccaggaaggaa

SEQ ID NO: 1307189 - RNA, 19 nt, Homo sapiens
  misc_RNA (1)...(19): siRNA sense strand
gaagugccaacaccuaaga

SEQ ID NO: 1307190 - RNA, 19 nt, Homo sapiens
  misc_RNA (1)...(19): siRNA sense strand
gcgaagugccaacaccuaa

SEQ ID NO: 1307191 - RNA, 19 nt, Homo sapiens
  misc_RNA (1)...(19): siRNA sense strand
gaaggagcccagcgaagug

SEQ ID NO: 1307192 - RNA, 19 nt, Homo sapiens
  misc_RNA (1)...(19): siRNA sense strand
gaaaaggacggcacugaga

SEQ ID NO: 1307193 - RNA, 19 nt, Homo sapiens
  misc_RNA (1)...(19): siRNA sense strand
ccacaacuccaggaaggaa

SEQ ID NO: 1307194 - RNA, 19 nt, Homo sapiens
  misc_RNA (1)...(19): siRNA sense strand
gaagugccaacaccuaaga

SEQ ID NO: 1307195 - RNA, 19 nt, Homo sapiens
  misc_RNA (1)...(19): siRNA sense strand
gcgaagugccaacaccuaa

SEQ ID NO: 1307196 - RNA, 19 nt, Homo sapiens
  misc_RNA (1)...(19): siRNA sense strand
gaaggagcccagcgaagug

SEQ ID NO: 1307197 - RNA, 19 nt, Homo sapiens
  misc_RNA (1)...(19): siRNA sense strand
gaaaaggacggcacugaga

SEQ ID NO: 1307198 - RNA, 19 nt, Homo sapiens
  misc_RNA (1)...(19): siRNA sense strand
ccacaacuccaggaaggaa

SEQ ID NO: 1307199 - RNA, 19 nt, Homo sapiens
  misc_RNA (1)...(19): siRNA sense strand
gaagugccaacaccuaaga

SEQ ID NO: 1307200 - RNA, 19 nt, Homo sapiens
  misc_RNA (1)...(19): siRNA sense strand
gcgaagugccaacaccuaa

SEQ ID NO: 1307201 - RNA, 19 nt, Homo sapiens
  misc_RNA (1)...(19): siRNA sense strand
gaaggagcccagcgaagug

SEQ ID NO: 1307202 - RNA, 19 nt, Homo sapiens
  misc_RNA (1)...(19): siRNA sense strand
gaaaaggacggcacugaga

SEQ ID NO: 1307203 - RNA, 19 nt, Homo sapiens
  misc_RNA (1)...(19): siRNA sense strand
ccacaacuccaggaaggaa

SEQ ID NO: 1307204 - RNA, 19 nt, Homo sapiens
  misc_RNA (1)...(19): siRNA sense strand
gaagugccaacaccuaaga

SEQ ID NO: 1307205 - RNA, 19 nt, Homo sapiens
  misc_RNA (1)...(19): siRNA sense strand
gcgaagugccaacaccuaa

SEQ ID NO: 1307206 - RNA, 19 nt, Homo sapiens
  misc_RNA (1)...(19): siRNA sense strand
gaaggagcccagcgaagug

SEQ ID NO: 1307207 - RNA, 19 nt, Homo sapiens
  misc_RNA (1)...(19): siRNA sense strand
gaaaaggacggcacugaga

SEQ ID NO: 1307208 - RNA, 19 nt, Homo sapiens
  misc_RNA (1)...(19): siRNA sense strand
ccacaacuccaggaaggaa

SEQ ID NO: 1307209 - RNA, 19 nt, Homo sapiens
  misc_RNA (1)...(19): siRNA sense strand
gaagugccaacaccuaaga

SEQ ID NO: 1307210 - RNA, 19 nt, Homo sapiens
  misc_RNA (1)...(19): siRNA sense strand
gcgaagugccaacaccuaa

SEQ ID NO: 1307211 - RNA, 19 nt, Homo sapiens
  misc_RNA (1)...(19): siRNA sense strand
gaaggagcccagcgaagug

SEQ ID NO: 1307212 - RNA, 19 nt, Homo sapiens
  misc_RNA (1)...(19): siRNA sense strand
gaaaaggacggcacugaga

SEQ ID NO: 1307213 - RNA, 19 nt, Homo sapiens
  misc_RNA (1)...(19): siRNA sense strand
ccacaacuccaggaaggaa

SEQ ID NO: 1307214 - RNA, 19 nt, Homo sapiens
  misc_RNA (1)...(19): siRNA sense strand
gaagugccaacaccuaaga

SEQ ID NO: 1307215 - RNA, 19 nt, Homo sapiens
  misc_RNA (1)...(19): siRNA sense strand
gcgaagugccaacaccuaa

SEQ ID NO: 1307216 - RNA, 19 nt, Homo sapiens
  misc_RNA (1)...(19): siRNA sense strand
gaaggagcccagcgaagug

SEQ ID NO: 1307217 - RNA, 19 nt, Homo sapiens
  misc_RNA (1)...(19): siRNA sense strand
gaaaaggacggcacugaga

SEQ ID NO: 1307218 - RNA, 19 nt, Homo sapiens
  misc_RNA (1)...(19): siRNA sense strand
ccacaacuccaggaaggaa

SEQ ID NO: 1307219 - RNA, 19 nt, Homo sapiens
  misc_RNA (1)...(19): siRNA sense strand
gaagugccaacaccuaaga

SEQ ID NO: 1307220 - RNA, 19 nt, Homo sapiens
  misc_RNA (1)...(19): siRNA sense strand
gcgaagugccaacaccuaa

SEQ ID NO: 1307221 - RNA, 19 nt, Homo sapiens
  misc_RNA (1)...(19): siRNA sense strand
gaaggagcccagcgaagug

SEQ ID NO: 1307222 - RNA, 19 nt, Homo sapiens
  misc_RNA (1)...(19): siRNA sense strand
gaaaaggacggcacugaga

SEQ ID NO: 1307223 - RNA, 19 nt, Homo sapiens
  misc_RNA (1)...(19): siRNA sense strand
ccacaacuccaggaaggaa

SEQ ID NO: 1307224 - RNA, 19 nt, Homo sapiens
  misc_RNA (1)...(19): siRNA sense strand
gaagugccaacaccuaaga

SEQ ID NO: 1307225 - RNA, 19 nt, Homo sapiens
  misc_RNA (1)...(19): siRNA sense strand
gcgaagugccaacaccuaa

SEQ ID NO: 1307226 - RNA, 19 nt, Homo sapiens
  misc_RNA (1)...(19): siRNA sense strand
gaaggagcccagcgaagug

SEQ ID NO: 1307227 - RNA, 19 nt, Homo sapiens
  misc_RNA (1)...(19): siRNA sense strand
gaaaaggacggcacugaga

SEQ ID NO: 1307228 - RNA, 19 nt, Homo sapiens
  misc_RNA (1)...(19): siRNA sense strand
ccacaacuccaggaaggaa

SEQ ID NO: 1307229 - RNA, 19 nt, Homo sapiens
  misc_RNA (1)...(19): siRNA sense strand
gaagugccaacaccuaaga

SEQ ID NO: 1307230 - RNA, 19 nt, Homo sapiens
  misc_RNA (1)...(19): siRNA sense strand
gcgaagugccaacaccuaa

SEQ ID NO: 1307231 - RNA, 19 nt, Homo sapiens
  misc_RNA (1)...(19): siRNA sense strand
gaaggagcccagcgaagug

SEQ ID NO: 1307232 - RNA, 19 nt, Homo sapiens
  misc_RNA (1)...(19): siRNA sense strand
gaaaaggacggcacugaga

SEQ ID NO: 1307233 - RNA, 19 nt, Homo sapiens
  misc_RNA (1)...(19): siRNA sense strand
ccacaacuccaggaaggaa

SEQ ID NO: 1307234 - RNA, 19 nt, Homo sapiens
  misc_RNA (1)...(19): siRNA sense strand
gaagugccaacaccuaaga

SEQ ID NO: 1307235 - RNA, 19 nt, Homo sapiens
  misc_RNA (1)...(19): siRNA sense strand
gcgaagugccaacaccuaa

SEQ ID NO: 1307236 - RNA, 19 nt, Homo sapiens
  misc_RNA (1)...(19): siRNA sense strand
gaaggagcccagcgaagug

SEQ ID NO: 1307237 - RNA, 19 nt, Homo sapiens
  misc_RNA (1)...(19): siRNA sense strand
gaaaaggacggcacugaga

SEQ ID NO: 1307238 - RNA, 19 nt, Homo sapiens
  misc_RNA (1)...(19): siRNA sense strand
ccacaacuccaggaaggaa

SEQ ID NO: 1307239 - RNA, 19 nt, Homo sapiens
  misc_RNA (1)...(19): siRNA sense strand
gaagugccaacaccuaaga

SEQ ID NO: 1307240 - RNA, 19 nt, Homo sapiens
  misc_RNA (1)...(19): siRNA sense strand
gcgaagugccaacaccuaa

SEQ ID NO: 1307241 - RNA, 19 nt, Homo sapiens
  misc_RNA (1)...(19): siRNA sense strand
gaaggagcccagcgaagug

SEQ ID NO: 1307242 - RNA, 19 nt, Homo sapiens
  misc_RNA (1)...(19): siRNA sense strand
gaaaaggacggcacugaga

SEQ ID NO: 1307243 - RNA, 19 nt, Homo sapiens
  misc_RNA (1)...(19): siRNA sense strand
ccacaacuccaggaaggaa

SEQ ID NO: 1307244 - RNA, 19 nt, Homo sapiens
  misc_RNA (1)...(19): siRNA sense strand
gaagugccaacaccuaaga

SEQ ID NO: 1307245 - RNA, 19 nt, Homo sapiens
  misc_RNA (1)...(19): siRNA sense strand
gcgaagugccaacaccuaa

SEQ ID NO: 1307246 - RNA, 19 nt, Homo sapiens
  misc_RNA (1)...(19): siRNA sense strand
gaaggagcccagcgaagug

SEQ ID NO: 1307247 - RNA, 19 nt, Homo sapiens
  misc_RNA (1)...(19): siRNA sense strand
gaaaaggacggcacugaga

SEQ ID NO: 1307248 - RNA, 19 nt, Homo sapiens
  misc_RNA (1)...(19): siRNA sense strand
ccacaacuccaggaaggaa

SEQ ID NO: 1307249 - RNA, 19 nt, Homo sapiens
  misc_RNA (1)...(19): siRNA sense strand
gaagugccaacaccuaaga

SEQ ID NO: 1307250 - RNA, 19 nt, Homo sapiens
  misc_RNA (1)...(19): siRNA sense strand
gcgaagugccaacaccuaa

SEQ ID NO: 1307251 - RNA, 19 nt, Homo sapiens
  misc_RNA (1)...(19): siRNA sense strand
gaaggagcccagcgaagug

SEQ ID NO: 1307252 - RNA, 19 nt, Homo sapiens
  misc_RNA (1)...(19): siRNA sense strand
gaaaaggacggcacugaga

SEQ ID NO: 1307253 - RNA, 19 nt, Homo sapiens
  misc_RNA (1)...(19): siRNA sense strand
ccacaacuccaggaaggaa

SEQ ID NO: 1307254 - RNA, 19 nt, Homo sapiens
  misc_RNA (1)...(19): siRNA sense strand
gaagugccaacaccuaaga

SEQ ID NO: 1307255 - RNA, 19 nt, Homo sapiens
  misc_RNA (1)...(19): siRNA sense strand
gcgaagugccaacaccuaa

SEQ ID NO: 1307256 - RNA, 19 nt, Homo sapiens
  misc_RNA (1)...(19): siRNA sense strand
gaaggagcccagcgaagug

SEQ ID NO: 1307257 - RNA, 19 nt, Homo sapiens
  misc_RNA (1)...(19): siRNA sense strand
gaaaaggacggcacugaga

SEQ ID NO: 1307258 - RNA, 19 nt, Homo sapiens
  misc_RNA (1)...(19): siRNA sense strand
ccacaacuccaggaaggaa

SEQ ID NO: 1307259 - RNA, 19 nt, Homo sapiens
  misc_RNA (1)...(19): siRNA sense strand
gaagugccaacaccuaaga

SEQ ID NO: 1307260 - RNA, 19 nt, Homo sapiens
  misc_RNA (1)...(19): siRNA sense strand
gcgaagugccaacaccuaa

SEQ ID NO: 1307261 - RNA, 19 nt, Homo sapiens
  misc_RNA (1)...(19): siRNA sense strand
gaaggagcccagcgaagug

SEQ ID NO: 1307262 - RNA, 19 nt, Homo sapiens
  misc_RNA (1)...(19): siRNA sense strand
gaaaaggacggcacugaga

SEQ ID NO: 1307263 - RNA, 19 nt, Homo sapiens
  misc_RNA (1)...(19): siRNA sense strand
ccacaacuccaggaaggaa

SEQ ID NO: 1307264 - RNA, 19 nt, Homo sapiens
  misc_RNA (1)...(19): siRNA sense strand
gaagugccaacaccuaaga

SEQ ID NO: 1307265 - RNA, 19 nt, Homo sapiens
  misc_RNA (1)...(19): siRNA sense strand
gcgaagugccaacaccuaa

SEQ ID NO: 1307266 - RNA, 19 nt, Homo sapiens
  misc_RNA (1)...(19): siRNA sense strand
gaaggagcccagcgaagug

SEQ ID NO: 1307267 - RNA, 19 nt, Homo sapiens
  misc_RNA (1)...(19): siRNA sense strand
gaaaaggacggcacugaga

SEQ ID NO: 1307268 - RNA, 19 nt, Homo sapiens
  misc_RNA (1)...(19): siRNA sense strand
ccacaacuccaggaaggaa

SEQ ID NO: 1307269 - RNA, 19 nt, Homo sapiens
  misc_RNA (1)...(19): siRNA sense strand
gaagugccaacaccuaaga

SEQ ID NO: 1307270 - RNA, 19 nt, Homo sapiens
  misc_RNA (1)...(19): siRNA sense strand
gcgaagugccaacaccuaa

SEQ ID NO: 1307271 - RNA, 19 nt, Homo sapiens
  misc_RNA (1)...(19): siRNA sense strand
gaaggagcccagcgaagug

SEQ ID NO: 1307272 - RNA, 19 nt, Homo sapiens
  misc_RNA (1)...(19): siRNA sense strand
gaaaaggacggcacugaga

SEQ ID NO: 1307273 - RNA, 19 nt, Homo sapiens
  misc_RNA (1)...(19): siRNA sense strand
ccacaacuccaggaaggaa

SEQ ID NO: 1307274 - RNA, 19 nt, Homo sapiens
  misc_RNA (1)...(19): siRNA sense strand
gaagugccaacaccuaaga

SEQ ID NO: 1307275 - RNA, 19 nt, Homo sapiens
  misc_RNA (1)...(19): siRNA sense strand
gcgaagugccaacaccuaa

SEQ ID NO: 1307276 - RNA, 19 nt, Homo sapiens
  misc_RNA (1)...(19): siRNA sense strand
gaaggagcccagcgaagug

SEQ ID NO: 1307277 - RNA, 19 nt, Homo sapiens
  misc_RNA (1)...(19): siRNA sense strand
gaaaaggacggcacugaga

SEQ ID NO: 1307278 - RNA, 19 nt, Homo sapiens
  misc_RNA (1)...(19): siRNA sense strand
ccacaacuccaggaaggaa

SEQ ID NO: 1307279 - RNA, 19 nt, Homo sapiens
  misc_RNA (1)...(19): siRNA sense strand
gaagugccaacaccuaaga

SEQ ID NO: 1307280 - RNA, 19 nt, Homo sapiens
  misc_RNA (1)...(19): siRNA sense strand
gcgaagugccaacaccuaa

SEQ ID NO: 1307281 - RNA, 19 nt, Homo sapiens
  misc_RNA (1)...(19): siRNA sense strand
gaaggagcccagcgaagug

SEQ ID NO: 1307282 - RNA, 19 nt, Homo sapiens
  misc_RNA (1)...(19): siRNA sense strand
gaaaaggacggcacugaga

SEQ ID NO: 1307283 - RNA, 19 nt, Homo sapiens
  misc_RNA (1)...(19): siRNA sense strand
ccacaacuccaggaaggaa

SEQ ID NO: 1307284 - RNA, 19 nt, Homo sapiens
  misc_RNA (1)...(19): siRNA sense strand
gauagaagcuuuggagaaa

SEQ ID NO: 1307285 - RNA, 19 nt, Homo sapiens
  misc_RNA (1)...(19): siRNA sense strand
gaaagaagccuacuaucaa

SEQ ID NO: 1307286 - RNA, 19 nt, Homo sapiens
  misc_RNA (1)...(19): siRNA sense strand
gcaguuauaucaugaaugu

SEQ ID NO: 1307287 - RNA, 19 nt, Homo sapiens
  misc_RNA (1)...(19): siRNA sense strand
gcugaaggaccauuuauua

SEQ ID NO: 1307288 - RNA, 19 nt, Homo sapiens
  misc_RNA (1)...(19): siRNA sense strand
caccaaacaugaugaagua

SEQ ID NO: 1307289 - RNA, 19 nt, Homo sapiens
  misc_RNA (1)...(19): siRNA sense strand
caaacaugaugaaguagua

SEQ ID NO: 1307290 - RNA, 19 nt, Homo sapiens
  misc_RNA (1)...(19): siRNA sense strand
gugaacagcuggccaaaga

SEQ ID NO: 1307291 - RNA, 19 nt, Homo sapiens
  misc_RNA (1)...(19): siRNA sense strand
gaacacagcaagaauggaa

SEQ ID NO: 1307292 - RNA, 19 nt, Homo sapiens
  misc_RNA (1)...(19): siRNA sense strand
gagguugacuggcaggaua

SEQ ID NO: 1307293 - RNA, 19 nt, Homo sapiens
  misc_RNA (1)...(19): siRNA sense strand
gacaaucacuggcuguauu

SEQ ID NO: 1307294 - RNA, 19 nt, Homo sapiens
  misc_RNA (1)...(19): siRNA sense strand
ccaaagaauugcaguuaga

SEQ ID NO: 1307295 - RNA, 19 nt, Homo sapiens
  misc_RNA (1)...(19): siRNA sense strand
gaaaggaggagucaaggaa

SEQ ID NO: 1307296 - RNA, 19 nt, Homo sapiens
  misc_RNA (1)...(19): siRNA sense strand
gaaggaccauuuauuacug

SEQ ID NO: 1307297 - RNA, 19 nt, Homo sapiens
  misc_RNA (1)...(19): siRNA sense strand
gcaggaaugucucgcaguu

SEQ ID NO: 1307298 - RNA, 19 nt, Homo sapiens
  misc_RNA (1)...(19): siRNA sense strand
aaguaaagcucaauaguga

SEQ ID NO: 1307299 - RNA, 19 nt, Homo sapiens
  misc_RNA (1)...(19): siRNA sense strand
gaaguaaagcucaauagug

SEQ ID NO: 1307300 - RNA, 19 nt, Homo sapiens
  misc_RNA (1)...(19): siRNA sense strand
aaagaagccuacuaucaaa

SEQ ID NO: 1307301 - RNA, 19 nt, Homo sapiens
  misc_RNA (1)...(19): siRNA sense strand
caauggagauagcaaaguu

SEQ ID NO: 1307302 - RNA, 19 nt, Homo sapiens
  misc_RNA (1)...(19): siRNA sense strand
gaagaucacguucagaaga

SEQ ID NO: 1307303 - RNA, 19 nt, Homo sapiens
  misc_RNA (1)...(19): siRNA sense strand
gaaaagauaucaccaccaa

SEQ ID NO: 1307304 - RNA, 19 nt, Homo sapiens
  misc_RNA (1)...(19): siRNA sense strand
gguaggagauggaauugga

SEQ ID NO: 1307305 - RNA, 19 nt, Homo sapiens
  misc_RNA (1)...(19): siRNA sense strand
aaagaucgcuucaguaaac

SEQ ID NO: 1307306 - RNA, 19 nt, Homo sapiens
  misc_RNA (1)...(19): siRNA sense strand
gcagagagcuggaauuccu

SEQ ID NO: 1307307 - RNA, 19 nt, Homo sapiens
  misc_RNA (1)...(19): siRNA sense strand
caacaugccuacucagaag

SEQ ID NO: 1307308 - RNA, 19 nt, Homo sapiens
  misc_RNA (1)...(19): siRNA sense strand
gaacgagaacucuucaaug

SEQ ID NO: 1307309 - RNA, 19 nt, Homo sapiens
  misc_RNA (1)...(19): siRNA sense strand
uuaaagaucgcuucaguaa

SEQ ID NO: 1307310 - RNA, 19 nt, Homo sapiens
  misc_RNA (1)...(19): siRNA sense strand
gaaagaacacagcaagaau

SEQ ID NO: 1307311 - RNA, 19 nt, Homo sapiens
  misc_RNA (1)...(19): siRNA sense strand
gaaguaguaugugggagaa

SEQ ID NO: 1307312 - RNA, 19 nt, Homo sapiens
  misc_RNA (1)...(19): siRNA sense strand
gcucaauagugaagaaaug

SEQ ID NO: 1307313 - RNA, 19 nt, Homo sapiens
  misc_RNA (1)...(19): siRNA sense strand
ggaauuggaauggauuuaa

SEQ ID NO: 1307314 - RNA, 19 nt, Homo sapiens
  misc_RNA (1)...(19): siRNA sense strand
gaaaggagucuguugucuu

SEQ ID NO: 1307315 - RNA, 19 nt, Homo sapiens
  misc_RNA (1)...(19): siRNA sense strand
ugaaagaagccuacuauca

SEQ ID NO: 1307316 - RNA, 19 nt, Homo sapiens
  misc_RNA (1)...(19): siRNA sense strand
gagaaaacauugauacuuc

SEQ ID NO: 1307317 - RNA, 19 nt, Homo sapiens
  misc_RNA (1)...(19): siRNA sense strand
gaauaugaugcacagcuua

SEQ ID NO: 1307318 - RNA, 19 nt, Homo sapiens
  misc_RNA (1)...(19): siRNA sense strand
gaaaagugcauccuuauga

SEQ ID NO: 1307319 - RNA, 19 nt, Homo sapiens
  misc_RNA (1)...(19): siRNA sense strand
gauagcaaaguuuccauuu

SEQ ID NO: 1307320 - RNA, 19 nt, Homo sapiens
  misc_RNA (1)...(19): siRNA sense strand
ucagaagaauggaaggaaa

SEQ ID NO: 1307321 - RNA, 19 nt, Homo sapiens
  misc_RNA (1)...(19): siRNA sense strand
guaaaguuauaccuacaga

SEQ ID NO: 1307322 - RNA, 19 nt, Homo sapiens
  misc_RNA (1)...(19): siRNA sense strand
gaacagcuggccaaagaau

SEQ ID NO: 1307323 - RNA, 19 nt, Homo sapiens
  misc_RNA (1)...(19): siRNA sense strand
ggccaaagaauugcaguua

SEQ ID NO: 1307324 - RNA, 19 nt, Homo sapiens
  misc_RNA (1)...(19): siRNA sense strand
gagggagcauggaggauga

SEQ ID NO: 1307325 - RNA, 19 nt, Homo sapiens
  misc_RNA (1)...(19): siRNA sense strand
ugaaguugcuguugcugaa

SEQ ID NO: 1307326 - RNA, 19 nt, Homo sapiens
  misc_RNA (1)...(19): siRNA sense strand
gauuucagguuuaaagauc

SEQ ID NO: 1307327 - RNA, 19 nt, Homo sapiens
  misc_RNA (1)...(19): siRNA sense strand
ggaaaggagucuguugucu

SEQ ID NO: 1307328 - RNA, 19 nt, Homo sapiens
  misc_RNA (1)...(19): siRNA sense strand
cagcaagaauggaaaauuu

SEQ ID NO: 1307329 - RNA, 19 nt, Homo sapiens
  misc_RNA (1)...(19): siRNA sense strand
caucacagcagauaaugaa

SEQ ID NO: 1307330 - RNA, 19 nt, Homo sapiens
  misc_RNA (1)...(19): siRNA sense strand
gcaggauacucgugaugau

SEQ ID NO: 1307331 - RNA, 19 nt, Homo sapiens
  misc_RNA (1)...(19): siRNA sense strand
uaaacuaaauccacguaag

SEQ ID NO: 1307332 - RNA, 19 nt, Homo sapiens
  misc_RNA (1)...(19): siRNA sense strand
aaacuaaauccacguaaga

SEQ ID NO: 1307333 - RNA, 19 nt, Homo sapiens
  misc_RNA (1)...(19): siRNA sense strand
gauaucaccaccaaacaug

SEQ ID NO: 1307334 - RNA, 19 nt, Homo sapiens
  misc_RNA (1)...(19): siRNA sense strand
guuuaaagaucgcuucagu

SEQ ID NO: 1307335 - RNA, 19 nt, Homo sapiens
  misc_RNA (1)...(19): siRNA sense strand
aaacaucacagcagauaau

SEQ ID NO: 1307336 - RNA, 19 nt, Homo sapiens
  misc_RNA (1)...(19): siRNA sense strand
aagaucacguucagaagaa

SEQ ID NO: 1307337 - RNA, 19 nt, Homo sapiens
  misc_RNA (1)...(19): siRNA sense strand
gaagaagaagcugccguuu

SEQ ID NO: 1307338 - RNA, 19 nt, Homo sapiens
  misc_RNA (1)...(19): siRNA sense strand
caaugcuguuucaggcuua

SEQ ID NO: 1307339 - RNA, 19 nt, Homo sapiens
  misc_RNA (1)...(19): siRNA sense strand
ggaauuccuuguccaacag

SEQ ID NO: 1307340 - RNA, 19 nt, Homo sapiens
  misc_RNA (1)...(19): siRNA sense strand
agacagcgauagcucugaa

SEQ ID NO: 1307341 - RNA, 19 nt, Homo sapiens
  misc_RNA (1)...(19): siRNA sense strand
gccaaagaauugcaguuag

SEQ ID NO: 1307342 - RNA, 19 nt, Homo sapiens
  misc_RNA (1)...(19): siRNA sense strand
gaaugugccaucaagguau

SEQ ID NO: 1307343 - RNA, 19 nt, Homo sapiens
  misc_RNA (1)...(19): siRNA sense strand
gagauggaauuggaaugga

SEQ ID NO: 1307344 - RNA, 19 nt, Homo sapiens
  misc_RNA (1)...(19): siRNA sense strand
gagaaagaacacagcaaga

SEQ ID NO: 1307345 - RNA, 19 nt, Homo sapiens
  misc_RNA (1)...(19): siRNA sense strand
agaaagaacacagcaagaa

SEQ ID NO: 1307346 - RNA, 19 nt, Homo sapiens
  misc_RNA (1)...(19): siRNA sense strand
gaauugcaguuagaagaag

SEQ ID NO: 1307347 - RNA, 19 nt, Homo sapiens
  misc_RNA (1)...(19): siRNA sense strand
acaaucacuggcuguauua

SEQ ID NO: 1307348 - RNA, 19 nt, Homo sapiens
  misc_RNA (1)...(19): siRNA sense strand
uggcugauguaaugaguga

SEQ ID NO: 1307349 - RNA, 19 nt, Homo sapiens
  misc_RNA (1)...(19): siRNA sense strand
ggagacccaccacuacuau

SEQ ID NO: 1307350 - RNA, 19 nt, Homo sapiens
  misc_RNA (1)...(19): siRNA sense strand
gaucgcuucaguaaacuaa

SEQ ID NO: 1307351 - RNA, 19 nt, Homo sapiens
  misc_RNA (1)...(19): siRNA sense strand
ucagguaggagauggaauu

SEQ ID NO: 1307352 - RNA, 19 nt, Homo sapiens
  misc_RNA (1)...(19): siRNA sense strand
uuaaacaucacagcagaua

SEQ ID NO: 1307353 - RNA, 19 nt, Homo sapiens
  misc_RNA (1)...(19): siRNA sense strand
agacacguuuacuuaugua

SEQ ID NO: 1307354 - RNA, 19 nt, Homo sapiens
  misc_RNA (1)...(19): siRNA sense strand
cgauagcucugaagaugag

SEQ ID NO: 1307355 - RNA, 19 nt, Homo sapiens
  misc_RNA (1)...(19): siRNA sense strand
cagauaaugaagcugauuu

SEQ ID NO: 1307356 - RNA, 19 nt, Homo sapiens
  misc_RNA (1)...(19): siRNA sense strand
aaagaacacagcaagaaug

SEQ ID NO: 1307357 - RNA, 19 nt, Homo sapiens
  misc_RNA (1)...(19): siRNA sense strand
caaagaauugcaguuagaa

SEQ ID NO: 1307358 - RNA, 19 nt, Homo sapiens
  misc_RNA (1)...(19): siRNA sense strand
ugacagagaauaugaugca

SEQ ID NO: 1307359 - RNA, 19 nt, Homo sapiens
  misc_RNA (1)...(19): siRNA sense strand
aaagcucaauagugaagaa

SEQ ID NO: 1307360 - RNA, 19 nt, Homo sapiens
  misc_RNA (1)...(19): siRNA sense strand
cuacugaagaaacacauuu

SEQ ID NO: 1307361 - RNA, 19 nt, Homo sapiens
  misc_RNA (1)...(19): siRNA sense strand
gcacaaucucgcaagaaug

SEQ ID NO: 1307362 - RNA, 19 nt, Homo sapiens
  misc_RNA (1)...(19): siRNA sense strand
cuaaauccacguaagauca

SEQ ID NO: 1307363 - RNA, 19 nt, Homo sapiens
  misc_RNA (1)...(19): siRNA sense strand
cagcuuaggcgugaagaaa

SEQ ID NO: 1307364 - RNA, 19 nt, Homo sapiens
  misc_RNA (1)...(19): siRNA sense strand
agaauaugaugcacagcuu

SEQ ID NO: 1307365 - RNA, 19 nt, Homo sapiens
  misc_RNA (1)...(19): siRNA sense strand
gcaaaguuuccauuuccuu

SEQ ID NO: 1307366 - RNA, 19 nt, Homo sapiens
  misc_RNA (1)...(19): siRNA sense strand
aguuauaccuacagaaugu

SEQ ID NO: 1307367 - RNA, 19 nt, Homo sapiens
  misc_RNA (1)...(19): siRNA sense strand
gcaguuagaagaagaagcu

SEQ ID NO: 1307368 - RNA, 19 nt, Homo sapiens
  misc_RNA (1)...(19): siRNA sense strand
uagcaaaguuuccauuucc

SEQ ID NO: 1307369 - RNA, 19 nt, Homo sapiens
  misc_RNA (1)...(19): siRNA sense strand
ccacuacuauaugaugaau

SEQ ID NO: 1307370 - RNA, 19 nt, Homo sapiens
  misc_RNA (1)...(19): siRNA sense strand
caccacuacuauaugauga

SEQ ID NO: 1307371 - RNA, 19 nt, Homo sapiens
  misc_RNA (1)...(19): siRNA sense strand
aacgagaacucuucaaugc

SEQ ID NO: 1307372 - RNA, 19 nt, Homo sapiens
  misc_RNA (1)...(19): siRNA sense strand
guaaagcucaauagugaag

SEQ ID NO: 1307373 - RNA, 19 nt, Homo sapiens
  misc_RNA (1)...(19): siRNA sense strand
gaugauuucagguuuaaag

SEQ ID NO: 1307374 - RNA, 19 nt, Homo sapiens
  misc_RNA (1)...(19): siRNA sense strand
aucacuggcuguauuagua

SEQ ID NO: 1307375 - RNA, 19 nt, Homo sapiens
  misc_RNA (1)...(19): siRNA sense strand
gcucugaagaugagguuga

SEQ ID NO: 1307376 - RNA, 19 nt, Homo sapiens
  misc_RNA (1)...(19): siRNA sense strand
aaugaaagaagccuacuau

SEQ ID NO: 1307377 - RNA, 19 nt, Homo sapiens
  misc_RNA (1)...(19): siRNA sense strand
cguaagaucauccgcaugu

SEQ ID NO: 1307378 - RNA, 19 nt, Homo sapiens
  misc_RNA (1)...(19): siRNA sense strand
agaaugugccaucaaggua

SEQ ID NO: 1307379 - RNA, 19 nt, Homo sapiens
  misc_RNA (1)...(19): siRNA sense strand
uaaagaucgcuucaguaaa

SEQ ID NO: 1307380 - RNA, 19 nt, Homo sapiens
  misc_RNA (1)...(19): siRNA sense strand
gaaaaugaaugaagaucac

SEQ ID NO: 1307381 - RNA, 19 nt, Homo sapiens
  misc_RNA (1)...(19): siRNA sense strand
gaacucuucaaugcuguuu

SEQ ID NO: 1307382 - RNA, 19 nt, Homo sapiens
  misc_RNA (1)...(19): siRNA sense strand
cgaugucagucagucagua

SEQ ID NO: 1307383 - RNA, 19 nt, Homo sapiens
  misc_RNA (1)...(19): siRNA sense strand
guaaacuaaauccacguaa

SEQ ID NO: 1307384 - RNA, 19 nt, Homo sapiens
  misc_RNA (1)...(19): siRNA sense strand
gaaagaagccuacuaucaa

SEQ ID NO: 1307385 - RNA, 19 nt, Homo sapiens
  misc_RNA (1)...(19): siRNA sense strand
gcaguuauaucaugaaugu

SEQ ID NO: 1307386 - RNA, 19 nt, Homo sapiens
  misc_RNA (1)...(19): siRNA sense strand
gcugaaggaccauuuauua

SEQ ID NO: 1307387 - RNA, 19 nt, Homo sapiens
  misc_RNA (1)...(19): siRNA sense strand
caccaaacaugaugaagua

SEQ ID NO: 1307388 - RNA, 19 nt, Homo sapiens
  misc_RNA (1)...(19): siRNA sense strand
caaacaugaugaaguagua

SEQ ID NO: 1307389 - RNA, 19 nt, Homo sapiens
  misc_RNA (1)...(19): siRNA sense strand
gugaacagcuggccaaaga

SEQ ID NO: 1307390 - RNA, 19 nt, Homo sapiens
  misc_RNA (1)...(19): siRNA sense strand
gaacacagcaagaauggaa

SEQ ID NO: 1307391 - RNA, 19 nt, Homo sapiens
  misc_RNA (1)...(19): siRNA sense strand
gagguugacuggcaggaua

SEQ ID NO: 1307392 - RNA, 19 nt, Homo sapiens
  misc_RNA (1)...(19): siRNA sense strand
gacaaucacuggcuguauu

SEQ ID NO: 1307393 - RNA, 19 nt, Homo sapiens
  misc_RNA (1)...(19): siRNA sense strand
ccaaagaauugcaguuaga

SEQ ID NO: 1307394 - RNA, 19 nt, Homo sapiens
  misc_RNA (1)...(19): siRNA sense strand
gaaggaccauuuauuacug

SEQ ID NO: 1307395 - RNA, 19 nt, Homo sapiens
  misc_RNA (1)...(19): siRNA sense strand
aaguaaagcucaauaguga

SEQ ID NO: 1307396 - RNA, 19 nt, Homo sapiens
  misc_RNA (1)...(19): siRNA sense strand
gaaguaaagcucaauagug

SEQ ID NO: 1307397 - RNA, 19 nt, Homo sapiens
  misc_RNA (1)...(19): siRNA sense strand
aaagaagccuacuaucaaa

SEQ ID NO: 1307398 - RNA, 19 nt, Homo sapiens
  misc_RNA (1)...(19): siRNA sense strand
caauggagauagcaaaguu

SEQ ID NO: 1307399 - RNA, 19 nt, Homo sapiens
  misc_RNA (1)...(19): siRNA sense strand
gaaaagauaucaccaccaa

SEQ ID NO: 1307400 - RNA, 19 nt, Homo sapiens
  misc_RNA (1)...(19): siRNA sense strand
gguaggagauggaauugga

SEQ ID NO: 1307401 - RNA, 19 nt, Homo sapiens
  misc_RNA (1)...(19): siRNA sense strand
aaagaucgcuucaguaaac

SEQ ID NO: 1307402 - RNA, 19 nt, Homo sapiens
  misc_RNA (1)...(19): siRNA sense strand
gcagagagcuggaauuccu

SEQ ID NO: 1307403 - RNA, 19 nt, Homo sapiens
  misc_RNA (1)...(19): siRNA sense strand
caacaugccuacucagaag

SEQ ID NO: 1307404 - RNA, 19 nt, Homo sapiens
  misc_RNA (1)...(19): siRNA sense strand
uuaaagaucgcuucaguaa

SEQ ID NO: 1307405 - RNA, 19 nt, Homo sapiens
  misc_RNA (1)...(19): siRNA sense strand
gaaagaacacagcaagaau

SEQ ID NO: 1307406 - RNA, 19 nt, Homo sapiens
  misc_RNA (1)...(19): siRNA sense strand
gaaguaguaugugggagaa

SEQ ID NO: 1307407 - RNA, 19 nt, Homo sapiens
  misc_RNA (1)...(19): siRNA sense strand
gcucaauagugaagaaaug

SEQ ID NO: 1307408 - RNA, 19 nt, Homo sapiens
  misc_RNA (1)...(19): siRNA sense strand
ggaauuggaauggauuuaa

SEQ ID NO: 1307409 - RNA, 19 nt, Homo sapiens
  misc_RNA (1)...(19): siRNA sense strand
gaaaggagucuguugucuu

SEQ ID NO: 1307410 - RNA, 19 nt, Homo sapiens
  misc_RNA (1)...(19): siRNA sense strand
ugaaagaagccuacuauca

SEQ ID NO: 1307411 - RNA, 19 nt, Homo sapiens
  misc_RNA (1)...(19): siRNA sense strand
gagaaaacauugauacuuc

SEQ ID NO: 1307412 - RNA, 19 nt, Homo sapiens
  misc_RNA (1)...(19): siRNA sense strand
gaauaugaugcacagcuua

SEQ ID NO: 1307413 - RNA, 19 nt, Homo sapiens
  misc_RNA (1)...(19): siRNA sense strand
gaaaagugcauccuuauga

SEQ ID NO: 1307414 - RNA, 19 nt, Homo sapiens
  misc_RNA (1)...(19): siRNA sense strand
gauagcaaaguuuccauuu

SEQ ID NO: 1307415 - RNA, 19 nt, Homo sapiens
  misc_RNA (1)...(19): siRNA sense strand
guaaaguuauaccuacaga

SEQ ID NO: 1307416 - RNA, 19 nt, Homo sapiens
  misc_RNA (1)...(19): siRNA sense strand
gaacagcuggccaaagaau

SEQ ID NO: 1307417 - RNA, 19 nt, Homo sapiens
  misc_RNA (1)...(19): siRNA sense strand
ggccaaagaauugcaguua

SEQ ID NO: 1307418 - RNA, 19 nt, Homo sapiens
  misc_RNA (1)...(19): siRNA sense strand
gagggagcauggaggauga

SEQ ID NO: 1307419 - RNA, 19 nt, Homo sapiens
  misc_RNA (1)...(19): siRNA sense strand
ugaaguugcuguugcugaa

SEQ ID NO: 1307420 - RNA, 19 nt, Homo sapiens
  misc_RNA (1)...(19): siRNA sense strand
gauuucagguuuaaagauc

SEQ ID NO: 1307421 - RNA, 19 nt, Homo sapiens
  misc_RNA (1)...(19): siRNA sense strand
ggaaaggagucuguugucu

SEQ ID NO: 1307422 - RNA, 19 nt, Homo sapiens
  misc_RNA (1)...(19): siRNA sense strand
cagcaagaauggaaaauuu

SEQ ID NO: 1307423 - RNA, 19 nt, Homo sapiens
  misc_RNA (1)...(19): siRNA sense strand
gcaggauacucgugaugau

SEQ ID NO: 1307424 - RNA, 19 nt, Homo sapiens
  misc_RNA (1)...(19): siRNA sense strand
uaaacuaaauccacguaag

SEQ ID NO: 1307425 - RNA, 19 nt, Homo sapiens
  misc_RNA (1)...(19): siRNA sense strand
aaacuaaauccacguaaga

SEQ ID NO: 1307426 - RNA, 19 nt, Homo sapiens
  misc_RNA (1)...(19): siRNA sense strand
gauaucaccaccaaacaug

SEQ ID NO: 1307427 - RNA, 19 nt, Homo sapiens
  misc_RNA (1)...(19): siRNA sense strand
guuuaaagaucgcuucagu

SEQ ID NO: 1307428 - RNA, 19 nt, Homo sapiens
  misc_RNA (1)...(19): siRNA sense strand
gaagaagaagcugccguuu

SEQ ID NO: 1307429 - RNA, 19 nt, Homo sapiens
  misc_RNA (1)...(19): siRNA sense strand
ggaauuccuuguccaacag

SEQ ID NO: 1307430 - RNA, 19 nt, Homo sapiens
  misc_RNA (1)...(19): siRNA sense strand
agacagcgauagcucugaa

SEQ ID NO: 1307431 - RNA, 19 nt, Homo sapiens
  misc_RNA (1)...(19): siRNA sense strand
gccaaagaauugcaguuag

SEQ ID NO: 1307432 - RNA, 19 nt, Homo sapiens
  misc_RNA (1)...(19): siRNA sense strand
gaaugugccaucaagguau

SEQ ID NO: 1307433 - RNA, 19 nt, Homo sapiens
  misc_RNA (1)...(19): siRNA sense strand
gagauggaauuggaaugga

SEQ ID NO: 1307434 - RNA, 19 nt, Homo sapiens
  misc_RNA (1)...(19): siRNA sense strand
gagaaagaacacagcaaga

SEQ ID NO: 1307435 - RNA, 19 nt, Homo sapiens
  misc_RNA (1)...(19): siRNA sense strand
agaaagaacacagcaagaa

SEQ ID NO: 1307436 - RNA, 19 nt, Homo sapiens
  misc_RNA (1)...(19): siRNA sense strand
gaauugcaguuagaagaag

SEQ ID NO: 1307437 - RNA, 19 nt, Homo sapiens
  misc_RNA (1)...(19): siRNA sense strand
acaaucacuggcuguauua

SEQ ID NO: 1307438 - RNA, 19 nt, Homo sapiens
  misc_RNA (1)...(19): siRNA sense strand
uggcugauguaaugaguga

SEQ ID NO: 1307439 - RNA, 19 nt, Homo sapiens
  misc_RNA (1)...(19): siRNA sense strand
gaucgcuucaguaaacuaa

SEQ ID NO: 1307440 - RNA, 19 nt, Homo sapiens
  misc_RNA (1)...(19): siRNA sense strand
ucagguaggagauggaauu

SEQ ID NO: 1307441 - RNA, 19 nt, Homo sapiens
  misc_RNA (1)...(19): siRNA sense strand
agacacguuuacuuaugua

SEQ ID NO: 1307442 - RNA, 19 nt, Homo sapiens
  misc_RNA (1)...(19): siRNA sense strand
cgauagcucugaagaugag

SEQ ID NO: 1307443 - RNA, 19 nt, Homo sapiens
  misc_RNA (1)...(19): siRNA sense strand
caaagaauugcaguuagaa

SEQ ID NO: 1307444 - RNA, 19 nt, Homo sapiens
  misc_RNA (1)...(19): siRNA sense strand
aaagaacacagcaagaaug

SEQ ID NO: 1307445 - RNA, 19 nt, Homo sapiens
  misc_RNA (1)...(19): siRNA sense strand
ugacagagaauaugaugca

SEQ ID NO: 1307446 - RNA, 19 nt, Homo sapiens
  misc_RNA (1)...(19): siRNA sense strand
aaagcucaauagugaagaa

SEQ ID NO: 1307447 - RNA, 19 nt, Homo sapiens
  misc_RNA (1)...(19): siRNA sense strand
cuacugaagaaacacauuu

SEQ ID NO: 1307448 - RNA, 19 nt, Homo sapiens
  misc_RNA (1)...(19): siRNA sense strand
gcacaaucucgcaagaaug

SEQ ID NO: 1307449 - RNA, 19 nt, Homo sapiens
  misc_RNA (1)...(19): siRNA sense strand
cuaaauccacguaagauca

SEQ ID NO: 1307450 - RNA, 19 nt, Homo sapiens
  misc_RNA (1)...(19): siRNA sense strand
cagcuuaggcgugaagaaa

SEQ ID NO: 1307451 - RNA, 19 nt, Homo sapiens
  misc_RNA (1)...(19): siRNA sense strand
agaauaugaugcacagcuu

SEQ ID NO: 1307452 - RNA, 19 nt, Homo sapiens
  misc_RNA (1)...(19): siRNA sense strand
gcaaaguuuccauuuccuu

SEQ ID NO: 1307453 - RNA, 19 nt, Homo sapiens
  misc_RNA (1)...(19): siRNA sense strand
gcaguuagaagaagaagcu

SEQ ID NO: 1307454 - RNA, 19 nt, Homo sapiens
  misc_RNA (1)...(19): siRNA sense strand
aguuauaccuacagaaugu

SEQ ID NO: 1307455 - RNA, 19 nt, Homo sapiens
  misc_RNA (1)...(19): siRNA sense strand
uagcaaaguuuccauuucc

SEQ ID NO: 1307456 - RNA, 19 nt, Homo sapiens
  misc_RNA (1)...(19): siRNA sense strand
guaaagcucaauagugaag

SEQ ID NO: 1307457 - RNA, 19 nt, Homo sapiens
  misc_RNA (1)...(19): siRNA sense strand
gaugauuucagguuuaaag

SEQ ID NO: 1307458 - RNA, 19 nt, Homo sapiens
  misc_RNA (1)...(19): siRNA sense strand
aucacuggcuguauuagua

SEQ ID NO: 1307459 - RNA, 19 nt, Homo sapiens
  misc_RNA (1)...(19): siRNA sense strand
gcucugaagaugagguuga

SEQ ID NO: 1307460 - RNA, 19 nt, Homo sapiens
  misc_RNA (1)...(19): siRNA sense strand
aaugaaagaagccuacuau

SEQ ID NO: 1307461 - RNA, 19 nt, Homo sapiens
  misc_RNA (1)...(19): siRNA sense strand
cguaagaucauccgcaugu

SEQ ID NO: 1307462 - RNA, 19 nt, Homo sapiens
  misc_RNA (1)...(19): siRNA sense strand
agaaugugccaucaaggua

SEQ ID NO: 1307463 - RNA, 19 nt, Homo sapiens
  misc_RNA (1)...(19): siRNA sense strand
ggagauggaauuggaaugg

SEQ ID NO: 1307464 - RNA, 19 nt, Homo sapiens
  misc_RNA (1)...(19): siRNA sense strand
guaaacuaaauccacguaa

SEQ ID NO: 1307465 - RNA, 19 nt, Homo sapiens
  misc_RNA (1)...(19): siRNA sense strand
uaaagaucgcuucaguaaa

SEQ ID NO: 1307466 - RNA, 19 nt, Homo sapiens
  misc_RNA (1)...(19): siRNA sense strand
aagacacguuuacuuaugu

SEQ ID NO: 1307467 - RNA, 19 nt, Homo sapiens
  misc_RNA (1)...(19): siRNA sense strand
gagacaaucacuggcugua

SEQ ID NO: 1307468 - RNA, 19 nt, Homo sapiens
  misc_RNA (1)...(19): siRNA sense strand
gaauuuaagaaucgugaca

SEQ ID NO: 1307469 - RNA, 19 nt, Homo sapiens
  misc_RNA (1)...(19): siRNA sense strand
gcgauagcucugaagauga

SEQ ID NO: 1307470 - RNA, 19 nt, Homo sapiens
  misc_RNA (1)...(19): siRNA sense strand
gcaaguguccaugggcuau

SEQ ID NO: 1307471 - RNA, 19 nt, Homo sapiens
  misc_RNA (1)...(19): siRNA sense strand
uauuggccaugaucaaguu

SEQ ID NO: 1307472 - RNA, 19 nt, Homo sapiens
  misc_RNA (1)...(19): siRNA sense strand
gauggaauuggaauggauu

SEQ ID NO: 1307473 - RNA, 19 nt, Homo sapiens
  misc_RNA (1)...(19): siRNA sense strand
aaagauaucaccaccaaac

SEQ ID NO: 1307474 - RNA, 19 nt, Homo sapiens
  misc_RNA (1)...(19): siRNA sense strand
auagcaaaguuuccauuuc

SEQ ID NO: 1307475 - RNA, 19 nt, Homo sapiens
  misc_RNA (1)...(19): siRNA sense strand
agaauugcaguuagaagaa

SEQ ID NO: 1307476 - RNA, 19 nt, Homo sapiens
  misc_RNA (1)...(19): siRNA sense strand
ucgcuucaguaaacuaaau

SEQ ID NO: 1307477 - RNA, 19 nt, Homo sapiens
  misc_RNA (1)...(19): siRNA sense strand
uacagaaugugccaucaag

SEQ ID NO: 1307478 - RNA, 19 nt, Homo sapiens
  misc_RNA (1)...(19): siRNA sense strand
ccaccaaacaugaugaagu

SEQ ID NO: 1307479 - RNA, 19 nt, Homo sapiens
  misc_RNA (1)...(19): siRNA sense strand
agcgauagcucugaagaug

SEQ ID NO: 1307480 - RNA, 19 nt, Homo sapiens
  misc_RNA (1)...(19): siRNA sense strand
uaugcuggcucagaugcua

SEQ ID NO: 1307481 - RNA, 19 nt, Homo sapiens
  misc_RNA (1)...(19): siRNA sense strand
ugaaggaccauuuauuacu

SEQ ID NO: 1307482 - RNA, 19 nt, Homo sapiens
  misc_RNA (1)...(19): siRNA sense strand
ugcacaaucucgcaagaau

SEQ ID NO: 1307483 - RNA, 19 nt, Homo sapiens
  misc_RNA (1)...(19): siRNA sense strand
aagaauugcaguuagaaga

SEQ ID NO: 1307484 - RNA, 19 nt, Homo sapiens
  misc_RNA (1)...(19): siRNA sense strand
gaaaggcccucaacuguca

SEQ ID NO: 1307485 - RNA, 19 nt, Homo sapiens
  misc_RNA (1)...(19): siRNA sense strand
gagaaaguguugccaagga

SEQ ID NO: 1307486 - RNA, 19 nt, Homo sapiens
  misc_RNA (1)...(19): siRNA sense strand
caucaaggaucccaaccua

SEQ ID NO: 1307487 - RNA, 19 nt, Homo sapiens
  misc_RNA (1)...(19): siRNA sense strand
ccugcugccugaaguauua

SEQ ID NO: 1307488 - RNA, 19 nt, Homo sapiens
  misc_RNA (1)...(19): siRNA sense strand
ggagacuaguggugggaua

SEQ ID NO: 1307489 - RNA, 19 nt, Homo sapiens
  misc_RNA (1)...(19): siRNA sense strand
gaacuuguccacgguuaaa

SEQ ID NO: 1307490 - RNA, 19 nt, Homo sapiens
  misc_RNA (1)...(19): siRNA sense strand
guccucauccuuaucauua

SEQ ID NO: 1307491 - RNA, 19 nt, Homo sapiens
  misc_RNA (1)...(19): siRNA sense strand
gaaguauuaugagaaagug

SEQ ID NO: 1307492 - RNA, 19 nt, Homo sapiens
  misc_RNA (1)...(19): siRNA sense strand
ccugaaguauuaugagaaa

SEQ ID NO: 1307493 - RNA, 19 nt, Homo sapiens
  misc_RNA (1)...(19): siRNA sense strand
cagaaaggcccucaacugu

SEQ ID NO: 1307494 - RNA, 19 nt, Homo sapiens
  misc_RNA (1)...(19): siRNA sense strand
ggaacuuguccacgguuaa

SEQ ID NO: 1307495 - RNA, 19 nt, Homo sapiens
  misc_RNA (1)...(19): siRNA sense strand
caagaggaaccgagaaguc

SEQ ID NO: 1307496 - RNA, 19 nt, Homo sapiens
  misc_RNA (1)...(19): siRNA sense strand
acagaaaggcccucaacug

SEQ ID NO: 1307497 - RNA, 19 nt, Homo sapiens
  misc_RNA (1)...(19): siRNA sense strand
acgacuggguccaagagua

SEQ ID NO: 1307498 - RNA, 19 nt, Homo sapiens
  misc_RNA (1)...(19): siRNA sense strand
aggaacuuguccacgguua

SEQ ID NO: 1307499 - RNA, 19 nt, Homo sapiens
  misc_RNA (1)...(19): siRNA sense strand
ugccugaaguauuaugaga

SEQ ID NO: 1307500 - RNA, 19 nt, Homo sapiens
  misc_RNA (1)...(19): siRNA sense strand
cuccuuguccucauccuua

SEQ ID NO: 1307501 - RNA, 19 nt, Homo sapiens
  misc_RNA (1)...(19): siRNA sense strand
gcuccucaacucccaguga

SEQ ID NO: 1307502 - RNA, 19 nt, Homo sapiens
  misc_RNA (1)...(19): siRNA sense strand
gguccaagaguacaucaag

SEQ ID NO: 1307503 - RNA, 19 nt, Homo sapiens
  misc_RNA (1)...(19): siRNA sense strand
gaucccaaccuaccuuugc

SEQ ID NO: 1307504 - RNA, 19 nt, Homo sapiens
  misc_RNA (1)...(19): siRNA sense strand
ccaccugcugccugaagua

SEQ ID NO: 1307505 - RNA, 19 nt, Homo sapiens
  misc_RNA (1)...(19): siRNA sense strand
cgacuggguccaagaguac

SEQ ID NO: 1307506 - RNA, 19 nt, Homo sapiens
  misc_RNA (1)...(19): siRNA sense strand
guggugggauacagaaagg

SEQ ID NO: 1307507 - RNA, 19 nt, Homo sapiens
  misc_RNA (1)...(19): siRNA sense strand
ccaagaguacaucaaggau

SEQ ID NO: 1307508 - RNA, 19 nt, Homo sapiens
  misc_RNA (1)...(19): siRNA sense strand
gagaaaccauuguggaauu

SEQ ID NO: 1307509 - RNA, 19 nt, Homo sapiens
  misc_RNA (1)...(19): siRNA sense strand
aaacacagcuucacaaugg

SEQ ID NO: 1307510 - RNA, 19 nt, Homo sapiens
  misc_RNA (1)...(19): siRNA sense strand
gagaagaacaugaagauga

SEQ ID NO: 1307511 - RNA, 19 nt, Homo sapiens
  misc_RNA (1)...(19): siRNA sense strand
gggcauggguggcuacgua

SEQ ID NO: 1307512 - RNA, 19 nt, Homo sapiens
  misc_RNA (1)...(19): siRNA sense strand
ggauuaugcuuuccaguau

SEQ ID NO: 1307513 - RNA, 19 nt, Homo sapiens
  misc_RNA (1)...(19): siRNA sense strand
ggacagauguuccggaaaa

SEQ ID NO: 1307514 - RNA, 19 nt, Homo sapiens
  misc_RNA (1)...(19): siRNA sense strand
aauauuggcuggugaagaa

SEQ ID NO: 1307515 - RNA, 19 nt, Homo sapiens
  misc_RNA (1)...(19): siRNA sense strand
guaaguacaaucccaagua

SEQ ID NO: 1307516 - RNA, 19 nt, Homo sapiens
  misc_RNA (1)...(19): siRNA sense strand
gaaagcacagaaucagaua

SEQ ID NO: 1307517 - RNA, 19 nt, Homo sapiens
  misc_RNA (1)...(19): siRNA sense strand
uaaguacaaucccaaguau

SEQ ID NO: 1307518 - RNA, 19 nt, Homo sapiens
  misc_RNA (1)...(19): siRNA sense strand
cagcuacucuaacauuuga

SEQ ID NO: 1307519 - RNA, 19 nt, Homo sapiens
  misc_RNA (1)...(19): siRNA sense strand
gaacgccuuuggagacaug

SEQ ID NO: 1307520 - RNA, 19 nt, Homo sapiens
  misc_RNA (1)...(19): siRNA sense strand
gcacagaaucagauaacaa

SEQ ID NO: 1307521 - RNA, 19 nt, Homo sapiens
  misc_RNA (1)...(19): siRNA sense strand
gauuauacggcaugaauga

SEQ ID NO: 1307522 - RNA, 19 nt, Homo sapiens
  misc_RNA (1)...(19): siRNA sense strand
gaaacacagcuucacaaug

SEQ ID NO: 1307523 - RNA, 19 nt, Homo sapiens
  misc_RNA (1)...(19): siRNA sense strand
caaguauucuguugcuaau

SEQ ID NO: 1307524 - RNA, 19 nt, Homo sapiens
  misc_RNA (1)...(19): siRNA sense strand
ggagagcagugugggagaa

SEQ ID NO: 1307525 - RNA, 19 nt, Homo sapiens
  misc_RNA (1)...(19): siRNA sense strand
gcccauuucuguugcuauu

SEQ ID NO: 1307526 - RNA, 19 nt, Homo sapiens
  misc_RNA (1)...(19): siRNA sense strand
ccaaguauucuguugcuaa

SEQ ID NO: 1307527 - RNA, 19 nt, Homo sapiens
  misc_RNA (1)...(19): siRNA sense strand
agaagaacaugaagaugau

SEQ ID NO: 1307528 - RNA, 19 nt, Homo sapiens
  misc_RNA (1)...(19): siRNA sense strand
ccauuucuguugcuauuga

SEQ ID NO: 1307529 - RNA, 19 nt, Homo sapiens
  misc_RNA (1)...(19): siRNA sense strand
uccaguauguucaggauaa

SEQ ID NO: 1307530 - RNA, 19 nt, Homo sapiens
  misc_RNA (1)...(19): siRNA sense strand
ggaauugccucagcuacuc

SEQ ID NO: 1307531 - RNA, 19 nt, Homo sapiens
  misc_RNA (1)...(19): siRNA sense strand
ggaaacacagcuucacaau

SEQ ID NO: 1307532 - RNA, 19 nt, Homo sapiens
  misc_RNA (1)...(19): siRNA sense strand
aguauucuguugcuaauga

SEQ ID NO: 1307533 - RNA, 19 nt, Homo sapiens
  misc_RNA (1)...(19): siRNA sense strand
cggcaugaaugaagaagga

SEQ ID NO: 1307534 - RNA, 19 nt, Homo sapiens
  misc_RNA (1)...(19): siRNA sense strand
ggaauccuauccauaugag

SEQ ID NO: 1307535 - RNA, 19 nt, Homo sapiens
  misc_RNA (1)...(19): siRNA sense strand
ugacuccugugaagaauca

SEQ ID NO: 1307536 - RNA, 19 nt, Homo sapiens
  misc_RNA (1)...(19): siRNA sense strand
gaacaugaagaugauugaa

SEQ ID NO: 1307537 - RNA, 19 nt, Homo sapiens
  misc_RNA (1)...(19): siRNA sense strand
cagaagaauccuguaagua

SEQ ID NO: 1307538 - RNA, 19 nt, Homo sapiens
  misc_RNA (1)...(19): siRNA sense strand
caugaccagugaagaauuc

SEQ ID NO: 1307539 - RNA, 19 nt, Homo sapiens
  misc_RNA (1)...(19): siRNA sense strand
ggaauacagggaagggaaa

SEQ ID NO: 1307540 - RNA, 19 nt, Homo sapiens
  misc_RNA (1)...(19): siRNA sense strand
gaacugcacaaucaggaau

SEQ ID NO: 1307541 - RNA, 19 nt, Homo sapiens
  misc_RNA (1)...(19): siRNA sense strand
ucaggcaggugaugaaugg

SEQ ID NO: 1307542 - RNA, 19 nt, Homo sapiens
  misc_RNA (1)...(19): siRNA sense strand
acguaaagauggccaaaga

SEQ ID NO: 1307543 - RNA, 19 nt, Homo sapiens
  misc_RNA (1)...(19): siRNA sense strand
gcagugaagacauggauca

SEQ ID NO: 1307544 - RNA, 19 nt, Homo sapiens
  misc_RNA (1)...(19): siRNA sense strand
gggagaagaacaugaagau

SEQ ID NO: 1307545 - RNA, 19 nt, Homo sapiens
  misc_RNA (1)...(19): siRNA sense strand
ggagaaaccauuguggaau

SEQ ID NO: 1307546 - RNA, 19 nt, Homo sapiens
  misc_RNA (1)...(19): siRNA sense strand
cuacgugacuccugugaag

SEQ ID NO: 1307547 - RNA, 19 nt, Homo sapiens
  misc_RNA (1)...(19): siRNA sense strand
agacaugaccagugaagaa

SEQ ID NO: 1307548 - RNA, 19 nt, Homo sapiens
  misc_RNA (1)...(19): siRNA sense strand
ggagaaggcccugaugaag

SEQ ID NO: 1307549 - RNA, 19 nt, Homo sapiens
  misc_RNA (1)...(19): siRNA sense strand
gauuaugcuuuccaguaug

SEQ ID NO: 1307550 - RNA, 19 nt, Homo sapiens
  misc_RNA (1)...(19): siRNA sense strand
agaagaauccuguaaguac

SEQ ID NO: 1307551 - RNA, 19 nt, Homo sapiens
  misc_RNA (1)...(19): siRNA sense strand
cauaugaggcaacagaaga

SEQ ID NO: 1307552 - RNA, 19 nt, Homo sapiens
  misc_RNA (1)...(19): siRNA sense strand
aguccuuccuguucuauaa

SEQ ID NO: 1307553 - RNA, 19 nt, Homo sapiens
  misc_RNA (1)...(19): siRNA sense strand
cagauuauacggcaugaau

SEQ ID NO: 1307554 - RNA, 19 nt, Homo sapiens
  misc_RNA (1)...(19): siRNA sense strand
ggcgaugcacaacagauua

SEQ ID NO: 1307555 - RNA, 19 nt, Homo sapiens
  misc_RNA (1)...(19): siRNA sense strand
uuggagacaugaccaguga

SEQ ID NO: 1307556 - RNA, 19 nt, Homo sapiens
  misc_RNA (1)...(19): siRNA sense strand
gggaaacacagcuucacaa

SEQ ID NO: 1307557 - RNA, 19 nt, Homo sapiens
  misc_RNA (1)...(19): siRNA sense strand
gaagaaucagggucagugu

SEQ ID NO: 1307558 - RNA, 19 nt, Homo sapiens
  misc_RNA (1)...(19): siRNA sense strand
agaaaccauuguggaauug

SEQ ID NO: 1307559 - RNA, 19 nt, Homo sapiens
  misc_RNA (1)...(19): siRNA sense strand
ccucagcuacucuaacauu

SEQ ID NO: 1307560 - RNA, 19 nt, Homo sapiens
  misc_RNA (1)...(19): siRNA sense strand
ugaaagcacagaaucagau

SEQ ID NO: 1307561 - RNA, 19 nt, Homo sapiens
  misc_RNA (1)...(19): siRNA sense strand
uauacggcaugaaugaaga

SEQ ID NO: 1307562 - RNA, 19 nt, Homo sapiens
  misc_RNA (1)...(19): siRNA sense strand
gaauucaggcaggugauga

SEQ ID NO: 1307563 - RNA, 19 nt, Homo sapiens
  misc_RNA (1)...(19): siRNA sense strand
gcaaugguggccuaaugga

SEQ ID NO: 1307564 - RNA, 19 nt, Homo sapiens
  misc_RNA (1)...(19): siRNA sense strand
cugcaaugguggccuaaug

SEQ ID NO: 1307565 - RNA, 19 nt, Homo sapiens
  misc_RNA (1)...(19): siRNA sense strand
gagcagugugggagaagaa

SEQ ID NO: 1307566 - RNA, 19 nt, Homo sapiens
  misc_RNA (1)...(19): siRNA sense strand
gaacagcuggggugaagaa

SEQ ID NO: 1307567 - RNA, 19 nt, Homo sapiens
  misc_RNA (1)...(19): siRNA sense strand
cacagaaucagauaacaau

SEQ ID NO: 1307568 - RNA, 19 nt, Homo sapiens
  misc_RNA (1)...(19): siRNA sense strand
gcaaugaaggcugcaaugg

SEQ ID NO: 1307569 - RNA, 19 nt, Homo sapiens
  misc_RNA (1)...(19): siRNA sense strand
acaugaagaugauugaacu

SEQ ID NO: 1307570 - RNA, 19 nt, Homo sapiens
  misc_RNA (1)...(19): siRNA sense strand
gaagaacaugaagaugauu

SEQ ID NO: 1307571 - RNA, 19 nt, Homo sapiens
  misc_RNA (1)...(19): siRNA sense strand
ggugguuggcuacggauuu

SEQ ID NO: 1307572 - RNA, 19 nt, Homo sapiens
  misc_RNA (1)...(19): siRNA sense strand
gugguuggcuacggauuug

SEQ ID NO: 1307573 - RNA, 19 nt, Homo sapiens
  misc_RNA (1)...(19): siRNA sense strand
ggagaagaacaugaagaug

SEQ ID NO: 1307574 - RNA, 19 nt, Homo sapiens
  misc_RNA (1)...(19): siRNA sense strand
cggagaaaccauuguggaa

SEQ ID NO: 1307575 - RNA, 19 nt, Homo sapiens
  misc_RNA (1)...(19): siRNA sense strand
gcgaugcacaacagauuau

SEQ ID NO: 1307576 - RNA, 19 nt, Homo sapiens
  misc_RNA (1)...(19): siRNA sense strand
acucauccuugcugccuuu

SEQ ID NO: 1307577 - RNA, 19 nt, Homo sapiens
  misc_RNA (1)...(19): siRNA sense strand
ggagacaugaccagugaag

SEQ ID NO: 1307578 - RNA, 19 nt, Homo sapiens
  misc_RNA (1)...(19): siRNA sense strand
ccaggaaccucuguuuuau

SEQ ID NO: 1307579 - RNA, 19 nt, Homo sapiens
  misc_RNA (1)...(19): siRNA sense strand
gacaugaccagugaagaau

SEQ ID NO: 1307580 - RNA, 19 nt, Homo sapiens
  misc_RNA (1)...(19): siRNA sense strand
ugccucagcuacucuaaca

SEQ ID NO: 1307581 - RNA, 19 nt, Homo sapiens
  misc_RNA (1)...(19): siRNA sense strand
aguacaaucccaaguauuc

SEQ ID NO: 1307582 - RNA, 19 nt, Homo sapiens
  misc_RNA (1)...(19): siRNA sense strand
ucuaacauuugaucacagu

SEQ ID NO: 1307583 - RNA, 19 nt, Homo sapiens
  misc_RNA (1)...(19): siRNA sense strand
aaugguggccuaauggauu

SEQ ID NO: 1307584 - RNA, 19 nt, Homo sapiens
  misc_RNA (1)...(19): siRNA sense strand
caaugaaggcugcaauggu

SEQ ID NO: 1307585 - RNA, 19 nt, Homo sapiens
  misc_RNA (1)...(19): siRNA sense strand
gaggcacaguggaccaagu

SEQ ID NO: 1307586 - RNA, 19 nt, Homo sapiens
  misc_RNA (1)...(19): siRNA sense strand
ggauuugaaagcacagaau

SEQ ID NO: 1307587 - RNA, 19 nt, Homo sapiens
  misc_RNA (1)...(19): siRNA sense strand
gcuaaugacaccggcuuug

SEQ ID NO: 1307588 - RNA, 19 nt, Homo sapiens
  misc_RNA (1)...(19): siRNA sense strand
auggaggccuggacucuga

SEQ ID NO: 1307589 - RNA, 19 nt, Homo sapiens
  misc_RNA (1)...(19): siRNA sense strand
aaucccaaguauucuguug

SEQ ID NO: 1307590 - RNA, 19 nt, Homo sapiens
  misc_RNA (1)...(19): siRNA sense strand
ccaaagaccggagaaacca

SEQ ID NO: 1307591 - RNA, 19 nt, Homo sapiens
  misc_RNA (1)...(19): siRNA sense strand
caugaguccuuccuguucu

SEQ ID NO: 1307592 - RNA, 19 nt, Homo sapiens
  misc_RNA (1)...(19): siRNA sense strand
ucagcuacucuaacauuug

SEQ ID NO: 1307593 - RNA, 19 nt, Homo sapiens
  misc_RNA (1)...(19): siRNA sense strand
aaagaccggagaaaccauu

SEQ ID NO: 1307594 - RNA, 19 nt, Homo sapiens
  misc_RNA (1)...(19): siRNA sense strand
cucagcuacucuaacauuu

SEQ ID NO: 1307595 - RNA, 19 nt, Homo sapiens
  misc_RNA (1)...(19): siRNA sense strand
gcaggugaugaauggcuuu

SEQ ID NO: 1307596 - RNA, 19 nt, Homo sapiens
  misc_RNA (1)...(19): siRNA sense strand
uaaugacaccggcuuugug

SEQ ID NO: 1307597 - RNA, 19 nt, Homo sapiens
  misc_RNA (1)...(19): siRNA sense strand
ggccuggacucugaggaau

SEQ ID NO: 1307598 - RNA, 19 nt, Homo sapiens
  misc_RNA (1)...(19): siRNA sense strand
agagaaaggcuacgugacu

SEQ ID NO: 1307599 - RNA, 19 nt, Homo sapiens
  misc_RNA (1)...(19): siRNA sense strand
aggaaccucuguuuuauga

SEQ ID NO: 1307600 - RNA, 19 nt, Homo sapiens
  misc_RNA (1)...(19): siRNA sense strand
gcucuugaaggacagaugu

SEQ ID NO: 1307601 - RNA, 19 nt, Homo sapiens
  misc_RNA (1)...(19): siRNA sense strand
gaaggcgaugcacaacaga

SEQ ID NO: 1307602 - RNA, 19 nt, Homo sapiens
  misc_RNA (1)...(19): siRNA sense strand
gcauggguggcuacguaaa

SEQ ID NO: 1307603 - RNA, 19 nt, Homo sapiens
  misc_RNA (1)...(19): siRNA sense strand
ucaugaguccuuccuguuc

SEQ ID NO: 1307604 - RNA, 19 nt, Homo sapiens
  misc_RNA (1)...(19): siRNA sense strand
ccaguauguucaggauaau

SEQ ID NO: 1307605 - RNA, 19 nt, Homo sapiens
  misc_RNA (1)...(19): siRNA sense strand
aggagaaggcccugaugaa

SEQ ID NO: 1307606 - RNA, 19 nt, Homo sapiens
  misc_RNA (1)...(19): siRNA sense strand
gaccggagaaaccauugug

SEQ ID NO: 1307607 - RNA, 19 nt, Homo sapiens
  misc_RNA (1)...(19): siRNA sense strand
gggaagggaaacacagcuu

SEQ ID NO: 1307608 - RNA, 19 nt, Homo sapiens
  misc_RNA (1)...(19): siRNA sense strand
gagaaaccauuguggaauu

SEQ ID NO: 1307609 - RNA, 19 nt, Homo sapiens
  misc_RNA (1)...(19): siRNA sense strand
aaacacagcuucacaaugg

SEQ ID NO: 1307610 - RNA, 19 nt, Homo sapiens
  misc_RNA (1)...(19): siRNA sense strand
gagaagaacaugaagauga

SEQ ID NO: 1307611 - RNA, 19 nt, Homo sapiens
  misc_RNA (1)...(19): siRNA sense strand
gggcauggguggcuacgua

SEQ ID NO: 1307612 - RNA, 19 nt, Homo sapiens
  misc_RNA (1)...(19): siRNA sense strand
ggauuaugcuuuccaguau

SEQ ID NO: 1307613 - RNA, 19 nt, Homo sapiens
  misc_RNA (1)...(19): siRNA sense strand
ggacagauguuccggaaaa

SEQ ID NO: 1307614 - RNA, 19 nt, Homo sapiens
  misc_RNA (1)...(19): siRNA sense strand
aauauuggcuggugaagaa

SEQ ID NO: 1307615 - RNA, 19 nt, Homo sapiens
  misc_RNA (1)...(19): siRNA sense strand
guaaguacaaucccaagua

SEQ ID NO: 1307616 - RNA, 19 nt, Homo sapiens
  misc_RNA (1)...(19): siRNA sense strand
gaaagcacagaaucagaua

SEQ ID NO: 1307617 - RNA, 19 nt, Homo sapiens
  misc_RNA (1)...(19): siRNA sense strand
uaaguacaaucccaaguau

SEQ ID NO: 1307618 - RNA, 19 nt, Homo sapiens
  misc_RNA (1)...(19): siRNA sense strand
cagcuacucuaacauuuga

SEQ ID NO: 1307619 - RNA, 19 nt, Homo sapiens
  misc_RNA (1)...(19): siRNA sense strand
gaacgccuuuggagacaug

SEQ ID NO: 1307620 - RNA, 19 nt, Homo sapiens
  misc_RNA (1)...(19): siRNA sense strand
gcacagaaucagauaacaa

SEQ ID NO: 1307621 - RNA, 19 nt, Homo sapiens
  misc_RNA (1)...(19): siRNA sense strand
gauuauacggcaugaauga

SEQ ID NO: 1307622 - RNA, 19 nt, Homo sapiens
  misc_RNA (1)...(19): siRNA sense strand
gaaacacagcuucacaaug

SEQ ID NO: 1307623 - RNA, 19 nt, Homo sapiens
  misc_RNA (1)...(19): siRNA sense strand
caaguauucuguugcuaau

SEQ ID NO: 1307624 - RNA, 19 nt, Homo sapiens
  misc_RNA (1)...(19): siRNA sense strand
ggagagcagugugggagaa

SEQ ID NO: 1307625 - RNA, 19 nt, Homo sapiens
  misc_RNA (1)...(19): siRNA sense strand
gcccauuucuguugcuauu

SEQ ID NO: 1307626 - RNA, 19 nt, Homo sapiens
  misc_RNA (1)...(19): siRNA sense strand
ccaaguauucuguugcuaa

SEQ ID NO: 1307627 - RNA, 19 nt, Homo sapiens
  misc_RNA (1)...(19): siRNA sense strand
agaagaacaugaagaugau

SEQ ID NO: 1307628 - RNA, 19 nt, Homo sapiens
  misc_RNA (1)...(19): siRNA sense strand
ccauuucuguugcuauuga

SEQ ID NO: 1307629 - RNA, 19 nt, Homo sapiens
  misc_RNA (1)...(19): siRNA sense strand
uccaguauguucaggauaa

SEQ ID NO: 1307630 - RNA, 19 nt, Homo sapiens
  misc_RNA (1)...(19): siRNA sense strand
ggaauugccucagcuacuc

SEQ ID NO: 1307631 - RNA, 19 nt, Homo sapiens
  misc_RNA (1)...(19): siRNA sense strand
ggaaacacagcuucacaau

SEQ ID NO: 1307632 - RNA, 19 nt, Homo sapiens
  misc_RNA (1)...(19): siRNA sense strand
aguauucuguugcuaauga

SEQ ID NO: 1307633 - RNA, 19 nt, Homo sapiens
  misc_RNA (1)...(19): siRNA sense strand
cggcaugaaugaagaagga

SEQ ID NO: 1307634 - RNA, 19 nt, Homo sapiens
  misc_RNA (1)...(19): siRNA sense strand
ggaauccuauccauaugag

SEQ ID NO: 1307635 - RNA, 19 nt, Homo sapiens
  misc_RNA (1)...(19): siRNA sense strand
ugacuccugugaagaauca

SEQ ID NO: 1307636 - RNA, 19 nt, Homo sapiens
  misc_RNA (1)...(19): siRNA sense strand
gaacaugaagaugauugaa

SEQ ID NO: 1307637 - RNA, 19 nt, Homo sapiens
  misc_RNA (1)...(19): siRNA sense strand
cagaagaauccuguaagua

SEQ ID NO: 1307638 - RNA, 19 nt, Homo sapiens
  misc_RNA (1)...(19): siRNA sense strand
caugaccagugaagaauuc

SEQ ID NO: 1307639 - RNA, 19 nt, Homo sapiens
  misc_RNA (1)...(19): siRNA sense strand
ggaauacagggaagggaaa

SEQ ID NO: 1307640 - RNA, 19 nt, Homo sapiens
  misc_RNA (1)...(19): siRNA sense strand
gaacugcacaaucaggaau

SEQ ID NO: 1307641 - RNA, 19 nt, Homo sapiens
  misc_RNA (1)...(19): siRNA sense strand
ucaggcaggugaugaaugg

SEQ ID NO: 1307642 - RNA, 19 nt, Homo sapiens
  misc_RNA (1)...(19): siRNA sense strand
acguaaagauggccaaaga

SEQ ID NO: 1307643 - RNA, 19 nt, Homo sapiens
  misc_RNA (1)...(19): siRNA sense strand
gcagugaagacauggauca

SEQ ID NO: 1307644 - RNA, 19 nt, Homo sapiens
  misc_RNA (1)...(19): siRNA sense strand
gggagaagaacaugaagau

SEQ ID NO: 1307645 - RNA, 19 nt, Homo sapiens
  misc_RNA (1)...(19): siRNA sense strand
ggagaaaccauuguggaau

SEQ ID NO: 1307646 - RNA, 19 nt, Homo sapiens
  misc_RNA (1)...(19): siRNA sense strand
cuacgugacuccugugaag

SEQ ID NO: 1307647 - RNA, 19 nt, Homo sapiens
  misc_RNA (1)...(19): siRNA sense strand
agacaugaccagugaagaa

SEQ ID NO: 1307648 - RNA, 19 nt, Homo sapiens
  misc_RNA (1)...(19): siRNA sense strand
ggagaaggcccugaugaag

SEQ ID NO: 1307649 - RNA, 19 nt, Homo sapiens
  misc_RNA (1)...(19): siRNA sense strand
gauuaugcuuuccaguaug

SEQ ID NO: 1307650 - RNA, 19 nt, Homo sapiens
  misc_RNA (1)...(19): siRNA sense strand
agaagaauccuguaaguac

SEQ ID NO: 1307651 - RNA, 19 nt, Homo sapiens
  misc_RNA (1)...(19): siRNA sense strand
cauaugaggcaacagaaga

SEQ ID NO: 1307652 - RNA, 19 nt, Homo sapiens
  misc_RNA (1)...(19): siRNA sense strand
aguccuuccuguucuauaa

SEQ ID NO: 1307653 - RNA, 19 nt, Homo sapiens
  misc_RNA (1)...(19): siRNA sense strand
cagauuauacggcaugaau

SEQ ID NO: 1307654 - RNA, 19 nt, Homo sapiens
  misc_RNA (1)...(19): siRNA sense strand
ggcgaugcacaacagauua

SEQ ID NO: 1307655 - RNA, 19 nt, Homo sapiens
  misc_RNA (1)...(19): siRNA sense strand
uuggagacaugaccaguga

SEQ ID NO: 1307656 - RNA, 19 nt, Homo sapiens
  misc_RNA (1)...(19): siRNA sense strand
gggaaacacagcuucacaa

SEQ ID NO: 1307657 - RNA, 19 nt, Homo sapiens
  misc_RNA (1)...(19): siRNA sense strand
gaagaaucagggucagugu

SEQ ID NO: 1307658 - RNA, 19 nt, Homo sapiens
  misc_RNA (1)...(19): siRNA sense strand
agaaaccauuguggaauug

SEQ ID NO: 1307659 - RNA, 19 nt, Homo sapiens
  misc_RNA (1)...(19): siRNA sense strand
ccucagcuacucuaacauu

SEQ ID NO: 1307660 - RNA, 19 nt, Homo sapiens
  misc_RNA (1)...(19): siRNA sense strand
ugaaagcacagaaucagau

SEQ ID NO: 1307661 - RNA, 19 nt, Homo sapiens
  misc_RNA (1)...(19): siRNA sense strand
uauacggcaugaaugaaga

SEQ ID NO: 1307662 - RNA, 19 nt, Homo sapiens
  misc_RNA (1)...(19): siRNA sense strand
gaauucaggcaggugauga

SEQ ID NO: 1307663 - RNA, 19 nt, Homo sapiens
  misc_RNA (1)...(19): siRNA sense strand
gcaaugguggccuaaugga

SEQ ID NO: 1307664 - RNA, 19 nt, Homo sapiens
  misc_RNA (1)...(19): siRNA sense strand
cugcaaugguggccuaaug

SEQ ID NO: 1307665 - RNA, 19 nt, Homo sapiens
  misc_RNA (1)...(19): siRNA sense strand
gagcagugugggagaagaa

SEQ ID NO: 1307666 - RNA, 19 nt, Homo sapiens
  misc_RNA (1)...(19): siRNA sense strand
gaacagcuggggugaagaa

SEQ ID NO: 1307667 - RNA, 19 nt, Homo sapiens
  misc_RNA (1)...(19): siRNA sense strand
cacagaaucagauaacaau

SEQ ID NO: 1307668 - RNA, 19 nt, Homo sapiens
  misc_RNA (1)...(19): siRNA sense strand
gcaaugaaggcugcaaugg

SEQ ID NO: 1307669 - RNA, 19 nt, Homo sapiens
  misc_RNA (1)...(19): siRNA sense strand
acaugaagaugauugaacu

SEQ ID NO: 1307670 - RNA, 19 nt, Homo sapiens
  misc_RNA (1)...(19): siRNA sense strand
gaagaacaugaagaugauu

SEQ ID NO: 1307671 - RNA, 19 nt, Homo sapiens
  misc_RNA (1)...(19): siRNA sense strand
ggugguuggcuacggauuu

SEQ ID NO: 1307672 - RNA, 19 nt, Homo sapiens
  misc_RNA (1)...(19): siRNA sense strand
gugguuggcuacggauuug

SEQ ID NO: 1307673 - RNA, 19 nt, Homo sapiens
  misc_RNA (1)...(19): siRNA sense strand
ggagaagaacaugaagaug

SEQ ID NO: 1307674 - RNA, 19 nt, Homo sapiens
  misc_RNA (1)...(19): siRNA sense strand
cggagaaaccauuguggaa

SEQ ID NO: 1307675 - RNA, 19 nt, Homo sapiens
  misc_RNA (1)...(19): siRNA sense strand
gcgaugcacaacagauuau

SEQ ID NO: 1307676 - RNA, 19 nt, Homo sapiens
  misc_RNA (1)...(19): siRNA sense strand
acucauccuugcugccuuu

SEQ ID NO: 1307677 - RNA, 19 nt, Homo sapiens
  misc_RNA (1)...(19): siRNA sense strand
ggagacaugaccagugaag

SEQ ID NO: 1307678 - RNA, 19 nt, Homo sapiens
  misc_RNA (1)...(19): siRNA sense strand
ccaggaaccucuguuuuau

SEQ ID NO: 1307679 - RNA, 19 nt, Homo sapiens
  misc_RNA (1)...(19): siRNA sense strand
gacaugaccagugaagaau

SEQ ID NO: 1307680 - RNA, 19 nt, Homo sapiens
  misc_RNA (1)...(19): siRNA sense strand
ugccucagcuacucuaaca

SEQ ID NO: 1307681 - RNA, 19 nt, Homo sapiens
  misc_RNA (1)...(19): siRNA sense strand
aguacaaucccaaguauuc

SEQ ID NO: 1307682 - RNA, 19 nt, Homo sapiens
  misc_RNA (1)...(19): siRNA sense strand
ucuaacauuugaucacagu

SEQ ID NO: 1307683 - RNA, 19 nt, Homo sapiens
  misc_RNA (1)...(19): siRNA sense strand
aaugguggccuaauggauu

SEQ ID NO: 1307684 - RNA, 19 nt, Homo sapiens
  misc_RNA (1)...(19): siRNA sense strand
caaugaaggcugcaauggu

SEQ ID NO: 1307685 - RNA, 19 nt, Homo sapiens
  misc_RNA (1)...(19): siRNA sense strand
gaggcacaguggaccaagu

SEQ ID NO: 1307686 - RNA, 19 nt, Homo sapiens
  misc_RNA (1)...(19): siRNA sense strand
ggauuugaaagcacagaau

SEQ ID NO: 1307687 - RNA, 19 nt, Homo sapiens
  misc_RNA (1)...(19): siRNA sense strand
gcuaaugacaccggcuuug

SEQ ID NO: 1307688 - RNA, 19 nt, Homo sapiens
  misc_RNA (1)...(19): siRNA sense strand
auggaggccuggacucuga

SEQ ID NO: 1307689 - RNA, 19 nt, Homo sapiens
  misc_RNA (1)...(19): siRNA sense strand
aaucccaaguauucuguug

SEQ ID NO: 1307690 - RNA, 19 nt, Homo sapiens
  misc_RNA (1)...(19): siRNA sense strand
ccaaagaccggagaaacca

SEQ ID NO: 1307691 - RNA, 19 nt, Homo sapiens
  misc_RNA (1)...(19): siRNA sense strand
caugaguccuuccuguucu

SEQ ID NO: 1307692 - RNA, 19 nt, Homo sapiens
  misc_RNA (1)...(19): siRNA sense strand
ucagcuacucuaacauuug

SEQ ID NO: 1307693 - RNA, 19 nt, Homo sapiens
  misc_RNA (1)...(19): siRNA sense strand
aaagaccggagaaaccauu

SEQ ID NO: 1307694 - RNA, 19 nt, Homo sapiens
  misc_RNA (1)...(19): siRNA sense strand
cucagcuacucuaacauuu

SEQ ID NO: 1307695 - RNA, 19 nt, Homo sapiens
  misc_RNA (1)...(19): siRNA sense strand
gcaggugaugaauggcuuu

SEQ ID NO: 1307696 - RNA, 19 nt, Homo sapiens
  misc_RNA (1)...(19): siRNA sense strand
uaaugacaccggcuuugug

SEQ ID NO: 1307697 - RNA, 19 nt, Homo sapiens
  misc_RNA (1)...(19): siRNA sense strand
ggccuggacucugaggaau

SEQ ID NO: 1307698 - RNA, 19 nt, Homo sapiens
  misc_RNA (1)...(19): siRNA sense strand
agagaaaggcuacgugacu

SEQ ID NO: 1307699 - RNA, 19 nt, Homo sapiens
  misc_RNA (1)...(19): siRNA sense strand
aggaaccucuguuuuauga

SEQ ID NO: 1307700 - RNA, 19 nt, Homo sapiens
  misc_RNA (1)...(19): siRNA sense strand
gcucuugaaggacagaugu

SEQ ID NO: 1307701 - RNA, 19 nt, Homo sapiens
  misc_RNA (1)...(19): siRNA sense strand
gaaggcgaugcacaacaga

SEQ ID NO: 1307702 - RNA, 19 nt, Homo sapiens
  misc_RNA (1)...(19): siRNA sense strand
gcauggguggcuacguaaa

SEQ ID NO: 1307703 - RNA, 19 nt, Homo sapiens
  misc_RNA (1)...(19): siRNA sense strand
ucaugaguccuuccuguuc

SEQ ID NO: 1307704 - RNA, 19 nt, Homo sapiens
  misc_RNA (1)...(19): siRNA sense strand
ccaguauguucaggauaau

SEQ ID NO: 1307705 - RNA, 19 nt, Homo sapiens
  misc_RNA (1)...(19): siRNA sense strand
aggagaaggcccugaugaa

SEQ ID NO: 1307706 - RNA, 19 nt, Homo sapiens
  misc_RNA (1)...(19): siRNA sense strand
gaccggagaaaccauugug

SEQ ID NO: 1307707 - RNA, 19 nt, Homo sapiens
  misc_RNA (1)...(19): siRNA sense strand
gggaagggaaacacagcuu

SEQ ID NO: 1307708 - RNA, 19 nt, Homo sapiens
  misc_RNA (1)...(19): siRNA sense strand
gaagaaagauggccacugu

SEQ ID NO: 1307709 - RNA, 19 nt, Homo sapiens
  misc_RNA (1)...(19): siRNA sense strand
gcucuuaucuagcaaauga

SEQ ID NO: 1307710 - RNA, 19 nt, Homo sapiens
  misc_RNA (1)...(19): siRNA sense strand
uggaaucgaucguauauuu

SEQ ID NO: 1307711 - RNA, 19 nt, Homo sapiens
  misc_RNA (1)...(19): siRNA sense strand
ugaaauagaugaagacagu

SEQ ID NO: 1307712 - RNA, 19 nt, Homo sapiens
  misc_RNA (1)...(19): siRNA sense strand
ugaagacaguccuuuauau

SEQ ID NO: 1307713 - RNA, 19 nt, Homo sapiens
  misc_RNA (1)...(19): siRNA sense strand
gaagacaguccuuuauaug

SEQ ID NO: 1307714 - RNA, 19 nt, Homo sapiens
  misc_RNA (1)...(19): siRNA sense strand
gagaagcacuacuacaaag

SEQ ID NO: 1307715 - RNA, 19 nt, Homo sapiens
  misc_RNA (1)...(19): siRNA sense strand
gguggaagcucauguucga

SEQ ID NO: 1307716 - RNA, 19 nt, Homo sapiens
  misc_RNA (1)...(19): siRNA sense strand
ucagaugugucacggauga

SEQ ID NO: 1307717 - RNA, 19 nt, Homo sapiens
  misc_RNA (1)...(19): siRNA sense strand
gacaguccuuuauaugauu

SEQ ID NO: 1307718 - RNA, 19 nt, Homo sapiens
  misc_RNA (1)...(19): siRNA sense strand
gaagaagacgguaugaagu

SEQ ID NO: 1307719 - RNA, 19 nt, Homo sapiens
  misc_RNA (1)...(19): siRNA sense strand
caacgcagacuuugaaauc

SEQ ID NO: 1307720 - RNA, 19 nt, Homo sapiens
  misc_RNA (1)...(19): siRNA sense strand
gauggccacuguaauguuc

SEQ ID NO: 1307721 - RNA, 19 nt, Homo sapiens
  misc_RNA (1)...(19): siRNA sense strand
cuccucaaauccagaauua

SEQ ID NO: 1307722 - RNA, 19 nt, Homo sapiens
  misc_RNA (1)...(19): siRNA sense strand
gaugaagacaguccuuuau

SEQ ID NO: 1307723 - RNA, 19 nt, Homo sapiens
  misc_RNA (1)...(19): siRNA sense strand
gaaguugcccucacaagca

SEQ ID NO: 1307724 - RNA, 19 nt, Homo sapiens
  misc_RNA (1)...(19): siRNA sense strand
ugacaacgcagacuuugaa

SEQ ID NO: 1307725 - RNA, 19 nt, Homo sapiens
  misc_RNA (1)...(19): siRNA sense strand
agaaagauggccacuguaa

SEQ ID NO: 1307726 - RNA, 19 nt, Homo sapiens
  misc_RNA (1)...(19): siRNA sense strand
gaucaaauagacaucaaug

SEQ ID NO: 1307727 - RNA, 19 nt, Homo sapiens
  misc_RNA (1)...(19): siRNA sense strand
aaagauggccacuguaaug

SEQ ID NO: 1307728 - RNA, 19 nt, Homo sapiens
  misc_RNA (1)...(19): siRNA sense strand
gaaagauggccacuguaau

SEQ ID NO: 1307729 - RNA, 19 nt, Homo sapiens
  misc_RNA (1)...(19): siRNA sense strand
guaaacaggacauugacaa

SEQ ID NO: 1307730 - RNA, 19 nt, Homo sapiens
  misc_RNA (1)...(19): siRNA sense strand
cacuauaguccaugaaaua

SEQ ID NO: 1307731 - RNA, 19 nt, Homo sapiens
  misc_RNA (1)...(19): siRNA sense strand
ggcaagcuguguuugaugu

SEQ ID NO: 1307732 - RNA, 19 nt, Homo sapiens
  misc_RNA (1)...(19): siRNA sense strand
gaagagaagcacuacuaca

SEQ ID NO: 1307733 - RNA, 19 nt, Homo sapiens
  misc_RNA (1)...(19): siRNA sense strand
ugccguagcucuuaucuag

SEQ ID NO: 1307734 - RNA, 19 nt, Homo sapiens
  misc_RNA (1)...(19): siRNA sense strand
agacaguccuuuauaugau

SEQ ID NO: 1307735 - RNA, 19 nt, Homo sapiens
  misc_RNA (1)...(19): siRNA sense strand
ugaguaaacaggacauuga

SEQ ID NO: 1307736 - RNA, 19 nt, Homo sapiens
  misc_RNA (1)...(19): siRNA sense strand
gccagagacuuagcagaaa

SEQ ID NO: 1307737 - RNA, 19 nt, Homo sapiens
  misc_RNA (1)...(19): siRNA sense strand
gcacagcuccucaaaucca

SEQ ID NO: 1307738 - RNA, 19 nt, Homo sapiens
  misc_RNA (1)...(19): siRNA sense strand
gguggaugcugguuaucuu

SEQ ID NO: 1307739 - RNA, 19 nt, Homo sapiens
  misc_RNA (1)...(19): siRNA sense strand
gcaaagccaaagaagagaa

SEQ ID NO: 1307740 - RNA, 19 nt, Homo sapiens
  misc_RNA (1)...(19): siRNA sense strand
gaaccaaccgcuacagcau

SEQ ID NO: 1307741 - RNA, 19 nt, Homo sapiens
  misc_RNA (1)...(19): siRNA sense strand
ugacauagaccuucacaac

SEQ ID NO: 1307742 - RNA, 19 nt, Homo sapiens
  misc_RNA (1)...(19): siRNA sense strand
uauauccucucaaaugcaa

SEQ ID NO: 1307743 - RNA, 19 nt, Homo sapiens
  misc_RNA (1)...(19): siRNA sense strand
ucacuauaguccaugaaau

SEQ ID NO: 1307744 - RNA, 19 nt, Homo sapiens
  misc_RNA (1)...(19): siRNA sense strand
ccaggcaaguguaccucua

SEQ ID NO: 1307745 - RNA, 19 nt, Homo sapiens
  misc_RNA (1)...(19): siRNA sense strand
acauagaccuucacaacca

SEQ ID NO: 1307746 - RNA, 19 nt, Homo sapiens
  misc_RNA (1)...(19): siRNA sense strand
gaggaagacgacagugaaa

SEQ ID NO: 1307747 - RNA, 19 nt, Homo sapiens
  misc_RNA (1)...(19): siRNA sense strand
ccucucaaaugcaaauuca

SEQ ID NO: 1307748 - RNA, 19 nt, Homo sapiens
  misc_RNA (1)...(19): siRNA sense strand
ccacugccaugacgacaca

SEQ ID NO: 1307749 - RNA, 19 nt, Homo sapiens
  misc_RNA (1)...(19): siRNA sense strand
guugauagcucugcuccau

SEQ ID NO: 1307750 - RNA, 19 nt, Homo sapiens
  misc_RNA (1)...(19): siRNA sense strand
aagagaagcacuacuacaa

SEQ ID NO: 1307751 - RNA, 19 nt, Homo sapiens
  misc_RNA (1)...(19): siRNA sense strand
gaaucgaucguauauuucu

SEQ ID NO: 1307752 - RNA, 19 nt, Homo sapiens
  misc_RNA (1)...(19): siRNA sense strand
caaucacuauaguccauga

SEQ ID NO: 1307753 - RNA, 19 nt, Homo sapiens
  misc_RNA (1)...(19): siRNA sense strand
gcuacagcaucgucucuuc

SEQ ID NO: 1307754 - RNA, 19 nt, Homo sapiens
  misc_RNA (1)...(19): siRNA sense strand
guaccucgcagacaucuuc

SEQ ID NO: 1307755 - RNA, 19 nt, Homo sapiens
  misc_RNA (1)...(19): siRNA sense strand
caaagccaaagaagagaaa

SEQ ID NO: 1307756 - RNA, 19 nt, Homo sapiens
  misc_RNA (1)...(19): siRNA sense strand
gcgcagucauggccaagau

SEQ ID NO: 1307757 - RNA, 19 nt, Homo sapiens
  misc_RNA (1)...(19): siRNA sense strand
ggagccgcuuugugaagaa

SEQ ID NO: 1307758 - RNA, 19 nt, Homo sapiens
  misc_RNA (1)...(19): siRNA sense strand
aaaugaaguugcccucaca

SEQ ID NO: 1307759 - RNA, 19 nt, Homo sapiens
  misc_RNA (1)...(19): siRNA sense strand
agaagacgguaugaaguug

SEQ ID NO: 1307760 - RNA, 19 nt, Homo sapiens
  misc_RNA (1)...(19): siRNA sense strand
aagacaguccuuuauauga

SEQ ID NO: 1307761 - RNA, 19 nt, Homo sapiens
  misc_RNA (1)...(19): siRNA sense strand
agaugaagacaguccuuua

SEQ ID NO: 1307762 - RNA, 19 nt, Homo sapiens
  misc_RNA (1)...(19): siRNA sense strand
ggaaucgaucguauauuuc

SEQ ID NO: 1307763 - RNA, 19 nt, Homo sapiens
  misc_RNA (1)...(19): siRNA sense strand
acggaugaaugcccaauug

SEQ ID NO: 1307764 - RNA, 19 nt, Homo sapiens
  misc_RNA (1)...(19): siRNA sense strand
agagaagcacuacuacaaa

SEQ ID NO: 1307765 - RNA, 19 nt, Homo sapiens
  misc_RNA (1)...(19): siRNA sense strand
acuacaaaguggacuauuc

SEQ ID NO: 1307766 - RNA, 19 nt, Homo sapiens
  misc_RNA (1)...(19): siRNA sense strand
agaagaagacgguaugaag

SEQ ID NO: 1307767 - RNA, 19 nt, Homo sapiens
  misc_RNA (1)...(19): siRNA sense strand
aagaagacgguaugaaguu

SEQ ID NO: 1307768 - RNA, 19 nt, Homo sapiens
  misc_RNA (1)...(19): siRNA sense strand
cagcaucgucucuucagaa

SEQ ID NO: 1307769 - RNA, 19 nt, Homo sapiens
  misc_RNA (1)...(19): siRNA sense strand
gaacgggaagaguaaaguc

SEQ ID NO: 1307770 - RNA, 19 nt, Homo sapiens
  misc_RNA (1)...(19): siRNA sense strand
caaagaggaagacgacagu

SEQ ID NO: 1307771 - RNA, 19 nt, Homo sapiens
  misc_RNA (1)...(19): siRNA sense strand
uugaagagaagcacuacua

SEQ ID NO: 1307772 - RNA, 19 nt, Homo sapiens
  misc_RNA (1)...(19): siRNA sense strand
gagccgcuuugugaagaaa

SEQ ID NO: 1307773 - RNA, 19 nt, Homo sapiens
  misc_RNA (1)...(19): siRNA sense strand
guaugaaguuggccaccau

SEQ ID NO: 1307774 - RNA, 19 nt, Homo sapiens
  misc_RNA (1)...(19): siRNA sense strand
gcaggagccgcuuugugaa

SEQ ID NO: 1307775 - RNA, 19 nt, Homo sapiens
  misc_RNA (1)...(19): siRNA sense strand
acaguggaaucgaucguau

SEQ ID NO: 1307776 - RNA, 19 nt, Homo sapiens
  misc_RNA (1)...(19): siRNA sense strand
ggcgguggaugcugguuau

SEQ ID NO: 1307777 - RNA, 19 nt, Homo sapiens
  misc_RNA (1)...(19): siRNA sense strand
gcgagagucggagauauga

SEQ ID NO: 1307778 - RNA, 19 nt, Homo sapiens
  misc_RNA (1)...(19): siRNA sense strand
ucacaaccaggcaagugua

SEQ ID NO: 1307779 - RNA, 19 nt, Homo sapiens
  misc_RNA (1)...(19): siRNA sense strand
aauguucaguucaucaaug

SEQ ID NO: 1307780 - RNA, 19 nt, Homo sapiens
  misc_RNA (1)...(19): siRNA sense strand
ugcaggagccgcuuuguga

SEQ ID NO: 1307781 - RNA, 19 nt, Homo sapiens
  misc_RNA (1)...(19): siRNA sense strand
caaagagggcaaagcuugu

SEQ ID NO: 1307782 - RNA, 19 nt, Homo sapiens
  misc_RNA (1)...(19): siRNA sense strand
gagacggcaagcuguguuu

SEQ ID NO: 1307783 - RNA, 19 nt, Homo sapiens
  misc_RNA (1)...(19): siRNA sense strand
guaauguucaguucaucaa

SEQ ID NO: 1307784 - RNA, 19 nt, Homo sapiens
  misc_RNA (1)...(19): siRNA sense strand
caccauggcaguugcaaau

SEQ ID NO: 1307785 - RNA, 19 nt, Homo sapiens
  misc_RNA (1)...(19): siRNA sense strand
acucuugucuucagucaca

SEQ ID NO: 1307786 - RNA, 19 nt, Homo sapiens
  misc_RNA (1)...(19): siRNA sense strand
aauauauccucucaaaugc

SEQ ID NO: 1307787 - RNA, 19 nt, Homo sapiens
  misc_RNA (1)...(19): siRNA sense strand
agacuuagcagaaaagaaa

SEQ ID NO: 1307788 - RNA, 19 nt, Homo sapiens
  misc_RNA (1)...(19): siRNA sense strand
ccguagcucuuaucuagca

SEQ ID NO: 1307789 - RNA, 19 nt, Homo sapiens
  misc_RNA (1)...(19): siRNA sense strand
uccaugaaauagaugaaga

SEQ ID NO: 1307790 - RNA, 19 nt, Homo sapiens
  misc_RNA (1)...(19): siRNA sense strand
uguccgaggucaacagcuu

SEQ ID NO: 1307791 - RNA, 19 nt, Homo sapiens
  misc_RNA (1)...(19): siRNA sense strand
ggaguuccagaaagcacua

SEQ ID NO: 1307792 - RNA, 19 nt, Homo sapiens
  misc_RNA (1)...(19): siRNA sense strand
ugccagagacuuagcagaa

SEQ ID NO: 1307793 - RNA, 19 nt, Homo sapiens
  misc_RNA (1)...(19): siRNA sense strand
augaagacaguccuuuaua

SEQ ID NO: 1307794 - RNA, 19 nt, Homo sapiens
  misc_RNA (1)...(19): siRNA sense strand
gcuaugguuucagaugugu

SEQ ID NO: 1307795 - RNA, 19 nt, Homo sapiens
  misc_RNA (1)...(19): siRNA sense strand
gccuuccucuucuccauug

SEQ ID NO: 1307796 - RNA, 19 nt, Homo sapiens
  misc_RNA (1)...(19): siRNA sense strand
caucauuggcgcagucaug

SEQ ID NO: 1307797 - RNA, 19 nt, Homo sapiens
  misc_RNA (1)...(19): siRNA sense strand
agaggaagacgacagugaa

SEQ ID NO: 1307798 - RNA, 19 nt, Homo sapiens
  misc_RNA (1)...(19): siRNA sense strand
gacaguggaaucgaucgua

SEQ ID NO: 1307799 - RNA, 19 nt, Homo sapiens
  misc_RNA (1)...(19): siRNA sense strand
ucaaauccagaauuacuuc

SEQ ID NO: 1307800 - RNA, 19 nt, Homo sapiens
  misc_RNA (1)...(19): siRNA sense strand
gacggcaagcuguguuuga

SEQ ID NO: 1307801 - RNA, 19 nt, Homo sapiens
  misc_RNA (1)...(19): siRNA sense strand
gagaaacgagacucuuguc

SEQ ID NO: 1307802 - RNA, 19 nt, Homo sapiens
  misc_RNA (1)...(19): siRNA sense strand
ggcgagagucggagauaug

SEQ ID NO: 1307803 - RNA, 19 nt, Homo sapiens
  misc_RNA (1)...(19): siRNA sense strand
ccagagacuuagcagaaaa

SEQ ID NO: 1307804 - RNA, 19 nt, Homo sapiens
  misc_RNA (1)...(19): siRNA sense strand
cacagugccguagcucuua

SEQ ID NO: 1307805 - RNA, 19 nt, Homo sapiens
  misc_RNA (1)...(19): siRNA sense strand
ggaugcugguuaucuucug

SEQ ID NO: 1307806 - RNA, 19 nt, Homo sapiens
  misc_RNA (1)...(19): siRNA sense strand
ggaagacgacagugaaaau

SEQ ID NO: 1307807 - RNA, 19 nt, Homo sapiens
  misc_RNA (1)...(19): siRNA sense strand
ugaaaucguggucauacug

SEQ ID NO: 1307808 - RNA, 19 nt, Homo sapiens
  misc_RNA (1)...(19): siRNA sense strand
ggagaagucuggcgaggaa

SEQ ID NO: 1307809 - RNA, 19 nt, Homo sapiens
  misc_RNA (1)...(19): siRNA sense strand
cgagauaacaugaguauug

SEQ ID NO: 1307810 - RNA, 19 nt, Homo sapiens
  misc_RNA (1)...(19): siRNA sense strand
gagauaacaugaguauugu

SEQ ID NO: 1307811 - RNA, 19 nt, Homo sapiens
  misc_RNA (1)...(19): siRNA sense strand
uugaagagauuauggagaa

SEQ ID NO: 1307812 - RNA, 19 nt, Homo sapiens
  misc_RNA (1)...(19): siRNA sense strand
gaaggaaugccugaucuug

SEQ ID NO: 1307813 - RNA, 19 nt, Homo sapiens
  misc_RNA (1)...(19): siRNA sense strand
ggaagucgagauaacauga

SEQ ID NO: 1307814 - RNA, 19 nt, Homo sapiens
  misc_RNA (1)...(19): siRNA sense strand
gcuggcaagcguaauguua

SEQ ID NO: 1307815 - RNA, 19 nt, Homo sapiens
  misc_RNA (1)...(19): siRNA sense strand
ccacauagagaaagugaug

SEQ ID NO: 1307816 - RNA, 19 nt, Homo sapiens
  misc_RNA (1)...(19): siRNA sense strand
gcaagcguaauguuauuga

SEQ ID NO: 1307817 - RNA, 19 nt, Homo sapiens
  misc_RNA (1)...(19): siRNA sense strand
caagcguaauguuauugaa

SEQ ID NO: 1307818 - RNA, 19 nt, Homo sapiens
  misc_RNA (1)...(19): siRNA sense strand
gaauccacauagagaaagu

SEQ ID NO: 1307819 - RNA, 19 nt, Homo sapiens
  misc_RNA (1)...(19): siRNA sense strand
uggcaagcguaauguuauu

SEQ ID NO: 1307820 - RNA, 19 nt, Homo sapiens
  misc_RNA (1)...(19): siRNA sense strand
gauaacaugaguauuguac

SEQ ID NO: 1307821 - RNA, 19 nt, Homo sapiens
  misc_RNA (1)...(19): siRNA sense strand
gauaagcacuuggaaucac

SEQ ID NO: 1307822 - RNA, 19 nt, Homo sapiens
  misc_RNA (1)...(19): siRNA sense strand
ggaaggaaugccugaucuu

SEQ ID NO: 1307823 - RNA, 19 nt, Homo sapiens
  misc_RNA (1)...(19): siRNA sense strand
ggauaagcacuuggaauca

SEQ ID NO: 1307824 - RNA, 19 nt, Homo sapiens
  misc_RNA (1)...(19): siRNA sense strand
ugccugaucuugcccaugu

SEQ ID NO: 1307825 - RNA, 19 nt, Homo sapiens
  misc_RNA (1)...(19): siRNA sense strand
caucuugucugcagaaaau

SEQ ID NO: 1307826 - RNA, 19 nt, Homo sapiens
  misc_RNA (1)...(19): siRNA sense strand
uagacugaauccacauaga

SEQ ID NO: 1307827 - RNA, 19 nt, Homo sapiens
  misc_RNA (1)...(19): siRNA sense strand
gcagaaaauaucccaaauu

SEQ ID NO: 1307828 - RNA, 19 nt, Homo sapiens
  misc_RNA (1)...(19): siRNA sense strand
gaagagauuauggagaagu

SEQ ID NO: 1307829 - RNA, 19 nt, Homo sapiens
  misc_RNA (1)...(19): siRNA sense strand
uugaagcuguuuauaguag

SEQ ID NO: 1307830 - RNA, 19 nt, Homo sapiens
  misc_RNA (1)...(19): siRNA sense strand
aaucacggguugaagagau

SEQ ID NO: 1307831 - RNA, 19 nt, Homo sapiens
  misc_RNA (1)...(19): siRNA sense strand
guauuguacuaguuugcuu

SEQ ID NO: 1307832 - RNA, 19 nt, Homo sapiens
  misc_RNA (1)...(19): siRNA sense strand
gaggaaggaaugccugauc

SEQ ID NO: 1307833 - RNA, 19 nt, Homo sapiens
  misc_RNA (1)...(19): siRNA sense strand
ggaaucacggguugaagag

SEQ ID NO: 1307834 - RNA, 19 nt, Homo sapiens
  misc_RNA (1)...(19): siRNA sense strand
gaagcuguuuauaguagac

SEQ ID NO: 1307835 - RNA, 19 nt, Homo sapiens
  misc_RNA (1)...(19): siRNA sense strand
cucccaaggucucagauga

SEQ ID NO: 1307836 - RNA, 19 nt, Homo sapiens
  misc_RNA (1)...(19): siRNA sense strand
auucagaguuggauaagca

SEQ ID NO: 1307837 - RNA, 19 nt, Homo sapiens
  misc_RNA (1)...(19): siRNA sense strand
ugaagcuguuuauaguaga

SEQ ID NO: 1307838 - RNA, 19 nt, Homo sapiens
  misc_RNA (1)...(19): siRNA sense strand
agaguuggauaagcacuug

SEQ ID NO: 1307839 - RNA, 19 nt, Homo sapiens
  misc_RNA (1)...(19): siRNA sense strand
uggauaagcacuuggaauc

SEQ ID NO: 1307840 - RNA, 19 nt, Homo sapiens
  misc_RNA (1)...(19): siRNA sense strand
gacugaauccacauagaga

SEQ ID NO: 1307841 - RNA, 19 nt, Homo sapiens
  misc_RNA (1)...(19): siRNA sense strand
aagauucagaguuggauaa

SEQ ID NO: 1307842 - RNA, 19 nt, Homo sapiens
  misc_RNA (1)...(19): siRNA sense strand
uggaaucacggguugaaga

SEQ ID NO: 1307843 - RNA, 19 nt, Homo sapiens
  misc_RNA (1)...(19): siRNA sense strand
guacuaguuugcuuuucaa

SEQ ID NO: 1307844 - RNA, 19 nt, Homo sapiens
  misc_RNA (1)...(19): siRNA sense strand
gucgagauaacaugaguau

SEQ ID NO: 1307845 - RNA, 19 nt, Homo sapiens
  misc_RNA (1)...(19): siRNA sense strand
gcgcaucuugucugcagaa

SEQ ID NO: 1307846 - RNA, 19 nt, Homo sapiens
  misc_RNA (1)...(19): siRNA sense strand
aaagauucagaguuggaua

SEQ ID NO: 1307847 - RNA, 19 nt, Homo sapiens
  misc_RNA (1)...(19): siRNA sense strand
aggaaggaaugccugaucu

SEQ ID NO: 1307848 - RNA, 19 nt, Homo sapiens
  misc_RNA (1)...(19): siRNA sense strand
gggaagucgagauaacaug

SEQ ID NO: 1307849 - RNA, 19 nt, Homo sapiens
  misc_RNA (1)...(19): siRNA sense strand
gaaucacggguugaagaga

SEQ ID NO: 1307850 - RNA, 19 nt, Homo sapiens
  misc_RNA (1)...(19): siRNA sense strand
cccaaggucucagaugaag

SEQ ID NO: 1307851 - RNA, 19 nt, Homo sapiens
  misc_RNA (1)...(19): siRNA sense strand
gaagucuggcgaggaagga

SEQ ID NO: 1307852 - RNA, 19 nt, Homo sapiens
  misc_RNA (1)...(19): siRNA sense strand
aagagauuauggagaaguc

SEQ ID NO: 1307853 - RNA, 19 nt, Homo sapiens
  misc_RNA (1)...(19): siRNA sense strand
ggagaagucuggcgaggaa

SEQ ID NO: 1307854 - RNA, 19 nt, Homo sapiens
  misc_RNA (1)...(19): siRNA sense strand
cgagauaacaugaguauug

SEQ ID NO: 1307855 - RNA, 19 nt, Homo sapiens
  misc_RNA (1)...(19): siRNA sense strand
gagauaacaugaguauugu

SEQ ID NO: 1307856 - RNA, 19 nt, Homo sapiens
  misc_RNA (1)...(19): siRNA sense strand
uugaagagauuauggagaa

SEQ ID NO: 1307857 - RNA, 19 nt, Homo sapiens
  misc_RNA (1)...(19): siRNA sense strand
gaaggaaugccugaucuug

SEQ ID NO: 1307858 - RNA, 19 nt, Homo sapiens
  misc_RNA (1)...(19): siRNA sense strand
ggaagucgagauaacauga

SEQ ID NO: 1307859 - RNA, 19 nt, Homo sapiens
  misc_RNA (1)...(19): siRNA sense strand
gcuggcaagcguaauguua

SEQ ID NO: 1307860 - RNA, 19 nt, Homo sapiens
  misc_RNA (1)...(19): siRNA sense strand
ccacauagagaaagugaug

SEQ ID NO: 1307861 - RNA, 19 nt, Homo sapiens
  misc_RNA (1)...(19): siRNA sense strand
gcaagcguaauguuauuga

SEQ ID NO: 1307862 - RNA, 19 nt, Homo sapiens
  misc_RNA (1)...(19): siRNA sense strand
caagcguaauguuauugaa

SEQ ID NO: 1307863 - RNA, 19 nt, Homo sapiens
  misc_RNA (1)...(19): siRNA sense strand
gaauccacauagagaaagu

SEQ ID NO: 1307864 - RNA, 19 nt, Homo sapiens
  misc_RNA (1)...(19): siRNA sense strand
uggcaagcguaauguuauu

SEQ ID NO: 1307865 - RNA, 19 nt, Homo sapiens
  misc_RNA (1)...(19): siRNA sense strand
gauaacaugaguauuguac

SEQ ID NO: 1307866 - RNA, 19 nt, Homo sapiens
  misc_RNA (1)...(19): siRNA sense strand
gauaagcacuuggaaucac

SEQ ID NO: 1307867 - RNA, 19 nt, Homo sapiens
  misc_RNA (1)...(19): siRNA sense strand
ggaaggaaugccugaucuu

SEQ ID NO: 1307868 - RNA, 19 nt, Homo sapiens
  misc_RNA (1)...(19): siRNA sense strand
ggauaagcacuuggaauca

SEQ ID NO: 1307869 - RNA, 19 nt, Homo sapiens
  misc_RNA (1)...(19): siRNA sense strand
ugccugaucuugcccaugu

SEQ ID NO: 1307870 - RNA, 19 nt, Homo sapiens
  misc_RNA (1)...(19): siRNA sense strand
caucuugucugcagaaaau

SEQ ID NO: 1307871 - RNA, 19 nt, Homo sapiens
  misc_RNA (1)...(19): siRNA sense strand
uagacugaauccacauaga

SEQ ID NO: 1307872 - RNA, 19 nt, Homo sapiens
  misc_RNA (1)...(19): siRNA sense strand
gcagaaaauaucccaaauu

SEQ ID NO: 1307873 - RNA, 19 nt, Homo sapiens
  misc_RNA (1)...(19): siRNA sense strand
gaagagauuauggagaagu

SEQ ID NO: 1307874 - RNA, 19 nt, Homo sapiens
  misc_RNA (1)...(19): siRNA sense strand
uugaagcuguuuauaguag

SEQ ID NO: 1307875 - RNA, 19 nt, Homo sapiens
  misc_RNA (1)...(19): siRNA sense strand
aaucacggguugaagagau

SEQ ID NO: 1307876 - RNA, 19 nt, Homo sapiens
  misc_RNA (1)...(19): siRNA sense strand
guauuguacuaguuugcuu

SEQ ID NO: 1307877 - RNA, 19 nt, Homo sapiens
  misc_RNA (1)...(19): siRNA sense strand
gaggaaggaaugccugauc

SEQ ID NO: 1307878 - RNA, 19 nt, Homo sapiens
  misc_RNA (1)...(19): siRNA sense strand
ggaaucacggguugaagag

SEQ ID NO: 1307879 - RNA, 19 nt, Homo sapiens
  misc_RNA (1)...(19): siRNA sense strand
gaagcuguuuauaguagac

SEQ ID NO: 1307880 - RNA, 19 nt, Homo sapiens
  misc_RNA (1)...(19): siRNA sense strand
cucccaaggucucagauga

SEQ ID NO: 1307881 - RNA, 19 nt, Homo sapiens
  misc_RNA (1)...(19): siRNA sense strand
auucagaguuggauaagca

SEQ ID NO: 1307882 - RNA, 19 nt, Homo sapiens
  misc_RNA (1)...(19): siRNA sense strand
ugaagcuguuuauaguaga

SEQ ID NO: 1307883 - RNA, 19 nt, Homo sapiens
  misc_RNA (1)...(19): siRNA sense strand
agaguuggauaagcacuug

SEQ ID NO: 1307884 - RNA, 19 nt, Homo sapiens
  misc_RNA (1)...(19): siRNA sense strand
uggauaagcacuuggaauc

SEQ ID NO: 1307885 - RNA, 19 nt, Homo sapiens
  misc_RNA (1)...(19): siRNA sense strand
gacugaauccacauagaga

SEQ ID NO: 1307886 - RNA, 19 nt, Homo sapiens
  misc_RNA (1)...(19): siRNA sense strand
aagauucagaguuggauaa

SEQ ID NO: 1307887 - RNA, 19 nt, Homo sapiens
  misc_RNA (1)...(19): siRNA sense strand
uggaaucacggguugaaga

SEQ ID NO: 1307888 - RNA, 19 nt, Homo sapiens
  misc_RNA (1)...(19): siRNA sense strand
guacuaguuugcuuuucaa

SEQ ID NO: 1307889 - RNA, 19 nt, Homo sapiens
  misc_RNA (1)...(19): siRNA sense strand
gucgagauaacaugaguau

SEQ ID NO: 1307890 - RNA, 19 nt, Homo sapiens
  misc_RNA (1)...(19): siRNA sense strand
gcgcaucuugucugcagaa

SEQ ID NO: 1307891 - RNA, 19 nt, Homo sapiens
  misc_RNA (1)...(19): siRNA sense strand
aaagauucagaguuggaua

SEQ ID NO: 1307892 - RNA, 19 nt, Homo sapiens
  misc_RNA (1)...(19): siRNA sense strand
aggaaggaaugccugaucu

SEQ ID NO: 1307893 - RNA, 19 nt, Homo sapiens
  misc_RNA (1)...(19): siRNA sense strand
gggaagucgagauaacaug

SEQ ID NO: 1307894 - RNA, 19 nt, Homo sapiens
  misc_RNA (1)...(19): siRNA sense strand
gaaucacggguugaagaga

SEQ ID NO: 1307895 - RNA, 19 nt, Homo sapiens
  misc_RNA (1)...(19): siRNA sense strand
cccaaggucucagaugaag

SEQ ID NO: 1307896 - RNA, 19 nt, Homo sapiens
  misc_RNA (1)...(19): siRNA sense strand
gaagucuggcgaggaagga

SEQ ID NO: 1307897 - RNA, 19 nt, Homo sapiens
  misc_RNA (1)...(19): siRNA sense strand
aagagauuauggagaaguc

SEQ ID NO: 1307898 - RNA, 19 nt, Homo sapiens
  misc_RNA (1)...(19): siRNA sense strand
ggagaagucuggcgaggaa

SEQ ID NO: 1307899 - RNA, 19 nt, Homo sapiens
  misc_RNA (1)...(19): siRNA sense strand
uugaagagauuauggagaa

SEQ ID NO: 1307900 - RNA, 19 nt, Homo sapiens
  misc_RNA (1)...(19): siRNA sense strand
gaaggaaugccugaucuug

SEQ ID NO: 1307901 - RNA, 19 nt, Homo sapiens
  misc_RNA (1)...(19): siRNA sense strand
gcuggcaagcguaauguua

SEQ ID NO: 1307902 - RNA, 19 nt, Homo sapiens
  misc_RNA (1)...(19): siRNA sense strand
ccacauagagaaagugaug

SEQ ID NO: 1307903 - RNA, 19 nt, Homo sapiens
  misc_RNA (1)...(19): siRNA sense strand
gcaagcguaauguuauuga

SEQ ID NO: 1307904 - RNA, 19 nt, Homo sapiens
  misc_RNA (1)...(19): siRNA sense strand
caagcguaauguuauugaa

SEQ ID NO: 1307905 - RNA, 19 nt, Homo sapiens
  misc_RNA (1)...(19): siRNA sense strand
gaauccacauagagaaagu

SEQ ID NO: 1307906 - RNA, 19 nt, Homo sapiens
  misc_RNA (1)...(19): siRNA sense strand
uggcaagcguaauguuauu

SEQ ID NO: 1307907 - RNA, 19 nt, Homo sapiens
  misc_RNA (1)...(19): siRNA sense strand
gauaagcacuuggaaucac

SEQ ID NO: 1307908 - RNA, 19 nt, Homo sapiens
  misc_RNA (1)...(19): siRNA sense strand
ggaaggaaugccugaucuu

SEQ ID NO: 1307909 - RNA, 19 nt, Homo sapiens
  misc_RNA (1)...(19): siRNA sense strand
ggauaagcacuuggaauca

SEQ ID NO: 1307910 - RNA, 19 nt, Homo sapiens
  misc_RNA (1)...(19): siRNA sense strand
ugccugaucuugcccaugu

SEQ ID NO: 1307911 - RNA, 19 nt, Homo sapiens
  misc_RNA (1)...(19): siRNA sense strand
caucuugucugcagaaaau

SEQ ID NO: 1307912 - RNA, 19 nt, Homo sapiens
  misc_RNA (1)...(19): siRNA sense strand
uagacugaauccacauaga

SEQ ID NO: 1307913 - RNA, 19 nt, Homo sapiens
  misc_RNA (1)...(19): siRNA sense strand
gcagaaaauaucccaaauu

SEQ ID NO: 1307914 - RNA, 19 nt, Homo sapiens
  misc_RNA (1)...(19): siRNA sense strand
gaagagauuauggagaagu

SEQ ID NO: 1307915 - RNA, 19 nt, Homo sapiens
  misc_RNA (1)...(19): siRNA sense strand
uugaagcuguuuauaguag

SEQ ID NO: 1307916 - RNA, 19 nt, Homo sapiens
  misc_RNA (1)...(19): siRNA sense strand
aaucacggguugaagagau

SEQ ID NO: 1307917 - RNA, 19 nt, Homo sapiens
  misc_RNA (1)...(19): siRNA sense strand
guauuguacuaguuugcuu

SEQ ID NO: 1307918 - RNA, 19 nt, Homo sapiens
  misc_RNA (1)...(19): siRNA sense strand
gaggaaggaaugccugauc

SEQ ID NO: 1307919 - RNA, 19 nt, Homo sapiens
  misc_RNA (1)...(19): siRNA sense strand
cucccaaggucucagauga

SEQ ID NO: 1307920 - RNA, 19 nt, Homo sapiens
  misc_RNA (1)...(19): siRNA sense strand
gaagcuguuuauaguagac

SEQ ID NO: 1307921 - RNA, 19 nt, Homo sapiens
  misc_RNA (1)...(19): siRNA sense strand
ggaaucacggguugaagag

SEQ ID NO: 1307922 - RNA, 19 nt, Homo sapiens
  misc_RNA (1)...(19): siRNA sense strand
agaguuggauaagcacuug

SEQ ID NO: 1307923 - RNA, 19 nt, Homo sapiens
  misc_RNA (1)...(19): siRNA sense strand
ugaagcuguuuauaguaga

SEQ ID NO: 1307924 - RNA, 19 nt, Homo sapiens
  misc_RNA (1)...(19): siRNA sense strand
auucagaguuggauaagca

SEQ ID NO: 1307925 - RNA, 19 nt, Homo sapiens
  misc_RNA (1)...(19): siRNA sense strand
uggauaagcacuuggaauc

SEQ ID NO: 1307926 - RNA, 19 nt, Homo sapiens
  misc_RNA (1)...(19): siRNA sense strand
gacugaauccacauagaga

SEQ ID NO: 1307927 - RNA, 19 nt, Homo sapiens
  misc_RNA (1)...(19): siRNA sense strand
aagauucagaguuggauaa

SEQ ID NO: 1307928 - RNA, 19 nt, Homo sapiens
  misc_RNA (1)...(19): siRNA sense strand
uggaaucacggguugaaga

SEQ ID NO: 1307929 - RNA, 19 nt, Homo sapiens
  misc_RNA (1)...(19): siRNA sense strand
gcgcaucuugucugcagaa

SEQ ID NO: 1307930 - RNA, 19 nt, Homo sapiens
  misc_RNA (1)...(19): siRNA sense strand
guacuaguuugcuuuucaa

SEQ ID NO: 1307931 - RNA, 19 nt, Homo sapiens
  misc_RNA (1)...(19): siRNA sense strand
aaagauucagaguuggaua

SEQ ID NO: 1307932 - RNA, 19 nt, Homo sapiens
  misc_RNA (1)...(19): siRNA sense strand
aggaaggaaugccugaucu

SEQ ID NO: 1307933 - RNA, 19 nt, Homo sapiens
  misc_RNA (1)...(19): siRNA sense strand
aagagauuauggagaaguc

SEQ ID NO: 1307934 - RNA, 19 nt, Homo sapiens
  misc_RNA (1)...(19): siRNA sense strand
cccaaggucucagaugaag

SEQ ID NO: 1307935 - RNA, 19 nt, Homo sapiens
  misc_RNA (1)...(19): siRNA sense strand
gaaucacggguugaagaga

SEQ ID NO: 1307936 - RNA, 19 nt, Homo sapiens
  misc_RNA (1)...(19): siRNA sense strand
gaagucuggcgaggaagga

SEQ ID NO: 1307937 - RNA, 19 nt, Homo sapiens
  misc_RNA (1)...(19): siRNA sense strand
ucacggaacuggagaagga

SEQ ID NO: 1307938 - RNA, 19 nt, Homo sapiens
  misc_RNA (1)...(19): siRNA sense strand
gcaccaacuucacuaccaa

SEQ ID NO: 1307939 - RNA, 19 nt, Homo sapiens
  misc_RNA (1)...(19): siRNA sense strand
gaccauaggauuacaacuu

SEQ ID NO: 1307940 - RNA, 19 nt, Homo sapiens
  misc_RNA (1)...(19): siRNA sense strand
ccaagcagcucacggaacu

SEQ ID NO: 1307941 - RNA, 19 nt, Homo sapiens
  misc_RNA (1)...(19): siRNA sense strand
ggaugaaagucaaaagaaa

SEQ ID NO: 1307942 - RNA, 19 nt, Homo sapiens
  misc_RNA (1)...(19): siRNA sense strand
accauaggauuacaacuuu

SEQ ID NO: 1307943 - RNA, 19 nt, Homo sapiens
  misc_RNA (1)...(19): siRNA sense strand
gagggucucuugcccaucu

SEQ ID NO: 1307944 - RNA, 19 nt, Homo sapiens
  misc_RNA (1)...(19): siRNA sense strand
gaacuucagugcgccuuac

SEQ ID NO: 1307945 - RNA, 19 nt, Homo sapiens
  misc_RNA (1)...(19): siRNA sense strand
cagggaaaguuggagagua

SEQ ID NO: 1307946 - RNA, 19 nt, Homo sapiens
  misc_RNA (1)...(19): siRNA sense strand
caacgagacccaagugaag

SEQ ID NO: 1307947 - RNA, 19 nt, Homo sapiens
  misc_RNA (1)...(19): siRNA sense strand
caaaagaaacccucccaaa

SEQ ID NO: 1307948 - RNA, 19 nt, Homo sapiens
  misc_RNA (1)...(19): siRNA sense strand
aaaagaaacccucccaaaa

SEQ ID NO: 1307949 - RNA, 19 nt, Homo sapiens
  misc_RNA (1)...(19): siRNA sense strand
ggacaaugcaagaaugaac

SEQ ID NO: 1307950 - RNA, 19 nt, Homo sapiens
  misc_RNA (1)...(19): siRNA sense strand
ggaguuccacuucaacaag

SEQ ID NO: 1307951 - RNA, 19 nt, Homo sapiens
  misc_RNA (1)...(19): siRNA sense strand
caaguugugguccaagcua

SEQ ID NO: 1307952 - RNA, 19 nt, Homo sapiens
  misc_RNA (1)...(19): siRNA sense strand
ucaacgagacccaagugaa

SEQ ID NO: 1307953 - RNA, 19 nt, Homo sapiens
  misc_RNA (1)...(19): siRNA sense strand
uuccagaaccgccgaauga

SEQ ID NO: 1307954 - RNA, 19 nt, Homo sapiens
  misc_RNA (1)...(19): siRNA sense strand
caagcuauggcucacagaa

SEQ ID NO: 1307955 - RNA, 19 nt, Homo sapiens
  misc_RNA (1)...(19): siRNA sense strand
gcggucagcgccaacaguu

SEQ ID NO: 1307956 - RNA, 19 nt, Homo sapiens
  misc_RNA (1)...(19): siRNA sense strand
cgacgaccgcuuccuagug

SEQ ID NO: 1307957 - RNA, 19 nt, Homo sapiens
  misc_RNA (1)...(19): siRNA sense strand
gcucaacgagacccaagug

SEQ ID NO: 1307958 - RNA, 19 nt, Homo sapiens
  misc_RNA (1)...(19): siRNA sense strand
ccauaggauuacaacuuuc

SEQ ID NO: 1307959 - RNA, 19 nt, Homo sapiens
  misc_RNA (1)...(19): siRNA sense strand
agggaaaguuggagaguac

SEQ ID NO: 1307960 - RNA, 19 nt, Homo sapiens
  misc_RNA (1)...(19): siRNA sense strand
uuacagccccuacgcguua

SEQ ID NO: 1307961 - RNA, 19 nt, Homo sapiens
  misc_RNA (1)...(19): siRNA sense strand
aagaaacccucccaaaaca

SEQ ID NO: 1307962 - RNA, 19 nt, Homo sapiens
  misc_RNA (1)...(19): siRNA sense strand
aaaagaaacgugagaagga

SEQ ID NO: 1307963 - RNA, 19 nt, Homo sapiens
  misc_RNA (1)...(19): siRNA sense strand
ccgcaucggagacaucuuc

SEQ ID NO: 1307964 - RNA, 19 nt, Homo sapiens
  misc_RNA (1)...(19): siRNA sense strand
cgacgagaaggccgaggaa

SEQ ID NO: 1307965 - RNA, 19 nt, Homo sapiens
  misc_RNA (1)...(19): siRNA sense strand
ccagaaccgccgaaugaag

SEQ ID NO: 1307966 - RNA, 19 nt, Homo sapiens
  misc_RNA (1)...(19): siRNA sense strand
augcaagaaugaacuccuu

SEQ ID NO: 1307967 - RNA, 19 nt, Homo sapiens
  misc_RNA (1)...(19): siRNA sense strand
gaccauaggauuacaacuu

SEQ ID NO: 1307968 - RNA, 19 nt, Homo sapiens
  misc_RNA (1)...(19): siRNA sense strand
accauaggauuacaacuuu

SEQ ID NO: 1307969 - RNA, 19 nt, Homo sapiens
  misc_RNA (1)...(19): siRNA sense strand
gaacuucagugcgccuuac

SEQ ID NO: 1307970 - RNA, 19 nt, Homo sapiens
  misc_RNA (1)...(19): siRNA sense strand
caaguugugguccaagcua

SEQ ID NO: 1307971 - RNA, 19 nt, Homo sapiens
  misc_RNA (1)...(19): siRNA sense strand
caagcuauggcucacagaa

SEQ ID NO: 1307972 - RNA, 19 nt, Homo sapiens
  misc_RNA (1)...(19): siRNA sense strand
gcggucagcgccaacaguu

SEQ ID NO: 1307973 - RNA, 19 nt, Homo sapiens
  misc_RNA (1)...(19): siRNA sense strand
cgacgaccgcuuccuagug

SEQ ID NO: 1307974 - RNA, 19 nt, Homo sapiens
  misc_RNA (1)...(19): siRNA sense strand
ccauaggauuacaacuuuc

SEQ ID NO: 1307975 - RNA, 19 nt, Homo sapiens
  misc_RNA (1)...(19): siRNA sense strand
uuacagccccuacgcguua

SEQ ID NO: 1307976 - RNA, 19 nt, Homo sapiens
  misc_RNA (1)...(19): siRNA sense strand
ccgcaucggagacaucuuc

SEQ ID NO: 1307977 - RNA, 19 nt, Homo sapiens
  misc_RNA (1)...(19): siRNA sense strand
ggaaagagauggagaauau

SEQ ID NO: 1307978 - RNA, 19 nt, Homo sapiens
  misc_RNA (1)...(19): siRNA sense strand
gaaccaggaugugcuauua

SEQ ID NO: 1307979 - RNA, 19 nt, Homo sapiens
  misc_RNA (1)...(19): siRNA sense strand
ggaaugaauuguucuguuu

SEQ ID NO: 1307980 - RNA, 19 nt, Homo sapiens
  misc_RNA (1)...(19): siRNA sense strand
gaucagaaccucaguauga

SEQ ID NO: 1307981 - RNA, 19 nt, Homo sapiens
  misc_RNA (1)...(19): siRNA sense strand
ggaacgaccuggcugaauu

SEQ ID NO: 1307982 - RNA, 19 nt, Homo sapiens
  misc_RNA (1)...(19): siRNA sense strand
gaagguuucugcuaucaaa

SEQ ID NO: 1307983 - RNA, 19 nt, Homo sapiens
  misc_RNA (1)...(19): siRNA sense strand
ggagugaagucaaagauau

SEQ ID NO: 1307984 - RNA, 19 nt, Homo sapiens
  misc_RNA (1)...(19): siRNA sense strand
gaacuuggcugcucguaca

SEQ ID NO: 1307985 - RNA, 19 nt, Homo sapiens
  misc_RNA (1)...(19): siRNA sense strand
caacaguacucuccugaaa

SEQ ID NO: 1307986 - RNA, 19 nt, Homo sapiens
  misc_RNA (1)...(19): siRNA sense strand
ggaguggcuuucacauuua

SEQ ID NO: 1307987 - RNA, 19 nt, Homo sapiens
  misc_RNA (1)...(19): siRNA sense strand
gaauguggcacuucuguua

SEQ ID NO: 1307988 - RNA, 19 nt, Homo sapiens
  misc_RNA (1)...(19): siRNA sense strand
ggauacagcuauucuuaga

SEQ ID NO: 1307989 - RNA, 19 nt, Homo sapiens
  misc_RNA (1)...(19): siRNA sense strand
cccaaacucuuacaucuua

SEQ ID NO: 1307990 - RNA, 19 nt, Homo sapiens
  misc_RNA (1)...(19): siRNA sense strand
gcucguacaugcugucuuu

SEQ ID NO: 1307991 - RNA, 19 nt, Homo sapiens
  misc_RNA (1)...(19): siRNA sense strand
ucacaucucucccugauau

SEQ ID NO: 1307992 - RNA, 19 nt, Homo sapiens
  misc_RNA (1)...(19): siRNA sense strand
ucaagaaacuccucucguu

SEQ ID NO: 1307993 - RNA, 19 nt, Homo sapiens
  misc_RNA (1)...(19): siRNA sense strand
ugaaagaaauggcaaguuc

SEQ ID NO: 1307994 - RNA, 19 nt, Homo sapiens
  misc_RNA (1)...(19): siRNA sense strand
gcagauaaauuggagcauu

SEQ ID NO: 1307995 - RNA, 19 nt, Homo sapiens
  misc_RNA (1)...(19): siRNA sense strand
ucaaagauauucaggaugu

SEQ ID NO: 1307996 - RNA, 19 nt, Homo sapiens
  misc_RNA (1)...(19): siRNA sense strand
agagaggccuucaccaaua

SEQ ID NO: 1307997 - RNA, 19 nt, Homo sapiens
  misc_RNA (1)...(19): siRNA sense strand
gcucuucgauccuuaauca

SEQ ID NO: 1307998 - RNA, 19 nt, Homo sapiens
  misc_RNA (1)...(19): siRNA sense strand
gaugaccuguuucaaauau

SEQ ID NO: 1307999 - RNA, 19 nt, Homo sapiens
  misc_RNA (1)...(19): siRNA sense strand
gauggaaggcuacuuauau

SEQ ID NO: 1308000 - RNA, 19 nt, Homo sapiens
  misc_RNA (1)...(19): siRNA sense strand
ggaguugaauguauugaau

SEQ ID NO: 1308001 - RNA, 19 nt, Homo sapiens
  misc_RNA (1)...(19): siRNA sense strand
ggacagaaagaggaauuua

SEQ ID NO: 1308002 - RNA, 19 nt, Homo sapiens
  misc_RNA (1)...(19): siRNA sense strand
auauggagcuuguuucuuu

SEQ ID NO: 1308003 - RNA, 19 nt, Homo sapiens
  misc_RNA (1)...(19): siRNA sense strand
ucagagaaguuuaccagaa

SEQ ID NO: 1308004 - RNA, 19 nt, Homo sapiens
  misc_RNA (1)...(19): siRNA sense strand
ggaagacacugaggaggaa

SEQ ID NO: 1308005 - RNA, 19 nt, Homo sapiens
  misc_RNA (1)...(19): siRNA sense strand
gaagaggccuauggaacuu

SEQ ID NO: 1308006 - RNA, 19 nt, Homo sapiens
  misc_RNA (1)...(19): siRNA sense strand
cagcugauccuucaucuaa

SEQ ID NO: 1308007 - RNA, 19 nt, Homo sapiens
  misc_RNA (1)...(19): siRNA sense strand
guacacaucaguucaagaa

SEQ ID NO: 1308008 - RNA, 19 nt, Homo sapiens
  misc_RNA (1)...(19): siRNA sense strand
cagagggccuugauacaaa

SEQ ID NO: 1308009 - RNA, 19 nt, Homo sapiens
  misc_RNA (1)...(19): siRNA sense strand
acaguacucuccugaaauu

SEQ ID NO: 1308010 - RNA, 19 nt, Homo sapiens
  misc_RNA (1)...(19): siRNA sense strand
gcaaucaugugaagaggau

SEQ ID NO: 1308011 - RNA, 19 nt, Homo sapiens
  misc_RNA (1)...(19): siRNA sense strand
ggaaaugaagacaauguuu

SEQ ID NO: 1308012 - RNA, 19 nt, Homo sapiens
  misc_RNA (1)...(19): siRNA sense strand
aguaauagcccuucuguuu

SEQ ID NO: 1308013 - RNA, 19 nt, Homo sapiens
  misc_RNA (1)...(19): siRNA sense strand
gcugauccuucaucuaauu

SEQ ID NO: 1308014 - RNA, 19 nt, Homo sapiens
  misc_RNA (1)...(19): siRNA sense strand
gagaauauggagcuuguuu

SEQ ID NO: 1308015 - RNA, 19 nt, Homo sapiens
  misc_RNA (1)...(19): siRNA sense strand
gagaggccuucaccaauau

SEQ ID NO: 1308016 - RNA, 19 nt, Homo sapiens
  misc_RNA (1)...(19): siRNA sense strand
aggaguggcuuucacauuu

SEQ ID NO: 1308017 - RNA, 19 nt, Homo sapiens
  misc_RNA (1)...(19): siRNA sense strand
agaagaagcuccauuucau

SEQ ID NO: 1308018 - RNA, 19 nt, Homo sapiens
  misc_RNA (1)...(19): siRNA sense strand
gggaaagucucacaucucu

SEQ ID NO: 1308019 - RNA, 19 nt, Homo sapiens
  misc_RNA (1)...(19): siRNA sense strand
gguuaaaguuacuagauga

SEQ ID NO: 1308020 - RNA, 19 nt, Homo sapiens
  misc_RNA (1)...(19): siRNA sense strand
gccaaacccucucagaaga

SEQ ID NO: 1308021 - RNA, 19 nt, Homo sapiens
  misc_RNA (1)...(19): siRNA sense strand
gccaguuccugaagaagua

SEQ ID NO: 1308022 - RNA, 19 nt, Homo sapiens
  misc_RNA (1)...(19): siRNA sense strand
gaagaggaccugccagauc

SEQ ID NO: 1308023 - RNA, 19 nt, Homo sapiens
  misc_RNA (1)...(19): siRNA sense strand
ccagcaaccucugauauau

SEQ ID NO: 1308024 - RNA, 19 nt, Homo sapiens
  misc_RNA (1)...(19): siRNA sense strand
gaaggagaguaucaagcuu

SEQ ID NO: 1308025 - RNA, 19 nt, Homo sapiens
  misc_RNA (1)...(19): siRNA sense strand
caggaugugcuauuaguua

SEQ ID NO: 1308026 - RNA, 19 nt, Homo sapiens
  misc_RNA (1)...(19): siRNA sense strand
ucagauaccugcccaaagg

SEQ ID NO: 1308027 - RNA, 19 nt, Homo sapiens
  misc_RNA (1)...(19): siRNA sense strand
caccuacaaugaucuaauu

SEQ ID NO: 1308028 - RNA, 19 nt, Homo sapiens
  misc_RNA (1)...(19): siRNA sense strand
gaagcuccauuucaucaca

SEQ ID NO: 1308029 - RNA, 19 nt, Homo sapiens
  misc_RNA (1)...(19): siRNA sense strand
gagaguaucaagcuuaguu

SEQ ID NO: 1308030 - RNA, 19 nt, Homo sapiens
  misc_RNA (1)...(19): siRNA sense strand
uaaaguagcaacagcagaa

SEQ ID NO: 1308031 - RNA, 19 nt, Homo sapiens
  misc_RNA (1)...(19): siRNA sense strand
gaagaugagagauuuaaag

SEQ ID NO: 1308032 - RNA, 19 nt, Homo sapiens
  misc_RNA (1)...(19): siRNA sense strand
ggauggaaggcuacuuaua

SEQ ID NO: 1308033 - RNA, 19 nt, Homo sapiens
  misc_RNA (1)...(19): siRNA sense strand
gcagagggccuugauacaa

SEQ ID NO: 1308034 - RNA, 19 nt, Homo sapiens
  misc_RNA (1)...(19): siRNA sense strand
guaauagcccuucuguuug

SEQ ID NO: 1308035 - RNA, 19 nt, Homo sapiens
  misc_RNA (1)...(19): siRNA sense strand
cgaccuggcugaauugaca

SEQ ID NO: 1308036 - RNA, 19 nt, Homo sapiens
  misc_RNA (1)...(19): siRNA sense strand
caagggagucuuuggauga

SEQ ID NO: 1308037 - RNA, 19 nt, Homo sapiens
  misc_RNA (1)...(19): siRNA sense strand
acacggaaaugaagacaau

SEQ ID NO: 1308038 - RNA, 19 nt, Homo sapiens
  misc_RNA (1)...(19): siRNA sense strand
gaaguuauaaguacacauc

SEQ ID NO: 1308039 - RNA, 19 nt, Homo sapiens
  misc_RNA (1)...(19): siRNA sense strand
uggaugaccuguuucaaau

SEQ ID NO: 1308040 - RNA, 19 nt, Homo sapiens
  misc_RNA (1)...(19): siRNA sense strand
guuacuagaugacgagguu

SEQ ID NO: 1308041 - RNA, 19 nt, Homo sapiens
  misc_RNA (1)...(19): siRNA sense strand
ccaacaagguuaaaguuac

SEQ ID NO: 1308042 - RNA, 19 nt, Homo sapiens
  misc_RNA (1)...(19): siRNA sense strand
gaggaugugaguucagaua

SEQ ID NO: 1308043 - RNA, 19 nt, Homo sapiens
  misc_RNA (1)...(19): siRNA sense strand
caaguucuuuccauccauu

SEQ ID NO: 1308044 - RNA, 19 nt, Homo sapiens
  misc_RNA (1)...(19): siRNA sense strand
gaacgaccuggcugaauug

SEQ ID NO: 1308045 - RNA, 19 nt, Homo sapiens
  misc_RNA (1)...(19): siRNA sense strand
caaaggaggaagacacuga

SEQ ID NO: 1308046 - RNA, 19 nt, Homo sapiens
  misc_RNA (1)...(19): siRNA sense strand
gauggagaaguuauaagua

SEQ ID NO: 1308047 - RNA, 19 nt, Homo sapiens
  misc_RNA (1)...(19): siRNA sense strand
ucaccaauauuguguaucu

SEQ ID NO: 1308048 - RNA, 19 nt, Homo sapiens
  misc_RNA (1)...(19): siRNA sense strand
caauggaugaugaagguua

SEQ ID NO: 1308049 - RNA, 19 nt, Homo sapiens
  misc_RNA (1)...(19): siRNA sense strand
aaacuuugacugcagauaa

SEQ ID NO: 1308050 - RNA, 19 nt, Homo sapiens
  misc_RNA (1)...(19): siRNA sense strand
gccagcaaccucugauaua

SEQ ID NO: 1308051 - RNA, 19 nt, Homo sapiens
  misc_RNA (1)...(19): siRNA sense strand
gaaaucaaggccugaagau

SEQ ID NO: 1308052 - RNA, 19 nt, Homo sapiens
  misc_RNA (1)...(19): siRNA sense strand
caacaagguuaaaguuacu

SEQ ID NO: 1308053 - RNA, 19 nt, Homo sapiens
  misc_RNA (1)...(19): siRNA sense strand
uaauagcccuucuguuugg

SEQ ID NO: 1308054 - RNA, 19 nt, Homo sapiens
  misc_RNA (1)...(19): siRNA sense strand
cacgagcccugaucugaaa

SEQ ID NO: 1308055 - RNA, 19 nt, Homo sapiens
  misc_RNA (1)...(19): siRNA sense strand
ggaaggcuacuuauaucuu

SEQ ID NO: 1308056 - RNA, 19 nt, Homo sapiens
  misc_RNA (1)...(19): siRNA sense strand
gcaaugaagaaucuguuga

SEQ ID NO: 1308057 - RNA, 19 nt, Homo sapiens
  misc_RNA (1)...(19): siRNA sense strand
aagaggaccugccagauca

SEQ ID NO: 1308058 - RNA, 19 nt, Homo sapiens
  misc_RNA (1)...(19): siRNA sense strand
gaagaggcagucagucaga

SEQ ID NO: 1308059 - RNA, 19 nt, Homo sapiens
  misc_RNA (1)...(19): siRNA sense strand
gcaccuaaaugggaaaguc

SEQ ID NO: 1308060 - RNA, 19 nt, Homo sapiens
  misc_RNA (1)...(19): siRNA sense strand
gugcugacuuggacagaaa

SEQ ID NO: 1308061 - RNA, 19 nt, Homo sapiens
  misc_RNA (1)...(19): siRNA sense strand
gaagacaauguuucucaug

SEQ ID NO: 1308062 - RNA, 19 nt, Homo sapiens
  misc_RNA (1)...(19): siRNA sense strand
gcuacccgguuguaugaaa

SEQ ID NO: 1308063 - RNA, 19 nt, Homo sapiens
  misc_RNA (1)...(19): siRNA sense strand
guuccaauccuguguauau

SEQ ID NO: 1308064 - RNA, 19 nt, Homo sapiens
  misc_RNA (1)...(19): siRNA sense strand
cuacaggacccucugguuu

SEQ ID NO: 1308065 - RNA, 19 nt, Homo sapiens
  misc_RNA (1)...(19): siRNA sense strand
gaccauggcaccuacaaug

SEQ ID NO: 1308066 - RNA, 19 nt, Homo sapiens
  misc_RNA (1)...(19): siRNA sense strand
uuaaagaauucaccucaca

SEQ ID NO: 1308067 - RNA, 19 nt, Homo sapiens
  misc_RNA (1)...(19): siRNA sense strand
ucuaauuucucaacuggaa

SEQ ID NO: 1308068 - RNA, 19 nt, Homo sapiens
  misc_RNA (1)...(19): siRNA sense strand
gauguuuccuguucagaca

SEQ ID NO: 1308069 - RNA, 19 nt, Homo sapiens
  misc_RNA (1)...(19): siRNA sense strand
gcacuucuguuagcuaagg

SEQ ID NO: 1308070 - RNA, 19 nt, Homo sapiens
  misc_RNA (1)...(19): siRNA sense strand
uaaaugggagccucaguga

SEQ ID NO: 1308071 - RNA, 19 nt, Homo sapiens
  misc_RNA (1)...(19): siRNA sense strand
ccaauauuguguaucugaa

SEQ ID NO: 1308072 - RNA, 19 nt, Homo sapiens
  misc_RNA (1)...(19): siRNA sense strand
cuaucaaacucaauacuuc

SEQ ID NO: 1308073 - RNA, 19 nt, Homo sapiens
  misc_RNA (1)...(19): siRNA sense strand
acagucagcugauccuuca

SEQ ID NO: 1308074 - RNA, 19 nt, Homo sapiens
  misc_RNA (1)...(19): siRNA sense strand
caaccagagucuuuaaggu

SEQ ID NO: 1308075 - RNA, 19 nt, Homo sapiens
  misc_RNA (1)...(19): siRNA sense strand
gaucagcggucaucuuuuc

SEQ ID NO: 1308076 - RNA, 19 nt, Homo sapiens
  misc_RNA (1)...(19): siRNA sense strand
gaaauggcaaguuccaauc

SEQ ID NO: 1308077 - RNA, 19 nt, Homo sapiens
  misc_RNA (1)...(19): siRNA sense strand
ggaaagagauggagaauau

SEQ ID NO: 1308078 - RNA, 19 nt, Homo sapiens
  misc_RNA (1)...(19): siRNA sense strand
gaaccaggaugugcuauua

SEQ ID NO: 1308079 - RNA, 19 nt, Homo sapiens
  misc_RNA (1)...(19): siRNA sense strand
ggaaugaauuguucuguuu

SEQ ID NO: 1308080 - RNA, 19 nt, Homo sapiens
  misc_RNA (1)...(19): siRNA sense strand
gaucagaaccucaguauga

SEQ ID NO: 1308081 - RNA, 19 nt, Homo sapiens
  misc_RNA (1)...(19): siRNA sense strand
ggaacgaccuggcugaauu

SEQ ID NO: 1308082 - RNA, 19 nt, Homo sapiens
  misc_RNA (1)...(19): siRNA sense strand
gaagguuucugcuaucaaa

SEQ ID NO: 1308083 - RNA, 19 nt, Homo sapiens
  misc_RNA (1)...(19): siRNA sense strand
ggagugaagucaaagauau

SEQ ID NO: 1308084 - RNA, 19 nt, Homo sapiens
  misc_RNA (1)...(19): siRNA sense strand
gaacuuggcugcucguaca

SEQ ID NO: 1308085 - RNA, 19 nt, Homo sapiens
  misc_RNA (1)...(19): siRNA sense strand
caacaguacucuccugaaa

SEQ ID NO: 1308086 - RNA, 19 nt, Homo sapiens
  misc_RNA (1)...(19): siRNA sense strand
ggaguggcuuucacauuua

SEQ ID NO: 1308087 - RNA, 19 nt, Homo sapiens
  misc_RNA (1)...(19): siRNA sense strand
gaauguggcacuucuguua

SEQ ID NO: 1308088 - RNA, 19 nt, Homo sapiens
  misc_RNA (1)...(19): siRNA sense strand
ggauacagcuauucuuaga

SEQ ID NO: 1308089 - RNA, 19 nt, Homo sapiens
  misc_RNA (1)...(19): siRNA sense strand
cccaaacucuuacaucuua

SEQ ID NO: 1308090 - RNA, 19 nt, Homo sapiens
  misc_RNA (1)...(19): siRNA sense strand
gcucguacaugcugucuuu

SEQ ID NO: 1308091 - RNA, 19 nt, Homo sapiens
  misc_RNA (1)...(19): siRNA sense strand
ucacaucucucccugauau

SEQ ID NO: 1308092 - RNA, 19 nt, Homo sapiens
  misc_RNA (1)...(19): siRNA sense strand
ucaagaaacuccucucguu

SEQ ID NO: 1308093 - RNA, 19 nt, Homo sapiens
  misc_RNA (1)...(19): siRNA sense strand
ugaaagaaauggcaaguuc

SEQ ID NO: 1308094 - RNA, 19 nt, Homo sapiens
  misc_RNA (1)...(19): siRNA sense strand
gcagauaaauuggagcauu

SEQ ID NO: 1308095 - RNA, 19 nt, Homo sapiens
  misc_RNA (1)...(19): siRNA sense strand
ucaaagauauucaggaugu

SEQ ID NO: 1308096 - RNA, 19 nt, Homo sapiens
  misc_RNA (1)...(19): siRNA sense strand
agagaggccuucaccaaua

SEQ ID NO: 1308097 - RNA, 19 nt, Homo sapiens
  misc_RNA (1)...(19): siRNA sense strand
ucaagucgccuguuguuua

SEQ ID NO: 1308098 - RNA, 19 nt, Homo sapiens
  misc_RNA (1)...(19): siRNA sense strand
gcucuucgauccuuaauca

SEQ ID NO: 1308099 - RNA, 19 nt, Homo sapiens
  misc_RNA (1)...(19): siRNA sense strand
gaugaccuguuucaaauau

SEQ ID NO: 1308100 - RNA, 19 nt, Homo sapiens
  misc_RNA (1)...(19): siRNA sense strand
gaacaaauguaugugucuu

SEQ ID NO: 1308101 - RNA, 19 nt, Homo sapiens
  misc_RNA (1)...(19): siRNA sense strand
ggaguugaauguauugaau

SEQ ID NO: 1308102 - RNA, 19 nt, Homo sapiens
  misc_RNA (1)...(19): siRNA sense strand
gauggaaggcuacuuauau

SEQ ID NO: 1308103 - RNA, 19 nt, Homo sapiens
  misc_RNA (1)...(19): siRNA sense strand
ggacagaaagaggaauuua

SEQ ID NO: 1308104 - RNA, 19 nt, Homo sapiens
  misc_RNA (1)...(19): siRNA sense strand
auauggagcuuguuucuuu

SEQ ID NO: 1308105 - RNA, 19 nt, Homo sapiens
  misc_RNA (1)...(19): siRNA sense strand
ucagagaaguuuaccagaa

SEQ ID NO: 1308106 - RNA, 19 nt, Homo sapiens
  misc_RNA (1)...(19): siRNA sense strand
ggaagacacugaggaggaa

SEQ ID NO: 1308107 - RNA, 19 nt, Homo sapiens
  misc_RNA (1)...(19): siRNA sense strand
gaagaggccuauggaacuu

SEQ ID NO: 1308108 - RNA, 19 nt, Homo sapiens
  misc_RNA (1)...(19): siRNA sense strand
cagcugauccuucaucuaa

SEQ ID NO: 1308109 - RNA, 19 nt, Homo sapiens
  misc_RNA (1)...(19): siRNA sense strand
guacacaucaguucaagaa

SEQ ID NO: 1308110 - RNA, 19 nt, Homo sapiens
  misc_RNA (1)...(19): siRNA sense strand
cagagggccuugauacaaa

SEQ ID NO: 1308111 - RNA, 19 nt, Homo sapiens
  misc_RNA (1)...(19): siRNA sense strand
acaguacucuccugaaauu

SEQ ID NO: 1308112 - RNA, 19 nt, Homo sapiens
  misc_RNA (1)...(19): siRNA sense strand
gcaaucaugugaagaggau

SEQ ID NO: 1308113 - RNA, 19 nt, Homo sapiens
  misc_RNA (1)...(19): siRNA sense strand
ggaaaugaagacaauguuu

SEQ ID NO: 1308114 - RNA, 19 nt, Homo sapiens
  misc_RNA (1)...(19): siRNA sense strand
aguaauagcccuucuguuu

SEQ ID NO: 1308115 - RNA, 19 nt, Homo sapiens
  misc_RNA (1)...(19): siRNA sense strand
gcugauccuucaucuaauu

SEQ ID NO: 1308116 - RNA, 19 nt, Homo sapiens
  misc_RNA (1)...(19): siRNA sense strand
gagaauauggagcuuguuu

SEQ ID NO: 1308117 - RNA, 19 nt, Homo sapiens
  misc_RNA (1)...(19): siRNA sense strand
gagaggccuucaccaauau

SEQ ID NO: 1308118 - RNA, 19 nt, Homo sapiens
  misc_RNA (1)...(19): siRNA sense strand
aggaguggcuuucacauuu

SEQ ID NO: 1308119 - RNA, 19 nt, Homo sapiens
  misc_RNA (1)...(19): siRNA sense strand
agaagaagcuccauuucau

SEQ ID NO: 1308120 - RNA, 19 nt, Homo sapiens
  misc_RNA (1)...(19): siRNA sense strand
gggaaagucucacaucucu

SEQ ID NO: 1308121 - RNA, 19 nt, Homo sapiens
  misc_RNA (1)...(19): siRNA sense strand
gguuaaaguuacuagauga

SEQ ID NO: 1308122 - RNA, 19 nt, Homo sapiens
  misc_RNA (1)...(19): siRNA sense strand
gccaaacccucucagaaga

SEQ ID NO: 1308123 - RNA, 19 nt, Homo sapiens
  misc_RNA (1)...(19): siRNA sense strand
gccaguuccugaagaagua

SEQ ID NO: 1308124 - RNA, 19 nt, Homo sapiens
  misc_RNA (1)...(19): siRNA sense strand
gaagaggaccugccagauc

SEQ ID NO: 1308125 - RNA, 19 nt, Homo sapiens
  misc_RNA (1)...(19): siRNA sense strand
ccagcaaccucugauauau

SEQ ID NO: 1308126 - RNA, 19 nt, Homo sapiens
  misc_RNA (1)...(19): siRNA sense strand
gaaggagaguaucaagcuu

SEQ ID NO: 1308127 - RNA, 19 nt, Homo sapiens
  misc_RNA (1)...(19): siRNA sense strand
caggaugugcuauuaguua

SEQ ID NO: 1308128 - RNA, 19 nt, Homo sapiens
  misc_RNA (1)...(19): siRNA sense strand
ucagauaccugcccaaagg

SEQ ID NO: 1308129 - RNA, 19 nt, Homo sapiens
  misc_RNA (1)...(19): siRNA sense strand
caccuacaaugaucuaauu

SEQ ID NO: 1308130 - RNA, 19 nt, Homo sapiens
  misc_RNA (1)...(19): siRNA sense strand
gaagcuccauuucaucaca

SEQ ID NO: 1308131 - RNA, 19 nt, Homo sapiens
  misc_RNA (1)...(19): siRNA sense strand
gagaguaucaagcuuaguu

SEQ ID NO: 1308132 - RNA, 19 nt, Homo sapiens
  misc_RNA (1)...(19): siRNA sense strand
uaaaguagcaacagcagaa

SEQ ID NO: 1308133 - RNA, 19 nt, Homo sapiens
  misc_RNA (1)...(19): siRNA sense strand
gaagaugagagauuuaaag

SEQ ID NO: 1308134 - RNA, 19 nt, Homo sapiens
  misc_RNA (1)...(19): siRNA sense strand
ggauggaaggcuacuuaua

SEQ ID NO: 1308135 - RNA, 19 nt, Homo sapiens
  misc_RNA (1)...(19): siRNA sense strand
gcagagggccuugauacaa

SEQ ID NO: 1308136 - RNA, 19 nt, Homo sapiens
  misc_RNA (1)...(19): siRNA sense strand
guaauagcccuucuguuug

SEQ ID NO: 1308137 - RNA, 19 nt, Homo sapiens
  misc_RNA (1)...(19): siRNA sense strand
cgaccuggcugaauugaca

SEQ ID NO: 1308138 - RNA, 19 nt, Homo sapiens
  misc_RNA (1)...(19): siRNA sense strand
caagggagucuuuggauga

SEQ ID NO: 1308139 - RNA, 19 nt, Homo sapiens
  misc_RNA (1)...(19): siRNA sense strand
acacggaaaugaagacaau

SEQ ID NO: 1308140 - RNA, 19 nt, Homo sapiens
  misc_RNA (1)...(19): siRNA sense strand
gaaguuauaaguacacauc

SEQ ID NO: 1308141 - RNA, 19 nt, Homo sapiens
  misc_RNA (1)...(19): siRNA sense strand
uggaugaccuguuucaaau

SEQ ID NO: 1308142 - RNA, 19 nt, Homo sapiens
  misc_RNA (1)...(19): siRNA sense strand
guuacuagaugacgagguu

SEQ ID NO: 1308143 - RNA, 19 nt, Homo sapiens
  misc_RNA (1)...(19): siRNA sense strand
ccaacaagguuaaaguuac

SEQ ID NO: 1308144 - RNA, 19 nt, Homo sapiens
  misc_RNA (1)...(19): siRNA sense strand
ggaaaccggaacaaaugua

SEQ ID NO: 1308145 - RNA, 19 nt, Homo sapiens
  misc_RNA (1)...(19): siRNA sense strand
caaguucuuuccauccauu

SEQ ID NO: 1308146 - RNA, 19 nt, Homo sapiens
  misc_RNA (1)...(19): siRNA sense strand
gaacgaccuggcugaauug

SEQ ID NO: 1308147 - RNA, 19 nt, Homo sapiens
  misc_RNA (1)...(19): siRNA sense strand
caaaggaggaagacacuga

SEQ ID NO: 1308148 - RNA, 19 nt, Homo sapiens
  misc_RNA (1)...(19): siRNA sense strand
gaggaugugaguucagaua

SEQ ID NO: 1308149 - RNA, 19 nt, Homo sapiens
  misc_RNA (1)...(19): siRNA sense strand
aaauguaugugucuucaga

SEQ ID NO: 1308150 - RNA, 19 nt, Homo sapiens
  misc_RNA (1)...(19): siRNA sense strand
gauggagaaguuauaagua

SEQ ID NO: 1308151 - RNA, 19 nt, Homo sapiens
  misc_RNA (1)...(19): siRNA sense strand
ucaccaauauuguguaucu

SEQ ID NO: 1308152 - RNA, 19 nt, Homo sapiens
  misc_RNA (1)...(19): siRNA sense strand
caauggaugaugaagguua

SEQ ID NO: 1308153 - RNA, 19 nt, Homo sapiens
  misc_RNA (1)...(19): siRNA sense strand
aaacuuugacugcagauaa

SEQ ID NO: 1308154 - RNA, 19 nt, Homo sapiens
  misc_RNA (1)...(19): siRNA sense strand
gccagcaaccucugauaua

SEQ ID NO: 1308155 - RNA, 19 nt, Homo sapiens
  misc_RNA (1)...(19): siRNA sense strand
gaaaucaaggccugaagau

SEQ ID NO: 1308156 - RNA, 19 nt, Homo sapiens
  misc_RNA (1)...(19): siRNA sense strand
caacaagguuaaaguuacu

SEQ ID NO: 1308157 - RNA, 19 nt, Homo sapiens
  misc_RNA (1)...(19): siRNA sense strand
uaauagcccuucuguuugg

SEQ ID NO: 1308158 - RNA, 19 nt, Homo sapiens
  misc_RNA (1)...(19): siRNA sense strand
cacgagcccugaucugaaa

SEQ ID NO: 1308159 - RNA, 19 nt, Homo sapiens
  misc_RNA (1)...(19): siRNA sense strand
ggaaggcuacuuauaucuu

SEQ ID NO: 1308160 - RNA, 19 nt, Homo sapiens
  misc_RNA (1)...(19): siRNA sense strand
gcaaugaagaaucuguuga

SEQ ID NO: 1308161 - RNA, 19 nt, Homo sapiens
  misc_RNA (1)...(19): siRNA sense strand
aagaggaccugccagauca

SEQ ID NO: 1308162 - RNA, 19 nt, Homo sapiens
  misc_RNA (1)...(19): siRNA sense strand
gaagaggcagucagucaga

SEQ ID NO: 1308163 - RNA, 19 nt, Homo sapiens
  misc_RNA (1)...(19): siRNA sense strand
gcaccuaaaugggaaaguc

SEQ ID NO: 1308164 - RNA, 19 nt, Homo sapiens
  misc_RNA (1)...(19): siRNA sense strand
gugcugacuuggacagaaa

SEQ ID NO: 1308165 - RNA, 19 nt, Homo sapiens
  misc_RNA (1)...(19): siRNA sense strand
gaagacaauguuucucaug

SEQ ID NO: 1308166 - RNA, 19 nt, Homo sapiens
  misc_RNA (1)...(19): siRNA sense strand
gcuacccgguuguaugaaa

SEQ ID NO: 1308167 - RNA, 19 nt, Homo sapiens
  misc_RNA (1)...(19): siRNA sense strand
guuccaauccuguguauau

SEQ ID NO: 1308168 - RNA, 19 nt, Homo sapiens
  misc_RNA (1)...(19): siRNA sense strand
gaaaccggaacaaauguau

SEQ ID NO: 1308169 - RNA, 19 nt, Homo sapiens
  misc_RNA (1)...(19): siRNA sense strand
cuacaggacccucugguuu

SEQ ID NO: 1308170 - RNA, 19 nt, Homo sapiens
  misc_RNA (1)...(19): siRNA sense strand
gaccauggcaccuacaaug

SEQ ID NO: 1308171 - RNA, 19 nt, Homo sapiens
  misc_RNA (1)...(19): siRNA sense strand
uuaaagaauucaccucaca

SEQ ID NO: 1308172 - RNA, 19 nt, Homo sapiens
  misc_RNA (1)...(19): siRNA sense strand
ucuaauuucucaacuggaa

SEQ ID NO: 1308173 - RNA, 19 nt, Homo sapiens
  misc_RNA (1)...(19): siRNA sense strand
acagucagcugauccuuca

SEQ ID NO: 1308174 - RNA, 19 nt, Homo sapiens
  misc_RNA (1)...(19): siRNA sense strand
gcacuucuguuagcuaagg

SEQ ID NO: 1308175 - RNA, 19 nt, Homo sapiens
  misc_RNA (1)...(19): siRNA sense strand
uaaaugggagccucaguga

SEQ ID NO: 1308176 - RNA, 19 nt, Homo sapiens
  misc_RNA (1)...(19): siRNA sense strand
ccaauauuguguaucugaa

SEQ ID NO: 1308177 - RNA, 19 nt, Homo sapiens
  misc_RNA (1)...(19): siRNA sense strand
ggaaagagauggagaauau

SEQ ID NO: 1308178 - RNA, 19 nt, Homo sapiens
  misc_RNA (1)...(19): siRNA sense strand
gaaccaggaugugcuauua

SEQ ID NO: 1308179 - RNA, 19 nt, Homo sapiens
  misc_RNA (1)...(19): siRNA sense strand
ggaaugaauuguucuguuu

SEQ ID NO: 1308180 - RNA, 19 nt, Homo sapiens
  misc_RNA (1)...(19): siRNA sense strand
gaucagaaccucaguauga

SEQ ID NO: 1308181 - RNA, 19 nt, Homo sapiens
  misc_RNA (1)...(19): siRNA sense strand
ggaacgaccuggcugaauu

SEQ ID NO: 1308182 - RNA, 19 nt, Homo sapiens
  misc_RNA (1)...(19): siRNA sense strand
gaagguuucugcuaucaaa

SEQ ID NO: 1308183 - RNA, 19 nt, Homo sapiens
  misc_RNA (1)...(19): siRNA sense strand
ggagugaagucaaagauau

SEQ ID NO: 1308184 - RNA, 19 nt, Homo sapiens
  misc_RNA (1)...(19): siRNA sense strand
gaacuuggcugcucguaca

SEQ ID NO: 1308185 - RNA, 19 nt, Homo sapiens
  misc_RNA (1)...(19): siRNA sense strand
caacaguacucuccugaaa

SEQ ID NO: 1308186 - RNA, 19 nt, Homo sapiens
  misc_RNA (1)...(19): siRNA sense strand
ggaguggcuuucacauuua

SEQ ID NO: 1308187 - RNA, 19 nt, Homo sapiens
  misc_RNA (1)...(19): siRNA sense strand
gaauguggcacuucuguua

SEQ ID NO: 1308188 - RNA, 19 nt, Homo sapiens
  misc_RNA (1)...(19): siRNA sense strand
ggauacagcuauucuuaga

SEQ ID NO: 1308189 - RNA, 19 nt, Homo sapiens
  misc_RNA (1)...(19): siRNA sense strand
cccaaacucuuacaucuua

SEQ ID NO: 1308190 - RNA, 19 nt, Homo sapiens
  misc_RNA (1)...(19): siRNA sense strand
gcucguacaugcugucuuu

SEQ ID NO: 1308191 - RNA, 19 nt, Homo sapiens
  misc_RNA (1)...(19): siRNA sense strand
ucacaucucucccugauau

SEQ ID NO: 1308192 - RNA, 19 nt, Homo sapiens
  misc_RNA (1)...(19): siRNA sense strand
ucaagaaacuccucucguu

SEQ ID NO: 1308193 - RNA, 19 nt, Homo sapiens
  misc_RNA (1)...(19): siRNA sense strand
ugaaagaaauggcaaguuc

SEQ ID NO: 1308194 - RNA, 19 nt, Homo sapiens
  misc_RNA (1)...(19): siRNA sense strand
gcagauaaauuggagcauu

SEQ ID NO: 1308195 - RNA, 19 nt, Homo sapiens
  misc_RNA (1)...(19): siRNA sense strand
ucaaagauauucaggaugu

SEQ ID NO: 1308196 - RNA, 19 nt, Homo sapiens
  misc_RNA (1)...(19): siRNA sense strand
agagaggccuucaccaaua

SEQ ID NO: 1308197 - RNA, 19 nt, Homo sapiens
  misc_RNA (1)...(19): siRNA sense strand
gcucuucgauccuuaauca

SEQ ID NO: 1308198 - RNA, 19 nt, Homo sapiens
  misc_RNA (1)...(19): siRNA sense strand
gaugaccuguuucaaauau

SEQ ID NO: 1308199 - RNA, 19 nt, Homo sapiens
  misc_RNA (1)...(19): siRNA sense strand
gauggaaggcuacuuauau

SEQ ID NO: 1308200 - RNA, 19 nt, Homo sapiens
  misc_RNA (1)...(19): siRNA sense strand
ggaguugaauguauugaau

SEQ ID NO: 1308201 - RNA, 19 nt, Homo sapiens
  misc_RNA (1)...(19): siRNA sense strand
ggacagaaagaggaauuua

SEQ ID NO: 1308202 - RNA, 19 nt, Homo sapiens
  misc_RNA (1)...(19): siRNA sense strand
auauggagcuuguuucuuu

SEQ ID NO: 1308203 - RNA, 19 nt, Homo sapiens
  misc_RNA (1)...(19): siRNA sense strand
ucagagaaguuuaccagaa

SEQ ID NO: 1308204 - RNA, 19 nt, Homo sapiens
  misc_RNA (1)...(19): siRNA sense strand
ggaagacacugaggaggaa

SEQ ID NO: 1308205 - RNA, 19 nt, Homo sapiens
  misc_RNA (1)...(19): siRNA sense strand
gaagaggccuauggaacuu

SEQ ID NO: 1308206 - RNA, 19 nt, Homo sapiens
  misc_RNA (1)...(19): siRNA sense strand
cagcugauccuucaucuaa

SEQ ID NO: 1308207 - RNA, 19 nt, Homo sapiens
  misc_RNA (1)...(19): siRNA sense strand
guacacaucaguucaagaa

SEQ ID NO: 1308208 - RNA, 19 nt, Homo sapiens
  misc_RNA (1)...(19): siRNA sense strand
cagagggccuugauacaaa

SEQ ID NO: 1308209 - RNA, 19 nt, Homo sapiens
  misc_RNA (1)...(19): siRNA sense strand
acaguacucuccugaaauu

SEQ ID NO: 1308210 - RNA, 19 nt, Homo sapiens
  misc_RNA (1)...(19): siRNA sense strand
gcaaucaugugaagaggau

SEQ ID NO: 1308211 - RNA, 19 nt, Homo sapiens
  misc_RNA (1)...(19): siRNA sense strand
ggaaaugaagacaauguuu

SEQ ID NO: 1308212 - RNA, 19 nt, Homo sapiens
  misc_RNA (1)...(19): siRNA sense strand
aguaauagcccuucuguuu

SEQ ID NO: 1308213 - RNA, 19 nt, Homo sapiens
  misc_RNA (1)...(19): siRNA sense strand
gcugauccuucaucuaauu

SEQ ID NO: 1308214 - RNA, 19 nt, Homo sapiens
  misc_RNA (1)...(19): siRNA sense strand
gagaauauggagcuuguuu

SEQ ID NO: 1308215 - RNA, 19 nt, Homo sapiens
  misc_RNA (1)...(19): siRNA sense strand
gagaggccuucaccaauau

SEQ ID NO: 1308216 - RNA, 19 nt, Homo sapiens
  misc_RNA (1)...(19): siRNA sense strand
aggaguggcuuucacauuu

SEQ ID NO: 1308217 - RNA, 19 nt, Homo sapiens
  misc_RNA (1)...(19): siRNA sense strand
agaagaagcuccauuucau

SEQ ID NO: 1308218 - RNA, 19 nt, Homo sapiens
  misc_RNA (1)...(19): siRNA sense strand
gggaaagucucacaucucu

SEQ ID NO: 1308219 - RNA, 19 nt, Homo sapiens
  misc_RNA (1)...(19): siRNA sense strand
gguuaaaguuacuagauga

SEQ ID NO: 1308220 - RNA, 19 nt, Homo sapiens
  misc_RNA (1)...(19): siRNA sense strand
gccaaacccucucagaaga

SEQ ID NO: 1308221 - RNA, 19 nt, Homo sapiens
  misc_RNA (1)...(19): siRNA sense strand
gccaguuccugaagaagua

SEQ ID NO: 1308222 - RNA, 19 nt, Homo sapiens
  misc_RNA (1)...(19): siRNA sense strand
gaagaggaccugccagauc

SEQ ID NO: 1308223 - RNA, 19 nt, Homo sapiens
  misc_RNA (1)...(19): siRNA sense strand
ccagcaaccucugauauau

SEQ ID NO: 1308224 - RNA, 19 nt, Homo sapiens
  misc_RNA (1)...(19): siRNA sense strand
gaaggagaguaucaagcuu

SEQ ID NO: 1308225 - RNA, 19 nt, Homo sapiens
  misc_RNA (1)...(19): siRNA sense strand
caggaugugcuauuaguua

SEQ ID NO: 1308226 - RNA, 19 nt, Homo sapiens
  misc_RNA (1)...(19): siRNA sense strand
ucagauaccugcccaaagg

SEQ ID NO: 1308227 - RNA, 19 nt, Homo sapiens
  misc_RNA (1)...(19): siRNA sense strand
caccuacaaugaucuaauu

SEQ ID NO: 1308228 - RNA, 19 nt, Homo sapiens
  misc_RNA (1)...(19): siRNA sense strand
gaagcuccauuucaucaca

SEQ ID NO: 1308229 - RNA, 19 nt, Homo sapiens
  misc_RNA (1)...(19): siRNA sense strand
gagaguaucaagcuuaguu

SEQ ID NO: 1308230 - RNA, 19 nt, Homo sapiens
  misc_RNA (1)...(19): siRNA sense strand
uaaaguagcaacagcagaa

SEQ ID NO: 1308231 - RNA, 19 nt, Homo sapiens
  misc_RNA (1)...(19): siRNA sense strand
gaagaugagagauuuaaag

SEQ ID NO: 1308232 - RNA, 19 nt, Homo sapiens
  misc_RNA (1)...(19): siRNA sense strand
ggauggaaggcuacuuaua

SEQ ID NO: 1308233 - RNA, 19 nt, Homo sapiens
  misc_RNA (1)...(19): siRNA sense strand
gcagagggccuugauacaa

SEQ ID NO: 1308234 - RNA, 19 nt, Homo sapiens
  misc_RNA (1)...(19): siRNA sense strand
guaauagcccuucuguuug

SEQ ID NO: 1308235 - RNA, 19 nt, Homo sapiens
  misc_RNA (1)...(19): siRNA sense strand
cgaccuggcugaauugaca

SEQ ID NO: 1308236 - RNA, 19 nt, Homo sapiens
  misc_RNA (1)...(19): siRNA sense strand
caagggagucuuuggauga

SEQ ID NO: 1308237 - RNA, 19 nt, Homo sapiens
  misc_RNA (1)...(19): siRNA sense strand
acacggaaaugaagacaau

SEQ ID NO: 1308238 - RNA, 19 nt, Homo sapiens
  misc_RNA (1)...(19): siRNA sense strand
gaaguuauaaguacacauc

SEQ ID NO: 1308239 - RNA, 19 nt, Homo sapiens
  misc_RNA (1)...(19): siRNA sense strand
uggaugaccuguuucaaau

SEQ ID NO: 1308240 - RNA, 19 nt, Homo sapiens
  misc_RNA (1)...(19): siRNA sense strand
guuacuagaugacgagguu

SEQ ID NO: 1308241 - RNA, 19 nt, Homo sapiens
  misc_RNA (1)...(19): siRNA sense strand
ccaacaagguuaaaguuac

SEQ ID NO: 1308242 - RNA, 19 nt, Homo sapiens
  misc_RNA (1)...(19): siRNA sense strand
gaggaugugaguucagaua

SEQ ID NO: 1308243 - RNA, 19 nt, Homo sapiens
  misc_RNA (1)...(19): siRNA sense strand
caaguucuuuccauccauu

SEQ ID NO: 1308244 - RNA, 19 nt, Homo sapiens
  misc_RNA (1)...(19): siRNA sense strand
gaacgaccuggcugaauug

SEQ ID NO: 1308245 - RNA, 19 nt, Homo sapiens
  misc_RNA (1)...(19): siRNA sense strand
caaaggaggaagacacuga

SEQ ID NO: 1308246 - RNA, 19 nt, Homo sapiens
  misc_RNA (1)...(19): siRNA sense strand
gauggagaaguuauaagua

SEQ ID NO: 1308247 - RNA, 19 nt, Homo sapiens
  misc_RNA (1)...(19): siRNA sense strand
ucaccaauauuguguaucu

SEQ ID NO: 1308248 - RNA, 19 nt, Homo sapiens
  misc_RNA (1)...(19): siRNA sense strand
caauggaugaugaagguua

SEQ ID NO: 1308249 - RNA, 19 nt, Homo sapiens
  misc_RNA (1)...(19): siRNA sense strand
aaacuuugacugcagauaa

SEQ ID NO: 1308250 - RNA, 19 nt, Homo sapiens
  misc_RNA (1)...(19): siRNA sense strand
gccagcaaccucugauaua

SEQ ID NO: 1308251 - RNA, 19 nt, Homo sapiens
  misc_RNA (1)...(19): siRNA sense strand
gaaaucaaggccugaagau

SEQ ID NO: 1308252 - RNA, 19 nt, Homo sapiens
  misc_RNA (1)...(19): siRNA sense strand
caacaagguuaaaguuacu

SEQ ID NO: 1308253 - RNA, 19 nt, Homo sapiens
  misc_RNA (1)...(19): siRNA sense strand
uaauagcccuucuguuugg

SEQ ID NO: 1308254 - RNA, 19 nt, Homo sapiens
  misc_RNA (1)...(19): siRNA sense strand
cacgagcccugaucugaaa

SEQ ID NO: 1308255 - RNA, 19 nt, Homo sapiens
  misc_RNA (1)...(19): siRNA sense strand
ggaaggcuacuuauaucuu

SEQ ID NO: 1308256 - RNA, 19 nt, Homo sapiens
  misc_RNA (1)...(19): siRNA sense strand
gcaaugaagaaucuguuga

SEQ ID NO: 1308257 - RNA, 19 nt, Homo sapiens
  misc_RNA (1)...(19): siRNA sense strand
aagaggaccugccagauca

SEQ ID NO: 1308258 - RNA, 19 nt, Homo sapiens
  misc_RNA (1)...(19): siRNA sense strand
gaagaggcagucagucaga

SEQ ID NO: 1308259 - RNA, 19 nt, Homo sapiens
  misc_RNA (1)...(19): siRNA sense strand
gcaccuaaaugggaaaguc

SEQ ID NO: 1308260 - RNA, 19 nt, Homo sapiens
  misc_RNA (1)...(19): siRNA sense strand
gugcugacuuggacagaaa

SEQ ID NO: 1308261 - RNA, 19 nt, Homo sapiens
  misc_RNA (1)...(19): siRNA sense strand
gaagacaauguuucucaug

SEQ ID NO: 1308262 - RNA, 19 nt, Homo sapiens
  misc_RNA (1)...(19): siRNA sense strand
gcuacccgguuguaugaaa

SEQ ID NO: 1308263 - RNA, 19 nt, Homo sapiens
  misc_RNA (1)...(19): siRNA sense strand
guuccaauccuguguauau

SEQ ID NO: 1308264 - RNA, 19 nt, Homo sapiens
  misc_RNA (1)...(19): siRNA sense strand
cuacaggacccucugguuu

SEQ ID NO: 1308265 - RNA, 19 nt, Homo sapiens
  misc_RNA (1)...(19): siRNA sense strand
gaccauggcaccuacaaug

SEQ ID NO: 1308266 - RNA, 19 nt, Homo sapiens
  misc_RNA (1)...(19): siRNA sense strand
uuaaagaauucaccucaca

SEQ ID NO: 1308267 - RNA, 19 nt, Homo sapiens
  misc_RNA (1)...(19): siRNA sense strand
ucuaauuucucaacuggaa

SEQ ID NO: 1308268 - RNA, 19 nt, Homo sapiens
  misc_RNA (1)...(19): siRNA sense strand
gauguuuccuguucagaca

SEQ ID NO: 1308269 - RNA, 19 nt, Homo sapiens
  misc_RNA (1)...(19): siRNA sense strand
gcacuucuguuagcuaagg

SEQ ID NO: 1308270 - RNA, 19 nt, Homo sapiens
  misc_RNA (1)...(19): siRNA sense strand
uaaaugggagccucaguga

SEQ ID NO: 1308271 - RNA, 19 nt, Homo sapiens
  misc_RNA (1)...(19): siRNA sense strand
ccaauauuguguaucugaa

SEQ ID NO: 1308272 - RNA, 19 nt, Homo sapiens
  misc_RNA (1)...(19): siRNA sense strand
cuaucaaacucaauacuuc

SEQ ID NO: 1308273 - RNA, 19 nt, Homo sapiens
  misc_RNA (1)...(19): siRNA sense strand
acagucagcugauccuuca

SEQ ID NO: 1308274 - RNA, 19 nt, Homo sapiens
  misc_RNA (1)...(19): siRNA sense strand
caaccagagucuuuaaggu

SEQ ID NO: 1308275 - RNA, 19 nt, Homo sapiens
  misc_RNA (1)...(19): siRNA sense strand
gaucagcggucaucuuuuc

SEQ ID NO: 1308276 - RNA, 19 nt, Homo sapiens
  misc_RNA (1)...(19): siRNA sense strand
gaaauggcaaguuccaauc

SEQ ID NO: 1308277 - RNA, 19 nt, Homo sapiens
  misc_RNA (1)...(19): siRNA sense strand
ggacauaccucccagauga

SEQ ID NO: 1308278 - RNA, 19 nt, Homo sapiens
  misc_RNA (1)...(19): siRNA sense strand
ccaaggaucugguguuuga

SEQ ID NO: 1308279 - RNA, 19 nt, Homo sapiens
  misc_RNA (1)...(19): siRNA sense strand
gcugaggacugaguugaua

SEQ ID NO: 1308280 - RNA, 19 nt, Homo sapiens
  misc_RNA (1)...(19): siRNA sense strand
aauaaccgcuggaaaggaa

SEQ ID NO: 1308281 - RNA, 19 nt, Homo sapiens
  misc_RNA (1)...(19): siRNA sense strand
ccagcucacuccagaagaa

SEQ ID NO: 1308282 - RNA, 19 nt, Homo sapiens
  misc_RNA (1)...(19): siRNA sense strand
gggaauaaccgcuggaaag

SEQ ID NO: 1308283 - RNA, 19 nt, Homo sapiens
  misc_RNA (1)...(19): siRNA sense strand
ggaagguccuaaguacaga

SEQ ID NO: 1308284 - RNA, 19 nt, Homo sapiens
  misc_RNA (1)...(19): siRNA sense strand
gugcugggcuccacauugg

SEQ ID NO: 1308285 - RNA, 19 nt, Homo sapiens
  misc_RNA (1)...(19): siRNA sense strand
gcauggaggaugaggaaga

SEQ ID NO: 1308286 - RNA, 19 nt, Homo sapiens
  misc_RNA (1)...(19): siRNA sense strand
cuuggucucuccuacagua

SEQ ID NO: 1308287 - RNA, 19 nt, Homo sapiens
  misc_RNA (1)...(19): siRNA sense strand
gcacugcugaccauguuga

SEQ ID NO: 1308288 - RNA, 19 nt, Homo sapiens
  misc_RNA (1)...(19): siRNA sense strand
caggguacaucugcuagaa

SEQ ID NO: 1308289 - RNA, 19 nt, Homo sapiens
  misc_RNA (1)...(19): siRNA sense strand
gggaaucuucgucugcuuu

SEQ ID NO: 1308290 - RNA, 19 nt, Homo sapiens
  misc_RNA (1)...(19): siRNA sense strand
gccuaaagcugugcuccaa

SEQ ID NO: 1308291 - RNA, 19 nt, Homo sapiens
  misc_RNA (1)...(19): siRNA sense strand
ggucucuccuacaguaaga

SEQ ID NO: 1308292 - RNA, 19 nt, Homo sapiens
  misc_RNA (1)...(19): siRNA sense strand
ggaauaaccgcuggaaagg

SEQ ID NO: 1308293 - RNA, 19 nt, Homo sapiens
  misc_RNA (1)...(19): siRNA sense strand
caucugcacugcugaccau

SEQ ID NO: 1308294 - RNA, 19 nt, Homo sapiens
  misc_RNA (1)...(19): siRNA sense strand
gagcuccugcuucuacuga

SEQ ID NO: 1308295 - RNA, 19 nt, Homo sapiens
  misc_RNA (1)...(19): siRNA sense strand
gcagagcaccgagcugugu

SEQ ID NO: 1308296 - RNA, 19 nt, Homo sapiens
  misc_RNA (1)...(19): siRNA sense strand
gaauaaccgcuggaaagga

SEQ ID NO: 1308297 - RNA, 19 nt, Homo sapiens
  misc_RNA (1)...(19): siRNA sense strand
guugauaggagaccagcua

SEQ ID NO: 1308298 - RNA, 19 nt, Homo sapiens
  misc_RNA (1)...(19): siRNA sense strand
gcccaguucuaagcccaua

SEQ ID NO: 1308299 - RNA, 19 nt, Homo sapiens
  misc_RNA (1)...(19): siRNA sense strand
cauuggaacugcuggacau

SEQ ID NO: 1308300 - RNA, 19 nt, Homo sapiens
  misc_RNA (1)...(19): siRNA sense strand
ggauuaccgaggcuuagaa

SEQ ID NO: 1308301 - RNA, 19 nt, Homo sapiens
  misc_RNA (1)...(19): siRNA sense strand
agccaaggaucugguguuu

SEQ ID NO: 1308302 - RNA, 19 nt, Homo sapiens
  misc_RNA (1)...(19): siRNA sense strand
ccagaagaacugagacaca

SEQ ID NO: 1308303 - RNA, 19 nt, Homo sapiens
  misc_RNA (1)...(19): siRNA sense strand
gcugagcuccugcuucuac

SEQ ID NO: 1308304 - RNA, 19 nt, Homo sapiens
  misc_RNA (1)...(19): siRNA sense strand
cugcacugcugaccauguu

SEQ ID NO: 1308305 - RNA, 19 nt, Homo sapiens
  misc_RNA (1)...(19): siRNA sense strand
cccacaggguguugaguug

SEQ ID NO: 1308306 - RNA, 19 nt, Homo sapiens
  misc_RNA (1)...(19): siRNA sense strand
ccugauguguggaagaaag

SEQ ID NO: 1308307 - RNA, 19 nt, Homo sapiens
  misc_RNA (1)...(19): siRNA sense strand
agacaggguacaucugcua

SEQ ID NO: 1308308 - RNA, 19 nt, Homo sapiens
  misc_RNA (1)...(19): siRNA sense strand
ggaaucuucgucugcuuuc

SEQ ID NO: 1308309 - RNA, 19 nt, Homo sapiens
  misc_RNA (1)...(19): siRNA sense strand
gaaucuucgucugcuuuca

SEQ ID NO: 1308310 - RNA, 19 nt, Homo sapiens
  misc_RNA (1)...(19): siRNA sense strand
gcccagcucaacaccguuu

SEQ ID NO: 1308311 - RNA, 19 nt, Homo sapiens
  misc_RNA (1)...(19): siRNA sense strand
acugugggcuugcucaaag

SEQ ID NO: 1308312 - RNA, 19 nt, Homo sapiens
  misc_RNA (1)...(19): siRNA sense strand
gcacugugagccuauugca

SEQ ID NO: 1308313 - RNA, 19 nt, Homo sapiens
  misc_RNA (1)...(19): siRNA sense strand
cggcauggaggaugaggaa

SEQ ID NO: 1308314 - RNA, 19 nt, Homo sapiens
  misc_RNA (1)...(19): siRNA sense strand
ccaggcaagggcaaaguga

SEQ ID NO: 1308315 - RNA, 19 nt, Homo sapiens
  misc_RNA (1)...(19): siRNA sense strand
cugcagcccuaggcacauu

SEQ ID NO: 1308316 - RNA, 19 nt, Homo sapiens
  misc_RNA (1)...(19): siRNA sense strand
gcacauuucagggcacucu

SEQ ID NO: 1308317 - RNA, 19 nt, Homo sapiens
  misc_RNA (1)...(19): siRNA sense strand
gcuuucagccacugugugu

SEQ ID NO: 1308318 - RNA, 19 nt, Homo sapiens
  misc_RNA (1)...(19): siRNA sense strand
ggcccacguucuacucauc

SEQ ID NO: 1308319 - RNA, 19 nt, Homo sapiens
  misc_RNA (1)...(19): siRNA sense strand
gggauuaccgaggcuuaga

SEQ ID NO: 1308320 - RNA, 19 nt, Homo sapiens
  misc_RNA (1)...(19): siRNA sense strand
cauggaggaugaggaagag

SEQ ID NO: 1308321 - RNA, 19 nt, Homo sapiens
  misc_RNA (1)...(19): siRNA sense strand
gcaggugacugguucuuca

SEQ ID NO: 1308322 - RNA, 19 nt, Homo sapiens
  misc_RNA (1)...(19): siRNA sense strand
agagguagcucagaaaugu

SEQ ID NO: 1308323 - RNA, 19 nt, Homo sapiens
  misc_RNA (1)...(19): siRNA sense strand
ggacugugcccuggccuua

SEQ ID NO: 1308324 - RNA, 19 nt, Homo sapiens
  misc_RNA (1)...(19): siRNA sense strand
agaaauguggcuugucuua

SEQ ID NO: 1308325 - RNA, 19 nt, Homo sapiens
  misc_RNA (1)...(19): siRNA sense strand
caacagguuuccaggagau

SEQ ID NO: 1308326 - RNA, 19 nt, Homo sapiens
  misc_RNA (1)...(19): siRNA sense strand
gaagagguagcucagaaau

SEQ ID NO: 1308327 - RNA, 19 nt, Homo sapiens
  misc_RNA (1)...(19): siRNA sense strand
ggaagagguagcucagaaa

SEQ ID NO: 1308328 - RNA, 19 nt, Homo sapiens
  misc_RNA (1)...(19): siRNA sense strand
aaauguggcuugucuuaca

SEQ ID NO: 1308329 - RNA, 19 nt, Homo sapiens
  misc_RNA (1)...(19): siRNA sense strand
ucagaaauguggcuugucu

SEQ ID NO: 1308330 - RNA, 19 nt, Homo sapiens
  misc_RNA (1)...(19): siRNA sense strand
uggaagagguagcucagaa

SEQ ID NO: 1308331 - RNA, 19 nt, Homo sapiens
  misc_RNA (1)...(19): siRNA sense strand
agagcagagugccacauua

SEQ ID NO: 1308332 - RNA, 19 nt, Homo sapiens
  misc_RNA (1)...(19): siRNA sense strand
gcucagaaauguggcuugu

SEQ ID NO: 1308333 - RNA, 19 nt, Homo sapiens
  misc_RNA (1)...(19): siRNA sense strand
gcaugcauuugacaucuuc

SEQ ID NO: 1308334 - RNA, 19 nt, Homo sapiens
  misc_RNA (1)...(19): siRNA sense strand
cgagggagcaggagcauca

SEQ ID NO: 1308335 - RNA, 19 nt, Homo sapiens
  misc_RNA (1)...(19): siRNA sense strand
gagcagagugccacauuac

SEQ ID NO: 1308336 - RNA, 19 nt, Homo sapiens
  misc_RNA (1)...(19): siRNA sense strand
cagaagcucuccggaggau

SEQ ID NO: 1308337 - RNA, 19 nt, Homo sapiens
  misc_RNA (1)...(19): siRNA sense strand
ggacagcgggaggcucaaa

SEQ ID NO: 1308338 - RNA, 19 nt, Homo sapiens
  misc_RNA (1)...(19): siRNA sense strand
gugacugguucuucaggaa

SEQ ID NO: 1308339 - RNA, 19 nt, Homo sapiens
  misc_RNA (1)...(19): siRNA sense strand
ccagguggugcaugcauuu

SEQ ID NO: 1308340 - RNA, 19 nt, Homo sapiens
  misc_RNA (1)...(19): siRNA sense strand
cagagcagagugccacauu

SEQ ID NO: 1308341 - RNA, 19 nt, Homo sapiens
  misc_RNA (1)...(19): siRNA sense strand
gcagagugccacauuacag

SEQ ID NO: 1308342 - RNA, 19 nt, Homo sapiens
  misc_RNA (1)...(19): siRNA sense strand
gaaauguggcuugucuuac

SEQ ID NO: 1308343 - RNA, 19 nt, Homo sapiens
  misc_RNA (1)...(19): siRNA sense strand
gccacaggaucaagacagu

SEQ ID NO: 1308344 - RNA, 19 nt, Homo sapiens
  misc_RNA (1)...(19): siRNA sense strand
gugcaugcauuugacaucu

SEQ ID NO: 1308345 - RNA, 19 nt, Homo sapiens
  misc_RNA (1)...(19): siRNA sense strand
acagggugaucagacauga

SEQ ID NO: 1308346 - RNA, 19 nt, Homo sapiens
  misc_RNA (1)...(19): siRNA sense strand
uccaggagaugguagacau

SEQ ID NO: 1308347 - RNA, 19 nt, Homo sapiens
  misc_RNA (1)...(19): siRNA sense strand
ggauucuccuggacaccau

SEQ ID NO: 1308348 - RNA, 19 nt, Homo sapiens
  misc_RNA (1)...(19): siRNA sense strand
caggagaugguagacauug

SEQ ID NO: 1308349 - RNA, 19 nt, Homo sapiens
  misc_RNA (1)...(19): siRNA sense strand
cccgacagccaacagguuu

SEQ ID NO: 1308350 - RNA, 19 nt, Homo sapiens
  misc_RNA (1)...(19): siRNA sense strand
ccacauuacagggugauca

SEQ ID NO: 1308351 - RNA, 19 nt, Homo sapiens
  misc_RNA (1)...(19): siRNA sense strand
agagguagcucagaaaugu

SEQ ID NO: 1308352 - RNA, 19 nt, Homo sapiens
  misc_RNA (1)...(19): siRNA sense strand
ggacugugcccuggccuua

SEQ ID NO: 1308353 - RNA, 19 nt, Homo sapiens
  misc_RNA (1)...(19): siRNA sense strand
agaaauguggcuugucuua

SEQ ID NO: 1308354 - RNA, 19 nt, Homo sapiens
  misc_RNA (1)...(19): siRNA sense strand
gaagagguagcucagaaau

SEQ ID NO: 1308355 - RNA, 19 nt, Homo sapiens
  misc_RNA (1)...(19): siRNA sense strand
ggaagagguagcucagaaa

SEQ ID NO: 1308356 - RNA, 19 nt, Homo sapiens
  misc_RNA (1)...(19): siRNA sense strand
aaauguggcuugucuuaca

SEQ ID NO: 1308357 - RNA, 19 nt, Homo sapiens
  misc_RNA (1)...(19): siRNA sense strand
ucagaaauguggcuugucu

SEQ ID NO: 1308358 - RNA, 19 nt, Homo sapiens
  misc_RNA (1)...(19): siRNA sense strand
uggaagagguagcucagaa

SEQ ID NO: 1308359 - RNA, 19 nt, Homo sapiens
  misc_RNA (1)...(19): siRNA sense strand
gcucagaaauguggcuugu

SEQ ID NO: 1308360 - RNA, 19 nt, Homo sapiens
  misc_RNA (1)...(19): siRNA sense strand
gccacaggaucaagacagu

SEQ ID NO: 1308361 - RNA, 19 nt, Homo sapiens
  misc_RNA (1)...(19): siRNA sense strand
gaaauguggcuugucuuac

SEQ ID NO: 1308362 - RNA, 19 nt, Homo sapiens
  misc_RNA (1)...(19): siRNA sense strand
agagguagcucagaaaugu

SEQ ID NO: 1308363 - RNA, 19 nt, Homo sapiens
  misc_RNA (1)...(19): siRNA sense strand
ggacugugcccuggccuua

SEQ ID NO: 1308364 - RNA, 19 nt, Homo sapiens
  misc_RNA (1)...(19): siRNA sense strand
agaaauguggcuugucuua

SEQ ID NO: 1308365 - RNA, 19 nt, Homo sapiens
  misc_RNA (1)...(19): siRNA sense strand
gaagagguagcucagaaau

SEQ ID NO: 1308366 - RNA, 19 nt, Homo sapiens
  misc_RNA (1)...(19): siRNA sense strand
ggaagagguagcucagaaa

SEQ ID NO: 1308367 - RNA, 19 nt, Homo sapiens
  misc_RNA (1)...(19): siRNA sense strand
aaauguggcuugucuuaca

SEQ ID NO: 1308368 - RNA, 19 nt, Homo sapiens
  misc_RNA (1)...(19): siRNA sense strand
ucagaaauguggcuugucu

SEQ ID NO: 1308369 - RNA, 19 nt, Homo sapiens
  misc_RNA (1)...(19): siRNA sense strand
uggaagagguagcucagaa

SEQ ID NO: 1308370 - RNA, 19 nt, Homo sapiens
  misc_RNA (1)...(19): siRNA sense strand
gcucagaaauguggcuugu

SEQ ID NO: 1308371 - RNA, 19 nt, Homo sapiens
  misc_RNA (1)...(19): siRNA sense strand
gccacaggaucaagacagu

SEQ ID NO: 1308372 - RNA, 19 nt, Homo sapiens
  misc_RNA (1)...(19): siRNA sense strand
gaaauguggcuugucuuac

SEQ ID NO: 1308373 - RNA, 19 nt, Homo sapiens
  misc_RNA (1)...(19): siRNA sense strand
gcaggugacugguucuuca

SEQ ID NO: 1308374 - RNA, 19 nt, Homo sapiens
  misc_RNA (1)...(19): siRNA sense strand
agagguagcucagaaaugu

SEQ ID NO: 1308375 - RNA, 19 nt, Homo sapiens
  misc_RNA (1)...(19): siRNA sense strand
ggacugugcccuggccuua

SEQ ID NO: 1308376 - RNA, 19 nt, Homo sapiens
  misc_RNA (1)...(19): siRNA sense strand
agaaauguggcuugucuua

SEQ ID NO: 1308377 - RNA, 19 nt, Homo sapiens
  misc_RNA (1)...(19): siRNA sense strand
caacagguuuccaggagau

SEQ ID NO: 1308378 - RNA, 19 nt, Homo sapiens
  misc_RNA (1)...(19): siRNA sense strand
gaagagguagcucagaaau

SEQ ID NO: 1308379 - RNA, 19 nt, Homo sapiens
  misc_RNA (1)...(19): siRNA sense strand
ggaagagguagcucagaaa

SEQ ID NO: 1308380 - RNA, 19 nt, Homo sapiens
  misc_RNA (1)...(19): siRNA sense strand
aaauguggcuugucuuaca

SEQ ID NO: 1308381 - RNA, 19 nt, Homo sapiens
  misc_RNA (1)...(19): siRNA sense strand
ucagaaauguggcuugucu

SEQ ID NO: 1308382 - RNA, 19 nt, Homo sapiens
  misc_RNA (1)...(19): siRNA sense strand
uggaagagguagcucagaa

SEQ ID NO: 1308383 - RNA, 19 nt, Homo sapiens
  misc_RNA (1)...(19): siRNA sense strand
agagcagagugccacauua

SEQ ID NO: 1308384 - RNA, 19 nt, Homo sapiens
  misc_RNA (1)...(19): siRNA sense strand
gcucagaaauguggcuugu

SEQ ID NO: 1308385 - RNA, 19 nt, Homo sapiens
  misc_RNA (1)...(19): siRNA sense strand
gcaugcauuugacaucuuc

SEQ ID NO: 1308386 - RNA, 19 nt, Homo sapiens
  misc_RNA (1)...(19): siRNA sense strand
cgagggagcaggagcauca

SEQ ID NO: 1308387 - RNA, 19 nt, Homo sapiens
  misc_RNA (1)...(19): siRNA sense strand
gagcagagugccacauuac

SEQ ID NO: 1308388 - RNA, 19 nt, Homo sapiens
  misc_RNA (1)...(19): siRNA sense strand
cagaagcucuccggaggau

SEQ ID NO: 1308389 - RNA, 19 nt, Homo sapiens
  misc_RNA (1)...(19): siRNA sense strand
ggacagcgggaggcucaaa

SEQ ID NO: 1308390 - RNA, 19 nt, Homo sapiens
  misc_RNA (1)...(19): siRNA sense strand
gugacugguucuucaggaa

SEQ ID NO: 1308391 - RNA, 19 nt, Homo sapiens
  misc_RNA (1)...(19): siRNA sense strand
ccagguggugcaugcauuu

SEQ ID NO: 1308392 - RNA, 19 nt, Homo sapiens
  misc_RNA (1)...(19): siRNA sense strand
cagagcagagugccacauu

SEQ ID NO: 1308393 - RNA, 19 nt, Homo sapiens
  misc_RNA (1)...(19): siRNA sense strand
gcagagugccacauuacag

SEQ ID NO: 1308394 - RNA, 19 nt, Homo sapiens
  misc_RNA (1)...(19): siRNA sense strand
gaaauguggcuugucuuac

SEQ ID NO: 1308395 - RNA, 19 nt, Homo sapiens
  misc_RNA (1)...(19): siRNA sense strand
gccacaggaucaagacagu

SEQ ID NO: 1308396 - RNA, 19 nt, Homo sapiens
  misc_RNA (1)...(19): siRNA sense strand
gugcaugcauuugacaucu

SEQ ID NO: 1308397 - RNA, 19 nt, Homo sapiens
  misc_RNA (1)...(19): siRNA sense strand
acagggugaucagacauga

SEQ ID NO: 1308398 - RNA, 19 nt, Homo sapiens
  misc_RNA (1)...(19): siRNA sense strand
uccaggagaugguagacau

SEQ ID NO: 1308399 - RNA, 19 nt, Homo sapiens
  misc_RNA (1)...(19): siRNA sense strand
ggauucuccuggacaccau

SEQ ID NO: 1308400 - RNA, 19 nt, Homo sapiens
  misc_RNA (1)...(19): siRNA sense strand
caggagaugguagacauug

SEQ ID NO: 1308401 - RNA, 19 nt, Homo sapiens
  misc_RNA (1)...(19): siRNA sense strand
cccgacagccaacagguuu

SEQ ID NO: 1308402 - RNA, 19 nt, Homo sapiens
  misc_RNA (1)...(19): siRNA sense strand
ccacauuacagggugauca

SEQ ID NO: 1308403 - RNA, 19 nt, Homo sapiens
  misc_RNA (1)...(19): siRNA sense strand
agagguagcucagaaaugu

SEQ ID NO: 1308404 - RNA, 19 nt, Homo sapiens
  misc_RNA (1)...(19): siRNA sense strand
ggacugugcccuggccuua

SEQ ID NO: 1308405 - RNA, 19 nt, Homo sapiens
  misc_RNA (1)...(19): siRNA sense strand
agaaauguggcuugucuua

SEQ ID NO: 1308406 - RNA, 19 nt, Homo sapiens
  misc_RNA (1)...(19): siRNA sense strand
gaagagguagcucagaaau

SEQ ID NO: 1308407 - RNA, 19 nt, Homo sapiens
  misc_RNA (1)...(19): siRNA sense strand
ggaagagguagcucagaaa

SEQ ID NO: 1308408 - RNA, 19 nt, Homo sapiens
  misc_RNA (1)...(19): siRNA sense strand
aaauguggcuugucuuaca

SEQ ID NO: 1308409 - RNA, 19 nt, Homo sapiens
  misc_RNA (1)...(19): siRNA sense strand
ucagaaauguggcuugucu

SEQ ID NO: 1308410 - RNA, 19 nt, Homo sapiens
  misc_RNA (1)...(19): siRNA sense strand
uggaagagguagcucagaa

SEQ ID NO: 1308411 - RNA, 19 nt, Homo sapiens
  misc_RNA (1)...(19): siRNA sense strand
gcucagaaauguggcuugu

SEQ ID NO: 1308412 - RNA, 19 nt, Homo sapiens
  misc_RNA (1)...(19): siRNA sense strand
gccacaggaucaagacagu

SEQ ID NO: 1308413 - RNA, 19 nt, Homo sapiens
  misc_RNA (1)...(19): siRNA sense strand
gaaauguggcuugucuuac

SEQ ID NO: 1308414 - RNA, 19 nt, Homo sapiens
  misc_RNA (1)...(19): siRNA sense strand
gaucugauguugguuauua

SEQ ID NO: 1308415 - RNA, 19 nt, Homo sapiens
  misc_RNA (1)...(19): siRNA sense strand
gcaacaagaugaauuagaa

SEQ ID NO: 1308416 - RNA, 19 nt, Homo sapiens
  misc_RNA (1)...(19): siRNA sense strand
gaaagggagucaacuauga

SEQ ID NO: 1308417 - RNA, 19 nt, Homo sapiens
  misc_RNA (1)...(19): siRNA sense strand
gcagacacguggccuaaua

SEQ ID NO: 1308418 - RNA, 19 nt, Homo sapiens
  misc_RNA (1)...(19): siRNA sense strand
ggagucaacuaugaaauua

SEQ ID NO: 1308419 - RNA, 19 nt, Homo sapiens
  misc_RNA (1)...(19): siRNA sense strand
gaaagcucaugaucacuua

SEQ ID NO: 1308420 - RNA, 19 nt, Homo sapiens
  misc_RNA (1)...(19): siRNA sense strand
gaucaacagucucaguaua

SEQ ID NO: 1308421 - RNA, 19 nt, Homo sapiens
  misc_RNA (1)...(19): siRNA sense strand
gaaucagacugguuaguuu

SEQ ID NO: 1308422 - RNA, 19 nt, Homo sapiens
  misc_RNA (1)...(19): siRNA sense strand
aaacggaacugcaauucua

SEQ ID NO: 1308423 - RNA, 19 nt, Homo sapiens
  misc_RNA (1)...(19): siRNA sense strand
gaaauacagucacauuauc

SEQ ID NO: 1308424 - RNA, 19 nt, Homo sapiens
  misc_RNA (1)...(19): siRNA sense strand
caacauuucuguagaugaa

SEQ ID NO: 1308425 - RNA, 19 nt, Homo sapiens
  misc_RNA (1)...(19): siRNA sense strand
gaaaggacguggaaacaag

SEQ ID NO: 1308426 - RNA, 19 nt, Homo sapiens
  misc_RNA (1)...(19): siRNA sense strand
gaagagacccaguaacuug

SEQ ID NO: 1308427 - RNA, 19 nt, Homo sapiens
  misc_RNA (1)...(19): siRNA sense strand
gagcaacuccaacaucuua

SEQ ID NO: 1308428 - RNA, 19 nt, Homo sapiens
  misc_RNA (1)...(19): siRNA sense strand
ccaagacucucgaaucaaa

SEQ ID NO: 1308429 - RNA, 19 nt, Homo sapiens
  misc_RNA (1)...(19): siRNA sense strand
agaaacaucugccauuaaa

SEQ ID NO: 1308430 - RNA, 19 nt, Homo sapiens
  misc_RNA (1)...(19): siRNA sense strand
gggcaaagcugaagcaucu

SEQ ID NO: 1308431 - RNA, 19 nt, Homo sapiens
  misc_RNA (1)...(19): siRNA sense strand
ggaugacagugcagaauuu

SEQ ID NO: 1308432 - RNA, 19 nt, Homo sapiens
  misc_RNA (1)...(19): siRNA sense strand
uuaaaggacucaaaccuaa

SEQ ID NO: 1308433 - RNA, 19 nt, Homo sapiens
  misc_RNA (1)...(19): siRNA sense strand
gaagacagguuguugacau

SEQ ID NO: 1308434 - RNA, 19 nt, Homo sapiens
  misc_RNA (1)...(19): siRNA sense strand
gaaacggacuuacuaguac

SEQ ID NO: 1308435 - RNA, 19 nt, Homo sapiens
  misc_RNA (1)...(19): siRNA sense strand
gagagaccaucauuuguga

SEQ ID NO: 1308436 - RNA, 19 nt, Homo sapiens
  misc_RNA (1)...(19): siRNA sense strand
gauaugaaauccgagauga

SEQ ID NO: 1308437 - RNA, 19 nt, Homo sapiens
  misc_RNA (1)...(19): siRNA sense strand
gcaacaacaugaacaaugg

SEQ ID NO: 1308438 - RNA, 19 nt, Homo sapiens
  misc_RNA (1)...(19): siRNA sense strand
gaaacucgauaccacauca

SEQ ID NO: 1308439 - RNA, 19 nt, Homo sapiens
  misc_RNA (1)...(19): siRNA sense strand
aagaggauauucuaccuua

SEQ ID NO: 1308440 - RNA, 19 nt, Homo sapiens
  misc_RNA (1)...(19): siRNA sense strand
ugaaagcuaugaccaagaa

SEQ ID NO: 1308441 - RNA, 19 nt, Homo sapiens
  misc_RNA (1)...(19): siRNA sense strand
gaaagaggagaagauaaua

SEQ ID NO: 1308442 - RNA, 19 nt, Homo sapiens
  misc_RNA (1)...(19): siRNA sense strand
gugcagaauuuaaauguga

SEQ ID NO: 1308443 - RNA, 19 nt, Homo sapiens
  misc_RNA (1)...(19): siRNA sense strand
ggugacagcuggugacaug

SEQ ID NO: 1308444 - RNA, 19 nt, Homo sapiens
  misc_RNA (1)...(19): siRNA sense strand
gcagguacuuggaggauau

SEQ ID NO: 1308445 - RNA, 19 nt, Homo sapiens
  misc_RNA (1)...(19): siRNA sense strand
gagggcagcuaaugcauau

SEQ ID NO: 1308446 - RNA, 19 nt, Homo sapiens
  misc_RNA (1)...(19): siRNA sense strand
gaggagaagauaauaauga

SEQ ID NO: 1308447 - RNA, 19 nt, Homo sapiens
  misc_RNA (1)...(19): siRNA sense strand
gcagaaauacagucacauu

SEQ ID NO: 1308448 - RNA, 19 nt, Homo sapiens
  misc_RNA (1)...(19): siRNA sense strand
gaacagacagaucaucaga

SEQ ID NO: 1308449 - RNA, 19 nt, Homo sapiens
  misc_RNA (1)...(19): siRNA sense strand
gcagagaaaccuacacaga

SEQ ID NO: 1308450 - RNA, 19 nt, Homo sapiens
  misc_RNA (1)...(19): siRNA sense strand
gcaaauguaggucgaagaa

SEQ ID NO: 1308451 - RNA, 19 nt, Homo sapiens
  misc_RNA (1)...(19): siRNA sense strand
gacaguagaucaacagucu

SEQ ID NO: 1308452 - RNA, 19 nt, Homo sapiens
  misc_RNA (1)...(19): siRNA sense strand
ggauguauuugcaacaaga

SEQ ID NO: 1308453 - RNA, 19 nt, Homo sapiens
  misc_RNA (1)...(19): siRNA sense strand
ucaacagucucaguauaua

SEQ ID NO: 1308454 - RNA, 19 nt, Homo sapiens
  misc_RNA (1)...(19): siRNA sense strand
gaggaaagcucaugaucac

SEQ ID NO: 1308455 - RNA, 19 nt, Homo sapiens
  misc_RNA (1)...(19): siRNA sense strand
gagaugaucauaccuugaa

SEQ ID NO: 1308456 - RNA, 19 nt, Homo sapiens
  misc_RNA (1)...(19): siRNA sense strand
acucaaaccuaaugcaauu

SEQ ID NO: 1308457 - RNA, 19 nt, Homo sapiens
  misc_RNA (1)...(19): siRNA sense strand
gcuauaaagucaccuacug

SEQ ID NO: 1308458 - RNA, 19 nt, Homo sapiens
  misc_RNA (1)...(19): siRNA sense strand
gagagagaguggagacaga

SEQ ID NO: 1308459 - RNA, 19 nt, Homo sapiens
  misc_RNA (1)...(19): siRNA sense strand
caagauguccuaccaacaa

SEQ ID NO: 1308460 - RNA, 19 nt, Homo sapiens
  misc_RNA (1)...(19): siRNA sense strand
ggaaagcucaugaucacuu

SEQ ID NO: 1308461 - RNA, 19 nt, Homo sapiens
  misc_RNA (1)...(19): siRNA sense strand
agacucaucucauccaaga

SEQ ID NO: 1308462 - RNA, 19 nt, Homo sapiens
  misc_RNA (1)...(19): siRNA sense strand
aauaucagauccagugaaa

SEQ ID NO: 1308463 - RNA, 19 nt, Homo sapiens
  misc_RNA (1)...(19): siRNA sense strand
cagaaauacagucacauua

SEQ ID NO: 1308464 - RNA, 19 nt, Homo sapiens
  misc_RNA (1)...(19): siRNA sense strand
ucaagaaccuccacauuuu

SEQ ID NO: 1308465 - RNA, 19 nt, Homo sapiens
  misc_RNA (1)...(19): siRNA sense strand
ucaaacaguuggagaaugg

SEQ ID NO: 1308466 - RNA, 19 nt, Homo sapiens
  misc_RNA (1)...(19): siRNA sense strand
aaauguaggucgaagaaau

SEQ ID NO: 1308467 - RNA, 19 nt, Homo sapiens
  misc_RNA (1)...(19): siRNA sense strand
gaggauauucuaccuuauu

SEQ ID NO: 1308468 - RNA, 19 nt, Homo sapiens
  misc_RNA (1)...(19): siRNA sense strand
agagaaaccuacacagaug

SEQ ID NO: 1308469 - RNA, 19 nt, Homo sapiens
  misc_RNA (1)...(19): siRNA sense strand
caaagauuaucgagcaaau

SEQ ID NO: 1308470 - RNA, 19 nt, Homo sapiens
  misc_RNA (1)...(19): siRNA sense strand
aaaacaagcugaacaaaga

SEQ ID NO: 1308471 - RNA, 19 nt, Homo sapiens
  misc_RNA (1)...(19): siRNA sense strand
ggagcagccuguuggauca

SEQ ID NO: 1308472 - RNA, 19 nt, Homo sapiens
  misc_RNA (1)...(19): siRNA sense strand
uauaguacauggacggaaa

SEQ ID NO: 1308473 - RNA, 19 nt, Homo sapiens
  misc_RNA (1)...(19): siRNA sense strand
guaacuguauccaagaaug

SEQ ID NO: 1308474 - RNA, 19 nt, Homo sapiens
  misc_RNA (1)...(19): siRNA sense strand
gacaagguccugugaauca

SEQ ID NO: 1308475 - RNA, 19 nt, Homo sapiens
  misc_RNA (1)...(19): siRNA sense strand
cgggaugacuucagacaaa

SEQ ID NO: 1308476 - RNA, 19 nt, Homo sapiens
  misc_RNA (1)...(19): siRNA sense strand
acagaugucagcagaaaua

SEQ ID NO: 1308477 - RNA, 19 nt, Homo sapiens
  misc_RNA (1)...(19): siRNA sense strand
guacuuggaggauaugaaa

SEQ ID NO: 1308478 - RNA, 19 nt, Homo sapiens
  misc_RNA (1)...(19): siRNA sense strand
gaagaacuccagcccaugu

SEQ ID NO: 1308479 - RNA, 19 nt, Homo sapiens
  misc_RNA (1)...(19): siRNA sense strand
gcaacuccaacaucuuaua

SEQ ID NO: 1308480 - RNA, 19 nt, Homo sapiens
  misc_RNA (1)...(19): siRNA sense strand
ggaaguuacagaugugauu

SEQ ID NO: 1308481 - RNA, 19 nt, Homo sapiens
  misc_RNA (1)...(19): siRNA sense strand
cacaaugacugcuccauca

SEQ ID NO: 1308482 - RNA, 19 nt, Homo sapiens
  misc_RNA (1)...(19): siRNA sense strand
agaaacggacuuacuagua

SEQ ID NO: 1308483 - RNA, 19 nt, Homo sapiens
  misc_RNA (1)...(19): siRNA sense strand
ggaggaaagcucaugauca

SEQ ID NO: 1308484 - RNA, 19 nt, Homo sapiens
  misc_RNA (1)...(19): siRNA sense strand
agaguaugcuggucugaaa

SEQ ID NO: 1308485 - RNA, 19 nt, Homo sapiens
  misc_RNA (1)...(19): siRNA sense strand
gaagagaaacggacuuacu

SEQ ID NO: 1308486 - RNA, 19 nt, Homo sapiens
  misc_RNA (1)...(19): siRNA sense strand
ugacagugcagaauuuaaa

SEQ ID NO: 1308487 - RNA, 19 nt, Homo sapiens
  misc_RNA (1)...(19): siRNA sense strand
ugaaagaggagaagauaau

SEQ ID NO: 1308488 - RNA, 19 nt, Homo sapiens
  misc_RNA (1)...(19): siRNA sense strand
guaggucgaagaaauauug

SEQ ID NO: 1308489 - RNA, 19 nt, Homo sapiens
  misc_RNA (1)...(19): siRNA sense strand
ggcaagaacacccaaggua

SEQ ID NO: 1308490 - RNA, 19 nt, Homo sapiens
  misc_RNA (1)...(19): siRNA sense strand
ggaaugguccaagaguaua

SEQ ID NO: 1308491 - RNA, 19 nt, Homo sapiens
  misc_RNA (1)...(19): siRNA sense strand
gggagucaacuaugaaauu

SEQ ID NO: 1308492 - RNA, 19 nt, Homo sapiens
  misc_RNA (1)...(19): siRNA sense strand
aaggagaaccugcaacuuu

SEQ ID NO: 1308493 - RNA, 19 nt, Homo sapiens
  misc_RNA (1)...(19): siRNA sense strand
cagggcagccuacuccuua

SEQ ID NO: 1308494 - RNA, 19 nt, Homo sapiens
  misc_RNA (1)...(19): siRNA sense strand
ccaacuggauaacaaacaa

SEQ ID NO: 1308495 - RNA, 19 nt, Homo sapiens
  misc_RNA (1)...(19): siRNA sense strand
ucgcccagcugauuguaua

SEQ ID NO: 1308496 - RNA, 19 nt, Homo sapiens
  misc_RNA (1)...(19): siRNA sense strand
gagcagauagugaaaucaa

SEQ ID NO: 1308497 - RNA, 19 nt, Homo sapiens
  misc_RNA (1)...(19): siRNA sense strand
gaaucaaacaguuggagaa

SEQ ID NO: 1308498 - RNA, 19 nt, Homo sapiens
  misc_RNA (1)...(19): siRNA sense strand
uuagagagaccaucauuug

SEQ ID NO: 1308499 - RNA, 19 nt, Homo sapiens
  misc_RNA (1)...(19): siRNA sense strand
ggaaguacgaccuguagug

SEQ ID NO: 1308500 - RNA, 19 nt, Homo sapiens
  misc_RNA (1)...(19): siRNA sense strand
gaacacccaagguaccaaa

SEQ ID NO: 1308501 - RNA, 19 nt, Homo sapiens
  misc_RNA (1)...(19): siRNA sense strand
acaaccaacuggauaacaa

SEQ ID NO: 1308502 - RNA, 19 nt, Homo sapiens
  misc_RNA (1)...(19): siRNA sense strand
acagcaaccucacuaccua

SEQ ID NO: 1308503 - RNA, 19 nt, Homo sapiens
  misc_RNA (1)...(19): siRNA sense strand
acaagcagguccagagaga

SEQ ID NO: 1308504 - RNA, 19 nt, Homo sapiens
  misc_RNA (1)...(19): siRNA sense strand
ugacauggguucauacacu

SEQ ID NO: 1308505 - RNA, 19 nt, Homo sapiens
  misc_RNA (1)...(19): siRNA sense strand
gaaauccgagaugaucaua

SEQ ID NO: 1308506 - RNA, 19 nt, Homo sapiens
  misc_RNA (1)...(19): siRNA sense strand
gaugacagugcagaauuua

SEQ ID NO: 1308507 - RNA, 19 nt, Homo sapiens
  misc_RNA (1)...(19): siRNA sense strand
ucgaagaaauauugcagaa

SEQ ID NO: 1308508 - RNA, 19 nt, Homo sapiens
  misc_RNA (1)...(19): siRNA sense strand
ggaaaggacguggaaacaa

SEQ ID NO: 1308509 - RNA, 19 nt, Homo sapiens
  misc_RNA (1)...(19): siRNA sense strand
uagaagaggaggaagauga

SEQ ID NO: 1308510 - RNA, 19 nt, Homo sapiens
  misc_RNA (1)...(19): siRNA sense strand
uauaacaaccaacuggaua

SEQ ID NO: 1308511 - RNA, 19 nt, Homo sapiens
  misc_RNA (1)...(19): siRNA sense strand
cggagaaucagacugguua

SEQ ID NO: 1308512 - RNA, 19 nt, Homo sapiens
  misc_RNA (1)...(19): siRNA sense strand
ggacucaaaccuaaugcaa

SEQ ID NO: 1308513 - RNA, 19 nt, Homo sapiens
  misc_RNA (1)...(19): siRNA sense strand
cagcagaaauacagucaca

SEQ ID NO: 1308514 - RNA, 19 nt, Homo sapiens
  misc_RNA (1)...(19): siRNA sense strand
gaucugauguugguuauua

SEQ ID NO: 1308515 - RNA, 19 nt, Homo sapiens
  misc_RNA (1)...(19): siRNA sense strand
gcaacaagaugaauuagaa

SEQ ID NO: 1308516 - RNA, 19 nt, Homo sapiens
  misc_RNA (1)...(19): siRNA sense strand
gaaagggagucaacuauga

SEQ ID NO: 1308517 - RNA, 19 nt, Homo sapiens
  misc_RNA (1)...(19): siRNA sense strand
gcagacacguggccuaaua

SEQ ID NO: 1308518 - RNA, 19 nt, Homo sapiens
  misc_RNA (1)...(19): siRNA sense strand
ggagucaacuaugaaauua

SEQ ID NO: 1308519 - RNA, 19 nt, Homo sapiens
  misc_RNA (1)...(19): siRNA sense strand
gaaagcucaugaucacuua

SEQ ID NO: 1308520 - RNA, 19 nt, Homo sapiens
  misc_RNA (1)...(19): siRNA sense strand
gaucaacagucucaguaua

SEQ ID NO: 1308521 - RNA, 19 nt, Homo sapiens
  misc_RNA (1)...(19): siRNA sense strand
gaaucagacugguuaguuu

SEQ ID NO: 1308522 - RNA, 19 nt, Homo sapiens
  misc_RNA (1)...(19): siRNA sense strand
aaacggaacugcaauucua

SEQ ID NO: 1308523 - RNA, 19 nt, Homo sapiens
  misc_RNA (1)...(19): siRNA sense strand
gaaauacagucacauuauc

SEQ ID NO: 1308524 - RNA, 19 nt, Homo sapiens
  misc_RNA (1)...(19): siRNA sense strand
caacauuucuguagaugaa

SEQ ID NO: 1308525 - RNA, 19 nt, Homo sapiens
  misc_RNA (1)...(19): siRNA sense strand
gaaaggacguggaaacaag

SEQ ID NO: 1308526 - RNA, 19 nt, Homo sapiens
  misc_RNA (1)...(19): siRNA sense strand
gaagagacccaguaacuug

SEQ ID NO: 1308527 - RNA, 19 nt, Homo sapiens
  misc_RNA (1)...(19): siRNA sense strand
gagcaacuccaacaucuua

SEQ ID NO: 1308528 - RNA, 19 nt, Homo sapiens
  misc_RNA (1)...(19): siRNA sense strand
ccaagacucucgaaucaaa

SEQ ID NO: 1308529 - RNA, 19 nt, Homo sapiens
  misc_RNA (1)...(19): siRNA sense strand
agaaacaucugccauuaaa

SEQ ID NO: 1308530 - RNA, 19 nt, Homo sapiens
  misc_RNA (1)...(19): siRNA sense strand
gggcaaagcugaagcaucu

SEQ ID NO: 1308531 - RNA, 19 nt, Homo sapiens
  misc_RNA (1)...(19): siRNA sense strand
ggaugacagugcagaauuu

SEQ ID NO: 1308532 - RNA, 19 nt, Homo sapiens
  misc_RNA (1)...(19): siRNA sense strand
uuaaaggacucaaaccuaa

SEQ ID NO: 1308533 - RNA, 19 nt, Homo sapiens
  misc_RNA (1)...(19): siRNA sense strand
gaagacagguuguugacau

SEQ ID NO: 1308534 - RNA, 19 nt, Homo sapiens
  misc_RNA (1)...(19): siRNA sense strand
gaaacggacuuacuaguac

SEQ ID NO: 1308535 - RNA, 19 nt, Homo sapiens
  misc_RNA (1)...(19): siRNA sense strand
gagagaccaucauuuguga

SEQ ID NO: 1308536 - RNA, 19 nt, Homo sapiens
  misc_RNA (1)...(19): siRNA sense strand
gauaugaaauccgagauga

SEQ ID NO: 1308537 - RNA, 19 nt, Homo sapiens
  misc_RNA (1)...(19): siRNA sense strand
gcaacaacaugaacaaugg

SEQ ID NO: 1308538 - RNA, 19 nt, Homo sapiens
  misc_RNA (1)...(19): siRNA sense strand
gaaacucgauaccacauca

SEQ ID NO: 1308539 - RNA, 19 nt, Homo sapiens
  misc_RNA (1)...(19): siRNA sense strand
aagaggauauucuaccuua

SEQ ID NO: 1308540 - RNA, 19 nt, Homo sapiens
  misc_RNA (1)...(19): siRNA sense strand
ugaaagcuaugaccaagaa

SEQ ID NO: 1308541 - RNA, 19 nt, Homo sapiens
  misc_RNA (1)...(19): siRNA sense strand
gaaagaggagaagauaaua

SEQ ID NO: 1308542 - RNA, 19 nt, Homo sapiens
  misc_RNA (1)...(19): siRNA sense strand
gugcagaauuuaaauguga

SEQ ID NO: 1308543 - RNA, 19 nt, Homo sapiens
  misc_RNA (1)...(19): siRNA sense strand
ggugacagcuggugacaug

SEQ ID NO: 1308544 - RNA, 19 nt, Homo sapiens
  misc_RNA (1)...(19): siRNA sense strand
gcagguacuuggaggauau

SEQ ID NO: 1308545 - RNA, 19 nt, Homo sapiens
  misc_RNA (1)...(19): siRNA sense strand
gagggcagcuaaugcauau

SEQ ID NO: 1308546 - RNA, 19 nt, Homo sapiens
  misc_RNA (1)...(19): siRNA sense strand
gaggagaagauaauaauga

SEQ ID NO: 1308547 - RNA, 19 nt, Homo sapiens
  misc_RNA (1)...(19): siRNA sense strand
gcagaaauacagucacauu

SEQ ID NO: 1308548 - RNA, 19 nt, Homo sapiens
  misc_RNA (1)...(19): siRNA sense strand
gaacagacagaucaucaga

SEQ ID NO: 1308549 - RNA, 19 nt, Homo sapiens
  misc_RNA (1)...(19): siRNA sense strand
gcagagaaaccuacacaga

SEQ ID NO: 1308550 - RNA, 19 nt, Homo sapiens
  misc_RNA (1)...(19): siRNA sense strand
gcaaauguaggucgaagaa

SEQ ID NO: 1308551 - RNA, 19 nt, Homo sapiens
  misc_RNA (1)...(19): siRNA sense strand
gacaguagaucaacagucu

SEQ ID NO: 1308552 - RNA, 19 nt, Homo sapiens
  misc_RNA (1)...(19): siRNA sense strand
ggauguauuugcaacaaga

SEQ ID NO: 1308553 - RNA, 19 nt, Homo sapiens
  misc_RNA (1)...(19): siRNA sense strand
ucaacagucucaguauaua

SEQ ID NO: 1308554 - RNA, 19 nt, Homo sapiens
  misc_RNA (1)...(19): siRNA sense strand
gaggaaagcucaugaucac

SEQ ID NO: 1308555 - RNA, 19 nt, Homo sapiens
  misc_RNA (1)...(19): siRNA sense strand
gagaugaucauaccuugaa

SEQ ID NO: 1308556 - RNA, 19 nt, Homo sapiens
  misc_RNA (1)...(19): siRNA sense strand
acucaaaccuaaugcaauu

SEQ ID NO: 1308557 - RNA, 19 nt, Homo sapiens
  misc_RNA (1)...(19): siRNA sense strand
gcuauaaagucaccuacug

SEQ ID NO: 1308558 - RNA, 19 nt, Homo sapiens
  misc_RNA (1)...(19): siRNA sense strand
gagagagaguggagacaga

SEQ ID NO: 1308559 - RNA, 19 nt, Homo sapiens
  misc_RNA (1)...(19): siRNA sense strand
caagauguccuaccaacaa

SEQ ID NO: 1308560 - RNA, 19 nt, Homo sapiens
  misc_RNA (1)...(19): siRNA sense strand
ggaaagcucaugaucacuu

SEQ ID NO: 1308561 - RNA, 19 nt, Homo sapiens
  misc_RNA (1)...(19): siRNA sense strand
agacucaucucauccaaga

SEQ ID NO: 1308562 - RNA, 19 nt, Homo sapiens
  misc_RNA (1)...(19): siRNA sense strand
aauaucagauccagugaaa

SEQ ID NO: 1308563 - RNA, 19 nt, Homo sapiens
  misc_RNA (1)...(19): siRNA sense strand
cagaaauacagucacauua

SEQ ID NO: 1308564 - RNA, 19 nt, Homo sapiens
  misc_RNA (1)...(19): siRNA sense strand
ucaagaaccuccacauuuu

SEQ ID NO: 1308565 - RNA, 19 nt, Homo sapiens
  misc_RNA (1)...(19): siRNA sense strand
ucaaacaguuggagaaugg

SEQ ID NO: 1308566 - RNA, 19 nt, Homo sapiens
  misc_RNA (1)...(19): siRNA sense strand
aaauguaggucgaagaaau

SEQ ID NO: 1308567 - RNA, 19 nt, Homo sapiens
  misc_RNA (1)...(19): siRNA sense strand
gaggauauucuaccuuauu

SEQ ID NO: 1308568 - RNA, 19 nt, Homo sapiens
  misc_RNA (1)...(19): siRNA sense strand
agagaaaccuacacagaug

SEQ ID NO: 1308569 - RNA, 19 nt, Homo sapiens
  misc_RNA (1)...(19): siRNA sense strand
caaagauuaucgagcaaau

SEQ ID NO: 1308570 - RNA, 19 nt, Homo sapiens
  misc_RNA (1)...(19): siRNA sense strand
aaaacaagcugaacaaaga

SEQ ID NO: 1308571 - RNA, 19 nt, Homo sapiens
  misc_RNA (1)...(19): siRNA sense strand
ggagcagccuguuggauca

SEQ ID NO: 1308572 - RNA, 19 nt, Homo sapiens
  misc_RNA (1)...(19): siRNA sense strand
uauaguacauggacggaaa

SEQ ID NO: 1308573 - RNA, 19 nt, Homo sapiens
  misc_RNA (1)...(19): siRNA sense strand
guaacuguauccaagaaug

SEQ ID NO: 1308574 - RNA, 19 nt, Homo sapiens
  misc_RNA (1)...(19): siRNA sense strand
gacaagguccugugaauca

SEQ ID NO: 1308575 - RNA, 19 nt, Homo sapiens
  misc_RNA (1)...(19): siRNA sense strand
cgggaugacuucagacaaa

SEQ ID NO: 1308576 - RNA, 19 nt, Homo sapiens
  misc_RNA (1)...(19): siRNA sense strand
acagaugucagcagaaaua

SEQ ID NO: 1308577 - RNA, 19 nt, Homo sapiens
  misc_RNA (1)...(19): siRNA sense strand
guacuuggaggauaugaaa

SEQ ID NO: 1308578 - RNA, 19 nt, Homo sapiens
  misc_RNA (1)...(19): siRNA sense strand
gaagaacuccagcccaugu

SEQ ID NO: 1308579 - RNA, 19 nt, Homo sapiens
  misc_RNA (1)...(19): siRNA sense strand
gcaacuccaacaucuuaua

SEQ ID NO: 1308580 - RNA, 19 nt, Homo sapiens
  misc_RNA (1)...(19): siRNA sense strand
ggaaguuacagaugugauu

SEQ ID NO: 1308581 - RNA, 19 nt, Homo sapiens
  misc_RNA (1)...(19): siRNA sense strand
cacaaugacugcuccauca

SEQ ID NO: 1308582 - RNA, 19 nt, Homo sapiens
  misc_RNA (1)...(19): siRNA sense strand
agaaacggacuuacuagua

SEQ ID NO: 1308583 - RNA, 19 nt, Homo sapiens
  misc_RNA (1)...(19): siRNA sense strand
ggaggaaagcucaugauca

SEQ ID NO: 1308584 - RNA, 19 nt, Homo sapiens
  misc_RNA (1)...(19): siRNA sense strand
agaguaugcuggucugaaa

SEQ ID NO: 1308585 - RNA, 19 nt, Homo sapiens
  misc_RNA (1)...(19): siRNA sense strand
gaagagaaacggacuuacu

SEQ ID NO: 1308586 - RNA, 19 nt, Homo sapiens
  misc_RNA (1)...(19): siRNA sense strand
ugacagugcagaauuuaaa

SEQ ID NO: 1308587 - RNA, 19 nt, Homo sapiens
  misc_RNA (1)...(19): siRNA sense strand
ugaaagaggagaagauaau

SEQ ID NO: 1308588 - RNA, 19 nt, Homo sapiens
  misc_RNA (1)...(19): siRNA sense strand
guaggucgaagaaauauug

SEQ ID NO: 1308589 - RNA, 19 nt, Homo sapiens
  misc_RNA (1)...(19): siRNA sense strand
ggcaagaacacccaaggua

SEQ ID NO: 1308590 - RNA, 19 nt, Homo sapiens
  misc_RNA (1)...(19): siRNA sense strand
ggaaugguccaagaguaua

SEQ ID NO: 1308591 - RNA, 19 nt, Homo sapiens
  misc_RNA (1)...(19): siRNA sense strand
gggagucaacuaugaaauu

SEQ ID NO: 1308592 - RNA, 19 nt, Homo sapiens
  misc_RNA (1)...(19): siRNA sense strand
aaggagaaccugcaacuuu

SEQ ID NO: 1308593 - RNA, 19 nt, Homo sapiens
  misc_RNA (1)...(19): siRNA sense strand
cagggcagccuacuccuua

SEQ ID NO: 1308594 - RNA, 19 nt, Homo sapiens
  misc_RNA (1)...(19): siRNA sense strand
ccaacuggauaacaaacaa

SEQ ID NO: 1308595 - RNA, 19 nt, Homo sapiens
  misc_RNA (1)...(19): siRNA sense strand
ucgcccagcugauuguaua

SEQ ID NO: 1308596 - RNA, 19 nt, Homo sapiens
  misc_RNA (1)...(19): siRNA sense strand
gagcagauagugaaaucaa

SEQ ID NO: 1308597 - RNA, 19 nt, Homo sapiens
  misc_RNA (1)...(19): siRNA sense strand
gaaucaaacaguuggagaa

SEQ ID NO: 1308598 - RNA, 19 nt, Homo sapiens
  misc_RNA (1)...(19): siRNA sense strand
uuagagagaccaucauuug

SEQ ID NO: 1308599 - RNA, 19 nt, Homo sapiens
  misc_RNA (1)...(19): siRNA sense strand
ggaaguacgaccuguagug

SEQ ID NO: 1308600 - RNA, 19 nt, Homo sapiens
  misc_RNA (1)...(19): siRNA sense strand
gaacacccaagguaccaaa

SEQ ID NO: 1308601 - RNA, 19 nt, Homo sapiens
  misc_RNA (1)...(19): siRNA sense strand
acaaccaacuggauaacaa

SEQ ID NO: 1308602 - RNA, 19 nt, Homo sapiens
  misc_RNA (1)...(19): siRNA sense strand
acagcaaccucacuaccua

SEQ ID NO: 1308603 - RNA, 19 nt, Homo sapiens
  misc_RNA (1)...(19): siRNA sense strand
acaagcagguccagagaga

SEQ ID NO: 1308604 - RNA, 19 nt, Homo sapiens
  misc_RNA (1)...(19): siRNA sense strand
ugacauggguucauacacu

SEQ ID NO: 1308605 - RNA, 19 nt, Homo sapiens
  misc_RNA (1)...(19): siRNA sense strand
gaaauccgagaugaucaua

SEQ ID NO: 1308606 - RNA, 19 nt, Homo sapiens
  misc_RNA (1)...(19): siRNA sense strand
gaugacagugcagaauuua

SEQ ID NO: 1308607 - RNA, 19 nt, Homo sapiens
  misc_RNA (1)...(19): siRNA sense strand
ucgaagaaauauugcagaa

SEQ ID NO: 1308608 - RNA, 19 nt, Homo sapiens
  misc_RNA (1)...(19): siRNA sense strand
ggaaaggacguggaaacaa

SEQ ID NO: 1308609 - RNA, 19 nt, Homo sapiens
  misc_RNA (1)...(19): siRNA sense strand
uagaagaggaggaagauga

SEQ ID NO: 1308610 - RNA, 19 nt, Homo sapiens
  misc_RNA (1)...(19): siRNA sense strand
uauaacaaccaacuggaua

SEQ ID NO: 1308611 - RNA, 19 nt, Homo sapiens
  misc_RNA (1)...(19): siRNA sense strand
cggagaaucagacugguua

SEQ ID NO: 1308612 - RNA, 19 nt, Homo sapiens
  misc_RNA (1)...(19): siRNA sense strand
ggacucaaaccuaaugcaa

SEQ ID NO: 1308613 - RNA, 19 nt, Homo sapiens
  misc_RNA (1)...(19): siRNA sense strand
cagcagaaauacagucaca

SEQ ID NO: 1308614 - RNA, 19 nt, Homo sapiens
  misc_RNA (1)...(19): siRNA sense strand
gcaggugacugguucuuca

SEQ ID NO: 1308615 - RNA, 19 nt, Homo sapiens
  misc_RNA (1)...(19): siRNA sense strand
agagguagcucagaaaugu

SEQ ID NO: 1308616 - RNA, 19 nt, Homo sapiens
  misc_RNA (1)...(19): siRNA sense strand
ggacugugcccuggccuua

SEQ ID NO: 1308617 - RNA, 19 nt, Homo sapiens
  misc_RNA (1)...(19): siRNA sense strand
agaaauguggcuugucuua

SEQ ID NO: 1308618 - RNA, 19 nt, Homo sapiens
  misc_RNA (1)...(19): siRNA sense strand
caacagguuuccaggagau

SEQ ID NO: 1308619 - RNA, 19 nt, Homo sapiens
  misc_RNA (1)...(19): siRNA sense strand
gaagagguagcucagaaau

SEQ ID NO: 1308620 - RNA, 19 nt, Homo sapiens
  misc_RNA (1)...(19): siRNA sense strand
ggaagagguagcucagaaa

SEQ ID NO: 1308621 - RNA, 19 nt, Homo sapiens
  misc_RNA (1)...(19): siRNA sense strand
aaauguggcuugucuuaca

SEQ ID NO: 1308622 - RNA, 19 nt, Homo sapiens
  misc_RNA (1)...(19): siRNA sense strand
ucagaaauguggcuugucu

SEQ ID NO: 1308623 - RNA, 19 nt, Homo sapiens
  misc_RNA (1)...(19): siRNA sense strand
uggaagagguagcucagaa

SEQ ID NO: 1308624 - RNA, 19 nt, Homo sapiens
  misc_RNA (1)...(19): siRNA sense strand
agagcagagugccacauua

SEQ ID NO: 1308625 - RNA, 19 nt, Homo sapiens
  misc_RNA (1)...(19): siRNA sense strand
gcucagaaauguggcuugu

SEQ ID NO: 1308626 - RNA, 19 nt, Homo sapiens
  misc_RNA (1)...(19): siRNA sense strand
gcaugcauuugacaucuuc

SEQ ID NO: 1308627 - RNA, 19 nt, Homo sapiens
  misc_RNA (1)...(19): siRNA sense strand
cgagggagcaggagcauca

SEQ ID NO: 1308628 - RNA, 19 nt, Homo sapiens
  misc_RNA (1)...(19): siRNA sense strand
gagcagagugccacauuac

SEQ ID NO: 1308629 - RNA, 19 nt, Homo sapiens
  misc_RNA (1)...(19): siRNA sense strand
cagaagcucuccggaggau

SEQ ID NO: 1308630 - RNA, 19 nt, Homo sapiens
  misc_RNA (1)...(19): siRNA sense strand
ggacagcgggaggcucaaa

SEQ ID NO: 1308631 - RNA, 19 nt, Homo sapiens
  misc_RNA (1)...(19): siRNA sense strand
gugacugguucuucaggaa

SEQ ID NO: 1308632 - RNA, 19 nt, Homo sapiens
  misc_RNA (1)...(19): siRNA sense strand
ccagguggugcaugcauuu

SEQ ID NO: 1308633 - RNA, 19 nt, Homo sapiens
  misc_RNA (1)...(19): siRNA sense strand
cagagcagagugccacauu

SEQ ID NO: 1308634 - RNA, 19 nt, Homo sapiens
  misc_RNA (1)...(19): siRNA sense strand
gcagagugccacauuacag

SEQ ID NO: 1308635 - RNA, 19 nt, Homo sapiens
  misc_RNA (1)...(19): siRNA sense strand
gaaauguggcuugucuuac

SEQ ID NO: 1308636 - RNA, 19 nt, Homo sapiens
  misc_RNA (1)...(19): siRNA sense strand
gccacaggaucaagacagu

SEQ ID NO: 1308637 - RNA, 19 nt, Homo sapiens
  misc_RNA (1)...(19): siRNA sense strand
gugcaugcauuugacaucu

SEQ ID NO: 1308638 - RNA, 19 nt, Homo sapiens
  misc_RNA (1)...(19): siRNA sense strand
acagggugaucagacauga

SEQ ID NO: 1308639 - RNA, 19 nt, Homo sapiens
  misc_RNA (1)...(19): siRNA sense strand
uccaggagaugguagacau

SEQ ID NO: 1308640 - RNA, 19 nt, Homo sapiens
  misc_RNA (1)...(19): siRNA sense strand
ggauucuccuggacaccau

SEQ ID NO: 1308641 - RNA, 19 nt, Homo sapiens
  misc_RNA (1)...(19): siRNA sense strand
caggagaugguagacauug

SEQ ID NO: 1308642 - RNA, 19 nt, Homo sapiens
  misc_RNA (1)...(19): siRNA sense strand
cccgacagccaacagguuu

SEQ ID NO: 1308643 - RNA, 19 nt, Homo sapiens
  misc_RNA (1)...(19): siRNA sense strand
ccacauuacagggugauca

SEQ ID NO: 1308644 - RNA, 19 nt, Homo sapiens
  misc_RNA (1)...(19): siRNA sense strand
agagguagcucagaaaugu

SEQ ID NO: 1308645 - RNA, 19 nt, Homo sapiens
  misc_RNA (1)...(19): siRNA sense strand
ggacugugcccuggccuua

SEQ ID NO: 1308646 - RNA, 19 nt, Homo sapiens
  misc_RNA (1)...(19): siRNA sense strand
agaaauguggcuugucuua

SEQ ID NO: 1308647 - RNA, 19 nt, Homo sapiens
  misc_RNA (1)...(19): siRNA sense strand
gaagagguagcucagaaau

SEQ ID NO: 1308648 - RNA, 19 nt, Homo sapiens
  misc_RNA (1)...(19): siRNA sense strand
ggaagagguagcucagaaa

SEQ ID NO: 1308649 - RNA, 19 nt, Homo sapiens
  misc_RNA (1)...(19): siRNA sense strand
aaauguggcuugucuuaca

SEQ ID NO: 1308650 - RNA, 19 nt, Homo sapiens
  misc_RNA (1)...(19): siRNA sense strand
ucagaaauguggcuugucu

SEQ ID NO: 1308651 - RNA, 19 nt, Homo sapiens
  misc_RNA (1)...(19): siRNA sense strand
uggaagagguagcucagaa

SEQ ID NO: 1308652 - RNA, 19 nt, Homo sapiens
  misc_RNA (1)...(19): siRNA sense strand
gcucagaaauguggcuugu

SEQ ID NO: 1308653 - RNA, 19 nt, Homo sapiens
  misc_RNA (1)...(19): siRNA sense strand
gccacaggaucaagacagu

SEQ ID NO: 1308654 - RNA, 19 nt, Homo sapiens
  misc_RNA (1)...(19): siRNA sense strand
gaaauguggcuugucuuac

SEQ ID NO: 1308655 - RNA, 19 nt, Homo sapiens
  misc_RNA (1)...(19): siRNA sense strand
agagguagcucagaaaugu

SEQ ID NO: 1308656 - RNA, 19 nt, Homo sapiens
  misc_RNA (1)...(19): siRNA sense strand
ggacugugcccuggccuua

SEQ ID NO: 1308657 - RNA, 19 nt, Homo sapiens
  misc_RNA (1)...(19): siRNA sense strand
agaaauguggcuugucuua

SEQ ID NO: 1308658 - RNA, 19 nt, Homo sapiens
  misc_RNA (1)...(19): siRNA sense strand
gaagagguagcucagaaau

SEQ ID NO: 1308659 - RNA, 19 nt, Homo sapiens
  misc_RNA (1)...(19): siRNA sense strand
ggaagagguagcucagaaa

SEQ ID NO: 1308660 - RNA, 19 nt, Homo sapiens
  misc_RNA (1)...(19): siRNA sense strand
aaauguggcuugucuuaca

SEQ ID NO: 1308661 - RNA, 19 nt, Homo sapiens
  misc_RNA (1)...(19): siRNA sense strand
ucagaaauguggcuugucu

SEQ ID NO: 1308662 - RNA, 19 nt, Homo sapiens
  misc_RNA (1)...(19): siRNA sense strand
uggaagagguagcucagaa

SEQ ID NO: 1308663 - RNA, 19 nt, Homo sapiens
  misc_RNA (1)...(19): siRNA sense strand
gcucagaaauguggcuugu

SEQ ID NO: 1308664 - RNA, 19 nt, Homo sapiens
  misc_RNA (1)...(19): siRNA sense strand
gccacaggaucaagacagu

SEQ ID NO: 1308665 - RNA, 19 nt, Homo sapiens
  misc_RNA (1)...(19): siRNA sense strand
gaaauguggcuugucuuac

SEQ ID NO: 1308666 - RNA, 19 nt, Homo sapiens
  misc_RNA (1)...(19): siRNA sense strand
gcaggugacugguucuuca

SEQ ID NO: 1308667 - RNA, 19 nt, Homo sapiens
  misc_RNA (1)...(19): siRNA sense strand
agagguagcucagaaaugu

SEQ ID NO: 1308668 - RNA, 19 nt, Homo sapiens
  misc_RNA (1)...(19): siRNA sense strand
ggacugugcccuggccuua

SEQ ID NO: 1308669 - RNA, 19 nt, Homo sapiens
  misc_RNA (1)...(19): siRNA sense strand
agaaauguggcuugucuua

SEQ ID NO: 1308670 - RNA, 19 nt, Homo sapiens
  misc_RNA (1)...(19): siRNA sense strand
caacagguuuccaggagau

SEQ ID NO: 1308671 - RNA, 19 nt, Homo sapiens
  misc_RNA (1)...(19): siRNA sense strand
gaagagguagcucagaaau

SEQ ID NO: 1308672 - RNA, 19 nt, Homo sapiens
  misc_RNA (1)...(19): siRNA sense strand
ggaagagguagcucagaaa

SEQ ID NO: 1308673 - RNA, 19 nt, Homo sapiens
  misc_RNA (1)...(19): siRNA sense strand
aaauguggcuugucuuaca

SEQ ID NO: 1308674 - RNA, 19 nt, Homo sapiens
  misc_RNA (1)...(19): siRNA sense strand
ucagaaauguggcuugucu

SEQ ID NO: 1308675 - RNA, 19 nt, Homo sapiens
  misc_RNA (1)...(19): siRNA sense strand
uggaagagguagcucagaa

SEQ ID NO: 1308676 - RNA, 19 nt, Homo sapiens
  misc_RNA (1)...(19): siRNA sense strand
agagcagagugccacauua

SEQ ID NO: 1308677 - RNA, 19 nt, Homo sapiens
  misc_RNA (1)...(19): siRNA sense strand
gcucagaaauguggcuugu

SEQ ID NO: 1308678 - RNA, 19 nt, Homo sapiens
  misc_RNA (1)...(19): siRNA sense strand
gcaugcauuugacaucuuc

SEQ ID NO: 1308679 - RNA, 19 nt, Homo sapiens
  misc_RNA (1)...(19): siRNA sense strand
cgagggagcaggagcauca

SEQ ID NO: 1308680 - RNA, 19 nt, Homo sapiens
  misc_RNA (1)...(19): siRNA sense strand
gagcagagugccacauuac

SEQ ID NO: 1308681 - RNA, 19 nt, Homo sapiens
  misc_RNA (1)...(19): siRNA sense strand
cagaagcucuccggaggau

SEQ ID NO: 1308682 - RNA, 19 nt, Homo sapiens
  misc_RNA (1)...(19): siRNA sense strand
ggacagcgggaggcucaaa

SEQ ID NO: 1308683 - RNA, 19 nt, Homo sapiens
  misc_RNA (1)...(19): siRNA sense strand
gugacugguucuucaggaa

SEQ ID NO: 1308684 - RNA, 19 nt, Homo sapiens
  misc_RNA (1)...(19): siRNA sense strand
ccagguggugcaugcauuu

SEQ ID NO: 1308685 - RNA, 19 nt, Homo sapiens
  misc_RNA (1)...(19): siRNA sense strand
cagagcagagugccacauu

SEQ ID NO: 1308686 - RNA, 19 nt, Homo sapiens
  misc_RNA (1)...(19): siRNA sense strand
gcagagugccacauuacag

SEQ ID NO: 1308687 - RNA, 19 nt, Homo sapiens
  misc_RNA (1)...(19): siRNA sense strand
gaaauguggcuugucuuac

SEQ ID NO: 1308688 - RNA, 19 nt, Homo sapiens
  misc_RNA (1)...(19): siRNA sense strand
gccacaggaucaagacagu

SEQ ID NO: 1308689 - RNA, 19 nt, Homo sapiens
  misc_RNA (1)...(19): siRNA sense strand
gugcaugcauuugacaucu

SEQ ID NO: 1308690 - RNA, 19 nt, Homo sapiens
  misc_RNA (1)...(19): siRNA sense strand
acagggugaucagacauga

SEQ ID NO: 1308691 - RNA, 19 nt, Homo sapiens
  misc_RNA (1)...(19): siRNA sense strand
uccaggagaugguagacau

SEQ ID NO: 1308692 - RNA, 19 nt, Homo sapiens
  misc_RNA (1)...(19): siRNA sense strand
ggauucuccuggacaccau

SEQ ID NO: 1308693 - RNA, 19 nt, Homo sapiens
  misc_RNA (1)...(19): siRNA sense strand
caggagaugguagacauug

SEQ ID NO: 1308694 - RNA, 19 nt, Homo sapiens
  misc_RNA (1)...(19): siRNA sense strand
cccgacagccaacagguuu

SEQ ID NO: 1308695 - RNA, 19 nt, Homo sapiens
  misc_RNA (1)...(19): siRNA sense strand
ccacauuacagggugauca

SEQ ID NO: 1308696 - RNA, 19 nt, Homo sapiens
  misc_RNA (1)...(19): siRNA sense strand
agagguagcucagaaaugu

SEQ ID NO: 1308697 - RNA, 19 nt, Homo sapiens
  misc_RNA (1)...(19): siRNA sense strand
ggacugugcccuggccuua

SEQ ID NO: 1308698 - RNA, 19 nt, Homo sapiens
  misc_RNA (1)...(19): siRNA sense strand
agaaauguggcuugucuua

SEQ ID NO: 1308699 - RNA, 19 nt, Homo sapiens
  misc_RNA (1)...(19): siRNA sense strand
gaagagguagcucagaaau

SEQ ID NO: 1308700 - RNA, 19 nt, Homo sapiens
  misc_RNA (1)...(19): siRNA sense strand
ggaagagguagcucagaaa

SEQ ID NO: 1308701 - RNA, 19 nt, Homo sapiens
  misc_RNA (1)...(19): siRNA sense strand
aaauguggcuugucuuaca

SEQ ID NO: 1308702 - RNA, 19 nt, Homo sapiens
  misc_RNA (1)...(19): siRNA sense strand
ucagaaauguggcuugucu

SEQ ID NO: 1308703 - RNA, 19 nt, Homo sapiens
  misc_RNA (1)...(19): siRNA sense strand
uggaagagguagcucagaa

SEQ ID NO: 1308704 - RNA, 19 nt, Homo sapiens
  misc_RNA (1)...(19): siRNA sense strand
gcucagaaauguggcuugu

SEQ ID NO: 1308705 - RNA, 19 nt, Homo sapiens
  misc_RNA (1)...(19): siRNA sense strand
gccacaggaucaagacagu

SEQ ID NO: 1308706 - RNA, 19 nt, Homo sapiens
  misc_RNA (1)...(19): siRNA sense strand
gaaauguggcuugucuuac

SEQ ID NO: 1308707 - RNA, 19 nt, Homo sapiens
  misc_RNA (1)...(19): siRNA sense strand
gcaggugacugguucuuca

SEQ ID NO: 1308708 - RNA, 19 nt, Homo sapiens
  misc_RNA (1)...(19): siRNA sense strand
agagguagcucagaaaugu

SEQ ID NO: 1308709 - RNA, 19 nt, Homo sapiens
  misc_RNA (1)...(19): siRNA sense strand
ggacugugcccuggccuua

SEQ ID NO: 1308710 - RNA, 19 nt, Homo sapiens
  misc_RNA (1)...(19): siRNA sense strand
agaaauguggcuugucuua

SEQ ID NO: 1308711 - RNA, 19 nt, Homo sapiens
  misc_RNA (1)...(19): siRNA sense strand
caacagguuuccaggagau

SEQ ID NO: 1308712 - RNA, 19 nt, Homo sapiens
  misc_RNA (1)...(19): siRNA sense strand
gaagagguagcucagaaau

SEQ ID NO: 1308713 - RNA, 19 nt, Homo sapiens
  misc_RNA (1)...(19): siRNA sense strand
ggaagagguagcucagaaa

SEQ ID NO: 1308714 - RNA, 19 nt, Homo sapiens
  misc_RNA (1)...(19): siRNA sense strand
aaauguggcuugucuuaca

SEQ ID NO: 1308715 - RNA, 19 nt, Homo sapiens
  misc_RNA (1)...(19): siRNA sense strand
ucagaaauguggcuugucu

SEQ ID NO: 1308716 - RNA, 19 nt, Homo sapiens
  misc_RNA (1)...(19): siRNA sense strand
uggaagagguagcucagaa

SEQ ID NO: 1308717 - RNA, 19 nt, Homo sapiens
  misc_RNA (1)...(19): siRNA sense strand
agagcagagugccacauua

SEQ ID NO: 1308718 - RNA, 19 nt, Homo sapiens
  misc_RNA (1)...(19): siRNA sense strand
gcucagaaauguggcuugu

SEQ ID NO: 1308719 - RNA, 19 nt, Homo sapiens
  misc_RNA (1)...(19): siRNA sense strand
gcaugcauuugacaucuuc

SEQ ID NO: 1308720 - RNA, 19 nt, Homo sapiens
  misc_RNA (1)...(19): siRNA sense strand
cgagggagcaggagcauca

SEQ ID NO: 1308721 - RNA, 19 nt, Homo sapiens
  misc_RNA (1)...(19): siRNA sense strand
gagcagagugccacauuac

SEQ ID NO: 1308722 - RNA, 19 nt, Homo sapiens
  misc_RNA (1)...(19): siRNA sense strand
cagaagcucuccggaggau

SEQ ID NO: 1308723 - RNA, 19 nt, Homo sapiens
  misc_RNA (1)...(19): siRNA sense strand
ggacagcgggaggcucaaa

SEQ ID NO: 1308724 - RNA, 19 nt, Homo sapiens
  misc_RNA (1)...(19): siRNA sense strand
gugacugguucuucaggaa

SEQ ID NO: 1308725 - RNA, 19 nt, Homo sapiens
  misc_RNA (1)...(19): siRNA sense strand
ccagguggugcaugcauuu

SEQ ID NO: 1308726 - RNA, 19 nt, Homo sapiens
  misc_RNA (1)...(19): siRNA sense strand
cagagcagagugccacauu

SEQ ID NO: 1308727 - RNA, 19 nt, Homo sapiens
  misc_RNA (1)...(19): siRNA sense strand
gcagagugccacauuacag

SEQ ID NO: 1308728 - RNA, 19 nt, Homo sapiens
  misc_RNA (1)...(19): siRNA sense strand
gaaauguggcuugucuuac

SEQ ID NO: 1308729 - RNA, 19 nt, Homo sapiens
  misc_RNA (1)...(19): siRNA sense strand
gccacaggaucaagacagu

SEQ ID NO: 1308730 - RNA, 19 nt, Homo sapiens
  misc_RNA (1)...(19): siRNA sense strand
gugcaugcauuugacaucu

SEQ ID NO: 1308731 - RNA, 19 nt, Homo sapiens
  misc_RNA (1)...(19): siRNA sense strand
acagggugaucagacauga

SEQ ID NO: 1308732 - RNA, 19 nt, Homo sapiens
  misc_RNA (1)...(19): siRNA sense strand
uccaggagaugguagacau

SEQ ID NO: 1308733 - RNA, 19 nt, Homo sapiens
  misc_RNA (1)...(19): siRNA sense strand
ggauucuccuggacaccau

SEQ ID NO: 1308734 - RNA, 19 nt, Homo sapiens
  misc_RNA (1)...(19): siRNA sense strand
caggagaugguagacauug

SEQ ID NO: 1308735 - RNA, 19 nt, Homo sapiens
  misc_RNA (1)...(19): siRNA sense strand
cccgacagccaacagguuu

SEQ ID NO: 1308736 - RNA, 19 nt, Homo sapiens
  misc_RNA (1)...(19): siRNA sense strand
ccacauuacagggugauca

SEQ ID NO: 1308737 - RNA, 19 nt, Homo sapiens
  misc_RNA (1)...(19): siRNA sense strand
agagguagcucagaaaugu

SEQ ID NO: 1308738 - RNA, 19 nt, Homo sapiens
  misc_RNA (1)...(19): siRNA sense strand
ggacugugcccuggccuua

SEQ ID NO: 1308739 - RNA, 19 nt, Homo sapiens
  misc_RNA (1)...(19): siRNA sense strand
agaaauguggcuugucuua

SEQ ID NO: 1308740 - RNA, 19 nt, Homo sapiens
  misc_RNA (1)...(19): siRNA sense strand
gaagagguagcucagaaau

SEQ ID NO: 1308741 - RNA, 19 nt, Homo sapiens
  misc_RNA (1)...(19): siRNA sense strand
ggaagagguagcucagaaa

SEQ ID NO: 1308742 - RNA, 19 nt, Homo sapiens
  misc_RNA (1)...(19): siRNA sense strand
aaauguggcuugucuuaca

SEQ ID NO: 1308743 - RNA, 19 nt, Homo sapiens
  misc_RNA (1)...(19): siRNA sense strand
ucagaaauguggcuugucu

SEQ ID NO: 1308744 - RNA, 19 nt, Homo sapiens
  misc_RNA (1)...(19): siRNA sense strand
uggaagagguagcucagaa

SEQ ID NO: 1308745 - RNA, 19 nt, Homo sapiens
  misc_RNA (1)...(19): siRNA sense strand
gcucagaaauguggcuugu

SEQ ID NO: 1308746 - RNA, 19 nt, Homo sapiens
  misc_RNA (1)...(19): siRNA sense strand
gccacaggaucaagacagu

SEQ ID NO: 1308747 - RNA, 19 nt, Homo sapiens
  misc_RNA (1)...(19): siRNA sense strand
gaaauguggcuugucuuac

SEQ ID NO: 1308748 - RNA, 19 nt, Homo sapiens
  misc_RNA (1)...(19): siRNA sense strand
agagguagcucagaaaugu

SEQ ID NO: 1308749 - RNA, 19 nt, Homo sapiens
  misc_RNA (1)...(19): siRNA sense strand
ggacugugcccuggccuua

SEQ ID NO: 1308750 - RNA, 19 nt, Homo sapiens
  misc_RNA (1)...(19): siRNA sense strand
agaaauguggcuugucuua

SEQ ID NO: 1308751 - RNA, 19 nt, Homo sapiens
  misc_RNA (1)...(19): siRNA sense strand
gaagagguagcucagaaau

SEQ ID NO: 1308752 - RNA, 19 nt, Homo sapiens
  misc_RNA (1)...(19): siRNA sense strand
ggaagagguagcucagaaa

SEQ ID NO: 1308753 - RNA, 19 nt, Homo sapiens
  misc_RNA (1)...(19): siRNA sense strand
aaauguggcuugucuuaca

SEQ ID NO: 1308754 - RNA, 19 nt, Homo sapiens
  misc_RNA (1)...(19): siRNA sense strand
ucagaaauguggcuugucu

SEQ ID NO: 1308755 - RNA, 19 nt, Homo sapiens
  misc_RNA (1)...(19): siRNA sense strand
uggaagagguagcucagaa

SEQ ID NO: 1308756 - RNA, 19 nt, Homo sapiens
  misc_RNA (1)...(19): siRNA sense strand
gcucagaaauguggcuugu

SEQ ID NO: 1308757 - RNA, 19 nt, Homo sapiens
  misc_RNA (1)...(19): siRNA sense strand
gccacaggaucaagacagu

SEQ ID NO: 1308758 - RNA, 19 nt, Homo sapiens
  misc_RNA (1)...(19): siRNA sense strand
gaaauguggcuugucuuac

SEQ ID NO: 1308759 - RNA, 19 nt, Homo sapiens
  misc_RNA (1)...(19): siRNA sense strand
gcaggugacugguucuuca

SEQ ID NO: 1308760 - RNA, 19 nt, Homo sapiens
  misc_RNA (1)...(19): siRNA sense strand
agagguagcucagaaaugu

SEQ ID NO: 1308761 - RNA, 19 nt, Homo sapiens
  misc_RNA (1)...(19): siRNA sense strand
ggacugugcccuggccuua

SEQ ID NO: 1308762 - RNA, 19 nt, Homo sapiens
  misc_RNA (1)...(19): siRNA sense strand
agaaauguggcuugucuua

SEQ ID NO: 1308763 - RNA, 19 nt, Homo sapiens
  misc_RNA (1)...(19): siRNA sense strand
caacagguuuccaggagau

SEQ ID NO: 1308764 - RNA, 19 nt, Homo sapiens
  misc_RNA (1)...(19): siRNA sense strand
gaagagguagcucagaaau

SEQ ID NO: 1308765 - RNA, 19 nt, Homo sapiens
  misc_RNA (1)...(19): siRNA sense strand
ggaagagguagcucagaaa

SEQ ID NO: 1308766 - RNA, 19 nt, Homo sapiens
  misc_RNA (1)...(19): siRNA sense strand
aaauguggcuugucuuaca

SEQ ID NO: 1308767 - RNA, 19 nt, Homo sapiens
  misc_RNA (1)...(19): siRNA sense strand
ucagaaauguggcuugucu

SEQ ID NO: 1308768 - RNA, 19 nt, Homo sapiens
  misc_RNA (1)...(19): siRNA sense strand
uggaagagguagcucagaa

SEQ ID NO: 1308769 - RNA, 19 nt, Homo sapiens
  misc_RNA (1)...(19): siRNA sense strand
agagcagagugccacauua

SEQ ID NO: 1308770 - RNA, 19 nt, Homo sapiens
  misc_RNA (1)...(19): siRNA sense strand
gcucagaaauguggcuugu

SEQ ID NO: 1308771 - RNA, 19 nt, Homo sapiens
  misc_RNA (1)...(19): siRNA sense strand
gcaugcauuugacaucuuc

SEQ ID NO: 1308772 - RNA, 19 nt, Homo sapiens
  misc_RNA (1)...(19): siRNA sense strand
cgagggagcaggagcauca

SEQ ID NO: 1308773 - RNA, 19 nt, Homo sapiens
  misc_RNA (1)...(19): siRNA sense strand
gagcagagugccacauuac

SEQ ID NO: 1308774 - RNA, 19 nt, Homo sapiens
  misc_RNA (1)...(19): siRNA sense strand
cagaagcucuccggaggau

SEQ ID NO: 1308775 - RNA, 19 nt, Homo sapiens
  misc_RNA (1)...(19): siRNA sense strand
ggacagcgggaggcucaaa

SEQ ID NO: 1308776 - RNA, 19 nt, Homo sapiens
  misc_RNA (1)...(19): siRNA sense strand
gugacugguucuucaggaa

SEQ ID NO: 1308777 - RNA, 19 nt, Homo sapiens
  misc_RNA (1)...(19): siRNA sense strand
ccagguggugcaugcauuu

SEQ ID NO: 1308778 - RNA, 19 nt, Homo sapiens
  misc_RNA (1)...(19): siRNA sense strand
cagagcagagugccacauu

SEQ ID NO: 1308779 - RNA, 19 nt, Homo sapiens
  misc_RNA (1)...(19): siRNA sense strand
gcagagugccacauuacag

SEQ ID NO: 1308780 - RNA, 19 nt, Homo sapiens
  misc_RNA (1)...(19): siRNA sense strand
gaaauguggcuugucuuac

SEQ ID NO: 1308781 - RNA, 19 nt, Homo sapiens
  misc_RNA (1)...(19): siRNA sense strand
gccacaggaucaagacagu

SEQ ID NO: 1308782 - RNA, 19 nt, Homo sapiens
  misc_RNA (1)...(19): siRNA sense strand
gugcaugcauuugacaucu

SEQ ID NO: 1308783 - RNA, 19 nt, Homo sapiens
  misc_RNA (1)...(19): siRNA sense strand
acagggugaucagacauga

SEQ ID NO: 1308784 - RNA, 19 nt, Homo sapiens
  misc_RNA (1)...(19): siRNA sense strand
uccaggagaugguagacau

SEQ ID NO: 1308785 - RNA, 19 nt, Homo sapiens
  misc_RNA (1)...(19): siRNA sense strand
ggauucuccuggacaccau

SEQ ID NO: 1308786 - RNA, 19 nt, Homo sapiens
  misc_RNA (1)...(19): siRNA sense strand
caggagaugguagacauug

SEQ ID NO: 1308787 - RNA, 19 nt, Homo sapiens
  misc_RNA (1)...(19): siRNA sense strand
cccgacagccaacagguuu

SEQ ID NO: 1308788 - RNA, 19 nt, Homo sapiens
  misc_RNA (1)...(19): siRNA sense strand
ccacauuacagggugauca

SEQ ID NO: 1308789 - RNA, 19 nt, Homo sapiens
  misc_RNA (1)...(19): siRNA sense strand
agagguagcucagaaaugu

SEQ ID NO: 1308790 - RNA, 19 nt, Homo sapiens
  misc_RNA (1)...(19): siRNA sense strand
ggacugugcccuggccuua

SEQ ID NO: 1308791 - RNA, 19 nt, Homo sapiens
  misc_RNA (1)...(19): siRNA sense strand
agaaauguggcuugucuua

SEQ ID NO: 1308792 - RNA, 19 nt, Homo sapiens
  misc_RNA (1)...(19): siRNA sense strand
gaagagguagcucagaaau

SEQ ID NO: 1308793 - RNA, 19 nt, Homo sapiens
  misc_RNA (1)...(19): siRNA sense strand
ggaagagguagcucagaaa

SEQ ID NO: 1308794 - RNA, 19 nt, Homo sapiens
  misc_RNA (1)...(19): siRNA sense strand
aaauguggcuugucuuaca

SEQ ID NO: 1308795 - RNA, 19 nt, Homo sapiens
  misc_RNA (1)...(19): siRNA sense strand
ucagaaauguggcuugucu

SEQ ID NO: 1308796 - RNA, 19 nt, Homo sapiens
  misc_RNA (1)...(19): siRNA sense strand
uggaagagguagcucagaa

SEQ ID NO: 1308797 - RNA, 19 nt, Homo sapiens
  misc_RNA (1)...(19): siRNA sense strand
gcucagaaauguggcuugu

SEQ ID NO: 1308798 - RNA, 19 nt, Homo sapiens
  misc_RNA (1)...(19): siRNA sense strand
gccacaggaucaagacagu

SEQ ID NO: 1308799 - RNA, 19 nt, Homo sapiens
  misc_RNA (1)...(19): siRNA sense strand
gaaauguggcuugucuuac

SEQ ID NO: 1308800 - RNA, 19 nt, Homo sapiens
  misc_RNA (1)...(19): siRNA sense strand
gcaggugacugguucuuca

SEQ ID NO: 1308801 - RNA, 19 nt, Homo sapiens
  misc_RNA (1)...(19): siRNA sense strand
agagguagcucagaaaugu

SEQ ID NO: 1308802 - RNA, 19 nt, Homo sapiens
  misc_RNA (1)...(19): siRNA sense strand
ggacugugcccuggccuua

SEQ ID NO: 1308803 - RNA, 19 nt, Homo sapiens
  misc_RNA (1)...(19): siRNA sense strand
agaaauguggcuugucuua

SEQ ID NO: 1308804 - RNA, 19 nt, Homo sapiens
  misc_RNA (1)...(19): siRNA sense strand
caacagguuuccaggagau

SEQ ID NO: 1308805 - RNA, 19 nt, Homo sapiens
  misc_RNA (1)...(19): siRNA sense strand
gaagagguagcucagaaau

SEQ ID NO: 1308806 - RNA, 19 nt, Homo sapiens
  misc_RNA (1)...(19): siRNA sense strand
ggaagagguagcucagaaa

SEQ ID NO: 1308807 - RNA, 19 nt, Homo sapiens
  misc_RNA (1)...(19): siRNA sense strand
aaauguggcuugucuuaca

SEQ ID NO: 1308808 - RNA, 19 nt, Homo sapiens
  misc_RNA (1)...(19): siRNA sense strand
ucagaaauguggcuugucu

SEQ ID NO: 1308809 - RNA, 19 nt, Homo sapiens
  misc_RNA (1)...(19): siRNA sense strand
uggaagagguagcucagaa

SEQ ID NO: 1308810 - RNA, 19 nt, Homo sapiens
  misc_RNA (1)...(19): siRNA sense strand
agagcagagugccacauua

SEQ ID NO: 1308811 - RNA, 19 nt, Homo sapiens
  misc_RNA (1)...(19): siRNA sense strand
gcucagaaauguggcuugu

SEQ ID NO: 1308812 - RNA, 19 nt, Homo sapiens
  misc_RNA (1)...(19): siRNA sense strand
gcaugcauuugacaucuuc

SEQ ID NO: 1308813 - RNA, 19 nt, Homo sapiens
  misc_RNA (1)...(19): siRNA sense strand
cgagggagcaggagcauca

SEQ ID NO: 1308814 - RNA, 19 nt, Homo sapiens
  misc_RNA (1)...(19): siRNA sense strand
gagcagagugccacauuac

SEQ ID NO: 1308815 - RNA, 19 nt, Homo sapiens
  misc_RNA (1)...(19): siRNA sense strand
cagaagcucuccggaggau

SEQ ID NO: 1308816 - RNA, 19 nt, Homo sapiens
  misc_RNA (1)...(19): siRNA sense strand
ggacagcgggaggcucaaa

SEQ ID NO: 1308817 - RNA, 19 nt, Homo sapiens
  misc_RNA (1)...(19): siRNA sense strand
gugacugguucuucaggaa

SEQ ID NO: 1308818 - RNA, 19 nt, Homo sapiens
  misc_RNA (1)...(19): siRNA sense strand
ccagguggugcaugcauuu

SEQ ID NO: 1308819 - RNA, 19 nt, Homo sapiens
  misc_RNA (1)...(19): siRNA sense strand
cagagcagagugccacauu

SEQ ID NO: 1308820 - RNA, 19 nt, Homo sapiens
  misc_RNA (1)...(19): siRNA sense strand
gcagagugccacauuacag

SEQ ID NO: 1308821 - RNA, 19 nt, Homo sapiens
  misc_RNA (1)...(19): siRNA sense strand
gaaauguggcuugucuuac

SEQ ID NO: 1308822 - RNA, 19 nt, Homo sapiens
  misc_RNA (1)...(19): siRNA sense strand
gccacaggaucaagacagu

SEQ ID NO: 1308823 - RNA, 19 nt, Homo sapiens
  misc_RNA (1)...(19): siRNA sense strand
gugcaugcauuugacaucu

SEQ ID NO: 1308824 - RNA, 19 nt, Homo sapiens
  misc_RNA (1)...(19): siRNA sense strand
acagggugaucagacauga

SEQ ID NO: 1308825 - RNA, 19 nt, Homo sapiens
  misc_RNA (1)...(19): siRNA sense strand
uccaggagaugguagacau

SEQ ID NO: 1308826 - RNA, 19 nt, Homo sapiens
  misc_RNA (1)...(19): siRNA sense strand
ggauucuccuggacaccau

SEQ ID NO: 1308827 - RNA, 19 nt, Homo sapiens
  misc_RNA (1)...(19): siRNA sense strand
caggagaugguagacauug

SEQ ID NO: 1308828 - RNA, 19 nt, Homo sapiens
  misc_RNA (1)...(19): siRNA sense strand
cccgacagccaacagguuu

SEQ ID NO: 1308829 - RNA, 19 nt, Homo sapiens
  misc_RNA (1)...(19): siRNA sense strand
ccacauuacagggugauca

SEQ ID NO: 1308830 - RNA, 19 nt, Homo sapiens
  misc_RNA (1)...(19): siRNA sense strand
agagguagcucagaaaugu

SEQ ID NO: 1308831 - RNA, 19 nt, Homo sapiens
  misc_RNA (1)...(19): siRNA sense strand
ggacugugcccuggccuua

SEQ ID NO: 1308832 - RNA, 19 nt, Homo sapiens
  misc_RNA (1)...(19): siRNA sense strand
agaaauguggcuugucuua

SEQ ID NO: 1308833 - RNA, 19 nt, Homo sapiens
  misc_RNA (1)...(19): siRNA sense strand
gaagagguagcucagaaau

SEQ ID NO: 1308834 - RNA, 19 nt, Homo sapiens
  misc_RNA (1)...(19): siRNA sense strand
ggaagagguagcucagaaa

SEQ ID NO: 1308835 - RNA, 19 nt, Homo sapiens
  misc_RNA (1)...(19): siRNA sense strand
aaauguggcuugucuuaca

SEQ ID NO: 1308836 - RNA, 19 nt, Homo sapiens
  misc_RNA (1)...(19): siRNA sense strand
ucagaaauguggcuugucu

SEQ ID NO: 1308837 - RNA, 19 nt, Homo sapiens
  misc_RNA (1)...(19): siRNA sense strand
uggaagagguagcucagaa

SEQ ID NO: 1308838 - RNA, 19 nt, Homo sapiens
  misc_RNA (1)...(19): siRNA sense strand
gcucagaaauguggcuugu

SEQ ID NO: 1308839 - RNA, 19 nt, Homo sapiens
  misc_RNA (1)...(19): siRNA sense strand
gccacaggaucaagacagu

SEQ ID NO: 1308840 - RNA, 19 nt, Homo sapiens
  misc_RNA (1)...(19): siRNA sense strand
gaaauguggcuugucuuac

SEQ ID NO: 1308841 - RNA, 19 nt, Homo sapiens
  misc_RNA (1)...(19): siRNA sense strand
agagguagcucagaaaugu

SEQ ID NO: 1308842 - RNA, 19 nt, Homo sapiens
  misc_RNA (1)...(19): siRNA sense strand
ggacugugcccuggccuua

SEQ ID NO: 1308843 - RNA, 19 nt, Homo sapiens
  misc_RNA (1)...(19): siRNA sense strand
agaaauguggcuugucuua

SEQ ID NO: 1308844 - RNA, 19 nt, Homo sapiens
  misc_RNA (1)...(19): siRNA sense strand
gaagagguagcucagaaau

SEQ ID NO: 1308845 - RNA, 19 nt, Homo sapiens
  misc_RNA (1)...(19): siRNA sense strand
ggaagagguagcucagaaa

SEQ ID NO: 1308846 - RNA, 19 nt, Homo sapiens
  misc_RNA (1)...(19): siRNA sense strand
aaauguggcuugucuuaca

SEQ ID NO: 1308847 - RNA, 19 nt, Homo sapiens
  misc_RNA (1)...(19): siRNA sense strand
ucagaaauguggcuugucu

SEQ ID NO: 1308848 - RNA, 19 nt, Homo sapiens
  misc_RNA (1)...(19): siRNA sense strand
uggaagagguagcucagaa

SEQ ID NO: 1308849 - RNA, 19 nt, Homo sapiens
  misc_RNA (1)...(19): siRNA sense strand
gcucagaaauguggcuugu

SEQ ID NO: 1308850 - RNA, 19 nt, Homo sapiens
  misc_RNA (1)...(19): siRNA sense strand
gccacaggaucaagacagu

SEQ ID NO: 1308851 - RNA, 19 nt, Homo sapiens
  misc_RNA (1)...(19): siRNA sense strand
gaaauguggcuugucuuac

SEQ ID NO: 1308852 - RNA, 19 nt, Homo sapiens
  misc_RNA (1)...(19): siRNA sense strand
gcaggugacugguucuuca

SEQ ID NO: 1308853 - RNA, 19 nt, Homo sapiens
  misc_RNA (1)...(19): siRNA sense strand
agagguagcucagaaaugu

SEQ ID NO: 1308854 - RNA, 19 nt, Homo sapiens
  misc_RNA (1)...(19): siRNA sense strand
ggacugugcccuggccuua

SEQ ID NO: 1308855 - RNA, 19 nt, Homo sapiens
  misc_RNA (1)...(19): siRNA sense strand
agaaauguggcuugucuua

SEQ ID NO: 1308856 - RNA, 19 nt, Homo sapiens
  misc_RNA (1)...(19): siRNA sense strand
caacagguuuccaggagau

SEQ ID NO: 1308857 - RNA, 19 nt, Homo sapiens
  misc_RNA (1)...(19): siRNA sense strand
gaagagguagcucagaaau

SEQ ID NO: 1308858 - RNA, 19 nt, Homo sapiens
  misc_RNA (1)...(19): siRNA sense strand
ggaagagguagcucagaaa

SEQ ID NO: 1308859 - RNA, 19 nt, Homo sapiens
  misc_RNA (1)...(19): siRNA sense strand
aaauguggcuugucuuaca

SEQ ID NO: 1308860 - RNA, 19 nt, Homo sapiens
  misc_RNA (1)...(19): siRNA sense strand
ucagaaauguggcuugucu

SEQ ID NO: 1308861 - RNA, 19 nt, Homo sapiens
  misc_RNA (1)...(19): siRNA sense strand
uggaagagguagcucagaa

SEQ ID NO: 1308862 - RNA, 19 nt, Homo sapiens
  misc_RNA (1)...(19): siRNA sense strand
agagcagagugccacauua

SEQ ID NO: 1308863 - RNA, 19 nt, Homo sapiens
  misc_RNA (1)...(19): siRNA sense strand
gcucagaaauguggcuugu

SEQ ID NO: 1308864 - RNA, 19 nt, Homo sapiens
  misc_RNA (1)...(19): siRNA sense strand
gcaugcauuugacaucuuc

SEQ ID NO: 1308865 - RNA, 19 nt, Homo sapiens
  misc_RNA (1)...(19): siRNA sense strand
cgagggagcaggagcauca

SEQ ID NO: 1308866 - RNA, 19 nt, Homo sapiens
  misc_RNA (1)...(19): siRNA sense strand
gagcagagugccacauuac

SEQ ID NO: 1308867 - RNA, 19 nt, Homo sapiens
  misc_RNA (1)...(19): siRNA sense strand
cagaagcucuccggaggau

SEQ ID NO: 1308868 - RNA, 19 nt, Homo sapiens
  misc_RNA (1)...(19): siRNA sense strand
ggacagcgggaggcucaaa

SEQ ID NO: 1308869 - RNA, 19 nt, Homo sapiens
  misc_RNA (1)...(19): siRNA sense strand
gugacugguucuucaggaa

SEQ ID NO: 1308870 - RNA, 19 nt, Homo sapiens
  misc_RNA (1)...(19): siRNA sense strand
ccagguggugcaugcauuu

SEQ ID NO: 1308871 - RNA, 19 nt, Homo sapiens
  misc_RNA (1)...(19): siRNA sense strand
cagagcagagugccacauu

SEQ ID NO: 1308872 - RNA, 19 nt, Homo sapiens
  misc_RNA (1)...(19): siRNA sense strand
gcagagugccacauuacag

SEQ ID NO: 1308873 - RNA, 19 nt, Homo sapiens
  misc_RNA (1)...(19): siRNA sense strand
gaaauguggcuugucuuac

SEQ ID NO: 1308874 - RNA, 19 nt, Homo sapiens
  misc_RNA (1)...(19): siRNA sense strand
gccacaggaucaagacagu

SEQ ID NO: 1308875 - RNA, 19 nt, Homo sapiens
  misc_RNA (1)...(19): siRNA sense strand
gugcaugcauuugacaucu

SEQ ID NO: 1308876 - RNA, 19 nt, Homo sapiens
  misc_RNA (1)...(19): siRNA sense strand
acagggugaucagacauga

SEQ ID NO: 1308877 - RNA, 19 nt, Homo sapiens
  misc_RNA (1)...(19): siRNA sense strand
uccaggagaugguagacau

SEQ ID NO: 1308878 - RNA, 19 nt, Homo sapiens
  misc_RNA (1)...(19): siRNA sense strand
ggauucuccuggacaccau

SEQ ID NO: 1308879 - RNA, 19 nt, Homo sapiens
  misc_RNA (1)...(19): siRNA sense strand
caggagaugguagacauug

SEQ ID NO: 1308880 - RNA, 19 nt, Homo sapiens
  misc_RNA (1)...(19): siRNA sense strand
cccgacagccaacagguuu

SEQ ID NO: 1308881 - RNA, 19 nt, Homo sapiens
  misc_RNA (1)...(19): siRNA sense strand
ccacauuacagggugauca

SEQ ID NO: 1308882 - RNA, 19 nt, Homo sapiens
  misc_RNA (1)...(19): siRNA sense strand
agagguagcucagaaaugu

SEQ ID NO: 1308883 - RNA, 19 nt, Homo sapiens
  misc_RNA (1)...(19): siRNA sense strand
ggacugugcccuggccuua

SEQ ID NO: 1308884 - RNA, 19 nt, Homo sapiens
  misc_RNA (1)...(19): siRNA sense strand
agaaauguggcuugucuua

SEQ ID NO: 1308885 - RNA, 19 nt, Homo sapiens
  misc_RNA (1)...(19): siRNA sense strand
gaagagguagcucagaaau

SEQ ID NO: 1308886 - RNA, 19 nt, Homo sapiens
  misc_RNA (1)...(19): siRNA sense strand
ggaagagguagcucagaaa

SEQ ID NO: 1308887 - RNA, 19 nt, Homo sapiens
  misc_RNA (1)...(19): siRNA sense strand
aaauguggcuugucuuaca

SEQ ID NO: 1308888 - RNA, 19 nt, Homo sapiens
  misc_RNA (1)...(19): siRNA sense strand
ucagaaauguggcuugucu

SEQ ID NO: 1308889 - RNA, 19 nt, Homo sapiens
  misc_RNA (1)...(19): siRNA sense strand
uggaagagguagcucagaa

SEQ ID NO: 1308890 - RNA, 19 nt, Homo sapiens
  misc_RNA (1)...(19): siRNA sense strand
gcucagaaauguggcuugu

SEQ ID NO: 1308891 - RNA, 19 nt, Homo sapiens
  misc_RNA (1)...(19): siRNA sense strand
gccacaggaucaagacagu

SEQ ID NO: 1308892 - RNA, 19 nt, Homo sapiens
  misc_RNA (1)...(19): siRNA sense strand
gaaauguggcuugucuuac

SEQ ID NO: 1308893 - RNA, 19 nt, Homo sapiens
  misc_RNA (1)...(19): siRNA sense strand
gcaggugacugguucuuca

SEQ ID NO: 1308894 - RNA, 19 nt, Homo sapiens
  misc_RNA (1)...(19): siRNA sense strand
agagguagcucagaaaugu

SEQ ID NO: 1308895 - RNA, 19 nt, Homo sapiens
  misc_RNA (1)...(19): siRNA sense strand
ggacugugcccuggccuua

SEQ ID NO: 1308896 - RNA, 19 nt, Homo sapiens
  misc_RNA (1)...(19): siRNA sense strand
agaaauguggcuugucuua

SEQ ID NO: 1308897 - RNA, 19 nt, Homo sapiens
  misc_RNA (1)...(19): siRNA sense strand
caacagguuuccaggagau

SEQ ID NO: 1308898 - RNA, 19 nt, Homo sapiens
  misc_RNA (1)...(19): siRNA sense strand
gaagagguagcucagaaau

SEQ ID NO: 1308899 - RNA, 19 nt, Homo sapiens
  misc_RNA (1)...(19): siRNA sense strand
ggaagagguagcucagaaa

SEQ ID NO: 1308900 - RNA, 19 nt, Homo sapiens
  misc_RNA (1)...(19): siRNA sense strand
aaauguggcuugucuuaca

SEQ ID NO: 1308901 - RNA, 19 nt, Homo sapiens
  misc_RNA (1)...(19): siRNA sense strand
ucagaaauguggcuugucu

SEQ ID NO: 1308902 - RNA, 19 nt, Homo sapiens
  misc_RNA (1)...(19): siRNA sense strand
uggaagagguagcucagaa

SEQ ID NO: 1308903 - RNA, 19 nt, Homo sapiens
  misc_RNA (1)...(19): siRNA sense strand
agagcagagugccacauua

SEQ ID NO: 1308904 - RNA, 19 nt, Homo sapiens
  misc_RNA (1)...(19): siRNA sense strand
gcucagaaauguggcuugu

SEQ ID NO: 1308905 - RNA, 19 nt, Homo sapiens
  misc_RNA (1)...(19): siRNA sense strand
gcaugcauuugacaucuuc

SEQ ID NO: 1308906 - RNA, 19 nt, Homo sapiens
  misc_RNA (1)...(19): siRNA sense strand
cgagggagcaggagcauca

SEQ ID NO: 1308907 - RNA, 19 nt, Homo sapiens
  misc_RNA (1)...(19): siRNA sense strand
gagcagagugccacauuac

SEQ ID NO: 1308908 - RNA, 19 nt, Homo sapiens
  misc_RNA (1)...(19): siRNA sense strand
cagaagcucuccggaggau

SEQ ID NO: 1308909 - RNA, 19 nt, Homo sapiens
  misc_RNA (1)...(19): siRNA sense strand
ggacagcgggaggcucaaa

SEQ ID NO: 1308910 - RNA, 19 nt, Homo sapiens
  misc_RNA (1)...(19): siRNA sense strand
gugacugguucuucaggaa

SEQ ID NO: 1308911 - RNA, 19 nt, Homo sapiens
  misc_RNA (1)...(19): siRNA sense strand
ccagguggugcaugcauuu

SEQ ID NO: 1308912 - RNA, 19 nt, Homo sapiens
  misc_RNA (1)...(19): siRNA sense strand
cagagcagagugccacauu

SEQ ID NO: 1308913 - RNA, 19 nt, Homo sapiens
  misc_RNA (1)...(19): siRNA sense strand
gcagagugccacauuacag

SEQ ID NO: 1308914 - RNA, 19 nt, Homo sapiens
  misc_RNA (1)...(19): siRNA sense strand
gaaauguggcuugucuuac

SEQ ID NO: 1308915 - RNA, 19 nt, Homo sapiens
  misc_RNA (1)...(19): siRNA sense strand
gccacaggaucaagacagu

SEQ ID NO: 1308916 - RNA, 19 nt, Homo sapiens
  misc_RNA (1)...(19): siRNA sense strand
gugcaugcauuugacaucu

SEQ ID NO: 1308917 - RNA, 19 nt, Homo sapiens
  misc_RNA (1)...(19): siRNA sense strand
acagggugaucagacauga

SEQ ID NO: 1308918 - RNA, 19 nt, Homo sapiens
  misc_RNA (1)...(19): siRNA sense strand
uccaggagaugguagacau

SEQ ID NO: 1308919 - RNA, 19 nt, Homo sapiens
  misc_RNA (1)...(19): siRNA sense strand
ggauucuccuggacaccau

SEQ ID NO: 1308920 - RNA, 19 nt, Homo sapiens
  misc_RNA (1)...(19): siRNA sense strand
caggagaugguagacauug

SEQ ID NO: 1308921 - RNA, 19 nt, Homo sapiens
  misc_RNA (1)...(19): siRNA sense strand
cccgacagccaacagguuu

SEQ ID NO: 1308922 - RNA, 19 nt, Homo sapiens
  misc_RNA (1)...(19): siRNA sense strand
ccacauuacagggugauca

SEQ ID NO: 1308923 - RNA, 19 nt, Homo sapiens
  misc_RNA (1)...(19): siRNA sense strand
agagguagcucagaaaugu

SEQ ID NO: 1308924 - RNA, 19 nt, Homo sapiens
  misc_RNA (1)...(19): siRNA sense strand
ggacugugcccuggccuua

SEQ ID NO: 1308925 - RNA, 19 nt, Homo sapiens
  misc_RNA (1)...(19): siRNA sense strand
agaaauguggcuugucuua

SEQ ID NO: 1308926 - RNA, 19 nt, Homo sapiens
  misc_RNA (1)...(19): siRNA sense strand
gaagagguagcucagaaau

SEQ ID NO: 1308927 - RNA, 19 nt, Homo sapiens
  misc_RNA (1)...(19): siRNA sense strand
ggaagagguagcucagaaa

SEQ ID NO: 1308928 - RNA, 19 nt, Homo sapiens
  misc_RNA (1)...(19): siRNA sense strand
aaauguggcuugucuuaca

SEQ ID NO: 1308929 - RNA, 19 nt, Homo sapiens
  misc_RNA (1)...(19): siRNA sense strand
ucagaaauguggcuugucu

SEQ ID NO: 1308930 - RNA, 19 nt, Homo sapiens
  misc_RNA (1)...(19): siRNA sense strand
uggaagagguagcucagaa

SEQ ID NO: 1308931 - RNA, 19 nt, Homo sapiens
  misc_RNA (1)...(19): siRNA sense strand
gcucagaaauguggcuugu

SEQ ID NO: 1308932 - RNA, 19 nt, Homo sapiens
  misc_RNA (1)...(19): siRNA sense strand
gccacaggaucaagacagu

SEQ ID NO: 1308933 - RNA, 19 nt, Homo sapiens
  misc_RNA (1)...(19): siRNA sense strand
gaaauguggcuugucuuac

SEQ ID NO: 1308934 - RNA, 19 nt, Homo sapiens
  misc_RNA (1)...(19): siRNA sense strand
agagguagcucagaaaugu

SEQ ID NO: 1308935 - RNA, 19 nt, Homo sapiens
  misc_RNA (1)...(19): siRNA sense strand
ggacugugcccuggccuua

SEQ ID NO: 1308936 - RNA, 19 nt, Homo sapiens
  misc_RNA (1)...(19): siRNA sense strand
agaaauguggcuugucuua

SEQ ID NO: 1308937 - RNA, 19 nt, Homo sapiens
  misc_RNA (1)...(19): siRNA sense strand
gaagagguagcucagaaau

SEQ ID NO: 1308938 - RNA, 19 nt, Homo sapiens
  misc_RNA (1)...(19): siRNA sense strand
ggaagagguagcucagaaa

SEQ ID NO: 1308939 - RNA, 19 nt, Homo sapiens
  misc_RNA (1)...(19): siRNA sense strand
aaauguggcuugucuuaca

SEQ ID NO: 1308940 - RNA, 19 nt, Homo sapiens
  misc_RNA (1)...(19): siRNA sense strand
ucagaaauguggcuugucu

SEQ ID NO: 1308941 - RNA, 19 nt, Homo sapiens
  misc_RNA (1)...(19): siRNA sense strand
uggaagagguagcucagaa

SEQ ID NO: 1308942 - RNA, 19 nt, Homo sapiens
  misc_RNA (1)...(19): siRNA sense strand
gcucagaaauguggcuugu

SEQ ID NO: 1308943 - RNA, 19 nt, Homo sapiens
  misc_RNA (1)...(19): siRNA sense strand
gccacaggaucaagacagu

SEQ ID NO: 1308944 - RNA, 19 nt, Homo sapiens
  misc_RNA (1)...(19): siRNA sense strand
gaaauguggcuugucuuac

SEQ ID NO: 1308945 - RNA, 19 nt, Homo sapiens
  misc_RNA (1)...(19): siRNA sense strand
gcaggugacugguucuuca

SEQ ID NO: 1308946 - RNA, 19 nt, Homo sapiens
  misc_RNA (1)...(19): siRNA sense strand
agagguagcucagaaaugu

SEQ ID NO: 1308947 - RNA, 19 nt, Homo sapiens
  misc_RNA (1)...(19): siRNA sense strand
ggacugugcccuggccuua

SEQ ID NO: 1308948 - RNA, 19 nt, Homo sapiens
  misc_RNA (1)...(19): siRNA sense strand
agaaauguggcuugucuua

SEQ ID NO: 1308949 - RNA, 19 nt, Homo sapiens
  misc_RNA (1)...(19): siRNA sense strand
caacagguuuccaggagau

SEQ ID NO: 1308950 - RNA, 19 nt, Homo sapiens
  misc_RNA (1)...(19): siRNA sense strand
gaagagguagcucagaaau

SEQ ID NO: 1308951 - RNA, 19 nt, Homo sapiens
  misc_RNA (1)...(19): siRNA sense strand
ggaagagguagcucagaaa

SEQ ID NO: 1308952 - RNA, 19 nt, Homo sapiens
  misc_RNA (1)...(19): siRNA sense strand
aaauguggcuugucuuaca

SEQ ID NO: 1308953 - RNA, 19 nt, Homo sapiens
  misc_RNA (1)...(19): siRNA sense strand
ucagaaauguggcuugucu

SEQ ID NO: 1308954 - RNA, 19 nt, Homo sapiens
  misc_RNA (1)...(19): siRNA sense strand
uggaagagguagcucagaa

SEQ ID NO: 1308955 - RNA, 19 nt, Homo sapiens
  misc_RNA (1)...(19): siRNA sense strand
agagcagagugccacauua

SEQ ID NO: 1308956 - RNA, 19 nt, Homo sapiens
  misc_RNA (1)...(19): siRNA sense strand
gcucagaaauguggcuugu

SEQ ID NO: 1308957 - RNA, 19 nt, Homo sapiens
  misc_RNA (1)...(19): siRNA sense strand
gcaugcauuugacaucuuc

SEQ ID NO: 1308958 - RNA, 19 nt, Homo sapiens
  misc_RNA (1)...(19): siRNA sense strand
cgagggagcaggagcauca

SEQ ID NO: 1308959 - RNA, 19 nt, Homo sapiens
  misc_RNA (1)...(19): siRNA sense strand
gagcagagugccacauuac

SEQ ID NO: 1308960 - RNA, 19 nt, Homo sapiens
  misc_RNA (1)...(19): siRNA sense strand
cagaagcucuccggaggau

SEQ ID NO: 1308961 - RNA, 19 nt, Homo sapiens
  misc_RNA (1)...(19): siRNA sense strand
ggacagcgggaggcucaaa

SEQ ID NO: 1308962 - RNA, 19 nt, Homo sapiens
  misc_RNA (1)...(19): siRNA sense strand
gugacugguucuucaggaa

SEQ ID NO: 1308963 - RNA, 19 nt, Homo sapiens
  misc_RNA (1)...(19): siRNA sense strand
ccagguggugcaugcauuu

SEQ ID NO: 1308964 - RNA, 19 nt, Homo sapiens
  misc_RNA (1)...(19): siRNA sense strand
cagagcagagugccacauu

SEQ ID NO: 1308965 - RNA, 19 nt, Homo sapiens
  misc_RNA (1)...(19): siRNA sense strand
gcagagugccacauuacag

SEQ ID NO: 1308966 - RNA, 19 nt, Homo sapiens
  misc_RNA (1)...(19): siRNA sense strand
gaaauguggcuugucuuac

SEQ ID NO: 1308967 - RNA, 19 nt, Homo sapiens
  misc_RNA (1)...(19): siRNA sense strand
gccacaggaucaagacagu

SEQ ID NO: 1308968 - RNA, 19 nt, Homo sapiens
  misc_RNA (1)...(19): siRNA sense strand
gugcaugcauuugacaucu

SEQ ID NO: 1308969 - RNA, 19 nt, Homo sapiens
  misc_RNA (1)...(19): siRNA sense strand
acagggugaucagacauga

SEQ ID NO: 1308970 - RNA, 19 nt, Homo sapiens
  misc_RNA (1)...(19): siRNA sense strand
uccaggagaugguagacau

SEQ ID NO: 1308971 - RNA, 19 nt, Homo sapiens
  misc_RNA (1)...(19): siRNA sense strand
ggauucuccuggacaccau

SEQ ID NO: 1308972 - RNA, 19 nt, Homo sapiens
  misc_RNA (1)...(19): siRNA sense strand
caggagaugguagacauug

SEQ ID NO: 1308973 - RNA, 19 nt, Homo sapiens
  misc_RNA (1)...(19): siRNA sense strand
cccgacagccaacagguuu

SEQ ID NO: 1308974 - RNA, 19 nt, Homo sapiens
  misc_RNA (1)...(19): siRNA sense strand
ccacauuacagggugauca

SEQ ID NO: 1308975 - RNA, 19 nt, Homo sapiens
  misc_RNA (1)...(19): siRNA sense strand
agagguagcucagaaaugu

SEQ ID NO: 1308976 - RNA, 19 nt, Homo sapiens
  misc_RNA (1)...(19): siRNA sense strand
ggacugugcccuggccuua

SEQ ID NO: 1308977 - RNA, 19 nt, Homo sapiens
  misc_RNA (1)...(19): siRNA sense strand
agaaauguggcuugucuua

SEQ ID NO: 1308978 - RNA, 19 nt, Homo sapiens
  misc_RNA (1)...(19): siRNA sense strand
gaagagguagcucagaaau

SEQ ID NO: 1308979 - RNA, 19 nt, Homo sapiens
  misc_RNA (1)...(19): siRNA sense strand
ggaagagguagcucagaaa

SEQ ID NO: 1308980 - RNA, 19 nt, Homo sapiens
  misc_RNA (1)...(19): siRNA sense strand
aaauguggcuugucuuaca

SEQ ID NO: 1308981 - RNA, 19 nt, Homo sapiens
  misc_RNA (1)...(19): siRNA sense strand
ucagaaauguggcuugucu

SEQ ID NO: 1308982 - RNA, 19 nt, Homo sapiens
  misc_RNA (1)...(19): siRNA sense strand
uggaagagguagcucagaa

SEQ ID NO: 1308983 - RNA, 19 nt, Homo sapiens
  misc_RNA (1)...(19): siRNA sense strand
gcucagaaauguggcuugu

SEQ ID NO: 1308984 - RNA, 19 nt, Homo sapiens
  misc_RNA (1)...(19): siRNA sense strand
gccacaggaucaagacagu

SEQ ID NO: 1308985 - RNA, 19 nt, Homo sapiens
  misc_RNA (1)...(19): siRNA sense strand
gaaauguggcuugucuuac

SEQ ID NO: 1308986 - RNA, 19 nt, Homo sapiens
  misc_RNA (1)...(19): siRNA sense strand
ggacugauguggaagcuuu

SEQ ID NO: 1308987 - RNA, 19 nt, Homo sapiens
  misc_RNA (1)...(19): siRNA sense strand
ucaagggacugauguggaa

SEQ ID NO: 1308988 - RNA, 19 nt, Homo sapiens
  misc_RNA (1)...(19): siRNA sense strand
gaggaaccaccaacugaua

SEQ ID NO: 1308989 - RNA, 19 nt, Homo sapiens
  misc_RNA (1)...(19): siRNA sense strand
gaacuggcucugcuuaaga

SEQ ID NO: 1308990 - RNA, 19 nt, Homo sapiens
  misc_RNA (1)...(19): siRNA sense strand
gauaugagugagcauguaa

SEQ ID NO: 1308991 - RNA, 19 nt, Homo sapiens
  misc_RNA (1)...(19): siRNA sense strand
ggaacuggcucugcuuaag

SEQ ID NO: 1308992 - RNA, 19 nt, Homo sapiens
  misc_RNA (1)...(19): siRNA sense strand
gggaggaagugagagauau

SEQ ID NO: 1308993 - RNA, 19 nt, Homo sapiens
  misc_RNA (1)...(19): siRNA sense strand
gaagaggaaccaccaacug

SEQ ID NO: 1308994 - RNA, 19 nt, Homo sapiens
  misc_RNA (1)...(19): siRNA sense strand
gagugagcauguaacaaga

SEQ ID NO: 1308995 - RNA, 19 nt, Homo sapiens
  misc_RNA (1)...(19): siRNA sense strand
ggaugcaccuggagauggu

SEQ ID NO: 1308996 - RNA, 19 nt, Homo sapiens
  misc_RNA (1)...(19): siRNA sense strand
guaacaagaucccaauccu

SEQ ID NO: 1308997 - RNA, 19 nt, Homo sapiens
  misc_RNA (1)...(19): siRNA sense strand
caagaucccaauccucaga

SEQ ID NO: 1308998 - RNA, 19 nt, Homo sapiens
  misc_RNA (1)...(19): siRNA sense strand
ugagugagcauguaacaag

SEQ ID NO: 1308999 - RNA, 19 nt, Homo sapiens
  misc_RNA (1)...(19): siRNA sense strand
gcaggugaagggcaacuau

SEQ ID NO: 1309000 - RNA, 19 nt, Homo sapiens
  misc_RNA (1)...(19): siRNA sense strand
aagaggaaaugaccaagag

SEQ ID NO: 1309001 - RNA, 19 nt, Homo sapiens
  misc_RNA (1)...(19): siRNA sense strand
ggaagugagagauaugagu

SEQ ID NO: 1309002 - RNA, 19 nt, Homo sapiens
  misc_RNA (1)...(19): siRNA sense strand
gaggaagugagagauauga

SEQ ID NO: 1309003 - RNA, 19 nt, Homo sapiens
  misc_RNA (1)...(19): siRNA sense strand
agauaugagugagcaugua

SEQ ID NO: 1309004 - RNA, 19 nt, Homo sapiens
  misc_RNA (1)...(19): siRNA sense strand
ggaggaagugagagauaug

SEQ ID NO: 1309005 - RNA, 19 nt, Homo sapiens
  misc_RNA (1)...(19): siRNA sense strand
aaucguggcugggcuggaa

SEQ ID NO: 1309006 - RNA, 19 nt, Homo sapiens
  misc_RNA (1)...(19): siRNA sense strand
ggagaugguccugauguca

SEQ ID NO: 1309007 - RNA, 19 nt, Homo sapiens
  misc_RNA (1)...(19): siRNA sense strand
caggaacuggcucugcuua

SEQ ID NO: 1309008 - RNA, 19 nt, Homo sapiens
  misc_RNA (1)...(19): siRNA sense strand
aagaggaaccaccaacuga

SEQ ID NO: 1309009 - RNA, 19 nt, Homo sapiens
  misc_RNA (1)...(19): siRNA sense strand
agaaagaggaaaugaccaa

SEQ ID NO: 1309010 - RNA, 19 nt, Homo sapiens
  misc_RNA (1)...(19): siRNA sense strand
uggcucugcuuaagauaga

SEQ ID NO: 1309011 - RNA, 19 nt, Homo sapiens
  misc_RNA (1)...(19): siRNA sense strand
ggaaccaccaacugauaau

SEQ ID NO: 1309012 - RNA, 19 nt, Homo sapiens
  misc_RNA (1)...(19): siRNA sense strand
ggaacgagggaggaaguga

SEQ ID NO: 1309013 - RNA, 19 nt, Homo sapiens
  misc_RNA (1)...(19): siRNA sense strand
caggugaagggcaacuaua

SEQ ID NO: 1309014 - RNA, 19 nt, Homo sapiens
  misc_RNA (1)...(19): siRNA sense strand
gagauaugagugagcaugu

SEQ ID NO: 1309015 - RNA, 19 nt, Homo sapiens
  misc_RNA (1)...(19): siRNA sense strand
aaagaggaaaugaccaaga

SEQ ID NO: 1309016 - RNA, 19 nt, Homo sapiens
  misc_RNA (1)...(19): siRNA sense strand
gaaccaccaacugauaauc

SEQ ID NO: 1309017 - RNA, 19 nt, Homo sapiens
  misc_RNA (1)...(19): siRNA sense strand
gugagcauguaacaagauc

SEQ ID NO: 1309018 - RNA, 19 nt, Homo sapiens
  misc_RNA (1)...(19): siRNA sense strand
cgagggaggaagugagaga

SEQ ID NO: 1309019 - RNA, 19 nt, Homo sapiens
  misc_RNA (1)...(19): siRNA sense strand
ggacucugcccacuuuuga

SEQ ID NO: 1309020 - RNA, 19 nt, Homo sapiens
  misc_RNA (1)...(19): siRNA sense strand
aggaaccaccaacugauaa

SEQ ID NO: 1309021 - RNA, 19 nt, Homo sapiens
  misc_RNA (1)...(19): siRNA sense strand
gaggaugcaccuggagaug

SEQ ID NO: 1309022 - RNA, 19 nt, Homo sapiens
  misc_RNA (1)...(19): siRNA sense strand
caagaagaggaaccaccaa

SEQ ID NO: 1309023 - RNA, 19 nt, Homo sapiens
  misc_RNA (1)...(19): siRNA sense strand
ggauggcacugaugacuuu

SEQ ID NO: 1309024 - RNA, 19 nt, Homo sapiens
  misc_RNA (1)...(19): siRNA sense strand
ggagagagacgaccgugua

SEQ ID NO: 1309025 - RNA, 19 nt, Homo sapiens
  misc_RNA (1)...(19): siRNA sense strand
caagagucaucaccgcaaa

SEQ ID NO: 1309026 - RNA, 19 nt, Homo sapiens
  misc_RNA (1)...(19): siRNA sense strand
ccaagaacccgcaccaguu

SEQ ID NO: 1309027 - RNA, 19 nt, Homo sapiens
  misc_RNA (1)...(19): siRNA sense strand
ccagcgagcucuguguaaa

SEQ ID NO: 1309028 - RNA, 19 nt, Homo sapiens
  misc_RNA (1)...(19): siRNA sense strand
guacccaccugagcuauuc

SEQ ID NO: 1309029 - RNA, 19 nt, Homo sapiens
  misc_RNA (1)...(19): siRNA sense strand
caagaacccgcaccaguug

SEQ ID NO: 1309030 - RNA, 19 nt, Homo sapiens
  misc_RNA (1)...(19): siRNA sense strand
ugaagaaugucagaagcaa

SEQ ID NO: 1309031 - RNA, 19 nt, Homo sapiens
  misc_RNA (1)...(19): siRNA sense strand
gcaguugggcucguugaaa

SEQ ID NO: 1309032 - RNA, 19 nt, Homo sapiens
  misc_RNA (1)...(19): siRNA sense strand
cgagcucuguguaaauaug

SEQ ID NO: 1309033 - RNA, 19 nt, Homo sapiens
  misc_RNA (1)...(19): siRNA sense strand
ugacagacaaagaggauga

SEQ ID NO: 1309034 - RNA, 19 nt, Homo sapiens
  misc_RNA (1)...(19): siRNA sense strand
ggagggaggaccagaugga

SEQ ID NO: 1309035 - RNA, 19 nt, Homo sapiens
  misc_RNA (1)...(19): siRNA sense strand
aaaagaaguucaagaguca

SEQ ID NO: 1309036 - RNA, 19 nt, Homo sapiens
  misc_RNA (1)...(19): siRNA sense strand
ccugagcuauucaccagaa

SEQ ID NO: 1309037 - RNA, 19 nt, Homo sapiens
  misc_RNA (1)...(19): siRNA sense strand
ugccggagcuccaggucua

SEQ ID NO: 1309038 - RNA, 19 nt, Homo sapiens
  misc_RNA (1)...(19): siRNA sense strand
agcgagcucuguguaaaua

SEQ ID NO: 1309039 - RNA, 19 nt, Homo sapiens
  misc_RNA (1)...(19): siRNA sense strand
agacaaagaggaugagaag

SEQ ID NO: 1309040 - RNA, 19 nt, Homo sapiens
  misc_RNA (1)...(19): siRNA sense strand
gaggagggaggaccagaug

SEQ ID NO: 1309041 - RNA, 19 nt, Homo sapiens
  misc_RNA (1)...(19): siRNA sense strand
gcaagugaugacagcauga

SEQ ID NO: 1309042 - RNA, 19 nt, Homo sapiens
  misc_RNA (1)...(19): siRNA sense strand
gagcucuguguaaauauga

SEQ ID NO: 1309043 - RNA, 19 nt, Homo sapiens
  misc_RNA (1)...(19): siRNA sense strand
caucaacaagugcccagaa

SEQ ID NO: 1309044 - RNA, 19 nt, Homo sapiens
  misc_RNA (1)...(19): siRNA sense strand
cuucgacuaugcagaguuc

SEQ ID NO: 1309045 - RNA, 19 nt, Homo sapiens
  misc_RNA (1)...(19): siRNA sense strand
caacaagugcccagaacac

SEQ ID NO: 1309046 - RNA, 19 nt, Homo sapiens
  misc_RNA (1)...(19): siRNA sense strand
agaagcaguugggcucguu

SEQ ID NO: 1309047 - RNA, 19 nt, Homo sapiens
  misc_RNA (1)...(19): siRNA sense strand
gugaugacagcaugacaga

SEQ ID NO: 1309048 - RNA, 19 nt, Homo sapiens
  misc_RNA (1)...(19): siRNA sense strand
gcaccaguuguucugcaaa

SEQ ID NO: 1309049 - RNA, 19 nt, Homo sapiens
  misc_RNA (1)...(19): siRNA sense strand
ggaggagggaggaccagau

SEQ ID NO: 1309050 - RNA, 19 nt, Homo sapiens
  misc_RNA (1)...(19): siRNA sense strand
caguugggcucguugaaaa

SEQ ID NO: 1309051 - RNA, 19 nt, Homo sapiens
  misc_RNA (1)...(19): siRNA sense strand
gggauggcacugaugacuu

SEQ ID NO: 1309052 - RNA, 19 nt, Homo sapiens
  misc_RNA (1)...(19): siRNA sense strand
caucaccgcaaacccaaga

SEQ ID NO: 1309053 - RNA, 19 nt, Homo sapiens
  misc_RNA (1)...(19): siRNA sense strand
gagcuauucaccagaaagg

SEQ ID NO: 1309054 - RNA, 19 nt, Homo sapiens
  misc_RNA (1)...(19): siRNA sense strand
cagacaaagaggaugagaa

SEQ ID NO: 1309055 - RNA, 19 nt, Homo sapiens
  misc_RNA (1)...(19): siRNA sense strand
uaccagcgagcucugugua

SEQ ID NO: 1309056 - RNA, 19 nt, Homo sapiens
  misc_RNA (1)...(19): siRNA sense strand
cagcgagcucuguguaaau

SEQ ID NO: 1309057 - RNA, 19 nt, Homo sapiens
  misc_RNA (1)...(19): siRNA sense strand
cagaaagacuggcuaacua

SEQ ID NO: 1309058 - RNA, 19 nt, Homo sapiens
  misc_RNA (1)...(19): siRNA sense strand
gaggagcacuguacauuug

SEQ ID NO: 1309059 - RNA, 19 nt, Homo sapiens
  misc_RNA (1)...(19): siRNA sense strand
gcagaaaucuacgcaaaug

SEQ ID NO: 1309060 - RNA, 19 nt, Homo sapiens
  misc_RNA (1)...(19): siRNA sense strand
gacaugcaaugaauucaaa

SEQ ID NO: 1309061 - RNA, 19 nt, Homo sapiens
  misc_RNA (1)...(19): siRNA sense strand
ggaauaauggcaacagaaa

SEQ ID NO: 1309062 - RNA, 19 nt, Homo sapiens
  misc_RNA (1)...(19): siRNA sense strand
caucagcuguggaauaaug

SEQ ID NO: 1309063 - RNA, 19 nt, Homo sapiens
  misc_RNA (1)...(19): siRNA sense strand
ccaggagugugacaaguuu

SEQ ID NO: 1309064 - RNA, 19 nt, Homo sapiens
  misc_RNA (1)...(19): siRNA sense strand
gauacaaccuugccaucga

SEQ ID NO: 1309065 - RNA, 19 nt, Homo sapiens
  misc_RNA (1)...(19): siRNA sense strand
ggaucaacaucaagaggaa

SEQ ID NO: 1309066 - RNA, 19 nt, Homo sapiens
  misc_RNA (1)...(19): siRNA sense strand
caacagaaagacuggcuaa

SEQ ID NO: 1309067 - RNA, 19 nt, Homo sapiens
  misc_RNA (1)...(19): siRNA sense strand
caggacaccacauauauaa

SEQ ID NO: 1309068 - RNA, 19 nt, Homo sapiens
  misc_RNA (1)...(19): siRNA sense strand
cccaucagcuguggaauaa

SEQ ID NO: 1309069 - RNA, 19 nt, Homo sapiens
  misc_RNA (1)...(19): siRNA sense strand
uggcagaaaucuacgcaaa

SEQ ID NO: 1309070 - RNA, 19 nt, Homo sapiens
  misc_RNA (1)...(19): siRNA sense strand
ccaaggaccaggaguguga

SEQ ID NO: 1309071 - RNA, 19 nt, Homo sapiens
  misc_RNA (1)...(19): siRNA sense strand
gacgagaccugcaacaacu

SEQ ID NO: 1309072 - RNA, 19 nt, Homo sapiens
  misc_RNA (1)...(19): siRNA sense strand
ggacaugcaaugaauucaa

SEQ ID NO: 1309073 - RNA, 19 nt, Homo sapiens
  misc_RNA (1)...(19): siRNA sense strand
ugacaaguuuaaccaaugu

SEQ ID NO: 1309074 - RNA, 19 nt, Homo sapiens
  misc_RNA (1)...(19): siRNA sense strand
ccaggacaccacauauaua

SEQ ID NO: 1309075 - RNA, 19 nt, Homo sapiens
  misc_RNA (1)...(19): siRNA sense strand
gugacaaguuuaaccaaug

SEQ ID NO: 1309076 - RNA, 19 nt, Homo sapiens
  misc_RNA (1)...(19): siRNA sense strand
cagcggaucugcccaagag

SEQ ID NO: 1309077 - RNA, 19 nt, Homo sapiens
  misc_RNA (1)...(19): siRNA sense strand
gagaagaugauggcagaaa

SEQ ID NO: 1309078 - RNA, 19 nt, Homo sapiens
  misc_RNA (1)...(19): siRNA sense strand
ggacaccacauauauaaac

SEQ ID NO: 1309079 - RNA, 19 nt, Homo sapiens
  misc_RNA (1)...(19): siRNA sense strand
gaugauggcagaaaucuac

SEQ ID NO: 1309080 - RNA, 19 nt, Homo sapiens
  misc_RNA (1)...(19): siRNA sense strand
gaagaugauggcagaaauc

SEQ ID NO: 1309081 - RNA, 19 nt, Homo sapiens
  misc_RNA (1)...(19): siRNA sense strand
agaagaugauggcagaaau

SEQ ID NO: 1309082 - RNA, 19 nt, Homo sapiens
  misc_RNA (1)...(19): siRNA sense strand
cgaggagcacuguacauuu

SEQ ID NO: 1309083 - RNA, 19 nt, Homo sapiens
  misc_RNA (1)...(19): siRNA sense strand
guacuggauuguccggaau

SEQ ID NO: 1309084 - RNA, 19 nt, Homo sapiens
  misc_RNA (1)...(19): siRNA sense strand
gaccagcaccuauaaggau

SEQ ID NO: 1309085 - RNA, 19 nt, Homo sapiens
  misc_RNA (1)...(19): siRNA sense strand
gaaagacuggcuaacuaca

SEQ ID NO: 1309086 - RNA, 19 nt, Homo sapiens
  misc_RNA (1)...(19): siRNA sense strand
aauaauggcaacagaaaga

SEQ ID NO: 1309087 - RNA, 19 nt, Homo sapiens
  misc_RNA (1)...(19): siRNA sense strand
uaccaggacaccacauaua

SEQ ID NO: 1309088 - RNA, 19 nt, Homo sapiens
  misc_RNA (1)...(19): siRNA sense strand
caauguggauggugucaac

SEQ ID NO: 1309089 - RNA, 19 nt, Homo sapiens
  misc_RNA (1)...(19): siRNA sense strand
gggacugaguacuggauug

SEQ ID NO: 1309090 - RNA, 19 nt, Homo sapiens
  misc_RNA (1)...(19): siRNA sense strand
gaucgugaccagcaccuau

SEQ ID NO: 1309091 - RNA, 19 nt, Homo sapiens
  misc_RNA (1)...(19): siRNA sense strand
ggacugaguacuggauugu

SEQ ID NO: 1309092 - RNA, 19 nt, Homo sapiens
  misc_RNA (1)...(19): siRNA sense strand
guggaauaauggcaacaga

SEQ ID NO: 1309093 - RNA, 19 nt, Homo sapiens
  misc_RNA (1)...(19): siRNA sense strand
gaauaauggcaacagaaag

SEQ ID NO: 1309094 - RNA, 19 nt, Homo sapiens
  misc_RNA (1)...(19): siRNA sense strand
gaccaggagugugacaagu

SEQ ID NO: 1309095 - RNA, 19 nt, Homo sapiens
  misc_RNA (1)...(19): siRNA sense strand
ugugggacaugcaaugaau

SEQ ID NO: 1309096 - RNA, 19 nt, Homo sapiens
  misc_RNA (1)...(19): siRNA sense strand
ugugacaaguuuaaccaau

SEQ ID NO: 1309097 - RNA, 19 nt, Homo sapiens
  misc_RNA (1)...(19): siRNA sense strand
ugcaaugaauucaaagagu

SEQ ID NO: 1309098 - RNA, 19 nt, Homo sapiens
  misc_RNA (1)...(19): siRNA sense strand
ggaccaggagugugacaag

SEQ ID NO: 1309099 - RNA, 19 nt, Homo sapiens
  misc_RNA (1)...(19): siRNA sense strand
ucccaucagcuguggaaua

SEQ ID NO: 1309100 - RNA, 19 nt, Homo sapiens
  misc_RNA (1)...(19): siRNA sense strand
uguggauggugucaacuau

SEQ ID NO: 1309101 - RNA, 19 nt, Homo sapiens
  misc_RNA (1)...(19): siRNA sense strand
ggacuggcgcaauguggau

SEQ ID NO: 1309102 - RNA, 19 nt, Homo sapiens
  misc_RNA (1)...(19): siRNA sense strand
caccacauauauaaaccau

SEQ ID NO: 1309103 - RNA, 19 nt, Homo sapiens
  misc_RNA (1)...(19): siRNA sense strand
ggauuguccggaauucaug

SEQ ID NO: 1309104 - RNA, 19 nt, Homo sapiens
  misc_RNA (1)...(19): siRNA sense strand
ucgaggagcacuguacauu

SEQ ID NO: 1309105 - RNA, 19 nt, Homo sapiens
  misc_RNA (1)...(19): siRNA sense strand
guaacgcuggcuccuguga

SEQ ID NO: 1309106 - RNA, 19 nt, Homo sapiens
  misc_RNA (1)...(19): siRNA sense strand
ggcagaaaucuacgcaaau

SEQ ID NO: 1309107 - RNA, 19 nt, Homo sapiens
  misc_RNA (1)...(19): siRNA sense strand
acaacuaccaggccaagga

SEQ ID NO: 1309108 - RNA, 19 nt, Homo sapiens
  misc_RNA (1)...(19): siRNA sense strand
aauaccaggacaccacaua

SEQ ID NO: 1309109 - RNA, 19 nt, Homo sapiens
  misc_RNA (1)...(19): siRNA sense strand
cuacaccggaggcaucuau

SEQ ID NO: 1309110 - RNA, 19 nt, Homo sapiens
  misc_RNA (1)...(19): siRNA sense strand
gugaugggacugaguacug

SEQ ID NO: 1309111 - RNA, 19 nt, Homo sapiens
  misc_RNA (1)...(19): siRNA sense strand
uggauggugucaacuaugc

SEQ ID NO: 1309112 - RNA, 19 nt, Homo sapiens
  misc_RNA (1)...(19): siRNA sense strand
ugacgagaccugcaacaac

SEQ ID NO: 1309113 - RNA, 19 nt, Homo sapiens
  misc_RNA (1)...(19): siRNA sense strand
ugaccagcaccuauaagga

SEQ ID NO: 1309114 - RNA, 19 nt, Homo sapiens
  misc_RNA (1)...(19): siRNA sense strand
ggucccaucagcuguggaa

SEQ ID NO: 1309115 - RNA, 19 nt, Homo sapiens
  misc_RNA (1)...(19): siRNA sense strand
agaaaucuacgcaaauggu

SEQ ID NO: 1309116 - RNA, 19 nt, Homo sapiens
  misc_RNA (1)...(19): siRNA sense strand
gccacgccauccggaacua

SEQ ID NO: 1309117 - RNA, 19 nt, Homo sapiens
  misc_RNA (1)...(19): siRNA sense strand
uggaauaauggcaacagaa

SEQ ID NO: 1309118 - RNA, 19 nt, Homo sapiens
  misc_RNA (1)...(19): siRNA sense strand
cgaaagaaccgccaagugu

SEQ ID NO: 1309119 - RNA, 19 nt, Homo sapiens
  misc_RNA (1)...(19): siRNA sense strand
agaaauggguucgggagua

SEQ ID NO: 1309120 - RNA, 19 nt, Homo sapiens
  misc_RNA (1)...(19): siRNA sense strand
caacccagcagucgucuuu

SEQ ID NO: 1309121 - RNA, 19 nt, Homo sapiens
  misc_RNA (1)...(19): siRNA sense strand
gaaauggguucgggaguac

SEQ ID NO: 1309122 - RNA, 19 nt, Homo sapiens
  misc_RNA (1)...(19): siRNA sense strand
gcugucauccucauugcua

SEQ ID NO: 1309123 - RNA, 19 nt, Homo sapiens
  misc_RNA (1)...(19): siRNA sense strand
gugcccacaucaaggagua

SEQ ID NO: 1309124 - RNA, 19 nt, Homo sapiens
  misc_RNA (1)...(19): siRNA sense strand
ccucugcgcuccugcaucu

SEQ ID NO: 1309125 - RNA, 19 nt, Homo sapiens
  misc_RNA (1)...(19): siRNA sense strand
caccacacccugcugcuuu

SEQ ID NO: 1309126 - RNA, 19 nt, Homo sapiens
  misc_RNA (1)...(19): siRNA sense strand
caucaaggaguauuucuac

SEQ ID NO: 1309127 - RNA, 19 nt, Homo sapiens
  misc_RNA (1)...(19): siRNA sense strand
aaagaaccgccaagugugu

SEQ ID NO: 1309128 - RNA, 19 nt, Homo sapiens
  misc_RNA (1)...(19): siRNA sense strand
gugccaacccagagaagaa

SEQ ID NO: 1309129 - RNA, 19 nt, Homo sapiens
  misc_RNA (1)...(19): siRNA sense strand
gcaucugccuccccauauu

SEQ ID NO: 1309130 - RNA, 19 nt, Homo sapiens
  misc_RNA (1)...(19): siRNA sense strand
ccacaucaaggaguauuuc

SEQ ID NO: 1309131 - RNA, 19 nt, Homo sapiens
  misc_RNA (1)...(19): siRNA sense strand
cugcugcuuugccuacauu

SEQ ID NO: 1309132 - RNA, 19 nt, Homo sapiens
  misc_RNA (1)...(19): siRNA sense strand
ccgaaagaaccgccaagug

SEQ ID NO: 1309133 - RNA, 19 nt, Homo sapiens
  misc_RNA (1)...(19): siRNA sense strand
ugacagagcuggcgcacua

SEQ ID NO: 1309134 - RNA, 19 nt, Homo sapiens
  misc_RNA (1)...(19): siRNA sense strand
agaauuagcuaugccaaga

SEQ ID NO: 1309135 - RNA, 19 nt, Homo sapiens
  misc_RNA (1)...(19): siRNA sense strand
ccucuaggcuuaagaccuu

SEQ ID NO: 1309136 - RNA, 19 nt, Homo sapiens
  misc_RNA (1)...(19): siRNA sense strand
ggacauacugcaccagguu

SEQ ID NO: 1309137 - RNA, 19 nt, Homo sapiens
  misc_RNA (1)...(19): siRNA sense strand
gcuuaagaccuucaacuug

SEQ ID NO: 1309138 - RNA, 19 nt, Homo sapiens
  misc_RNA (1)...(19): siRNA sense strand
gcaggacucacguuacaga

SEQ ID NO: 1309139 - RNA, 19 nt, Homo sapiens
  misc_RNA (1)...(19): siRNA sense strand
uggcaggacucacguuaca

SEQ ID NO: 1309140 - RNA, 19 nt, Homo sapiens
  misc_RNA (1)...(19): siRNA sense strand
guugcuauguggcagaaga

SEQ ID NO: 1309141 - RNA, 19 nt, Homo sapiens
  misc_RNA (1)...(19): siRNA sense strand
ucaagagaauuagcuaugc

SEQ ID NO: 1309142 - RNA, 19 nt, Homo sapiens
  misc_RNA (1)...(19): siRNA sense strand
caucauggacucccuagag

SEQ ID NO: 1309143 - RNA, 19 nt, Homo sapiens
  misc_RNA (1)...(19): siRNA sense strand
ggacgaccugcacaucaug

SEQ ID NO: 1309144 - RNA, 19 nt, Homo sapiens
  misc_RNA (1)...(19): siRNA sense strand
guacuccucguggacuuaa

SEQ ID NO: 1309145 - RNA, 19 nt, Homo sapiens
  misc_RNA (1)...(19): siRNA sense strand
ggcuuaagaccuucaacuu

SEQ ID NO: 1309146 - RNA, 19 nt, Homo sapiens
  misc_RNA (1)...(19): siRNA sense strand
gccuaaaugugcacagcau

SEQ ID NO: 1309147 - RNA, 19 nt, Homo sapiens
  misc_RNA (1)...(19): siRNA sense strand
ggcgcugggucucaaagug

SEQ ID NO: 1309148 - RNA, 19 nt, Homo sapiens
  misc_RNA (1)...(19): siRNA sense strand
gaacuucaagagaauuagc

SEQ ID NO: 1309149 - RNA, 19 nt, Homo sapiens
  misc_RNA (1)...(19): siRNA sense strand
ccacaaguuacuacuacau

SEQ ID NO: 1309150 - RNA, 19 nt, Homo sapiens
  misc_RNA (1)...(19): siRNA sense strand
cuauguggcagaagaacuu

SEQ ID NO: 1309151 - RNA, 19 nt, Homo sapiens
  misc_RNA (1)...(19): siRNA sense strand
ccaccggagacccacagua

SEQ ID NO: 1309152 - RNA, 19 nt, Homo sapiens
  misc_RNA (1)...(19): siRNA sense strand
ugacagagcuggcgcacua

SEQ ID NO: 1309153 - RNA, 19 nt, Homo sapiens
  misc_RNA (1)...(19): siRNA sense strand
agaauuagcuaugccaaga

SEQ ID NO: 1309154 - RNA, 19 nt, Homo sapiens
  misc_RNA (1)...(19): siRNA sense strand
ccucuaggcuuaagaccuu

SEQ ID NO: 1309155 - RNA, 19 nt, Homo sapiens
  misc_RNA (1)...(19): siRNA sense strand
ggacauacugcaccagguu

SEQ ID NO: 1309156 - RNA, 19 nt, Homo sapiens
  misc_RNA (1)...(19): siRNA sense strand
gcuuaagaccuucaacuug

SEQ ID NO: 1309157 - RNA, 19 nt, Homo sapiens
  misc_RNA (1)...(19): siRNA sense strand
gcaggacucacguuacaga

SEQ ID NO: 1309158 - RNA, 19 nt, Homo sapiens
  misc_RNA (1)...(19): siRNA sense strand
uggcaggacucacguuaca

SEQ ID NO: 1309159 - RNA, 19 nt, Homo sapiens
  misc_RNA (1)...(19): siRNA sense strand
guugcuauguggcagaaga

SEQ ID NO: 1309160 - RNA, 19 nt, Homo sapiens
  misc_RNA (1)...(19): siRNA sense strand
ucaagagaauuagcuaugc

SEQ ID NO: 1309161 - RNA, 19 nt, Homo sapiens
  misc_RNA (1)...(19): siRNA sense strand
caucauggacucccuagag

SEQ ID NO: 1309162 - RNA, 19 nt, Homo sapiens
  misc_RNA (1)...(19): siRNA sense strand
ggacgaccugcacaucaug

SEQ ID NO: 1309163 - RNA, 19 nt, Homo sapiens
  misc_RNA (1)...(19): siRNA sense strand
guacuccucguggacuuaa

SEQ ID NO: 1309164 - RNA, 19 nt, Homo sapiens
  misc_RNA (1)...(19): siRNA sense strand
ggcuuaagaccuucaacuu

SEQ ID NO: 1309165 - RNA, 19 nt, Homo sapiens
  misc_RNA (1)...(19): siRNA sense strand
gccuaaaugugcacagcau

SEQ ID NO: 1309166 - RNA, 19 nt, Homo sapiens
  misc_RNA (1)...(19): siRNA sense strand
ggcgcugggucucaaagug

SEQ ID NO: 1309167 - RNA, 19 nt, Homo sapiens
  misc_RNA (1)...(19): siRNA sense strand
gaacuucaagagaauuagc

SEQ ID NO: 1309168 - RNA, 19 nt, Homo sapiens
  misc_RNA (1)...(19): siRNA sense strand
ccacaaguuacuacuacau

SEQ ID NO: 1309169 - RNA, 19 nt, Homo sapiens
  misc_RNA (1)...(19): siRNA sense strand
cuauguggcagaagaacuu

SEQ ID NO: 1309170 - RNA, 19 nt, Homo sapiens
  misc_RNA (1)...(19): siRNA sense strand
ccaccggagacccacagua

SEQ ID NO: 1309171 - RNA, 19 nt, Homo sapiens
  misc_RNA (1)...(19): siRNA sense strand
ugacagagcuggcgcacua

SEQ ID NO: 1309172 - RNA, 19 nt, Homo sapiens
  misc_RNA (1)...(19): siRNA sense strand
agaauuagcuaugccaaga

SEQ ID NO: 1309173 - RNA, 19 nt, Homo sapiens
  misc_RNA (1)...(19): siRNA sense strand
ccucuaggcuuaagaccuu

SEQ ID NO: 1309174 - RNA, 19 nt, Homo sapiens
  misc_RNA (1)...(19): siRNA sense strand
ggacauacugcaccagguu

SEQ ID NO: 1309175 - RNA, 19 nt, Homo sapiens
  misc_RNA (1)...(19): siRNA sense strand
gcuuaagaccuucaacuug

SEQ ID NO: 1309176 - RNA, 19 nt, Homo sapiens
  misc_RNA (1)...(19): siRNA sense strand
guugcuauguggcagaaga

SEQ ID NO: 1309177 - RNA, 19 nt, Homo sapiens
  misc_RNA (1)...(19): siRNA sense strand
ucaagagaauuagcuaugc

SEQ ID NO: 1309178 - RNA, 19 nt, Homo sapiens
  misc_RNA (1)...(19): siRNA sense strand
caucauggacucccuagag

SEQ ID NO: 1309179 - RNA, 19 nt, Homo sapiens
  misc_RNA (1)...(19): siRNA sense strand
ggacgaccugcacaucaug

SEQ ID NO: 1309180 - RNA, 19 nt, Homo sapiens
  misc_RNA (1)...(19): siRNA sense strand
guacuccucguggacuuaa

SEQ ID NO: 1309181 - RNA, 19 nt, Homo sapiens
  misc_RNA (1)...(19): siRNA sense strand
ggcuuaagaccuucaacuu

SEQ ID NO: 1309182 - RNA, 19 nt, Homo sapiens
  misc_RNA (1)...(19): siRNA sense strand
ggcgcugggucucaaagug

SEQ ID NO: 1309183 - RNA, 19 nt, Homo sapiens
  misc_RNA (1)...(19): siRNA sense strand
gaacuucaagagaauuagc

SEQ ID NO: 1309184 - RNA, 19 nt, Homo sapiens
  misc_RNA (1)...(19): siRNA sense strand
ccacaaguuacuacuacau

SEQ ID NO: 1309185 - RNA, 19 nt, Homo sapiens
  misc_RNA (1)...(19): siRNA sense strand
cuauguggcagaagaacuu

SEQ ID NO: 1309186 - RNA, 19 nt, Homo sapiens
  misc_RNA (1)...(19): siRNA sense strand
ccaccggagacccacagua

SEQ ID NO: 1309187 - RNA, 19 nt, Homo sapiens
  misc_RNA (1)...(19): siRNA sense strand
ugacagagcuggcgcacua

SEQ ID NO: 1309188 - RNA, 19 nt, Homo sapiens
  misc_RNA (1)...(19): siRNA sense strand
agaauuagcuaugccaaga

SEQ ID NO: 1309189 - RNA, 19 nt, Homo sapiens
  misc_RNA (1)...(19): siRNA sense strand
ccucuaggcuuaagaccuu

SEQ ID NO: 1309190 - RNA, 19 nt, Homo sapiens
  misc_RNA (1)...(19): siRNA sense strand
ggacauacugcaccagguu

SEQ ID NO: 1309191 - RNA, 19 nt, Homo sapiens
  misc_RNA (1)...(19): siRNA sense strand
gcuuaagaccuucaacuug

SEQ ID NO: 1309192 - RNA, 19 nt, Homo sapiens
  misc_RNA (1)...(19): siRNA sense strand
gcaggacucacguuacaga

SEQ ID NO: 1309193 - RNA, 19 nt, Homo sapiens
  misc_RNA (1)...(19): siRNA sense strand
uggcaggacucacguuaca

SEQ ID NO: 1309194 - RNA, 19 nt, Homo sapiens
  misc_RNA (1)...(19): siRNA sense strand
guugcuauguggcagaaga

SEQ ID NO: 1309195 - RNA, 19 nt, Homo sapiens
  misc_RNA (1)...(19): siRNA sense strand
ucaagagaauuagcuaugc

SEQ ID NO: 1309196 - RNA, 19 nt, Homo sapiens
  misc_RNA (1)...(19): siRNA sense strand
caucauggacucccuagag

SEQ ID NO: 1309197 - RNA, 19 nt, Homo sapiens
  misc_RNA (1)...(19): siRNA sense strand
ggacgaccugcacaucaug

SEQ ID NO: 1309198 - RNA, 19 nt, Homo sapiens
  misc_RNA (1)...(19): siRNA sense strand
guacuccucguggacuuaa

SEQ ID NO: 1309199 - RNA, 19 nt, Homo sapiens
  misc_RNA (1)...(19): siRNA sense strand
ggcuuaagaccuucaacuu

SEQ ID NO: 1309200 - RNA, 19 nt, Homo sapiens
  misc_RNA (1)...(19): siRNA sense strand
gccuaaaugugcacagcau

SEQ ID NO: 1309201 - RNA, 19 nt, Homo sapiens
  misc_RNA (1)...(19): siRNA sense strand
ggcgcugggucucaaagug

SEQ ID NO: 1309202 - RNA, 19 nt, Homo sapiens
  misc_RNA (1)...(19): siRNA sense strand
gaacuucaagagaauuagc

SEQ ID NO: 1309203 - RNA, 19 nt, Homo sapiens
  misc_RNA (1)...(19): siRNA sense strand
ccacaaguuacuacuacau

SEQ ID NO: 1309204 - RNA, 19 nt, Homo sapiens
  misc_RNA (1)...(19): siRNA sense strand
cuauguggcagaagaacuu

SEQ ID NO: 1309205 - RNA, 19 nt, Homo sapiens
  misc_RNA (1)...(19): siRNA sense strand
ccaccggagacccacagua

SEQ ID NO: 1309206 - RNA, 19 nt, Homo sapiens
  misc_RNA (1)...(19): siRNA sense strand
ugacagagcuggcgcacua

SEQ ID NO: 1309207 - RNA, 19 nt, Homo sapiens
  misc_RNA (1)...(19): siRNA sense strand
agaauuagcuaugccaaga

SEQ ID NO: 1309208 - RNA, 19 nt, Homo sapiens
  misc_RNA (1)...(19): siRNA sense strand
ccucuaggcuuaagaccuu

SEQ ID NO: 1309209 - RNA, 19 nt, Homo sapiens
  misc_RNA (1)...(19): siRNA sense strand
ggacauacugcaccagguu

SEQ ID NO: 1309210 - RNA, 19 nt, Homo sapiens
  misc_RNA (1)...(19): siRNA sense strand
gcuuaagaccuucaacuug

SEQ ID NO: 1309211 - RNA, 19 nt, Homo sapiens
  misc_RNA (1)...(19): siRNA sense strand
gcaggacucacguuacaga

SEQ ID NO: 1309212 - RNA, 19 nt, Homo sapiens
  misc_RNA (1)...(19): siRNA sense strand
uggcaggacucacguuaca

SEQ ID NO: 1309213 - RNA, 19 nt, Homo sapiens
  misc_RNA (1)...(19): siRNA sense strand
guugcuauguggcagaaga

SEQ ID NO: 1309214 - RNA, 19 nt, Homo sapiens
  misc_RNA (1)...(19): siRNA sense strand
ucaagagaauuagcuaugc

SEQ ID NO: 1309215 - RNA, 19 nt, Homo sapiens
  misc_RNA (1)...(19): siRNA sense strand
caucauggacucccuagag

SEQ ID NO: 1309216 - RNA, 19 nt, Homo sapiens
  misc_RNA (1)...(19): siRNA sense strand
ggacgaccugcacaucaug

SEQ ID NO: 1309217 - RNA, 19 nt, Homo sapiens
  misc_RNA (1)...(19): siRNA sense strand
guacuccucguggacuuaa

SEQ ID NO: 1309218 - RNA, 19 nt, Homo sapiens
  misc_RNA (1)...(19): siRNA sense strand
ggcuuaagaccuucaacuu

SEQ ID NO: 1309219 - RNA, 19 nt, Homo sapiens
  misc_RNA (1)...(19): siRNA sense strand
gccuaaaugugcacagcau

SEQ ID NO: 1309220 - RNA, 19 nt, Homo sapiens
  misc_RNA (1)...(19): siRNA sense strand
ggcgcugggucucaaagug

SEQ ID NO: 1309221 - RNA, 19 nt, Homo sapiens
  misc_RNA (1)...(19): siRNA sense strand
gaacuucaagagaauuagc

SEQ ID NO: 1309222 - RNA, 19 nt, Homo sapiens
  misc_RNA (1)...(19): siRNA sense strand
ccacaaguuacuacuacau

SEQ ID NO: 1309223 - RNA, 19 nt, Homo sapiens
  misc_RNA (1)...(19): siRNA sense strand
cuauguggcagaagaacuu

SEQ ID NO: 1309224 - RNA, 19 nt, Homo sapiens
  misc_RNA (1)...(19): siRNA sense strand
ccaccggagacccacagua

SEQ ID NO: 1309225 - RNA, 19 nt, Homo sapiens
  misc_RNA (1)...(19): siRNA sense strand
ugacagagcuggcgcacua

SEQ ID NO: 1309226 - RNA, 19 nt, Homo sapiens
  misc_RNA (1)...(19): siRNA sense strand
agaauuagcuaugccaaga

SEQ ID NO: 1309227 - RNA, 19 nt, Homo sapiens
  misc_RNA (1)...(19): siRNA sense strand
ccucuaggcuuaagaccuu

SEQ ID NO: 1309228 - RNA, 19 nt, Homo sapiens
  misc_RNA (1)...(19): siRNA sense strand
ggacauacugcaccagguu

SEQ ID NO: 1309229 - RNA, 19 nt, Homo sapiens
  misc_RNA (1)...(19): siRNA sense strand
gcuuaagaccuucaacuug

SEQ ID NO: 1309230 - RNA, 19 nt, Homo sapiens
  misc_RNA (1)...(19): siRNA sense strand
guugcuauguggcagaaga

SEQ ID NO: 1309231 - RNA, 19 nt, Homo sapiens
  misc_RNA (1)...(19): siRNA sense strand
ucaagagaauuagcuaugc

SEQ ID NO: 1309232 - RNA, 19 nt, Homo sapiens
  misc_RNA (1)...(19): siRNA sense strand
caucauggacucccuagag

SEQ ID NO: 1309233 - RNA, 19 nt, Homo sapiens
  misc_RNA (1)...(19): siRNA sense strand
ggacgaccugcacaucaug

SEQ ID NO: 1309234 - RNA, 19 nt, Homo sapiens
  misc_RNA (1)...(19): siRNA sense strand
guacuccucguggacuuaa

SEQ ID NO: 1309235 - RNA, 19 nt, Homo sapiens
  misc_RNA (1)...(19): siRNA sense strand
ggcuuaagaccuucaacuu

SEQ ID NO: 1309236 - RNA, 19 nt, Homo sapiens
  misc_RNA (1)...(19): siRNA sense strand
ggcgcugggucucaaagug

SEQ ID NO: 1309237 - RNA, 19 nt, Homo sapiens
  misc_RNA (1)...(19): siRNA sense strand
gaacuucaagagaauuagc

SEQ ID NO: 1309238 - RNA, 19 nt, Homo sapiens
  misc_RNA (1)...(19): siRNA sense strand
ccacaaguuacuacuacau

SEQ ID NO: 1309239 - RNA, 19 nt, Homo sapiens
  misc_RNA (1)...(19): siRNA sense strand
cuauguggcagaagaacuu

SEQ ID NO: 1309240 - RNA, 19 nt, Homo sapiens
  misc_RNA (1)...(19): siRNA sense strand
ccaccggagacccacagua

SEQ ID NO: 1309241 - RNA, 19 nt, Homo sapiens
  misc_RNA (1)...(19): siRNA sense strand
ugacagagcuggcgcacua

SEQ ID NO: 1309242 - RNA, 19 nt, Homo sapiens
  misc_RNA (1)...(19): siRNA sense strand
agaauuagcuaugccaaga

SEQ ID NO: 1309243 - RNA, 19 nt, Homo sapiens
  misc_RNA (1)...(19): siRNA sense strand
ccucuaggcuuaagaccuu

SEQ ID NO: 1309244 - RNA, 19 nt, Homo sapiens
  misc_RNA (1)...(19): siRNA sense strand
ggacauacugcaccagguu

SEQ ID NO: 1309245 - RNA, 19 nt, Homo sapiens
  misc_RNA (1)...(19): siRNA sense strand
gcuuaagaccuucaacuug

SEQ ID NO: 1309246 - RNA, 19 nt, Homo sapiens
  misc_RNA (1)...(19): siRNA sense strand
gcaggacucacguuacaga

SEQ ID NO: 1309247 - RNA, 19 nt, Homo sapiens
  misc_RNA (1)...(19): siRNA sense strand
uggcaggacucacguuaca

SEQ ID NO: 1309248 - RNA, 19 nt, Homo sapiens
  misc_RNA (1)...(19): siRNA sense strand
guugcuauguggcagaaga

SEQ ID NO: 1309249 - RNA, 19 nt, Homo sapiens
  misc_RNA (1)...(19): siRNA sense strand
ucaagagaauuagcuaugc

SEQ ID NO: 1309250 - RNA, 19 nt, Homo sapiens
  misc_RNA (1)...(19): siRNA sense strand
caucauggacucccuagag

SEQ ID NO: 1309251 - RNA, 19 nt, Homo sapiens
  misc_RNA (1)...(19): siRNA sense strand
ggacgaccugcacaucaug

SEQ ID NO: 1309252 - RNA, 19 nt, Homo sapiens
  misc_RNA (1)...(19): siRNA sense strand
guacuccucguggacuuaa

SEQ ID NO: 1309253 - RNA, 19 nt, Homo sapiens
  misc_RNA (1)...(19): siRNA sense strand
ggcuuaagaccuucaacuu

SEQ ID NO: 1309254 - RNA, 19 nt, Homo sapiens
  misc_RNA (1)...(19): siRNA sense strand
gccuaaaugugcacagcau

SEQ ID NO: 1309255 - RNA, 19 nt, Homo sapiens
  misc_RNA (1)...(19): siRNA sense strand
ggcgcugggucucaaagug

SEQ ID NO: 1309256 - RNA, 19 nt, Homo sapiens
  misc_RNA (1)...(19): siRNA sense strand
gaacuucaagagaauuagc

SEQ ID NO: 1309257 - RNA, 19 nt, Homo sapiens
  misc_RNA (1)...(19): siRNA sense strand
ccacaaguuacuacuacau

SEQ ID NO: 1309258 - RNA, 19 nt, Homo sapiens
  misc_RNA (1)...(19): siRNA sense strand
cuauguggcagaagaacuu

SEQ ID NO: 1309259 - RNA, 19 nt, Homo sapiens
  misc_RNA (1)...(19): siRNA sense strand
ccaccggagacccacagua

SEQ ID NO: 1309260 - RNA, 19 nt, Homo sapiens
  misc_RNA (1)...(19): siRNA sense strand
ugacagagcuggcgcacua

SEQ ID NO: 1309261 - RNA, 19 nt, Homo sapiens
  misc_RNA (1)...(19): siRNA sense strand
agaauuagcuaugccaaga

SEQ ID NO: 1309262 - RNA, 19 nt, Homo sapiens
  misc_RNA (1)...(19): siRNA sense strand
ccucuaggcuuaagaccuu

SEQ ID NO: 1309263 - RNA, 19 nt, Homo sapiens
  misc_RNA (1)...(19): siRNA sense strand
ggacauacugcaccagguu

SEQ ID NO: 1309264 - RNA, 19 nt, Homo sapiens
  misc_RNA (1)...(19): siRNA sense strand
gcuuaagaccuucaacuug

SEQ ID NO: 1309265 - RNA, 19 nt, Homo sapiens
  misc_RNA (1)...(19): siRNA sense strand
gcaggacucacguuacaga

SEQ ID NO: 1309266 - RNA, 19 nt, Homo sapiens
  misc_RNA (1)...(19): siRNA sense strand
uggcaggacucacguuaca

SEQ ID NO: 1309267 - RNA, 19 nt, Homo sapiens
  misc_RNA (1)...(19): siRNA sense strand
guugcuauguggcagaaga

SEQ ID NO: 1309268 - RNA, 19 nt, Homo sapiens
  misc_RNA (1)...(19): siRNA sense strand
ucaagagaauuagcuaugc

SEQ ID NO: 1309269 - RNA, 19 nt, Homo sapiens
  misc_RNA (1)...(19): siRNA sense strand
caucauggacucccuagag

SEQ ID NO: 1309270 - RNA, 19 nt, Homo sapiens
  misc_RNA (1)...(19): siRNA sense strand
ggacgaccugcacaucaug

SEQ ID NO: 1309271 - RNA, 19 nt, Homo sapiens
  misc_RNA (1)...(19): siRNA sense strand
guacuccucguggacuuaa

SEQ ID NO: 1309272 - RNA, 19 nt, Homo sapiens
  misc_RNA (1)...(19): siRNA sense strand
ggcuuaagaccuucaacuu

SEQ ID NO: 1309273 - RNA, 19 nt, Homo sapiens
  misc_RNA (1)...(19): siRNA sense strand
gccuaaaugugcacagcau

SEQ ID NO: 1309274 - RNA, 19 nt, Homo sapiens
  misc_RNA (1)...(19): siRNA sense strand
ggcgcugggucucaaagug

SEQ ID NO: 1309275 - RNA, 19 nt, Homo sapiens
  misc_RNA (1)...(19): siRNA sense strand
gaacuucaagagaauuagc

SEQ ID NO: 1309276 - RNA, 19 nt, Homo sapiens
  misc_RNA (1)...(19): siRNA sense strand
ccacaaguuacuacuacau

SEQ ID NO: 1309277 - RNA, 19 nt, Homo sapiens
  misc_RNA (1)...(19): siRNA sense strand
cuauguggcagaagaacuu

SEQ ID NO: 1309278 - RNA, 19 nt, Homo sapiens
  misc_RNA (1)...(19): siRNA sense strand
ccaccggagacccacagua

SEQ ID NO: 1309279 - RNA, 19 nt, Homo sapiens
  misc_RNA (1)...(19): siRNA sense strand
ugacagagcuggcgcacua

SEQ ID NO: 1309280 - RNA, 19 nt, Homo sapiens
  misc_RNA (1)...(19): siRNA sense strand
agaauuagcuaugccaaga

SEQ ID NO: 1309281 - RNA, 19 nt, Homo sapiens
  misc_RNA (1)...(19): siRNA sense strand
ccucuaggcuuaagaccuu

SEQ ID NO: 1309282 - RNA, 19 nt, Homo sapiens
  misc_RNA (1)...(19): siRNA sense strand
ggacauacugcaccagguu

SEQ ID NO: 1309283 - RNA, 19 nt, Homo sapiens
  misc_RNA (1)...(19): siRNA sense strand
gcuuaagaccuucaacuug

SEQ ID NO: 1309284 - RNA, 19 nt, Homo sapiens
  misc_RNA (1)...(19): siRNA sense strand
guugcuauguggcagaaga

SEQ ID NO: 1309285 - RNA, 19 nt, Homo sapiens
  misc_RNA (1)...(19): siRNA sense strand
ucaagagaauuagcuaugc

SEQ ID NO: 1309286 - RNA, 19 nt, Homo sapiens
  misc_RNA (1)...(19): siRNA sense strand
caucauggacucccuagag

SEQ ID NO: 1309287 - RNA, 19 nt, Homo sapiens
  misc_RNA (1)...(19): siRNA sense strand
ggacgaccugcacaucaug

SEQ ID NO: 1309288 - RNA, 19 nt, Homo sapiens
  misc_RNA (1)...(19): siRNA sense strand
guacuccucguggacuuaa

SEQ ID NO: 1309289 - RNA, 19 nt, Homo sapiens
  misc_RNA (1)...(19): siRNA sense strand
ggcuuaagaccuucaacuu

SEQ ID NO: 1309290 - RNA, 19 nt, Homo sapiens
  misc_RNA (1)...(19): siRNA sense strand
ggcgcugggucucaaagug

SEQ ID NO: 1309291 - RNA, 19 nt, Homo sapiens
  misc_RNA (1)...(19): siRNA sense strand
gaacuucaagagaauuagc

SEQ ID NO: 1309292 - RNA, 19 nt, Homo sapiens
  misc_RNA (1)...(19): siRNA sense strand
ccacaaguuacuacuacau

SEQ ID NO: 1309293 - RNA, 19 nt, Homo sapiens
  misc_RNA (1)...(19): siRNA sense strand
cuauguggcagaagaacuu

SEQ ID NO: 1309294 - RNA, 19 nt, Homo sapiens
  misc_RNA (1)...(19): siRNA sense strand
ccaccggagacccacagua

SEQ ID NO: 1309295 - RNA, 19 nt, Homo sapiens
  misc_RNA (1)...(19): siRNA sense strand
gaagaucucugccuacaug

SEQ ID NO: 1309296 - RNA, 19 nt, Homo sapiens
  misc_RNA (1)...(19): siRNA sense strand
gaagauucguguggacauu

SEQ ID NO: 1309297 - RNA, 19 nt, Homo sapiens
  misc_RNA (1)...(19): siRNA sense strand
ggcaugaucugcuacaauc

SEQ ID NO: 1309298 - RNA, 19 nt, Homo sapiens
  misc_RNA (1)...(19): siRNA sense strand
cugcuacaauccagaauuu

SEQ ID NO: 1309299 - RNA, 19 nt, Homo sapiens
  misc_RNA (1)...(19): siRNA sense strand
caaaguacuuggaggaacu

SEQ ID NO: 1309300 - RNA, 19 nt, Homo sapiens
  misc_RNA (1)...(19): siRNA sense strand
ggccaugguuugcaggaaa

SEQ ID NO: 1309301 - RNA, 19 nt, Homo sapiens
  misc_RNA (1)...(19): siRNA sense strand
gcuacaauccagaauuuga

SEQ ID NO: 1309302 - RNA, 19 nt, Homo sapiens
  misc_RNA (1)...(19): siRNA sense strand
uugagaaacugaagccaaa

SEQ ID NO: 1309303 - RNA, 19 nt, Homo sapiens
  misc_RNA (1)...(19): siRNA sense strand
ggaacucccugaaaagcua

SEQ ID NO: 1309304 - RNA, 19 nt, Homo sapiens
  misc_RNA (1)...(19): siRNA sense strand
gggaagcggccaugguuug

SEQ ID NO: 1309305 - RNA, 19 nt, Homo sapiens
  misc_RNA (1)...(19): siRNA sense strand
ggccuggacuuucccaauc

SEQ ID NO: 1309306 - RNA, 19 nt, Homo sapiens
  misc_RNA (1)...(19): siRNA sense strand
gacagaagaggagaagauu

SEQ ID NO: 1309307 - RNA, 19 nt, Homo sapiens
  misc_RNA (1)...(19): siRNA sense strand
gaaacugaagccaaaguac

SEQ ID NO: 1309308 - RNA, 19 nt, Homo sapiens
  misc_RNA (1)...(19): siRNA sense strand
caauccagaauuugagaaa

SEQ ID NO: 1309309 - RNA, 19 nt, Homo sapiens
  misc_RNA (1)...(19): siRNA sense strand
agaaacugaagccaaagua

SEQ ID NO: 1309310 - RNA, 19 nt, Homo sapiens
  misc_RNA (1)...(19): siRNA sense strand
agacagaagaggagaagau

SEQ ID NO: 1309311 - RNA, 19 nt, Homo sapiens
  misc_RNA (1)...(19): siRNA sense strand
gagaaacugaagccaaagu

SEQ ID NO: 1309312 - RNA, 19 nt, Homo sapiens
  misc_RNA (1)...(19): siRNA sense strand
gaucucugccuacaugaag

SEQ ID NO: 1309313 - RNA, 19 nt, Homo sapiens
  misc_RNA (1)...(19): siRNA sense strand
caagcugggccuggacuuu

SEQ ID NO: 1309314 - RNA, 19 nt, Homo sapiens
  misc_RNA (1)...(19): siRNA sense strand
gggcaugaucugcuacaau

SEQ ID NO: 1309315 - RNA, 19 nt, Homo sapiens
  misc_RNA (1)...(19): siRNA sense strand
cagaagaggagaagauucg

SEQ ID NO: 1309316 - RNA, 19 nt, Homo sapiens
  misc_RNA (1)...(19): siRNA sense strand
ggagacagaagaggagaag

SEQ ID NO: 1309317 - RNA, 19 nt, Homo sapiens
  misc_RNA (1)...(19): siRNA sense strand
ccaaucugcccuacuugau

SEQ ID NO: 1309318 - RNA, 19 nt, Homo sapiens
  misc_RNA (1)...(19): siRNA sense strand
aaacugaagccaaaguacu

SEQ ID NO: 1309319 - RNA, 19 nt, Homo sapiens
  misc_RNA (1)...(19): siRNA sense strand
uucccaaucugcccuacuu

SEQ ID NO: 1309320 - RNA, 19 nt, Homo sapiens
  misc_RNA (1)...(19): siRNA sense strand
gaagaucucugccuacaug

SEQ ID NO: 1309321 - RNA, 19 nt, Homo sapiens
  misc_RNA (1)...(19): siRNA sense strand
caagaccuguguucucaaa

SEQ ID NO: 1309322 - RNA, 19 nt, Homo sapiens
  misc_RNA (1)...(19): siRNA sense strand
gaagauucguguggacauu

SEQ ID NO: 1309323 - RNA, 19 nt, Homo sapiens
  misc_RNA (1)...(19): siRNA sense strand
ggcaugaucugcuacaauc

SEQ ID NO: 1309324 - RNA, 19 nt, Homo sapiens
  misc_RNA (1)...(19): siRNA sense strand
cugcuacaauccagaauuu

SEQ ID NO: 1309325 - RNA, 19 nt, Homo sapiens
  misc_RNA (1)...(19): siRNA sense strand
caaaguacuuggaggaacu

SEQ ID NO: 1309326 - RNA, 19 nt, Homo sapiens
  misc_RNA (1)...(19): siRNA sense strand
ggccaugguuugcaggaaa

SEQ ID NO: 1309327 - RNA, 19 nt, Homo sapiens
  misc_RNA (1)...(19): siRNA sense strand
gcuacaauccagaauuuga

SEQ ID NO: 1309328 - RNA, 19 nt, Homo sapiens
  misc_RNA (1)...(19): siRNA sense strand
uugagaaacugaagccaaa

SEQ ID NO: 1309329 - RNA, 19 nt, Homo sapiens
  misc_RNA (1)...(19): siRNA sense strand
ggaacucccugaaaagcua

SEQ ID NO: 1309330 - RNA, 19 nt, Homo sapiens
  misc_RNA (1)...(19): siRNA sense strand
agaccuguguucucaaaga

SEQ ID NO: 1309331 - RNA, 19 nt, Homo sapiens
  misc_RNA (1)...(19): siRNA sense strand
gggaagcggccaugguuug

SEQ ID NO: 1309332 - RNA, 19 nt, Homo sapiens
  misc_RNA (1)...(19): siRNA sense strand
ggccuggacuuucccaauc

SEQ ID NO: 1309333 - RNA, 19 nt, Homo sapiens
  misc_RNA (1)...(19): siRNA sense strand
cccaagaccuguguucuca

SEQ ID NO: 1309334 - RNA, 19 nt, Homo sapiens
  misc_RNA (1)...(19): siRNA sense strand
gacagaagaggagaagauu

SEQ ID NO: 1309335 - RNA, 19 nt, Homo sapiens
  misc_RNA (1)...(19): siRNA sense strand
gaccuguguucucaaagau

SEQ ID NO: 1309336 - RNA, 19 nt, Homo sapiens
  misc_RNA (1)...(19): siRNA sense strand
gaaacugaagccaaaguac

SEQ ID NO: 1309337 - RNA, 19 nt, Homo sapiens
  misc_RNA (1)...(19): siRNA sense strand
caauccagaauuugagaaa

SEQ ID NO: 1309338 - RNA, 19 nt, Homo sapiens
  misc_RNA (1)...(19): siRNA sense strand
agaaacugaagccaaagua

SEQ ID NO: 1309339 - RNA, 19 nt, Homo sapiens
  misc_RNA (1)...(19): siRNA sense strand
agacagaagaggagaagau

SEQ ID NO: 1309340 - RNA, 19 nt, Homo sapiens
  misc_RNA (1)...(19): siRNA sense strand
gagaaacugaagccaaagu

SEQ ID NO: 1309341 - RNA, 19 nt, Homo sapiens
  misc_RNA (1)...(19): siRNA sense strand
gaucucugccuacaugaag

SEQ ID NO: 1309342 - RNA, 19 nt, Homo sapiens
  misc_RNA (1)...(19): siRNA sense strand
gggcaugaucugcuacaau

SEQ ID NO: 1309343 - RNA, 19 nt, Homo sapiens
  misc_RNA (1)...(19): siRNA sense strand
caagcugggccuggacuuu

SEQ ID NO: 1309344 - RNA, 19 nt, Homo sapiens
  misc_RNA (1)...(19): siRNA sense strand
cagaagaggagaagauucg

SEQ ID NO: 1309345 - RNA, 19 nt, Homo sapiens
  misc_RNA (1)...(19): siRNA sense strand
ggagacagaagaggagaag

SEQ ID NO: 1309346 - RNA, 19 nt, Homo sapiens
  misc_RNA (1)...(19): siRNA sense strand
ccaaucugcccuacuugau

SEQ ID NO: 1309347 - RNA, 19 nt, Homo sapiens
  misc_RNA (1)...(19): siRNA sense strand
aaacugaagccaaaguacu

SEQ ID NO: 1309348 - RNA, 19 nt, Homo sapiens
  misc_RNA (1)...(19): siRNA sense strand
uucccaaucugcccuacuu

SEQ ID NO: 1309349 - RNA, 19 nt, Homo sapiens
  misc_RNA (1)...(19): siRNA sense strand
ggaagcagcucgagagugu

SEQ ID NO: 1309350 - RNA, 19 nt, Homo sapiens
  misc_RNA (1)...(19): siRNA sense strand
caauacagcuggcuaacaa

SEQ ID NO: 1309351 - RNA, 19 nt, Homo sapiens
  misc_RNA (1)...(19): siRNA sense strand
guacaaacauaccagauuc

SEQ ID NO: 1309352 - RNA, 19 nt, Homo sapiens
  misc_RNA (1)...(19): siRNA sense strand
gaguggagaugcagcugua

SEQ ID NO: 1309353 - RNA, 19 nt, Homo sapiens
  misc_RNA (1)...(19): siRNA sense strand
ugacuuaucuucugaugca

SEQ ID NO: 1309354 - RNA, 19 nt, Homo sapiens
  misc_RNA (1)...(19): siRNA sense strand
cugcaaacauuaaccauga

SEQ ID NO: 1309355 - RNA, 19 nt, Homo sapiens
  misc_RNA (1)...(19): siRNA sense strand
gaagaagcagcacgaaaga

SEQ ID NO: 1309356 - RNA, 19 nt, Homo sapiens
  misc_RNA (1)...(19): siRNA sense strand
ucaaguccauggagucauu

SEQ ID NO: 1309357 - RNA, 19 nt, Homo sapiens
  misc_RNA (1)...(19): siRNA sense strand
ugaaugacuuaucuucuga

SEQ ID NO: 1309358 - RNA, 19 nt, Homo sapiens
  misc_RNA (1)...(19): siRNA sense strand
gcucgagagugucguagaa

SEQ ID NO: 1309359 - RNA, 19 nt, Homo sapiens
  misc_RNA (1)...(19): siRNA sense strand
gacaguauauugccauuac

SEQ ID NO: 1309360 - RNA, 19 nt, Homo sapiens
  misc_RNA (1)...(19): siRNA sense strand
gcagacaguucaaguccau

SEQ ID NO: 1309361 - RNA, 19 nt, Homo sapiens
  misc_RNA (1)...(19): siRNA sense strand
ucacaggagucaguggaua

SEQ ID NO: 1309362 - RNA, 19 nt, Homo sapiens
  misc_RNA (1)...(19): siRNA sense strand
gauuucaacuauugcagaa

SEQ ID NO: 1309363 - RNA, 19 nt, Homo sapiens
  misc_RNA (1)...(19): siRNA sense strand
gccagcagcucaugcaaca

SEQ ID NO: 1309364 - RNA, 19 nt, Homo sapiens
  misc_RNA (1)...(19): siRNA sense strand
gaccuuuacugccacaaau

SEQ ID NO: 1309365 - RNA, 19 nt, Homo sapiens
  misc_RNA (1)...(19): siRNA sense strand
agagagguccgucuaauga

SEQ ID NO: 1309366 - RNA, 19 nt, Homo sapiens
  misc_RNA (1)...(19): siRNA sense strand
gccacagauugccacauua

SEQ ID NO: 1309367 - RNA, 19 nt, Homo sapiens
  misc_RNA (1)...(19): siRNA sense strand
gagcaauacagcuggcuaa

SEQ ID NO: 1309368 - RNA, 19 nt, Homo sapiens
  misc_RNA (1)...(19): siRNA sense strand
cuggagacguacaaacaua

SEQ ID NO: 1309369 - RNA, 19 nt, Homo sapiens
  misc_RNA (1)...(19): siRNA sense strand
ccacaaguccaaacaguuc

SEQ ID NO: 1309370 - RNA, 19 nt, Homo sapiens
  misc_RNA (1)...(19): siRNA sense strand
ggacaguauauugccauua

SEQ ID NO: 1309371 - RNA, 19 nt, Homo sapiens
  misc_RNA (1)...(19): siRNA sense strand
gagagagguccgucuaaug

SEQ ID NO: 1309372 - RNA, 19 nt, Homo sapiens
  misc_RNA (1)...(19): siRNA sense strand
uaguacagcugcccaaugg

SEQ ID NO: 1309373 - RNA, 19 nt, Homo sapiens
  misc_RNA (1)...(19): siRNA sense strand
caacuccaauuuaccaaac

SEQ ID NO: 1309374 - RNA, 19 nt, Homo sapiens
  misc_RNA (1)...(19): siRNA sense strand
ugccaaggauugaagaaga

SEQ ID NO: 1309375 - RNA, 19 nt, Homo sapiens
  misc_RNA (1)...(19): siRNA sense strand
ugaagaagcagcacgaaag

SEQ ID NO: 1309376 - RNA, 19 nt, Homo sapiens
  misc_RNA (1)...(19): siRNA sense strand
gagagugucguagaaagaa

SEQ ID NO: 1309377 - RNA, 19 nt, Homo sapiens
  misc_RNA (1)...(19): siRNA sense strand
caccguaacucuaguacag

SEQ ID NO: 1309378 - RNA, 19 nt, Homo sapiens
  misc_RNA (1)...(19): siRNA sense strand
aaagagagagguccgucua

SEQ ID NO: 1309379 - RNA, 19 nt, Homo sapiens
  misc_RNA (1)...(19): siRNA sense strand
ggagucaguggauagugua

SEQ ID NO: 1309380 - RNA, 19 nt, Homo sapiens
  misc_RNA (1)...(19): siRNA sense strand
gcccagccaucaguuauuc

SEQ ID NO: 1309381 - RNA, 19 nt, Homo sapiens
  misc_RNA (1)...(19): siRNA sense strand
aagaagagaagucugaaga

SEQ ID NO: 1309382 - RNA, 19 nt, Homo sapiens
  misc_RNA (1)...(19): siRNA sense strand
agccacagauugccacauu

SEQ ID NO: 1309383 - RNA, 19 nt, Homo sapiens
  misc_RNA (1)...(19): siRNA sense strand
ccaaugggcagacaguuca

SEQ ID NO: 1309384 - RNA, 19 nt, Homo sapiens
  misc_RNA (1)...(19): siRNA sense strand
ggaccuuuacugccacaaa

SEQ ID NO: 1309385 - RNA, 19 nt, Homo sapiens
  misc_RNA (1)...(19): siRNA sense strand
agagagagguccgucuaau

SEQ ID NO: 1309386 - RNA, 19 nt, Homo sapiens
  misc_RNA (1)...(19): siRNA sense strand
guggauaguguaacugauu

SEQ ID NO: 1309387 - RNA, 19 nt, Homo sapiens
  misc_RNA (1)...(19): siRNA sense strand
caacuauugcagaaaguga

SEQ ID NO: 1309388 - RNA, 19 nt, Homo sapiens
  misc_RNA (1)...(19): siRNA sense strand
gcaauacagcuggcuaaca

SEQ ID NO: 1309389 - RNA, 19 nt, Homo sapiens
  misc_RNA (1)...(19): siRNA sense strand
caacaaaugacaguucaag

SEQ ID NO: 1309390 - RNA, 19 nt, Homo sapiens
  misc_RNA (1)...(19): siRNA sense strand
agaagcagcacgaaagaga

SEQ ID NO: 1309391 - RNA, 19 nt, Homo sapiens
  misc_RNA (1)...(19): siRNA sense strand
guuauucagucuccacaag

SEQ ID NO: 1309392 - RNA, 19 nt, Homo sapiens
  misc_RNA (1)...(19): siRNA sense strand
gacauugauugaggagcua

SEQ ID NO: 1309393 - RNA, 19 nt, Homo sapiens
  misc_RNA (1)...(19): siRNA sense strand
aaacagaguggcagugcuu

SEQ ID NO: 1309394 - RNA, 19 nt, Homo sapiens
  misc_RNA (1)...(19): siRNA sense strand
gcugaaaaccaacaaauga

SEQ ID NO: 1309395 - RNA, 19 nt, Homo sapiens
  misc_RNA (1)...(19): siRNA sense strand
ggugccaacuccaauuuac

SEQ ID NO: 1309396 - RNA, 19 nt, Homo sapiens
  misc_RNA (1)...(19): siRNA sense strand
ccacagauugccacauuag

SEQ ID NO: 1309397 - RNA, 19 nt, Homo sapiens
  misc_RNA (1)...(19): siRNA sense strand
gcacccacuagcacuauug

SEQ ID NO: 1309398 - RNA, 19 nt, Homo sapiens
  misc_RNA (1)...(19): siRNA sense strand
gaagaagagaagucugaag

SEQ ID NO: 1309399 - RNA, 19 nt, Homo sapiens
  misc_RNA (1)...(19): siRNA sense strand
uugaaugacuuaucuucug

SEQ ID NO: 1309400 - RNA, 19 nt, Homo sapiens
  misc_RNA (1)...(19): siRNA sense strand
aagcgaagggaaauucuuu

SEQ ID NO: 1309401 - RNA, 19 nt, Homo sapiens
  misc_RNA (1)...(19): siRNA sense strand
cguacaaacauaccagauu

SEQ ID NO: 1309402 - RNA, 19 nt, Homo sapiens
  misc_RNA (1)...(19): siRNA sense strand
gagagguccgucuaaugaa

SEQ ID NO: 1309403 - RNA, 19 nt, Homo sapiens
  misc_RNA (1)...(19): siRNA sense strand
gccaaggauugaagaagag

SEQ ID NO: 1309404 - RNA, 19 nt, Homo sapiens
  misc_RNA (1)...(19): siRNA sense strand
cgagagugucguagaaaga

SEQ ID NO: 1309405 - RNA, 19 nt, Homo sapiens
  misc_RNA (1)...(19): siRNA sense strand
caaacuagcaguggacagu

SEQ ID NO: 1309406 - RNA, 19 nt, Homo sapiens
  misc_RNA (1)...(19): siRNA sense strand
aaacauuaaccaugaccaa

SEQ ID NO: 1309407 - RNA, 19 nt, Homo sapiens
  misc_RNA (1)...(19): siRNA sense strand
ccaggagugccaaggauug

SEQ ID NO: 1309408 - RNA, 19 nt, Homo sapiens
  misc_RNA (1)...(19): siRNA sense strand
caaaacaagacauugauug

SEQ ID NO: 1309409 - RNA, 19 nt, Homo sapiens
  misc_RNA (1)...(19): siRNA sense strand
gcagcucgagagugucgua

SEQ ID NO: 1309410 - RNA, 19 nt, Homo sapiens
  misc_RNA (1)...(19): siRNA sense strand
gcaguggacaguauauugc

SEQ ID NO: 1309411 - RNA, 19 nt, Homo sapiens
  misc_RNA (1)...(19): siRNA sense strand
caccaggagugccaaggau

SEQ ID NO: 1309412 - RNA, 19 nt, Homo sapiens
  misc_RNA (1)...(19): siRNA sense strand
ccaaguuguuguucaagcu

SEQ ID NO: 1309413 - RNA, 19 nt, Homo sapiens
  misc_RNA (1)...(19): siRNA sense strand
guucaagcccagccacaga

SEQ ID NO: 1309414 - RNA, 19 nt, Homo sapiens
  misc_RNA (1)...(19): siRNA sense strand
cacauuagcccagguaucu

SEQ ID NO: 1309415 - RNA, 19 nt, Homo sapiens
  misc_RNA (1)...(19): siRNA sense strand
cagcagcucaugcaacauc

SEQ ID NO: 1309416 - RNA, 19 nt, Homo sapiens
  misc_RNA (1)...(19): siRNA sense strand
ugauggacagcagaucuua

SEQ ID NO: 1309417 - RNA, 19 nt, Homo sapiens
  misc_RNA (1)...(19): siRNA sense strand
caccugccaucaccacugu

SEQ ID NO: 1309418 - RNA, 19 nt, Homo sapiens
  misc_RNA (1)...(19): siRNA sense strand
uggauaguguaacugauuc

SEQ ID NO: 1309419 - RNA, 19 nt, Homo sapiens
  misc_RNA (1)...(19): siRNA sense strand
uaacggugccaacuccaau

SEQ ID NO: 1309420 - RNA, 19 nt, Homo sapiens
  misc_RNA (1)...(19): siRNA sense strand
ccaacuccaauuuaccaaa

SEQ ID NO: 1309421 - RNA, 19 nt, Homo sapiens
  misc_RNA (1)...(19): siRNA sense strand
uggcagugcuugaaaauca

SEQ ID NO: 1309422 - RNA, 19 nt, Homo sapiens
  misc_RNA (1)...(19): siRNA sense strand
gagguccgucuaaugaaga

SEQ ID NO: 1309423 - RNA, 19 nt, Homo sapiens
  misc_RNA (1)...(19): siRNA sense strand
agagguccgucuaaugaag

SEQ ID NO: 1309424 - RNA, 19 nt, Homo sapiens
  misc_RNA (1)...(19): siRNA sense strand
cauuagcccagguaucuau

SEQ ID NO: 1309425 - RNA, 19 nt, Homo sapiens
  misc_RNA (1)...(19): siRNA sense strand
acuccaauuuaccaaacua

SEQ ID NO: 1309426 - RNA, 19 nt, Homo sapiens
  misc_RNA (1)...(19): siRNA sense strand
gccaucaguuauucagucu

SEQ ID NO: 1309427 - RNA, 19 nt, Homo sapiens
  misc_RNA (1)...(19): siRNA sense strand
ccacucagccggguacuac

SEQ ID NO: 1309428 - RNA, 19 nt, Homo sapiens
  misc_RNA (1)...(19): siRNA sense strand
aaacuagcaguggacagua

SEQ ID NO: 1309429 - RNA, 19 nt, Homo sapiens
  misc_RNA (1)...(19): siRNA sense strand
ccaauuuaccaaacuagca

SEQ ID NO: 1309430 - RNA, 19 nt, Homo sapiens
  misc_RNA (1)...(19): siRNA sense strand
uugaagaagagaagucuga

SEQ ID NO: 1309431 - RNA, 19 nt, Homo sapiens
  misc_RNA (1)...(19): siRNA sense strand
aacagaagcugaaaaccaa

SEQ ID NO: 1309432 - RNA, 19 nt, Homo sapiens
  misc_RNA (1)...(19): siRNA sense strand
aggagucaguggauagugu

SEQ ID NO: 1309433 - RNA, 19 nt, Homo sapiens
  misc_RNA (1)...(19): siRNA sense strand
guaacggugccaacuccaa

SEQ ID NO: 1309434 - RNA, 19 nt, Homo sapiens
  misc_RNA (1)...(19): siRNA sense strand
ggagugccaaggauugaag

SEQ ID NO: 1309435 - RNA, 19 nt, Homo sapiens
  misc_RNA (1)...(19): siRNA sense strand
gucaguggauaguguaacu

SEQ ID NO: 1309436 - RNA, 19 nt, Homo sapiens
  misc_RNA (1)...(19): siRNA sense strand
cagaguggcagugcuugaa

SEQ ID NO: 1309437 - RNA, 19 nt, Homo sapiens
  misc_RNA (1)...(19): siRNA sense strand
accaacaaaugacaguuca

SEQ ID NO: 1309438 - RNA, 19 nt, Homo sapiens
  misc_RNA (1)...(19): siRNA sense strand
ucgagagugucguagaaag

SEQ ID NO: 1309439 - RNA, 19 nt, Homo sapiens
  misc_RNA (1)...(19): siRNA sense strand
ggauugaagaagagaaguc

SEQ ID NO: 1309440 - RNA, 19 nt, Homo sapiens
  misc_RNA (1)...(19): siRNA sense strand
aaugacuuaucuucugaug

SEQ ID NO: 1309441 - RNA, 19 nt, Homo sapiens
  misc_RNA (1)...(19): siRNA sense strand
aaacaagacauugauugag

SEQ ID NO: 1309442 - RNA, 19 nt, Homo sapiens
  misc_RNA (1)...(19): siRNA sense strand
gaguggcagugcuugaaaa

SEQ ID NO: 1309443 - RNA, 19 nt, Homo sapiens
  misc_RNA (1)...(19): siRNA sense strand
aagagagagguccgucuaa

SEQ ID NO: 1309444 - RNA, 19 nt, Homo sapiens
  misc_RNA (1)...(19): siRNA sense strand
ccaaugcagcagccacuca

SEQ ID NO: 1309445 - RNA, 19 nt, Homo sapiens
  misc_RNA (1)...(19): siRNA sense strand
ggaagcagcucgagagugu

SEQ ID NO: 1309446 - RNA, 19 nt, Homo sapiens
  misc_RNA (1)...(19): siRNA sense strand
caauacagcuggcuaacaa

SEQ ID NO: 1309447 - RNA, 19 nt, Homo sapiens
  misc_RNA (1)...(19): siRNA sense strand
guacaaacauaccagauuc

SEQ ID NO: 1309448 - RNA, 19 nt, Homo sapiens
  misc_RNA (1)...(19): siRNA sense strand
gaguggagaugcagcugua

SEQ ID NO: 1309449 - RNA, 19 nt, Homo sapiens
  misc_RNA (1)...(19): siRNA sense strand
ugacuuaucuucugaugca

SEQ ID NO: 1309450 - RNA, 19 nt, Homo sapiens
  misc_RNA (1)...(19): siRNA sense strand
cugcaaacauuaaccauga

SEQ ID NO: 1309451 - RNA, 19 nt, Homo sapiens
  misc_RNA (1)...(19): siRNA sense strand
gaagaagcagcacgaaaga

SEQ ID NO: 1309452 - RNA, 19 nt, Homo sapiens
  misc_RNA (1)...(19): siRNA sense strand
ucaaguccauggagucauu

SEQ ID NO: 1309453 - RNA, 19 nt, Homo sapiens
  misc_RNA (1)...(19): siRNA sense strand
ugaaugacuuaucuucuga

SEQ ID NO: 1309454 - RNA, 19 nt, Homo sapiens
  misc_RNA (1)...(19): siRNA sense strand
gcucgagagugucguagaa

SEQ ID NO: 1309455 - RNA, 19 nt, Homo sapiens
  misc_RNA (1)...(19): siRNA sense strand
gacaguauauugccauuac

SEQ ID NO: 1309456 - RNA, 19 nt, Homo sapiens
  misc_RNA (1)...(19): siRNA sense strand
gcagacaguucaaguccau

SEQ ID NO: 1309457 - RNA, 19 nt, Homo sapiens
  misc_RNA (1)...(19): siRNA sense strand
ucacaggagucaguggaua

SEQ ID NO: 1309458 - RNA, 19 nt, Homo sapiens
  misc_RNA (1)...(19): siRNA sense strand
gauuucaacuauugcagaa

SEQ ID NO: 1309459 - RNA, 19 nt, Homo sapiens
  misc_RNA (1)...(19): siRNA sense strand
gccagcagcucaugcaaca

SEQ ID NO: 1309460 - RNA, 19 nt, Homo sapiens
  misc_RNA (1)...(19): siRNA sense strand
gaccuuuacugccacaaau

SEQ ID NO: 1309461 - RNA, 19 nt, Homo sapiens
  misc_RNA (1)...(19): siRNA sense strand
agagagguccgucuaauga

SEQ ID NO: 1309462 - RNA, 19 nt, Homo sapiens
  misc_RNA (1)...(19): siRNA sense strand
gccacagauugccacauua

SEQ ID NO: 1309463 - RNA, 19 nt, Homo sapiens
  misc_RNA (1)...(19): siRNA sense strand
gagcaauacagcuggcuaa

SEQ ID NO: 1309464 - RNA, 19 nt, Homo sapiens
  misc_RNA (1)...(19): siRNA sense strand
cuggagacguacaaacaua

SEQ ID NO: 1309465 - RNA, 19 nt, Homo sapiens
  misc_RNA (1)...(19): siRNA sense strand
ccacaaguccaaacaguuc

SEQ ID NO: 1309466 - RNA, 19 nt, Homo sapiens
  misc_RNA (1)...(19): siRNA sense strand
ggacaguauauugccauua

SEQ ID NO: 1309467 - RNA, 19 nt, Homo sapiens
  misc_RNA (1)...(19): siRNA sense strand
gagagagguccgucuaaug

SEQ ID NO: 1309468 - RNA, 19 nt, Homo sapiens
  misc_RNA (1)...(19): siRNA sense strand
uaguacagcugcccaaugg

SEQ ID NO: 1309469 - RNA, 19 nt, Homo sapiens
  misc_RNA (1)...(19): siRNA sense strand
caacuccaauuuaccaaac

SEQ ID NO: 1309470 - RNA, 19 nt, Homo sapiens
  misc_RNA (1)...(19): siRNA sense strand
ugccaaggauugaagaaga

SEQ ID NO: 1309471 - RNA, 19 nt, Homo sapiens
  misc_RNA (1)...(19): siRNA sense strand
ugaagaagcagcacgaaag

SEQ ID NO: 1309472 - RNA, 19 nt, Homo sapiens
  misc_RNA (1)...(19): siRNA sense strand
gagagugucguagaaagaa

SEQ ID NO: 1309473 - RNA, 19 nt, Homo sapiens
  misc_RNA (1)...(19): siRNA sense strand
caccguaacucuaguacag

SEQ ID NO: 1309474 - RNA, 19 nt, Homo sapiens
  misc_RNA (1)...(19): siRNA sense strand
aaagagagagguccgucua

SEQ ID NO: 1309475 - RNA, 19 nt, Homo sapiens
  misc_RNA (1)...(19): siRNA sense strand
ggagucaguggauagugua

SEQ ID NO: 1309476 - RNA, 19 nt, Homo sapiens
  misc_RNA (1)...(19): siRNA sense strand
gcccagccaucaguuauuc

SEQ ID NO: 1309477 - RNA, 19 nt, Homo sapiens
  misc_RNA (1)...(19): siRNA sense strand
aagaagagaagucugaaga

SEQ ID NO: 1309478 - RNA, 19 nt, Homo sapiens
  misc_RNA (1)...(19): siRNA sense strand
agccacagauugccacauu

SEQ ID NO: 1309479 - RNA, 19 nt, Homo sapiens
  misc_RNA (1)...(19): siRNA sense strand
ccaaugggcagacaguuca

SEQ ID NO: 1309480 - RNA, 19 nt, Homo sapiens
  misc_RNA (1)...(19): siRNA sense strand
ggaccuuuacugccacaaa

SEQ ID NO: 1309481 - RNA, 19 nt, Homo sapiens
  misc_RNA (1)...(19): siRNA sense strand
agagagagguccgucuaau

SEQ ID NO: 1309482 - RNA, 19 nt, Homo sapiens
  misc_RNA (1)...(19): siRNA sense strand
guggauaguguaacugauu

SEQ ID NO: 1309483 - RNA, 19 nt, Homo sapiens
  misc_RNA (1)...(19): siRNA sense strand
caacuauugcagaaaguga

SEQ ID NO: 1309484 - RNA, 19 nt, Homo sapiens
  misc_RNA (1)...(19): siRNA sense strand
gcaauacagcuggcuaaca

SEQ ID NO: 1309485 - RNA, 19 nt, Homo sapiens
  misc_RNA (1)...(19): siRNA sense strand
caacaaaugacaguucaag

SEQ ID NO: 1309486 - RNA, 19 nt, Homo sapiens
  misc_RNA (1)...(19): siRNA sense strand
agaagcagcacgaaagaga

SEQ ID NO: 1309487 - RNA, 19 nt, Homo sapiens
  misc_RNA (1)...(19): siRNA sense strand
guuauucagucuccacaag

SEQ ID NO: 1309488 - RNA, 19 nt, Homo sapiens
  misc_RNA (1)...(19): siRNA sense strand
gacauugauugaggagcua

SEQ ID NO: 1309489 - RNA, 19 nt, Homo sapiens
  misc_RNA (1)...(19): siRNA sense strand
aaacagaguggcagugcuu

SEQ ID NO: 1309490 - RNA, 19 nt, Homo sapiens
  misc_RNA (1)...(19): siRNA sense strand
gcugaaaaccaacaaauga

SEQ ID NO: 1309491 - RNA, 19 nt, Homo sapiens
  misc_RNA (1)...(19): siRNA sense strand
ggugccaacuccaauuuac

SEQ ID NO: 1309492 - RNA, 19 nt, Homo sapiens
  misc_RNA (1)...(19): siRNA sense strand
ccacagauugccacauuag

SEQ ID NO: 1309493 - RNA, 19 nt, Homo sapiens
  misc_RNA (1)...(19): siRNA sense strand
gcacccacuagcacuauug

SEQ ID NO: 1309494 - RNA, 19 nt, Homo sapiens
  misc_RNA (1)...(19): siRNA sense strand
gaagaagagaagucugaag

SEQ ID NO: 1309495 - RNA, 19 nt, Homo sapiens
  misc_RNA (1)...(19): siRNA sense strand
uugaaugacuuaucuucug

SEQ ID NO: 1309496 - RNA, 19 nt, Homo sapiens
  misc_RNA (1)...(19): siRNA sense strand
aagcgaagggaaauucuuu

SEQ ID NO: 1309497 - RNA, 19 nt, Homo sapiens
  misc_RNA (1)...(19): siRNA sense strand
cguacaaacauaccagauu

SEQ ID NO: 1309498 - RNA, 19 nt, Homo sapiens
  misc_RNA (1)...(19): siRNA sense strand
gagagguccgucuaaugaa

SEQ ID NO: 1309499 - RNA, 19 nt, Homo sapiens
  misc_RNA (1)...(19): siRNA sense strand
gccaaggauugaagaagag

SEQ ID NO: 1309500 - RNA, 19 nt, Homo sapiens
  misc_RNA (1)...(19): siRNA sense strand
cgagagugucguagaaaga

SEQ ID NO: 1309501 - RNA, 19 nt, Homo sapiens
  misc_RNA (1)...(19): siRNA sense strand
caaacuagcaguggacagu

SEQ ID NO: 1309502 - RNA, 19 nt, Homo sapiens
  misc_RNA (1)...(19): siRNA sense strand
aaacauuaaccaugaccaa

SEQ ID NO: 1309503 - RNA, 19 nt, Homo sapiens
  misc_RNA (1)...(19): siRNA sense strand
ccaggagugccaaggauug

SEQ ID NO: 1309504 - RNA, 19 nt, Homo sapiens
  misc_RNA (1)...(19): siRNA sense strand
caaaacaagacauugauug

SEQ ID NO: 1309505 - RNA, 19 nt, Homo sapiens
  misc_RNA (1)...(19): siRNA sense strand
gcagcucgagagugucgua

SEQ ID NO: 1309506 - RNA, 19 nt, Homo sapiens
  misc_RNA (1)...(19): siRNA sense strand
gcaguggacaguauauugc

SEQ ID NO: 1309507 - RNA, 19 nt, Homo sapiens
  misc_RNA (1)...(19): siRNA sense strand
caccaggagugccaaggau

SEQ ID NO: 1309508 - RNA, 19 nt, Homo sapiens
  misc_RNA (1)...(19): siRNA sense strand
ccaaguuguuguucaagcu

SEQ ID NO: 1309509 - RNA, 19 nt, Homo sapiens
  misc_RNA (1)...(19): siRNA sense strand
guucaagcccagccacaga

SEQ ID NO: 1309510 - RNA, 19 nt, Homo sapiens
  misc_RNA (1)...(19): siRNA sense strand
cacauuagcccagguaucu

SEQ ID NO: 1309511 - RNA, 19 nt, Homo sapiens
  misc_RNA (1)...(19): siRNA sense strand
cagcagcucaugcaacauc

SEQ ID NO: 1309512 - RNA, 19 nt, Homo sapiens
  misc_RNA (1)...(19): siRNA sense strand
ugauggacagcagaucuua

SEQ ID NO: 1309513 - RNA, 19 nt, Homo sapiens
  misc_RNA (1)...(19): siRNA sense strand
caccugccaucaccacugu

SEQ ID NO: 1309514 - RNA, 19 nt, Homo sapiens
  misc_RNA (1)...(19): siRNA sense strand
uggauaguguaacugauuc

SEQ ID NO: 1309515 - RNA, 19 nt, Homo sapiens
  misc_RNA (1)...(19): siRNA sense strand
uaacggugccaacuccaau

SEQ ID NO: 1309516 - RNA, 19 nt, Homo sapiens
  misc_RNA (1)...(19): siRNA sense strand
ccaacuccaauuuaccaaa

SEQ ID NO: 1309517 - RNA, 19 nt, Homo sapiens
  misc_RNA (1)...(19): siRNA sense strand
uggcagugcuugaaaauca

SEQ ID NO: 1309518 - RNA, 19 nt, Homo sapiens
  misc_RNA (1)...(19): siRNA sense strand
gagguccgucuaaugaaga

SEQ ID NO: 1309519 - RNA, 19 nt, Homo sapiens
  misc_RNA (1)...(19): siRNA sense strand
agagguccgucuaaugaag

SEQ ID NO: 1309520 - RNA, 19 nt, Homo sapiens
  misc_RNA (1)...(19): siRNA sense strand
cauuagcccagguaucuau

SEQ ID NO: 1309521 - RNA, 19 nt, Homo sapiens
  misc_RNA (1)...(19): siRNA sense strand
acuccaauuuaccaaacua

SEQ ID NO: 1309522 - RNA, 19 nt, Homo sapiens
  misc_RNA (1)...(19): siRNA sense strand
gccaucaguuauucagucu

SEQ ID NO: 1309523 - RNA, 19 nt, Homo sapiens
  misc_RNA (1)...(19): siRNA sense strand
ccacucagccggguacuac

SEQ ID NO: 1309524 - RNA, 19 nt, Homo sapiens
  misc_RNA (1)...(19): siRNA sense strand
aaacuagcaguggacagua

SEQ ID NO: 1309525 - RNA, 19 nt, Homo sapiens
  misc_RNA (1)...(19): siRNA sense strand
ccaauuuaccaaacuagca

SEQ ID NO: 1309526 - RNA, 19 nt, Homo sapiens
  misc_RNA (1)...(19): siRNA sense strand
uugaagaagagaagucuga

SEQ ID NO: 1309527 - RNA, 19 nt, Homo sapiens
  misc_RNA (1)...(19): siRNA sense strand
aacagaagcugaaaaccaa

SEQ ID NO: 1309528 - RNA, 19 nt, Homo sapiens
  misc_RNA (1)...(19): siRNA sense strand
aggagucaguggauagugu

SEQ ID NO: 1309529 - RNA, 19 nt, Homo sapiens
  misc_RNA (1)...(19): siRNA sense strand
guaacggugccaacuccaa

SEQ ID NO: 1309530 - RNA, 19 nt, Homo sapiens
  misc_RNA (1)...(19): siRNA sense strand
ggagugccaaggauugaag

SEQ ID NO: 1309531 - RNA, 19 nt, Homo sapiens
  misc_RNA (1)...(19): siRNA sense strand
gucaguggauaguguaacu

SEQ ID NO: 1309532 - RNA, 19 nt, Homo sapiens
  misc_RNA (1)...(19): siRNA sense strand
cagaguggcagugcuugaa

SEQ ID NO: 1309533 - RNA, 19 nt, Homo sapiens
  misc_RNA (1)...(19): siRNA sense strand
accaacaaaugacaguuca

SEQ ID NO: 1309534 - RNA, 19 nt, Homo sapiens
  misc_RNA (1)...(19): siRNA sense strand
ucgagagugucguagaaag

SEQ ID NO: 1309535 - RNA, 19 nt, Homo sapiens
  misc_RNA (1)...(19): siRNA sense strand
ggauugaagaagagaaguc

SEQ ID NO: 1309536 - RNA, 19 nt, Homo sapiens
  misc_RNA (1)...(19): siRNA sense strand
aaugacuuaucuucugaug

SEQ ID NO: 1309537 - RNA, 19 nt, Homo sapiens
  misc_RNA (1)...(19): siRNA sense strand
aaacaagacauugauugag

SEQ ID NO: 1309538 - RNA, 19 nt, Homo sapiens
  misc_RNA (1)...(19): siRNA sense strand
gaguggcagugcuugaaaa

SEQ ID NO: 1309539 - RNA, 19 nt, Homo sapiens
  misc_RNA (1)...(19): siRNA sense strand
aagagagagguccgucuaa

SEQ ID NO: 1309540 - RNA, 19 nt, Homo sapiens
  misc_RNA (1)...(19): siRNA sense strand
ccaaugcagcagccacuca

SEQ ID NO: 1309541 - RNA, 19 nt, Homo sapiens
  misc_RNA (1)...(19): siRNA sense strand
aaacaaaggugccaugaug

SEQ ID NO: 1309542 - RNA, 19 nt, Homo sapiens
  misc_RNA (1)...(19): siRNA sense strand
gaucuagccuccaucauga

SEQ ID NO: 1309543 - RNA, 19 nt, Homo sapiens
  misc_RNA (1)...(19): siRNA sense strand
gaucucagcaggccuauaa

SEQ ID NO: 1309544 - RNA, 19 nt, Homo sapiens
  misc_RNA (1)...(19): siRNA sense strand
gcaaacgaccaucagcaua

SEQ ID NO: 1309545 - RNA, 19 nt, Homo sapiens
  misc_RNA (1)...(19): siRNA sense strand
gccaggagcuacucaggaa

SEQ ID NO: 1309546 - RNA, 19 nt, Homo sapiens
  misc_RNA (1)...(19): siRNA sense strand
caaacgaccaucagcauau

SEQ ID NO: 1309547 - RNA, 19 nt, Homo sapiens
  misc_RNA (1)...(19): siRNA sense strand
acaacccgcugcaggauga

SEQ ID NO: 1309548 - RNA, 19 nt, Homo sapiens
  misc_RNA (1)...(19): siRNA sense strand
caaguaugacaaccucuuu

SEQ ID NO: 1309549 - RNA, 19 nt, Homo sapiens
  misc_RNA (1)...(19): siRNA sense strand
gcugcacgcucauuacuac

SEQ ID NO: 1309550 - RNA, 19 nt, Homo sapiens
  misc_RNA (1)...(19): siRNA sense strand
uagccuccaucaugaagaa

SEQ ID NO: 1309551 - RNA, 19 nt, Homo sapiens
  misc_RNA (1)...(19): siRNA sense strand
uaugacaaccucuuugaga

SEQ ID NO: 1309552 - RNA, 19 nt, Homo sapiens
  misc_RNA (1)...(19): siRNA sense strand
gugaugaucuagccuccau

SEQ ID NO: 1309553 - RNA, 19 nt, Homo sapiens
  misc_RNA (1)...(19): siRNA sense strand
aaacgaccaucagcauauc

SEQ ID NO: 1309554 - RNA, 19 nt, Homo sapiens
  misc_RNA (1)...(19): siRNA sense strand
gguaugggccagcaguuuc

SEQ ID NO: 1309555 - RNA, 19 nt, Homo sapiens
  misc_RNA (1)...(19): siRNA sense strand
ggcagcugcacgcucauua

SEQ ID NO: 1309556 - RNA, 19 nt, Homo sapiens
  misc_RNA (1)...(19): siRNA sense strand
guacagccgccaggagcua

SEQ ID NO: 1309557 - RNA, 19 nt, Homo sapiens
  misc_RNA (1)...(19): siRNA sense strand
uggaaccgauccucagcaa

SEQ ID NO: 1309558 - RNA, 19 nt, Homo sapiens
  misc_RNA (1)...(19): siRNA sense strand
gaaaacaaaggugccauga

SEQ ID NO: 1309559 - RNA, 19 nt, Homo sapiens
  misc_RNA (1)...(19): siRNA sense strand
ccaaguaugacaaccucuu

SEQ ID NO: 1309560 - RNA, 19 nt, Homo sapiens
  misc_RNA (1)...(19): siRNA sense strand
cagcaaccuuccgggcaaa

SEQ ID NO: 1309561 - RNA, 19 nt, Homo sapiens
  misc_RNA (1)...(19): siRNA sense strand
auucaugguuggcuacgaa

SEQ ID NO: 1309562 - RNA, 19 nt, Homo sapiens
  misc_RNA (1)...(19): siRNA sense strand
ucagcaggccuauaagagu

SEQ ID NO: 1309563 - RNA, 19 nt, Homo sapiens
  misc_RNA (1)...(19): siRNA sense strand
caugguuggcuacgaaaug

SEQ ID NO: 1309564 - RNA, 19 nt, Homo sapiens
  misc_RNA (1)...(19): siRNA sense strand
ggcaaacgaccaucagcau

SEQ ID NO: 1309565 - RNA, 19 nt, Homo sapiens
  misc_RNA (1)...(19): siRNA sense strand
gagacguccuuucccuacu

SEQ ID NO: 1309566 - RNA, 19 nt, Homo sapiens
  misc_RNA (1)...(19): siRNA sense strand
aguaugacaaccucuuuga

SEQ ID NO: 1309567 - RNA, 19 nt, Homo sapiens
  misc_RNA (1)...(19): siRNA sense strand
gccacuguccggaaauuca

SEQ ID NO: 1309568 - RNA, 19 nt, Homo sapiens
  misc_RNA (1)...(19): siRNA sense strand
gcaaacgaccaucagcaua

SEQ ID NO: 1309569 - RNA, 19 nt, Homo sapiens
  misc_RNA (1)...(19): siRNA sense strand
caaacgaccaucagcauau

SEQ ID NO: 1309570 - RNA, 19 nt, Homo sapiens
  misc_RNA (1)...(19): siRNA sense strand
acaacccgcugcaggauga

SEQ ID NO: 1309571 - RNA, 19 nt, Homo sapiens
  misc_RNA (1)...(19): siRNA sense strand
aaacgaccaucagcauauc

SEQ ID NO: 1309572 - RNA, 19 nt, Homo sapiens
  misc_RNA (1)...(19): siRNA sense strand
uggaaccgauccucagcaa

SEQ ID NO: 1309573 - RNA, 19 nt, Homo sapiens
  misc_RNA (1)...(19): siRNA sense strand
cagcaaccuuccgggcaaa

SEQ ID NO: 1309574 - RNA, 19 nt, Homo sapiens
  misc_RNA (1)...(19): siRNA sense strand
ggcaaacgaccaucagcau

SEQ ID NO: 1309575 - RNA, 19 nt, Homo sapiens
  misc_RNA (1)...(19): siRNA sense strand
aaacaaaggugccaugaug

SEQ ID NO: 1309576 - RNA, 19 nt, Homo sapiens
  misc_RNA (1)...(19): siRNA sense strand
gaucucagcaggccuauaa

SEQ ID NO: 1309577 - RNA, 19 nt, Homo sapiens
  misc_RNA (1)...(19): siRNA sense strand
gcaaacgaccaucagcaua

SEQ ID NO: 1309578 - RNA, 19 nt, Homo sapiens
  misc_RNA (1)...(19): siRNA sense strand
gccaggagcuacucaggaa

SEQ ID NO: 1309579 - RNA, 19 nt, Homo sapiens
  misc_RNA (1)...(19): siRNA sense strand
caaacgaccaucagcauau

SEQ ID NO: 1309580 - RNA, 19 nt, Homo sapiens
  misc_RNA (1)...(19): siRNA sense strand
acaacccgcugcaggauga

SEQ ID NO: 1309581 - RNA, 19 nt, Homo sapiens
  misc_RNA (1)...(19): siRNA sense strand
aaacgaccaucagcauauc

SEQ ID NO: 1309582 - RNA, 19 nt, Homo sapiens
  misc_RNA (1)...(19): siRNA sense strand
gguaugggccagcaguuuc

SEQ ID NO: 1309583 - RNA, 19 nt, Homo sapiens
  misc_RNA (1)...(19): siRNA sense strand
guacagccgccaggagcua

SEQ ID NO: 1309584 - RNA, 19 nt, Homo sapiens
  misc_RNA (1)...(19): siRNA sense strand
uggaaccgauccucagcaa

SEQ ID NO: 1309585 - RNA, 19 nt, Homo sapiens
  misc_RNA (1)...(19): siRNA sense strand
gaaaacaaaggugccauga

SEQ ID NO: 1309586 - RNA, 19 nt, Homo sapiens
  misc_RNA (1)...(19): siRNA sense strand
cagcaaccuuccgggcaaa

SEQ ID NO: 1309587 - RNA, 19 nt, Homo sapiens
  misc_RNA (1)...(19): siRNA sense strand
ucagcaggccuauaagagu

SEQ ID NO: 1309588 - RNA, 19 nt, Homo sapiens
  misc_RNA (1)...(19): siRNA sense strand
ggcaaacgaccaucagcau

SEQ ID NO: 1309589 - RNA, 19 nt, Homo sapiens
  misc_RNA (1)...(19): siRNA sense strand
aaacaaaggugccaugaug

SEQ ID NO: 1309590 - RNA, 19 nt, Homo sapiens
  misc_RNA (1)...(19): siRNA sense strand
gaucuagccuccaucauga

SEQ ID NO: 1309591 - RNA, 19 nt, Homo sapiens
  misc_RNA (1)...(19): siRNA sense strand
gaucucagcaggccuauaa

SEQ ID NO: 1309592 - RNA, 19 nt, Homo sapiens
  misc_RNA (1)...(19): siRNA sense strand
gcaaacgaccaucagcaua

SEQ ID NO: 1309593 - RNA, 19 nt, Homo sapiens
  misc_RNA (1)...(19): siRNA sense strand
gccaggagcuacucaggaa

SEQ ID NO: 1309594 - RNA, 19 nt, Homo sapiens
  misc_RNA (1)...(19): siRNA sense strand
caaacgaccaucagcauau

SEQ ID NO: 1309595 - RNA, 19 nt, Homo sapiens
  misc_RNA (1)...(19): siRNA sense strand
acaacccgcugcaggauga

SEQ ID NO: 1309596 - RNA, 19 nt, Homo sapiens
  misc_RNA (1)...(19): siRNA sense strand
caaguaugacaaccucuuu

SEQ ID NO: 1309597 - RNA, 19 nt, Homo sapiens
  misc_RNA (1)...(19): siRNA sense strand
gcugcacgcucauuacuac

SEQ ID NO: 1309598 - RNA, 19 nt, Homo sapiens
  misc_RNA (1)...(19): siRNA sense strand
uagccuccaucaugaagaa

SEQ ID NO: 1309599 - RNA, 19 nt, Homo sapiens
  misc_RNA (1)...(19): siRNA sense strand
uaugacaaccucuuugaga

SEQ ID NO: 1309600 - RNA, 19 nt, Homo sapiens
  misc_RNA (1)...(19): siRNA sense strand
gugaugaucuagccuccau

SEQ ID NO: 1309601 - RNA, 19 nt, Homo sapiens
  misc_RNA (1)...(19): siRNA sense strand
aaacgaccaucagcauauc

SEQ ID NO: 1309602 - RNA, 19 nt, Homo sapiens
  misc_RNA (1)...(19): siRNA sense strand
gguaugggccagcaguuuc

SEQ ID NO: 1309603 - RNA, 19 nt, Homo sapiens
  misc_RNA (1)...(19): siRNA sense strand
ggcagcugcacgcucauua

SEQ ID NO: 1309604 - RNA, 19 nt, Homo sapiens
  misc_RNA (1)...(19): siRNA sense strand
guacagccgccaggagcua

SEQ ID NO: 1309605 - RNA, 19 nt, Homo sapiens
  misc_RNA (1)...(19): siRNA sense strand
uggaaccgauccucagcaa

SEQ ID NO: 1309606 - RNA, 19 nt, Homo sapiens
  misc_RNA (1)...(19): siRNA sense strand
gaaaacaaaggugccauga

SEQ ID NO: 1309607 - RNA, 19 nt, Homo sapiens
  misc_RNA (1)...(19): siRNA sense strand
ccaaguaugacaaccucuu

SEQ ID NO: 1309608 - RNA, 19 nt, Homo sapiens
  misc_RNA (1)...(19): siRNA sense strand
cagcaaccuuccgggcaaa

SEQ ID NO: 1309609 - RNA, 19 nt, Homo sapiens
  misc_RNA (1)...(19): siRNA sense strand
auucaugguuggcuacgaa

SEQ ID NO: 1309610 - RNA, 19 nt, Homo sapiens
  misc_RNA (1)...(19): siRNA sense strand
ucagcaggccuauaagagu

SEQ ID NO: 1309611 - RNA, 19 nt, Homo sapiens
  misc_RNA (1)...(19): siRNA sense strand
caugguuggcuacgaaaug

SEQ ID NO: 1309612 - RNA, 19 nt, Homo sapiens
  misc_RNA (1)...(19): siRNA sense strand
ggcaaacgaccaucagcau

SEQ ID NO: 1309613 - RNA, 19 nt, Homo sapiens
  misc_RNA (1)...(19): siRNA sense strand
gagacguccuuucccuacu

SEQ ID NO: 1309614 - RNA, 19 nt, Homo sapiens
  misc_RNA (1)...(19): siRNA sense strand
aguaugacaaccucuuuga

SEQ ID NO: 1309615 - RNA, 19 nt, Homo sapiens
  misc_RNA (1)...(19): siRNA sense strand
gccacuguccggaaauuca

SEQ ID NO: 1309616 - RNA, 19 nt, Homo sapiens
  misc_RNA (1)...(19): siRNA sense strand
gcaaacgaccaucagcaua

SEQ ID NO: 1309617 - RNA, 19 nt, Homo sapiens
  misc_RNA (1)...(19): siRNA sense strand
caaacgaccaucagcauau

SEQ ID NO: 1309618 - RNA, 19 nt, Homo sapiens
  misc_RNA (1)...(19): siRNA sense strand
acaacccgcugcaggauga

SEQ ID NO: 1309619 - RNA, 19 nt, Homo sapiens
  misc_RNA (1)...(19): siRNA sense strand
aaacgaccaucagcauauc

SEQ ID NO: 1309620 - RNA, 19 nt, Homo sapiens
  misc_RNA (1)...(19): siRNA sense strand
uggaaccgauccucagcaa

SEQ ID NO: 1309621 - RNA, 19 nt, Homo sapiens
  misc_RNA (1)...(19): siRNA sense strand
cagcaaccuuccgggcaaa

SEQ ID NO: 1309622 - RNA, 19 nt, Homo sapiens
  misc_RNA (1)...(19): siRNA sense strand
ggcaaacgaccaucagcau

SEQ ID NO: 1309623 - RNA, 19 nt, Homo sapiens
  misc_RNA (1)...(19): siRNA sense strand
aaacaaaggugccaugaug

SEQ ID NO: 1309624 - RNA, 19 nt, Homo sapiens
  misc_RNA (1)...(19): siRNA sense strand
gaucucagcaggccuauaa

SEQ ID NO: 1309625 - RNA, 19 nt, Homo sapiens
  misc_RNA (1)...(19): siRNA sense strand
gcaaacgaccaucagcaua

SEQ ID NO: 1309626 - RNA, 19 nt, Homo sapiens
  misc_RNA (1)...(19): siRNA sense strand
gccaggagcuacucaggaa

SEQ ID NO: 1309627 - RNA, 19 nt, Homo sapiens
  misc_RNA (1)...(19): siRNA sense strand
caaacgaccaucagcauau

SEQ ID NO: 1309628 - RNA, 19 nt, Homo sapiens
  misc_RNA (1)...(19): siRNA sense strand
acaacccgcugcaggauga

SEQ ID NO: 1309629 - RNA, 19 nt, Homo sapiens
  misc_RNA (1)...(19): siRNA sense strand
aaacgaccaucagcauauc

SEQ ID NO: 1309630 - RNA, 19 nt, Homo sapiens
  misc_RNA (1)...(19): siRNA sense strand
gguaugggccagcaguuuc

SEQ ID NO: 1309631 - RNA, 19 nt, Homo sapiens
  misc_RNA (1)...(19): siRNA sense strand
guacagccgccaggagcua

SEQ ID NO: 1309632 - RNA, 19 nt, Homo sapiens
  misc_RNA (1)...(19): siRNA sense strand
uggaaccgauccucagcaa

SEQ ID NO: 1309633 - RNA, 19 nt, Homo sapiens
  misc_RNA (1)...(19): siRNA sense strand
gaaaacaaaggugccauga

SEQ ID NO: 1309634 - RNA, 19 nt, Homo sapiens
  misc_RNA (1)...(19): siRNA sense strand
cagcaaccuuccgggcaaa

SEQ ID NO: 1309635 - RNA, 19 nt, Homo sapiens
  misc_RNA (1)...(19): siRNA sense strand
ucagcaggccuauaagagu

SEQ ID NO: 1309636 - RNA, 19 nt, Homo sapiens
  misc_RNA (1)...(19): siRNA sense strand
ggcaaacgaccaucagcau

SEQ ID NO: 1309637 - RNA, 19 nt, Homo sapiens
  misc_RNA (1)...(19): siRNA sense strand
gcacacagguucucuaauu

SEQ ID NO: 1309638 - RNA, 19 nt, Homo sapiens
  misc_RNA (1)...(19): siRNA sense strand
gaaaugaaauuccacauag

SEQ ID NO: 1309639 - RNA, 19 nt, Homo sapiens
  misc_RNA (1)...(19): siRNA sense strand
gaaaugagcagagaagaua

SEQ ID NO: 1309640 - RNA, 19 nt, Homo sapiens
  misc_RNA (1)...(19): siRNA sense strand
gcacaaguguccuuugauu

SEQ ID NO: 1309641 - RNA, 19 nt, Homo sapiens
  misc_RNA (1)...(19): siRNA sense strand
caaaggagcuuccauguac

SEQ ID NO: 1309642 - RNA, 19 nt, Homo sapiens
  misc_RNA (1)...(19): siRNA sense strand
gcaggauccucaaguagua

SEQ ID NO: 1309643 - RNA, 19 nt, Homo sapiens
  misc_RNA (1)...(19): siRNA sense strand
gauuucagcuguuuaaaga

SEQ ID NO: 1309644 - RNA, 19 nt, Homo sapiens
  misc_RNA (1)...(19): siRNA sense strand
gaauuaaccugccauugug

SEQ ID NO: 1309645 - RNA, 19 nt, Homo sapiens
  misc_RNA (1)...(19): siRNA sense strand
gagcacaaguguccuuuga

SEQ ID NO: 1309646 - RNA, 19 nt, Homo sapiens
  misc_RNA (1)...(19): siRNA sense strand
gaacaacuaacaacagaaa

SEQ ID NO: 1309647 - RNA, 19 nt, Homo sapiens
  misc_RNA (1)...(19): siRNA sense strand
gcaggucccuuaugaugaa

SEQ ID NO: 1309648 - RNA, 19 nt, Homo sapiens
  misc_RNA (1)...(19): siRNA sense strand
gaaaugcgguaaccauaca

SEQ ID NO: 1309649 - RNA, 19 nt, Homo sapiens
  misc_RNA (1)...(19): siRNA sense strand
gaugaaaucucugcuguuc

SEQ ID NO: 1309650 - RNA, 19 nt, Homo sapiens
  misc_RNA (1)...(19): siRNA sense strand
gagaagauacccacagaaa

SEQ ID NO: 1309651 - RNA, 19 nt, Homo sapiens
  misc_RNA (1)...(19): siRNA sense strand
gacaagcgguguaacaaga

SEQ ID NO: 1309652 - RNA, 19 nt, Homo sapiens
  misc_RNA (1)...(19): siRNA sense strand
gagauaugcuguguggaua

SEQ ID NO: 1309653 - RNA, 19 nt, Homo sapiens
  misc_RNA (1)...(19): siRNA sense strand
gaaucaaccuuggcagaaa

SEQ ID NO: 1309654 - RNA, 19 nt, Homo sapiens
  misc_RNA (1)...(19): siRNA sense strand
ggaaugagaagcaccauau

SEQ ID NO: 1309655 - RNA, 19 nt, Homo sapiens
  misc_RNA (1)...(19): siRNA sense strand
caagagaaaugcacuguac

SEQ ID NO: 1309656 - RNA, 19 nt, Homo sapiens
  misc_RNA (1)...(19): siRNA sense strand
ccaggcaggucccuuauga

SEQ ID NO: 1309657 - RNA, 19 nt, Homo sapiens
  misc_RNA (1)...(19): siRNA sense strand
cauuugaacugcauaaaga

SEQ ID NO: 1309658 - RNA, 19 nt, Homo sapiens
  misc_RNA (1)...(19): siRNA sense strand
gaagcaaaccuaagaguca

SEQ ID NO: 1309659 - RNA, 19 nt, Homo sapiens
  misc_RNA (1)...(19): siRNA sense strand
gcacuuuccuaacucagaa

SEQ ID NO: 1309660 - RNA, 19 nt, Homo sapiens
  misc_RNA (1)...(19): siRNA sense strand
caaaggaugaccucaauga

SEQ ID NO: 1309661 - RNA, 19 nt, Homo sapiens
  misc_RNA (1)...(19): siRNA sense strand
cggcauaaauguaaugaga

SEQ ID NO: 1309662 - RNA, 19 nt, Homo sapiens
  misc_RNA (1)...(19): siRNA sense strand
aggaaagucugauggauuu

SEQ ID NO: 1309663 - RNA, 19 nt, Homo sapiens
  misc_RNA (1)...(19): siRNA sense strand
gagcagaaaugaaauucca

SEQ ID NO: 1309664 - RNA, 19 nt, Homo sapiens
  misc_RNA (1)...(19): siRNA sense strand
ccuaauaccuacacuuguu

SEQ ID NO: 1309665 - RNA, 19 nt, Homo sapiens
  misc_RNA (1)...(19): siRNA sense strand
gagcauaguccuucugaga

SEQ ID NO: 1309666 - RNA, 19 nt, Homo sapiens
  misc_RNA (1)...(19): siRNA sense strand
caacacaguuuguauacag

SEQ ID NO: 1309667 - RNA, 19 nt, Homo sapiens
  misc_RNA (1)...(19): siRNA sense strand
cgagauguguuauguggaa

SEQ ID NO: 1309668 - RNA, 19 nt, Homo sapiens
  misc_RNA (1)...(19): siRNA sense strand
caauacagaugcugcugaa

SEQ ID NO: 1309669 - RNA, 19 nt, Homo sapiens
  misc_RNA (1)...(19): siRNA sense strand
ggccaggacugcccacauu

SEQ ID NO: 1309670 - RNA, 19 nt, Homo sapiens
  misc_RNA (1)...(19): siRNA sense strand
ccaccucccugucaccuuu

SEQ ID NO: 1309671 - RNA, 19 nt, Homo sapiens
  misc_RNA (1)...(19): siRNA sense strand
guaaugagauaugcugugu

SEQ ID NO: 1309672 - RNA, 19 nt, Homo sapiens
  misc_RNA (1)...(19): siRNA sense strand
gaaaagcucugccaugaag

SEQ ID NO: 1309673 - RNA, 19 nt, Homo sapiens
  misc_RNA (1)...(19): siRNA sense strand
uuagagagcucgaccagau

SEQ ID NO: 1309674 - RNA, 19 nt, Homo sapiens
  misc_RNA (1)...(19): siRNA sense strand
uguaauaaaucgcccaaga

SEQ ID NO: 1309675 - RNA, 19 nt, Homo sapiens
  misc_RNA (1)...(19): siRNA sense strand
aagugaagaugcuacauuu

SEQ ID NO: 1309676 - RNA, 19 nt, Homo sapiens
  misc_RNA (1)...(19): siRNA sense strand
gcagauggccagagugguu

SEQ ID NO: 1309677 - RNA, 19 nt, Homo sapiens
  misc_RNA (1)...(19): siRNA sense strand
ggaguugucagagcuguua

SEQ ID NO: 1309678 - RNA, 19 nt, Homo sapiens
  misc_RNA (1)...(19): siRNA sense strand
cagagaagauacccacaga

SEQ ID NO: 1309679 - RNA, 19 nt, Homo sapiens
  misc_RNA (1)...(19): siRNA sense strand
gagcagaccucagauacag

SEQ ID NO: 1309680 - RNA, 19 nt, Homo sapiens
  misc_RNA (1)...(19): siRNA sense strand
gccauggccuucagaauca

SEQ ID NO: 1309681 - RNA, 19 nt, Homo sapiens
  misc_RNA (1)...(19): siRNA sense strand
gaguggagcagaaaugaaa

SEQ ID NO: 1309682 - RNA, 19 nt, Homo sapiens
  misc_RNA (1)...(19): siRNA sense strand
ugaagaugcuacauuuaug

SEQ ID NO: 1309683 - RNA, 19 nt, Homo sapiens
  misc_RNA (1)...(19): siRNA sense strand
gaacuuggcagucaucaac

SEQ ID NO: 1309684 - RNA, 19 nt, Homo sapiens
  misc_RNA (1)...(19): siRNA sense strand
ggugagguuuguagaaaga

SEQ ID NO: 1309685 - RNA, 19 nt, Homo sapiens
  misc_RNA (1)...(19): siRNA sense strand
guuaccauguguuucauuu

SEQ ID NO: 1309686 - RNA, 19 nt, Homo sapiens
  misc_RNA (1)...(19): siRNA sense strand
uaccauguguuucauuuga

SEQ ID NO: 1309687 - RNA, 19 nt, Homo sapiens
  misc_RNA (1)...(19): siRNA sense strand
ugaauuaaccugccauugu

SEQ ID NO: 1309688 - RNA, 19 nt, Homo sapiens
  misc_RNA (1)...(19): siRNA sense strand
uggcagaaauugaggaaug

SEQ ID NO: 1309689 - RNA, 19 nt, Homo sapiens
  misc_RNA (1)...(19): siRNA sense strand
ccaguucccugugguacua

SEQ ID NO: 1309690 - RNA, 19 nt, Homo sapiens
  misc_RNA (1)...(19): siRNA sense strand
gugaagaugcuacauuuau

SEQ ID NO: 1309691 - RNA, 19 nt, Homo sapiens
  misc_RNA (1)...(19): siRNA sense strand
cagaugcucuuucagaaca

SEQ ID NO: 1309692 - RNA, 19 nt, Homo sapiens
  misc_RNA (1)...(19): siRNA sense strand
ccaggaggguugaccaaga

SEQ ID NO: 1309693 - RNA, 19 nt, Homo sapiens
  misc_RNA (1)...(19): siRNA sense strand
aaacagaaccaugugcuaa

SEQ ID NO: 1309694 - RNA, 19 nt, Homo sapiens
  misc_RNA (1)...(19): siRNA sense strand
gcauaguccuucugagagu

SEQ ID NO: 1309695 - RNA, 19 nt, Homo sapiens
  misc_RNA (1)...(19): siRNA sense strand
caaguaguaucuccuuucu

SEQ ID NO: 1309696 - RNA, 19 nt, Homo sapiens
  misc_RNA (1)...(19): siRNA sense strand
ugaagaaccuugucaucgu

SEQ ID NO: 1309697 - RNA, 19 nt, Homo sapiens
  misc_RNA (1)...(19): siRNA sense strand
guggugagguuuguagaaa

SEQ ID NO: 1309698 - RNA, 19 nt, Homo sapiens
  misc_RNA (1)...(19): siRNA sense strand
uaauaggauugguagaaga

SEQ ID NO: 1309699 - RNA, 19 nt, Homo sapiens
  misc_RNA (1)...(19): siRNA sense strand
gaaggagacuguggaccau

SEQ ID NO: 1309700 - RNA, 19 nt, Homo sapiens
  misc_RNA (1)...(19): siRNA sense strand
gaaccgauguaggaaaguc

SEQ ID NO: 1309701 - RNA, 19 nt, Homo sapiens
  misc_RNA (1)...(19): siRNA sense strand
ggcagaaauugaggaauga

SEQ ID NO: 1309702 - RNA, 19 nt, Homo sapiens
  misc_RNA (1)...(19): siRNA sense strand
acaaguguccuuugauuug

SEQ ID NO: 1309703 - RNA, 19 nt, Homo sapiens
  misc_RNA (1)...(19): siRNA sense strand
aaacuccucucagccaauu

SEQ ID NO: 1309704 - RNA, 19 nt, Homo sapiens
  misc_RNA (1)...(19): siRNA sense strand
uaacccaugugagaauauu

SEQ ID NO: 1309705 - RNA, 19 nt, Homo sapiens
  misc_RNA (1)...(19): siRNA sense strand
agauacagcuggauuagag

SEQ ID NO: 1309706 - RNA, 19 nt, Homo sapiens
  misc_RNA (1)...(19): siRNA sense strand
uacagaugcugcugaauuc

SEQ ID NO: 1309707 - RNA, 19 nt, Homo sapiens
  misc_RNA (1)...(19): siRNA sense strand
caagcgguguaacaagaaa

SEQ ID NO: 1309708 - RNA, 19 nt, Homo sapiens
  misc_RNA (1)...(19): siRNA sense strand
ggaccaugcucucgcacau

SEQ ID NO: 1309709 - RNA, 19 nt, Homo sapiens
  misc_RNA (1)...(19): siRNA sense strand
gagcuguuaccauguguuu

SEQ ID NO: 1309710 - RNA, 19 nt, Homo sapiens
  misc_RNA (1)...(19): siRNA sense strand
agaaccaugugcuaaagaa

SEQ ID NO: 1309711 - RNA, 19 nt, Homo sapiens
  misc_RNA (1)...(19): siRNA sense strand
gaucagagagugggacaga

SEQ ID NO: 1309712 - RNA, 19 nt, Homo sapiens
  misc_RNA (1)...(19): siRNA sense strand
acaaaggagcuuccaugua

SEQ ID NO: 1309713 - RNA, 19 nt, Homo sapiens
  misc_RNA (1)...(19): siRNA sense strand
ucaagcagauggccagagu

SEQ ID NO: 1309714 - RNA, 19 nt, Homo sapiens
  misc_RNA (1)...(19): siRNA sense strand
ggugugcugugaauugguu

SEQ ID NO: 1309715 - RNA, 19 nt, Homo sapiens
  misc_RNA (1)...(19): siRNA sense strand
caggagggccaccgacaua

SEQ ID NO: 1309716 - RNA, 19 nt, Homo sapiens
  misc_RNA (1)...(19): siRNA sense strand
gcaacacaguuuguauaca

SEQ ID NO: 1309717 - RNA, 19 nt, Homo sapiens
  misc_RNA (1)...(19): siRNA sense strand
gaccauccaguauaucauu

SEQ ID NO: 1309718 - RNA, 19 nt, Homo sapiens
  misc_RNA (1)...(19): siRNA sense strand
gugaaaagcucugccauga

SEQ ID NO: 1309719 - RNA, 19 nt, Homo sapiens
  misc_RNA (1)...(19): siRNA sense strand
ggcaaggucuccagcaucu

SEQ ID NO: 1309720 - RNA, 19 nt, Homo sapiens
  misc_RNA (1)...(19): siRNA sense strand
ugaacugcauaaagaaaug

SEQ ID NO: 1309721 - RNA, 19 nt, Homo sapiens
  misc_RNA (1)...(19): siRNA sense strand
gaaacucaaaugugaaugg

SEQ ID NO: 1309722 - RNA, 19 nt, Homo sapiens
  misc_RNA (1)...(19): siRNA sense strand
gguagaagaaauuacaguu

SEQ ID NO: 1309723 - RNA, 19 nt, Homo sapiens
  misc_RNA (1)...(19): siRNA sense strand
caaguguccuuugauuugu

SEQ ID NO: 1309724 - RNA, 19 nt, Homo sapiens
  misc_RNA (1)...(19): siRNA sense strand
ucaggaagcaaaccuaaga

SEQ ID NO: 1309725 - RNA, 19 nt, Homo sapiens
  misc_RNA (1)...(19): siRNA sense strand
uaccuacacuuguuucugu

SEQ ID NO: 1309726 - RNA, 19 nt, Homo sapiens
  misc_RNA (1)...(19): siRNA sense strand
auacagaugcugcugaauu

SEQ ID NO: 1309727 - RNA, 19 nt, Homo sapiens
  misc_RNA (1)...(19): siRNA sense strand
aagcaacacaguuuguaua

SEQ ID NO: 1309728 - RNA, 19 nt, Homo sapiens
  misc_RNA (1)...(19): siRNA sense strand
gagagcauaguccuucuga

SEQ ID NO: 1309729 - RNA, 19 nt, Homo sapiens
  misc_RNA (1)...(19): siRNA sense strand
guaccagucucaaaaguga

SEQ ID NO: 1309730 - RNA, 19 nt, Homo sapiens
  misc_RNA (1)...(19): siRNA sense strand
ucucgcacaucaguuauuu

SEQ ID NO: 1309731 - RNA, 19 nt, Homo sapiens
  misc_RNA (1)...(19): siRNA sense strand
ccacuguucuaacccaugu

SEQ ID NO: 1309732 - RNA, 19 nt, Homo sapiens
  misc_RNA (1)...(19): siRNA sense strand
ucagagcuguuaccaugug

SEQ ID NO: 1309733 - RNA, 19 nt, Homo sapiens
  misc_RNA (1)...(19): siRNA sense strand
cacacagguucucuaauug

SEQ ID NO: 1309734 - RNA, 19 nt, Homo sapiens
  misc_RNA (1)...(19): siRNA sense strand
caaacagaaccaugugcua

SEQ ID NO: 1309735 - RNA, 19 nt, Homo sapiens
  misc_RNA (1)...(19): siRNA sense strand
guagaagaaauuacaguuc

SEQ ID NO: 1309736 - RNA, 19 nt, Homo sapiens
  misc_RNA (1)...(19): siRNA sense strand
guggacggcauaaauguaa

SEQ ID NO: 1309737 - RNA, 19 nt, Homo sapiens
  misc_RNA (1)...(19): siRNA sense strand
gcacacagguucucuaauu

SEQ ID NO: 1309738 - RNA, 19 nt, Homo sapiens
  misc_RNA (1)...(19): siRNA sense strand
gaaaugaaauuccacauag

SEQ ID NO: 1309739 - RNA, 19 nt, Homo sapiens
  misc_RNA (1)...(19): siRNA sense strand
gaaaugagcagagaagaua

SEQ ID NO: 1309740 - RNA, 19 nt, Homo sapiens
  misc_RNA (1)...(19): siRNA sense strand
gcacaaguguccuuugauu

SEQ ID NO: 1309741 - RNA, 19 nt, Homo sapiens
  misc_RNA (1)...(19): siRNA sense strand
caaaggagcuuccauguac

SEQ ID NO: 1309742 - RNA, 19 nt, Homo sapiens
  misc_RNA (1)...(19): siRNA sense strand
gcaggauccucaaguagua

SEQ ID NO: 1309743 - RNA, 19 nt, Homo sapiens
  misc_RNA (1)...(19): siRNA sense strand
gauuucagcuguuuaaaga

SEQ ID NO: 1309744 - RNA, 19 nt, Homo sapiens
  misc_RNA (1)...(19): siRNA sense strand
gaauuaaccugccauugug

SEQ ID NO: 1309745 - RNA, 19 nt, Homo sapiens
  misc_RNA (1)...(19): siRNA sense strand
gagcacaaguguccuuuga

SEQ ID NO: 1309746 - RNA, 19 nt, Homo sapiens
  misc_RNA (1)...(19): siRNA sense strand
gaacaacuaacaacagaaa

SEQ ID NO: 1309747 - RNA, 19 nt, Homo sapiens
  misc_RNA (1)...(19): siRNA sense strand
gcaggucccuuaugaugaa

SEQ ID NO: 1309748 - RNA, 19 nt, Homo sapiens
  misc_RNA (1)...(19): siRNA sense strand
gaaaugcgguaaccauaca

SEQ ID NO: 1309749 - RNA, 19 nt, Homo sapiens
  misc_RNA (1)...(19): siRNA sense strand
gaugaaaucucugcuguuc

SEQ ID NO: 1309750 - RNA, 19 nt, Homo sapiens
  misc_RNA (1)...(19): siRNA sense strand
gagaagauacccacagaaa

SEQ ID NO: 1309751 - RNA, 19 nt, Homo sapiens
  misc_RNA (1)...(19): siRNA sense strand
gacaagcgguguaacaaga

SEQ ID NO: 1309752 - RNA, 19 nt, Homo sapiens
  misc_RNA (1)...(19): siRNA sense strand
gagauaugcuguguggaua

SEQ ID NO: 1309753 - RNA, 19 nt, Homo sapiens
  misc_RNA (1)...(19): siRNA sense strand
gaaucaaccuuggcagaaa

SEQ ID NO: 1309754 - RNA, 19 nt, Homo sapiens
  misc_RNA (1)...(19): siRNA sense strand
ggaaugagaagcaccauau

SEQ ID NO: 1309755 - RNA, 19 nt, Homo sapiens
  misc_RNA (1)...(19): siRNA sense strand
caagagaaaugcacuguac

SEQ ID NO: 1309756 - RNA, 19 nt, Homo sapiens
  misc_RNA (1)...(19): siRNA sense strand
ccaggcaggucccuuauga

SEQ ID NO: 1309757 - RNA, 19 nt, Homo sapiens
  misc_RNA (1)...(19): siRNA sense strand
cauuugaacugcauaaaga

SEQ ID NO: 1309758 - RNA, 19 nt, Homo sapiens
  misc_RNA (1)...(19): siRNA sense strand
gaagcaaaccuaagaguca

SEQ ID NO: 1309759 - RNA, 19 nt, Homo sapiens
  misc_RNA (1)...(19): siRNA sense strand
gcacuuuccuaacucagaa

SEQ ID NO: 1309760 - RNA, 19 nt, Homo sapiens
  misc_RNA (1)...(19): siRNA sense strand
caaaggaugaccucaauga

SEQ ID NO: 1309761 - RNA, 19 nt, Homo sapiens
  misc_RNA (1)...(19): siRNA sense strand
cggcauaaauguaaugaga

SEQ ID NO: 1309762 - RNA, 19 nt, Homo sapiens
  misc_RNA (1)...(19): siRNA sense strand
aggaaagucugauggauuu

SEQ ID NO: 1309763 - RNA, 19 nt, Homo sapiens
  misc_RNA (1)...(19): siRNA sense strand
gagcagaaaugaaauucca

SEQ ID NO: 1309764 - RNA, 19 nt, Homo sapiens
  misc_RNA (1)...(19): siRNA sense strand
ccuaauaccuacacuuguu

SEQ ID NO: 1309765 - RNA, 19 nt, Homo sapiens
  misc_RNA (1)...(19): siRNA sense strand
gagcauaguccuucugaga

SEQ ID NO: 1309766 - RNA, 19 nt, Homo sapiens
  misc_RNA (1)...(19): siRNA sense strand
caacacaguuuguauacag

SEQ ID NO: 1309767 - RNA, 19 nt, Homo sapiens
  misc_RNA (1)...(19): siRNA sense strand
cgagauguguuauguggaa

SEQ ID NO: 1309768 - RNA, 19 nt, Homo sapiens
  misc_RNA (1)...(19): siRNA sense strand
caauacagaugcugcugaa

SEQ ID NO: 1309769 - RNA, 19 nt, Homo sapiens
  misc_RNA (1)...(19): siRNA sense strand
ggccaggacugcccacauu

SEQ ID NO: 1309770 - RNA, 19 nt, Homo sapiens
  misc_RNA (1)...(19): siRNA sense strand
ccaccucccugucaccuuu

SEQ ID NO: 1309771 - RNA, 19 nt, Homo sapiens
  misc_RNA (1)...(19): siRNA sense strand
guaaugagauaugcugugu

SEQ ID NO: 1309772 - RNA, 19 nt, Homo sapiens
  misc_RNA (1)...(19): siRNA sense strand
gaaaagcucugccaugaag

SEQ ID NO: 1309773 - RNA, 19 nt, Homo sapiens
  misc_RNA (1)...(19): siRNA sense strand
uuagagagcucgaccagau

SEQ ID NO: 1309774 - RNA, 19 nt, Homo sapiens
  misc_RNA (1)...(19): siRNA sense strand
uguaauaaaucgcccaaga

SEQ ID NO: 1309775 - RNA, 19 nt, Homo sapiens
  misc_RNA (1)...(19): siRNA sense strand
aagugaagaugcuacauuu

SEQ ID NO: 1309776 - RNA, 19 nt, Homo sapiens
  misc_RNA (1)...(19): siRNA sense strand
gcagauggccagagugguu

SEQ ID NO: 1309777 - RNA, 19 nt, Homo sapiens
  misc_RNA (1)...(19): siRNA sense strand
ggaguugucagagcuguua

SEQ ID NO: 1309778 - RNA, 19 nt, Homo sapiens
  misc_RNA (1)...(19): siRNA sense strand
cagagaagauacccacaga

SEQ ID NO: 1309779 - RNA, 19 nt, Homo sapiens
  misc_RNA (1)...(19): siRNA sense strand
gagcagaccucagauacag

SEQ ID NO: 1309780 - RNA, 19 nt, Homo sapiens
  misc_RNA (1)...(19): siRNA sense strand
gccauggccuucagaauca

SEQ ID NO: 1309781 - RNA, 19 nt, Homo sapiens
  misc_RNA (1)...(19): siRNA sense strand
gaguggagcagaaaugaaa

SEQ ID NO: 1309782 - RNA, 19 nt, Homo sapiens
  misc_RNA (1)...(19): siRNA sense strand
ugaagaugcuacauuuaug

SEQ ID NO: 1309783 - RNA, 19 nt, Homo sapiens
  misc_RNA (1)...(19): siRNA sense strand
gaacuuggcagucaucaac

SEQ ID NO: 1309784 - RNA, 19 nt, Homo sapiens
  misc_RNA (1)...(19): siRNA sense strand
ggugagguuuguagaaaga

SEQ ID NO: 1309785 - RNA, 19 nt, Homo sapiens
  misc_RNA (1)...(19): siRNA sense strand
guuaccauguguuucauuu

SEQ ID NO: 1309786 - RNA, 19 nt, Homo sapiens
  misc_RNA (1)...(19): siRNA sense strand
uaccauguguuucauuuga

SEQ ID NO: 1309787 - RNA, 19 nt, Homo sapiens
  misc_RNA (1)...(19): siRNA sense strand
ugaauuaaccugccauugu

SEQ ID NO: 1309788 - RNA, 19 nt, Homo sapiens
  misc_RNA (1)...(19): siRNA sense strand
uggcagaaauugaggaaug

SEQ ID NO: 1309789 - RNA, 19 nt, Homo sapiens
  misc_RNA (1)...(19): siRNA sense strand
ccaguucccugugguacua

SEQ ID NO: 1309790 - RNA, 19 nt, Homo sapiens
  misc_RNA (1)...(19): siRNA sense strand
gugaagaugcuacauuuau

SEQ ID NO: 1309791 - RNA, 19 nt, Homo sapiens
  misc_RNA (1)...(19): siRNA sense strand
cagaugcucuuucagaaca

SEQ ID NO: 1309792 - RNA, 19 nt, Homo sapiens
  misc_RNA (1)...(19): siRNA sense strand
ccaggaggguugaccaaga

SEQ ID NO: 1309793 - RNA, 19 nt, Homo sapiens
  misc_RNA (1)...(19): siRNA sense strand
aaacagaaccaugugcuaa

SEQ ID NO: 1309794 - RNA, 19 nt, Homo sapiens
  misc_RNA (1)...(19): siRNA sense strand
gcauaguccuucugagagu

SEQ ID NO: 1309795 - RNA, 19 nt, Homo sapiens
  misc_RNA (1)...(19): siRNA sense strand
caaguaguaucuccuuucu

SEQ ID NO: 1309796 - RNA, 19 nt, Homo sapiens
  misc_RNA (1)...(19): siRNA sense strand
ugaagaaccuugucaucgu

SEQ ID NO: 1309797 - RNA, 19 nt, Homo sapiens
  misc_RNA (1)...(19): siRNA sense strand
guggugagguuuguagaaa

SEQ ID NO: 1309798 - RNA, 19 nt, Homo sapiens
  misc_RNA (1)...(19): siRNA sense strand
uaauaggauugguagaaga

SEQ ID NO: 1309799 - RNA, 19 nt, Homo sapiens
  misc_RNA (1)...(19): siRNA sense strand
gaaggagacuguggaccau

SEQ ID NO: 1309800 - RNA, 19 nt, Homo sapiens
  misc_RNA (1)...(19): siRNA sense strand
gaaccgauguaggaaaguc

SEQ ID NO: 1309801 - RNA, 19 nt, Homo sapiens
  misc_RNA (1)...(19): siRNA sense strand
ggcagaaauugaggaauga

SEQ ID NO: 1309802 - RNA, 19 nt, Homo sapiens
  misc_RNA (1)...(19): siRNA sense strand
acaaguguccuuugauuug

SEQ ID NO: 1309803 - RNA, 19 nt, Homo sapiens
  misc_RNA (1)...(19): siRNA sense strand
aaacuccucucagccaauu

SEQ ID NO: 1309804 - RNA, 19 nt, Homo sapiens
  misc_RNA (1)...(19): siRNA sense strand
uaacccaugugagaauauu

SEQ ID NO: 1309805 - RNA, 19 nt, Homo sapiens
  misc_RNA (1)...(19): siRNA sense strand
agauacagcuggauuagag

SEQ ID NO: 1309806 - RNA, 19 nt, Homo sapiens
  misc_RNA (1)...(19): siRNA sense strand
uacagaugcugcugaauuc

SEQ ID NO: 1309807 - RNA, 19 nt, Homo sapiens
  misc_RNA (1)...(19): siRNA sense strand
caagcgguguaacaagaaa

SEQ ID NO: 1309808 - RNA, 19 nt, Homo sapiens
  misc_RNA (1)...(19): siRNA sense strand
ggaccaugcucucgcacau

SEQ ID NO: 1309809 - RNA, 19 nt, Homo sapiens
  misc_RNA (1)...(19): siRNA sense strand
gagcuguuaccauguguuu

SEQ ID NO: 1309810 - RNA, 19 nt, Homo sapiens
  misc_RNA (1)...(19): siRNA sense strand
agaaccaugugcuaaagaa

SEQ ID NO: 1309811 - RNA, 19 nt, Homo sapiens
  misc_RNA (1)...(19): siRNA sense strand
gaucagagagugggacaga

SEQ ID NO: 1309812 - RNA, 19 nt, Homo sapiens
  misc_RNA (1)...(19): siRNA sense strand
acaaaggagcuuccaugua

SEQ ID NO: 1309813 - RNA, 19 nt, Homo sapiens
  misc_RNA (1)...(19): siRNA sense strand
ucaagcagauggccagagu

SEQ ID NO: 1309814 - RNA, 19 nt, Homo sapiens
  misc_RNA (1)...(19): siRNA sense strand
ggugugcugugaauugguu

SEQ ID NO: 1309815 - RNA, 19 nt, Homo sapiens
  misc_RNA (1)...(19): siRNA sense strand
caggagggccaccgacaua

SEQ ID NO: 1309816 - RNA, 19 nt, Homo sapiens
  misc_RNA (1)...(19): siRNA sense strand
gcaacacaguuuguauaca

SEQ ID NO: 1309817 - RNA, 19 nt, Homo sapiens
  misc_RNA (1)...(19): siRNA sense strand
gaccauccaguauaucauu

SEQ ID NO: 1309818 - RNA, 19 nt, Homo sapiens
  misc_RNA (1)...(19): siRNA sense strand
gugaaaagcucugccauga

SEQ ID NO: 1309819 - RNA, 19 nt, Homo sapiens
  misc_RNA (1)...(19): siRNA sense strand
ggcaaggucuccagcaucu

SEQ ID NO: 1309820 - RNA, 19 nt, Homo sapiens
  misc_RNA (1)...(19): siRNA sense strand
ugaacugcauaaagaaaug

SEQ ID NO: 1309821 - RNA, 19 nt, Homo sapiens
  misc_RNA (1)...(19): siRNA sense strand
gaaacucaaaugugaaugg

SEQ ID NO: 1309822 - RNA, 19 nt, Homo sapiens
  misc_RNA (1)...(19): siRNA sense strand
gguagaagaaauuacaguu

SEQ ID NO: 1309823 - RNA, 19 nt, Homo sapiens
  misc_RNA (1)...(19): siRNA sense strand
caaguguccuuugauuugu

SEQ ID NO: 1309824 - RNA, 19 nt, Homo sapiens
  misc_RNA (1)...(19): siRNA sense strand
ucaggaagcaaaccuaaga

SEQ ID NO: 1309825 - RNA, 19 nt, Homo sapiens
  misc_RNA (1)...(19): siRNA sense strand
uaccuacacuuguuucugu

SEQ ID NO: 1309826 - RNA, 19 nt, Homo sapiens
  misc_RNA (1)...(19): siRNA sense strand
auacagaugcugcugaauu

SEQ ID NO: 1309827 - RNA, 19 nt, Homo sapiens
  misc_RNA (1)...(19): siRNA sense strand
aagcaacacaguuuguaua

SEQ ID NO: 1309828 - RNA, 19 nt, Homo sapiens
  misc_RNA (1)...(19): siRNA sense strand
gagagcauaguccuucuga

SEQ ID NO: 1309829 - RNA, 19 nt, Homo sapiens
  misc_RNA (1)...(19): siRNA sense strand
guaccagucucaaaaguga

SEQ ID NO: 1309830 - RNA, 19 nt, Homo sapiens
  misc_RNA (1)...(19): siRNA sense strand
ucucgcacaucaguuauuu

SEQ ID NO: 1309831 - RNA, 19 nt, Homo sapiens
  misc_RNA (1)...(19): siRNA sense strand
ccacuguucuaacccaugu

SEQ ID NO: 1309832 - RNA, 19 nt, Homo sapiens
  misc_RNA (1)...(19): siRNA sense strand
ucagagcuguuaccaugug

SEQ ID NO: 1309833 - RNA, 19 nt, Homo sapiens
  misc_RNA (1)...(19): siRNA sense strand
cacacagguucucuaauug

SEQ ID NO: 1309834 - RNA, 19 nt, Homo sapiens
  misc_RNA (1)...(19): siRNA sense strand
caaacagaaccaugugcua

SEQ ID NO: 1309835 - RNA, 19 nt, Homo sapiens
  misc_RNA (1)...(19): siRNA sense strand
guagaagaaauuacaguuc

SEQ ID NO: 1309836 - RNA, 19 nt, Homo sapiens
  misc_RNA (1)...(19): siRNA sense strand
guggacggcauaaauguaa

SEQ ID NO: 1309837 - RNA, 19 nt, Homo sapiens
  misc_RNA (1)...(19): siRNA sense strand
gcacacagguucucuaauu

SEQ ID NO: 1309838 - RNA, 19 nt, Homo sapiens
  misc_RNA (1)...(19): siRNA sense strand
gaaaugaaauuccacauag

SEQ ID NO: 1309839 - RNA, 19 nt, Homo sapiens
  misc_RNA (1)...(19): siRNA sense strand
gaaaugagcagagaagaua

SEQ ID NO: 1309840 - RNA, 19 nt, Homo sapiens
  misc_RNA (1)...(19): siRNA sense strand
gcacaaguguccuuugauu

SEQ ID NO: 1309841 - RNA, 19 nt, Homo sapiens
  misc_RNA (1)...(19): siRNA sense strand
caaaggagcuuccauguac

SEQ ID NO: 1309842 - RNA, 19 nt, Homo sapiens
  misc_RNA (1)...(19): siRNA sense strand
gcaggauccucaaguagua

SEQ ID NO: 1309843 - RNA, 19 nt, Homo sapiens
  misc_RNA (1)...(19): siRNA sense strand
gauuucagcuguuuaaaga

SEQ ID NO: 1309844 - RNA, 19 nt, Homo sapiens
  misc_RNA (1)...(19): siRNA sense strand
gaauuaaccugccauugug

SEQ ID NO: 1309845 - RNA, 19 nt, Homo sapiens
  misc_RNA (1)...(19): siRNA sense strand
gagcacaaguguccuuuga

SEQ ID NO: 1309846 - RNA, 19 nt, Homo sapiens
  misc_RNA (1)...(19): siRNA sense strand
gaacaacuaacaacagaaa

SEQ ID NO: 1309847 - RNA, 19 nt, Homo sapiens
  misc_RNA (1)...(19): siRNA sense strand
gcaggucccuuaugaugaa

SEQ ID NO: 1309848 - RNA, 19 nt, Homo sapiens
  misc_RNA (1)...(19): siRNA sense strand
gaaaugcgguaaccauaca

SEQ ID NO: 1309849 - RNA, 19 nt, Homo sapiens
  misc_RNA (1)...(19): siRNA sense strand
gaugaaaucucugcuguuc

SEQ ID NO: 1309850 - RNA, 19 nt, Homo sapiens
  misc_RNA (1)...(19): siRNA sense strand
gagaagauacccacagaaa

SEQ ID NO: 1309851 - RNA, 19 nt, Homo sapiens
  misc_RNA (1)...(19): siRNA sense strand
gacaagcgguguaacaaga

SEQ ID NO: 1309852 - RNA, 19 nt, Homo sapiens
  misc_RNA (1)...(19): siRNA sense strand
gagauaugcuguguggaua

SEQ ID NO: 1309853 - RNA, 19 nt, Homo sapiens
  misc_RNA (1)...(19): siRNA sense strand
gaaucaaccuuggcagaaa

SEQ ID NO: 1309854 - RNA, 19 nt, Homo sapiens
  misc_RNA (1)...(19): siRNA sense strand
ggaaugagaagcaccauau

SEQ ID NO: 1309855 - RNA, 19 nt, Homo sapiens
  misc_RNA (1)...(19): siRNA sense strand
caagagaaaugcacuguac

SEQ ID NO: 1309856 - RNA, 19 nt, Homo sapiens
  misc_RNA (1)...(19): siRNA sense strand
ccaggcaggucccuuauga

SEQ ID NO: 1309857 - RNA, 19 nt, Homo sapiens
  misc_RNA (1)...(19): siRNA sense strand
cauuugaacugcauaaaga

SEQ ID NO: 1309858 - RNA, 19 nt, Homo sapiens
  misc_RNA (1)...(19): siRNA sense strand
gaagcaaaccuaagaguca

SEQ ID NO: 1309859 - RNA, 19 nt, Homo sapiens
  misc_RNA (1)...(19): siRNA sense strand
gcacuuuccuaacucagaa

SEQ ID NO: 1309860 - RNA, 19 nt, Homo sapiens
  misc_RNA (1)...(19): siRNA sense strand
caaaggaugaccucaauga

SEQ ID NO: 1309861 - RNA, 19 nt, Homo sapiens
  misc_RNA (1)...(19): siRNA sense strand
cggcauaaauguaaugaga

SEQ ID NO: 1309862 - RNA, 19 nt, Homo sapiens
  misc_RNA (1)...(19): siRNA sense strand
aggaaagucugauggauuu

SEQ ID NO: 1309863 - RNA, 19 nt, Homo sapiens
  misc_RNA (1)...(19): siRNA sense strand
gagcagaaaugaaauucca

SEQ ID NO: 1309864 - RNA, 19 nt, Homo sapiens
  misc_RNA (1)...(19): siRNA sense strand
ccuaauaccuacacuuguu

SEQ ID NO: 1309865 - RNA, 19 nt, Homo sapiens
  misc_RNA (1)...(19): siRNA sense strand
gagcauaguccuucugaga

SEQ ID NO: 1309866 - RNA, 19 nt, Homo sapiens
  misc_RNA (1)...(19): siRNA sense strand
caacacaguuuguauacag

SEQ ID NO: 1309867 - RNA, 19 nt, Homo sapiens
  misc_RNA (1)...(19): siRNA sense strand
cgagauguguuauguggaa

SEQ ID NO: 1309868 - RNA, 19 nt, Homo sapiens
  misc_RNA (1)...(19): siRNA sense strand
caauacagaugcugcugaa

SEQ ID NO: 1309869 - RNA, 19 nt, Homo sapiens
  misc_RNA (1)...(19): siRNA sense strand
ggccaggacugcccacauu

SEQ ID NO: 1309870 - RNA, 19 nt, Homo sapiens
  misc_RNA (1)...(19): siRNA sense strand
ccaccucccugucaccuuu

SEQ ID NO: 1309871 - RNA, 19 nt, Homo sapiens
  misc_RNA (1)...(19): siRNA sense strand
guaaugagauaugcugugu

SEQ ID NO: 1309872 - RNA, 19 nt, Homo sapiens
  misc_RNA (1)...(19): siRNA sense strand
gaaaagcucugccaugaag

SEQ ID NO: 1309873 - RNA, 19 nt, Homo sapiens
  misc_RNA (1)...(19): siRNA sense strand
uuagagagcucgaccagau

SEQ ID NO: 1309874 - RNA, 19 nt, Homo sapiens
  misc_RNA (1)...(19): siRNA sense strand
uguaauaaaucgcccaaga

SEQ ID NO: 1309875 - RNA, 19 nt, Homo sapiens
  misc_RNA (1)...(19): siRNA sense strand
aagugaagaugcuacauuu

SEQ ID NO: 1309876 - RNA, 19 nt, Homo sapiens
  misc_RNA (1)...(19): siRNA sense strand
gcagauggccagagugguu

SEQ ID NO: 1309877 - RNA, 19 nt, Homo sapiens
  misc_RNA (1)...(19): siRNA sense strand
ggaguugucagagcuguua

SEQ ID NO: 1309878 - RNA, 19 nt, Homo sapiens
  misc_RNA (1)...(19): siRNA sense strand
cagagaagauacccacaga

SEQ ID NO: 1309879 - RNA, 19 nt, Homo sapiens
  misc_RNA (1)...(19): siRNA sense strand
gagcagaccucagauacag

SEQ ID NO: 1309880 - RNA, 19 nt, Homo sapiens
  misc_RNA (1)...(19): siRNA sense strand
gccauggccuucagaauca

SEQ ID NO: 1309881 - RNA, 19 nt, Homo sapiens
  misc_RNA (1)...(19): siRNA sense strand
gaguggagcagaaaugaaa

SEQ ID NO: 1309882 - RNA, 19 nt, Homo sapiens
  misc_RNA (1)...(19): siRNA sense strand
ugaagaugcuacauuuaug

SEQ ID NO: 1309883 - RNA, 19 nt, Homo sapiens
  misc_RNA (1)...(19): siRNA sense strand
gaacuuggcagucaucaac

SEQ ID NO: 1309884 - RNA, 19 nt, Homo sapiens
  misc_RNA (1)...(19): siRNA sense strand
ggugagguuuguagaaaga

SEQ ID NO: 1309885 - RNA, 19 nt, Homo sapiens
  misc_RNA (1)...(19): siRNA sense strand
guuaccauguguuucauuu

SEQ ID NO: 1309886 - RNA, 19 nt, Homo sapiens
  misc_RNA (1)...(19): siRNA sense strand
uaccauguguuucauuuga

SEQ ID NO: 1309887 - RNA, 19 nt, Homo sapiens
  misc_RNA (1)...(19): siRNA sense strand
ugaauuaaccugccauugu

SEQ ID NO: 1309888 - RNA, 19 nt, Homo sapiens
  misc_RNA (1)...(19): siRNA sense strand
uggcagaaauugaggaaug

SEQ ID NO: 1309889 - RNA, 19 nt, Homo sapiens
  misc_RNA (1)...(19): siRNA sense strand
ccaguucccugugguacua

SEQ ID NO: 1309890 - RNA, 19 nt, Homo sapiens
  misc_RNA (1)...(19): siRNA sense strand
gugaagaugcuacauuuau

SEQ ID NO: 1309891 - RNA, 19 nt, Homo sapiens
  misc_RNA (1)...(19): siRNA sense strand
cagaugcucuuucagaaca

SEQ ID NO: 1309892 - RNA, 19 nt, Homo sapiens
  misc_RNA (1)...(19): siRNA sense strand
ccaggaggguugaccaaga

SEQ ID NO: 1309893 - RNA, 19 nt, Homo sapiens
  misc_RNA (1)...(19): siRNA sense strand
aaacagaaccaugugcuaa

SEQ ID NO: 1309894 - RNA, 19 nt, Homo sapiens
  misc_RNA (1)...(19): siRNA sense strand
gcauaguccuucugagagu

SEQ ID NO: 1309895 - RNA, 19 nt, Homo sapiens
  misc_RNA (1)...(19): siRNA sense strand
caaguaguaucuccuuucu

SEQ ID NO: 1309896 - RNA, 19 nt, Homo sapiens
  misc_RNA (1)...(19): siRNA sense strand
ugaagaaccuugucaucgu

SEQ ID NO: 1309897 - RNA, 19 nt, Homo sapiens
  misc_RNA (1)...(19): siRNA sense strand
guggugagguuuguagaaa

SEQ ID NO: 1309898 - RNA, 19 nt, Homo sapiens
  misc_RNA (1)...(19): siRNA sense strand
uaauaggauugguagaaga

SEQ ID NO: 1309899 - RNA, 19 nt, Homo sapiens
  misc_RNA (1)...(19): siRNA sense strand
gaaggagacuguggaccau

SEQ ID NO: 1309900 - RNA, 19 nt, Homo sapiens
  misc_RNA (1)...(19): siRNA sense strand
gaaccgauguaggaaaguc

SEQ ID NO: 1309901 - RNA, 19 nt, Homo sapiens
  misc_RNA (1)...(19): siRNA sense strand
ggcagaaauugaggaauga

SEQ ID NO: 1309902 - RNA, 19 nt, Homo sapiens
  misc_RNA (1)...(19): siRNA sense strand
acaaguguccuuugauuug

SEQ ID NO: 1309903 - RNA, 19 nt, Homo sapiens
  misc_RNA (1)...(19): siRNA sense strand
aaacuccucucagccaauu

SEQ ID NO: 1309904 - RNA, 19 nt, Homo sapiens
  misc_RNA (1)...(19): siRNA sense strand
uaacccaugugagaauauu

SEQ ID NO: 1309905 - RNA, 19 nt, Homo sapiens
  misc_RNA (1)...(19): siRNA sense strand
agauacagcuggauuagag

SEQ ID NO: 1309906 - RNA, 19 nt, Homo sapiens
  misc_RNA (1)...(19): siRNA sense strand
uacagaugcugcugaauuc

SEQ ID NO: 1309907 - RNA, 19 nt, Homo sapiens
  misc_RNA (1)...(19): siRNA sense strand
caagcgguguaacaagaaa

SEQ ID NO: 1309908 - RNA, 19 nt, Homo sapiens
  misc_RNA (1)...(19): siRNA sense strand
ggaccaugcucucgcacau

SEQ ID NO: 1309909 - RNA, 19 nt, Homo sapiens
  misc_RNA (1)...(19): siRNA sense strand
gagcuguuaccauguguuu

SEQ ID NO: 1309910 - RNA, 19 nt, Homo sapiens
  misc_RNA (1)...(19): siRNA sense strand
agaaccaugugcuaaagaa

SEQ ID NO: 1309911 - RNA, 19 nt, Homo sapiens
  misc_RNA (1)...(19): siRNA sense strand
gaucagagagugggacaga

SEQ ID NO: 1309912 - RNA, 19 nt, Homo sapiens
  misc_RNA (1)...(19): siRNA sense strand
acaaaggagcuuccaugua

SEQ ID NO: 1309913 - RNA, 19 nt, Homo sapiens
  misc_RNA (1)...(19): siRNA sense strand
ucaagcagauggccagagu

SEQ ID NO: 1309914 - RNA, 19 nt, Homo sapiens
  misc_RNA (1)...(19): siRNA sense strand
ggugugcugugaauugguu

SEQ ID NO: 1309915 - RNA, 19 nt, Homo sapiens
  misc_RNA (1)...(19): siRNA sense strand
caggagggccaccgacaua

SEQ ID NO: 1309916 - RNA, 19 nt, Homo sapiens
  misc_RNA (1)...(19): siRNA sense strand
gcaacacaguuuguauaca

SEQ ID NO: 1309917 - RNA, 19 nt, Homo sapiens
  misc_RNA (1)...(19): siRNA sense strand
gaccauccaguauaucauu

SEQ ID NO: 1309918 - RNA, 19 nt, Homo sapiens
  misc_RNA (1)...(19): siRNA sense strand
gugaaaagcucugccauga

SEQ ID NO: 1309919 - RNA, 19 nt, Homo sapiens
  misc_RNA (1)...(19): siRNA sense strand
ggcaaggucuccagcaucu

SEQ ID NO: 1309920 - RNA, 19 nt, Homo sapiens
  misc_RNA (1)...(19): siRNA sense strand
ugaacugcauaaagaaaug

SEQ ID NO: 1309921 - RNA, 19 nt, Homo sapiens
  misc_RNA (1)...(19): siRNA sense strand
gaaacucaaaugugaaugg

SEQ ID NO: 1309922 - RNA, 19 nt, Homo sapiens
  misc_RNA (1)...(19): siRNA sense strand
gguagaagaaauuacaguu

SEQ ID NO: 1309923 - RNA, 19 nt, Homo sapiens
  misc_RNA (1)...(19): siRNA sense strand
caaguguccuuugauuugu

SEQ ID NO: 1309924 - RNA, 19 nt, Homo sapiens
  misc_RNA (1)...(19): siRNA sense strand
ucaggaagcaaaccuaaga

SEQ ID NO: 1309925 - RNA, 19 nt, Homo sapiens
  misc_RNA (1)...(19): siRNA sense strand
uaccuacacuuguuucugu

SEQ ID NO: 1309926 - RNA, 19 nt, Homo sapiens
  misc_RNA (1)...(19): siRNA sense strand
auacagaugcugcugaauu

SEQ ID NO: 1309927 - RNA, 19 nt, Homo sapiens
  misc_RNA (1)...(19): siRNA sense strand
aagcaacacaguuuguaua

SEQ ID NO: 1309928 - RNA, 19 nt, Homo sapiens
  misc_RNA (1)...(19): siRNA sense strand
gagagcauaguccuucuga

SEQ ID NO: 1309929 - RNA, 19 nt, Homo sapiens
  misc_RNA (1)...(19): siRNA sense strand
guaccagucucaaaaguga

SEQ ID NO: 1309930 - RNA, 19 nt, Homo sapiens
  misc_RNA (1)...(19): siRNA sense strand
ucucgcacaucaguuauuu

SEQ ID NO: 1309931 - RNA, 19 nt, Homo sapiens
  misc_RNA (1)...(19): siRNA sense strand
ccacuguucuaacccaugu

SEQ ID NO: 1309932 - RNA, 19 nt, Homo sapiens
  misc_RNA (1)...(19): siRNA sense strand
ucagagcuguuaccaugug

SEQ ID NO: 1309933 - RNA, 19 nt, Homo sapiens
  misc_RNA (1)...(19): siRNA sense strand
cacacagguucucuaauug

SEQ ID NO: 1309934 - RNA, 19 nt, Homo sapiens
  misc_RNA (1)...(19): siRNA sense strand
caaacagaaccaugugcua

SEQ ID NO: 1309935 - RNA, 19 nt, Homo sapiens
  misc_RNA (1)...(19): siRNA sense strand
guagaagaaauuacaguuc

SEQ ID NO: 1309936 - RNA, 19 nt, Homo sapiens
  misc_RNA (1)...(19): siRNA sense strand
guggacggcauaaauguaa

SEQ ID NO: 1309937 - RNA, 19 nt, Homo sapiens
  misc_RNA (1)...(19): siRNA sense strand
gcacacagguucucuaauu

SEQ ID NO: 1309938 - RNA, 19 nt, Homo sapiens
  misc_RNA (1)...(19): siRNA sense strand
gaaaugaaauuccacauag

SEQ ID NO: 1309939 - RNA, 19 nt, Homo sapiens
  misc_RNA (1)...(19): siRNA sense strand
gaaaugagcagagaagaua

SEQ ID NO: 1309940 - RNA, 19 nt, Homo sapiens
  misc_RNA (1)...(19): siRNA sense strand
gcacaaguguccuuugauu

SEQ ID NO: 1309941 - RNA, 19 nt, Homo sapiens
  misc_RNA (1)...(19): siRNA sense strand
caaaggagcuuccauguac

SEQ ID NO: 1309942 - RNA, 19 nt, Homo sapiens
  misc_RNA (1)...(19): siRNA sense strand
gcaggauccucaaguagua

SEQ ID NO: 1309943 - RNA, 19 nt, Homo sapiens
  misc_RNA (1)...(19): siRNA sense strand
gauuucagcuguuuaaaga

SEQ ID NO: 1309944 - RNA, 19 nt, Homo sapiens
  misc_RNA (1)...(19): siRNA sense strand
gaauuaaccugccauugug

SEQ ID NO: 1309945 - RNA, 19 nt, Homo sapiens
  misc_RNA (1)...(19): siRNA sense strand
gagcacaaguguccuuuga

SEQ ID NO: 1309946 - RNA, 19 nt, Homo sapiens
  misc_RNA (1)...(19): siRNA sense strand
gaacaacuaacaacagaaa

SEQ ID NO: 1309947 - RNA, 19 nt, Homo sapiens
  misc_RNA (1)...(19): siRNA sense strand
gcaggucccuuaugaugaa

SEQ ID NO: 1309948 - RNA, 19 nt, Homo sapiens
  misc_RNA (1)...(19): siRNA sense strand
gaaaugcgguaaccauaca

SEQ ID NO: 1309949 - RNA, 19 nt, Homo sapiens
  misc_RNA (1)...(19): siRNA sense strand
gaugaaaucucugcuguuc

SEQ ID NO: 1309950 - RNA, 19 nt, Homo sapiens
  misc_RNA (1)...(19): siRNA sense strand
gagaagauacccacagaaa

SEQ ID NO: 1309951 - RNA, 19 nt, Homo sapiens
  misc_RNA (1)...(19): siRNA sense strand
gacaagcgguguaacaaga

SEQ ID NO: 1309952 - RNA, 19 nt, Homo sapiens
  misc_RNA (1)...(19): siRNA sense strand
gagauaugcuguguggaua

SEQ ID NO: 1309953 - RNA, 19 nt, Homo sapiens
  misc_RNA (1)...(19): siRNA sense strand
gaaucaaccuuggcagaaa

SEQ ID NO: 1309954 - RNA, 19 nt, Homo sapiens
  misc_RNA (1)...(19): siRNA sense strand
ggaaugagaagcaccauau

SEQ ID NO: 1309955 - RNA, 19 nt, Homo sapiens
  misc_RNA (1)...(19): siRNA sense strand
caagagaaaugcacuguac

SEQ ID NO: 1309956 - RNA, 19 nt, Homo sapiens
  misc_RNA (1)...(19): siRNA sense strand
ccaggcaggucccuuauga

SEQ ID NO: 1309957 - RNA, 19 nt, Homo sapiens
  misc_RNA (1)...(19): siRNA sense strand
cauuugaacugcauaaaga

SEQ ID NO: 1309958 - RNA, 19 nt, Homo sapiens
  misc_RNA (1)...(19): siRNA sense strand
gaagcaaaccuaagaguca

SEQ ID NO: 1309959 - RNA, 19 nt, Homo sapiens
  misc_RNA (1)...(19): siRNA sense strand
gcacuuuccuaacucagaa

SEQ ID NO: 1309960 - RNA, 19 nt, Homo sapiens
  misc_RNA (1)...(19): siRNA sense strand
caaaggaugaccucaauga

SEQ ID NO: 1309961 - RNA, 19 nt, Homo sapiens
  misc_RNA (1)...(19): siRNA sense strand
cggcauaaauguaaugaga

SEQ ID NO: 1309962 - RNA, 19 nt, Homo sapiens
  misc_RNA (1)...(19): siRNA sense strand
aggaaagucugauggauuu

SEQ ID NO: 1309963 - RNA, 19 nt, Homo sapiens
  misc_RNA (1)...(19): siRNA sense strand
gagcagaaaugaaauucca

SEQ ID NO: 1309964 - RNA, 19 nt, Homo sapiens
  misc_RNA (1)...(19): siRNA sense strand
ccuaauaccuacacuuguu

SEQ ID NO: 1309965 - RNA, 19 nt, Homo sapiens
  misc_RNA (1)...(19): siRNA sense strand
gagcauaguccuucugaga

SEQ ID NO: 1309966 - RNA, 19 nt, Homo sapiens
  misc_RNA (1)...(19): siRNA sense strand
caacacaguuuguauacag

SEQ ID NO: 1309967 - RNA, 19 nt, Homo sapiens
  misc_RNA (1)...(19): siRNA sense strand
cgagauguguuauguggaa

SEQ ID NO: 1309968 - RNA, 19 nt, Homo sapiens
  misc_RNA (1)...(19): siRNA sense strand
caauacagaugcugcugaa

SEQ ID NO: 1309969 - RNA, 19 nt, Homo sapiens
  misc_RNA (1)...(19): siRNA sense strand
ggccaggacugcccacauu

SEQ ID NO: 1309970 - RNA, 19 nt, Homo sapiens
  misc_RNA (1)...(19): siRNA sense strand
ccaccucccugucaccuuu

SEQ ID NO: 1309971 - RNA, 19 nt, Homo sapiens
  misc_RNA (1)...(19): siRNA sense strand
guaaugagauaugcugugu

SEQ ID NO: 1309972 - RNA, 19 nt, Homo sapiens
  misc_RNA (1)...(19): siRNA sense strand
gaaaagcucugccaugaag

SEQ ID NO: 1309973 - RNA, 19 nt, Homo sapiens
  misc_RNA (1)...(19): siRNA sense strand
uuagagagcucgaccagau

SEQ ID NO: 1309974 - RNA, 19 nt, Homo sapiens
  misc_RNA (1)...(19): siRNA sense strand
uguaauaaaucgcccaaga

SEQ ID NO: 1309975 - RNA, 19 nt, Homo sapiens
  misc_RNA (1)...(19): siRNA sense strand
aagugaagaugcuacauuu

SEQ ID NO: 1309976 - RNA, 19 nt, Homo sapiens
  misc_RNA (1)...(19): siRNA sense strand
gcagauggccagagugguu

SEQ ID NO: 1309977 - RNA, 19 nt, Homo sapiens
  misc_RNA (1)...(19): siRNA sense strand
ggaguugucagagcuguua

SEQ ID NO: 1309978 - RNA, 19 nt, Homo sapiens
  misc_RNA (1)...(19): siRNA sense strand
cagagaagauacccacaga

SEQ ID NO: 1309979 - RNA, 19 nt, Homo sapiens
  misc_RNA (1)...(19): siRNA sense strand
gagcagaccucagauacag

SEQ ID NO: 1309980 - RNA, 19 nt, Homo sapiens
  misc_RNA (1)...(19): siRNA sense strand
gccauggccuucagaauca

SEQ ID NO: 1309981 - RNA, 19 nt, Homo sapiens
  misc_RNA (1)...(19): siRNA sense strand
gaguggagcagaaaugaaa

SEQ ID NO: 1309982 - RNA, 19 nt, Homo sapiens
  misc_RNA (1)...(19): siRNA sense strand
ugaagaugcuacauuuaug

SEQ ID NO: 1309983 - RNA, 19 nt, Homo sapiens
  misc_RNA (1)...(19): siRNA sense strand
gaacuuggcagucaucaac

SEQ ID NO: 1309984 - RNA, 19 nt, Homo sapiens
  misc_RNA (1)...(19): siRNA sense strand
ggugagguuuguagaaaga

SEQ ID NO: 1309985 - RNA, 19 nt, Homo sapiens
  misc_RNA (1)...(19): siRNA sense strand
guuaccauguguuucauuu

SEQ ID NO: 1309986 - RNA, 19 nt, Homo sapiens
  misc_RNA (1)...(19): siRNA sense strand
uaccauguguuucauuuga

SEQ ID NO: 1309987 - RNA, 19 nt, Homo sapiens
  misc_RNA (1)...(19): siRNA sense strand
ugaauuaaccugccauugu

SEQ ID NO: 1309988 - RNA, 19 nt, Homo sapiens
  misc_RNA (1)...(19): siRNA sense strand
uggcagaaauugaggaaug

SEQ ID NO: 1309989 - RNA, 19 nt, Homo sapiens
  misc_RNA (1)...(19): siRNA sense strand
ccaguucccugugguacua

SEQ ID NO: 1309990 - RNA, 19 nt, Homo sapiens
  misc_RNA (1)...(19): siRNA sense strand
gugaagaugcuacauuuau

SEQ ID NO: 1309991 - RNA, 19 nt, Homo sapiens
  misc_RNA (1)...(19): siRNA sense strand
cagaugcucuuucagaaca

SEQ ID NO: 1309992 - RNA, 19 nt, Homo sapiens
  misc_RNA (1)...(19): siRNA sense strand
ccaggaggguugaccaaga

SEQ ID NO: 1309993 - RNA, 19 nt, Homo sapiens
  misc_RNA (1)...(19): siRNA sense strand
aaacagaaccaugugcuaa

SEQ ID NO: 1309994 - RNA, 19 nt, Homo sapiens
  misc_RNA (1)...(19): siRNA sense strand
gcauaguccuucugagagu

SEQ ID NO: 1309995 - RNA, 19 nt, Homo sapiens
  misc_RNA (1)...(19): siRNA sense strand
caaguaguaucuccuuucu

SEQ ID NO: 1309996 - RNA, 19 nt, Homo sapiens
  misc_RNA (1)...(19): siRNA sense strand
ugaagaaccuugucaucgu

SEQ ID NO: 1309997 - RNA, 19 nt, Homo sapiens
  misc_RNA (1)...(19): siRNA sense strand
guggugagguuuguagaaa

SEQ ID NO: 1309998 - RNA, 19 nt, Homo sapiens
  misc_RNA (1)...(19): siRNA sense strand
uaauaggauugguagaaga

SEQ ID NO: 1309999 - RNA, 19 nt, Homo sapiens
  misc_RNA (1)...(19): siRNA sense strand
gaaggagacuguggaccau

SEQ ID NO: 1310000 - RNA, 19 nt, Homo sapiens
  misc_RNA (1)...(19): siRNA sense strand
gaaccgauguaggaaaguc

SEQ ID NO: 1310001 - RNA, 19 nt, Homo sapiens
  misc_RNA (1)...(19): siRNA sense strand
ggcagaaauugaggaauga

SEQ ID NO: 1310002 - RNA, 19 nt, Homo sapiens
  misc_RNA (1)...(19): siRNA sense strand
acaaguguccuuugauuug

SEQ ID NO: 1310003 - RNA, 19 nt, Homo sapiens
  misc_RNA (1)...(19): siRNA sense strand
aaacuccucucagccaauu

SEQ ID NO: 1310004 - RNA, 19 nt, Homo sapiens
  misc_RNA (1)...(19): siRNA sense strand
uaacccaugugagaauauu

SEQ ID NO: 1310005 - RNA, 19 nt, Homo sapiens
  misc_RNA (1)...(19): siRNA sense strand
agauacagcuggauuagag

SEQ ID NO: 1310006 - RNA, 19 nt, Homo sapiens
  misc_RNA (1)...(19): siRNA sense strand
uacagaugcugcugaauuc

SEQ ID NO: 1310007 - RNA, 19 nt, Homo sapiens
  misc_RNA (1)...(19): siRNA sense strand
caagcgguguaacaagaaa

SEQ ID NO: 1310008 - RNA, 19 nt, Homo sapiens
  misc_RNA (1)...(19): siRNA sense strand
ggaccaugcucucgcacau

SEQ ID NO: 1310009 - RNA, 19 nt, Homo sapiens
  misc_RNA (1)...(19): siRNA sense strand
gagcuguuaccauguguuu

SEQ ID NO: 1310010 - RNA, 19 nt, Homo sapiens
  misc_RNA (1)...(19): siRNA sense strand
agaaccaugugcuaaagaa

SEQ ID NO: 1310011 - RNA, 19 nt, Homo sapiens
  misc_RNA (1)...(19): siRNA sense strand
gaucagagagugggacaga

SEQ ID NO: 1310012 - RNA, 19 nt, Homo sapiens
  misc_RNA (1)...(19): siRNA sense strand
acaaaggagcuuccaugua

SEQ ID NO: 1310013 - RNA, 19 nt, Homo sapiens
  misc_RNA (1)...(19): siRNA sense strand
ucaagcagauggccagagu

SEQ ID NO: 1310014 - RNA, 19 nt, Homo sapiens
  misc_RNA (1)...(19): siRNA sense strand
ggugugcugugaauugguu

SEQ ID NO: 1310015 - RNA, 19 nt, Homo sapiens
  misc_RNA (1)...(19): siRNA sense strand
caggagggccaccgacaua

SEQ ID NO: 1310016 - RNA, 19 nt, Homo sapiens
  misc_RNA (1)...(19): siRNA sense strand
gcaacacaguuuguauaca

SEQ ID NO: 1310017 - RNA, 19 nt, Homo sapiens
  misc_RNA (1)...(19): siRNA sense strand
gaccauccaguauaucauu

SEQ ID NO: 1310018 - RNA, 19 nt, Homo sapiens
  misc_RNA (1)...(19): siRNA sense strand
gugaaaagcucugccauga

SEQ ID NO: 1310019 - RNA, 19 nt, Homo sapiens
  misc_RNA (1)...(19): siRNA sense strand
ggcaaggucuccagcaucu

SEQ ID NO: 1310020 - RNA, 19 nt, Homo sapiens
  misc_RNA (1)...(19): siRNA sense strand
ugaacugcauaaagaaaug

SEQ ID NO: 1310021 - RNA, 19 nt, Homo sapiens
  misc_RNA (1)...(19): siRNA sense strand
gaaacucaaaugugaaugg

SEQ ID NO: 1310022 - RNA, 19 nt, Homo sapiens
  misc_RNA (1)...(19): siRNA sense strand
gguagaagaaauuacaguu

SEQ ID NO: 1310023 - RNA, 19 nt, Homo sapiens
  misc_RNA (1)...(19): siRNA sense strand
caaguguccuuugauuugu

SEQ ID NO: 1310024 - RNA, 19 nt, Homo sapiens
  misc_RNA (1)...(19): siRNA sense strand
ucaggaagcaaaccuaaga

SEQ ID NO: 1310025 - RNA, 19 nt, Homo sapiens
  misc_RNA (1)...(19): siRNA sense strand
uaccuacacuuguuucugu

SEQ ID NO: 1310026 - RNA, 19 nt, Homo sapiens
  misc_RNA (1)...(19): siRNA sense strand
auacagaugcugcugaauu

SEQ ID NO: 1310027 - RNA, 19 nt, Homo sapiens
  misc_RNA (1)...(19): siRNA sense strand
aagcaacacaguuuguaua

SEQ ID NO: 1310028 - RNA, 19 nt, Homo sapiens
  misc_RNA (1)...(19): siRNA sense strand
gagagcauaguccuucuga

SEQ ID NO: 1310029 - RNA, 19 nt, Homo sapiens
  misc_RNA (1)...(19): siRNA sense strand
guaccagucucaaaaguga

SEQ ID NO: 1310030 - RNA, 19 nt, Homo sapiens
  misc_RNA (1)...(19): siRNA sense strand
ucucgcacaucaguuauuu

SEQ ID NO: 1310031 - RNA, 19 nt, Homo sapiens
  misc_RNA (1)...(19): siRNA sense strand
ccacuguucuaacccaugu

SEQ ID NO: 1310032 - RNA, 19 nt, Homo sapiens
  misc_RNA (1)...(19): siRNA sense strand
ucagagcuguuaccaugug

SEQ ID NO: 1310033 - RNA, 19 nt, Homo sapiens
  misc_RNA (1)...(19): siRNA sense strand
cacacagguucucuaauug

SEQ ID NO: 1310034 - RNA, 19 nt, Homo sapiens
  misc_RNA (1)...(19): siRNA sense strand
caaacagaaccaugugcua

SEQ ID NO: 1310035 - RNA, 19 nt, Homo sapiens
  misc_RNA (1)...(19): siRNA sense strand
guagaagaaauuacaguuc

SEQ ID NO: 1310036 - RNA, 19 nt, Homo sapiens
  misc_RNA (1)...(19): siRNA sense strand
guggacggcauaaauguaa

SEQ ID NO: 1310037 - RNA, 19 nt, Homo sapiens
  misc_RNA (1)...(19): siRNA sense strand
gcacacagguucucuaauu

SEQ ID NO: 1310038 - RNA, 19 nt, Homo sapiens
  misc_RNA (1)...(19): siRNA sense strand
gaaaugaaauuccacauag

SEQ ID NO: 1310039 - RNA, 19 nt, Homo sapiens
  misc_RNA (1)...(19): siRNA sense strand
gaaaugagcagagaagaua

SEQ ID NO: 1310040 - RNA, 19 nt, Homo sapiens
  misc_RNA (1)...(19): siRNA sense strand
gcacaaguguccuuugauu

SEQ ID NO: 1310041 - RNA, 19 nt, Homo sapiens
  misc_RNA (1)...(19): siRNA sense strand
caaaggagcuuccauguac

SEQ ID NO: 1310042 - RNA, 19 nt, Homo sapiens
  misc_RNA (1)...(19): siRNA sense strand
gcaggauccucaaguagua

SEQ ID NO: 1310043 - RNA, 19 nt, Homo sapiens
  misc_RNA (1)...(19): siRNA sense strand
gauuucagcuguuuaaaga

SEQ ID NO: 1310044 - RNA, 19 nt, Homo sapiens
  misc_RNA (1)...(19): siRNA sense strand
gaauuaaccugccauugug

SEQ ID NO: 1310045 - RNA, 19 nt, Homo sapiens
  misc_RNA (1)...(19): siRNA sense strand
gagcacaaguguccuuuga

SEQ ID NO: 1310046 - RNA, 19 nt, Homo sapiens
  misc_RNA (1)...(19): siRNA sense strand
gaacaacuaacaacagaaa

SEQ ID NO: 1310047 - RNA, 19 nt, Homo sapiens
  misc_RNA (1)...(19): siRNA sense strand
gcaggucccuuaugaugaa

SEQ ID NO: 1310048 - RNA, 19 nt, Homo sapiens
  misc_RNA (1)...(19): siRNA sense strand
gaaaugcgguaaccauaca

SEQ ID NO: 1310049 - RNA, 19 nt, Homo sapiens
  misc_RNA (1)...(19): siRNA sense strand
gaugaaaucucugcuguuc

SEQ ID NO: 1310050 - RNA, 19 nt, Homo sapiens
  misc_RNA (1)...(19): siRNA sense strand
gagaagauacccacagaaa

SEQ ID NO: 1310051 - RNA, 19 nt, Homo sapiens
  misc_RNA (1)...(19): siRNA sense strand
gacaagcgguguaacaaga

SEQ ID NO: 1310052 - RNA, 19 nt, Homo sapiens
  misc_RNA (1)...(19): siRNA sense strand
gagauaugcuguguggaua

SEQ ID NO: 1310053 - RNA, 19 nt, Homo sapiens
  misc_RNA (1)...(19): siRNA sense strand
gaaucaaccuuggcagaaa

SEQ ID NO: 1310054 - RNA, 19 nt, Homo sapiens
  misc_RNA (1)...(19): siRNA sense strand
ggaaugagaagcaccauau

SEQ ID NO: 1310055 - RNA, 19 nt, Homo sapiens
  misc_RNA (1)...(19): siRNA sense strand
caagagaaaugcacuguac

SEQ ID NO: 1310056 - RNA, 19 nt, Homo sapiens
  misc_RNA (1)...(19): siRNA sense strand
ccaggcaggucccuuauga

SEQ ID NO: 1310057 - RNA, 19 nt, Homo sapiens
  misc_RNA (1)...(19): siRNA sense strand
cauuugaacugcauaaaga

SEQ ID NO: 1310058 - RNA, 19 nt, Homo sapiens
  misc_RNA (1)...(19): siRNA sense strand
gaagcaaaccuaagaguca

SEQ ID NO: 1310059 - RNA, 19 nt, Homo sapiens
  misc_RNA (1)...(19): siRNA sense strand
gcacuuuccuaacucagaa

SEQ ID NO: 1310060 - RNA, 19 nt, Homo sapiens
  misc_RNA (1)...(19): siRNA sense strand
caaaggaugaccucaauga

SEQ ID NO: 1310061 - RNA, 19 nt, Homo sapiens
  misc_RNA (1)...(19): siRNA sense strand
cggcauaaauguaaugaga

SEQ ID NO: 1310062 - RNA, 19 nt, Homo sapiens
  misc_RNA (1)...(19): siRNA sense strand
aggaaagucugauggauuu

SEQ ID NO: 1310063 - RNA, 19 nt, Homo sapiens
  misc_RNA (1)...(19): siRNA sense strand
gagcagaaaugaaauucca

SEQ ID NO: 1310064 - RNA, 19 nt, Homo sapiens
  misc_RNA (1)...(19): siRNA sense strand
ccuaauaccuacacuuguu

SEQ ID NO: 1310065 - RNA, 19 nt, Homo sapiens
  misc_RNA (1)...(19): siRNA sense strand
gagcauaguccuucugaga

SEQ ID NO: 1310066 - RNA, 19 nt, Homo sapiens
  misc_RNA (1)...(19): siRNA sense strand
caacacaguuuguauacag

SEQ ID NO: 1310067 - RNA, 19 nt, Homo sapiens
  misc_RNA (1)...(19): siRNA sense strand
cgagauguguuauguggaa

SEQ ID NO: 1310068 - RNA, 19 nt, Homo sapiens
  misc_RNA (1)...(19): siRNA sense strand
caauacagaugcugcugaa

SEQ ID NO: 1310069 - RNA, 19 nt, Homo sapiens
  misc_RNA (1)...(19): siRNA sense strand
ggccaggacugcccacauu

SEQ ID NO: 1310070 - RNA, 19 nt, Homo sapiens
  misc_RNA (1)...(19): siRNA sense strand
ccaccucccugucaccuuu

SEQ ID NO: 1310071 - RNA, 19 nt, Homo sapiens
  misc_RNA (1)...(19): siRNA sense strand
guaaugagauaugcugugu

SEQ ID NO: 1310072 - RNA, 19 nt, Homo sapiens
  misc_RNA (1)...(19): siRNA sense strand
gaaaagcucugccaugaag

SEQ ID NO: 1310073 - RNA, 19 nt, Homo sapiens
  misc_RNA (1)...(19): siRNA sense strand
uuagagagcucgaccagau

SEQ ID NO: 1310074 - RNA, 19 nt, Homo sapiens
  misc_RNA (1)...(19): siRNA sense strand
uguaauaaaucgcccaaga

SEQ ID NO: 1310075 - RNA, 19 nt, Homo sapiens
  misc_RNA (1)...(19): siRNA sense strand
aagugaagaugcuacauuu

SEQ ID NO: 1310076 - RNA, 19 nt, Homo sapiens
  misc_RNA (1)...(19): siRNA sense strand
gcagauggccagagugguu

SEQ ID NO: 1310077 - RNA, 19 nt, Homo sapiens
  misc_RNA (1)...(19): siRNA sense strand
ggaguugucagagcuguua

SEQ ID NO: 1310078 - RNA, 19 nt, Homo sapiens
  misc_RNA (1)...(19): siRNA sense strand
cagagaagauacccacaga

SEQ ID NO: 1310079 - RNA, 19 nt, Homo sapiens
  misc_RNA (1)...(19): siRNA sense strand
gagcagaccucagauacag

SEQ ID NO: 1310080 - RNA, 19 nt, Homo sapiens
  misc_RNA (1)...(19): siRNA sense strand
gccauggccuucagaauca

SEQ ID NO: 1310081 - RNA, 19 nt, Homo sapiens
  misc_RNA (1)...(19): siRNA sense strand
gaguggagcagaaaugaaa

SEQ ID NO: 1310082 - RNA, 19 nt, Homo sapiens
  misc_RNA (1)...(19): siRNA sense strand
ugaagaugcuacauuuaug

SEQ ID NO: 1310083 - RNA, 19 nt, Homo sapiens
  misc_RNA (1)...(19): siRNA sense strand
gaacuuggcagucaucaac

SEQ ID NO: 1310084 - RNA, 19 nt, Homo sapiens
  misc_RNA (1)...(19): siRNA sense strand
ggugagguuuguagaaaga

SEQ ID NO: 1310085 - RNA, 19 nt, Homo sapiens
  misc_RNA (1)...(19): siRNA sense strand
guuaccauguguuucauuu

SEQ ID NO: 1310086 - RNA, 19 nt, Homo sapiens
  misc_RNA (1)...(19): siRNA sense strand
uaccauguguuucauuuga

SEQ ID NO: 1310087 - RNA, 19 nt, Homo sapiens
  misc_RNA (1)...(19): siRNA sense strand
ugaauuaaccugccauugu

SEQ ID NO: 1310088 - RNA, 19 nt, Homo sapiens
  misc_RNA (1)...(19): siRNA sense strand
uggcagaaauugaggaaug

SEQ ID NO: 1310089 - RNA, 19 nt, Homo sapiens
  misc_RNA (1)...(19): siRNA sense strand
ccaguucccugugguacua

SEQ ID NO: 1310090 - RNA, 19 nt, Homo sapiens
  misc_RNA (1)...(19): siRNA sense strand
gugaagaugcuacauuuau

SEQ ID NO: 1310091 - RNA, 19 nt, Homo sapiens
  misc_RNA (1)...(19): siRNA sense strand
cagaugcucuuucagaaca

SEQ ID NO: 1310092 - RNA, 19 nt, Homo sapiens
  misc_RNA (1)...(19): siRNA sense strand
ccaggaggguugaccaaga

SEQ ID NO: 1310093 - RNA, 19 nt, Homo sapiens
  misc_RNA (1)...(19): siRNA sense strand
aaacagaaccaugugcuaa

SEQ ID NO: 1310094 - RNA, 19 nt, Homo sapiens
  misc_RNA (1)...(19): siRNA sense strand
gcauaguccuucugagagu

SEQ ID NO: 1310095 - RNA, 19 nt, Homo sapiens
  misc_RNA (1)...(19): siRNA sense strand
caaguaguaucuccuuucu

SEQ ID NO: 1310096 - RNA, 19 nt, Homo sapiens
  misc_RNA (1)...(19): siRNA sense strand
ugaagaaccuugucaucgu

SEQ ID NO: 1310097 - RNA, 19 nt, Homo sapiens
  misc_RNA (1)...(19): siRNA sense strand
guggugagguuuguagaaa

SEQ ID NO: 1310098 - RNA, 19 nt, Homo sapiens
  misc_RNA (1)...(19): siRNA sense strand
uaauaggauugguagaaga

SEQ ID NO: 1310099 - RNA, 19 nt, Homo sapiens
  misc_RNA (1)...(19): siRNA sense strand
gaaggagacuguggaccau

SEQ ID NO: 1310100 - RNA, 19 nt, Homo sapiens
  misc_RNA (1)...(19): siRNA sense strand
gaaccgauguaggaaaguc

SEQ ID NO: 1310101 - RNA, 19 nt, Homo sapiens
  misc_RNA (1)...(19): siRNA sense strand
ggcagaaauugaggaauga

SEQ ID NO: 1310102 - RNA, 19 nt, Homo sapiens
  misc_RNA (1)...(19): siRNA sense strand
acaaguguccuuugauuug

SEQ ID NO: 1310103 - RNA, 19 nt, Homo sapiens
  misc_RNA (1)...(19): siRNA sense strand
aaacuccucucagccaauu

SEQ ID NO: 1310104 - RNA, 19 nt, Homo sapiens
  misc_RNA (1)...(19): siRNA sense strand
uaacccaugugagaauauu

SEQ ID NO: 1310105 - RNA, 19 nt, Homo sapiens
  misc_RNA (1)...(19): siRNA sense strand
agauacagcuggauuagag

SEQ ID NO: 1310106 - RNA, 19 nt, Homo sapiens
  misc_RNA (1)...(19): siRNA sense strand
uacagaugcugcugaauuc

SEQ ID NO: 1310107 - RNA, 19 nt, Homo sapiens
  misc_RNA (1)...(19): siRNA sense strand
caagcgguguaacaagaaa

SEQ ID NO: 1310108 - RNA, 19 nt, Homo sapiens
  misc_RNA (1)...(19): siRNA sense strand
ggaccaugcucucgcacau

SEQ ID NO: 1310109 - RNA, 19 nt, Homo sapiens
  misc_RNA (1)...(19): siRNA sense strand
gagcuguuaccauguguuu

SEQ ID NO: 1310110 - RNA, 19 nt, Homo sapiens
  misc_RNA (1)...(19): siRNA sense strand
agaaccaugugcuaaagaa

SEQ ID NO: 1310111 - RNA, 19 nt, Homo sapiens
  misc_RNA (1)...(19): siRNA sense strand
gaucagagagugggacaga

SEQ ID NO: 1310112 - RNA, 19 nt, Homo sapiens
  misc_RNA (1)...(19): siRNA sense strand
acaaaggagcuuccaugua

SEQ ID NO: 1310113 - RNA, 19 nt, Homo sapiens
  misc_RNA (1)...(19): siRNA sense strand
ucaagcagauggccagagu

SEQ ID NO: 1310114 - RNA, 19 nt, Homo sapiens
  misc_RNA (1)...(19): siRNA sense strand
ggugugcugugaauugguu

SEQ ID NO: 1310115 - RNA, 19 nt, Homo sapiens
  misc_RNA (1)...(19): siRNA sense strand
caggagggccaccgacaua

SEQ ID NO: 1310116 - RNA, 19 nt, Homo sapiens
  misc_RNA (1)...(19): siRNA sense strand
gcaacacaguuuguauaca

SEQ ID NO: 1310117 - RNA, 19 nt, Homo sapiens
  misc_RNA (1)...(19): siRNA sense strand
gaccauccaguauaucauu

SEQ ID NO: 1310118 - RNA, 19 nt, Homo sapiens
  misc_RNA (1)...(19): siRNA sense strand
gugaaaagcucugccauga

SEQ ID NO: 1310119 - RNA, 19 nt, Homo sapiens
  misc_RNA (1)...(19): siRNA sense strand
ggcaaggucuccagcaucu

SEQ ID NO: 1310120 - RNA, 19 nt, Homo sapiens
  misc_RNA (1)...(19): siRNA sense strand
ugaacugcauaaagaaaug

SEQ ID NO: 1310121 - RNA, 19 nt, Homo sapiens
  misc_RNA (1)...(19): siRNA sense strand
gaaacucaaaugugaaugg

SEQ ID NO: 1310122 - RNA, 19 nt, Homo sapiens
  misc_RNA (1)...(19): siRNA sense strand
gguagaagaaauuacaguu

SEQ ID NO: 1310123 - RNA, 19 nt, Homo sapiens
  misc_RNA (1)...(19): siRNA sense strand
caaguguccuuugauuugu

SEQ ID NO: 1310124 - RNA, 19 nt, Homo sapiens
  misc_RNA (1)...(19): siRNA sense strand
ucaggaagcaaaccuaaga

SEQ ID NO: 1310125 - RNA, 19 nt, Homo sapiens
  misc_RNA (1)...(19): siRNA sense strand
uaccuacacuuguuucugu

SEQ ID NO: 1310126 - RNA, 19 nt, Homo sapiens
  misc_RNA (1)...(19): siRNA sense strand
auacagaugcugcugaauu

SEQ ID NO: 1310127 - RNA, 19 nt, Homo sapiens
  misc_RNA (1)...(19): siRNA sense strand
aagcaacacaguuuguaua

SEQ ID NO: 1310128 - RNA, 19 nt, Homo sapiens
  misc_RNA (1)...(19): siRNA sense strand
gagagcauaguccuucuga

SEQ ID NO: 1310129 - RNA, 19 nt, Homo sapiens
  misc_RNA (1)...(19): siRNA sense strand
guaccagucucaaaaguga

SEQ ID NO: 1310130 - RNA, 19 nt, Homo sapiens
  misc_RNA (1)...(19): siRNA sense strand
ucucgcacaucaguuauuu

SEQ ID NO: 1310131 - RNA, 19 nt, Homo sapiens
  misc_RNA (1)...(19): siRNA sense strand
ccacuguucuaacccaugu

SEQ ID NO: 1310132 - RNA, 19 nt, Homo sapiens
  misc_RNA (1)...(19): siRNA sense strand
ucagagcuguuaccaugug

SEQ ID NO: 1310133 - RNA, 19 nt, Homo sapiens
  misc_RNA (1)...(19): siRNA sense strand
cacacagguucucuaauug

SEQ ID NO: 1310134 - RNA, 19 nt, Homo sapiens
  misc_RNA (1)...(19): siRNA sense strand
caaacagaaccaugugcua

SEQ ID NO: 1310135 - RNA, 19 nt, Homo sapiens
  misc_RNA (1)...(19): siRNA sense strand
guagaagaaauuacaguuc

SEQ ID NO: 1310136 - RNA, 19 nt, Homo sapiens
  misc_RNA (1)...(19): siRNA sense strand
guggacggcauaaauguaa

SEQ ID NO: 1310137 - RNA, 19 nt, Homo sapiens
  misc_RNA (1)...(19): siRNA sense strand
gcacacagguucucuaauu

SEQ ID NO: 1310138 - RNA, 19 nt, Homo sapiens
  misc_RNA (1)...(19): siRNA sense strand
gaaaugaaauuccacauag

SEQ ID NO: 1310139 - RNA, 19 nt, Homo sapiens
  misc_RNA (1)...(19): siRNA sense strand
gaaaugagcagagaagaua

SEQ ID NO: 1310140 - RNA, 19 nt, Homo sapiens
  misc_RNA (1)...(19): siRNA sense strand
gcacaaguguccuuugauu

SEQ ID NO: 1310141 - RNA, 19 nt, Homo sapiens
  misc_RNA (1)...(19): siRNA sense strand
caaaggagcuuccauguac

SEQ ID NO: 1310142 - RNA, 19 nt, Homo sapiens
  misc_RNA (1)...(19): siRNA sense strand
gcaggauccucaaguagua

SEQ ID NO: 1310143 - RNA, 19 nt, Homo sapiens
  misc_RNA (1)...(19): siRNA sense strand
gauuucagcuguuuaaaga

SEQ ID NO: 1310144 - RNA, 19 nt, Homo sapiens
  misc_RNA (1)...(19): siRNA sense strand
gaauuaaccugccauugug

SEQ ID NO: 1310145 - RNA, 19 nt, Homo sapiens
  misc_RNA (1)...(19): siRNA sense strand
gagcacaaguguccuuuga

SEQ ID NO: 1310146 - RNA, 19 nt, Homo sapiens
  misc_RNA (1)...(19): siRNA sense strand
gaacaacuaacaacagaaa

SEQ ID NO: 1310147 - RNA, 19 nt, Homo sapiens
  misc_RNA (1)...(19): siRNA sense strand
gcaggucccuuaugaugaa

SEQ ID NO: 1310148 - RNA, 19 nt, Homo sapiens
  misc_RNA (1)...(19): siRNA sense strand
gaaaugcgguaaccauaca

SEQ ID NO: 1310149 - RNA, 19 nt, Homo sapiens
  misc_RNA (1)...(19): siRNA sense strand
gaugaaaucucugcuguuc

SEQ ID NO: 1310150 - RNA, 19 nt, Homo sapiens
  misc_RNA (1)...(19): siRNA sense strand
gagaagauacccacagaaa

SEQ ID NO: 1310151 - RNA, 19 nt, Homo sapiens
  misc_RNA (1)...(19): siRNA sense strand
gacaagcgguguaacaaga

SEQ ID NO: 1310152 - RNA, 19 nt, Homo sapiens
  misc_RNA (1)...(19): siRNA sense strand
gagauaugcuguguggaua

SEQ ID NO: 1310153 - RNA, 19 nt, Homo sapiens
  misc_RNA (1)...(19): siRNA sense strand
gaaucaaccuuggcagaaa

SEQ ID NO: 1310154 - RNA, 19 nt, Homo sapiens
  misc_RNA (1)...(19): siRNA sense strand
ggaaugagaagcaccauau

SEQ ID NO: 1310155 - RNA, 19 nt, Homo sapiens
  misc_RNA (1)...(19): siRNA sense strand
caagagaaaugcacuguac

SEQ ID NO: 1310156 - RNA, 19 nt, Homo sapiens
  misc_RNA (1)...(19): siRNA sense strand
ccaggcaggucccuuauga

SEQ ID NO: 1310157 - RNA, 19 nt, Homo sapiens
  misc_RNA (1)...(19): siRNA sense strand
cauuugaacugcauaaaga

SEQ ID NO: 1310158 - RNA, 19 nt, Homo sapiens
  misc_RNA (1)...(19): siRNA sense strand
gaagcaaaccuaagaguca

SEQ ID NO: 1310159 - RNA, 19 nt, Homo sapiens
  misc_RNA (1)...(19): siRNA sense strand
gcacuuuccuaacucagaa

SEQ ID NO: 1310160 - RNA, 19 nt, Homo sapiens
  misc_RNA (1)...(19): siRNA sense strand
caaaggaugaccucaauga

SEQ ID NO: 1310161 - RNA, 19 nt, Homo sapiens
  misc_RNA (1)...(19): siRNA sense strand
cggcauaaauguaaugaga

SEQ ID NO: 1310162 - RNA, 19 nt, Homo sapiens
  misc_RNA (1)...(19): siRNA sense strand
aggaaagucugauggauuu

SEQ ID NO: 1310163 - RNA, 19 nt, Homo sapiens
  misc_RNA (1)...(19): siRNA sense strand
gagcagaaaugaaauucca

SEQ ID NO: 1310164 - RNA, 19 nt, Homo sapiens
  misc_RNA (1)...(19): siRNA sense strand
ccuaauaccuacacuuguu

SEQ ID NO: 1310165 - RNA, 19 nt, Homo sapiens
  misc_RNA (1)...(19): siRNA sense strand
gagcauaguccuucugaga

SEQ ID NO: 1310166 - RNA, 19 nt, Homo sapiens
  misc_RNA (1)...(19): siRNA sense strand
caacacaguuuguauacag

SEQ ID NO: 1310167 - RNA, 19 nt, Homo sapiens
  misc_RNA (1)...(19): siRNA sense strand
cgagauguguuauguggaa

SEQ ID NO: 1310168 - RNA, 19 nt, Homo sapiens
  misc_RNA (1)...(19): siRNA sense strand
caauacagaugcugcugaa

SEQ ID NO: 1310169 - RNA, 19 nt, Homo sapiens
  misc_RNA (1)...(19): siRNA sense strand
ggccaggacugcccacauu

SEQ ID NO: 1310170 - RNA, 19 nt, Homo sapiens
  misc_RNA (1)...(19): siRNA sense strand
ccaccucccugucaccuuu

SEQ ID NO: 1310171 - RNA, 19 nt, Homo sapiens
  misc_RNA (1)...(19): siRNA sense strand
guaaugagauaugcugugu

SEQ ID NO: 1310172 - RNA, 19 nt, Homo sapiens
  misc_RNA (1)...(19): siRNA sense strand
gaaaagcucugccaugaag

SEQ ID NO: 1310173 - RNA, 19 nt, Homo sapiens
  misc_RNA (1)...(19): siRNA sense strand
uuagagagcucgaccagau

SEQ ID NO: 1310174 - RNA, 19 nt, Homo sapiens
  misc_RNA (1)...(19): siRNA sense strand
uguaauaaaucgcccaaga

SEQ ID NO: 1310175 - RNA, 19 nt, Homo sapiens
  misc_RNA (1)...(19): siRNA sense strand
aagugaagaugcuacauuu

SEQ ID NO: 1310176 - RNA, 19 nt, Homo sapiens
  misc_RNA (1)...(19): siRNA sense strand
gcagauggccagagugguu

SEQ ID NO: 1310177 - RNA, 19 nt, Homo sapiens
  misc_RNA (1)...(19): siRNA sense strand
ggaguugucagagcuguua

SEQ ID NO: 1310178 - RNA, 19 nt, Homo sapiens
  misc_RNA (1)...(19): siRNA sense strand
cagagaagauacccacaga

SEQ ID NO: 1310179 - RNA, 19 nt, Homo sapiens
  misc_RNA (1)...(19): siRNA sense strand
gagcagaccucagauacag

SEQ ID NO: 1310180 - RNA, 19 nt, Homo sapiens
  misc_RNA (1)...(19): siRNA sense strand
gccauggccuucagaauca

SEQ ID NO: 1310181 - RNA, 19 nt, Homo sapiens
  misc_RNA (1)...(19): siRNA sense strand
gaguggagcagaaaugaaa

SEQ ID NO: 1310182 - RNA, 19 nt, Homo sapiens
  misc_RNA (1)...(19): siRNA sense strand
ugaagaugcuacauuuaug

SEQ ID NO: 1310183 - RNA, 19 nt, Homo sapiens
  misc_RNA (1)...(19): siRNA sense strand
gaacuuggcagucaucaac

SEQ ID NO: 1310184 - RNA, 19 nt, Homo sapiens
  misc_RNA (1)...(19): siRNA sense strand
ggugagguuuguagaaaga

SEQ ID NO: 1310185 - RNA, 19 nt, Homo sapiens
  misc_RNA (1)...(19): siRNA sense strand
guuaccauguguuucauuu

SEQ ID NO: 1310186 - RNA, 19 nt, Homo sapiens
  misc_RNA (1)...(19): siRNA sense strand
uaccauguguuucauuuga

SEQ ID NO: 1310187 - RNA, 19 nt, Homo sapiens
  misc_RNA (1)...(19): siRNA sense strand
ugaauuaaccugccauugu

SEQ ID NO: 1310188 - RNA, 19 nt, Homo sapiens
  misc_RNA (1)...(19): siRNA sense strand
uggcagaaauugaggaaug

SEQ ID NO: 1310189 - RNA, 19 nt, Homo sapiens
  misc_RNA (1)...(19): siRNA sense strand
ccaguucccugugguacua

SEQ ID NO: 1310190 - RNA, 19 nt, Homo sapiens
  misc_RNA (1)...(19): siRNA sense strand
gugaagaugcuacauuuau

SEQ ID NO: 1310191 - RNA, 19 nt, Homo sapiens
  misc_RNA (1)...(19): siRNA sense strand
cagaugcucuuucagaaca

SEQ ID NO: 1310192 - RNA, 19 nt, Homo sapiens
  misc_RNA (1)...(19): siRNA sense strand
ccaggaggguugaccaaga

SEQ ID NO: 1310193 - RNA, 19 nt, Homo sapiens
  misc_RNA (1)...(19): siRNA sense strand
aaacagaaccaugugcuaa

SEQ ID NO: 1310194 - RNA, 19 nt, Homo sapiens
  misc_RNA (1)...(19): siRNA sense strand
gcauaguccuucugagagu

SEQ ID NO: 1310195 - RNA, 19 nt, Homo sapiens
  misc_RNA (1)...(19): siRNA sense strand
caaguaguaucuccuuucu

SEQ ID NO: 1310196 - RNA, 19 nt, Homo sapiens
  misc_RNA (1)...(19): siRNA sense strand
ugaagaaccuugucaucgu

SEQ ID NO: 1310197 - RNA, 19 nt, Homo sapiens
  misc_RNA (1)...(19): siRNA sense strand
guggugagguuuguagaaa

SEQ ID NO: 1310198 - RNA, 19 nt, Homo sapiens
  misc_RNA (1)...(19): siRNA sense strand
uaauaggauugguagaaga

SEQ ID NO: 1310199 - RNA, 19 nt, Homo sapiens
  misc_RNA (1)...(19): siRNA sense strand
gaaggagacuguggaccau

SEQ ID NO: 1310200 - RNA, 19 nt, Homo sapiens
  misc_RNA (1)...(19): siRNA sense strand
gaaccgauguaggaaaguc

SEQ ID NO: 1310201 - RNA, 19 nt, Homo sapiens
  misc_RNA (1)...(19): siRNA sense strand
ggcagaaauugaggaauga

SEQ ID NO: 1310202 - RNA, 19 nt, Homo sapiens
  misc_RNA (1)...(19): siRNA sense strand
acaaguguccuuugauuug

SEQ ID NO: 1310203 - RNA, 19 nt, Homo sapiens
  misc_RNA (1)...(19): siRNA sense strand
aaacuccucucagccaauu

SEQ ID NO: 1310204 - RNA, 19 nt, Homo sapiens
  misc_RNA (1)...(19): siRNA sense strand
uaacccaugugagaauauu

SEQ ID NO: 1310205 - RNA, 19 nt, Homo sapiens
  misc_RNA (1)...(19): siRNA sense strand
agauacagcuggauuagag

SEQ ID NO: 1310206 - RNA, 19 nt, Homo sapiens
  misc_RNA (1)...(19): siRNA sense strand
uacagaugcugcugaauuc

SEQ ID NO: 1310207 - RNA, 19 nt, Homo sapiens
  misc_RNA (1)...(19): siRNA sense strand
caagcgguguaacaagaaa

SEQ ID NO: 1310208 - RNA, 19 nt, Homo sapiens
  misc_RNA (1)...(19): siRNA sense strand
ggaccaugcucucgcacau

SEQ ID NO: 1310209 - RNA, 19 nt, Homo sapiens
  misc_RNA (1)...(19): siRNA sense strand
gagcuguuaccauguguuu

SEQ ID NO: 1310210 - RNA, 19 nt, Homo sapiens
  misc_RNA (1)...(19): siRNA sense strand
agaaccaugugcuaaagaa

SEQ ID NO: 1310211 - RNA, 19 nt, Homo sapiens
  misc_RNA (1)...(19): siRNA sense strand
gaucagagagugggacaga

SEQ ID NO: 1310212 - RNA, 19 nt, Homo sapiens
  misc_RNA (1)...(19): siRNA sense strand
acaaaggagcuuccaugua

SEQ ID NO: 1310213 - RNA, 19 nt, Homo sapiens
  misc_RNA (1)...(19): siRNA sense strand
ucaagcagauggccagagu

SEQ ID NO: 1310214 - RNA, 19 nt, Homo sapiens
  misc_RNA (1)...(19): siRNA sense strand
ggugugcugugaauugguu

SEQ ID NO: 1310215 - RNA, 19 nt, Homo sapiens
  misc_RNA (1)...(19): siRNA sense strand
caggagggccaccgacaua

SEQ ID NO: 1310216 - RNA, 19 nt, Homo sapiens
  misc_RNA (1)...(19): siRNA sense strand
gcaacacaguuuguauaca

SEQ ID NO: 1310217 - RNA, 19 nt, Homo sapiens
  misc_RNA (1)...(19): siRNA sense strand
gaccauccaguauaucauu

SEQ ID NO: 1310218 - RNA, 19 nt, Homo sapiens
  misc_RNA (1)...(19): siRNA sense strand
gugaaaagcucugccauga

SEQ ID NO: 1310219 - RNA, 19 nt, Homo sapiens
  misc_RNA (1)...(19): siRNA sense strand
ggcaaggucuccagcaucu

SEQ ID NO: 1310220 - RNA, 19 nt, Homo sapiens
  misc_RNA (1)...(19): siRNA sense strand
ugaacugcauaaagaaaug

SEQ ID NO: 1310221 - RNA, 19 nt, Homo sapiens
  misc_RNA (1)...(19): siRNA sense strand
gaaacucaaaugugaaugg

SEQ ID NO: 1310222 - RNA, 19 nt, Homo sapiens
  misc_RNA (1)...(19): siRNA sense strand
gguagaagaaauuacaguu

SEQ ID NO: 1310223 - RNA, 19 nt, Homo sapiens
  misc_RNA (1)...(19): siRNA sense strand
caaguguccuuugauuugu

SEQ ID NO: 1310224 - RNA, 19 nt, Homo sapiens
  misc_RNA (1)...(19): siRNA sense strand
ucaggaagcaaaccuaaga

SEQ ID NO: 1310225 - RNA, 19 nt, Homo sapiens
  misc_RNA (1)...(19): siRNA sense strand
uaccuacacuuguuucugu

SEQ ID NO: 1310226 - RNA, 19 nt, Homo sapiens
  misc_RNA (1)...(19): siRNA sense strand
auacagaugcugcugaauu

SEQ ID NO: 1310227 - RNA, 19 nt, Homo sapiens
  misc_RNA (1)...(19): siRNA sense strand
aagcaacacaguuuguaua

SEQ ID NO: 1310228 - RNA, 19 nt, Homo sapiens
  misc_RNA (1)...(19): siRNA sense strand
gagagcauaguccuucuga

SEQ ID NO: 1310229 - RNA, 19 nt, Homo sapiens
  misc_RNA (1)...(19): siRNA sense strand
guaccagucucaaaaguga

SEQ ID NO: 1310230 - RNA, 19 nt, Homo sapiens
  misc_RNA (1)...(19): siRNA sense strand
ucucgcacaucaguuauuu

SEQ ID NO: 1310231 - RNA, 19 nt, Homo sapiens
  misc_RNA (1)...(19): siRNA sense strand
ccacuguucuaacccaugu

SEQ ID NO: 1310232 - RNA, 19 nt, Homo sapiens
  misc_RNA (1)...(19): siRNA sense strand
ucagagcuguuaccaugug

SEQ ID NO: 1310233 - RNA, 19 nt, Homo sapiens
  misc_RNA (1)...(19): siRNA sense strand
cacacagguucucuaauug

SEQ ID NO: 1310234 - RNA, 19 nt, Homo sapiens
  misc_RNA (1)...(19): siRNA sense strand
caaacagaaccaugugcua

SEQ ID NO: 1310235 - RNA, 19 nt, Homo sapiens
  misc_RNA (1)...(19): siRNA sense strand
guagaagaaauuacaguuc

SEQ ID NO: 1310236 - RNA, 19 nt, Homo sapiens
  misc_RNA (1)...(19): siRNA sense strand
guggacggcauaaauguaa

SEQ ID NO: 1310237 - RNA, 19 nt, Homo sapiens
  misc_RNA (1)...(19): siRNA sense strand
ggaggaagauucgaaauaa

SEQ ID NO: 1310238 - RNA, 19 nt, Homo sapiens
  misc_RNA (1)...(19): siRNA sense strand
gaggaagauucgaaauaaa

SEQ ID NO: 1310239 - RNA, 19 nt, Homo sapiens
  misc_RNA (1)...(19): siRNA sense strand
gaaauacacagcccagaau

SEQ ID NO: 1310240 - RNA, 19 nt, Homo sapiens
  misc_RNA (1)...(19): siRNA sense strand
uaagacagaggaacaaauu

SEQ ID NO: 1310241 - RNA, 19 nt, Homo sapiens
  misc_RNA (1)...(19): siRNA sense strand
agagcagggucuugaaaua

SEQ ID NO: 1310242 - RNA, 19 nt, Homo sapiens
  misc_RNA (1)...(19): siRNA sense strand
aggcaaaucucacaaggaa

SEQ ID NO: 1310243 - RNA, 19 nt, Homo sapiens
  misc_RNA (1)...(19): siRNA sense strand
gggaaacugucucuaugga

SEQ ID NO: 1310244 - RNA, 19 nt, Homo sapiens
  misc_RNA (1)...(19): siRNA sense strand
gaauuugucccuucuagau

SEQ ID NO: 1310245 - RNA, 19 nt, Homo sapiens
  misc_RNA (1)...(19): siRNA sense strand
agaggaaaguggagauuug

SEQ ID NO: 1310246 - RNA, 19 nt, Homo sapiens
  misc_RNA (1)...(19): siRNA sense strand
uaaaagaucugcucaagag

SEQ ID NO: 1310247 - RNA, 19 nt, Homo sapiens
  misc_RNA (1)...(19): siRNA sense strand
ggacggcucagacugugua

SEQ ID NO: 1310248 - RNA, 19 nt, Homo sapiens
  misc_RNA (1)...(19): siRNA sense strand
agaagagucuauuggagaa

SEQ ID NO: 1310249 - RNA, 19 nt, Homo sapiens
  misc_RNA (1)...(19): siRNA sense strand
auauggagcuucagaacaa

SEQ ID NO: 1310250 - RNA, 19 nt, Homo sapiens
  misc_RNA (1)...(19): siRNA sense strand
agucagaagugccgaaaga

SEQ ID NO: 1310251 - RNA, 19 nt, Homo sapiens
  misc_RNA (1)...(19): siRNA sense strand
cuauggaucuagagaguga

SEQ ID NO: 1310252 - RNA, 19 nt, Homo sapiens
  misc_RNA (1)...(19): siRNA sense strand
cuuccugccugcugcauua

SEQ ID NO: 1310253 - RNA, 19 nt, Homo sapiens
  misc_RNA (1)...(19): siRNA sense strand
caagagagccgcaggaaaa

SEQ ID NO: 1310254 - RNA, 19 nt, Homo sapiens
  misc_RNA (1)...(19): siRNA sense strand
gccauucccugaccucuuc

SEQ ID NO: 1310255 - RNA, 19 nt, Homo sapiens
  misc_RNA (1)...(19): siRNA sense strand
ccagaugacuccacagcau

SEQ ID NO: 1310256 - RNA, 19 nt, Homo sapiens
  misc_RNA (1)...(19): siRNA sense strand
cggaggaagauucgaaaua

SEQ ID NO: 1310257 - RNA, 19 nt, Homo sapiens
  misc_RNA (1)...(19): siRNA sense strand
gaacaaaguacagcuucug

SEQ ID NO: 1310258 - RNA, 19 nt, Homo sapiens
  misc_RNA (1)...(19): siRNA sense strand
gcuauguacuccucugaca

SEQ ID NO: 1310259 - RNA, 19 nt, Homo sapiens
  misc_RNA (1)...(19): siRNA sense strand
ugaaauacacagcccagaa

SEQ ID NO: 1310260 - RNA, 19 nt, Homo sapiens
  misc_RNA (1)...(19): siRNA sense strand
gagagugagagcuguagaa

SEQ ID NO: 1310261 - RNA, 19 nt, Homo sapiens
  misc_RNA (1)...(19): siRNA sense strand
ggcuaguacugacagauga

SEQ ID NO: 1310262 - RNA, 19 nt, Homo sapiens
  misc_RNA (1)...(19): siRNA sense strand
cagaugacuccacagcaua

SEQ ID NO: 1310263 - RNA, 19 nt, Homo sapiens
  misc_RNA (1)...(19): siRNA sense strand
gagagcagggucuugaaau

SEQ ID NO: 1310264 - RNA, 19 nt, Homo sapiens
  misc_RNA (1)...(19): siRNA sense strand
agacacuuccucucacuaa

SEQ ID NO: 1310265 - RNA, 19 nt, Homo sapiens
  misc_RNA (1)...(19): siRNA sense strand
ggaacaaauucugaaacgu

SEQ ID NO: 1310266 - RNA, 19 nt, Homo sapiens
  misc_RNA (1)...(19): siRNA sense strand
gaauauggagcuucagaac

SEQ ID NO: 1310267 - RNA, 19 nt, Homo sapiens
  misc_RNA (1)...(19): siRNA sense strand
aaauacacagcccagaaua

SEQ ID NO: 1310268 - RNA, 19 nt, Homo sapiens
  misc_RNA (1)...(19): siRNA sense strand
gaaaagaggggacccagau

SEQ ID NO: 1310269 - RNA, 19 nt, Homo sapiens
  misc_RNA (1)...(19): siRNA sense strand
acugggaaguagaugauuu

SEQ ID NO: 1310270 - RNA, 19 nt, Homo sapiens
  misc_RNA (1)...(19): siRNA sense strand
ucacuaagacagaggaaca

SEQ ID NO: 1310271 - RNA, 19 nt, Homo sapiens
  misc_RNA (1)...(19): siRNA sense strand
gaggagaagagucuauugg

SEQ ID NO: 1310272 - RNA, 19 nt, Homo sapiens
  misc_RNA (1)...(19): siRNA sense strand
ggauggcuuccuacuggua

SEQ ID NO: 1310273 - RNA, 19 nt, Homo sapiens
  misc_RNA (1)...(19): siRNA sense strand
cagcgucguugaacauucu

SEQ ID NO: 1310274 - RNA, 19 nt, Homo sapiens
  misc_RNA (1)...(19): siRNA sense strand
gggcuuauucugccugaga

SEQ ID NO: 1310275 - RNA, 19 nt, Homo sapiens
  misc_RNA (1)...(19): siRNA sense strand
gagcagggucuugaaauac

SEQ ID NO: 1310276 - RNA, 19 nt, Homo sapiens
  misc_RNA (1)...(19): siRNA sense strand
acgggaaacugucucuaug

SEQ ID NO: 1310277 - RNA, 19 nt, Homo sapiens
  misc_RNA (1)...(19): siRNA sense strand
ggccauggugauugagaua

SEQ ID NO: 1310278 - RNA, 19 nt, Homo sapiens
  misc_RNA (1)...(19): siRNA sense strand
cagaauauggagcuucaga

SEQ ID NO: 1310279 - RNA, 19 nt, Homo sapiens
  misc_RNA (1)...(19): siRNA sense strand
ugaaacgugugcggaggaa

SEQ ID NO: 1310280 - RNA, 19 nt, Homo sapiens
  misc_RNA (1)...(19): siRNA sense strand
ggaaacugucucuauggau

SEQ ID NO: 1310281 - RNA, 19 nt, Homo sapiens
  misc_RNA (1)...(19): siRNA sense strand
aaacgugugcggaggaaga

SEQ ID NO: 1310282 - RNA, 19 nt, Homo sapiens
  misc_RNA (1)...(19): siRNA sense strand
ccauggugauugagauauc

SEQ ID NO: 1310283 - RNA, 19 nt, Homo sapiens
  misc_RNA (1)...(19): siRNA sense strand
cccagaauauggagcuuca

SEQ ID NO: 1310284 - RNA, 19 nt, Homo sapiens
  misc_RNA (1)...(19): siRNA sense strand
ugacagaugaggagaagag

SEQ ID NO: 1310285 - RNA, 19 nt, Homo sapiens
  misc_RNA (1)...(19): siRNA sense strand
uagaucaacugaggaaacu

SEQ ID NO: 1310286 - RNA, 19 nt, Homo sapiens
  misc_RNA (1)...(19): siRNA sense strand
auacacagcccagaauaug

SEQ ID NO: 1310287 - RNA, 19 nt, Homo sapiens
  misc_RNA (1)...(19): siRNA sense strand
gaugaggagaagagucuau

SEQ ID NO: 1310288 - RNA, 19 nt, Homo sapiens
  misc_RNA (1)...(19): siRNA sense strand
ucaagagagccgcaggaaa

SEQ ID NO: 1310289 - RNA, 19 nt, Homo sapiens
  misc_RNA (1)...(19): siRNA sense strand
gcagucagaagugccgaaa

SEQ ID NO: 1310290 - RNA, 19 nt, Homo sapiens
  misc_RNA (1)...(19): siRNA sense strand
acacagcccagaauaugga

SEQ ID NO: 1310291 - RNA, 19 nt, Homo sapiens
  misc_RNA (1)...(19): siRNA sense strand
gagcgacugggaaguagau

SEQ ID NO: 1310292 - RNA, 19 nt, Homo sapiens
  misc_RNA (1)...(19): siRNA sense strand
uagaggaaaguggagauuu

SEQ ID NO: 1310293 - RNA, 19 nt, Homo sapiens
  misc_RNA (1)...(19): siRNA sense strand
uuagagagcagggucuuga

SEQ ID NO: 1310294 - RNA, 19 nt, Homo sapiens
  misc_RNA (1)...(19): siRNA sense strand
cgacugggaaguagaugau

SEQ ID NO: 1310295 - RNA, 19 nt, Homo sapiens
  misc_RNA (1)...(19): siRNA sense strand
cagaugaggagaagagucu

SEQ ID NO: 1310296 - RNA, 19 nt, Homo sapiens
  misc_RNA (1)...(19): siRNA sense strand
uccaggccauggugauuga

SEQ ID NO: 1310297 - RNA, 19 nt, Homo sapiens
  misc_RNA (1)...(19): siRNA sense strand
agacagaggaacaaauucu

SEQ ID NO: 1310298 - RNA, 19 nt, Homo sapiens
  misc_RNA (1)...(19): siRNA sense strand
acacuuccucucacuaaga

SEQ ID NO: 1310299 - RNA, 19 nt, Homo sapiens
  misc_RNA (1)...(19): siRNA sense strand
ggagcuucagaacaaagua

SEQ ID NO: 1310300 - RNA, 19 nt, Homo sapiens
  misc_RNA (1)...(19): siRNA sense strand
cagcugagcauggaguguu

SEQ ID NO: 1310301 - RNA, 19 nt, Homo sapiens
  misc_RNA (1)...(19): siRNA sense strand
agugagagcuguagaaaag

SEQ ID NO: 1310302 - RNA, 19 nt, Homo sapiens
  misc_RNA (1)...(19): siRNA sense strand
ccagcgucguugaacauuc

SEQ ID NO: 1310303 - RNA, 19 nt, Homo sapiens
  misc_RNA (1)...(19): siRNA sense strand
gcaucuugguccuacuagu

SEQ ID NO: 1310304 - RNA, 19 nt, Homo sapiens
  misc_RNA (1)...(19): siRNA sense strand
agagagcagggucuugaaa

SEQ ID NO: 1310305 - RNA, 19 nt, Homo sapiens
  misc_RNA (1)...(19): siRNA sense strand
agagugagagcuguagaaa

SEQ ID NO: 1310306 - RNA, 19 nt, Homo sapiens
  misc_RNA (1)...(19): siRNA sense strand
agaggaacaaauucugaaa

SEQ ID NO: 1310307 - RNA, 19 nt, Homo sapiens
  misc_RNA (1)...(19): siRNA sense strand
gacacuuccucucacuaag

SEQ ID NO: 1310308 - RNA, 19 nt, Homo sapiens
  misc_RNA (1)...(19): siRNA sense strand
gaggaacaaauucugaaac

SEQ ID NO: 1310309 - RNA, 19 nt, Homo sapiens
  misc_RNA (1)...(19): siRNA sense strand
ucagaagugccgaaagaca

SEQ ID NO: 1310310 - RNA, 19 nt, Homo sapiens
  misc_RNA (1)...(19): siRNA sense strand
cuagagagugagagcugua

SEQ ID NO: 1310311 - RNA, 19 nt, Homo sapiens
  misc_RNA (1)...(19): siRNA sense strand
cacgggaaacugucucuau

SEQ ID NO: 1310312 - RNA, 19 nt, Homo sapiens
  misc_RNA (1)...(19): siRNA sense strand
gugcggaggaagauucgaa

SEQ ID NO: 1310313 - RNA, 19 nt, Homo sapiens
  misc_RNA (1)...(19): siRNA sense strand
uauggagcuucagaacaaa

SEQ ID NO: 1310314 - RNA, 19 nt, Homo sapiens
  misc_RNA (1)...(19): siRNA sense strand
gcugccgcuuucugaggua

SEQ ID NO: 1310315 - RNA, 19 nt, Homo sapiens
  misc_RNA (1)...(19): siRNA sense strand
ugaggagaagagucuauug

SEQ ID NO: 1310316 - RNA, 19 nt, Homo sapiens
  misc_RNA (1)...(19): siRNA sense strand
gguagccccucugucauuu

SEQ ID NO: 1310317 - RNA, 19 nt, Homo sapiens
  misc_RNA (1)...(19): siRNA sense strand
gaggaaaguggagauuugg

SEQ ID NO: 1310318 - RNA, 19 nt, Homo sapiens
  misc_RNA (1)...(19): siRNA sense strand
caucuugguccuacuaguc

SEQ ID NO: 1310319 - RNA, 19 nt, Homo sapiens
  misc_RNA (1)...(19): siRNA sense strand
ucagaacaaaguacagcuu

SEQ ID NO: 1310320 - RNA, 19 nt, Homo sapiens
  misc_RNA (1)...(19): siRNA sense strand
agcagggucuugaaauaca

SEQ ID NO: 1310321 - RNA, 19 nt, Homo sapiens
  misc_RNA (1)...(19): siRNA sense strand
aggaacaaauucugaaacg

SEQ ID NO: 1310322 - RNA, 19 nt, Homo sapiens
  misc_RNA (1)...(19): siRNA sense strand
gaaaaucgcugccuacuua

SEQ ID NO: 1310323 - RNA, 19 nt, Homo sapiens
  misc_RNA (1)...(19): siRNA sense strand
gaucagaaccguauauuug

SEQ ID NO: 1310324 - RNA, 19 nt, Homo sapiens
  misc_RNA (1)...(19): siRNA sense strand
gggaagcuccugacuauga

SEQ ID NO: 1310325 - RNA, 19 nt, Homo sapiens
  misc_RNA (1)...(19): siRNA sense strand
ccaagugccuggaugaguu

SEQ ID NO: 1310326 - RNA, 19 nt, Homo sapiens
  misc_RNA (1)...(19): siRNA sense strand
gggaaauucucaugguuug

SEQ ID NO: 1310327 - RNA, 19 nt, Homo sapiens
  misc_RNA (1)...(19): siRNA sense strand
gaccuggacuuuccuaauc

SEQ ID NO: 1310328 - RNA, 19 nt, Homo sapiens
  misc_RNA (1)...(19): siRNA sense strand
ccagagcaaugccaucuug

SEQ ID NO: 1310329 - RNA, 19 nt, Homo sapiens
  misc_RNA (1)...(19): siRNA sense strand
caucauagagaaccaagua

SEQ ID NO: 1310330 - RNA, 19 nt, Homo sapiens
  misc_RNA (1)...(19): siRNA sense strand
uuacagcucugaccacgaa

SEQ ID NO: 1310331 - RNA, 19 nt, Homo sapiens
  misc_RNA (1)...(19): siRNA sense strand
ucacggauaccucuuauga

SEQ ID NO: 1310332 - RNA, 19 nt, Homo sapiens
  misc_RNA (1)...(19): siRNA sense strand
ucccaaaccugaaggcuuu

SEQ ID NO: 1310333 - RNA, 19 nt, Homo sapiens
  misc_RNA (1)...(19): siRNA sense strand
gaguggacaucauagagaa

SEQ ID NO: 1310334 - RNA, 19 nt, Homo sapiens
  misc_RNA (1)...(19): siRNA sense strand
caacauguguggugagacu

SEQ ID NO: 1310335 - RNA, 19 nt, Homo sapiens
  misc_RNA (1)...(19): siRNA sense strand
cuggacaacugaaacaauu

SEQ ID NO: 1310336 - RNA, 19 nt, Homo sapiens
  misc_RNA (1)...(19): siRNA sense strand
ggaagcuccugacuaugau

SEQ ID NO: 1310337 - RNA, 19 nt, Homo sapiens
  misc_RNA (1)...(19): siRNA sense strand
ggaucagaaccguauauuu

SEQ ID NO: 1310338 - RNA, 19 nt, Homo sapiens
  misc_RNA (1)...(19): siRNA sense strand
caagcuagaccuggacuuu

SEQ ID NO: 1310339 - RNA, 19 nt, Homo sapiens
  misc_RNA (1)...(19): siRNA sense strand
agaaccaaguaauggauuu

SEQ ID NO: 1310340 - RNA, 19 nt, Homo sapiens
  misc_RNA (1)...(19): siRNA sense strand
caacugauaaggcucuguu

SEQ ID NO: 1310341 - RNA, 19 nt, Homo sapiens
  misc_RNA (1)...(19): siRNA sense strand
ucucaccuaugauaucuug

SEQ ID NO: 1310342 - RNA, 19 nt, Homo sapiens
  misc_RNA (1)...(19): siRNA sense strand
cauagagaaccaaguaaug

SEQ ID NO: 1310343 - RNA, 19 nt, Homo sapiens
  misc_RNA (1)...(19): siRNA sense strand
guucucggguacugggaua

SEQ ID NO: 1310344 - RNA, 19 nt, Homo sapiens
  misc_RNA (1)...(19): siRNA sense strand
gagaaccaaguaauggauu

SEQ ID NO: 1310345 - RNA, 19 nt, Homo sapiens
  misc_RNA (1)...(19): siRNA sense strand
cugaaacaauucuccaugu

SEQ ID NO: 1310346 - RNA, 19 nt, Homo sapiens
  misc_RNA (1)...(19): siRNA sense strand
guucacggauaccucuuau

SEQ ID NO: 1310347 - RNA, 19 nt, Homo sapiens
  misc_RNA (1)...(19): siRNA sense strand
gauucgaguggacaucaua

SEQ ID NO: 1310348 - RNA, 19 nt, Homo sapiens
  misc_RNA (1)...(19): siRNA sense strand
agagcuaccuggacaacug

SEQ ID NO: 1310349 - RNA, 19 nt, Homo sapiens
  misc_RNA (1)...(19): siRNA sense strand
guggugagacugaagaaga

SEQ ID NO: 1310350 - RNA, 19 nt, Homo sapiens
  misc_RNA (1)...(19): siRNA sense strand
ucugaucaguucugcaaga

SEQ ID NO: 1310351 - RNA, 19 nt, Homo sapiens
  misc_RNA (1)...(19): siRNA sense strand
uggugagacugaagaagaa

SEQ ID NO: 1310352 - RNA, 19 nt, Homo sapiens
  misc_RNA (1)...(19): siRNA sense strand
ggacaacugaaacaauucu

SEQ ID NO: 1310353 - RNA, 19 nt, Homo sapiens
  misc_RNA (1)...(19): siRNA sense strand
gauuuccgcacacaacuga

SEQ ID NO: 1310354 - RNA, 19 nt, Homo sapiens
  misc_RNA (1)...(19): siRNA sense strand
aagcucaccuuuguggauu

SEQ ID NO: 1310355 - RNA, 19 nt, Homo sapiens
  misc_RNA (1)...(19): siRNA sense strand
caagaucacccagagcaau

SEQ ID NO: 1310356 - RNA, 19 nt, Homo sapiens
  misc_RNA (1)...(19): siRNA sense strand
gaaccaaguaauggauuuc

SEQ ID NO: 1310357 - RNA, 19 nt, Homo sapiens
  misc_RNA (1)...(19): siRNA sense strand
cgaguggacaucauagaga

SEQ ID NO: 1310358 - RNA, 19 nt, Homo sapiens
  misc_RNA (1)...(19): siRNA sense strand
gcuccugacuaugaucgaa

SEQ ID NO: 1310359 - RNA, 19 nt, Homo sapiens
  misc_RNA (1)...(19): siRNA sense strand
cuuacagucugaucaguuc

SEQ ID NO: 1310360 - RNA, 19 nt, Homo sapiens
  misc_RNA (1)...(19): siRNA sense strand
gagcuaccuggacaacuga

SEQ ID NO: 1310361 - RNA, 19 nt, Homo sapiens
  misc_RNA (1)...(19): siRNA sense strand
ucauagagaaccaaguaau

SEQ ID NO: 1310362 - RNA, 19 nt, Homo sapiens
  misc_RNA (1)...(19): siRNA sense strand
gaugggaagaacaagauca

SEQ ID NO: 1310363 - RNA, 19 nt, Homo sapiens
  misc_RNA (1)...(19): siRNA sense strand
ccaauggcuggaugugaaa

SEQ ID NO: 1310364 - RNA, 19 nt, Homo sapiens
  misc_RNA (1)...(19): siRNA sense strand
cggggaagcuccugacuau

SEQ ID NO: 1310365 - RNA, 19 nt, Homo sapiens
  misc_RNA (1)...(19): siRNA sense strand
gaagagcuaccuggacaac

SEQ ID NO: 1310366 - RNA, 19 nt, Homo sapiens
  misc_RNA (1)...(19): siRNA sense strand
ggacaucauagagaaccaa

SEQ ID NO: 1310367 - RNA, 19 nt, Homo sapiens
  misc_RNA (1)...(19): siRNA sense strand
ggaagagcuaccuggacaa

SEQ ID NO: 1310368 - RNA, 19 nt, Homo sapiens
  misc_RNA (1)...(19): siRNA sense strand
gugcgagucgucuaugguu

SEQ ID NO: 1310369 - RNA, 19 nt, Homo sapiens
  misc_RNA (1)...(19): siRNA sense strand
uagagaaccaaguaaugga

SEQ ID NO: 1310370 - RNA, 19 nt, Homo sapiens
  misc_RNA (1)...(19): siRNA sense strand
gauuuucucaccuaugaua

SEQ ID NO: 1310371 - RNA, 19 nt, Homo sapiens
  misc_RNA (1)...(19): siRNA sense strand
uaauggauuuccgcacaca

SEQ ID NO: 1310372 - RNA, 19 nt, Homo sapiens
  misc_RNA (1)...(19): siRNA sense strand
ucagaaccguauauuugac

SEQ ID NO: 1310373 - RNA, 19 nt, Homo sapiens
  misc_RNA (1)...(19): siRNA sense strand
ucaccuaugauaucuugga

SEQ ID NO: 1310374 - RNA, 19 nt, Homo sapiens
  misc_RNA (1)...(19): siRNA sense strand
cugauaaggcucuguuaca

SEQ ID NO: 1310375 - RNA, 19 nt, Homo sapiens
  misc_RNA (1)...(19): siRNA sense strand
uggauuuucucaccuauga

SEQ ID NO: 1310376 - RNA, 19 nt, Homo sapiens
  misc_RNA (1)...(19): siRNA sense strand
caaauaagcucuacucauu

SEQ ID NO: 1310377 - RNA, 19 nt, Homo sapiens
  misc_RNA (1)...(19): siRNA sense strand
gaaccggcaucuccaaaua

SEQ ID NO: 1310378 - RNA, 19 nt, Homo sapiens
  misc_RNA (1)...(19): siRNA sense strand
gaauuuagaucaacucaga

SEQ ID NO: 1310379 - RNA, 19 nt, Homo sapiens
  misc_RNA (1)...(19): siRNA sense strand
gcacacagaucuccauguu

SEQ ID NO: 1310380 - RNA, 19 nt, Homo sapiens
  misc_RNA (1)...(19): siRNA sense strand
gaucccaccuuaaaugaua

SEQ ID NO: 1310381 - RNA, 19 nt, Homo sapiens
  misc_RNA (1)...(19): siRNA sense strand
gaagagaccgguaaagauu

SEQ ID NO: 1310382 - RNA, 19 nt, Homo sapiens
  misc_RNA (1)...(19): siRNA sense strand
gaugauaacugcagauuuu

SEQ ID NO: 1310383 - RNA, 19 nt, Homo sapiens
  misc_RNA (1)...(19): siRNA sense strand
caacuacucuucaccuuca

SEQ ID NO: 1310384 - RNA, 19 nt, Homo sapiens
  misc_RNA (1)...(19): siRNA sense strand
gaaaugaggaacaguauag

SEQ ID NO: 1310385 - RNA, 19 nt, Homo sapiens
  misc_RNA (1)...(19): siRNA sense strand
uaacauacuuucuggaauc

SEQ ID NO: 1310386 - RNA, 19 nt, Homo sapiens
  misc_RNA (1)...(19): siRNA sense strand
ccaauaagaccacuuguga

SEQ ID NO: 1310387 - RNA, 19 nt, Homo sapiens
  misc_RNA (1)...(19): siRNA sense strand
gcaguuggguugguuauuc

SEQ ID NO: 1310388 - RNA, 19 nt, Homo sapiens
  misc_RNA (1)...(19): siRNA sense strand
ggaaaagacaucacaaaua

SEQ ID NO: 1310389 - RNA, 19 nt, Homo sapiens
  misc_RNA (1)...(19): siRNA sense strand
caacucagaugcacaaagg

SEQ ID NO: 1310390 - RNA, 19 nt, Homo sapiens
  misc_RNA (1)...(19): siRNA sense strand
ugaaugaucccaccuuaaa

SEQ ID NO: 1310391 - RNA, 19 nt, Homo sapiens
  misc_RNA (1)...(19): siRNA sense strand
gagcagaagaugaugauga

SEQ ID NO: 1310392 - RNA, 19 nt, Homo sapiens
  misc_RNA (1)...(19): siRNA sense strand
guucuugggugucaacauu

SEQ ID NO: 1310393 - RNA, 19 nt, Homo sapiens
  misc_RNA (1)...(19): siRNA sense strand
gagagaaucaacugccaua

SEQ ID NO: 1310394 - RNA, 19 nt, Homo sapiens
  misc_RNA (1)...(19): siRNA sense strand
gaugaaaccgauagaagaa

SEQ ID NO: 1310395 - RNA, 19 nt, Homo sapiens
  misc_RNA (1)...(19): siRNA sense strand
ggaaaugaggaacaguaua

SEQ ID NO: 1310396 - RNA, 19 nt, Homo sapiens
  misc_RNA (1)...(19): siRNA sense strand
aauaagcucuacucauuga

SEQ ID NO: 1310397 - RNA, 19 nt, Homo sapiens
  misc_RNA (1)...(19): siRNA sense strand
cgaugugccuuggauauaa

SEQ ID NO: 1310398 - RNA, 19 nt, Homo sapiens
  misc_RNA (1)...(19): siRNA sense strand
gauagaagaaggagcagaa

SEQ ID NO: 1310399 - RNA, 19 nt, Homo sapiens
  misc_RNA (1)...(19): siRNA sense strand
aauguuaacucuaggaugu

SEQ ID NO: 1310400 - RNA, 19 nt, Homo sapiens
  misc_RNA (1)...(19): siRNA sense strand
gauaaaaccucaguugaug

SEQ ID NO: 1310401 - RNA, 19 nt, Homo sapiens
  misc_RNA (1)...(19): siRNA sense strand
aauaagaccacuugugaaa

SEQ ID NO: 1310402 - RNA, 19 nt, Homo sapiens
  misc_RNA (1)...(19): siRNA sense strand
gaucaacucagaugcacaa

SEQ ID NO: 1310403 - RNA, 19 nt, Homo sapiens
  misc_RNA (1)...(19): siRNA sense strand
ggaacucaguggcauguac

SEQ ID NO: 1310404 - RNA, 19 nt, Homo sapiens
  misc_RNA (1)...(19): siRNA sense strand
uugcaucugucguaucuuu

SEQ ID NO: 1310405 - RNA, 19 nt, Homo sapiens
  misc_RNA (1)...(19): siRNA sense strand
gaagaaggagcagaagaug

SEQ ID NO: 1310406 - RNA, 19 nt, Homo sapiens
  misc_RNA (1)...(19): siRNA sense strand
agaaucaacugccauaggu

SEQ ID NO: 1310407 - RNA, 19 nt, Homo sapiens
  misc_RNA (1)...(19): siRNA sense strand
ggauguacccuuuauaucg

SEQ ID NO: 1310408 - RNA, 19 nt, Homo sapiens
  misc_RNA (1)...(19): siRNA sense strand
agaagaugaugaugacguu

SEQ ID NO: 1310409 - RNA, 19 nt, Homo sapiens
  misc_RNA (1)...(19): siRNA sense strand
gauguacccuuuauaucgu

SEQ ID NO: 1310410 - RNA, 19 nt, Homo sapiens
  misc_RNA (1)...(19): siRNA sense strand
gaugugccuuggauauaau

SEQ ID NO: 1310411 - RNA, 19 nt, Homo sapiens
  misc_RNA (1)...(19): siRNA sense strand
caccugaguuagaaaguau

SEQ ID NO: 1310412 - RNA, 19 nt, Homo sapiens
  misc_RNA (1)...(19): siRNA sense strand
gcgagccucugccaagaug

SEQ ID NO: 1310413 - RNA, 19 nt, Homo sapiens
  misc_RNA (1)...(19): siRNA sense strand
guugaugaccgucugagua

SEQ ID NO: 1310414 - RNA, 19 nt, Homo sapiens
  misc_RNA (1)...(19): siRNA sense strand
acucuaggauguacccuuu

SEQ ID NO: 1310415 - RNA, 19 nt, Homo sapiens
  misc_RNA (1)...(19): siRNA sense strand
aaaugaaggucuccuaucg

SEQ ID NO: 1310416 - RNA, 19 nt, Homo sapiens
  misc_RNA (1)...(19): siRNA sense strand
agagaccgguaaagauuga

SEQ ID NO: 1310417 - RNA, 19 nt, Homo sapiens
  misc_RNA (1)...(19): siRNA sense strand
gaggacauuuucugcauaa

SEQ ID NO: 1310418 - RNA, 19 nt, Homo sapiens
  misc_RNA (1)...(19): siRNA sense strand
acaccugaguuagaaagua

SEQ ID NO: 1310419 - RNA, 19 nt, Homo sapiens
  misc_RNA (1)...(19): siRNA sense strand
uaccugugccuuccaauaa

SEQ ID NO: 1310420 - RNA, 19 nt, Homo sapiens
  misc_RNA (1)...(19): siRNA sense strand
ucaccauuauugcagauga

SEQ ID NO: 1310421 - RNA, 19 nt, Homo sapiens
  misc_RNA (1)...(19): siRNA sense strand
ucuaggauguacccuuuau

SEQ ID NO: 1310422 - RNA, 19 nt, Homo sapiens
  misc_RNA (1)...(19): siRNA sense strand
gaaugaucccaccuuaaau

SEQ ID NO: 1310423 - RNA, 19 nt, Homo sapiens
  misc_RNA (1)...(19): siRNA sense strand
cuuuauagauucuccugaa

SEQ ID NO: 1310424 - RNA, 19 nt, Homo sapiens
  misc_RNA (1)...(19): siRNA sense strand
uaggauguacccuuuauau

SEQ ID NO: 1310425 - RNA, 19 nt, Homo sapiens
  misc_RNA (1)...(19): siRNA sense strand
gaugaccgucugaguauuc

SEQ ID NO: 1310426 - RNA, 19 nt, Homo sapiens
  misc_RNA (1)...(19): siRNA sense strand
acucuucaccuucauauga

SEQ ID NO: 1310427 - RNA, 19 nt, Homo sapiens
  misc_RNA (1)...(19): siRNA sense strand
cggcaucuccaaauacauu

SEQ ID NO: 1310428 - RNA, 19 nt, Homo sapiens
  misc_RNA (1)...(19): siRNA sense strand
agaaggagcagaagaugau

SEQ ID NO: 1310429 - RNA, 19 nt, Homo sapiens
  misc_RNA (1)...(19): siRNA sense strand
gauuuguucagaagacuaa

SEQ ID NO: 1310430 - RNA, 19 nt, Homo sapiens
  misc_RNA (1)...(19): siRNA sense strand
aagaagagaccgguaaaga

SEQ ID NO: 1310431 - RNA, 19 nt, Homo sapiens
  misc_RNA (1)...(19): siRNA sense strand
caauaagaccacuugugaa

SEQ ID NO: 1310432 - RNA, 19 nt, Homo sapiens
  misc_RNA (1)...(19): siRNA sense strand
auugaaugaucccaccuua

SEQ ID NO: 1310433 - RNA, 19 nt, Homo sapiens
  misc_RNA (1)...(19): siRNA sense strand
aaucaacugccauagguuu

SEQ ID NO: 1310434 - RNA, 19 nt, Homo sapiens
  misc_RNA (1)...(19): siRNA sense strand
caagaugaaaccgauagaa

SEQ ID NO: 1310435 - RNA, 19 nt, Homo sapiens
  misc_RNA (1)...(19): siRNA sense strand
cagcgagccucugccaaga

SEQ ID NO: 1310436 - RNA, 19 nt, Homo sapiens
  misc_RNA (1)...(19): siRNA sense strand
agaagagaccgguaaagau

SEQ ID NO: 1310437 - RNA, 19 nt, Homo sapiens
  misc_RNA (1)...(19): siRNA sense strand
agaugaaaccgauagaaga

SEQ ID NO: 1310438 - RNA, 19 nt, Homo sapiens
  misc_RNA (1)...(19): siRNA sense strand
gagaaucaacugccauagg

SEQ ID NO: 1310439 - RNA, 19 nt, Homo sapiens
  misc_RNA (1)...(19): siRNA sense strand
agaagaaggagcagaagau

SEQ ID NO: 1310440 - RNA, 19 nt, Homo sapiens
  misc_RNA (1)...(19): siRNA sense strand
gauauaaugaucuggaacu

SEQ ID NO: 1310441 - RNA, 19 nt, Homo sapiens
  misc_RNA (1)...(19): siRNA sense strand
cuaccgaugugccuuggau

SEQ ID NO: 1310442 - RNA, 19 nt, Homo sapiens
  misc_RNA (1)...(19): siRNA sense strand
gaagaugaugaugacguuu

SEQ ID NO: 1310443 - RNA, 19 nt, Homo sapiens
  misc_RNA (1)...(19): siRNA sense strand
gguaaagauugaaaaggaa

SEQ ID NO: 1310444 - RNA, 19 nt, Homo sapiens
  misc_RNA (1)...(19): siRNA sense strand
ccgugugccuccagauuug

SEQ ID NO: 1310445 - RNA, 19 nt, Homo sapiens
  misc_RNA (1)...(19): siRNA sense strand
ucacaaauaagcucuacuc

SEQ ID NO: 1310446 - RNA, 19 nt, Homo sapiens
  misc_RNA (1)...(19): siRNA sense strand
uacaagaagagaccgguaa

SEQ ID NO: 1310447 - RNA, 19 nt, Homo sapiens
  misc_RNA (1)...(19): siRNA sense strand
cccugugccuuuauagauu

SEQ ID NO: 1310448 - RNA, 19 nt, Homo sapiens
  misc_RNA (1)...(19): siRNA sense strand
ccagauuuguucagaagac

SEQ ID NO: 1310449 - RNA, 19 nt, Homo sapiens
  misc_RNA (1)...(19): siRNA sense strand
ccgaugugccuuggauaua

SEQ ID NO: 1310450 - RNA, 19 nt, Homo sapiens
  misc_RNA (1)...(19): siRNA sense strand
gagccucugccaagaugaa

SEQ ID NO: 1310451 - RNA, 19 nt, Homo sapiens
  misc_RNA (1)...(19): siRNA sense strand
aaauaagcucuacucauug

SEQ ID NO: 1310452 - RNA, 19 nt, Homo sapiens
  misc_RNA (1)...(19): siRNA sense strand
gcauguaccggcgauuguu

SEQ ID NO: 1310453 - RNA, 19 nt, Homo sapiens
  misc_RNA (1)...(19): siRNA sense strand
uggauauaaugaucuggaa

SEQ ID NO: 1310454 - RNA, 19 nt, Homo sapiens
  misc_RNA (1)...(19): siRNA sense strand
ccugugccuuccaauaaga

SEQ ID NO: 1310455 - RNA, 19 nt, Homo sapiens
  misc_RNA (1)...(19): siRNA sense strand
cagcauguccucucuucau

SEQ ID NO: 1310456 - RNA, 19 nt, Homo sapiens
  misc_RNA (1)...(19): siRNA sense strand
guauagccagcuccaguga

SEQ ID NO: 1310457 - RNA, 19 nt, Homo sapiens
  misc_RNA (1)...(19): siRNA sense strand
aaugaucccaccuuaaaug

SEQ ID NO: 1310458 - RNA, 19 nt, Homo sapiens
  misc_RNA (1)...(19): siRNA sense strand
gucaagagaaagauuaaca

SEQ ID NO: 1310459 - RNA, 19 nt, Homo sapiens
  misc_RNA (1)...(19): siRNA sense strand
gaaucaacugccauagguu

SEQ ID NO: 1310460 - RNA, 19 nt, Homo sapiens
  misc_RNA (1)...(19): siRNA sense strand
ggauaaaaccucaguugau

SEQ ID NO: 1310461 - RNA, 19 nt, Homo sapiens
  misc_RNA (1)...(19): siRNA sense strand
acaagaagagaccgguaaa

SEQ ID NO: 1310462 - RNA, 19 nt, Homo sapiens
  misc_RNA (1)...(19): siRNA sense strand
ggaauguuaacucuaggau

SEQ ID NO: 1310463 - RNA, 19 nt, Homo sapiens
  misc_RNA (1)...(19): siRNA sense strand
cgacggcuugcaccaguuu

SEQ ID NO: 1310464 - RNA, 19 nt, Homo sapiens
  misc_RNA (1)...(19): siRNA sense strand
acaaauaagcucuacucau

SEQ ID NO: 1310465 - RNA, 19 nt, Homo sapiens
  misc_RNA (1)...(19): siRNA sense strand
gcaucugucguaucuuuua

SEQ ID NO: 1310466 - RNA, 19 nt, Homo sapiens
  misc_RNA (1)...(19): siRNA sense strand
gaaaccgauagaagaagga

SEQ ID NO: 1310467 - RNA, 19 nt, Homo sapiens
  misc_RNA (1)...(19): siRNA sense strand
caucacaaauaagcucuac

SEQ ID NO: 1310468 - RNA, 19 nt, Homo sapiens
  misc_RNA (1)...(19): siRNA sense strand
aaagacaucacaaauaagc

SEQ ID NO: 1310469 - RNA, 19 nt, Homo sapiens
  misc_RNA (1)...(19): siRNA sense strand
cagaugauaacugcagauu

SEQ ID NO: 1310470 - RNA, 19 nt, Homo sapiens
  misc_RNA (1)...(19): siRNA sense strand
aaauuccaggucaccauua

SEQ ID NO: 1310471 - RNA, 19 nt, Homo sapiens
  misc_RNA (1)...(19): siRNA sense strand
ugugaaaacuggagagaga

SEQ ID NO: 1310472 - RNA, 19 nt, Homo sapiens
  misc_RNA (1)...(19): siRNA sense strand
ggucaccauuauugcagau

SEQ ID NO: 1310473 - RNA, 19 nt, Homo sapiens
  misc_RNA (1)...(19): siRNA sense strand
uaagcucuacucauugaau

SEQ ID NO: 1310474 - RNA, 19 nt, Homo sapiens
  misc_RNA (1)...(19): siRNA sense strand
ccugugccuuuauagauuc

SEQ ID NO: 1310475 - RNA, 19 nt, Homo sapiens
  misc_RNA (1)...(19): siRNA sense strand
uagaagaaggagcagaaga

SEQ ID NO: 1310476 - RNA, 19 nt, Homo sapiens
  misc_RNA (1)...(19): siRNA sense strand
caaauaagcucuacucauu

SEQ ID NO: 1310477 - RNA, 19 nt, Homo sapiens
  misc_RNA (1)...(19): siRNA sense strand
gaaccggcaucuccaaaua

SEQ ID NO: 1310478 - RNA, 19 nt, Homo sapiens
  misc_RNA (1)...(19): siRNA sense strand
gaauuuagaucaacucaga

SEQ ID NO: 1310479 - RNA, 19 nt, Homo sapiens
  misc_RNA (1)...(19): siRNA sense strand
gcacacagaucuccauguu

SEQ ID NO: 1310480 - RNA, 19 nt, Homo sapiens
  misc_RNA (1)...(19): siRNA sense strand
gaucccaccuuaaaugaua

SEQ ID NO: 1310481 - RNA, 19 nt, Homo sapiens
  misc_RNA (1)...(19): siRNA sense strand
gaagagaccgguaaagauu

SEQ ID NO: 1310482 - RNA, 19 nt, Homo sapiens
  misc_RNA (1)...(19): siRNA sense strand
gaugauaacugcagauuuu

SEQ ID NO: 1310483 - RNA, 19 nt, Homo sapiens
  misc_RNA (1)...(19): siRNA sense strand
caacuacucuucaccuuca

SEQ ID NO: 1310484 - RNA, 19 nt, Homo sapiens
  misc_RNA (1)...(19): siRNA sense strand
gaaaugaggaacaguauag

SEQ ID NO: 1310485 - RNA, 19 nt, Homo sapiens
  misc_RNA (1)...(19): siRNA sense strand
uaacauacuuucuggaauc

SEQ ID NO: 1310486 - RNA, 19 nt, Homo sapiens
  misc_RNA (1)...(19): siRNA sense strand
ccaauaagaccacuuguga

SEQ ID NO: 1310487 - RNA, 19 nt, Homo sapiens
  misc_RNA (1)...(19): siRNA sense strand
gcaguuggguugguuauuc

SEQ ID NO: 1310488 - RNA, 19 nt, Homo sapiens
  misc_RNA (1)...(19): siRNA sense strand
ggaaaagacaucacaaaua

SEQ ID NO: 1310489 - RNA, 19 nt, Homo sapiens
  misc_RNA (1)...(19): siRNA sense strand
caacucagaugcacaaagg

SEQ ID NO: 1310490 - RNA, 19 nt, Homo sapiens
  misc_RNA (1)...(19): siRNA sense strand
ugaaugaucccaccuuaaa

SEQ ID NO: 1310491 - RNA, 19 nt, Homo sapiens
  misc_RNA (1)...(19): siRNA sense strand
gagcagaagaugaugauga

SEQ ID NO: 1310492 - RNA, 19 nt, Homo sapiens
  misc_RNA (1)...(19): siRNA sense strand
guucuugggugucaacauu

SEQ ID NO: 1310493 - RNA, 19 nt, Homo sapiens
  misc_RNA (1)...(19): siRNA sense strand
gagagaaucaacugccaua

SEQ ID NO: 1310494 - RNA, 19 nt, Homo sapiens
  misc_RNA (1)...(19): siRNA sense strand
gaugaaaccgauagaagaa

SEQ ID NO: 1310495 - RNA, 19 nt, Homo sapiens
  misc_RNA (1)...(19): siRNA sense strand
ggaaaugaggaacaguaua

SEQ ID NO: 1310496 - RNA, 19 nt, Homo sapiens
  misc_RNA (1)...(19): siRNA sense strand
aauaagcucuacucauuga

SEQ ID NO: 1310497 - RNA, 19 nt, Homo sapiens
  misc_RNA (1)...(19): siRNA sense strand
cgaugugccuuggauauaa

SEQ ID NO: 1310498 - RNA, 19 nt, Homo sapiens
  misc_RNA (1)...(19): siRNA sense strand
gauagaagaaggagcagaa

SEQ ID NO: 1310499 - RNA, 19 nt, Homo sapiens
  misc_RNA (1)...(19): siRNA sense strand
aauguuaacucuaggaugu

SEQ ID NO: 1310500 - RNA, 19 nt, Homo sapiens
  misc_RNA (1)...(19): siRNA sense strand
gauaaaaccucaguugaug

SEQ ID NO: 1310501 - RNA, 19 nt, Homo sapiens
  misc_RNA (1)...(19): siRNA sense strand
aauaagaccacuugugaaa

SEQ ID NO: 1310502 - RNA, 19 nt, Homo sapiens
  misc_RNA (1)...(19): siRNA sense strand
gaucaacucagaugcacaa

SEQ ID NO: 1310503 - RNA, 19 nt, Homo sapiens
  misc_RNA (1)...(19): siRNA sense strand
ggaacucaguggcauguac

SEQ ID NO: 1310504 - RNA, 19 nt, Homo sapiens
  misc_RNA (1)...(19): siRNA sense strand
uugcaucugucguaucuuu

SEQ ID NO: 1310505 - RNA, 19 nt, Homo sapiens
  misc_RNA (1)...(19): siRNA sense strand
gaagaaggagcagaagaug

SEQ ID NO: 1310506 - RNA, 19 nt, Homo sapiens
  misc_RNA (1)...(19): siRNA sense strand
agaaucaacugccauaggu

SEQ ID NO: 1310507 - RNA, 19 nt, Homo sapiens
  misc_RNA (1)...(19): siRNA sense strand
ggauguacccuuuauaucg

SEQ ID NO: 1310508 - RNA, 19 nt, Homo sapiens
  misc_RNA (1)...(19): siRNA sense strand
agaagaugaugaugacguu

SEQ ID NO: 1310509 - RNA, 19 nt, Homo sapiens
  misc_RNA (1)...(19): siRNA sense strand
gauguacccuuuauaucgu

SEQ ID NO: 1310510 - RNA, 19 nt, Homo sapiens
  misc_RNA (1)...(19): siRNA sense strand
gaugugccuuggauauaau

SEQ ID NO: 1310511 - RNA, 19 nt, Homo sapiens
  misc_RNA (1)...(19): siRNA sense strand
caccugaguuagaaaguau

SEQ ID NO: 1310512 - RNA, 19 nt, Homo sapiens
  misc_RNA (1)...(19): siRNA sense strand
gcgagccucugccaagaug

SEQ ID NO: 1310513 - RNA, 19 nt, Homo sapiens
  misc_RNA (1)...(19): siRNA sense strand
guugaugaccgucugagua

SEQ ID NO: 1310514 - RNA, 19 nt, Homo sapiens
  misc_RNA (1)...(19): siRNA sense strand
acucuaggauguacccuuu

SEQ ID NO: 1310515 - RNA, 19 nt, Homo sapiens
  misc_RNA (1)...(19): siRNA sense strand
aaaugaaggucuccuaucg

SEQ ID NO: 1310516 - RNA, 19 nt, Homo sapiens
  misc_RNA (1)...(19): siRNA sense strand
agagaccgguaaagauuga

SEQ ID NO: 1310517 - RNA, 19 nt, Homo sapiens
  misc_RNA (1)...(19): siRNA sense strand
gaggacauuuucugcauaa

SEQ ID NO: 1310518 - RNA, 19 nt, Homo sapiens
  misc_RNA (1)...(19): siRNA sense strand
acaccugaguuagaaagua

SEQ ID NO: 1310519 - RNA, 19 nt, Homo sapiens
  misc_RNA (1)...(19): siRNA sense strand
uaccugugccuuccaauaa

SEQ ID NO: 1310520 - RNA, 19 nt, Homo sapiens
  misc_RNA (1)...(19): siRNA sense strand
ucaccauuauugcagauga

SEQ ID NO: 1310521 - RNA, 19 nt, Homo sapiens
  misc_RNA (1)...(19): siRNA sense strand
ucuaggauguacccuuuau

SEQ ID NO: 1310522 - RNA, 19 nt, Homo sapiens
  misc_RNA (1)...(19): siRNA sense strand
gaaugaucccaccuuaaau

SEQ ID NO: 1310523 - RNA, 19 nt, Homo sapiens
  misc_RNA (1)...(19): siRNA sense strand
cuuuauagauucuccugaa

SEQ ID NO: 1310524 - RNA, 19 nt, Homo sapiens
  misc_RNA (1)...(19): siRNA sense strand
uaggauguacccuuuauau

SEQ ID NO: 1310525 - RNA, 19 nt, Homo sapiens
  misc_RNA (1)...(19): siRNA sense strand
gaugaccgucugaguauuc

SEQ ID NO: 1310526 - RNA, 19 nt, Homo sapiens
  misc_RNA (1)...(19): siRNA sense strand
acucuucaccuucauauga

SEQ ID NO: 1310527 - RNA, 19 nt, Homo sapiens
  misc_RNA (1)...(19): siRNA sense strand
cggcaucuccaaauacauu

SEQ ID NO: 1310528 - RNA, 19 nt, Homo sapiens
  misc_RNA (1)...(19): siRNA sense strand
agaaggagcagaagaugau

SEQ ID NO: 1310529 - RNA, 19 nt, Homo sapiens
  misc_RNA (1)...(19): siRNA sense strand
gauuuguucagaagacuaa

SEQ ID NO: 1310530 - RNA, 19 nt, Homo sapiens
  misc_RNA (1)...(19): siRNA sense strand
aagaagagaccgguaaaga

SEQ ID NO: 1310531 - RNA, 19 nt, Homo sapiens
  misc_RNA (1)...(19): siRNA sense strand
caauaagaccacuugugaa

SEQ ID NO: 1310532 - RNA, 19 nt, Homo sapiens
  misc_RNA (1)...(19): siRNA sense strand
auugaaugaucccaccuua

SEQ ID NO: 1310533 - RNA, 19 nt, Homo sapiens
  misc_RNA (1)...(19): siRNA sense strand
aaucaacugccauagguuu

SEQ ID NO: 1310534 - RNA, 19 nt, Homo sapiens
  misc_RNA (1)...(19): siRNA sense strand
caagaugaaaccgauagaa

SEQ ID NO: 1310535 - RNA, 19 nt, Homo sapiens
  misc_RNA (1)...(19): siRNA sense strand
cagcgagccucugccaaga

SEQ ID NO: 1310536 - RNA, 19 nt, Homo sapiens
  misc_RNA (1)...(19): siRNA sense strand
agaagagaccgguaaagau

SEQ ID NO: 1310537 - RNA, 19 nt, Homo sapiens
  misc_RNA (1)...(19): siRNA sense strand
agaugaaaccgauagaaga

SEQ ID NO: 1310538 - RNA, 19 nt, Homo sapiens
  misc_RNA (1)...(19): siRNA sense strand
gagaaucaacugccauagg

SEQ ID NO: 1310539 - RNA, 19 nt, Homo sapiens
  misc_RNA (1)...(19): siRNA sense strand
agaagaaggagcagaagau

SEQ ID NO: 1310540 - RNA, 19 nt, Homo sapiens
  misc_RNA (1)...(19): siRNA sense strand
gauauaaugaucuggaacu

SEQ ID NO: 1310541 - RNA, 19 nt, Homo sapiens
  misc_RNA (1)...(19): siRNA sense strand
cuaccgaugugccuuggau

SEQ ID NO: 1310542 - RNA, 19 nt, Homo sapiens
  misc_RNA (1)...(19): siRNA sense strand
gaagaugaugaugacguuu

SEQ ID NO: 1310543 - RNA, 19 nt, Homo sapiens
  misc_RNA (1)...(19): siRNA sense strand
gguaaagauugaaaaggaa

SEQ ID NO: 1310544 - RNA, 19 nt, Homo sapiens
  misc_RNA (1)...(19): siRNA sense strand
ccgugugccuccagauuug

SEQ ID NO: 1310545 - RNA, 19 nt, Homo sapiens
  misc_RNA (1)...(19): siRNA sense strand
ucacaaauaagcucuacuc

SEQ ID NO: 1310546 - RNA, 19 nt, Homo sapiens
  misc_RNA (1)...(19): siRNA sense strand
uacaagaagagaccgguaa

SEQ ID NO: 1310547 - RNA, 19 nt, Homo sapiens
  misc_RNA (1)...(19): siRNA sense strand
cccugugccuuuauagauu

SEQ ID NO: 1310548 - RNA, 19 nt, Homo sapiens
  misc_RNA (1)...(19): siRNA sense strand
ccagauuuguucagaagac

SEQ ID NO: 1310549 - RNA, 19 nt, Homo sapiens
  misc_RNA (1)...(19): siRNA sense strand
ccgaugugccuuggauaua

SEQ ID NO: 1310550 - RNA, 19 nt, Homo sapiens
  misc_RNA (1)...(19): siRNA sense strand
gagccucugccaagaugaa

SEQ ID NO: 1310551 - RNA, 19 nt, Homo sapiens
  misc_RNA (1)...(19): siRNA sense strand
aaauaagcucuacucauug

SEQ ID NO: 1310552 - RNA, 19 nt, Homo sapiens
  misc_RNA (1)...(19): siRNA sense strand
gcauguaccggcgauuguu

SEQ ID NO: 1310553 - RNA, 19 nt, Homo sapiens
  misc_RNA (1)...(19): siRNA sense strand
uggauauaaugaucuggaa

SEQ ID NO: 1310554 - RNA, 19 nt, Homo sapiens
  misc_RNA (1)...(19): siRNA sense strand
ccugugccuuccaauaaga

SEQ ID NO: 1310555 - RNA, 19 nt, Homo sapiens
  misc_RNA (1)...(19): siRNA sense strand
cagcauguccucucuucau

SEQ ID NO: 1310556 - RNA, 19 nt, Homo sapiens
  misc_RNA (1)...(19): siRNA sense strand
guauagccagcuccaguga

SEQ ID NO: 1310557 - RNA, 19 nt, Homo sapiens
  misc_RNA (1)...(19): siRNA sense strand
aaugaucccaccuuaaaug

SEQ ID NO: 1310558 - RNA, 19 nt, Homo sapiens
  misc_RNA (1)...(19): siRNA sense strand
gucaagagaaagauuaaca

SEQ ID NO: 1310559 - RNA, 19 nt, Homo sapiens
  misc_RNA (1)...(19): siRNA sense strand
gaaucaacugccauagguu

SEQ ID NO: 1310560 - RNA, 19 nt, Homo sapiens
  misc_RNA (1)...(19): siRNA sense strand
ggauaaaaccucaguugau

SEQ ID NO: 1310561 - RNA, 19 nt, Homo sapiens
  misc_RNA (1)...(19): siRNA sense strand
acaagaagagaccgguaaa

SEQ ID NO: 1310562 - RNA, 19 nt, Homo sapiens
  misc_RNA (1)...(19): siRNA sense strand
ggaauguuaacucuaggau

SEQ ID NO: 1310563 - RNA, 19 nt, Homo sapiens
  misc_RNA (1)...(19): siRNA sense strand
cgacggcuugcaccaguuu

SEQ ID NO: 1310564 - RNA, 19 nt, Homo sapiens
  misc_RNA (1)...(19): siRNA sense strand
acaaauaagcucuacucau

SEQ ID NO: 1310565 - RNA, 19 nt, Homo sapiens
  misc_RNA (1)...(19): siRNA sense strand
gcaucugucguaucuuuua

SEQ ID NO: 1310566 - RNA, 19 nt, Homo sapiens
  misc_RNA (1)...(19): siRNA sense strand
gaaaccgauagaagaagga

SEQ ID NO: 1310567 - RNA, 19 nt, Homo sapiens
  misc_RNA (1)...(19): siRNA sense strand
caucacaaauaagcucuac

SEQ ID NO: 1310568 - RNA, 19 nt, Homo sapiens
  misc_RNA (1)...(19): siRNA sense strand
aaagacaucacaaauaagc

SEQ ID NO: 1310569 - RNA, 19 nt, Homo sapiens
  misc_RNA (1)...(19): siRNA sense strand
cagaugauaacugcagauu

SEQ ID NO: 1310570 - RNA, 19 nt, Homo sapiens
  misc_RNA (1)...(19): siRNA sense strand
aaauuccaggucaccauua

SEQ ID NO: 1310571 - RNA, 19 nt, Homo sapiens
  misc_RNA (1)...(19): siRNA sense strand
ugugaaaacuggagagaga

SEQ ID NO: 1310572 - RNA, 19 nt, Homo sapiens
  misc_RNA (1)...(19): siRNA sense strand
ggucaccauuauugcagau

SEQ ID NO: 1310573 - RNA, 19 nt, Homo sapiens
  misc_RNA (1)...(19): siRNA sense strand
uaagcucuacucauugaau

SEQ ID NO: 1310574 - RNA, 19 nt, Homo sapiens
  misc_RNA (1)...(19): siRNA sense strand
ccugugccuuuauagauuc

SEQ ID NO: 1310575 - RNA, 19 nt, Homo sapiens
  misc_RNA (1)...(19): siRNA sense strand
uagaagaaggagcagaaga

SEQ ID NO: 1310576 - RNA, 19 nt, Homo sapiens
  misc_RNA (1)...(19): siRNA sense strand
gcaaacggcuuaugggaua

SEQ ID NO: 1310577 - RNA, 19 nt, Homo sapiens
  misc_RNA (1)...(19): siRNA sense strand
ggaaauaccuggagucaca

SEQ ID NO: 1310578 - RNA, 19 nt, Homo sapiens
  misc_RNA (1)...(19): siRNA sense strand
gcacaaaggucugcugauu

SEQ ID NO: 1310579 - RNA, 19 nt, Homo sapiens
  misc_RNA (1)...(19): siRNA sense strand
gaaggugacuggucugagu

SEQ ID NO: 1310580 - RNA, 19 nt, Homo sapiens
  misc_RNA (1)...(19): siRNA sense strand
cuacuacccuuucugcuuu

SEQ ID NO: 1310581 - RNA, 19 nt, Homo sapiens
  misc_RNA (1)...(19): siRNA sense strand
gagcugugguguacauuga

SEQ ID NO: 1310582 - RNA, 19 nt, Homo sapiens
  misc_RNA (1)...(19): siRNA sense strand
ccaguuaucuugacgaauc

SEQ ID NO: 1310583 - RNA, 19 nt, Homo sapiens
  misc_RNA (1)...(19): siRNA sense strand
acaaaggucugcugauuuc

SEQ ID NO: 1310584 - RNA, 19 nt, Homo sapiens
  misc_RNA (1)...(19): siRNA sense strand
guauuuggcugaggaguuu

SEQ ID NO: 1310585 - RNA, 19 nt, Homo sapiens
  misc_RNA (1)...(19): siRNA sense strand
caacaugggaggauuagaa

SEQ ID NO: 1310586 - RNA, 19 nt, Homo sapiens
  misc_RNA (1)...(19): siRNA sense strand
ugaaagacugguugaaaua

SEQ ID NO: 1310587 - RNA, 19 nt, Homo sapiens
  misc_RNA (1)...(19): siRNA sense strand
ucaaggcaaucucaaagaa

SEQ ID NO: 1310588 - RNA, 19 nt, Homo sapiens
  misc_RNA (1)...(19): siRNA sense strand
ggaagaagaaauuaucuca

SEQ ID NO: 1310589 - RNA, 19 nt, Homo sapiens
  misc_RNA (1)...(19): siRNA sense strand
caaagaugcaaacggcuua

SEQ ID NO: 1310590 - RNA, 19 nt, Homo sapiens
  misc_RNA (1)...(19): siRNA sense strand
gaaguucuacaaaggauug

SEQ ID NO: 1310591 - RNA, 19 nt, Homo sapiens
  misc_RNA (1)...(19): siRNA sense strand
uccaugaacuucuauguau

SEQ ID NO: 1310592 - RNA, 19 nt, Homo sapiens
  misc_RNA (1)...(19): siRNA sense strand
ccagcauucuuaucuacua

SEQ ID NO: 1310593 - RNA, 19 nt, Homo sapiens
  misc_RNA (1)...(19): siRNA sense strand
cauccuccuugaaguauuu

SEQ ID NO: 1310594 - RNA, 19 nt, Homo sapiens
  misc_RNA (1)...(19): siRNA sense strand
guaccuugauucagagaga

SEQ ID NO: 1310595 - RNA, 19 nt, Homo sapiens
  misc_RNA (1)...(19): siRNA sense strand
gcugaaagacugguugaaa

SEQ ID NO: 1310596 - RNA, 19 nt, Homo sapiens
  misc_RNA (1)...(19): siRNA sense strand
ucaccagcauucuuaucua

SEQ ID NO: 1310597 - RNA, 19 nt, Homo sapiens
  misc_RNA (1)...(19): siRNA sense strand
gugaugaaguucuacaaag

SEQ ID NO: 1310598 - RNA, 19 nt, Homo sapiens
  misc_RNA (1)...(19): siRNA sense strand
cugaaagacugguugaaau

SEQ ID NO: 1310599 - RNA, 19 nt, Homo sapiens
  misc_RNA (1)...(19): siRNA sense strand
gaaagacugguugaaauag

SEQ ID NO: 1310600 - RNA, 19 nt, Homo sapiens
  misc_RNA (1)...(19): siRNA sense strand
agaaggagcugugguguac

SEQ ID NO: 1310601 - RNA, 19 nt, Homo sapiens
  misc_RNA (1)...(19): siRNA sense strand
uccaguaccuugauucaga

SEQ ID NO: 1310602 - RNA, 19 nt, Homo sapiens
  misc_RNA (1)...(19): siRNA sense strand
caaagaaagaaacaaguuc

SEQ ID NO: 1310603 - RNA, 19 nt, Homo sapiens
  misc_RNA (1)...(19): siRNA sense strand
ccagauauuuuaacacuga

SEQ ID NO: 1310604 - RNA, 19 nt, Homo sapiens
  misc_RNA (1)...(19): siRNA sense strand
gaguagacaucagauccuu

SEQ ID NO: 1310605 - RNA, 19 nt, Homo sapiens
  misc_RNA (1)...(19): siRNA sense strand
ucagagagaagacagauuc

SEQ ID NO: 1310606 - RNA, 19 nt, Homo sapiens
  misc_RNA (1)...(19): siRNA sense strand
ggauccagcugugugauag

SEQ ID NO: 1310607 - RNA, 19 nt, Homo sapiens
  misc_RNA (1)...(19): siRNA sense strand
ggacgaagcccugcauggu

SEQ ID NO: 1310608 - RNA, 19 nt, Homo sapiens
  misc_RNA (1)...(19): siRNA sense strand
cacaaaggucugcugauuu

SEQ ID NO: 1310609 - RNA, 19 nt, Homo sapiens
  misc_RNA (1)...(19): siRNA sense strand
caaggcaaucucaaagaaa

SEQ ID NO: 1310610 - RNA, 19 nt, Homo sapiens
  misc_RNA (1)...(19): siRNA sense strand
guggaucccucacagagau

SEQ ID NO: 1310611 - RNA, 19 nt, Homo sapiens
  misc_RNA (1)...(19): siRNA sense strand
ugugauagccgcacuagga

SEQ ID NO: 1310612 - RNA, 19 nt, Homo sapiens
  misc_RNA (1)...(19): siRNA sense strand
gaugaaguucuacaaagga

SEQ ID NO: 1310613 - RNA, 19 nt, Homo sapiens
  misc_RNA (1)...(19): siRNA sense strand
ccaccaacaugggaggauu

SEQ ID NO: 1310614 - RNA, 19 nt, Homo sapiens
  misc_RNA (1)...(19): siRNA sense strand
gauagccgcacuaggaaau

SEQ ID NO: 1310615 - RNA, 19 nt, Homo sapiens
  misc_RNA (1)...(19): siRNA sense strand
caacuucaaggcaaucuca

SEQ ID NO: 1310616 - RNA, 19 nt, Homo sapiens
  misc_RNA (1)...(19): siRNA sense strand
caccugugaugaaguucua

SEQ ID NO: 1310617 - RNA, 19 nt, Homo sapiens
  misc_RNA (1)...(19): siRNA sense strand
ccaugaacuucuauguaug

SEQ ID NO: 1310618 - RNA, 19 nt, Homo sapiens
  misc_RNA (1)...(19): siRNA sense strand
cacuggagcuuaugaaggu

SEQ ID NO: 1310619 - RNA, 19 nt, Homo sapiens
  misc_RNA (1)...(19): siRNA sense strand
cgaguggguuuaucacaag

SEQ ID NO: 1310620 - RNA, 19 nt, Homo sapiens
  misc_RNA (1)...(19): siRNA sense strand
guccaugaacuucuaugua

SEQ ID NO: 1310621 - RNA, 19 nt, Homo sapiens
  misc_RNA (1)...(19): siRNA sense strand
ucauuugucuacaccauca

SEQ ID NO: 1310622 - RNA, 19 nt, Homo sapiens
  misc_RNA (1)...(19): siRNA sense strand
ugaugaaguucuacaaagg

SEQ ID NO: 1310623 - RNA, 19 nt, Homo sapiens
  misc_RNA (1)...(19): siRNA sense strand
gauuacaacccaucugagu

SEQ ID NO: 1310624 - RNA, 19 nt, Homo sapiens
  misc_RNA (1)...(19): siRNA sense strand
ggaggaaggccugguucuu

SEQ ID NO: 1310625 - RNA, 19 nt, Homo sapiens
  misc_RNA (1)...(19): siRNA sense strand
ugacuggucugaguuaucg

SEQ ID NO: 1310626 - RNA, 19 nt, Homo sapiens
  misc_RNA (1)...(19): siRNA sense strand
gcauccuccuugaaguauu

SEQ ID NO: 1310627 - RNA, 19 nt, Homo sapiens
  misc_RNA (1)...(19): siRNA sense strand
aaaggaguuugaugcacaa

SEQ ID NO: 1310628 - RNA, 19 nt, Homo sapiens
  misc_RNA (1)...(19): siRNA sense strand
uuucucaccagcauucuua

SEQ ID NO: 1310629 - RNA, 19 nt, Homo sapiens
  misc_RNA (1)...(19): siRNA sense strand
uuaucgagguguccaugaa

SEQ ID NO: 1310630 - RNA, 19 nt, Homo sapiens
  misc_RNA (1)...(19): siRNA sense strand
aaggcaaucucaaagaaag

SEQ ID NO: 1310631 - RNA, 19 nt, Homo sapiens
  misc_RNA (1)...(19): siRNA sense strand
uagaaggagcuguggugua

SEQ ID NO: 1310632 - RNA, 19 nt, Homo sapiens
  misc_RNA (1)...(19): siRNA sense strand
caccaacaugggaggauua

SEQ ID NO: 1310633 - RNA, 19 nt, Homo sapiens
  misc_RNA (1)...(19): siRNA sense strand
ugacaaguaguaaaguuca

SEQ ID NO: 1310634 - RNA, 19 nt, Homo sapiens
  misc_RNA (1)...(19): siRNA sense strand
caaggaggaaggccugguu

SEQ ID NO: 1310635 - RNA, 19 nt, Homo sapiens
  misc_RNA (1)...(19): siRNA sense strand
acgaguggguuuaucacaa

SEQ ID NO: 1310636 - RNA, 19 nt, Homo sapiens
  misc_RNA (1)...(19): siRNA sense strand
caugggaggauuagaagga

SEQ ID NO: 1310637 - RNA, 19 nt, Homo sapiens
  misc_RNA (1)...(19): siRNA sense strand
gucuccagcugaugauuug

SEQ ID NO: 1310638 - RNA, 19 nt, Homo sapiens
  misc_RNA (1)...(19): siRNA sense strand
ggagcugugguguacauug

SEQ ID NO: 1310639 - RNA, 19 nt, Homo sapiens
  misc_RNA (1)...(19): siRNA sense strand
guagacaucagauccuuac

SEQ ID NO: 1310640 - RNA, 19 nt, Homo sapiens
  misc_RNA (1)...(19): siRNA sense strand
caccagcauucuuaucuac

SEQ ID NO: 1310641 - RNA, 19 nt, Homo sapiens
  misc_RNA (1)...(19): siRNA sense strand
gaguggguuuaucacaaga

SEQ ID NO: 1310642 - RNA, 19 nt, Homo sapiens
  misc_RNA (1)...(19): siRNA sense strand
gacaaguaguaaaguucau

SEQ ID NO: 1310643 - RNA, 19 nt, Homo sapiens
  misc_RNA (1)...(19): siRNA sense strand
gcugugguguacauugaca

SEQ ID NO: 1310644 - RNA, 19 nt, Homo sapiens
  misc_RNA (1)...(19): siRNA sense strand
gcaaucucaaagaaagaaa

SEQ ID NO: 1310645 - RNA, 19 nt, Homo sapiens
  misc_RNA (1)...(19): siRNA sense strand
guacauugacacagagucu

SEQ ID NO: 1310646 - RNA, 19 nt, Homo sapiens
  misc_RNA (1)...(19): siRNA sense strand
ggaucccucacagagauua

SEQ ID NO: 1310647 - RNA, 19 nt, Homo sapiens
  misc_RNA (1)...(19): siRNA sense strand
aaggucugcugauuucuca

SEQ ID NO: 1310648 - RNA, 19 nt, Homo sapiens
  misc_RNA (1)...(19): siRNA sense strand
cuacauuacccaccaacau

SEQ ID NO: 1310649 - RNA, 19 nt, Homo sapiens
  misc_RNA (1)...(19): siRNA sense strand
uacauuacccaccaacaug

SEQ ID NO: 1310650 - RNA, 19 nt, Homo sapiens
  misc_RNA (1)...(19): siRNA sense strand
gugauagccgcacuaggaa

SEQ ID NO: 1310651 - RNA, 19 nt, Homo sapiens
  misc_RNA (1)...(19): siRNA sense strand
cagaaaggaguuugaugca

SEQ ID NO: 1310652 - RNA, 19 nt, Homo sapiens
  misc_RNA (1)...(19): siRNA sense strand
ggcaaucucaaagaaagaa

SEQ ID NO: 1310653 - RNA, 19 nt, Homo sapiens
  misc_RNA (1)...(19): siRNA sense strand
aaggagcugugguguacau

SEQ ID NO: 1310654 - RNA, 19 nt, Homo sapiens
  misc_RNA (1)...(19): siRNA sense strand
ggugacuggucugaguuau

SEQ ID NO: 1310655 - RNA, 19 nt, Homo sapiens
  misc_RNA (1)...(19): siRNA sense strand
aggcauccuccuugaagua

SEQ ID NO: 1310656 - RNA, 19 nt, Homo sapiens
  misc_RNA (1)...(19): siRNA sense strand
ggucagaaaggaguuugau

SEQ ID NO: 1310657 - RNA, 19 nt, Homo sapiens
  misc_RNA (1)...(19): siRNA sense strand
ugcauuuagugcugaaaga

SEQ ID NO: 1310658 - RNA, 19 nt, Homo sapiens
  misc_RNA (1)...(19): siRNA sense strand
gagcauuuuggcuacauua

SEQ ID NO: 1310659 - RNA, 19 nt, Homo sapiens
  misc_RNA (1)...(19): siRNA sense strand
ucccaguuaucuugacgaa

SEQ ID NO: 1310660 - RNA, 19 nt, Homo sapiens
  misc_RNA (1)...(19): siRNA sense strand
caugaacuucuauguaugg

SEQ ID NO: 1310661 - RNA, 19 nt, Homo sapiens
  misc_RNA (1)...(19): siRNA sense strand
aagacugguugaaauagca

SEQ ID NO: 1310662 - RNA, 19 nt, Homo sapiens
  misc_RNA (1)...(19): siRNA sense strand
gcauggugguguggcuugu

SEQ ID NO: 1310663 - RNA, 19 nt, Homo sapiens
  misc_RNA (1)...(19): siRNA sense strand
ccucauuugucuacaccau

SEQ ID NO: 1310664 - RNA, 19 nt, Homo sapiens
  misc_RNA (1)...(19): siRNA sense strand
gcacaacuucaaggcaauc

SEQ ID NO: 1310665 - RNA, 19 nt, Homo sapiens
  misc_RNA (1)...(19): siRNA sense strand
ugugaugaaguucuacaaa

SEQ ID NO: 1310666 - RNA, 19 nt, Homo sapiens
  misc_RNA (1)...(19): siRNA sense strand
aaagacugguugaaauagc

SEQ ID NO: 1310667 - RNA, 19 nt, Homo sapiens
  misc_RNA (1)...(19): siRNA sense strand
gcaaacggcuuaugggaua

SEQ ID NO: 1310668 - RNA, 19 nt, Homo sapiens
  misc_RNA (1)...(19): siRNA sense strand
ggaaauaccuggagucaca

SEQ ID NO: 1310669 - RNA, 19 nt, Homo sapiens
  misc_RNA (1)...(19): siRNA sense strand
gcacaaaggucugcugauu

SEQ ID NO: 1310670 - RNA, 19 nt, Homo sapiens
  misc_RNA (1)...(19): siRNA sense strand
gaaggugacuggucugagu

SEQ ID NO: 1310671 - RNA, 19 nt, Homo sapiens
  misc_RNA (1)...(19): siRNA sense strand
cuacuacccuuucugcuuu

SEQ ID NO: 1310672 - RNA, 19 nt, Homo sapiens
  misc_RNA (1)...(19): siRNA sense strand
gagcugugguguacauuga

SEQ ID NO: 1310673 - RNA, 19 nt, Homo sapiens
  misc_RNA (1)...(19): siRNA sense strand
ccaguuaucuugacgaauc

SEQ ID NO: 1310674 - RNA, 19 nt, Homo sapiens
  misc_RNA (1)...(19): siRNA sense strand
acaaaggucugcugauuuc

SEQ ID NO: 1310675 - RNA, 19 nt, Homo sapiens
  misc_RNA (1)...(19): siRNA sense strand
guauuuggcugaggaguuu

SEQ ID NO: 1310676 - RNA, 19 nt, Homo sapiens
  misc_RNA (1)...(19): siRNA sense strand
caacaugggaggauuagaa

SEQ ID NO: 1310677 - RNA, 19 nt, Homo sapiens
  misc_RNA (1)...(19): siRNA sense strand
ugaaagacugguugaaaua

SEQ ID NO: 1310678 - RNA, 19 nt, Homo sapiens
  misc_RNA (1)...(19): siRNA sense strand
ucaaggcaaucucaaagaa

SEQ ID NO: 1310679 - RNA, 19 nt, Homo sapiens
  misc_RNA (1)...(19): siRNA sense strand
ggaagaagaaauuaucuca

SEQ ID NO: 1310680 - RNA, 19 nt, Homo sapiens
  misc_RNA (1)...(19): siRNA sense strand
caaagaugcaaacggcuua

SEQ ID NO: 1310681 - RNA, 19 nt, Homo sapiens
  misc_RNA (1)...(19): siRNA sense strand
gaaguucuacaaaggauug

SEQ ID NO: 1310682 - RNA, 19 nt, Homo sapiens
  misc_RNA (1)...(19): siRNA sense strand
uccaugaacuucuauguau

SEQ ID NO: 1310683 - RNA, 19 nt, Homo sapiens
  misc_RNA (1)...(19): siRNA sense strand
ccagcauucuuaucuacua

SEQ ID NO: 1310684 - RNA, 19 nt, Homo sapiens
  misc_RNA (1)...(19): siRNA sense strand
cauccuccuugaaguauuu

SEQ ID NO: 1310685 - RNA, 19 nt, Homo sapiens
  misc_RNA (1)...(19): siRNA sense strand
guaccuugauucagagaga

SEQ ID NO: 1310686 - RNA, 19 nt, Homo sapiens
  misc_RNA (1)...(19): siRNA sense strand
gcugaaagacugguugaaa

SEQ ID NO: 1310687 - RNA, 19 nt, Homo sapiens
  misc_RNA (1)...(19): siRNA sense strand
ucaccagcauucuuaucua

SEQ ID NO: 1310688 - RNA, 19 nt, Homo sapiens
  misc_RNA (1)...(19): siRNA sense strand
gugaugaaguucuacaaag

SEQ ID NO: 1310689 - RNA, 19 nt, Homo sapiens
  misc_RNA (1)...(19): siRNA sense strand
cugaaagacugguugaaau

SEQ ID NO: 1310690 - RNA, 19 nt, Homo sapiens
  misc_RNA (1)...(19): siRNA sense strand
gaaagacugguugaaauag

SEQ ID NO: 1310691 - RNA, 19 nt, Homo sapiens
  misc_RNA (1)...(19): siRNA sense strand
agaaggagcugugguguac

SEQ ID NO: 1310692 - RNA, 19 nt, Homo sapiens
  misc_RNA (1)...(19): siRNA sense strand
uccaguaccuugauucaga

SEQ ID NO: 1310693 - RNA, 19 nt, Homo sapiens
  misc_RNA (1)...(19): siRNA sense strand
caaagaaagaaacaaguuc

SEQ ID NO: 1310694 - RNA, 19 nt, Homo sapiens
  misc_RNA (1)...(19): siRNA sense strand
ccagauauuuuaacacuga

SEQ ID NO: 1310695 - RNA, 19 nt, Homo sapiens
  misc_RNA (1)...(19): siRNA sense strand
gaguagacaucagauccuu

SEQ ID NO: 1310696 - RNA, 19 nt, Homo sapiens
  misc_RNA (1)...(19): siRNA sense strand
ucagagagaagacagauuc

SEQ ID NO: 1310697 - RNA, 19 nt, Homo sapiens
  misc_RNA (1)...(19): siRNA sense strand
ggauccagcugugugauag

SEQ ID NO: 1310698 - RNA, 19 nt, Homo sapiens
  misc_RNA (1)...(19): siRNA sense strand
ggacgaagcccugcauggu

SEQ ID NO: 1310699 - RNA, 19 nt, Homo sapiens
  misc_RNA (1)...(19): siRNA sense strand
cacaaaggucugcugauuu

SEQ ID NO: 1310700 - RNA, 19 nt, Homo sapiens
  misc_RNA (1)...(19): siRNA sense strand
caaggcaaucucaaagaaa

SEQ ID NO: 1310701 - RNA, 19 nt, Homo sapiens
  misc_RNA (1)...(19): siRNA sense strand
guggaucccucacagagau

SEQ ID NO: 1310702 - RNA, 19 nt, Homo sapiens
  misc_RNA (1)...(19): siRNA sense strand
ugugauagccgcacuagga

SEQ ID NO: 1310703 - RNA, 19 nt, Homo sapiens
  misc_RNA (1)...(19): siRNA sense strand
gaugaaguucuacaaagga

SEQ ID NO: 1310704 - RNA, 19 nt, Homo sapiens
  misc_RNA (1)...(19): siRNA sense strand
ccaccaacaugggaggauu

SEQ ID NO: 1310705 - RNA, 19 nt, Homo sapiens
  misc_RNA (1)...(19): siRNA sense strand
gauagccgcacuaggaaau

SEQ ID NO: 1310706 - RNA, 19 nt, Homo sapiens
  misc_RNA (1)...(19): siRNA sense strand
caacuucaaggcaaucuca

SEQ ID NO: 1310707 - RNA, 19 nt, Homo sapiens
  misc_RNA (1)...(19): siRNA sense strand
caccugugaugaaguucua

SEQ ID NO: 1310708 - RNA, 19 nt, Homo sapiens
  misc_RNA (1)...(19): siRNA sense strand
ccaugaacuucuauguaug

SEQ ID NO: 1310709 - RNA, 19 nt, Homo sapiens
  misc_RNA (1)...(19): siRNA sense strand
cacuggagcuuaugaaggu

SEQ ID NO: 1310710 - RNA, 19 nt, Homo sapiens
  misc_RNA (1)...(19): siRNA sense strand
cgaguggguuuaucacaag

SEQ ID NO: 1310711 - RNA, 19 nt, Homo sapiens
  misc_RNA (1)...(19): siRNA sense strand
guccaugaacuucuaugua

SEQ ID NO: 1310712 - RNA, 19 nt, Homo sapiens
  misc_RNA (1)...(19): siRNA sense strand
ucauuugucuacaccauca

SEQ ID NO: 1310713 - RNA, 19 nt, Homo sapiens
  misc_RNA (1)...(19): siRNA sense strand
ugaugaaguucuacaaagg

SEQ ID NO: 1310714 - RNA, 19 nt, Homo sapiens
  misc_RNA (1)...(19): siRNA sense strand
gauuacaacccaucugagu

SEQ ID NO: 1310715 - RNA, 19 nt, Homo sapiens
  misc_RNA (1)...(19): siRNA sense strand
ggaggaaggccugguucuu

SEQ ID NO: 1310716 - RNA, 19 nt, Homo sapiens
  misc_RNA (1)...(19): siRNA sense strand
ugacuggucugaguuaucg

SEQ ID NO: 1310717 - RNA, 19 nt, Homo sapiens
  misc_RNA (1)...(19): siRNA sense strand
gcauccuccuugaaguauu

SEQ ID NO: 1310718 - RNA, 19 nt, Homo sapiens
  misc_RNA (1)...(19): siRNA sense strand
aaaggaguuugaugcacaa

SEQ ID NO: 1310719 - RNA, 19 nt, Homo sapiens
  misc_RNA (1)...(19): siRNA sense strand
uuucucaccagcauucuua

SEQ ID NO: 1310720 - RNA, 19 nt, Homo sapiens
  misc_RNA (1)...(19): siRNA sense strand
uuaucgagguguccaugaa

SEQ ID NO: 1310721 - RNA, 19 nt, Homo sapiens
  misc_RNA (1)...(19): siRNA sense strand
aaggcaaucucaaagaaag

SEQ ID NO: 1310722 - RNA, 19 nt, Homo sapiens
  misc_RNA (1)...(19): siRNA sense strand
uagaaggagcuguggugua

SEQ ID NO: 1310723 - RNA, 19 nt, Homo sapiens
  misc_RNA (1)...(19): siRNA sense strand
caccaacaugggaggauua

SEQ ID NO: 1310724 - RNA, 19 nt, Homo sapiens
  misc_RNA (1)...(19): siRNA sense strand
ugacaaguaguaaaguuca

SEQ ID NO: 1310725 - RNA, 19 nt, Homo sapiens
  misc_RNA (1)...(19): siRNA sense strand
caaggaggaaggccugguu

SEQ ID NO: 1310726 - RNA, 19 nt, Homo sapiens
  misc_RNA (1)...(19): siRNA sense strand
acgaguggguuuaucacaa

SEQ ID NO: 1310727 - RNA, 19 nt, Homo sapiens
  misc_RNA (1)...(19): siRNA sense strand
caugggaggauuagaagga

SEQ ID NO: 1310728 - RNA, 19 nt, Homo sapiens
  misc_RNA (1)...(19): siRNA sense strand
gucuccagcugaugauuug

SEQ ID NO: 1310729 - RNA, 19 nt, Homo sapiens
  misc_RNA (1)...(19): siRNA sense strand
ggagcugugguguacauug

SEQ ID NO: 1310730 - RNA, 19 nt, Homo sapiens
  misc_RNA (1)...(19): siRNA sense strand
guagacaucagauccuuac

SEQ ID NO: 1310731 - RNA, 19 nt, Homo sapiens
  misc_RNA (1)...(19): siRNA sense strand
caccagcauucuuaucuac

SEQ ID NO: 1310732 - RNA, 19 nt, Homo sapiens
  misc_RNA (1)...(19): siRNA sense strand
gaguggguuuaucacaaga

SEQ ID NO: 1310733 - RNA, 19 nt, Homo sapiens
  misc_RNA (1)...(19): siRNA sense strand
gacaaguaguaaaguucau

SEQ ID NO: 1310734 - RNA, 19 nt, Homo sapiens
  misc_RNA (1)...(19): siRNA sense strand
gcugugguguacauugaca

SEQ ID NO: 1310735 - RNA, 19 nt, Homo sapiens
  misc_RNA (1)...(19): siRNA sense strand
gcaaucucaaagaaagaaa

SEQ ID NO: 1310736 - RNA, 19 nt, Homo sapiens
  misc_RNA (1)...(19): siRNA sense strand
guacauugacacagagucu

SEQ ID NO: 1310737 - RNA, 19 nt, Homo sapiens
  misc_RNA (1)...(19): siRNA sense strand
ggaucccucacagagauua

SEQ ID NO: 1310738 - RNA, 19 nt, Homo sapiens
  misc_RNA (1)...(19): siRNA sense strand
aaggucugcugauuucuca

SEQ ID NO: 1310739 - RNA, 19 nt, Homo sapiens
  misc_RNA (1)...(19): siRNA sense strand
cuacauuacccaccaacau

SEQ ID NO: 1310740 - RNA, 19 nt, Homo sapiens
  misc_RNA (1)...(19): siRNA sense strand
uacauuacccaccaacaug

SEQ ID NO: 1310741 - RNA, 19 nt, Homo sapiens
  misc_RNA (1)...(19): siRNA sense strand
gugauagccgcacuaggaa

SEQ ID NO: 1310742 - RNA, 19 nt, Homo sapiens
  misc_RNA (1)...(19): siRNA sense strand
cagaaaggaguuugaugca

SEQ ID NO: 1310743 - RNA, 19 nt, Homo sapiens
  misc_RNA (1)...(19): siRNA sense strand
ggcaaucucaaagaaagaa

SEQ ID NO: 1310744 - RNA, 19 nt, Homo sapiens
  misc_RNA (1)...(19): siRNA sense strand
aaggagcugugguguacau

SEQ ID NO: 1310745 - RNA, 19 nt, Homo sapiens
  misc_RNA (1)...(19): siRNA sense strand
ggugacuggucugaguuau

SEQ ID NO: 1310746 - RNA, 19 nt, Homo sapiens
  misc_RNA (1)...(19): siRNA sense strand
aggcauccuccuugaagua

SEQ ID NO: 1310747 - RNA, 19 nt, Homo sapiens
  misc_RNA (1)...(19): siRNA sense strand
ggucagaaaggaguuugau

SEQ ID NO: 1310748 - RNA, 19 nt, Homo sapiens
  misc_RNA (1)...(19): siRNA sense strand
ugcauuuagugcugaaaga

SEQ ID NO: 1310749 - RNA, 19 nt, Homo sapiens
  misc_RNA (1)...(19): siRNA sense strand
gagcauuuuggcuacauua

SEQ ID NO: 1310750 - RNA, 19 nt, Homo sapiens
  misc_RNA (1)...(19): siRNA sense strand
ucccaguuaucuugacgaa

SEQ ID NO: 1310751 - RNA, 19 nt, Homo sapiens
  misc_RNA (1)...(19): siRNA sense strand
caugaacuucuauguaugg

SEQ ID NO: 1310752 - RNA, 19 nt, Homo sapiens
  misc_RNA (1)...(19): siRNA sense strand
aagacugguugaaauagca

SEQ ID NO: 1310753 - RNA, 19 nt, Homo sapiens
  misc_RNA (1)...(19): siRNA sense strand
gcauggugguguggcuugu

SEQ ID NO: 1310754 - RNA, 19 nt, Homo sapiens
  misc_RNA (1)...(19): siRNA sense strand
ccucauuugucuacaccau

SEQ ID NO: 1310755 - RNA, 19 nt, Homo sapiens
  misc_RNA (1)...(19): siRNA sense strand
gcacaacuucaaggcaauc

SEQ ID NO: 1310756 - RNA, 19 nt, Homo sapiens
  misc_RNA (1)...(19): siRNA sense strand
ugugaugaaguucuacaaa

SEQ ID NO: 1310757 - RNA, 19 nt, Homo sapiens
  misc_RNA (1)...(19): siRNA sense strand
aaagacugguugaaauagc

SEQ ID NO: 1310758 - RNA, 19 nt, Homo sapiens
  misc_RNA (1)...(19): siRNA sense strand
gcaaacggcuuaugggaua

SEQ ID NO: 1310759 - RNA, 19 nt, Homo sapiens
  misc_RNA (1)...(19): siRNA sense strand
ggaaauaccuggagucaca

SEQ ID NO: 1310760 - RNA, 19 nt, Homo sapiens
  misc_RNA (1)...(19): siRNA sense strand
gcacaaaggucugcugauu

SEQ ID NO: 1310761 - RNA, 19 nt, Homo sapiens
  misc_RNA (1)...(19): siRNA sense strand
gaaggugacuggucugagu

SEQ ID NO: 1310762 - RNA, 19 nt, Homo sapiens
  misc_RNA (1)...(19): siRNA sense strand
cuacuacccuuucugcuuu

SEQ ID NO: 1310763 - RNA, 19 nt, Homo sapiens
  misc_RNA (1)...(19): siRNA sense strand
gagcugugguguacauuga

SEQ ID NO: 1310764 - RNA, 19 nt, Homo sapiens
  misc_RNA (1)...(19): siRNA sense strand
ccaguuaucuugacgaauc

SEQ ID NO: 1310765 - RNA, 19 nt, Homo sapiens
  misc_RNA (1)...(19): siRNA sense strand
acaaaggucugcugauuuc

SEQ ID NO: 1310766 - RNA, 19 nt, Homo sapiens
  misc_RNA (1)...(19): siRNA sense strand
guauuuggcugaggaguuu

SEQ ID NO: 1310767 - RNA, 19 nt, Homo sapiens
  misc_RNA (1)...(19): siRNA sense strand
caacaugggaggauuagaa

SEQ ID NO: 1310768 - RNA, 19 nt, Homo sapiens
  misc_RNA (1)...(19): siRNA sense strand
ugaaagacugguugaaaua

SEQ ID NO: 1310769 - RNA, 19 nt, Homo sapiens
  misc_RNA (1)...(19): siRNA sense strand
ucaaggcaaucucaaagaa

SEQ ID NO: 1310770 - RNA, 19 nt, Homo sapiens
  misc_RNA (1)...(19): siRNA sense strand
ggaagaagaaauuaucuca

SEQ ID NO: 1310771 - RNA, 19 nt, Homo sapiens
  misc_RNA (1)...(19): siRNA sense strand
caaagaugcaaacggcuua

SEQ ID NO: 1310772 - RNA, 19 nt, Homo sapiens
  misc_RNA (1)...(19): siRNA sense strand
gaaguucuacaaaggauug

SEQ ID NO: 1310773 - RNA, 19 nt, Homo sapiens
  misc_RNA (1)...(19): siRNA sense strand
uccaugaacuucuauguau

SEQ ID NO: 1310774 - RNA, 19 nt, Homo sapiens
  misc_RNA (1)...(19): siRNA sense strand
ccagcauucuuaucuacua

SEQ ID NO: 1310775 - RNA, 19 nt, Homo sapiens
  misc_RNA (1)...(19): siRNA sense strand
cauccuccuugaaguauuu

SEQ ID NO: 1310776 - RNA, 19 nt, Homo sapiens
  misc_RNA (1)...(19): siRNA sense strand
guaccuugauucagagaga

SEQ ID NO: 1310777 - RNA, 19 nt, Homo sapiens
  misc_RNA (1)...(19): siRNA sense strand
gcugaaagacugguugaaa

SEQ ID NO: 1310778 - RNA, 19 nt, Homo sapiens
  misc_RNA (1)...(19): siRNA sense strand
ucaccagcauucuuaucua

SEQ ID NO: 1310779 - RNA, 19 nt, Homo sapiens
  misc_RNA (1)...(19): siRNA sense strand
gugaugaaguucuacaaag

SEQ ID NO: 1310780 - RNA, 19 nt, Homo sapiens
  misc_RNA (1)...(19): siRNA sense strand
cugaaagacugguugaaau

SEQ ID NO: 1310781 - RNA, 19 nt, Homo sapiens
  misc_RNA (1)...(19): siRNA sense strand
gaaagacugguugaaauag

SEQ ID NO: 1310782 - RNA, 19 nt, Homo sapiens
  misc_RNA (1)...(19): siRNA sense strand
agaaggagcugugguguac

SEQ ID NO: 1310783 - RNA, 19 nt, Homo sapiens
  misc_RNA (1)...(19): siRNA sense strand
uccaguaccuugauucaga

SEQ ID NO: 1310784 - RNA, 19 nt, Homo sapiens
  misc_RNA (1)...(19): siRNA sense strand
caaagaaagaaacaaguuc

SEQ ID NO: 1310785 - RNA, 19 nt, Homo sapiens
  misc_RNA (1)...(19): siRNA sense strand
ccagauauuuuaacacuga

SEQ ID NO: 1310786 - RNA, 19 nt, Homo sapiens
  misc_RNA (1)...(19): siRNA sense strand
gaguagacaucagauccuu

SEQ ID NO: 1310787 - RNA, 19 nt, Homo sapiens
  misc_RNA (1)...(19): siRNA sense strand
ucagagagaagacagauuc

SEQ ID NO: 1310788 - RNA, 19 nt, Homo sapiens
  misc_RNA (1)...(19): siRNA sense strand
ggauccagcugugugauag

SEQ ID NO: 1310789 - RNA, 19 nt, Homo sapiens
  misc_RNA (1)...(19): siRNA sense strand
ggacgaagcccugcauggu

SEQ ID NO: 1310790 - RNA, 19 nt, Homo sapiens
  misc_RNA (1)...(19): siRNA sense strand
cacaaaggucugcugauuu

SEQ ID NO: 1310791 - RNA, 19 nt, Homo sapiens
  misc_RNA (1)...(19): siRNA sense strand
caaggcaaucucaaagaaa

SEQ ID NO: 1310792 - RNA, 19 nt, Homo sapiens
  misc_RNA (1)...(19): siRNA sense strand
guggaucccucacagagau

SEQ ID NO: 1310793 - RNA, 19 nt, Homo sapiens
  misc_RNA (1)...(19): siRNA sense strand
ugugauagccgcacuagga

SEQ ID NO: 1310794 - RNA, 19 nt, Homo sapiens
  misc_RNA (1)...(19): siRNA sense strand
gaugaaguucuacaaagga

SEQ ID NO: 1310795 - RNA, 19 nt, Homo sapiens
  misc_RNA (1)...(19): siRNA sense strand
ccaccaacaugggaggauu

SEQ ID NO: 1310796 - RNA, 19 nt, Homo sapiens
  misc_RNA (1)...(19): siRNA sense strand
gauagccgcacuaggaaau

SEQ ID NO: 1310797 - RNA, 19 nt, Homo sapiens
  misc_RNA (1)...(19): siRNA sense strand
caacuucaaggcaaucuca

SEQ ID NO: 1310798 - RNA, 19 nt, Homo sapiens
  misc_RNA (1)...(19): siRNA sense strand
caccugugaugaaguucua

SEQ ID NO: 1310799 - RNA, 19 nt, Homo sapiens
  misc_RNA (1)...(19): siRNA sense strand
ccaugaacuucuauguaug

SEQ ID NO: 1310800 - RNA, 19 nt, Homo sapiens
  misc_RNA (1)...(19): siRNA sense strand
cacuggagcuuaugaaggu

SEQ ID NO: 1310801 - RNA, 19 nt, Homo sapiens
  misc_RNA (1)...(19): siRNA sense strand
cgaguggguuuaucacaag

SEQ ID NO: 1310802 - RNA, 19 nt, Homo sapiens
  misc_RNA (1)...(19): siRNA sense strand
guccaugaacuucuaugua

SEQ ID NO: 1310803 - RNA, 19 nt, Homo sapiens
  misc_RNA (1)...(19): siRNA sense strand
ucauuugucuacaccauca

SEQ ID NO: 1310804 - RNA, 19 nt, Homo sapiens
  misc_RNA (1)...(19): siRNA sense strand
ugaugaaguucuacaaagg

SEQ ID NO: 1310805 - RNA, 19 nt, Homo sapiens
  misc_RNA (1)...(19): siRNA sense strand
gauuacaacccaucugagu

SEQ ID NO: 1310806 - RNA, 19 nt, Homo sapiens
  misc_RNA (1)...(19): siRNA sense strand
ggaggaaggccugguucuu

SEQ ID NO: 1310807 - RNA, 19 nt, Homo sapiens
  misc_RNA (1)...(19): siRNA sense strand
ugacuggucugaguuaucg

SEQ ID NO: 1310808 - RNA, 19 nt, Homo sapiens
  misc_RNA (1)...(19): siRNA sense strand
gcauccuccuugaaguauu

SEQ ID NO: 1310809 - RNA, 19 nt, Homo sapiens
  misc_RNA (1)...(19): siRNA sense strand
aaaggaguuugaugcacaa

SEQ ID NO: 1310810 - RNA, 19 nt, Homo sapiens
  misc_RNA (1)...(19): siRNA sense strand
uuucucaccagcauucuua

SEQ ID NO: 1310811 - RNA, 19 nt, Homo sapiens
  misc_RNA (1)...(19): siRNA sense strand
uuaucgagguguccaugaa

SEQ ID NO: 1310812 - RNA, 19 nt, Homo sapiens
  misc_RNA (1)...(19): siRNA sense strand
aaggcaaucucaaagaaag

SEQ ID NO: 1310813 - RNA, 19 nt, Homo sapiens
  misc_RNA (1)...(19): siRNA sense strand
uagaaggagcuguggugua

SEQ ID NO: 1310814 - RNA, 19 nt, Homo sapiens
  misc_RNA (1)...(19): siRNA sense strand
caccaacaugggaggauua

SEQ ID NO: 1310815 - RNA, 19 nt, Homo sapiens
  misc_RNA (1)...(19): siRNA sense strand
ugacaaguaguaaaguuca

SEQ ID NO: 1310816 - RNA, 19 nt, Homo sapiens
  misc_RNA (1)...(19): siRNA sense strand
caaggaggaaggccugguu

SEQ ID NO: 1310817 - RNA, 19 nt, Homo sapiens
  misc_RNA (1)...(19): siRNA sense strand
acgaguggguuuaucacaa

SEQ ID NO: 1310818 - RNA, 19 nt, Homo sapiens
  misc_RNA (1)...(19): siRNA sense strand
caugggaggauuagaagga

SEQ ID NO: 1310819 - RNA, 19 nt, Homo sapiens
  misc_RNA (1)...(19): siRNA sense strand
gucuccagcugaugauuug

SEQ ID NO: 1310820 - RNA, 19 nt, Homo sapiens
  misc_RNA (1)...(19): siRNA sense strand
ggagcugugguguacauug

SEQ ID NO: 1310821 - RNA, 19 nt, Homo sapiens
  misc_RNA (1)...(19): siRNA sense strand
guagacaucagauccuuac

SEQ ID NO: 1310822 - RNA, 19 nt, Homo sapiens
  misc_RNA (1)...(19): siRNA sense strand
caccagcauucuuaucuac

SEQ ID NO: 1310823 - RNA, 19 nt, Homo sapiens
  misc_RNA (1)...(19): siRNA sense strand
gaguggguuuaucacaaga

SEQ ID NO: 1310824 - RNA, 19 nt, Homo sapiens
  misc_RNA (1)...(19): siRNA sense strand
gacaaguaguaaaguucau

SEQ ID NO: 1310825 - RNA, 19 nt, Homo sapiens
  misc_RNA (1)...(19): siRNA sense strand
gcugugguguacauugaca

SEQ ID NO: 1310826 - RNA, 19 nt, Homo sapiens
  misc_RNA (1)...(19): siRNA sense strand
gcaaucucaaagaaagaaa

SEQ ID NO: 1310827 - RNA, 19 nt, Homo sapiens
  misc_RNA (1)...(19): siRNA sense strand
guacauugacacagagucu

SEQ ID NO: 1310828 - RNA, 19 nt, Homo sapiens
  misc_RNA (1)...(19): siRNA sense strand
ggaucccucacagagauua

SEQ ID NO: 1310829 - RNA, 19 nt, Homo sapiens
  misc_RNA (1)...(19): siRNA sense strand
aaggucugcugauuucuca

SEQ ID NO: 1310830 - RNA, 19 nt, Homo sapiens
  misc_RNA (1)...(19): siRNA sense strand
cuacauuacccaccaacau

SEQ ID NO: 1310831 - RNA, 19 nt, Homo sapiens
  misc_RNA (1)...(19): siRNA sense strand
uacauuacccaccaacaug

SEQ ID NO: 1310832 - RNA, 19 nt, Homo sapiens
  misc_RNA (1)...(19): siRNA sense strand
gugauagccgcacuaggaa

SEQ ID NO: 1310833 - RNA, 19 nt, Homo sapiens
  misc_RNA (1)...(19): siRNA sense strand
cagaaaggaguuugaugca

SEQ ID NO: 1310834 - RNA, 19 nt, Homo sapiens
  misc_RNA (1)...(19): siRNA sense strand
ggcaaucucaaagaaagaa

SEQ ID NO: 1310835 - RNA, 19 nt, Homo sapiens
  misc_RNA (1)...(19): siRNA sense strand
aaggagcugugguguacau

SEQ ID NO: 1310836 - RNA, 19 nt, Homo sapiens
  misc_RNA (1)...(19): siRNA sense strand
ggugacuggucugaguuau

SEQ ID NO: 1310837 - RNA, 19 nt, Homo sapiens
  misc_RNA (1)...(19): siRNA sense strand
aggcauccuccuugaagua

SEQ ID NO: 1310838 - RNA, 19 nt, Homo sapiens
  misc_RNA (1)...(19): siRNA sense strand
ggucagaaaggaguuugau

SEQ ID NO: 1310839 - RNA, 19 nt, Homo sapiens
  misc_RNA (1)...(19): siRNA sense strand
ugcauuuagugcugaaaga

SEQ ID NO: 1310840 - RNA, 19 nt, Homo sapiens
  misc_RNA (1)...(19): siRNA sense strand
gagcauuuuggcuacauua

SEQ ID NO: 1310841 - RNA, 19 nt, Homo sapiens
  misc_RNA (1)...(19): siRNA sense strand
ucccaguuaucuugacgaa

SEQ ID NO: 1310842 - RNA, 19 nt, Homo sapiens
  misc_RNA (1)...(19): siRNA sense strand
caugaacuucuauguaugg

SEQ ID NO: 1310843 - RNA, 19 nt, Homo sapiens
  misc_RNA (1)...(19): siRNA sense strand
aagacugguugaaauagca

SEQ ID NO: 1310844 - RNA, 19 nt, Homo sapiens
  misc_RNA (1)...(19): siRNA sense strand
gcauggugguguggcuugu

SEQ ID NO: 1310845 - RNA, 19 nt, Homo sapiens
  misc_RNA (1)...(19): siRNA sense strand
ccucauuugucuacaccau

SEQ ID NO: 1310846 - RNA, 19 nt, Homo sapiens
  misc_RNA (1)...(19): siRNA sense strand
gcacaacuucaaggcaauc

SEQ ID NO: 1310847 - RNA, 19 nt, Homo sapiens
  misc_RNA (1)...(19): siRNA sense strand
ugugaugaaguucuacaaa

SEQ ID NO: 1310848 - RNA, 19 nt, Homo sapiens
  misc_RNA (1)...(19): siRNA sense strand
aaagacugguugaaauagc

SEQ ID NO: 1310849 - RNA, 19 nt, Homo sapiens
  misc_RNA (1)...(19): siRNA sense strand
ccacagagcggaacacuua

SEQ ID NO: 1310850 - RNA, 19 nt, Homo sapiens
  misc_RNA (1)...(19): siRNA sense strand
gcaaagaugggaaagacua

SEQ ID NO: 1310851 - RNA, 19 nt, Homo sapiens
  misc_RNA (1)...(19): siRNA sense strand
gaacuagucaucagcaaga

SEQ ID NO: 1310852 - RNA, 19 nt, Homo sapiens
  misc_RNA (1)...(19): siRNA sense strand
aaaguucccucucauugaa

SEQ ID NO: 1310853 - RNA, 19 nt, Homo sapiens
  misc_RNA (1)...(19): siRNA sense strand
gauccggacucaagcaaga

SEQ ID NO: 1310854 - RNA, 19 nt, Homo sapiens
  misc_RNA (1)...(19): siRNA sense strand
gcaccuaugcuguggauau

SEQ ID NO: 1310855 - RNA, 19 nt, Homo sapiens
  misc_RNA (1)...(19): siRNA sense strand
gcaacaacuacaaggcuua

SEQ ID NO: 1310856 - RNA, 19 nt, Homo sapiens
  misc_RNA (1)...(19): siRNA sense strand
acaaagagaugcugacacu

SEQ ID NO: 1310857 - RNA, 19 nt, Homo sapiens
  misc_RNA (1)...(19): siRNA sense strand
cugcagagccuuucauuga

SEQ ID NO: 1310858 - RNA, 19 nt, Homo sapiens
  misc_RNA (1)...(19): siRNA sense strand
gaucauugguaugcaguau

SEQ ID NO: 1310859 - RNA, 19 nt, Homo sapiens
  misc_RNA (1)...(19): siRNA sense strand
guggacaccugcucugaga

SEQ ID NO: 1310860 - RNA, 19 nt, Homo sapiens
  misc_RNA (1)...(19): siRNA sense strand
gguggaacaggcagaauuu

SEQ ID NO: 1310861 - RNA, 19 nt, Homo sapiens
  misc_RNA (1)...(19): siRNA sense strand
gaaaaguucccucucauug

SEQ ID NO: 1310862 - RNA, 19 nt, Homo sapiens
  misc_RNA (1)...(19): siRNA sense strand
caccugcucugagauguuu

SEQ ID NO: 1310863 - RNA, 19 nt, Homo sapiens
  misc_RNA (1)...(19): siRNA sense strand
gaugggaaagacuacauuu

SEQ ID NO: 1310864 - RNA, 19 nt, Homo sapiens
  misc_RNA (1)...(19): siRNA sense strand
gcuggucgcuaucuauaag

SEQ ID NO: 1310865 - RNA, 19 nt, Homo sapiens
  misc_RNA (1)...(19): siRNA sense strand
gagcggaacacuuaaggau

SEQ ID NO: 1310866 - RNA, 19 nt, Homo sapiens
  misc_RNA (1)...(19): siRNA sense strand
ggacaccugcucugagaug

SEQ ID NO: 1310867 - RNA, 19 nt, Homo sapiens
  misc_RNA (1)...(19): siRNA sense strand
ucauugaacagacauacua

SEQ ID NO: 1310868 - RNA, 19 nt, Homo sapiens
  misc_RNA (1)...(19): siRNA sense strand
gcagagccuuucauugacu

SEQ ID NO: 1310869 - RNA, 19 nt, Homo sapiens
  misc_RNA (1)...(19): siRNA sense strand
gagauuaugauaucaaggu

SEQ ID NO: 1310870 - RNA, 19 nt, Homo sapiens
  misc_RNA (1)...(19): siRNA sense strand
gacaagccauggguguuug

SEQ ID NO: 1310871 - RNA, 19 nt, Homo sapiens
  misc_RNA (1)...(19): siRNA sense strand
ccauauacaacuucuguga

SEQ ID NO: 1310872 - RNA, 19 nt, Homo sapiens
  misc_RNA (1)...(19): siRNA sense strand
cagcuggucgcuaucuaua

SEQ ID NO: 1310873 - RNA, 19 nt, Homo sapiens
  misc_RNA (1)...(19): siRNA sense strand
gacuguagcaugccacuga

SEQ ID NO: 1310874 - RNA, 19 nt, Homo sapiens
  misc_RNA (1)...(19): siRNA sense strand
ggagcagauugccauguca

SEQ ID NO: 1310875 - RNA, 19 nt, Homo sapiens
  misc_RNA (1)...(19): siRNA sense strand
caacuacaaggcuuacaug

SEQ ID NO: 1310876 - RNA, 19 nt, Homo sapiens
  misc_RNA (1)...(19): siRNA sense strand
gaagauuggcaacaacuac

SEQ ID NO: 1310877 - RNA, 19 nt, Homo sapiens
  misc_RNA (1)...(19): siRNA sense strand
ugacaagccauggguguuu

SEQ ID NO: 1310878 - RNA, 19 nt, Homo sapiens
  misc_RNA (1)...(19): siRNA sense strand
ccuuggagauuaugauauc

SEQ ID NO: 1310879 - RNA, 19 nt, Homo sapiens
  misc_RNA (1)...(19): siRNA sense strand
gaggacaggcaacucauca

SEQ ID NO: 1310880 - RNA, 19 nt, Homo sapiens
  misc_RNA (1)...(19): siRNA sense strand
ggacuuccgccaccugauc

SEQ ID NO: 1310881 - RNA, 19 nt, Homo sapiens
  misc_RNA (1)...(19): siRNA sense strand
cagcaucaacucacuggaa

SEQ ID NO: 1310882 - RNA, 19 nt, Homo sapiens
  misc_RNA (1)...(19): siRNA sense strand
caucugugcugucaaagcu

SEQ ID NO: 1310883 - RNA, 19 nt, Homo sapiens
  misc_RNA (1)...(19): siRNA sense strand
auauacaacuucugugaca

SEQ ID NO: 1310884 - RNA, 19 nt, Homo sapiens
  misc_RNA (1)...(19): siRNA sense strand
cgacugggccaagugcuuu

SEQ ID NO: 1310885 - RNA, 19 nt, Homo sapiens
  misc_RNA (1)...(19): siRNA sense strand
gcaacucaucaccgaacua

SEQ ID NO: 1310886 - RNA, 19 nt, Homo sapiens
  misc_RNA (1)...(19): siRNA sense strand
gaauccauauacaacuucu

SEQ ID NO: 1310887 - RNA, 19 nt, Homo sapiens
  misc_RNA (1)...(19): siRNA sense strand
ggaauccauauacaacuuc

SEQ ID NO: 1310888 - RNA, 19 nt, Homo sapiens
  misc_RNA (1)...(19): siRNA sense strand
uuaaggauccggacucaag

SEQ ID NO: 1310889 - RNA, 19 nt, Homo sapiens
  misc_RNA (1)...(19): siRNA sense strand
caacucaucaccgaacuag

SEQ ID NO: 1310890 - RNA, 19 nt, Homo sapiens
  misc_RNA (1)...(19): siRNA sense strand
ccagaagauuggcaacaac

SEQ ID NO: 1310891 - RNA, 19 nt, Homo sapiens
  misc_RNA (1)...(19): siRNA sense strand
ggaaaaccacuacgacuuc

SEQ ID NO: 1310892 - RNA, 19 nt, Homo sapiens
  misc_RNA (1)...(19): siRNA sense strand
gggcaaggucaaaguggaa

SEQ ID NO: 1310893 - RNA, 19 nt, Homo sapiens
  misc_RNA (1)...(19): siRNA sense strand
caccuaugcuguggauaug

SEQ ID NO: 1310894 - RNA, 19 nt, Homo sapiens
  misc_RNA (1)...(19): siRNA sense strand
uccagaagauuggcaacaa

SEQ ID NO: 1310895 - RNA, 19 nt, Homo sapiens
  misc_RNA (1)...(19): siRNA sense strand
guccuuggagauuaugaua

SEQ ID NO: 1310896 - RNA, 19 nt, Homo sapiens
  misc_RNA (1)...(19): siRNA sense strand
uggcaaagaugggaaagac

SEQ ID NO: 1310897 - RNA, 19 nt, Homo sapiens
  misc_RNA (1)...(19): siRNA sense strand
cauuuggcauggcggagaa

SEQ ID NO: 1310898 - RNA, 19 nt, Homo sapiens
  misc_RNA (1)...(19): siRNA sense strand
ucaccgaacuagucaucag

SEQ ID NO: 1310899 - RNA, 19 nt, Homo sapiens
  misc_RNA (1)...(19): siRNA sense strand
ucauugguaugcaguaugc

SEQ ID NO: 1310900 - RNA, 19 nt, Homo sapiens
  misc_RNA (1)...(19): siRNA sense strand
ggaacaggcagaauuuuca

SEQ ID NO: 1310901 - RNA, 19 nt, Homo sapiens
  misc_RNA (1)...(19): siRNA sense strand
ccacaaagagaugcugaca

SEQ ID NO: 1310902 - RNA, 19 nt, Homo sapiens
  misc_RNA (1)...(19): siRNA sense strand
ccuaugcuguggauaugca

SEQ ID NO: 1310903 - RNA, 19 nt, Homo sapiens
  misc_RNA (1)...(19): siRNA sense strand
ggaggacaggcaacucauc

SEQ ID NO: 1310904 - RNA, 19 nt, Homo sapiens
  misc_RNA (1)...(19): siRNA sense strand
uggagcagauugccauguc

SEQ ID NO: 1310905 - RNA, 19 nt, Homo sapiens
  misc_RNA (1)...(19): siRNA sense strand
aaaaguccuuggagauuau

SEQ ID NO: 1310906 - RNA, 19 nt, Homo sapiens
  misc_RNA (1)...(19): siRNA sense strand
ggccagacuucgugcucau

SEQ ID NO: 1310907 - RNA, 19 nt, Homo sapiens
  misc_RNA (1)...(19): siRNA sense strand
gcucucacccagaccuaug

SEQ ID NO: 1310908 - RNA, 19 nt, Homo sapiens
  misc_RNA (1)...(19): siRNA sense strand
uaagacacugggaggagaa

SEQ ID NO: 1310909 - RNA, 19 nt, Homo sapiens
  misc_RNA (1)...(19): siRNA sense strand
uugcccagcuggucgcuau

SEQ ID NO: 1310910 - RNA, 19 nt, Homo sapiens
  misc_RNA (1)...(19): siRNA sense strand
caagguggaacaggcagaa

SEQ ID NO: 1310911 - RNA, 19 nt, Homo sapiens
  misc_RNA (1)...(19): siRNA sense strand
uucauugacuccaaguaug

SEQ ID NO: 1310912 - RNA, 19 nt, Homo sapiens
  misc_RNA (1)...(19): siRNA sense strand
agaagauuggcaacaacua

SEQ ID NO: 1310913 - RNA, 19 nt, Homo sapiens
  misc_RNA (1)...(19): siRNA sense strand
ccacagagcggaacacuua

SEQ ID NO: 1310914 - RNA, 19 nt, Homo sapiens
  misc_RNA (1)...(19): siRNA sense strand
gcaaagaugggaaagacua

SEQ ID NO: 1310915 - RNA, 19 nt, Homo sapiens
  misc_RNA (1)...(19): siRNA sense strand
gaacuagucaucagcaaga

SEQ ID NO: 1310916 - RNA, 19 nt, Homo sapiens
  misc_RNA (1)...(19): siRNA sense strand
aaaguucccucucauugaa

SEQ ID NO: 1310917 - RNA, 19 nt, Homo sapiens
  misc_RNA (1)...(19): siRNA sense strand
gauccggacucaagcaaga

SEQ ID NO: 1310918 - RNA, 19 nt, Homo sapiens
  misc_RNA (1)...(19): siRNA sense strand
gcaccuaugcuguggauau

SEQ ID NO: 1310919 - RNA, 19 nt, Homo sapiens
  misc_RNA (1)...(19): siRNA sense strand
gcaacaacuacaaggcuua

SEQ ID NO: 1310920 - RNA, 19 nt, Homo sapiens
  misc_RNA (1)...(19): siRNA sense strand
acaaagagaugcugacacu

SEQ ID NO: 1310921 - RNA, 19 nt, Homo sapiens
  misc_RNA (1)...(19): siRNA sense strand
cugcagagccuuucauuga

SEQ ID NO: 1310922 - RNA, 19 nt, Homo sapiens
  misc_RNA (1)...(19): siRNA sense strand
gaucauugguaugcaguau

SEQ ID NO: 1310923 - RNA, 19 nt, Homo sapiens
  misc_RNA (1)...(19): siRNA sense strand
guggacaccugcucugaga

SEQ ID NO: 1310924 - RNA, 19 nt, Homo sapiens
  misc_RNA (1)...(19): siRNA sense strand
gguggaacaggcagaauuu

SEQ ID NO: 1310925 - RNA, 19 nt, Homo sapiens
  misc_RNA (1)...(19): siRNA sense strand
gaaaaguucccucucauug

SEQ ID NO: 1310926 - RNA, 19 nt, Homo sapiens
  misc_RNA (1)...(19): siRNA sense strand
caccugcucugagauguuu

SEQ ID NO: 1310927 - RNA, 19 nt, Homo sapiens
  misc_RNA (1)...(19): siRNA sense strand
gaugggaaagacuacauuu

SEQ ID NO: 1310928 - RNA, 19 nt, Homo sapiens
  misc_RNA (1)...(19): siRNA sense strand
gcuggucgcuaucuauaag

SEQ ID NO: 1310929 - RNA, 19 nt, Homo sapiens
  misc_RNA (1)...(19): siRNA sense strand
gagcggaacacuuaaggau

SEQ ID NO: 1310930 - RNA, 19 nt, Homo sapiens
  misc_RNA (1)...(19): siRNA sense strand
ggacaccugcucugagaug

SEQ ID NO: 1310931 - RNA, 19 nt, Homo sapiens
  misc_RNA (1)...(19): siRNA sense strand
ucauugaacagacauacua

SEQ ID NO: 1310932 - RNA, 19 nt, Homo sapiens
  misc_RNA (1)...(19): siRNA sense strand
gcagagccuuucauugacu

SEQ ID NO: 1310933 - RNA, 19 nt, Homo sapiens
  misc_RNA (1)...(19): siRNA sense strand
gagauuaugauaucaaggu

SEQ ID NO: 1310934 - RNA, 19 nt, Homo sapiens
  misc_RNA (1)...(19): siRNA sense strand
gacaagccauggguguuug

SEQ ID NO: 1310935 - RNA, 19 nt, Homo sapiens
  misc_RNA (1)...(19): siRNA sense strand
ccauauacaacuucuguga

SEQ ID NO: 1310936 - RNA, 19 nt, Homo sapiens
  misc_RNA (1)...(19): siRNA sense strand
cagcuggucgcuaucuaua

SEQ ID NO: 1310937 - RNA, 19 nt, Homo sapiens
  misc_RNA (1)...(19): siRNA sense strand
gacuguagcaugccacuga

SEQ ID NO: 1310938 - RNA, 19 nt, Homo sapiens
  misc_RNA (1)...(19): siRNA sense strand
ggagcagauugccauguca

SEQ ID NO: 1310939 - RNA, 19 nt, Homo sapiens
  misc_RNA (1)...(19): siRNA sense strand
caacuacaaggcuuacaug

SEQ ID NO: 1310940 - RNA, 19 nt, Homo sapiens
  misc_RNA (1)...(19): siRNA sense strand
gaagauuggcaacaacuac

SEQ ID NO: 1310941 - RNA, 19 nt, Homo sapiens
  misc_RNA (1)...(19): siRNA sense strand
ugacaagccauggguguuu

SEQ ID NO: 1310942 - RNA, 19 nt, Homo sapiens
  misc_RNA (1)...(19): siRNA sense strand
ccuuggagauuaugauauc

SEQ ID NO: 1310943 - RNA, 19 nt, Homo sapiens
  misc_RNA (1)...(19): siRNA sense strand
gaggacaggcaacucauca

SEQ ID NO: 1310944 - RNA, 19 nt, Homo sapiens
  misc_RNA (1)...(19): siRNA sense strand
ggacuuccgccaccugauc

SEQ ID NO: 1310945 - RNA, 19 nt, Homo sapiens
  misc_RNA (1)...(19): siRNA sense strand
cagcaucaacucacuggaa

SEQ ID NO: 1310946 - RNA, 19 nt, Homo sapiens
  misc_RNA (1)...(19): siRNA sense strand
caucugugcugucaaagcu

SEQ ID NO: 1310947 - RNA, 19 nt, Homo sapiens
  misc_RNA (1)...(19): siRNA sense strand
auauacaacuucugugaca

SEQ ID NO: 1310948 - RNA, 19 nt, Homo sapiens
  misc_RNA (1)...(19): siRNA sense strand
cgacugggccaagugcuuu

SEQ ID NO: 1310949 - RNA, 19 nt, Homo sapiens
  misc_RNA (1)...(19): siRNA sense strand
gcaacucaucaccgaacua

SEQ ID NO: 1310950 - RNA, 19 nt, Homo sapiens
  misc_RNA (1)...(19): siRNA sense strand
gaauccauauacaacuucu

SEQ ID NO: 1310951 - RNA, 19 nt, Homo sapiens
  misc_RNA (1)...(19): siRNA sense strand
ggaauccauauacaacuuc

SEQ ID NO: 1310952 - RNA, 19 nt, Homo sapiens
  misc_RNA (1)...(19): siRNA sense strand
uuaaggauccggacucaag

SEQ ID NO: 1310953 - RNA, 19 nt, Homo sapiens
  misc_RNA (1)...(19): siRNA sense strand
caacucaucaccgaacuag

SEQ ID NO: 1310954 - RNA, 19 nt, Homo sapiens
  misc_RNA (1)...(19): siRNA sense strand
ccagaagauuggcaacaac

SEQ ID NO: 1310955 - RNA, 19 nt, Homo sapiens
  misc_RNA (1)...(19): siRNA sense strand
ggaaaaccacuacgacuuc

SEQ ID NO: 1310956 - RNA, 19 nt, Homo sapiens
  misc_RNA (1)...(19): siRNA sense strand
gggcaaggucaaaguggaa

SEQ ID NO: 1310957 - RNA, 19 nt, Homo sapiens
  misc_RNA (1)...(19): siRNA sense strand
caccuaugcuguggauaug

SEQ ID NO: 1310958 - RNA, 19 nt, Homo sapiens
  misc_RNA (1)...(19): siRNA sense strand
uccagaagauuggcaacaa

SEQ ID NO: 1310959 - RNA, 19 nt, Homo sapiens
  misc_RNA (1)...(19): siRNA sense strand
guccuuggagauuaugaua

SEQ ID NO: 1310960 - RNA, 19 nt, Homo sapiens
  misc_RNA (1)...(19): siRNA sense strand
uggcaaagaugggaaagac

SEQ ID NO: 1310961 - RNA, 19 nt, Homo sapiens
  misc_RNA (1)...(19): siRNA sense strand
cauuuggcauggcggagaa

SEQ ID NO: 1310962 - RNA, 19 nt, Homo sapiens
  misc_RNA (1)...(19): siRNA sense strand
ucaccgaacuagucaucag

SEQ ID NO: 1310963 - RNA, 19 nt, Homo sapiens
  misc_RNA (1)...(19): siRNA sense strand
ucauugguaugcaguaugc

SEQ ID NO: 1310964 - RNA, 19 nt, Homo sapiens
  misc_RNA (1)...(19): siRNA sense strand
ggaacaggcagaauuuuca

SEQ ID NO: 1310965 - RNA, 19 nt, Homo sapiens
  misc_RNA (1)...(19): siRNA sense strand
ccacaaagagaugcugaca

SEQ ID NO: 1310966 - RNA, 19 nt, Homo sapiens
  misc_RNA (1)...(19): siRNA sense strand
ccuaugcuguggauaugca

SEQ ID NO: 1310967 - RNA, 19 nt, Homo sapiens
  misc_RNA (1)...(19): siRNA sense strand
ggaggacaggcaacucauc

SEQ ID NO: 1310968 - RNA, 19 nt, Homo sapiens
  misc_RNA (1)...(19): siRNA sense strand
uggagcagauugccauguc

SEQ ID NO: 1310969 - RNA, 19 nt, Homo sapiens
  misc_RNA (1)...(19): siRNA sense strand
aaaaguccuuggagauuau

SEQ ID NO: 1310970 - RNA, 19 nt, Homo sapiens
  misc_RNA (1)...(19): siRNA sense strand
ggccagacuucgugcucau

SEQ ID NO: 1310971 - RNA, 19 nt, Homo sapiens
  misc_RNA (1)...(19): siRNA sense strand
gcucucacccagaccuaug

SEQ ID NO: 1310972 - RNA, 19 nt, Homo sapiens
  misc_RNA (1)...(19): siRNA sense strand
uaagacacugggaggagaa

SEQ ID NO: 1310973 - RNA, 19 nt, Homo sapiens
  misc_RNA (1)...(19): siRNA sense strand
uugcccagcuggucgcuau

SEQ ID NO: 1310974 - RNA, 19 nt, Homo sapiens
  misc_RNA (1)...(19): siRNA sense strand
caagguggaacaggcagaa

SEQ ID NO: 1310975 - RNA, 19 nt, Homo sapiens
  misc_RNA (1)...(19): siRNA sense strand
uucauugacuccaaguaug

SEQ ID NO: 1310976 - RNA, 19 nt, Homo sapiens
  misc_RNA (1)...(19): siRNA sense strand
agaagauuggcaacaacua

SEQ ID NO: 1310977 - RNA, 19 nt, Homo sapiens
  misc_RNA (1)...(19): siRNA sense strand
gaugaccacuucuccauug

SEQ ID NO: 1310978 - RNA, 19 nt, Homo sapiens
  misc_RNA (1)...(19): siRNA sense strand
gaaauucaguaggagagaa

SEQ ID NO: 1310979 - RNA, 19 nt, Homo sapiens
  misc_RNA (1)...(19): siRNA sense strand
ucagcuaccuggauauuga

SEQ ID NO: 1310980 - RNA, 19 nt, Homo sapiens
  misc_RNA (1)...(19): siRNA sense strand
ggaagacgccuguguacga

SEQ ID NO: 1310981 - RNA, 19 nt, Homo sapiens
  misc_RNA (1)...(19): siRNA sense strand
gcaaagaauucaccaugac

SEQ ID NO: 1310982 - RNA, 19 nt, Homo sapiens
  misc_RNA (1)...(19): siRNA sense strand
gaguggagcguuucauuga

SEQ ID NO: 1310983 - RNA, 19 nt, Homo sapiens
  misc_RNA (1)...(19): siRNA sense strand
gggauucucuacgaaauuc

SEQ ID NO: 1310984 - RNA, 19 nt, Homo sapiens
  misc_RNA (1)...(19): siRNA sense strand
gcaagaaggcagccaagca

SEQ ID NO: 1310985 - RNA, 19 nt, Homo sapiens
  misc_RNA (1)...(19): siRNA sense strand
cgcaaagaauucaccauga

SEQ ID NO: 1310986 - RNA, 19 nt, Homo sapiens
  misc_RNA (1)...(19): siRNA sense strand
cacgucagcuaccuggaua

SEQ ID NO: 1310987 - RNA, 19 nt, Homo sapiens
  misc_RNA (1)...(19): siRNA sense strand
guggagcguuucauugaga

SEQ ID NO: 1310988 - RNA, 19 nt, Homo sapiens
  misc_RNA (1)...(19): siRNA sense strand
ggaguaugggaccagaaua

SEQ ID NO: 1310989 - RNA, 19 nt, Homo sapiens
  misc_RNA (1)...(19): siRNA sense strand
caccugggauucucuacga

SEQ ID NO: 1310990 - RNA, 19 nt, Homo sapiens
  misc_RNA (1)...(19): siRNA sense strand
gaguaugggaccagaauag

SEQ ID NO: 1310991 - RNA, 19 nt, Homo sapiens
  misc_RNA (1)...(19): siRNA sense strand
gccaagcccaccagccuaa

SEQ ID NO: 1310992 - RNA, 19 nt, Homo sapiens
  misc_RNA (1)...(19): siRNA sense strand
cgaguggagcguuucauug

SEQ ID NO: 1310993 - RNA, 19 nt, Homo sapiens
  misc_RNA (1)...(19): siRNA sense strand
uagggaagacgccugugua

SEQ ID NO: 1310994 - RNA, 19 nt, Homo sapiens
  misc_RNA (1)...(19): siRNA sense strand
gaaggcagccaagcacaag

SEQ ID NO: 1310995 - RNA, 19 nt, Homo sapiens
  misc_RNA (1)...(19): siRNA sense strand
ucagccuucugcaggagua

SEQ ID NO: 1310996 - RNA, 19 nt, Homo sapiens
  misc_RNA (1)...(19): siRNA sense strand
gcccugcaguaccucaaga

SEQ ID NO: 1310997 - RNA, 19 nt, Homo sapiens
  misc_RNA (1)...(19): siRNA sense strand
gagcguuucauugagauug

SEQ ID NO: 1310998 - RNA, 19 nt, Homo sapiens
  misc_RNA (1)...(19): siRNA sense strand
caagcccaccagccuaauu

SEQ ID NO: 1310999 - RNA, 19 nt, Homo sapiens
  misc_RNA (1)...(19): siRNA sense strand
ugcaguaccucaagaucau

SEQ ID NO: 1311000 - RNA, 19 nt, Homo sapiens
  misc_RNA (1)...(19): siRNA sense strand
ugucauggcucugcaacca

SEQ ID NO: 1311001 - RNA, 19 nt, Homo sapiens
  misc_RNA (1)...(19): siRNA sense strand
gguggagccugaugaugac

SEQ ID NO: 1311002 - RNA, 19 nt, Homo sapiens
  misc_RNA (1)...(19): siRNA sense strand
uguacgaccuucucaaagc

SEQ ID NO: 1311003 - RNA, 19 nt, Homo sapiens
  misc_RNA (1)...(19): siRNA sense strand
ccugaggacauuccgguuu

SEQ ID NO: 1311004 - RNA, 19 nt, Homo sapiens
  misc_RNA (1)...(19): siRNA sense strand
aagcccaccagccuaauuu

SEQ ID NO: 1311005 - RNA, 19 nt, Homo sapiens
  misc_RNA (1)...(19): siRNA sense strand
gcugccguguccucaguga

SEQ ID NO: 1311006 - RNA, 19 nt, Homo sapiens
  misc_RNA (1)...(19): siRNA sense strand
agguggagccugaugauga

SEQ ID NO: 1311007 - RNA, 19 nt, Homo sapiens
  misc_RNA (1)...(19): siRNA sense strand
uguguacgaccuucucaaa

SEQ ID NO: 1311008 - RNA, 19 nt, Homo sapiens
  misc_RNA (1)...(19): siRNA sense strand
ccugucgaguggagcguuu

SEQ ID NO: 1311009 - RNA, 19 nt, Homo sapiens
  misc_RNA (1)...(19): siRNA sense strand
cugaggagcaggccuuuca

SEQ ID NO: 1311010 - RNA, 19 nt, Homo sapiens
  misc_RNA (1)...(19): siRNA sense strand
cauggcaggcagcaaguga

SEQ ID NO: 1311011 - RNA, 19 nt, Homo sapiens
  misc_RNA (1)...(19): siRNA sense strand
gaugaccacuucuccauug

SEQ ID NO: 1311012 - RNA, 19 nt, Homo sapiens
  misc_RNA (1)...(19): siRNA sense strand
gaaauucaguaggagagaa

SEQ ID NO: 1311013 - RNA, 19 nt, Homo sapiens
  misc_RNA (1)...(19): siRNA sense strand
ucagcuaccuggauauuga

SEQ ID NO: 1311014 - RNA, 19 nt, Homo sapiens
  misc_RNA (1)...(19): siRNA sense strand
ggaagacgccuguguacga

SEQ ID NO: 1311015 - RNA, 19 nt, Homo sapiens
  misc_RNA (1)...(19): siRNA sense strand
gcaaagaauucaccaugac

SEQ ID NO: 1311016 - RNA, 19 nt, Homo sapiens
  misc_RNA (1)...(19): siRNA sense strand
gaguggagcguuucauuga

SEQ ID NO: 1311017 - RNA, 19 nt, Homo sapiens
  misc_RNA (1)...(19): siRNA sense strand
gggauucucuacgaaauuc

SEQ ID NO: 1311018 - RNA, 19 nt, Homo sapiens
  misc_RNA (1)...(19): siRNA sense strand
gcaagaaggcagccaagca

SEQ ID NO: 1311019 - RNA, 19 nt, Homo sapiens
  misc_RNA (1)...(19): siRNA sense strand
cgcaaagaauucaccauga

SEQ ID NO: 1311020 - RNA, 19 nt, Homo sapiens
  misc_RNA (1)...(19): siRNA sense strand
cacgucagcuaccuggaua

SEQ ID NO: 1311021 - RNA, 19 nt, Homo sapiens
  misc_RNA (1)...(19): siRNA sense strand
guggagcguuucauugaga

SEQ ID NO: 1311022 - RNA, 19 nt, Homo sapiens
  misc_RNA (1)...(19): siRNA sense strand
ggaguaugggaccagaaua

SEQ ID NO: 1311023 - RNA, 19 nt, Homo sapiens
  misc_RNA (1)...(19): siRNA sense strand
caccugggauucucuacga

SEQ ID NO: 1311024 - RNA, 19 nt, Homo sapiens
  misc_RNA (1)...(19): siRNA sense strand
gaguaugggaccagaauag

SEQ ID NO: 1311025 - RNA, 19 nt, Homo sapiens
  misc_RNA (1)...(19): siRNA sense strand
gccaagcccaccagccuaa

SEQ ID NO: 1311026 - RNA, 19 nt, Homo sapiens
  misc_RNA (1)...(19): siRNA sense strand
cgaguggagcguuucauug

SEQ ID NO: 1311027 - RNA, 19 nt, Homo sapiens
  misc_RNA (1)...(19): siRNA sense strand
uagggaagacgccugugua

SEQ ID NO: 1311028 - RNA, 19 nt, Homo sapiens
  misc_RNA (1)...(19): siRNA sense strand
gaaggcagccaagcacaag

SEQ ID NO: 1311029 - RNA, 19 nt, Homo sapiens
  misc_RNA (1)...(19): siRNA sense strand
ucagccuucugcaggagua

SEQ ID NO: 1311030 - RNA, 19 nt, Homo sapiens
  misc_RNA (1)...(19): siRNA sense strand
gcccugcaguaccucaaga

SEQ ID NO: 1311031 - RNA, 19 nt, Homo sapiens
  misc_RNA (1)...(19): siRNA sense strand
gagcguuucauugagauug

SEQ ID NO: 1311032 - RNA, 19 nt, Homo sapiens
  misc_RNA (1)...(19): siRNA sense strand
caagcccaccagccuaauu

SEQ ID NO: 1311033 - RNA, 19 nt, Homo sapiens
  misc_RNA (1)...(19): siRNA sense strand
ugcaguaccucaagaucau

SEQ ID NO: 1311034 - RNA, 19 nt, Homo sapiens
  misc_RNA (1)...(19): siRNA sense strand
ugucauggcucugcaacca

SEQ ID NO: 1311035 - RNA, 19 nt, Homo sapiens
  misc_RNA (1)...(19): siRNA sense strand
gguggagccugaugaugac

SEQ ID NO: 1311036 - RNA, 19 nt, Homo sapiens
  misc_RNA (1)...(19): siRNA sense strand
uguacgaccuucucaaagc

SEQ ID NO: 1311037 - RNA, 19 nt, Homo sapiens
  misc_RNA (1)...(19): siRNA sense strand
ccugaggacauuccgguuu

SEQ ID NO: 1311038 - RNA, 19 nt, Homo sapiens
  misc_RNA (1)...(19): siRNA sense strand
aagcccaccagccuaauuu

SEQ ID NO: 1311039 - RNA, 19 nt, Homo sapiens
  misc_RNA (1)...(19): siRNA sense strand
gcugccguguccucaguga

SEQ ID NO: 1311040 - RNA, 19 nt, Homo sapiens
  misc_RNA (1)...(19): siRNA sense strand
agguggagccugaugauga

SEQ ID NO: 1311041 - RNA, 19 nt, Homo sapiens
  misc_RNA (1)...(19): siRNA sense strand
uguguacgaccuucucaaa

SEQ ID NO: 1311042 - RNA, 19 nt, Homo sapiens
  misc_RNA (1)...(19): siRNA sense strand
ccugucgaguggagcguuu

SEQ ID NO: 1311043 - RNA, 19 nt, Homo sapiens
  misc_RNA (1)...(19): siRNA sense strand
cugaggagcaggccuuuca

SEQ ID NO: 1311044 - RNA, 19 nt, Homo sapiens
  misc_RNA (1)...(19): siRNA sense strand
cauggcaggcagcaaguga

SEQ ID NO: 1311045 - RNA, 19 nt, Homo sapiens
  misc_RNA (1)...(19): siRNA sense strand
ggaagacgccuguguacga

SEQ ID NO: 1311046 - RNA, 19 nt, Homo sapiens
  misc_RNA (1)...(19): siRNA sense strand
gcaagaaggcagccaagca

SEQ ID NO: 1311047 - RNA, 19 nt, Homo sapiens
  misc_RNA (1)...(19): siRNA sense strand
ggaguaugggaccagaaua

SEQ ID NO: 1311048 - RNA, 19 nt, Homo sapiens
  misc_RNA (1)...(19): siRNA sense strand
gaguaugggaccagaauag

SEQ ID NO: 1311049 - RNA, 19 nt, Homo sapiens
  misc_RNA (1)...(19): siRNA sense strand
gccaagcccaccagccuaa

SEQ ID NO: 1311050 - RNA, 19 nt, Homo sapiens
  misc_RNA (1)...(19): siRNA sense strand
uagggaagacgccugugua

SEQ ID NO: 1311051 - RNA, 19 nt, Homo sapiens
  misc_RNA (1)...(19): siRNA sense strand
gaaggcagccaagcacaag

SEQ ID NO: 1311052 - RNA, 19 nt, Homo sapiens
  misc_RNA (1)...(19): siRNA sense strand
ucagccuucugcaggagua

SEQ ID NO: 1311053 - RNA, 19 nt, Homo sapiens
  misc_RNA (1)...(19): siRNA sense strand
caagcccaccagccuaauu

SEQ ID NO: 1311054 - RNA, 19 nt, Homo sapiens
  misc_RNA (1)...(19): siRNA sense strand
uguacgaccuucucaaagc

SEQ ID NO: 1311055 - RNA, 19 nt, Homo sapiens
  misc_RNA (1)...(19): siRNA sense strand
aagcccaccagccuaauuu

SEQ ID NO: 1311056 - RNA, 19 nt, Homo sapiens
  misc_RNA (1)...(19): siRNA sense strand
uguguacgaccuucucaaa

SEQ ID NO: 1311057 - RNA, 19 nt, Homo sapiens
  misc_RNA (1)...(19): siRNA sense strand
gcaaacggcuuaugggaua

SEQ ID NO: 1311058 - RNA, 19 nt, Homo sapiens
  misc_RNA (1)...(19): siRNA sense strand
ggaaauaccuggagucaca

SEQ ID NO: 1311059 - RNA, 19 nt, Homo sapiens
  misc_RNA (1)...(19): siRNA sense strand
gcacaaaggucugcugauu

SEQ ID NO: 1311060 - RNA, 19 nt, Homo sapiens
  misc_RNA (1)...(19): siRNA sense strand
gaaggugacuggucugagu

SEQ ID NO: 1311061 - RNA, 19 nt, Homo sapiens
  misc_RNA (1)...(19): siRNA sense strand
cuacuacccuuucugcuuu

SEQ ID NO: 1311062 - RNA, 19 nt, Homo sapiens
  misc_RNA (1)...(19): siRNA sense strand
gagcugugguguacauuga

SEQ ID NO: 1311063 - RNA, 19 nt, Homo sapiens
  misc_RNA (1)...(19): siRNA sense strand
ccaguuaucuugacgaauc

SEQ ID NO: 1311064 - RNA, 19 nt, Homo sapiens
  misc_RNA (1)...(19): siRNA sense strand
acaaaggucugcugauuuc

SEQ ID NO: 1311065 - RNA, 19 nt, Homo sapiens
  misc_RNA (1)...(19): siRNA sense strand
guauuuggcugaggaguuu

SEQ ID NO: 1311066 - RNA, 19 nt, Homo sapiens
  misc_RNA (1)...(19): siRNA sense strand
caacaugggaggauuagaa

SEQ ID NO: 1311067 - RNA, 19 nt, Homo sapiens
  misc_RNA (1)...(19): siRNA sense strand
ugaaagacugguugaaaua

SEQ ID NO: 1311068 - RNA, 19 nt, Homo sapiens
  misc_RNA (1)...(19): siRNA sense strand
ucaaggcaaucucaaagaa

SEQ ID NO: 1311069 - RNA, 19 nt, Homo sapiens
  misc_RNA (1)...(19): siRNA sense strand
ggaagaagaaauuaucuca

SEQ ID NO: 1311070 - RNA, 19 nt, Homo sapiens
  misc_RNA (1)...(19): siRNA sense strand
caaagaugcaaacggcuua

SEQ ID NO: 1311071 - RNA, 19 nt, Homo sapiens
  misc_RNA (1)...(19): siRNA sense strand
gaaguucuacaaaggauug

SEQ ID NO: 1311072 - RNA, 19 nt, Homo sapiens
  misc_RNA (1)...(19): siRNA sense strand
uccaugaacuucuauguau

SEQ ID NO: 1311073 - RNA, 19 nt, Homo sapiens
  misc_RNA (1)...(19): siRNA sense strand
ccagcauucuuaucuacua

SEQ ID NO: 1311074 - RNA, 19 nt, Homo sapiens
  misc_RNA (1)...(19): siRNA sense strand
cauccuccuugaaguauuu

SEQ ID NO: 1311075 - RNA, 19 nt, Homo sapiens
  misc_RNA (1)...(19): siRNA sense strand
guaccuugauucagagaga

SEQ ID NO: 1311076 - RNA, 19 nt, Homo sapiens
  misc_RNA (1)...(19): siRNA sense strand
gcugaaagacugguugaaa

SEQ ID NO: 1311077 - RNA, 19 nt, Homo sapiens
  misc_RNA (1)...(19): siRNA sense strand
ucaccagcauucuuaucua

SEQ ID NO: 1311078 - RNA, 19 nt, Homo sapiens
  misc_RNA (1)...(19): siRNA sense strand
gugaugaaguucuacaaag

SEQ ID NO: 1311079 - RNA, 19 nt, Homo sapiens
  misc_RNA (1)...(19): siRNA sense strand
cugaaagacugguugaaau

SEQ ID NO: 1311080 - RNA, 19 nt, Homo sapiens
  misc_RNA (1)...(19): siRNA sense strand
gaaagacugguugaaauag

SEQ ID NO: 1311081 - RNA, 19 nt, Homo sapiens
  misc_RNA (1)...(19): siRNA sense strand
agaaggagcugugguguac

SEQ ID NO: 1311082 - RNA, 19 nt, Homo sapiens
  misc_RNA (1)...(19): siRNA sense strand
uccaguaccuugauucaga

SEQ ID NO: 1311083 - RNA, 19 nt, Homo sapiens
  misc_RNA (1)...(19): siRNA sense strand
caaagaaagaaacaaguuc

SEQ ID NO: 1311084 - RNA, 19 nt, Homo sapiens
  misc_RNA (1)...(19): siRNA sense strand
ccagauauuuuaacacuga

SEQ ID NO: 1311085 - RNA, 19 nt, Homo sapiens
  misc_RNA (1)...(19): siRNA sense strand
gaguagacaucagauccuu

SEQ ID NO: 1311086 - RNA, 19 nt, Homo sapiens
  misc_RNA (1)...(19): siRNA sense strand
ucagagagaagacagauuc

SEQ ID NO: 1311087 - RNA, 19 nt, Homo sapiens
  misc_RNA (1)...(19): siRNA sense strand
ggauccagcugugugauag

SEQ ID NO: 1311088 - RNA, 19 nt, Homo sapiens
  misc_RNA (1)...(19): siRNA sense strand
ggacgaagcccugcauggu

SEQ ID NO: 1311089 - RNA, 19 nt, Homo sapiens
  misc_RNA (1)...(19): siRNA sense strand
cacaaaggucugcugauuu

SEQ ID NO: 1311090 - RNA, 19 nt, Homo sapiens
  misc_RNA (1)...(19): siRNA sense strand
caaggcaaucucaaagaaa

SEQ ID NO: 1311091 - RNA, 19 nt, Homo sapiens
  misc_RNA (1)...(19): siRNA sense strand
guggaucccucacagagau

SEQ ID NO: 1311092 - RNA, 19 nt, Homo sapiens
  misc_RNA (1)...(19): siRNA sense strand
ugugauagccgcacuagga

SEQ ID NO: 1311093 - RNA, 19 nt, Homo sapiens
  misc_RNA (1)...(19): siRNA sense strand
gaugaaguucuacaaagga

SEQ ID NO: 1311094 - RNA, 19 nt, Homo sapiens
  misc_RNA (1)...(19): siRNA sense strand
ccaccaacaugggaggauu

SEQ ID NO: 1311095 - RNA, 19 nt, Homo sapiens
  misc_RNA (1)...(19): siRNA sense strand
gauagccgcacuaggaaau

SEQ ID NO: 1311096 - RNA, 19 nt, Homo sapiens
  misc_RNA (1)...(19): siRNA sense strand
caacuucaaggcaaucuca

SEQ ID NO: 1311097 - RNA, 19 nt, Homo sapiens
  misc_RNA (1)...(19): siRNA sense strand
caccugugaugaaguucua

SEQ ID NO: 1311098 - RNA, 19 nt, Homo sapiens
  misc_RNA (1)...(19): siRNA sense strand
ccaugaacuucuauguaug

SEQ ID NO: 1311099 - RNA, 19 nt, Homo sapiens
  misc_RNA (1)...(19): siRNA sense strand
cacuggagcuuaugaaggu

SEQ ID NO: 1311100 - RNA, 19 nt, Homo sapiens
  misc_RNA (1)...(19): siRNA sense strand
cgaguggguuuaucacaag

SEQ ID NO: 1311101 - RNA, 19 nt, Homo sapiens
  misc_RNA (1)...(19): siRNA sense strand
guccaugaacuucuaugua

SEQ ID NO: 1311102 - RNA, 19 nt, Homo sapiens
  misc_RNA (1)...(19): siRNA sense strand
ucauuugucuacaccauca

SEQ ID NO: 1311103 - RNA, 19 nt, Homo sapiens
  misc_RNA (1)...(19): siRNA sense strand
ugaugaaguucuacaaagg

SEQ ID NO: 1311104 - RNA, 19 nt, Homo sapiens
  misc_RNA (1)...(19): siRNA sense strand
gauuacaacccaucugagu

SEQ ID NO: 1311105 - RNA, 19 nt, Homo sapiens
  misc_RNA (1)...(19): siRNA sense strand
ggaggaaggccugguucuu

SEQ ID NO: 1311106 - RNA, 19 nt, Homo sapiens
  misc_RNA (1)...(19): siRNA sense strand
ugacuggucugaguuaucg

SEQ ID NO: 1311107 - RNA, 19 nt, Homo sapiens
  misc_RNA (1)...(19): siRNA sense strand
gcauccuccuugaaguauu

SEQ ID NO: 1311108 - RNA, 19 nt, Homo sapiens
  misc_RNA (1)...(19): siRNA sense strand
aaaggaguuugaugcacaa

SEQ ID NO: 1311109 - RNA, 19 nt, Homo sapiens
  misc_RNA (1)...(19): siRNA sense strand
uuucucaccagcauucuua

SEQ ID NO: 1311110 - RNA, 19 nt, Homo sapiens
  misc_RNA (1)...(19): siRNA sense strand
uuaucgagguguccaugaa

SEQ ID NO: 1311111 - RNA, 19 nt, Homo sapiens
  misc_RNA (1)...(19): siRNA sense strand
aaggcaaucucaaagaaag

SEQ ID NO: 1311112 - RNA, 19 nt, Homo sapiens
  misc_RNA (1)...(19): siRNA sense strand
uagaaggagcuguggugua

SEQ ID NO: 1311113 - RNA, 19 nt, Homo sapiens
  misc_RNA (1)...(19): siRNA sense strand
caccaacaugggaggauua

SEQ ID NO: 1311114 - RNA, 19 nt, Homo sapiens
  misc_RNA (1)...(19): siRNA sense strand
ugacaaguaguaaaguuca

SEQ ID NO: 1311115 - RNA, 19 nt, Homo sapiens
  misc_RNA (1)...(19): siRNA sense strand
caaggaggaaggccugguu

SEQ ID NO: 1311116 - RNA, 19 nt, Homo sapiens
  misc_RNA (1)...(19): siRNA sense strand
acgaguggguuuaucacaa

SEQ ID NO: 1311117 - RNA, 19 nt, Homo sapiens
  misc_RNA (1)...(19): siRNA sense strand
caugggaggauuagaagga

SEQ ID NO: 1311118 - RNA, 19 nt, Homo sapiens
  misc_RNA (1)...(19): siRNA sense strand
gucuccagcugaugauuug

SEQ ID NO: 1311119 - RNA, 19 nt, Homo sapiens
  misc_RNA (1)...(19): siRNA sense strand
ggagcugugguguacauug

SEQ ID NO: 1311120 - RNA, 19 nt, Homo sapiens
  misc_RNA (1)...(19): siRNA sense strand
guagacaucagauccuuac

SEQ ID NO: 1311121 - RNA, 19 nt, Homo sapiens
  misc_RNA (1)...(19): siRNA sense strand
caccagcauucuuaucuac

SEQ ID NO: 1311122 - RNA, 19 nt, Homo sapiens
  misc_RNA (1)...(19): siRNA sense strand
gaguggguuuaucacaaga

SEQ ID NO: 1311123 - RNA, 19 nt, Homo sapiens
  misc_RNA (1)...(19): siRNA sense strand
gacaaguaguaaaguucau

SEQ ID NO: 1311124 - RNA, 19 nt, Homo sapiens
  misc_RNA (1)...(19): siRNA sense strand
gcugugguguacauugaca

SEQ ID NO: 1311125 - RNA, 19 nt, Homo sapiens
  misc_RNA (1)...(19): siRNA sense strand
gcaaucucaaagaaagaaa

SEQ ID NO: 1311126 - RNA, 19 nt, Homo sapiens
  misc_RNA (1)...(19): siRNA sense strand
guacauugacacagagucu

SEQ ID NO: 1311127 - RNA, 19 nt, Homo sapiens
  misc_RNA (1)...(19): siRNA sense strand
ggaucccucacagagauua

SEQ ID NO: 1311128 - RNA, 19 nt, Homo sapiens
  misc_RNA (1)...(19): siRNA sense strand
aaggucugcugauuucuca

SEQ ID NO: 1311129 - RNA, 19 nt, Homo sapiens
  misc_RNA (1)...(19): siRNA sense strand
cuacauuacccaccaacau

SEQ ID NO: 1311130 - RNA, 19 nt, Homo sapiens
  misc_RNA (1)...(19): siRNA sense strand
uacauuacccaccaacaug

SEQ ID NO: 1311131 - RNA, 19 nt, Homo sapiens
  misc_RNA (1)...(19): siRNA sense strand
gugauagccgcacuaggaa

SEQ ID NO: 1311132 - RNA, 19 nt, Homo sapiens
  misc_RNA (1)...(19): siRNA sense strand
cagaaaggaguuugaugca

SEQ ID NO: 1311133 - RNA, 19 nt, Homo sapiens
  misc_RNA (1)...(19): siRNA sense strand
ggcaaucucaaagaaagaa

SEQ ID NO: 1311134 - RNA, 19 nt, Homo sapiens
  misc_RNA (1)...(19): siRNA sense strand
aaggagcugugguguacau

SEQ ID NO: 1311135 - RNA, 19 nt, Homo sapiens
  misc_RNA (1)...(19): siRNA sense strand
ggugacuggucugaguuau

SEQ ID NO: 1311136 - RNA, 19 nt, Homo sapiens
  misc_RNA (1)...(19): siRNA sense strand
aggcauccuccuugaagua

SEQ ID NO: 1311137 - RNA, 19 nt, Homo sapiens
  misc_RNA (1)...(19): siRNA sense strand
ggucagaaaggaguuugau

SEQ ID NO: 1311138 - RNA, 19 nt, Homo sapiens
  misc_RNA (1)...(19): siRNA sense strand
ugcauuuagugcugaaaga

SEQ ID NO: 1311139 - RNA, 19 nt, Homo sapiens
  misc_RNA (1)...(19): siRNA sense strand
gagcauuuuggcuacauua

SEQ ID NO: 1311140 - RNA, 19 nt, Homo sapiens
  misc_RNA (1)...(19): siRNA sense strand
ucccaguuaucuugacgaa

SEQ ID NO: 1311141 - RNA, 19 nt, Homo sapiens
  misc_RNA (1)...(19): siRNA sense strand
caugaacuucuauguaugg

SEQ ID NO: 1311142 - RNA, 19 nt, Homo sapiens
  misc_RNA (1)...(19): siRNA sense strand
aagacugguugaaauagca

SEQ ID NO: 1311143 - RNA, 19 nt, Homo sapiens
  misc_RNA (1)...(19): siRNA sense strand
gcauggugguguggcuugu

SEQ ID NO: 1311144 - RNA, 19 nt, Homo sapiens
  misc_RNA (1)...(19): siRNA sense strand
ccucauuugucuacaccau

SEQ ID NO: 1311145 - RNA, 19 nt, Homo sapiens
  misc_RNA (1)...(19): siRNA sense strand
gcacaacuucaaggcaauc

SEQ ID NO: 1311146 - RNA, 19 nt, Homo sapiens
  misc_RNA (1)...(19): siRNA sense strand
ugugaugaaguucuacaaa

SEQ ID NO: 1311147 - RNA, 19 nt, Homo sapiens
  misc_RNA (1)...(19): siRNA sense strand
aaagacugguugaaauagc

SEQ ID NO: 1311148 - RNA, 19 nt, Homo sapiens
  misc_RNA (1)...(19): siRNA sense strand
gcaaacggcuuaugggaua

SEQ ID NO: 1311149 - RNA, 19 nt, Homo sapiens
  misc_RNA (1)...(19): siRNA sense strand
ggaaauaccuggagucaca

SEQ ID NO: 1311150 - RNA, 19 nt, Homo sapiens
  misc_RNA (1)...(19): siRNA sense strand
gcacaaaggucugcugauu

SEQ ID NO: 1311151 - RNA, 19 nt, Homo sapiens
  misc_RNA (1)...(19): siRNA sense strand
gaaggugacuggucugagu

SEQ ID NO: 1311152 - RNA, 19 nt, Homo sapiens
  misc_RNA (1)...(19): siRNA sense strand
cuacuacccuuucugcuuu

SEQ ID NO: 1311153 - RNA, 19 nt, Homo sapiens
  misc_RNA (1)...(19): siRNA sense strand
gagcugugguguacauuga

SEQ ID NO: 1311154 - RNA, 19 nt, Homo sapiens
  misc_RNA (1)...(19): siRNA sense strand
ccaguuaucuugacgaauc

SEQ ID NO: 1311155 - RNA, 19 nt, Homo sapiens
  misc_RNA (1)...(19): siRNA sense strand
acaaaggucugcugauuuc

SEQ ID NO: 1311156 - RNA, 19 nt, Homo sapiens
  misc_RNA (1)...(19): siRNA sense strand
guauuuggcugaggaguuu

SEQ ID NO: 1311157 - RNA, 19 nt, Homo sapiens
  misc_RNA (1)...(19): siRNA sense strand
caacaugggaggauuagaa

SEQ ID NO: 1311158 - RNA, 19 nt, Homo sapiens
  misc_RNA (1)...(19): siRNA sense strand
ugaaagacugguugaaaua

SEQ ID NO: 1311159 - RNA, 19 nt, Homo sapiens
  misc_RNA (1)...(19): siRNA sense strand
ucaaggcaaucucaaagaa

SEQ ID NO: 1311160 - RNA, 19 nt, Homo sapiens
  misc_RNA (1)...(19): siRNA sense strand
ggaagaagaaauuaucuca

SEQ ID NO: 1311161 - RNA, 19 nt, Homo sapiens
  misc_RNA (1)...(19): siRNA sense strand
caaagaugcaaacggcuua

SEQ ID NO: 1311162 - RNA, 19 nt, Homo sapiens
  misc_RNA (1)...(19): siRNA sense strand
gaaguucuacaaaggauug

SEQ ID NO: 1311163 - RNA, 19 nt, Homo sapiens
  misc_RNA (1)...(19): siRNA sense strand
uccaugaacuucuauguau

SEQ ID NO: 1311164 - RNA, 19 nt, Homo sapiens
  misc_RNA (1)...(19): siRNA sense strand
ccagcauucuuaucuacua

SEQ ID NO: 1311165 - RNA, 19 nt, Homo sapiens
  misc_RNA (1)...(19): siRNA sense strand
cauccuccuugaaguauuu

SEQ ID NO: 1311166 - RNA, 19 nt, Homo sapiens
  misc_RNA (1)...(19): siRNA sense strand
guaccuugauucagagaga

SEQ ID NO: 1311167 - RNA, 19 nt, Homo sapiens
  misc_RNA (1)...(19): siRNA sense strand
gcugaaagacugguugaaa

SEQ ID NO: 1311168 - RNA, 19 nt, Homo sapiens
  misc_RNA (1)...(19): siRNA sense strand
ucaccagcauucuuaucua

SEQ ID NO: 1311169 - RNA, 19 nt, Homo sapiens
  misc_RNA (1)...(19): siRNA sense strand
gugaugaaguucuacaaag

SEQ ID NO: 1311170 - RNA, 19 nt, Homo sapiens
  misc_RNA (1)...(19): siRNA sense strand
cugaaagacugguugaaau

SEQ ID NO: 1311171 - RNA, 19 nt, Homo sapiens
  misc_RNA (1)...(19): siRNA sense strand
gaaagacugguugaaauag

SEQ ID NO: 1311172 - RNA, 19 nt, Homo sapiens
  misc_RNA (1)...(19): siRNA sense strand
agaaggagcugugguguac

SEQ ID NO: 1311173 - RNA, 19 nt, Homo sapiens
  misc_RNA (1)...(19): siRNA sense strand
uccaguaccuugauucaga

SEQ ID NO: 1311174 - RNA, 19 nt, Homo sapiens
  misc_RNA (1)...(19): siRNA sense strand
caaagaaagaaacaaguuc

SEQ ID NO: 1311175 - RNA, 19 nt, Homo sapiens
  misc_RNA (1)...(19): siRNA sense strand
ccagauauuuuaacacuga

SEQ ID NO: 1311176 - RNA, 19 nt, Homo sapiens
  misc_RNA (1)...(19): siRNA sense strand
gaguagacaucagauccuu

SEQ ID NO: 1311177 - RNA, 19 nt, Homo sapiens
  misc_RNA (1)...(19): siRNA sense strand
ucagagagaagacagauuc

SEQ ID NO: 1311178 - RNA, 19 nt, Homo sapiens
  misc_RNA (1)...(19): siRNA sense strand
ggauccagcugugugauag

SEQ ID NO: 1311179 - RNA, 19 nt, Homo sapiens
  misc_RNA (1)...(19): siRNA sense strand
ggacgaagcccugcauggu

SEQ ID NO: 1311180 - RNA, 19 nt, Homo sapiens
  misc_RNA (1)...(19): siRNA sense strand
cacaaaggucugcugauuu

SEQ ID NO: 1311181 - RNA, 19 nt, Homo sapiens
  misc_RNA (1)...(19): siRNA sense strand
caaggcaaucucaaagaaa

SEQ ID NO: 1311182 - RNA, 19 nt, Homo sapiens
  misc_RNA (1)...(19): siRNA sense strand
guggaucccucacagagau

SEQ ID NO: 1311183 - RNA, 19 nt, Homo sapiens
  misc_RNA (1)...(19): siRNA sense strand
ugugauagccgcacuagga

SEQ ID NO: 1311184 - RNA, 19 nt, Homo sapiens
  misc_RNA (1)...(19): siRNA sense strand
gaugaaguucuacaaagga

SEQ ID NO: 1311185 - RNA, 19 nt, Homo sapiens
  misc_RNA (1)...(19): siRNA sense strand
ccaccaacaugggaggauu

SEQ ID NO: 1311186 - RNA, 19 nt, Homo sapiens
  misc_RNA (1)...(19): siRNA sense strand
gauagccgcacuaggaaau

SEQ ID NO: 1311187 - RNA, 19 nt, Homo sapiens
  misc_RNA (1)...(19): siRNA sense strand
caacuucaaggcaaucuca

SEQ ID NO: 1311188 - RNA, 19 nt, Homo sapiens
  misc_RNA (1)...(19): siRNA sense strand
caccugugaugaaguucua

SEQ ID NO: 1311189 - RNA, 19 nt, Homo sapiens
  misc_RNA (1)...(19): siRNA sense strand
ccaugaacuucuauguaug

SEQ ID NO: 1311190 - RNA, 19 nt, Homo sapiens
  misc_RNA (1)...(19): siRNA sense strand
cacuggagcuuaugaaggu

SEQ ID NO: 1311191 - RNA, 19 nt, Homo sapiens
  misc_RNA (1)...(19): siRNA sense strand
cgaguggguuuaucacaag

SEQ ID NO: 1311192 - RNA, 19 nt, Homo sapiens
  misc_RNA (1)...(19): siRNA sense strand
guccaugaacuucuaugua

SEQ ID NO: 1311193 - RNA, 19 nt, Homo sapiens
  misc_RNA (1)...(19): siRNA sense strand
ucauuugucuacaccauca

SEQ ID NO: 1311194 - RNA, 19 nt, Homo sapiens
  misc_RNA (1)...(19): siRNA sense strand
ugaugaaguucuacaaagg

SEQ ID NO: 1311195 - RNA, 19 nt, Homo sapiens
  misc_RNA (1)...(19): siRNA sense strand
gauuacaacccaucugagu

SEQ ID NO: 1311196 - RNA, 19 nt, Homo sapiens
  misc_RNA (1)...(19): siRNA sense strand
ggaggaaggccugguucuu

SEQ ID NO: 1311197 - RNA, 19 nt, Homo sapiens
  misc_RNA (1)...(19): siRNA sense strand
ugacuggucugaguuaucg

SEQ ID NO: 1311198 - RNA, 19 nt, Homo sapiens
  misc_RNA (1)...(19): siRNA sense strand
gcauccuccuugaaguauu

SEQ ID NO: 1311199 - RNA, 19 nt, Homo sapiens
  misc_RNA (1)...(19): siRNA sense strand
aaaggaguuugaugcacaa

SEQ ID NO: 1311200 - RNA, 19 nt, Homo sapiens
  misc_RNA (1)...(19): siRNA sense strand
uuucucaccagcauucuua

SEQ ID NO: 1311201 - RNA, 19 nt, Homo sapiens
  misc_RNA (1)...(19): siRNA sense strand
uuaucgagguguccaugaa

SEQ ID NO: 1311202 - RNA, 19 nt, Homo sapiens
  misc_RNA (1)...(19): siRNA sense strand
aaggcaaucucaaagaaag

SEQ ID NO: 1311203 - RNA, 19 nt, Homo sapiens
  misc_RNA (1)...(19): siRNA sense strand
uagaaggagcuguggugua

SEQ ID NO: 1311204 - RNA, 19 nt, Homo sapiens
  misc_RNA (1)...(19): siRNA sense strand
caccaacaugggaggauua

SEQ ID NO: 1311205 - RNA, 19 nt, Homo sapiens
  misc_RNA (1)...(19): siRNA sense strand
ugacaaguaguaaaguuca

SEQ ID NO: 1311206 - RNA, 19 nt, Homo sapiens
  misc_RNA (1)...(19): siRNA sense strand
caaggaggaaggccugguu

SEQ ID NO: 1311207 - RNA, 19 nt, Homo sapiens
  misc_RNA (1)...(19): siRNA sense strand
acgaguggguuuaucacaa

SEQ ID NO: 1311208 - RNA, 19 nt, Homo sapiens
  misc_RNA (1)...(19): siRNA sense strand
caugggaggauuagaagga

SEQ ID NO: 1311209 - RNA, 19 nt, Homo sapiens
  misc_RNA (1)...(19): siRNA sense strand
gucuccagcugaugauuug

SEQ ID NO: 1311210 - RNA, 19 nt, Homo sapiens
  misc_RNA (1)...(19): siRNA sense strand
ggagcugugguguacauug

SEQ ID NO: 1311211 - RNA, 19 nt, Homo sapiens
  misc_RNA (1)...(19): siRNA sense strand
guagacaucagauccuuac

SEQ ID NO: 1311212 - RNA, 19 nt, Homo sapiens
  misc_RNA (1)...(19): siRNA sense strand
caccagcauucuuaucuac

SEQ ID NO: 1311213 - RNA, 19 nt, Homo sapiens
  misc_RNA (1)...(19): siRNA sense strand
gaguggguuuaucacaaga

SEQ ID NO: 1311214 - RNA, 19 nt, Homo sapiens
  misc_RNA (1)...(19): siRNA sense strand
gacaaguaguaaaguucau

SEQ ID NO: 1311215 - RNA, 19 nt, Homo sapiens
  misc_RNA (1)...(19): siRNA sense strand
gcugugguguacauugaca

SEQ ID NO: 1311216 - RNA, 19 nt, Homo sapiens
  misc_RNA (1)...(19): siRNA sense strand
gcaaucucaaagaaagaaa

SEQ ID NO: 1311217 - RNA, 19 nt, Homo sapiens
  misc_RNA (1)...(19): siRNA sense strand
guacauugacacagagucu

SEQ ID NO: 1311218 - RNA, 19 nt, Homo sapiens
  misc_RNA (1)...(19): siRNA sense strand
ggaucccucacagagauua

SEQ ID NO: 1311219 - RNA, 19 nt, Homo sapiens
  misc_RNA (1)...(19): siRNA sense strand
aaggucugcugauuucuca

SEQ ID NO: 1311220 - RNA, 19 nt, Homo sapiens
  misc_RNA (1)...(19): siRNA sense strand
cuacauuacccaccaacau

SEQ ID NO: 1311221 - RNA, 19 nt, Homo sapiens
  misc_RNA (1)...(19): siRNA sense strand
uacauuacccaccaacaug

SEQ ID NO: 1311222 - RNA, 19 nt, Homo sapiens
  misc_RNA (1)...(19): siRNA sense strand
gugauagccgcacuaggaa

SEQ ID NO: 1311223 - RNA, 19 nt, Homo sapiens
  misc_RNA (1)...(19): siRNA sense strand
cagaaaggaguuugaugca

SEQ ID NO: 1311224 - RNA, 19 nt, Homo sapiens
  misc_RNA (1)...(19): siRNA sense strand
ggcaaucucaaagaaagaa

SEQ ID NO: 1311225 - RNA, 19 nt, Homo sapiens
  misc_RNA (1)...(19): siRNA sense strand
aaggagcugugguguacau

SEQ ID NO: 1311226 - RNA, 19 nt, Homo sapiens
  misc_RNA (1)...(19): siRNA sense strand
ggugacuggucugaguuau

SEQ ID NO: 1311227 - RNA, 19 nt, Homo sapiens
  misc_RNA (1)...(19): siRNA sense strand
aggcauccuccuugaagua

SEQ ID NO: 1311228 - RNA, 19 nt, Homo sapiens
  misc_RNA (1)...(19): siRNA sense strand
ggucagaaaggaguuugau

SEQ ID NO: 1311229 - RNA, 19 nt, Homo sapiens
  misc_RNA (1)...(19): siRNA sense strand
ugcauuuagugcugaaaga

SEQ ID NO: 1311230 - RNA, 19 nt, Homo sapiens
  misc_RNA (1)...(19): siRNA sense strand
gagcauuuuggcuacauua

SEQ ID NO: 1311231 - RNA, 19 nt, Homo sapiens
  misc_RNA (1)...(19): siRNA sense strand
ucccaguuaucuugacgaa

SEQ ID NO: 1311232 - RNA, 19 nt, Homo sapiens
  misc_RNA (1)...(19): siRNA sense strand
caugaacuucuauguaugg

SEQ ID NO: 1311233 - RNA, 19 nt, Homo sapiens
  misc_RNA (1)...(19): siRNA sense strand
aagacugguugaaauagca

SEQ ID NO: 1311234 - RNA, 19 nt, Homo sapiens
  misc_RNA (1)...(19): siRNA sense strand
gcauggugguguggcuugu

SEQ ID NO: 1311235 - RNA, 19 nt, Homo sapiens
  misc_RNA (1)...(19): siRNA sense strand
ccucauuugucuacaccau

SEQ ID NO: 1311236 - RNA, 19 nt, Homo sapiens
  misc_RNA (1)...(19): siRNA sense strand
gcacaacuucaaggcaauc

SEQ ID NO: 1311237 - RNA, 19 nt, Homo sapiens
  misc_RNA (1)...(19): siRNA sense strand
ugugaugaaguucuacaaa

SEQ ID NO: 1311238 - RNA, 19 nt, Homo sapiens
  misc_RNA (1)...(19): siRNA sense strand
aaagacugguugaaauagc

SEQ ID NO: 1311239 - RNA, 19 nt, Homo sapiens
  misc_RNA (1)...(19): siRNA sense strand
gcaaacggcuuaugggaua

SEQ ID NO: 1311240 - RNA, 19 nt, Homo sapiens
  misc_RNA (1)...(19): siRNA sense strand
ggaaauaccuggagucaca

SEQ ID NO: 1311241 - RNA, 19 nt, Homo sapiens
  misc_RNA (1)...(19): siRNA sense strand
gcacaaaggucugcugauu

SEQ ID NO: 1311242 - RNA, 19 nt, Homo sapiens
  misc_RNA (1)...(19): siRNA sense strand
gaaggugacuggucugagu

SEQ ID NO: 1311243 - RNA, 19 nt, Homo sapiens
  misc_RNA (1)...(19): siRNA sense strand
cuacuacccuuucugcuuu

SEQ ID NO: 1311244 - RNA, 19 nt, Homo sapiens
  misc_RNA (1)...(19): siRNA sense strand
gagcugugguguacauuga

SEQ ID NO: 1311245 - RNA, 19 nt, Homo sapiens
  misc_RNA (1)...(19): siRNA sense strand
ccaguuaucuugacgaauc

SEQ ID NO: 1311246 - RNA, 19 nt, Homo sapiens
  misc_RNA (1)...(19): siRNA sense strand
acaaaggucugcugauuuc

SEQ ID NO: 1311247 - RNA, 19 nt, Homo sapiens
  misc_RNA (1)...(19): siRNA sense strand
guauuuggcugaggaguuu

SEQ ID NO: 1311248 - RNA, 19 nt, Homo sapiens
  misc_RNA (1)...(19): siRNA sense strand
caacaugggaggauuagaa

SEQ ID NO: 1311249 - RNA, 19 nt, Homo sapiens
  misc_RNA (1)...(19): siRNA sense strand
ugaaagacugguugaaaua

SEQ ID NO: 1311250 - RNA, 19 nt, Homo sapiens
  misc_RNA (1)...(19): siRNA sense strand
ucaaggcaaucucaaagaa

SEQ ID NO: 1311251 - RNA, 19 nt, Homo sapiens
  misc_RNA (1)...(19): siRNA sense strand
ggaagaagaaauuaucuca

SEQ ID NO: 1311252 - RNA, 19 nt, Homo sapiens
  misc_RNA (1)...(19): siRNA sense strand
caaagaugcaaacggcuua

SEQ ID NO: 1311253 - RNA, 19 nt, Homo sapiens
  misc_RNA (1)...(19): siRNA sense strand
gaaguucuacaaaggauug

SEQ ID NO: 1311254 - RNA, 19 nt, Homo sapiens
  misc_RNA (1)...(19): siRNA sense strand
uccaugaacuucuauguau

SEQ ID NO: 1311255 - RNA, 19 nt, Homo sapiens
  misc_RNA (1)...(19): siRNA sense strand
ccagcauucuuaucuacua

SEQ ID NO: 1311256 - RNA, 19 nt, Homo sapiens
  misc_RNA (1)...(19): siRNA sense strand
cauccuccuugaaguauuu

SEQ ID NO: 1311257 - RNA, 19 nt, Homo sapiens
  misc_RNA (1)...(19): siRNA sense strand
guaccuugauucagagaga

SEQ ID NO: 1311258 - RNA, 19 nt, Homo sapiens
  misc_RNA (1)...(19): siRNA sense strand
gcugaaagacugguugaaa

SEQ ID NO: 1311259 - RNA, 19 nt, Homo sapiens
  misc_RNA (1)...(19): siRNA sense strand
ucaccagcauucuuaucua

SEQ ID NO: 1311260 - RNA, 19 nt, Homo sapiens
  misc_RNA (1)...(19): siRNA sense strand
gugaugaaguucuacaaag

SEQ ID NO: 1311261 - RNA, 19 nt, Homo sapiens
  misc_RNA (1)...(19): siRNA sense strand
cugaaagacugguugaaau

SEQ ID NO: 1311262 - RNA, 19 nt, Homo sapiens
  misc_RNA (1)...(19): siRNA sense strand
gaaagacugguugaaauag

SEQ ID NO: 1311263 - RNA, 19 nt, Homo sapiens
  misc_RNA (1)...(19): siRNA sense strand
agaaggagcugugguguac

SEQ ID NO: 1311264 - RNA, 19 nt, Homo sapiens
  misc_RNA (1)...(19): siRNA sense strand
uccaguaccuugauucaga

SEQ ID NO: 1311265 - RNA, 19 nt, Homo sapiens
  misc_RNA (1)...(19): siRNA sense strand
caaagaaagaaacaaguuc

SEQ ID NO: 1311266 - RNA, 19 nt, Homo sapiens
  misc_RNA (1)...(19): siRNA sense strand
ccagauauuuuaacacuga

SEQ ID NO: 1311267 - RNA, 19 nt, Homo sapiens
  misc_RNA (1)...(19): siRNA sense strand
gaguagacaucagauccuu

SEQ ID NO: 1311268 - RNA, 19 nt, Homo sapiens
  misc_RNA (1)...(19): siRNA sense strand
ucagagagaagacagauuc

SEQ ID NO: 1311269 - RNA, 19 nt, Homo sapiens
  misc_RNA (1)...(19): siRNA sense strand
ggauccagcugugugauag

SEQ ID NO: 1311270 - RNA, 19 nt, Homo sapiens
  misc_RNA (1)...(19): siRNA sense strand
ggacgaagcccugcauggu

SEQ ID NO: 1311271 - RNA, 19 nt, Homo sapiens
  misc_RNA (1)...(19): siRNA sense strand
cacaaaggucugcugauuu

SEQ ID NO: 1311272 - RNA, 19 nt, Homo sapiens
  misc_RNA (1)...(19): siRNA sense strand
caaggcaaucucaaagaaa

SEQ ID NO: 1311273 - RNA, 19 nt, Homo sapiens
  misc_RNA (1)...(19): siRNA sense strand
guggaucccucacagagau

SEQ ID NO: 1311274 - RNA, 19 nt, Homo sapiens
  misc_RNA (1)...(19): siRNA sense strand
ugugauagccgcacuagga

SEQ ID NO: 1311275 - RNA, 19 nt, Homo sapiens
  misc_RNA (1)...(19): siRNA sense strand
gaugaaguucuacaaagga

SEQ ID NO: 1311276 - RNA, 19 nt, Homo sapiens
  misc_RNA (1)...(19): siRNA sense strand
ccaccaacaugggaggauu

SEQ ID NO: 1311277 - RNA, 19 nt, Homo sapiens
  misc_RNA (1)...(19): siRNA sense strand
gauagccgcacuaggaaau

SEQ ID NO: 1311278 - RNA, 19 nt, Homo sapiens
  misc_RNA (1)...(19): siRNA sense strand
caacuucaaggcaaucuca

SEQ ID NO: 1311279 - RNA, 19 nt, Homo sapiens
  misc_RNA (1)...(19): siRNA sense strand
caccugugaugaaguucua

SEQ ID NO: 1311280 - RNA, 19 nt, Homo sapiens
  misc_RNA (1)...(19): siRNA sense strand
ccaugaacuucuauguaug

SEQ ID NO: 1311281 - RNA, 19 nt, Homo sapiens
  misc_RNA (1)...(19): siRNA sense strand
cacuggagcuuaugaaggu

SEQ ID NO: 1311282 - RNA, 19 nt, Homo sapiens
  misc_RNA (1)...(19): siRNA sense strand
cgaguggguuuaucacaag

SEQ ID NO: 1311283 - RNA, 19 nt, Homo sapiens
  misc_RNA (1)...(19): siRNA sense strand
guccaugaacuucuaugua

SEQ ID NO: 1311284 - RNA, 19 nt, Homo sapiens
  misc_RNA (1)...(19): siRNA sense strand
ucauuugucuacaccauca

SEQ ID NO: 1311285 - RNA, 19 nt, Homo sapiens
  misc_RNA (1)...(19): siRNA sense strand
ugaugaaguucuacaaagg

SEQ ID NO: 1311286 - RNA, 19 nt, Homo sapiens
  misc_RNA (1)...(19): siRNA sense strand
gauuacaacccaucugagu

SEQ ID NO: 1311287 - RNA, 19 nt, Homo sapiens
  misc_RNA (1)...(19): siRNA sense strand
ggaggaaggccugguucuu

SEQ ID NO: 1311288 - RNA, 19 nt, Homo sapiens
  misc_RNA (1)...(19): siRNA sense strand
ugacuggucugaguuaucg

SEQ ID NO: 1311289 - RNA, 19 nt, Homo sapiens
  misc_RNA (1)...(19): siRNA sense strand
gcauccuccuugaaguauu

SEQ ID NO: 1311290 - RNA, 19 nt, Homo sapiens
  misc_RNA (1)...(19): siRNA sense strand
aaaggaguuugaugcacaa

SEQ ID NO: 1311291 - RNA, 19 nt, Homo sapiens
  misc_RNA (1)...(19): siRNA sense strand
uuucucaccagcauucuua

SEQ ID NO: 1311292 - RNA, 19 nt, Homo sapiens
  misc_RNA (1)...(19): siRNA sense strand
uuaucgagguguccaugaa

SEQ ID NO: 1311293 - RNA, 19 nt, Homo sapiens
  misc_RNA (1)...(19): siRNA sense strand
aaggcaaucucaaagaaag

SEQ ID NO: 1311294 - RNA, 19 nt, Homo sapiens
  misc_RNA (1)...(19): siRNA sense strand
uagaaggagcuguggugua

SEQ ID NO: 1311295 - RNA, 19 nt, Homo sapiens
  misc_RNA (1)...(19): siRNA sense strand
caccaacaugggaggauua

SEQ ID NO: 1311296 - RNA, 19 nt, Homo sapiens
  misc_RNA (1)...(19): siRNA sense strand
ugacaaguaguaaaguuca

SEQ ID NO: 1311297 - RNA, 19 nt, Homo sapiens
  misc_RNA (1)...(19): siRNA sense strand
caaggaggaaggccugguu

SEQ ID NO: 1311298 - RNA, 19 nt, Homo sapiens
  misc_RNA (1)...(19): siRNA sense strand
acgaguggguuuaucacaa

SEQ ID NO: 1311299 - RNA, 19 nt, Homo sapiens
  misc_RNA (1)...(19): siRNA sense strand
caugggaggauuagaagga

SEQ ID NO: 1311300 - RNA, 19 nt, Homo sapiens
  misc_RNA (1)...(19): siRNA sense strand
gucuccagcugaugauuug

SEQ ID NO: 1311301 - RNA, 19 nt, Homo sapiens
  misc_RNA (1)...(19): siRNA sense strand
ggagcugugguguacauug

SEQ ID NO: 1311302 - RNA, 19 nt, Homo sapiens
  misc_RNA (1)...(19): siRNA sense strand
guagacaucagauccuuac

SEQ ID NO: 1311303 - RNA, 19 nt, Homo sapiens
  misc_RNA (1)...(19): siRNA sense strand
caccagcauucuuaucuac

SEQ ID NO: 1311304 - RNA, 19 nt, Homo sapiens
  misc_RNA (1)...(19): siRNA sense strand
gaguggguuuaucacaaga

SEQ ID NO: 1311305 - RNA, 19 nt, Homo sapiens
  misc_RNA (1)...(19): siRNA sense strand
gacaaguaguaaaguucau

SEQ ID NO: 1311306 - RNA, 19 nt, Homo sapiens
  misc_RNA (1)...(19): siRNA sense strand
gcugugguguacauugaca

SEQ ID NO: 1311307 - RNA, 19 nt, Homo sapiens
  misc_RNA (1)...(19): siRNA sense strand
gcaaucucaaagaaagaaa

SEQ ID NO: 1311308 - RNA, 19 nt, Homo sapiens
  misc_RNA (1)...(19): siRNA sense strand
guacauugacacagagucu

SEQ ID NO: 1311309 - RNA, 19 nt, Homo sapiens
  misc_RNA (1)...(19): siRNA sense strand
ggaucccucacagagauua

SEQ ID NO: 1311310 - RNA, 19 nt, Homo sapiens
  misc_RNA (1)...(19): siRNA sense strand
aaggucugcugauuucuca

SEQ ID NO: 1311311 - RNA, 19 nt, Homo sapiens
  misc_RNA (1)...(19): siRNA sense strand
cuacauuacccaccaacau

SEQ ID NO: 1311312 - RNA, 19 nt, Homo sapiens
  misc_RNA (1)...(19): siRNA sense strand
uacauuacccaccaacaug

SEQ ID NO: 1311313 - RNA, 19 nt, Homo sapiens
  misc_RNA (1)...(19): siRNA sense strand
gugauagccgcacuaggaa

SEQ ID NO: 1311314 - RNA, 19 nt, Homo sapiens
  misc_RNA (1)...(19): siRNA sense strand
cagaaaggaguuugaugca

SEQ ID NO: 1311315 - RNA, 19 nt, Homo sapiens
  misc_RNA (1)...(19): siRNA sense strand
ggcaaucucaaagaaagaa

SEQ ID NO: 1311316 - RNA, 19 nt, Homo sapiens
  misc_RNA (1)...(19): siRNA sense strand
aaggagcugugguguacau

SEQ ID NO: 1311317 - RNA, 19 nt, Homo sapiens
  misc_RNA (1)...(19): siRNA sense strand
ggugacuggucugaguuau

SEQ ID NO: 1311318 - RNA, 19 nt, Homo sapiens
  misc_RNA (1)...(19): siRNA sense strand
aggcauccuccuugaagua

SEQ ID NO: 1311319 - RNA, 19 nt, Homo sapiens
  misc_RNA (1)...(19): siRNA sense strand
ggucagaaaggaguuugau

SEQ ID NO: 1311320 - RNA, 19 nt, Homo sapiens
  misc_RNA (1)...(19): siRNA sense strand
ugcauuuagugcugaaaga

SEQ ID NO: 1311321 - RNA, 19 nt, Homo sapiens
  misc_RNA (1)...(19): siRNA sense strand
gagcauuuuggcuacauua

SEQ ID NO: 1311322 - RNA, 19 nt, Homo sapiens
  misc_RNA (1)...(19): siRNA sense strand
ucccaguuaucuugacgaa

SEQ ID NO: 1311323 - RNA, 19 nt, Homo sapiens
  misc_RNA (1)...(19): siRNA sense strand
caugaacuucuauguaugg

SEQ ID NO: 1311324 - RNA, 19 nt, Homo sapiens
  misc_RNA (1)...(19): siRNA sense strand
aagacugguugaaauagca

SEQ ID NO: 1311325 - RNA, 19 nt, Homo sapiens
  misc_RNA (1)...(19): siRNA sense strand
gcauggugguguggcuugu

SEQ ID NO: 1311326 - RNA, 19 nt, Homo sapiens
  misc_RNA (1)...(19): siRNA sense strand
ccucauuugucuacaccau

SEQ ID NO: 1311327 - RNA, 19 nt, Homo sapiens
  misc_RNA (1)...(19): siRNA sense strand
gcacaacuucaaggcaauc

SEQ ID NO: 1311328 - RNA, 19 nt, Homo sapiens
  misc_RNA (1)...(19): siRNA sense strand
ugugaugaaguucuacaaa

SEQ ID NO: 1311329 - RNA, 19 nt, Homo sapiens
  misc_RNA (1)...(19): siRNA sense strand
aaagacugguugaaauagc

SEQ ID NO: 1311330 - RNA, 19 nt, Homo sapiens
  misc_RNA (1)...(19): siRNA sense strand
guacucagcucuaccgaaa

SEQ ID NO: 1311331 - RNA, 19 nt, Homo sapiens
  misc_RNA (1)...(19): siRNA sense strand
gaaagccacucucagacaa

SEQ ID NO: 1311332 - RNA, 19 nt, Homo sapiens
  misc_RNA (1)...(19): siRNA sense strand
cagacaagcuacugaggaa

SEQ ID NO: 1311333 - RNA, 19 nt, Homo sapiens
  misc_RNA (1)...(19): siRNA sense strand
ggacucugcccaagcugaa

SEQ ID NO: 1311334 - RNA, 19 nt, Homo sapiens
  misc_RNA (1)...(19): siRNA sense strand
ccuccaggcuuucgugcuu

SEQ ID NO: 1311335 - RNA, 19 nt, Homo sapiens
  misc_RNA (1)...(19): siRNA sense strand
cgaaagccacucucagaca

SEQ ID NO: 1311336 - RNA, 19 nt, Homo sapiens
  misc_RNA (1)...(19): siRNA sense strand
acugucaccuccaggcuuu

SEQ ID NO: 1311337 - RNA, 19 nt, Homo sapiens
  misc_RNA (1)...(19): siRNA sense strand
gaagauucguguggacauu

SEQ ID NO: 1311338 - RNA, 19 nt, Homo sapiens
  misc_RNA (1)...(19): siRNA sense strand
ccaaucagcuggccagagu

SEQ ID NO: 1311339 - RNA, 19 nt, Homo sapiens
  misc_RNA (1)...(19): siRNA sense strand
ucccaaaucugaaggacuu

SEQ ID NO: 1311340 - RNA, 19 nt, Homo sapiens
  misc_RNA (1)...(19): siRNA sense strand
ugaccuccaccguauauuu

SEQ ID NO: 1311341 - RNA, 19 nt, Homo sapiens
  misc_RNA (1)...(19): siRNA sense strand
gaaacugaagccagaauac

SEQ ID NO: 1311342 - RNA, 19 nt, Homo sapiens
  misc_RNA (1)...(19): siRNA sense strand
cagaauacuuggaggaacu

SEQ ID NO: 1311343 - RNA, 19 nt, Homo sapiens
  misc_RNA (1)...(19): siRNA sense strand
gaccuccaccguauauuug

SEQ ID NO: 1311344 - RNA, 19 nt, Homo sapiens
  misc_RNA (1)...(19): siRNA sense strand
gacagaagaggagaagauu

SEQ ID NO: 1311345 - RNA, 19 nt, Homo sapiens
  misc_RNA (1)...(19): siRNA sense strand
agaaacugaagccagaaua

SEQ ID NO: 1311346 - RNA, 19 nt, Homo sapiens
  misc_RNA (1)...(19): siRNA sense strand
agacagaagaggagaagau

SEQ ID NO: 1311347 - RNA, 19 nt, Homo sapiens
  misc_RNA (1)...(19): siRNA sense strand
gagaaacugaagccagaau

SEQ ID NO: 1311348 - RNA, 19 nt, Homo sapiens
  misc_RNA (1)...(19): siRNA sense strand
caagcugggccuggacuuu

SEQ ID NO: 1311349 - RNA, 19 nt, Homo sapiens
  misc_RNA (1)...(19): siRNA sense strand
uauuugagcccaacugcuu

SEQ ID NO: 1311350 - RNA, 19 nt, Homo sapiens
  misc_RNA (1)...(19): siRNA sense strand
cagaagaggagaagauucg

SEQ ID NO: 1311351 - RNA, 19 nt, Homo sapiens
  misc_RNA (1)...(19): siRNA sense strand
ggagacagaagaggagaag

SEQ ID NO: 1311352 - RNA, 19 nt, Homo sapiens
  misc_RNA (1)...(19): siRNA sense strand
gccagaauacuuggaggaa

SEQ ID NO: 1311353 - RNA, 19 nt, Homo sapiens
  misc_RNA (1)...(19): siRNA sense strand
gaagauucguguggacauu

SEQ ID NO: 1311354 - RNA, 19 nt, Homo sapiens
  misc_RNA (1)...(19): siRNA sense strand
ccaaucagcuggccagagu

SEQ ID NO: 1311355 - RNA, 19 nt, Homo sapiens
  misc_RNA (1)...(19): siRNA sense strand
ggacuucaucucccgcuuu

SEQ ID NO: 1311356 - RNA, 19 nt, Homo sapiens
  misc_RNA (1)...(19): siRNA sense strand
ucccaaaucugaaggacuu

SEQ ID NO: 1311357 - RNA, 19 nt, Homo sapiens
  misc_RNA (1)...(19): siRNA sense strand
ugaccuccaccguauauuu

SEQ ID NO: 1311358 - RNA, 19 nt, Homo sapiens
  misc_RNA (1)...(19): siRNA sense strand
gaaacugaagccagaauac

SEQ ID NO: 1311359 - RNA, 19 nt, Homo sapiens
  misc_RNA (1)...(19): siRNA sense strand
gacuucaucucccgcuuug

SEQ ID NO: 1311360 - RNA, 19 nt, Homo sapiens
  misc_RNA (1)...(19): siRNA sense strand
cagaauacuuggaggaacu

SEQ ID NO: 1311361 - RNA, 19 nt, Homo sapiens
  misc_RNA (1)...(19): siRNA sense strand
gaccuccaccguauauuug

SEQ ID NO: 1311362 - RNA, 19 nt, Homo sapiens
  misc_RNA (1)...(19): siRNA sense strand
gacagaagaggagaagauu

SEQ ID NO: 1311363 - RNA, 19 nt, Homo sapiens
  misc_RNA (1)...(19): siRNA sense strand
agaaacugaagccagaaua

SEQ ID NO: 1311364 - RNA, 19 nt, Homo sapiens
  misc_RNA (1)...(19): siRNA sense strand
agacagaagaggagaagau

SEQ ID NO: 1311365 - RNA, 19 nt, Homo sapiens
  misc_RNA (1)...(19): siRNA sense strand
gagaaacugaagccagaau

SEQ ID NO: 1311366 - RNA, 19 nt, Homo sapiens
  misc_RNA (1)...(19): siRNA sense strand
caagcugggccuggacuuu

SEQ ID NO: 1311367 - RNA, 19 nt, Homo sapiens
  misc_RNA (1)...(19): siRNA sense strand
uauuugagcccaacugcuu

SEQ ID NO: 1311368 - RNA, 19 nt, Homo sapiens
  misc_RNA (1)...(19): siRNA sense strand
cagaagaggagaagauucg

SEQ ID NO: 1311369 - RNA, 19 nt, Homo sapiens
  misc_RNA (1)...(19): siRNA sense strand
ggagacagaagaggagaag

SEQ ID NO: 1311370 - RNA, 19 nt, Homo sapiens
  misc_RNA (1)...(19): siRNA sense strand
gccagaauacuuggaggaa

SEQ ID NO: 1311371 - RNA, 19 nt, Homo sapiens
  misc_RNA (1)...(19): siRNA sense strand
gaagauucguguggacauu

SEQ ID NO: 1311372 - RNA, 19 nt, Homo sapiens
  misc_RNA (1)...(19): siRNA sense strand
ccaaucagcuggccagagu

SEQ ID NO: 1311373 - RNA, 19 nt, Homo sapiens
  misc_RNA (1)...(19): siRNA sense strand
gacagaagaggagaagauu

SEQ ID NO: 1311374 - RNA, 19 nt, Homo sapiens
  misc_RNA (1)...(19): siRNA sense strand
agacagaagaggagaagau

SEQ ID NO: 1311375 - RNA, 19 nt, Homo sapiens
  misc_RNA (1)...(19): siRNA sense strand
caagcugggccuggacuuu

SEQ ID NO: 1311376 - RNA, 19 nt, Homo sapiens
  misc_RNA (1)...(19): siRNA sense strand
cagaagaggagaagauucg

SEQ ID NO: 1311377 - RNA, 19 nt, Homo sapiens
  misc_RNA (1)...(19): siRNA sense strand
ggagacagaagaggagaag

SEQ ID NO: 1311378 - RNA, 19 nt, Homo sapiens
  misc_RNA (1)...(19): siRNA sense strand
gccaggagauguacauuga

SEQ ID NO: 1311379 - RNA, 19 nt, Homo sapiens
  misc_RNA (1)...(19): siRNA sense strand
gggaugaagugggccaaga

SEQ ID NO: 1311380 - RNA, 19 nt, Homo sapiens
  misc_RNA (1)...(19): siRNA sense strand
gagcucagggcgacuguga

SEQ ID NO: 1311381 - RNA, 19 nt, Homo sapiens
  misc_RNA (1)...(19): siRNA sense strand
ggaugaagugggccaagaa

SEQ ID NO: 1311382 - RNA, 19 nt, Homo sapiens
  misc_RNA (1)...(19): siRNA sense strand
gggcgacugugacccugaa

SEQ ID NO: 1311383 - RNA, 19 nt, Homo sapiens
  misc_RNA (1)...(19): siRNA sense strand
ugaccgaggccgugaacuu

SEQ ID NO: 1311384 - RNA, 19 nt, Homo sapiens
  misc_RNA (1)...(19): siRNA sense strand
cuuccuggcuuacgagugu

SEQ ID NO: 1311385 - RNA, 19 nt, Homo sapiens
  misc_RNA (1)...(19): siRNA sense strand
acaugagggugcagaagug

SEQ ID NO: 1311386 - RNA, 19 nt, Homo sapiens
  misc_RNA (1)...(19): siRNA sense strand
caaccgcaccucccucauc

SEQ ID NO: 1311387 - RNA, 19 nt, Homo sapiens
  misc_RNA (1)...(19): siRNA sense strand
cgugagggcccaguaugua

SEQ ID NO: 1311388 - RNA, 19 nt, Homo sapiens
  misc_RNA (1)...(19): siRNA sense strand
ugaagugggccaagaacug

SEQ ID NO: 1311389 - RNA, 19 nt, Homo sapiens
  misc_RNA (1)...(19): siRNA sense strand
gaccgaggccgugaacuuc

SEQ ID NO: 1311390 - RNA, 19 nt, Homo sapiens
  misc_RNA (1)...(19): siRNA sense strand
gacccugaagcaccaauga

SEQ ID NO: 1311391 - RNA, 19 nt, Homo sapiens
  misc_RNA (1)...(19): siRNA sense strand
gggccgacauggagaagcu

SEQ ID NO: 1311392 - RNA, 19 nt, Homo sapiens
  misc_RNA (1)...(19): siRNA sense strand
ccacgugagggcccaguau

SEQ ID NO: 1311393 - RNA, 19 nt, Homo sapiens
  misc_RNA (1)...(19): siRNA sense strand
ggaccucagggacuaugga

SEQ ID NO: 1311394 - RNA, 19 nt, Homo sapiens
  misc_RNA (1)...(19): siRNA sense strand
cgacugugacccugaagca

SEQ ID NO: 1311395 - RNA, 19 nt, Homo sapiens
  misc_RNA (1)...(19): siRNA sense strand
gauaugaguuggacagaga

SEQ ID NO: 1311396 - RNA, 19 nt, Homo sapiens
  misc_RNA (1)...(19): siRNA sense strand
gcuguaccguguuuccuua

SEQ ID NO: 1311397 - RNA, 19 nt, Homo sapiens
  misc_RNA (1)...(19): siRNA sense strand
uuccuuagcuugugugugu

SEQ ID NO: 1311398 - RNA, 19 nt, Homo sapiens
  misc_RNA (1)...(19): siRNA sense strand
gcgagaagggcacccacaa

SEQ ID NO: 1311399 - RNA, 19 nt, Homo sapiens
  misc_RNA (1)...(19): siRNA sense strand
gaagauggaccccucaaca

SEQ ID NO: 1311400 - RNA, 19 nt, Homo sapiens
  misc_RNA (1)...(19): siRNA sense strand
ugaguuggacagagacuug

SEQ ID NO: 1311401 - RNA, 19 nt, Homo sapiens
  misc_RNA (1)...(19): siRNA sense strand
acagacaggcucccacaug

SEQ ID NO: 1311402 - RNA, 19 nt, Homo sapiens
  misc_RNA (1)...(19): siRNA sense strand
cgcaggcuguaccguguuu

SEQ ID NO: 1311403 - RNA, 19 nt, Homo sapiens
  misc_RNA (1)...(19): siRNA sense strand
gagauaugaguuggacaga

SEQ ID NO: 1311404 - RNA, 19 nt, Homo sapiens
  misc_RNA (1)...(19): siRNA sense strand
gauaugaguuggacagaga

SEQ ID NO: 1311405 - RNA, 19 nt, Homo sapiens
  misc_RNA (1)...(19): siRNA sense strand
gcuguaccguguuuccuua

SEQ ID NO: 1311406 - RNA, 19 nt, Homo sapiens
  misc_RNA (1)...(19): siRNA sense strand
uuccuuagcuugugugugu

SEQ ID NO: 1311407 - RNA, 19 nt, Homo sapiens
  misc_RNA (1)...(19): siRNA sense strand
gcgagaagggcacccacaa

SEQ ID NO: 1311408 - RNA, 19 nt, Homo sapiens
  misc_RNA (1)...(19): siRNA sense strand
gaagauggaccccucaaca

SEQ ID NO: 1311409 - RNA, 19 nt, Homo sapiens
  misc_RNA (1)...(19): siRNA sense strand
ugaguuggacagagacuug

SEQ ID NO: 1311410 - RNA, 19 nt, Homo sapiens
  misc_RNA (1)...(19): siRNA sense strand
acagacaggcucccacaug

SEQ ID NO: 1311411 - RNA, 19 nt, Homo sapiens
  misc_RNA (1)...(19): siRNA sense strand
cgcaggcuguaccguguuu

SEQ ID NO: 1311412 - RNA, 19 nt, Homo sapiens
  misc_RNA (1)...(19): siRNA sense strand
gagauaugaguuggacaga

SEQ ID NO: 1311413 - RNA, 19 nt, Homo sapiens
  misc_RNA (1)...(19): siRNA sense strand
guacuaagguuucaucuuu

SEQ ID NO: 1311414 - RNA, 19 nt, Homo sapiens
  misc_RNA (1)...(19): siRNA sense strand
caagucagaucaugaagaa

SEQ ID NO: 1311415 - RNA, 19 nt, Homo sapiens
  misc_RNA (1)...(19): siRNA sense strand
gauacaagcaauacaagua

SEQ ID NO: 1311416 - RNA, 19 nt, Homo sapiens
  misc_RNA (1)...(19): siRNA sense strand
caaaguagcaacaaauauc

SEQ ID NO: 1311417 - RNA, 19 nt, Homo sapiens
  misc_RNA (1)...(19): siRNA sense strand
gaccauaacccuucuucuu

SEQ ID NO: 1311418 - RNA, 19 nt, Homo sapiens
  misc_RNA (1)...(19): siRNA sense strand
ggacaaggacgcgaucuau

SEQ ID NO: 1311419 - RNA, 19 nt, Homo sapiens
  misc_RNA (1)...(19): siRNA sense strand
gcuggacaauuugaugaua

SEQ ID NO: 1311420 - RNA, 19 nt, Homo sapiens
  misc_RNA (1)...(19): siRNA sense strand
caauacaaguacuaagguu

SEQ ID NO: 1311421 - RNA, 19 nt, Homo sapiens
  misc_RNA (1)...(19): siRNA sense strand
ccaucgaccucgucauuga

SEQ ID NO: 1311422 - RNA, 19 nt, Homo sapiens
  misc_RNA (1)...(19): siRNA sense strand
gaugauacaagcaauacaa

SEQ ID NO: 1311423 - RNA, 19 nt, Homo sapiens
  misc_RNA (1)...(19): siRNA sense strand
guacaggugacgaugauga

SEQ ID NO: 1311424 - RNA, 19 nt, Homo sapiens
  misc_RNA (1)...(19): siRNA sense strand
ccaaggagcagcauauagu

SEQ ID NO: 1311425 - RNA, 19 nt, Homo sapiens
  misc_RNA (1)...(19): siRNA sense strand
agacaacaguguagcuuca

SEQ ID NO: 1311426 - RNA, 19 nt, Homo sapiens
  misc_RNA (1)...(19): siRNA sense strand
gagcuggacaauuugauga

SEQ ID NO: 1311427 - RNA, 19 nt, Homo sapiens
  misc_RNA (1)...(19): siRNA sense strand
gagccaaggagcagcauau

SEQ ID NO: 1311428 - RNA, 19 nt, Homo sapiens
  misc_RNA (1)...(19): siRNA sense strand
gcccaucgaccucgucauu

SEQ ID NO: 1311429 - RNA, 19 nt, Homo sapiens
  misc_RNA (1)...(19): siRNA sense strand
ccaaaguagcaacaaauau

SEQ ID NO: 1311430 - RNA, 19 nt, Homo sapiens
  misc_RNA (1)...(19): siRNA sense strand
gcucuggucuuugagaagu

SEQ ID NO: 1311431 - RNA, 19 nt, Homo sapiens
  misc_RNA (1)...(19): siRNA sense strand
uaguacagcccaugauuga

SEQ ID NO: 1311432 - RNA, 19 nt, Homo sapiens
  misc_RNA (1)...(19): siRNA sense strand
caaaucucgcugaccauaa

SEQ ID NO: 1311433 - RNA, 19 nt, Homo sapiens
  misc_RNA (1)...(19): siRNA sense strand
gcaauacaaguacuaaggu

SEQ ID NO: 1311434 - RNA, 19 nt, Homo sapiens
  misc_RNA (1)...(19): siRNA sense strand
cccaaaguagcaacaaaua

SEQ ID NO: 1311435 - RNA, 19 nt, Homo sapiens
  misc_RNA (1)...(19): siRNA sense strand
caagcaauacaaguacuaa

SEQ ID NO: 1311436 - RNA, 19 nt, Homo sapiens
  misc_RNA (1)...(19): siRNA sense strand
acaaauaucaugagagcau

SEQ ID NO: 1311437 - RNA, 19 nt, Homo sapiens
  misc_RNA (1)...(19): siRNA sense strand
acaaaucucgcugaccaua

SEQ ID NO: 1311438 - RNA, 19 nt, Homo sapiens
  misc_RNA (1)...(19): siRNA sense strand
gaacugugcgauaacuucu

SEQ ID NO: 1311439 - RNA, 19 nt, Homo sapiens
  misc_RNA (1)...(19): siRNA sense strand
gacaaggacgcgaucuaug

SEQ ID NO: 1311440 - RNA, 19 nt, Homo sapiens
  misc_RNA (1)...(19): siRNA sense strand
uccacgaacugugcgauaa

SEQ ID NO: 1311441 - RNA, 19 nt, Homo sapiens
  misc_RNA (1)...(19): siRNA sense strand
gaauaguacagcccaugau

SEQ ID NO: 1311442 - RNA, 19 nt, Homo sapiens
  misc_RNA (1)...(19): siRNA sense strand
ccaagucagaucaugaaga

SEQ ID NO: 1311443 - RNA, 19 nt, Homo sapiens
  misc_RNA (1)...(19): siRNA sense strand
gcuccaagucagaucauga

SEQ ID NO: 1311444 - RNA, 19 nt, Homo sapiens
  misc_RNA (1)...(19): siRNA sense strand
gggacaaggacgcgaucua

SEQ ID NO: 1311445 - RNA, 19 nt, Homo sapiens
  misc_RNA (1)...(19): siRNA sense strand
guagcaacaaauaucauga

SEQ ID NO: 1311446 - RNA, 19 nt, Homo sapiens
  misc_RNA (1)...(19): siRNA sense strand
accgauacauuagcuguuu

SEQ ID NO: 1311447 - RNA, 19 nt, Homo sapiens
  misc_RNA (1)...(19): siRNA sense strand
guuuauuaaugccagaaga

SEQ ID NO: 1311448 - RNA, 19 nt, Homo sapiens
  misc_RNA (1)...(19): siRNA sense strand
gcaaggggaugguuuagac

SEQ ID NO: 1311449 - RNA, 19 nt, Homo sapiens
  misc_RNA (1)...(19): siRNA sense strand
uaacuucugccaccgauac

SEQ ID NO: 1311450 - RNA, 19 nt, Homo sapiens
  misc_RNA (1)...(19): siRNA sense strand
aauaguacagcccaugauu

SEQ ID NO: 1311451 - RNA, 19 nt, Homo sapiens
  misc_RNA (1)...(19): siRNA sense strand
aaaucucgcugaccauaac

SEQ ID NO: 1311452 - RNA, 19 nt, Homo sapiens
  misc_RNA (1)...(19): siRNA sense strand
acaaggacgcgaucuaugg

SEQ ID NO: 1311453 - RNA, 19 nt, Homo sapiens
  misc_RNA (1)...(19): siRNA sense strand
caaguacuaagguuucauc

SEQ ID NO: 1311454 - RNA, 19 nt, Homo sapiens
  misc_RNA (1)...(19): siRNA sense strand
gccagaagaagaauaguac

SEQ ID NO: 1311455 - RNA, 19 nt, Homo sapiens
  misc_RNA (1)...(19): siRNA sense strand
accauaacccuucuucuug

SEQ ID NO: 1311456 - RNA, 19 nt, Homo sapiens
  misc_RNA (1)...(19): siRNA sense strand
cgaacugugcgauaacuuc

SEQ ID NO: 1311457 - RNA, 19 nt, Homo sapiens
  misc_RNA (1)...(19): siRNA sense strand
ucaggcuccuccacaaauc

SEQ ID NO: 1311458 - RNA, 19 nt, Homo sapiens
  misc_RNA (1)...(19): siRNA sense strand
uguguuggauggucagcaa

SEQ ID NO: 1311459 - RNA, 19 nt, Homo sapiens
  misc_RNA (1)...(19): siRNA sense strand
acaagcaauacaaguacua

SEQ ID NO: 1311460 - RNA, 19 nt, Homo sapiens
  misc_RNA (1)...(19): siRNA sense strand
agaauaguacagcccauga

SEQ ID NO: 1311461 - RNA, 19 nt, Homo sapiens
  misc_RNA (1)...(19): siRNA sense strand
gucagaucaugaagaacuu

SEQ ID NO: 1311462 - RNA, 19 nt, Homo sapiens
  misc_RNA (1)...(19): siRNA sense strand
ggucuucgccaagcagguu

SEQ ID NO: 1311463 - RNA, 19 nt, Homo sapiens
  misc_RNA (1)...(19): siRNA sense strand
ugccagaagaagaauagua

SEQ ID NO: 1311464 - RNA, 19 nt, Homo sapiens
  misc_RNA (1)...(19): siRNA sense strand
acgaugaugauccggauaa

SEQ ID NO: 1311465 - RNA, 19 nt, Homo sapiens
  misc_RNA (1)...(19): siRNA sense strand
auacaaguacuaagguuuc

SEQ ID NO: 1311466 - RNA, 19 nt, Homo sapiens
  misc_RNA (1)...(19): siRNA sense strand
agcaacaaauaucaugaga

SEQ ID NO: 1311467 - RNA, 19 nt, Homo sapiens
  misc_RNA (1)...(19): siRNA sense strand
gcggagacaacagcaguga

SEQ ID NO: 1311468 - RNA, 19 nt, Homo sapiens
  misc_RNA (1)...(19): siRNA sense strand
gguuucaucuuuuggaguu

SEQ ID NO: 1311469 - RNA, 19 nt, Homo sapiens
  misc_RNA (1)...(19): siRNA sense strand
caaggagcagcauauaguc

SEQ ID NO: 1311470 - RNA, 19 nt, Homo sapiens
  misc_RNA (1)...(19): siRNA sense strand
gccaaggagcagcauauag

SEQ ID NO: 1311471 - RNA, 19 nt, Homo sapiens
  misc_RNA (1)...(19): siRNA sense strand
uggacaauuugaugauaca

SEQ ID NO: 1311472 - RNA, 19 nt, Homo sapiens
  misc_RNA (1)...(19): siRNA sense strand
cgauacauuagcuguuuga

SEQ ID NO: 1311473 - RNA, 19 nt, Homo sapiens
  misc_RNA (1)...(19): siRNA sense strand
ccgauacauuagcuguuug

SEQ ID NO: 1311474 - RNA, 19 nt, Homo sapiens
  misc_RNA (1)...(19): siRNA sense strand
gaaaagguccacgaacugu

SEQ ID NO: 1311475 - RNA, 19 nt, Homo sapiens
  misc_RNA (1)...(19): siRNA sense strand
gcagcuccaagucagauca

SEQ ID NO: 1311476 - RNA, 19 nt, Homo sapiens
  misc_RNA (1)...(19): siRNA sense strand
auuaaugccagaagaagaa

SEQ ID NO: 1311477 - RNA, 19 nt, Homo sapiens
  misc_RNA (1)...(19): siRNA sense strand
uagaaaagguccacgaacu

SEQ ID NO: 1311478 - RNA, 19 nt, Homo sapiens
  misc_RNA (1)...(19): siRNA sense strand
augaugauccggauaagga

SEQ ID NO: 1311479 - RNA, 19 nt, Homo sapiens
  misc_RNA (1)...(19): siRNA sense strand
guacuaagguuucaucuuu

SEQ ID NO: 1311480 - RNA, 19 nt, Homo sapiens
  misc_RNA (1)...(19): siRNA sense strand
caagucagaucaugaagaa

SEQ ID NO: 1311481 - RNA, 19 nt, Homo sapiens
  misc_RNA (1)...(19): siRNA sense strand
gauacaagcaauacaagua

SEQ ID NO: 1311482 - RNA, 19 nt, Homo sapiens
  misc_RNA (1)...(19): siRNA sense strand
caaaguagcaacaaauauc

SEQ ID NO: 1311483 - RNA, 19 nt, Homo sapiens
  misc_RNA (1)...(19): siRNA sense strand
gaccauaacccuucuucuu

SEQ ID NO: 1311484 - RNA, 19 nt, Homo sapiens
  misc_RNA (1)...(19): siRNA sense strand
ggacaaggacgcgaucuau

SEQ ID NO: 1311485 - RNA, 19 nt, Homo sapiens
  misc_RNA (1)...(19): siRNA sense strand
gcuggacaauuugaugaua

SEQ ID NO: 1311486 - RNA, 19 nt, Homo sapiens
  misc_RNA (1)...(19): siRNA sense strand
caauacaaguacuaagguu

SEQ ID NO: 1311487 - RNA, 19 nt, Homo sapiens
  misc_RNA (1)...(19): siRNA sense strand
ccaucgaccucgucauuga

SEQ ID NO: 1311488 - RNA, 19 nt, Homo sapiens
  misc_RNA (1)...(19): siRNA sense strand
gaugauacaagcaauacaa

SEQ ID NO: 1311489 - RNA, 19 nt, Homo sapiens
  misc_RNA (1)...(19): siRNA sense strand
guacaggugacgaugauga

SEQ ID NO: 1311490 - RNA, 19 nt, Homo sapiens
  misc_RNA (1)...(19): siRNA sense strand
acgaugagcugccccauua

SEQ ID NO: 1311491 - RNA, 19 nt, Homo sapiens
  misc_RNA (1)...(19): siRNA sense strand
agacaacaguguagcuuca

SEQ ID NO: 1311492 - RNA, 19 nt, Homo sapiens
  misc_RNA (1)...(19): siRNA sense strand
gagcuggacaauuugauga

SEQ ID NO: 1311493 - RNA, 19 nt, Homo sapiens
  misc_RNA (1)...(19): siRNA sense strand
gcccaucgaccucgucauu

SEQ ID NO: 1311494 - RNA, 19 nt, Homo sapiens
  misc_RNA (1)...(19): siRNA sense strand
ccaaaguagcaacaaauau

SEQ ID NO: 1311495 - RNA, 19 nt, Homo sapiens
  misc_RNA (1)...(19): siRNA sense strand
gcucuggucuuugagaagu

SEQ ID NO: 1311496 - RNA, 19 nt, Homo sapiens
  misc_RNA (1)...(19): siRNA sense strand
caaaucucgcugaccauaa

SEQ ID NO: 1311497 - RNA, 19 nt, Homo sapiens
  misc_RNA (1)...(19): siRNA sense strand
gcaauacaaguacuaaggu

SEQ ID NO: 1311498 - RNA, 19 nt, Homo sapiens
  misc_RNA (1)...(19): siRNA sense strand
cccaaaguagcaacaaaua

SEQ ID NO: 1311499 - RNA, 19 nt, Homo sapiens
  misc_RNA (1)...(19): siRNA sense strand
caagcaauacaaguacuaa

SEQ ID NO: 1311500 - RNA, 19 nt, Homo sapiens
  misc_RNA (1)...(19): siRNA sense strand
acaaauaucaugagagcau

SEQ ID NO: 1311501 - RNA, 19 nt, Homo sapiens
  misc_RNA (1)...(19): siRNA sense strand
acaaaucucgcugaccaua

SEQ ID NO: 1311502 - RNA, 19 nt, Homo sapiens
  misc_RNA (1)...(19): siRNA sense strand
gaacugugcgauaacuucu

SEQ ID NO: 1311503 - RNA, 19 nt, Homo sapiens
  misc_RNA (1)...(19): siRNA sense strand
gacaaggacgcgaucuaug

SEQ ID NO: 1311504 - RNA, 19 nt, Homo sapiens
  misc_RNA (1)...(19): siRNA sense strand
uccacgaacugugcgauaa

SEQ ID NO: 1311505 - RNA, 19 nt, Homo sapiens
  misc_RNA (1)...(19): siRNA sense strand
ccaagucagaucaugaaga

SEQ ID NO: 1311506 - RNA, 19 nt, Homo sapiens
  misc_RNA (1)...(19): siRNA sense strand
gcuccaagucagaucauga

SEQ ID NO: 1311507 - RNA, 19 nt, Homo sapiens
  misc_RNA (1)...(19): siRNA sense strand
gggacaaggacgcgaucua

SEQ ID NO: 1311508 - RNA, 19 nt, Homo sapiens
  misc_RNA (1)...(19): siRNA sense strand
guagcaacaaauaucauga

SEQ ID NO: 1311509 - RNA, 19 nt, Homo sapiens
  misc_RNA (1)...(19): siRNA sense strand
accgauacauuagcuguuu

SEQ ID NO: 1311510 - RNA, 19 nt, Homo sapiens
  misc_RNA (1)...(19): siRNA sense strand
gcaaggggaugguuuagac

SEQ ID NO: 1311511 - RNA, 19 nt, Homo sapiens
  misc_RNA (1)...(19): siRNA sense strand
uaacuucugccaccgauac

SEQ ID NO: 1311512 - RNA, 19 nt, Homo sapiens
  misc_RNA (1)...(19): siRNA sense strand
aaaucucgcugaccauaac

SEQ ID NO: 1311513 - RNA, 19 nt, Homo sapiens
  misc_RNA (1)...(19): siRNA sense strand
acaaggacgcgaucuaugg

SEQ ID NO: 1311514 - RNA, 19 nt, Homo sapiens
  misc_RNA (1)...(19): siRNA sense strand
caaguacuaagguuucauc

SEQ ID NO: 1311515 - RNA, 19 nt, Homo sapiens
  misc_RNA (1)...(19): siRNA sense strand
accauaacccuucuucuug

SEQ ID NO: 1311516 - RNA, 19 nt, Homo sapiens
  misc_RNA (1)...(19): siRNA sense strand
cgaacugugcgauaacuuc

SEQ ID NO: 1311517 - RNA, 19 nt, Homo sapiens
  misc_RNA (1)...(19): siRNA sense strand
ucaggcuccuccacaaauc

SEQ ID NO: 1311518 - RNA, 19 nt, Homo sapiens
  misc_RNA (1)...(19): siRNA sense strand
acaagcaauacaaguacua

SEQ ID NO: 1311519 - RNA, 19 nt, Homo sapiens
  misc_RNA (1)...(19): siRNA sense strand
gucagaucaugaagaacuu

SEQ ID NO: 1311520 - RNA, 19 nt, Homo sapiens
  misc_RNA (1)...(19): siRNA sense strand
ggucuucgccaagcagguu

SEQ ID NO: 1311521 - RNA, 19 nt, Homo sapiens
  misc_RNA (1)...(19): siRNA sense strand
acgaugaugauccggauaa

SEQ ID NO: 1311522 - RNA, 19 nt, Homo sapiens
  misc_RNA (1)...(19): siRNA sense strand
auacaaguacuaagguuuc

SEQ ID NO: 1311523 - RNA, 19 nt, Homo sapiens
  misc_RNA (1)...(19): siRNA sense strand
agcaacaaauaucaugaga

SEQ ID NO: 1311524 - RNA, 19 nt, Homo sapiens
  misc_RNA (1)...(19): siRNA sense strand
gcggagacaacagcaguga

SEQ ID NO: 1311525 - RNA, 19 nt, Homo sapiens
  misc_RNA (1)...(19): siRNA sense strand
uggacaauuugaugauaca

SEQ ID NO: 1311526 - RNA, 19 nt, Homo sapiens
  misc_RNA (1)...(19): siRNA sense strand
cgauacauuagcuguuuga

SEQ ID NO: 1311527 - RNA, 19 nt, Homo sapiens
  misc_RNA (1)...(19): siRNA sense strand
ccgauacauuagcuguuug

SEQ ID NO: 1311528 - RNA, 19 nt, Homo sapiens
  misc_RNA (1)...(19): siRNA sense strand
gaaaagguccacgaacugu

SEQ ID NO: 1311529 - RNA, 19 nt, Homo sapiens
  misc_RNA (1)...(19): siRNA sense strand
gguuucaucuuuuggaguu

SEQ ID NO: 1311530 - RNA, 19 nt, Homo sapiens
  misc_RNA (1)...(19): siRNA sense strand
gcagcuccaagucagauca

SEQ ID NO: 1311531 - RNA, 19 nt, Homo sapiens
  misc_RNA (1)...(19): siRNA sense strand
uagaaaagguccacgaacu

SEQ ID NO: 1311532 - RNA, 19 nt, Homo sapiens
  misc_RNA (1)...(19): siRNA sense strand
augaugauccggauaagga

SEQ ID NO: 1311533 - RNA, 19 nt, Homo sapiens
  misc_RNA (1)...(19): siRNA sense strand
guacuaagguuucaucuuu

SEQ ID NO: 1311534 - RNA, 19 nt, Homo sapiens
  misc_RNA (1)...(19): siRNA sense strand
caagucagaucaugaagaa

SEQ ID NO: 1311535 - RNA, 19 nt, Homo sapiens
  misc_RNA (1)...(19): siRNA sense strand
gauacaagcaauacaagua

SEQ ID NO: 1311536 - RNA, 19 nt, Homo sapiens
  misc_RNA (1)...(19): siRNA sense strand
caaaguagcaacaaauauc

SEQ ID NO: 1311537 - RNA, 19 nt, Homo sapiens
  misc_RNA (1)...(19): siRNA sense strand
gaccauaacccuucuucuu

SEQ ID NO: 1311538 - RNA, 19 nt, Homo sapiens
  misc_RNA (1)...(19): siRNA sense strand
ggacaaggacgcgaucuau

SEQ ID NO: 1311539 - RNA, 19 nt, Homo sapiens
  misc_RNA (1)...(19): siRNA sense strand
gcuggacaauuugaugaua

SEQ ID NO: 1311540 - RNA, 19 nt, Homo sapiens
  misc_RNA (1)...(19): siRNA sense strand
caauacaaguacuaagguu

SEQ ID NO: 1311541 - RNA, 19 nt, Homo sapiens
  misc_RNA (1)...(19): siRNA sense strand
ccaucgaccucgucauuga

SEQ ID NO: 1311542 - RNA, 19 nt, Homo sapiens
  misc_RNA (1)...(19): siRNA sense strand
gaugauacaagcaauacaa

SEQ ID NO: 1311543 - RNA, 19 nt, Homo sapiens
  misc_RNA (1)...(19): siRNA sense strand
guacaggugacgaugauga

SEQ ID NO: 1311544 - RNA, 19 nt, Homo sapiens
  misc_RNA (1)...(19): siRNA sense strand
ccaaggagcagcauauagu

SEQ ID NO: 1311545 - RNA, 19 nt, Homo sapiens
  misc_RNA (1)...(19): siRNA sense strand
acgaugagcugccccauua

SEQ ID NO: 1311546 - RNA, 19 nt, Homo sapiens
  misc_RNA (1)...(19): siRNA sense strand
agacaacaguguagcuuca

SEQ ID NO: 1311547 - RNA, 19 nt, Homo sapiens
  misc_RNA (1)...(19): siRNA sense strand
gagcuggacaauuugauga

SEQ ID NO: 1311548 - RNA, 19 nt, Homo sapiens
  misc_RNA (1)...(19): siRNA sense strand
gagccaaggagcagcauau

SEQ ID NO: 1311549 - RNA, 19 nt, Homo sapiens
  misc_RNA (1)...(19): siRNA sense strand
gcccaucgaccucgucauu

SEQ ID NO: 1311550 - RNA, 19 nt, Homo sapiens
  misc_RNA (1)...(19): siRNA sense strand
ccaaaguagcaacaaauau

SEQ ID NO: 1311551 - RNA, 19 nt, Homo sapiens
  misc_RNA (1)...(19): siRNA sense strand
gcucuggucuuugagaagu

SEQ ID NO: 1311552 - RNA, 19 nt, Homo sapiens
  misc_RNA (1)...(19): siRNA sense strand
uaguacagcccaugauuga

SEQ ID NO: 1311553 - RNA, 19 nt, Homo sapiens
  misc_RNA (1)...(19): siRNA sense strand
caaaucucgcugaccauaa

SEQ ID NO: 1311554 - RNA, 19 nt, Homo sapiens
  misc_RNA (1)...(19): siRNA sense strand
gcaauacaaguacuaaggu

SEQ ID NO: 1311555 - RNA, 19 nt, Homo sapiens
  misc_RNA (1)...(19): siRNA sense strand
cccaaaguagcaacaaaua

SEQ ID NO: 1311556 - RNA, 19 nt, Homo sapiens
  misc_RNA (1)...(19): siRNA sense strand
caagcaauacaaguacuaa

SEQ ID NO: 1311557 - RNA, 19 nt, Homo sapiens
  misc_RNA (1)...(19): siRNA sense strand
acaaauaucaugagagcau

SEQ ID NO: 1311558 - RNA, 19 nt, Homo sapiens
  misc_RNA (1)...(19): siRNA sense strand
acaaaucucgcugaccaua

SEQ ID NO: 1311559 - RNA, 19 nt, Homo sapiens
  misc_RNA (1)...(19): siRNA sense strand
gaacugugcgauaacuucu

SEQ ID NO: 1311560 - RNA, 19 nt, Homo sapiens
  misc_RNA (1)...(19): siRNA sense strand
gacaaggacgcgaucuaug

SEQ ID NO: 1311561 - RNA, 19 nt, Homo sapiens
  misc_RNA (1)...(19): siRNA sense strand
uccacgaacugugcgauaa

SEQ ID NO: 1311562 - RNA, 19 nt, Homo sapiens
  misc_RNA (1)...(19): siRNA sense strand
gaauaguacagcccaugau

SEQ ID NO: 1311563 - RNA, 19 nt, Homo sapiens
  misc_RNA (1)...(19): siRNA sense strand
ccaagucagaucaugaaga

SEQ ID NO: 1311564 - RNA, 19 nt, Homo sapiens
  misc_RNA (1)...(19): siRNA sense strand
gcuccaagucagaucauga

SEQ ID NO: 1311565 - RNA, 19 nt, Homo sapiens
  misc_RNA (1)...(19): siRNA sense strand
gggacaaggacgcgaucua

SEQ ID NO: 1311566 - RNA, 19 nt, Homo sapiens
  misc_RNA (1)...(19): siRNA sense strand
guagcaacaaauaucauga

SEQ ID NO: 1311567 - RNA, 19 nt, Homo sapiens
  misc_RNA (1)...(19): siRNA sense strand
accgauacauuagcuguuu

SEQ ID NO: 1311568 - RNA, 19 nt, Homo sapiens
  misc_RNA (1)...(19): siRNA sense strand
guuuauuaaugccagaaga

SEQ ID NO: 1311569 - RNA, 19 nt, Homo sapiens
  misc_RNA (1)...(19): siRNA sense strand
gcaaggggaugguuuagac

SEQ ID NO: 1311570 - RNA, 19 nt, Homo sapiens
  misc_RNA (1)...(19): siRNA sense strand
uaacuucugccaccgauac

SEQ ID NO: 1311571 - RNA, 19 nt, Homo sapiens
  misc_RNA (1)...(19): siRNA sense strand
aauaguacagcccaugauu

SEQ ID NO: 1311572 - RNA, 19 nt, Homo sapiens
  misc_RNA (1)...(19): siRNA sense strand
acaaggacgcgaucuaugg

SEQ ID NO: 1311573 - RNA, 19 nt, Homo sapiens
  misc_RNA (1)...(19): siRNA sense strand
aaaucucgcugaccauaac

SEQ ID NO: 1311574 - RNA, 19 nt, Homo sapiens
  misc_RNA (1)...(19): siRNA sense strand
caaguacuaagguuucauc

SEQ ID NO: 1311575 - RNA, 19 nt, Homo sapiens
  misc_RNA (1)...(19): siRNA sense strand
gccagaagaagaauaguac

SEQ ID NO: 1311576 - RNA, 19 nt, Homo sapiens
  misc_RNA (1)...(19): siRNA sense strand
accauaacccuucuucuug

SEQ ID NO: 1311577 - RNA, 19 nt, Homo sapiens
  misc_RNA (1)...(19): siRNA sense strand
cgaacugugcgauaacuuc

SEQ ID NO: 1311578 - RNA, 19 nt, Homo sapiens
  misc_RNA (1)...(19): siRNA sense strand
ucaggcuccuccacaaauc

SEQ ID NO: 1311579 - RNA, 19 nt, Homo sapiens
  misc_RNA (1)...(19): siRNA sense strand
uguguuggauggucagcaa

SEQ ID NO: 1311580 - RNA, 19 nt, Homo sapiens
  misc_RNA (1)...(19): siRNA sense strand
acaagcaauacaaguacua

SEQ ID NO: 1311581 - RNA, 19 nt, Homo sapiens
  misc_RNA (1)...(19): siRNA sense strand
agaauaguacagcccauga

SEQ ID NO: 1311582 - RNA, 19 nt, Homo sapiens
  misc_RNA (1)...(19): siRNA sense strand
gucagaucaugaagaacuu

SEQ ID NO: 1311583 - RNA, 19 nt, Homo sapiens
  misc_RNA (1)...(19): siRNA sense strand
ggucuucgccaagcagguu

SEQ ID NO: 1311584 - RNA, 19 nt, Homo sapiens
  misc_RNA (1)...(19): siRNA sense strand
ugccagaagaagaauagua

SEQ ID NO: 1311585 - RNA, 19 nt, Homo sapiens
  misc_RNA (1)...(19): siRNA sense strand
acgaugaugauccggauaa

SEQ ID NO: 1311586 - RNA, 19 nt, Homo sapiens
  misc_RNA (1)...(19): siRNA sense strand
auacaaguacuaagguuuc

SEQ ID NO: 1311587 - RNA, 19 nt, Homo sapiens
  misc_RNA (1)...(19): siRNA sense strand
agcaacaaauaucaugaga

SEQ ID NO: 1311588 - RNA, 19 nt, Homo sapiens
  misc_RNA (1)...(19): siRNA sense strand
gcggagacaacagcaguga

SEQ ID NO: 1311589 - RNA, 19 nt, Homo sapiens
  misc_RNA (1)...(19): siRNA sense strand
gguuucaucuuuuggaguu

SEQ ID NO: 1311590 - RNA, 19 nt, Homo sapiens
  misc_RNA (1)...(19): siRNA sense strand
caaggagcagcauauaguc

SEQ ID NO: 1311591 - RNA, 19 nt, Homo sapiens
  misc_RNA (1)...(19): siRNA sense strand
gccaaggagcagcauauag

SEQ ID NO: 1311592 - RNA, 19 nt, Homo sapiens
  misc_RNA (1)...(19): siRNA sense strand
cgauacauuagcuguuuga

SEQ ID NO: 1311593 - RNA, 19 nt, Homo sapiens
  misc_RNA (1)...(19): siRNA sense strand
ccgauacauuagcuguuug

SEQ ID NO: 1311594 - RNA, 19 nt, Homo sapiens
  misc_RNA (1)...(19): siRNA sense strand
uggacaauuugaugauaca

SEQ ID NO: 1311595 - RNA, 19 nt, Homo sapiens
  misc_RNA (1)...(19): siRNA sense strand
gaaaagguccacgaacugu

SEQ ID NO: 1311596 - RNA, 19 nt, Homo sapiens
  misc_RNA (1)...(19): siRNA sense strand
gcagcuccaagucagauca

SEQ ID NO: 1311597 - RNA, 19 nt, Homo sapiens
  misc_RNA (1)...(19): siRNA sense strand
auuaaugccagaagaagaa

SEQ ID NO: 1311598 - RNA, 19 nt, Homo sapiens
  misc_RNA (1)...(19): siRNA sense strand
uagaaaagguccacgaacu

SEQ ID NO: 1311599 - RNA, 19 nt, Homo sapiens
  misc_RNA (1)...(19): siRNA sense strand
augaugauccggauaagga

SEQ ID NO: 1311600 - RNA, 19 nt, Homo sapiens
  misc_RNA (1)...(19): siRNA sense strand
guacuaagguuucaucuuu

SEQ ID NO: 1311601 - RNA, 19 nt, Homo sapiens
  misc_RNA (1)...(19): siRNA sense strand
caagucagaucaugaagaa

SEQ ID NO: 1311602 - RNA, 19 nt, Homo sapiens
  misc_RNA (1)...(19): siRNA sense strand
ggacauucaugcccaauag

SEQ ID NO: 1311603 - RNA, 19 nt, Homo sapiens
  misc_RNA (1)...(19): siRNA sense strand
gauacaagcaauacaagua

SEQ ID NO: 1311604 - RNA, 19 nt, Homo sapiens
  misc_RNA (1)...(19): siRNA sense strand
caaaguagcaacaaauauc

SEQ ID NO: 1311605 - RNA, 19 nt, Homo sapiens
  misc_RNA (1)...(19): siRNA sense strand
gcacagagccccacaaugu

SEQ ID NO: 1311606 - RNA, 19 nt, Homo sapiens
  misc_RNA (1)...(19): siRNA sense strand
gaccauaacccuucuucuu

SEQ ID NO: 1311607 - RNA, 19 nt, Homo sapiens
  misc_RNA (1)...(19): siRNA sense strand
ggacaaggacgcgaucuau

SEQ ID NO: 1311608 - RNA, 19 nt, Homo sapiens
  misc_RNA (1)...(19): siRNA sense strand
gcuggacaauuugaugaua

SEQ ID NO: 1311609 - RNA, 19 nt, Homo sapiens
  misc_RNA (1)...(19): siRNA sense strand
caauacaaguacuaagguu

SEQ ID NO: 1311610 - RNA, 19 nt, Homo sapiens
  misc_RNA (1)...(19): siRNA sense strand
ccaucgaccucgucauuga

SEQ ID NO: 1311611 - RNA, 19 nt, Homo sapiens
  misc_RNA (1)...(19): siRNA sense strand
gaugauacaagcaauacaa

SEQ ID NO: 1311612 - RNA, 19 nt, Homo sapiens
  misc_RNA (1)...(19): siRNA sense strand
cccacacccuacucaauua

SEQ ID NO: 1311613 - RNA, 19 nt, Homo sapiens
  misc_RNA (1)...(19): siRNA sense strand
guacaggugacgaugauga

SEQ ID NO: 1311614 - RNA, 19 nt, Homo sapiens
  misc_RNA (1)...(19): siRNA sense strand
ccacaauguuaaauucugu

SEQ ID NO: 1311615 - RNA, 19 nt, Homo sapiens
  misc_RNA (1)...(19): siRNA sense strand
cccaaugcauucauauuug

SEQ ID NO: 1311616 - RNA, 19 nt, Homo sapiens
  misc_RNA (1)...(19): siRNA sense strand
ccaaggagcagcauauagu

SEQ ID NO: 1311617 - RNA, 19 nt, Homo sapiens
  misc_RNA (1)...(19): siRNA sense strand
acgaugagcugccccauua

SEQ ID NO: 1311618 - RNA, 19 nt, Homo sapiens
  misc_RNA (1)...(19): siRNA sense strand
agacaacaguguagcuuca

SEQ ID NO: 1311619 - RNA, 19 nt, Homo sapiens
  misc_RNA (1)...(19): siRNA sense strand
gagcuggacaauuugauga

SEQ ID NO: 1311620 - RNA, 19 nt, Homo sapiens
  misc_RNA (1)...(19): siRNA sense strand
gagccaaggagcagcauau

SEQ ID NO: 1311621 - RNA, 19 nt, Homo sapiens
  misc_RNA (1)...(19): siRNA sense strand
gcggacagguuauggacau

SEQ ID NO: 1311622 - RNA, 19 nt, Homo sapiens
  misc_RNA (1)...(19): siRNA sense strand
gcccaucgaccucgucauu

SEQ ID NO: 1311623 - RNA, 19 nt, Homo sapiens
  misc_RNA (1)...(19): siRNA sense strand
ccaaaguagcaacaaauau

SEQ ID NO: 1311624 - RNA, 19 nt, Homo sapiens
  misc_RNA (1)...(19): siRNA sense strand
gcaauacaaguacuaaggu

SEQ ID NO: 1311625 - RNA, 19 nt, Homo sapiens
  misc_RNA (1)...(19): siRNA sense strand
gacagguuauggacauuca

SEQ ID NO: 1311626 - RNA, 19 nt, Homo sapiens
  misc_RNA (1)...(19): siRNA sense strand
uaguacagcccaugauuga

SEQ ID NO: 1311627 - RNA, 19 nt, Homo sapiens
  misc_RNA (1)...(19): siRNA sense strand
caaaucucgcugaccauaa

SEQ ID NO: 1311628 - RNA, 19 nt, Homo sapiens
  misc_RNA (1)...(19): siRNA sense strand
gcucuggucuuugagaagu

SEQ ID NO: 1311629 - RNA, 19 nt, Homo sapiens
  misc_RNA (1)...(19): siRNA sense strand
cccaaaguagcaacaaaua

SEQ ID NO: 1311630 - RNA, 19 nt, Homo sapiens
  misc_RNA (1)...(19): siRNA sense strand
gguccuaugggaaugagua

SEQ ID NO: 1311631 - RNA, 19 nt, Homo sapiens
  misc_RNA (1)...(19): siRNA sense strand
caagcaauacaaguacuaa

SEQ ID NO: 1311632 - RNA, 19 nt, Homo sapiens
  misc_RNA (1)...(19): siRNA sense strand
aauguuggcggacagguua

SEQ ID NO: 1311633 - RNA, 19 nt, Homo sapiens
  misc_RNA (1)...(19): siRNA sense strand
ccaaugcauucauauuugc

SEQ ID NO: 1311634 - RNA, 19 nt, Homo sapiens
  misc_RNA (1)...(19): siRNA sense strand
acaaauaucaugagagcau

SEQ ID NO: 1311635 - RNA, 19 nt, Homo sapiens
  misc_RNA (1)...(19): siRNA sense strand
acaaaucucgcugaccaua

SEQ ID NO: 1311636 - RNA, 19 nt, Homo sapiens
  misc_RNA (1)...(19): siRNA sense strand
acacccuacucaauuaaga

SEQ ID NO: 1311637 - RNA, 19 nt, Homo sapiens
  misc_RNA (1)...(19): siRNA sense strand
gaacugugcgauaacuucu

SEQ ID NO: 1311638 - RNA, 19 nt, Homo sapiens
  misc_RNA (1)...(19): siRNA sense strand
ccuacucaauuaagacaug

SEQ ID NO: 1311639 - RNA, 19 nt, Homo sapiens
  misc_RNA (1)...(19): siRNA sense strand
gacaaggacgcgaucuaug

SEQ ID NO: 1311640 - RNA, 19 nt, Homo sapiens
  misc_RNA (1)...(19): siRNA sense strand
ccacacccuacucaauuaa

SEQ ID NO: 1311641 - RNA, 19 nt, Homo sapiens
  misc_RNA (1)...(19): siRNA sense strand
uccacgaacugugcgauaa

SEQ ID NO: 1311642 - RNA, 19 nt, Homo sapiens
  misc_RNA (1)...(19): siRNA sense strand
gaauaguacagcccaugau

SEQ ID NO: 1311643 - RNA, 19 nt, Homo sapiens
  misc_RNA (1)...(19): siRNA sense strand
ccaagucagaucaugaaga

SEQ ID NO: 1311644 - RNA, 19 nt, Homo sapiens
  misc_RNA (1)...(19): siRNA sense strand
gcuccaagucagaucauga

SEQ ID NO: 1311645 - RNA, 19 nt, Homo sapiens
  misc_RNA (1)...(19): siRNA sense strand
gggacaaggacgcgaucua

SEQ ID NO: 1311646 - RNA, 19 nt, Homo sapiens
  misc_RNA (1)...(19): siRNA sense strand
guagcaacaaauaucauga

SEQ ID NO: 1311647 - RNA, 19 nt, Homo sapiens
  misc_RNA (1)...(19): siRNA sense strand
accgauacauuagcuguuu

SEQ ID NO: 1311648 - RNA, 19 nt, Homo sapiens
  misc_RNA (1)...(19): siRNA sense strand
guuuauuaaugccagaaga

SEQ ID NO: 1311649 - RNA, 19 nt, Homo sapiens
  misc_RNA (1)...(19): siRNA sense strand
gcaaggggaugguuuagac

SEQ ID NO: 1311650 - RNA, 19 nt, Homo sapiens
  misc_RNA (1)...(19): siRNA sense strand
uaacuucugccaccgauac

SEQ ID NO: 1311651 - RNA, 19 nt, Homo sapiens
  misc_RNA (1)...(19): siRNA sense strand
ggacagguuauggacauuc

SEQ ID NO: 1311652 - RNA, 19 nt, Homo sapiens
  misc_RNA (1)...(19): siRNA sense strand
aauaguacagcccaugauu

SEQ ID NO: 1311653 - RNA, 19 nt, Homo sapiens
  misc_RNA (1)...(19): siRNA sense strand
acaaggacgcgaucuaugg

SEQ ID NO: 1311654 - RNA, 19 nt, Homo sapiens
  misc_RNA (1)...(19): siRNA sense strand
aaaucucgcugaccauaac

SEQ ID NO: 1311655 - RNA, 19 nt, Homo sapiens
  misc_RNA (1)...(19): siRNA sense strand
caaguacuaagguuucauc

SEQ ID NO: 1311656 - RNA, 19 nt, Homo sapiens
  misc_RNA (1)...(19): siRNA sense strand
gccagaagaagaauaguac

SEQ ID NO: 1311657 - RNA, 19 nt, Homo sapiens
  misc_RNA (1)...(19): siRNA sense strand
accauaacccuucuucuug

SEQ ID NO: 1311658 - RNA, 19 nt, Homo sapiens
  misc_RNA (1)...(19): siRNA sense strand
cgaacugugcgauaacuuc

SEQ ID NO: 1311659 - RNA, 19 nt, Homo sapiens
  misc_RNA (1)...(19): siRNA sense strand
ucaggcuccuccacaaauc

SEQ ID NO: 1311660 - RNA, 19 nt, Homo sapiens
  misc_RNA (1)...(19): siRNA sense strand
uguguuggauggucagcaa

SEQ ID NO: 1311661 - RNA, 19 nt, Homo sapiens
  misc_RNA (1)...(19): siRNA sense strand
gucagaucaugaagaacuu

SEQ ID NO: 1311662 - RNA, 19 nt, Homo sapiens
  misc_RNA (1)...(19): siRNA sense strand
agaauaguacagcccauga

SEQ ID NO: 1311663 - RNA, 19 nt, Homo sapiens
  misc_RNA (1)...(19): siRNA sense strand
acaagcaauacaaguacua

SEQ ID NO: 1311664 - RNA, 19 nt, Homo sapiens
  misc_RNA (1)...(19): siRNA sense strand
acgaugaugauccggauaa

SEQ ID NO: 1311665 - RNA, 19 nt, Homo sapiens
  misc_RNA (1)...(19): siRNA sense strand
ugccagaagaagaauagua

SEQ ID NO: 1311666 - RNA, 19 nt, Homo sapiens
  misc_RNA (1)...(19): siRNA sense strand
ggucuucgccaagcagguu

SEQ ID NO: 1311667 - RNA, 19 nt, Homo sapiens
  misc_RNA (1)...(19): siRNA sense strand
gcggagacaacagcaguga

SEQ ID NO: 1311668 - RNA, 19 nt, Homo sapiens
  misc_RNA (1)...(19): siRNA sense strand
auacaaguacuaagguuuc

SEQ ID NO: 1311669 - RNA, 19 nt, Homo sapiens
  misc_RNA (1)...(19): siRNA sense strand
agcaacaaauaucaugaga

SEQ ID NO: 1311670 - RNA, 19 nt, Homo sapiens
  misc_RNA (1)...(19): siRNA sense strand
gaaaagguccacgaacugu

SEQ ID NO: 1311671 - RNA, 19 nt, Homo sapiens
  misc_RNA (1)...(19): siRNA sense strand
caaggagcagcauauaguc

SEQ ID NO: 1311672 - RNA, 19 nt, Homo sapiens
  misc_RNA (1)...(19): siRNA sense strand
gccaaggagcagcauauag

SEQ ID NO: 1311673 - RNA, 19 nt, Homo sapiens
  misc_RNA (1)...(19): siRNA sense strand
uggacaauuugaugauaca

SEQ ID NO: 1311674 - RNA, 19 nt, Homo sapiens
  misc_RNA (1)...(19): siRNA sense strand
gguuucaucuuuuggaguu

SEQ ID NO: 1311675 - RNA, 19 nt, Homo sapiens
  misc_RNA (1)...(19): siRNA sense strand
cgauacauuagcuguuuga

SEQ ID NO: 1311676 - RNA, 19 nt, Homo sapiens
  misc_RNA (1)...(19): siRNA sense strand
ccgauacauuagcuguuug

SEQ ID NO: 1311677 - RNA, 19 nt, Homo sapiens
  misc_RNA (1)...(19): siRNA sense strand
gcagcuccaagucagauca

SEQ ID NO: 1311678 - RNA, 19 nt, Homo sapiens
  misc_RNA (1)...(19): siRNA sense strand
caauguuggcggacagguu

SEQ ID NO: 1311679 - RNA, 19 nt, Homo sapiens
  misc_RNA (1)...(19): siRNA sense strand
auuaaugccagaagaagaa

SEQ ID NO: 1311680 - RNA, 19 nt, Homo sapiens
  misc_RNA (1)...(19): siRNA sense strand
uagaaaagguccacgaacu

SEQ ID NO: 1311681 - RNA, 19 nt, Homo sapiens
  misc_RNA (1)...(19): siRNA sense strand
cccacaauguuaaauucug

SEQ ID NO: 1311682 - RNA, 19 nt, Homo sapiens
  misc_RNA (1)...(19): siRNA sense strand
ccaccacccagccaugaug

SEQ ID NO: 1311683 - RNA, 19 nt, Homo sapiens
  misc_RNA (1)...(19): siRNA sense strand
augaugauccggauaagga

SEQ ID NO: 1311684 - RNA, 19 nt, Homo sapiens
  misc_RNA (1)...(19): siRNA sense strand
guacuaagguuucaucuuu

SEQ ID NO: 1311685 - RNA, 19 nt, Homo sapiens
  misc_RNA (1)...(19): siRNA sense strand
caagucagaucaugaagaa

SEQ ID NO: 1311686 - RNA, 19 nt, Homo sapiens
  misc_RNA (1)...(19): siRNA sense strand
ggacauucaugcccaauag

SEQ ID NO: 1311687 - RNA, 19 nt, Homo sapiens
  misc_RNA (1)...(19): siRNA sense strand
gauacaagcaauacaagua

SEQ ID NO: 1311688 - RNA, 19 nt, Homo sapiens
  misc_RNA (1)...(19): siRNA sense strand
caaaguagcaacaaauauc

SEQ ID NO: 1311689 - RNA, 19 nt, Homo sapiens
  misc_RNA (1)...(19): siRNA sense strand
gcacagagccccacaaugu

SEQ ID NO: 1311690 - RNA, 19 nt, Homo sapiens
  misc_RNA (1)...(19): siRNA sense strand
gaccauaacccuucuucuu

SEQ ID NO: 1311691 - RNA, 19 nt, Homo sapiens
  misc_RNA (1)...(19): siRNA sense strand
ggacaaggacgcgaucuau

SEQ ID NO: 1311692 - RNA, 19 nt, Homo sapiens
  misc_RNA (1)...(19): siRNA sense strand
gcuggacaauuugaugaua

SEQ ID NO: 1311693 - RNA, 19 nt, Homo sapiens
  misc_RNA (1)...(19): siRNA sense strand
caauacaaguacuaagguu

SEQ ID NO: 1311694 - RNA, 19 nt, Homo sapiens
  misc_RNA (1)...(19): siRNA sense strand
ccaucgaccucgucauuga

SEQ ID NO: 1311695 - RNA, 19 nt, Homo sapiens
  misc_RNA (1)...(19): siRNA sense strand
gaugauacaagcaauacaa

SEQ ID NO: 1311696 - RNA, 19 nt, Homo sapiens
  misc_RNA (1)...(19): siRNA sense strand
cccacacccuacucaauua

SEQ ID NO: 1311697 - RNA, 19 nt, Homo sapiens
  misc_RNA (1)...(19): siRNA sense strand
guacaggugacgaugauga

SEQ ID NO: 1311698 - RNA, 19 nt, Homo sapiens
  misc_RNA (1)...(19): siRNA sense strand
ccacaauguuaaauucugu

SEQ ID NO: 1311699 - RNA, 19 nt, Homo sapiens
  misc_RNA (1)...(19): siRNA sense strand
cccaaugcauucauauuug

SEQ ID NO: 1311700 - RNA, 19 nt, Homo sapiens
  misc_RNA (1)...(19): siRNA sense strand
ccaaggagcagcauauagu

SEQ ID NO: 1311701 - RNA, 19 nt, Homo sapiens
  misc_RNA (1)...(19): siRNA sense strand
acgaugagcugccccauua

SEQ ID NO: 1311702 - RNA, 19 nt, Homo sapiens
  misc_RNA (1)...(19): siRNA sense strand
agacaacaguguagcuuca

SEQ ID NO: 1311703 - RNA, 19 nt, Homo sapiens
  misc_RNA (1)...(19): siRNA sense strand
gagcuggacaauuugauga

SEQ ID NO: 1311704 - RNA, 19 nt, Homo sapiens
  misc_RNA (1)...(19): siRNA sense strand
gagccaaggagcagcauau

SEQ ID NO: 1311705 - RNA, 19 nt, Homo sapiens
  misc_RNA (1)...(19): siRNA sense strand
gcggacagguuauggacau

SEQ ID NO: 1311706 - RNA, 19 nt, Homo sapiens
  misc_RNA (1)...(19): siRNA sense strand
gcccaucgaccucgucauu

SEQ ID NO: 1311707 - RNA, 19 nt, Homo sapiens
  misc_RNA (1)...(19): siRNA sense strand
ccaaaguagcaacaaauau

SEQ ID NO: 1311708 - RNA, 19 nt, Homo sapiens
  misc_RNA (1)...(19): siRNA sense strand
gcaauacaaguacuaaggu

SEQ ID NO: 1311709 - RNA, 19 nt, Homo sapiens
  misc_RNA (1)...(19): siRNA sense strand
gacagguuauggacauuca

SEQ ID NO: 1311710 - RNA, 19 nt, Homo sapiens
  misc_RNA (1)...(19): siRNA sense strand
uaguacagcccaugauuga

SEQ ID NO: 1311711 - RNA, 19 nt, Homo sapiens
  misc_RNA (1)...(19): siRNA sense strand
caaaucucgcugaccauaa

SEQ ID NO: 1311712 - RNA, 19 nt, Homo sapiens
  misc_RNA (1)...(19): siRNA sense strand
gcucuggucuuugagaagu

SEQ ID NO: 1311713 - RNA, 19 nt, Homo sapiens
  misc_RNA (1)...(19): siRNA sense strand
cccaaaguagcaacaaaua

SEQ ID NO: 1311714 - RNA, 19 nt, Homo sapiens
  misc_RNA (1)...(19): siRNA sense strand
gguccuaugggaaugagua

SEQ ID NO: 1311715 - RNA, 19 nt, Homo sapiens
  misc_RNA (1)...(19): siRNA sense strand
caagcaauacaaguacuaa

SEQ ID NO: 1311716 - RNA, 19 nt, Homo sapiens
  misc_RNA (1)...(19): siRNA sense strand
aauguuggcggacagguua

SEQ ID NO: 1311717 - RNA, 19 nt, Homo sapiens
  misc_RNA (1)...(19): siRNA sense strand
ccaaugcauucauauuugc

SEQ ID NO: 1311718 - RNA, 19 nt, Homo sapiens
  misc_RNA (1)...(19): siRNA sense strand
acaaauaucaugagagcau

SEQ ID NO: 1311719 - RNA, 19 nt, Homo sapiens
  misc_RNA (1)...(19): siRNA sense strand
acaaaucucgcugaccaua

SEQ ID NO: 1311720 - RNA, 19 nt, Homo sapiens
  misc_RNA (1)...(19): siRNA sense strand
acacccuacucaauuaaga

SEQ ID NO: 1311721 - RNA, 19 nt, Homo sapiens
  misc_RNA (1)...(19): siRNA sense strand
gaacugugcgauaacuucu

SEQ ID NO: 1311722 - RNA, 19 nt, Homo sapiens
  misc_RNA (1)...(19): siRNA sense strand
ccuacucaauuaagacaug

SEQ ID NO: 1311723 - RNA, 19 nt, Homo sapiens
  misc_RNA (1)...(19): siRNA sense strand
gacaaggacgcgaucuaug

SEQ ID NO: 1311724 - RNA, 19 nt, Homo sapiens
  misc_RNA (1)...(19): siRNA sense strand
ccacacccuacucaauuaa

SEQ ID NO: 1311725 - RNA, 19 nt, Homo sapiens
  misc_RNA (1)...(19): siRNA sense strand
uccacgaacugugcgauaa

SEQ ID NO: 1311726 - RNA, 19 nt, Homo sapiens
  misc_RNA (1)...(19): siRNA sense strand
gaauaguacagcccaugau

SEQ ID NO: 1311727 - RNA, 19 nt, Homo sapiens
  misc_RNA (1)...(19): siRNA sense strand
ccaagucagaucaugaaga

SEQ ID NO: 1311728 - RNA, 19 nt, Homo sapiens
  misc_RNA (1)...(19): siRNA sense strand
gcuccaagucagaucauga

SEQ ID NO: 1311729 - RNA, 19 nt, Homo sapiens
  misc_RNA (1)...(19): siRNA sense strand
gggacaaggacgcgaucua

SEQ ID NO: 1311730 - RNA, 19 nt, Homo sapiens
  misc_RNA (1)...(19): siRNA sense strand
guagcaacaaauaucauga

SEQ ID NO: 1311731 - RNA, 19 nt, Homo sapiens
  misc_RNA (1)...(19): siRNA sense strand
accgauacauuagcuguuu

SEQ ID NO: 1311732 - RNA, 19 nt, Homo sapiens
  misc_RNA (1)...(19): siRNA sense strand
guuuauuaaugccagaaga

SEQ ID NO: 1311733 - RNA, 19 nt, Homo sapiens
  misc_RNA (1)...(19): siRNA sense strand
gcaaggggaugguuuagac

SEQ ID NO: 1311734 - RNA, 19 nt, Homo sapiens
  misc_RNA (1)...(19): siRNA sense strand
uaacuucugccaccgauac

SEQ ID NO: 1311735 - RNA, 19 nt, Homo sapiens
  misc_RNA (1)...(19): siRNA sense strand
ggacagguuauggacauuc

SEQ ID NO: 1311736 - RNA, 19 nt, Homo sapiens
  misc_RNA (1)...(19): siRNA sense strand
aauaguacagcccaugauu

SEQ ID NO: 1311737 - RNA, 19 nt, Homo sapiens
  misc_RNA (1)...(19): siRNA sense strand
acaaggacgcgaucuaugg

SEQ ID NO: 1311738 - RNA, 19 nt, Homo sapiens
  misc_RNA (1)...(19): siRNA sense strand
aaaucucgcugaccauaac

SEQ ID NO: 1311739 - RNA, 19 nt, Homo sapiens
  misc_RNA (1)...(19): siRNA sense strand
caaguacuaagguuucauc

SEQ ID NO: 1311740 - RNA, 19 nt, Homo sapiens
  misc_RNA (1)...(19): siRNA sense strand
gccagaagaagaauaguac

SEQ ID NO: 1311741 - RNA, 19 nt, Homo sapiens
  misc_RNA (1)...(19): siRNA sense strand
accauaacccuucuucuug

SEQ ID NO: 1311742 - RNA, 19 nt, Homo sapiens
  misc_RNA (1)...(19): siRNA sense strand
cgaacugugcgauaacuuc

SEQ ID NO: 1311743 - RNA, 19 nt, Homo sapiens
  misc_RNA (1)...(19): siRNA sense strand
ucaggcuccuccacaaauc

SEQ ID NO: 1311744 - RNA, 19 nt, Homo sapiens
  misc_RNA (1)...(19): siRNA sense strand
uguguuggauggucagcaa

SEQ ID NO: 1311745 - RNA, 19 nt, Homo sapiens
  misc_RNA (1)...(19): siRNA sense strand
gucagaucaugaagaacuu

SEQ ID NO: 1311746 - RNA, 19 nt, Homo sapiens
  misc_RNA (1)...(19): siRNA sense strand
agaauaguacagcccauga

SEQ ID NO: 1311747 - RNA, 19 nt, Homo sapiens
  misc_RNA (1)...(19): siRNA sense strand
acaagcaauacaaguacua

SEQ ID NO: 1311748 - RNA, 19 nt, Homo sapiens
  misc_RNA (1)...(19): siRNA sense strand
acgaugaugauccggauaa

SEQ ID NO: 1311749 - RNA, 19 nt, Homo sapiens
  misc_RNA (1)...(19): siRNA sense strand
ugccagaagaagaauagua

SEQ ID NO: 1311750 - RNA, 19 nt, Homo sapiens
  misc_RNA (1)...(19): siRNA sense strand
ggucuucgccaagcagguu

SEQ ID NO: 1311751 - RNA, 19 nt, Homo sapiens
  misc_RNA (1)...(19): siRNA sense strand
gcggagacaacagcaguga

SEQ ID NO: 1311752 - RNA, 19 nt, Homo sapiens
  misc_RNA (1)...(19): siRNA sense strand
auacaaguacuaagguuuc

SEQ ID NO: 1311753 - RNA, 19 nt, Homo sapiens
  misc_RNA (1)...(19): siRNA sense strand
agcaacaaauaucaugaga

SEQ ID NO: 1311754 - RNA, 19 nt, Homo sapiens
  misc_RNA (1)...(19): siRNA sense strand
gaaaagguccacgaacugu

SEQ ID NO: 1311755 - RNA, 19 nt, Homo sapiens
  misc_RNA (1)...(19): siRNA sense strand
caaggagcagcauauaguc

SEQ ID NO: 1311756 - RNA, 19 nt, Homo sapiens
  misc_RNA (1)...(19): siRNA sense strand
gccaaggagcagcauauag

SEQ ID NO: 1311757 - RNA, 19 nt, Homo sapiens
  misc_RNA (1)...(19): siRNA sense strand
uggacaauuugaugauaca

SEQ ID NO: 1311758 - RNA, 19 nt, Homo sapiens
  misc_RNA (1)...(19): siRNA sense strand
gguuucaucuuuuggaguu

SEQ ID NO: 1311759 - RNA, 19 nt, Homo sapiens
  misc_RNA (1)...(19): siRNA sense strand
cgauacauuagcuguuuga

SEQ ID NO: 1311760 - RNA, 19 nt, Homo sapiens
  misc_RNA (1)...(19): siRNA sense strand
ccgauacauuagcuguuug

SEQ ID NO: 1311761 - RNA, 19 nt, Homo sapiens
  misc_RNA (1)...(19): siRNA sense strand
gcagcuccaagucagauca

SEQ ID NO: 1311762 - RNA, 19 nt, Homo sapiens
  misc_RNA (1)...(19): siRNA sense strand
caauguuggcggacagguu

SEQ ID NO: 1311763 - RNA, 19 nt, Homo sapiens
  misc_RNA (1)...(19): siRNA sense strand
auuaaugccagaagaagaa

SEQ ID NO: 1311764 - RNA, 19 nt, Homo sapiens
  misc_RNA (1)...(19): siRNA sense strand
uagaaaagguccacgaacu

SEQ ID NO: 1311765 - RNA, 19 nt, Homo sapiens
  misc_RNA (1)...(19): siRNA sense strand
cccacaauguuaaauucug

SEQ ID NO: 1311766 - RNA, 19 nt, Homo sapiens
  misc_RNA (1)...(19): siRNA sense strand
ccaccacccagccaugaug

SEQ ID NO: 1311767 - RNA, 19 nt, Homo sapiens
  misc_RNA (1)...(19): siRNA sense strand
augaugauccggauaagga

SEQ ID NO: 1311768 - RNA, 19 nt, Homo sapiens
  misc_RNA (1)...(19): siRNA sense strand
guacuaagguuucaucuuu

SEQ ID NO: 1311769 - RNA, 19 nt, Homo sapiens
  misc_RNA (1)...(19): siRNA sense strand
caagucagaucaugaagaa

SEQ ID NO: 1311770 - RNA, 19 nt, Homo sapiens
  misc_RNA (1)...(19): siRNA sense strand
gauacaagcaauacaagua

SEQ ID NO: 1311771 - RNA, 19 nt, Homo sapiens
  misc_RNA (1)...(19): siRNA sense strand
caaaguagcaacaaauauc

SEQ ID NO: 1311772 - RNA, 19 nt, Homo sapiens
  misc_RNA (1)...(19): siRNA sense strand
gaccauaacccuucuucuu

SEQ ID NO: 1311773 - RNA, 19 nt, Homo sapiens
  misc_RNA (1)...(19): siRNA sense strand
ggacaaggacgcgaucuau

SEQ ID NO: 1311774 - RNA, 19 nt, Homo sapiens
  misc_RNA (1)...(19): siRNA sense strand
gcuggacaauuugaugaua

SEQ ID NO: 1311775 - RNA, 19 nt, Homo sapiens
  misc_RNA (1)...(19): siRNA sense strand
caauacaaguacuaagguu

SEQ ID NO: 1311776 - RNA, 19 nt, Homo sapiens
  misc_RNA (1)...(19): siRNA sense strand
ccaucgaccucgucauuga

SEQ ID NO: 1311777 - RNA, 19 nt, Homo sapiens
  misc_RNA (1)...(19): siRNA sense strand
gaugauacaagcaauacaa

SEQ ID NO: 1311778 - RNA, 19 nt, Homo sapiens
  misc_RNA (1)...(19): siRNA sense strand
guacaggugacgaugauga

SEQ ID NO: 1311779 - RNA, 19 nt, Homo sapiens
  misc_RNA (1)...(19): siRNA sense strand
ccaaggagcagcauauagu

SEQ ID NO: 1311780 - RNA, 19 nt, Homo sapiens
  misc_RNA (1)...(19): siRNA sense strand
acgaugagcugccccauua

SEQ ID NO: 1311781 - RNA, 19 nt, Homo sapiens
  misc_RNA (1)...(19): siRNA sense strand
agacaacaguguagcuuca

SEQ ID NO: 1311782 - RNA, 19 nt, Homo sapiens
  misc_RNA (1)...(19): siRNA sense strand
gagcuggacaauuugauga

SEQ ID NO: 1311783 - RNA, 19 nt, Homo sapiens
  misc_RNA (1)...(19): siRNA sense strand
gagccaaggagcagcauau

SEQ ID NO: 1311784 - RNA, 19 nt, Homo sapiens
  misc_RNA (1)...(19): siRNA sense strand
gcccaucgaccucgucauu

SEQ ID NO: 1311785 - RNA, 19 nt, Homo sapiens
  misc_RNA (1)...(19): siRNA sense strand
ccaaaguagcaacaaauau

SEQ ID NO: 1311786 - RNA, 19 nt, Homo sapiens
  misc_RNA (1)...(19): siRNA sense strand
gcucuggucuuugagaagu

SEQ ID NO: 1311787 - RNA, 19 nt, Homo sapiens
  misc_RNA (1)...(19): siRNA sense strand
uaguacagcccaugauuga

SEQ ID NO: 1311788 - RNA, 19 nt, Homo sapiens
  misc_RNA (1)...(19): siRNA sense strand
caaaucucgcugaccauaa

SEQ ID NO: 1311789 - RNA, 19 nt, Homo sapiens
  misc_RNA (1)...(19): siRNA sense strand
gcaauacaaguacuaaggu

SEQ ID NO: 1311790 - RNA, 19 nt, Homo sapiens
  misc_RNA (1)...(19): siRNA sense strand
cccaaaguagcaacaaaua

SEQ ID NO: 1311791 - RNA, 19 nt, Homo sapiens
  misc_RNA (1)...(19): siRNA sense strand
caagcaauacaaguacuaa

SEQ ID NO: 1311792 - RNA, 19 nt, Homo sapiens
  misc_RNA (1)...(19): siRNA sense strand
acaaauaucaugagagcau

SEQ ID NO: 1311793 - RNA, 19 nt, Homo sapiens
  misc_RNA (1)...(19): siRNA sense strand
acaaaucucgcugaccaua

SEQ ID NO: 1311794 - RNA, 19 nt, Homo sapiens
  misc_RNA (1)...(19): siRNA sense strand
gaacugugcgauaacuucu

SEQ ID NO: 1311795 - RNA, 19 nt, Homo sapiens
  misc_RNA (1)...(19): siRNA sense strand
gacaaggacgcgaucuaug

SEQ ID NO: 1311796 - RNA, 19 nt, Homo sapiens
  misc_RNA (1)...(19): siRNA sense strand
uccacgaacugugcgauaa

SEQ ID NO: 1311797 - RNA, 19 nt, Homo sapiens
  misc_RNA (1)...(19): siRNA sense strand
gaauaguacagcccaugau

SEQ ID NO: 1311798 - RNA, 19 nt, Homo sapiens
  misc_RNA (1)...(19): siRNA sense strand
ccaagucagaucaugaaga

SEQ ID NO: 1311799 - RNA, 19 nt, Homo sapiens
  misc_RNA (1)...(19): siRNA sense strand
gcuccaagucagaucauga

SEQ ID NO: 1311800 - RNA, 19 nt, Homo sapiens
  misc_RNA (1)...(19): siRNA sense strand
gggacaaggacgcgaucua

SEQ ID NO: 1311801 - RNA, 19 nt, Homo sapiens
  misc_RNA (1)...(19): siRNA sense strand
guagcaacaaauaucauga

SEQ ID NO: 1311802 - RNA, 19 nt, Homo sapiens
  misc_RNA (1)...(19): siRNA sense strand
accgauacauuagcuguuu

SEQ ID NO: 1311803 - RNA, 19 nt, Homo sapiens
  misc_RNA (1)...(19): siRNA sense strand
guuuauuaaugccagaaga

SEQ ID NO: 1311804 - RNA, 19 nt, Homo sapiens
  misc_RNA (1)...(19): siRNA sense strand
gcaaggggaugguuuagac

SEQ ID NO: 1311805 - RNA, 19 nt, Homo sapiens
  misc_RNA (1)...(19): siRNA sense strand
uaacuucugccaccgauac

SEQ ID NO: 1311806 - RNA, 19 nt, Homo sapiens
  misc_RNA (1)...(19): siRNA sense strand
aauaguacagcccaugauu

SEQ ID NO: 1311807 - RNA, 19 nt, Homo sapiens
  misc_RNA (1)...(19): siRNA sense strand
acaaggacgcgaucuaugg

SEQ ID NO: 1311808 - RNA, 19 nt, Homo sapiens
  misc_RNA (1)...(19): siRNA sense strand
aaaucucgcugaccauaac

SEQ ID NO: 1311809 - RNA, 19 nt, Homo sapiens
  misc_RNA (1)...(19): siRNA sense strand
caaguacuaagguuucauc

SEQ ID NO: 1311810 - RNA, 19 nt, Homo sapiens
  misc_RNA (1)...(19): siRNA sense strand
gccagaagaagaauaguac

SEQ ID NO: 1311811 - RNA, 19 nt, Homo sapiens
  misc_RNA (1)...(19): siRNA sense strand
accauaacccuucuucuug

SEQ ID NO: 1311812 - RNA, 19 nt, Homo sapiens
  misc_RNA (1)...(19): siRNA sense strand
cgaacugugcgauaacuuc

SEQ ID NO: 1311813 - RNA, 19 nt, Homo sapiens
  misc_RNA (1)...(19): siRNA sense strand
ucaggcuccuccacaaauc

SEQ ID NO: 1311814 - RNA, 19 nt, Homo sapiens
  misc_RNA (1)...(19): siRNA sense strand
uguguuggauggucagcaa

SEQ ID NO: 1311815 - RNA, 19 nt, Homo sapiens
  misc_RNA (1)...(19): siRNA sense strand
acaagcaauacaaguacua

SEQ ID NO: 1311816 - RNA, 19 nt, Homo sapiens
  misc_RNA (1)...(19): siRNA sense strand
agaauaguacagcccauga

SEQ ID NO: 1311817 - RNA, 19 nt, Homo sapiens
  misc_RNA (1)...(19): siRNA sense strand
gucagaucaugaagaacuu

SEQ ID NO: 1311818 - RNA, 19 nt, Homo sapiens
  misc_RNA (1)...(19): siRNA sense strand
ggucuucgccaagcagguu

SEQ ID NO: 1311819 - RNA, 19 nt, Homo sapiens
  misc_RNA (1)...(19): siRNA sense strand
ugccagaagaagaauagua

SEQ ID NO: 1311820 - RNA, 19 nt, Homo sapiens
  misc_RNA (1)...(19): siRNA sense strand
acgaugaugauccggauaa

SEQ ID NO: 1311821 - RNA, 19 nt, Homo sapiens
  misc_RNA (1)...(19): siRNA sense strand
auacaaguacuaagguuuc

SEQ ID NO: 1311822 - RNA, 19 nt, Homo sapiens
  misc_RNA (1)...(19): siRNA sense strand
agcaacaaauaucaugaga

SEQ ID NO: 1311823 - RNA, 19 nt, Homo sapiens
  misc_RNA (1)...(19): siRNA sense strand
gcggagacaacagcaguga

SEQ ID NO: 1311824 - RNA, 19 nt, Homo sapiens
  misc_RNA (1)...(19): siRNA sense strand
gguuucaucuuuuggaguu

SEQ ID NO: 1311825 - RNA, 19 nt, Homo sapiens
  misc_RNA (1)...(19): siRNA sense strand
caaggagcagcauauaguc

SEQ ID NO: 1311826 - RNA, 19 nt, Homo sapiens
  misc_RNA (1)...(19): siRNA sense strand
gccaaggagcagcauauag

SEQ ID NO: 1311827 - RNA, 19 nt, Homo sapiens
  misc_RNA (1)...(19): siRNA sense strand
cgauacauuagcuguuuga

SEQ ID NO: 1311828 - RNA, 19 nt, Homo sapiens
  misc_RNA (1)...(19): siRNA sense strand
ccgauacauuagcuguuug

SEQ ID NO: 1311829 - RNA, 19 nt, Homo sapiens
  misc_RNA (1)...(19): siRNA sense strand
uggacaauuugaugauaca

SEQ ID NO: 1311830 - RNA, 19 nt, Homo sapiens
  misc_RNA (1)...(19): siRNA sense strand
gaaaagguccacgaacugu

SEQ ID NO: 1311831 - RNA, 19 nt, Homo sapiens
  misc_RNA (1)...(19): siRNA sense strand
gcagcuccaagucagauca

SEQ ID NO: 1311832 - RNA, 19 nt, Homo sapiens
  misc_RNA (1)...(19): siRNA sense strand
auuaaugccagaagaagaa

SEQ ID NO: 1311833 - RNA, 19 nt, Homo sapiens
  misc_RNA (1)...(19): siRNA sense strand
uagaaaagguccacgaacu

SEQ ID NO: 1311834 - RNA, 19 nt, Homo sapiens
  misc_RNA (1)...(19): siRNA sense strand
augaugauccggauaagga

SEQ ID NO: 1311835 - RNA, 19 nt, Homo sapiens
  misc_RNA (1)...(19): siRNA sense strand
guacuaagguuucaucuuu

SEQ ID NO: 1311836 - RNA, 19 nt, Homo sapiens
  misc_RNA (1)...(19): siRNA sense strand
caagucagaucaugaagaa

SEQ ID NO: 1311837 - RNA, 19 nt, Homo sapiens
  misc_RNA (1)...(19): siRNA sense strand
gauacaagcaauacaagua

SEQ ID NO: 1311838 - RNA, 19 nt, Homo sapiens
  misc_RNA (1)...(19): siRNA sense strand
caaaguagcaacaaauauc

SEQ ID NO: 1311839 - RNA, 19 nt, Homo sapiens
  misc_RNA (1)...(19): siRNA sense strand
gaccauaacccuucuucuu

SEQ ID NO: 1311840 - RNA, 19 nt, Homo sapiens
  misc_RNA (1)...(19): siRNA sense strand
ggacaaggacgcgaucuau

SEQ ID NO: 1311841 - RNA, 19 nt, Homo sapiens
  misc_RNA (1)...(19): siRNA sense strand
gcuggacaauuugaugaua

SEQ ID NO: 1311842 - RNA, 19 nt, Homo sapiens
  misc_RNA (1)...(19): siRNA sense strand
caauacaaguacuaagguu

SEQ ID NO: 1311843 - RNA, 19 nt, Homo sapiens
  misc_RNA (1)...(19): siRNA sense strand
ccaucgaccucgucauuga

SEQ ID NO: 1311844 - RNA, 19 nt, Homo sapiens
  misc_RNA (1)...(19): siRNA sense strand
gaugauacaagcaauacaa

SEQ ID NO: 1311845 - RNA, 19 nt, Homo sapiens
  misc_RNA (1)...(19): siRNA sense strand
guacaggugacgaugauga

SEQ ID NO: 1311846 - RNA, 19 nt, Homo sapiens
  misc_RNA (1)...(19): siRNA sense strand
ccaaggagcagcauauagu

SEQ ID NO: 1311847 - RNA, 19 nt, Homo sapiens
  misc_RNA (1)...(19): siRNA sense strand
agacaacaguguagcuuca

SEQ ID NO: 1311848 - RNA, 19 nt, Homo sapiens
  misc_RNA (1)...(19): siRNA sense strand
gagcuggacaauuugauga

SEQ ID NO: 1311849 - RNA, 19 nt, Homo sapiens
  misc_RNA (1)...(19): siRNA sense strand
gagccaaggagcagcauau

SEQ ID NO: 1311850 - RNA, 19 nt, Homo sapiens
  misc_RNA (1)...(19): siRNA sense strand
gcccaucgaccucgucauu

SEQ ID NO: 1311851 - RNA, 19 nt, Homo sapiens
  misc_RNA (1)...(19): siRNA sense strand
ccaaaguagcaacaaauau

SEQ ID NO: 1311852 - RNA, 19 nt, Homo sapiens
  misc_RNA (1)...(19): siRNA sense strand
gcucuggucuuugagaagu

SEQ ID NO: 1311853 - RNA, 19 nt, Homo sapiens
  misc_RNA (1)...(19): siRNA sense strand
uaguacagcccaugauuga

SEQ ID NO: 1311854 - RNA, 19 nt, Homo sapiens
  misc_RNA (1)...(19): siRNA sense strand
caaaucucgcugaccauaa

SEQ ID NO: 1311855 - RNA, 19 nt, Homo sapiens
  misc_RNA (1)...(19): siRNA sense strand
gcaauacaaguacuaaggu

SEQ ID NO: 1311856 - RNA, 19 nt, Homo sapiens
  misc_RNA (1)...(19): siRNA sense strand
cccaaaguagcaacaaaua

SEQ ID NO: 1311857 - RNA, 19 nt, Homo sapiens
  misc_RNA (1)...(19): siRNA sense strand
caagcaauacaaguacuaa

SEQ ID NO: 1311858 - RNA, 19 nt, Homo sapiens
  misc_RNA (1)...(19): siRNA sense strand
acaaauaucaugagagcau

SEQ ID NO: 1311859 - RNA, 19 nt, Homo sapiens
  misc_RNA (1)...(19): siRNA sense strand
acaaaucucgcugaccaua

SEQ ID NO: 1311860 - RNA, 19 nt, Homo sapiens
  misc_RNA (1)...(19): siRNA sense strand
gaacugugcgauaacuucu

SEQ ID NO: 1311861 - RNA, 19 nt, Homo sapiens
  misc_RNA (1)...(19): siRNA sense strand
gacaaggacgcgaucuaug

SEQ ID NO: 1311862 - RNA, 19 nt, Homo sapiens
  misc_RNA (1)...(19): siRNA sense strand
uccacgaacugugcgauaa

SEQ ID NO: 1311863 - RNA, 19 nt, Homo sapiens
  misc_RNA (1)...(19): siRNA sense strand
gaauaguacagcccaugau

SEQ ID NO: 1311864 - RNA, 19 nt, Homo sapiens
  misc_RNA (1)...(19): siRNA sense strand
ccaagucagaucaugaaga

SEQ ID NO: 1311865 - RNA, 19 nt, Homo sapiens
  misc_RNA (1)...(19): siRNA sense strand
gcuccaagucagaucauga

SEQ ID NO: 1311866 - RNA, 19 nt, Homo sapiens
  misc_RNA (1)...(19): siRNA sense strand
gggacaaggacgcgaucua

SEQ ID NO: 1311867 - RNA, 19 nt, Homo sapiens
  misc_RNA (1)...(19): siRNA sense strand
guagcaacaaauaucauga

SEQ ID NO: 1311868 - RNA, 19 nt, Homo sapiens
  misc_RNA (1)...(19): siRNA sense strand
accgauacauuagcuguuu

SEQ ID NO: 1311869 - RNA, 19 nt, Homo sapiens
  misc_RNA (1)...(19): siRNA sense strand
guuuauuaaugccagaaga

SEQ ID NO: 1311870 - RNA, 19 nt, Homo sapiens
  misc_RNA (1)...(19): siRNA sense strand
gcaaggggaugguuuagac

SEQ ID NO: 1311871 - RNA, 19 nt, Homo sapiens
  misc_RNA (1)...(19): siRNA sense strand
uaacuucugccaccgauac

SEQ ID NO: 1311872 - RNA, 19 nt, Homo sapiens
  misc_RNA (1)...(19): siRNA sense strand
aauaguacagcccaugauu

SEQ ID NO: 1311873 - RNA, 19 nt, Homo sapiens
  misc_RNA (1)...(19): siRNA sense strand
aaaucucgcugaccauaac

SEQ ID NO: 1311874 - RNA, 19 nt, Homo sapiens
  misc_RNA (1)...(19): siRNA sense strand
acaaggacgcgaucuaugg

SEQ ID NO: 1311875 - RNA, 19 nt, Homo sapiens
  misc_RNA (1)...(19): siRNA sense strand
caaguacuaagguuucauc

SEQ ID NO: 1311876 - RNA, 19 nt, Homo sapiens
  misc_RNA (1)...(19): siRNA sense strand
gccagaagaagaauaguac

SEQ ID NO: 1311877 - RNA, 19 nt, Homo sapiens
  misc_RNA (1)...(19): siRNA sense strand
accauaacccuucuucuug

SEQ ID NO: 1311878 - RNA, 19 nt, Homo sapiens
  misc_RNA (1)...(19): siRNA sense strand
cgaacugugcgauaacuuc

SEQ ID NO: 1311879 - RNA, 19 nt, Homo sapiens
  misc_RNA (1)...(19): siRNA sense strand
ucaggcuccuccacaaauc

SEQ ID NO: 1311880 - RNA, 19 nt, Homo sapiens
  misc_RNA (1)...(19): siRNA sense strand
uguguuggauggucagcaa

SEQ ID NO: 1311881 - RNA, 19 nt, Homo sapiens
  misc_RNA (1)...(19): siRNA sense strand
acaagcaauacaaguacua

SEQ ID NO: 1311882 - RNA, 19 nt, Homo sapiens
  misc_RNA (1)...(19): siRNA sense strand
agaauaguacagcccauga

SEQ ID NO: 1311883 - RNA, 19 nt, Homo sapiens
  misc_RNA (1)...(19): siRNA sense strand
gucagaucaugaagaacuu

SEQ ID NO: 1311884 - RNA, 19 nt, Homo sapiens
  misc_RNA (1)...(19): siRNA sense strand
ggucuucgccaagcagguu

SEQ ID NO: 1311885 - RNA, 19 nt, Homo sapiens
  misc_RNA (1)...(19): siRNA sense strand
ugccagaagaagaauagua

SEQ ID NO: 1311886 - RNA, 19 nt, Homo sapiens
  misc_RNA (1)...(19): siRNA sense strand
acgaugaugauccggauaa

SEQ ID NO: 1311887 - RNA, 19 nt, Homo sapiens
  misc_RNA (1)...(19): siRNA sense strand
auacaaguacuaagguuuc

SEQ ID NO: 1311888 - RNA, 19 nt, Homo sapiens
  misc_RNA (1)...(19): siRNA sense strand
agcaacaaauaucaugaga

SEQ ID NO: 1311889 - RNA, 19 nt, Homo sapiens
  misc_RNA (1)...(19): siRNA sense strand
gcggagacaacagcaguga

SEQ ID NO: 1311890 - RNA, 19 nt, Homo sapiens
  misc_RNA (1)...(19): siRNA sense strand
gguuucaucuuuuggaguu

SEQ ID NO: 1311891 - RNA, 19 nt, Homo sapiens
  misc_RNA (1)...(19): siRNA sense strand
caaggagcagcauauaguc

SEQ ID NO: 1311892 - RNA, 19 nt, Homo sapiens
  misc_RNA (1)...(19): siRNA sense strand
gccaaggagcagcauauag

SEQ ID NO: 1311893 - RNA, 19 nt, Homo sapiens
  misc_RNA (1)...(19): siRNA sense strand
uggacaauuugaugauaca

SEQ ID NO: 1311894 - RNA, 19 nt, Homo sapiens
  misc_RNA (1)...(19): siRNA sense strand
cgauacauuagcuguuuga

SEQ ID NO: 1311895 - RNA, 19 nt, Homo sapiens
  misc_RNA (1)...(19): siRNA sense strand
ccgauacauuagcuguuug

SEQ ID NO: 1311896 - RNA, 19 nt, Homo sapiens
  misc_RNA (1)...(19): siRNA sense strand
gaaaagguccacgaacugu

SEQ ID NO: 1311897 - RNA, 19 nt, Homo sapiens
  misc_RNA (1)...(19): siRNA sense strand
gcagcuccaagucagauca

SEQ ID NO: 1311898 - RNA, 19 nt, Homo sapiens
  misc_RNA (1)...(19): siRNA sense strand
auuaaugccagaagaagaa

SEQ ID NO: 1311899 - RNA, 19 nt, Homo sapiens
  misc_RNA (1)...(19): siRNA sense strand
uagaaaagguccacgaacu

SEQ ID NO: 1311900 - RNA, 19 nt, Homo sapiens
  misc_RNA (1)...(19): siRNA sense strand
augaugauccggauaagga

SEQ ID NO: 1311901 - RNA, 19 nt, Homo sapiens
  misc_RNA (1)...(19): siRNA sense strand
guacuaagguuucaucuuu

SEQ ID NO: 1311902 - RNA, 19 nt, Homo sapiens
  misc_RNA (1)...(19): siRNA sense strand
caagucagaucaugaagaa

SEQ ID NO: 1311903 - RNA, 19 nt, Homo sapiens
  misc_RNA (1)...(19): siRNA sense strand
gauacaagcaauacaagua

SEQ ID NO: 1311904 - RNA, 19 nt, Homo sapiens
  misc_RNA (1)...(19): siRNA sense strand
caaaguagcaacaaauauc

SEQ ID NO: 1311905 - RNA, 19 nt, Homo sapiens
  misc_RNA (1)...(19): siRNA sense strand
gaccauaacccuucuucuu

SEQ ID NO: 1311906 - RNA, 19 nt, Homo sapiens
  misc_RNA (1)...(19): siRNA sense strand
gcuggacaauuugaugaua

SEQ ID NO: 1311907 - RNA, 19 nt, Homo sapiens
  misc_RNA (1)...(19): siRNA sense strand
caauacaaguacuaagguu

SEQ ID NO: 1311908 - RNA, 19 nt, Homo sapiens
  misc_RNA (1)...(19): siRNA sense strand
ccaucgaccucgucauuga

SEQ ID NO: 1311909 - RNA, 19 nt, Homo sapiens
  misc_RNA (1)...(19): siRNA sense strand
gaugauacaagcaauacaa

SEQ ID NO: 1311910 - RNA, 19 nt, Homo sapiens
  misc_RNA (1)...(19): siRNA sense strand
guacaggugacgaugauga

SEQ ID NO: 1311911 - RNA, 19 nt, Homo sapiens
  misc_RNA (1)...(19): siRNA sense strand
ccaaggagcagcauauagu

SEQ ID NO: 1311912 - RNA, 19 nt, Homo sapiens
  misc_RNA (1)...(19): siRNA sense strand
agacaacaguguagcuuca

SEQ ID NO: 1311913 - RNA, 19 nt, Homo sapiens
  misc_RNA (1)...(19): siRNA sense strand
gagcuggacaauuugauga

SEQ ID NO: 1311914 - RNA, 19 nt, Homo sapiens
  misc_RNA (1)...(19): siRNA sense strand
gagccaaggagcagcauau

SEQ ID NO: 1311915 - RNA, 19 nt, Homo sapiens
  misc_RNA (1)...(19): siRNA sense strand
gcccaucgaccucgucauu

SEQ ID NO: 1311916 - RNA, 19 nt, Homo sapiens
  misc_RNA (1)...(19): siRNA sense strand
ccaaaguagcaacaaauau

SEQ ID NO: 1311917 - RNA, 19 nt, Homo sapiens
  misc_RNA (1)...(19): siRNA sense strand
gcaauacaaguacuaaggu

SEQ ID NO: 1311918 - RNA, 19 nt, Homo sapiens
  misc_RNA (1)...(19): siRNA sense strand
uaguacagcccaugauuga

SEQ ID NO: 1311919 - RNA, 19 nt, Homo sapiens
  misc_RNA (1)...(19): siRNA sense strand
caaaucucgcugaccauaa

SEQ ID NO: 1311920 - RNA, 19 nt, Homo sapiens
  misc_RNA (1)...(19): siRNA sense strand
gcucuggucuuugagaagu

SEQ ID NO: 1311921 - RNA, 19 nt, Homo sapiens
  misc_RNA (1)...(19): siRNA sense strand
cccaaaguagcaacaaaua

SEQ ID NO: 1311922 - RNA, 19 nt, Homo sapiens
  misc_RNA (1)...(19): siRNA sense strand
caagcaauacaaguacuaa

SEQ ID NO: 1311923 - RNA, 19 nt, Homo sapiens
  misc_RNA (1)...(19): siRNA sense strand
acaaauaucaugagagcau

SEQ ID NO: 1311924 - RNA, 19 nt, Homo sapiens
  misc_RNA (1)...(19): siRNA sense strand
acaaaucucgcugaccaua

SEQ ID NO: 1311925 - RNA, 19 nt, Homo sapiens
  misc_RNA (1)...(19): siRNA sense strand
gaacugugcgauaacuucu

SEQ ID NO: 1311926 - RNA, 19 nt, Homo sapiens
  misc_RNA (1)...(19): siRNA sense strand
uccacgaacugugcgauaa

SEQ ID NO: 1311927 - RNA, 19 nt, Homo sapiens
  misc_RNA (1)...(19): siRNA sense strand
gaauaguacagcccaugau

SEQ ID NO: 1311928 - RNA, 19 nt, Homo sapiens
  misc_RNA (1)...(19): siRNA sense strand
ccaagucagaucaugaaga

SEQ ID NO: 1311929 - RNA, 19 nt, Homo sapiens
  misc_RNA (1)...(19): siRNA sense strand
gcuccaagucagaucauga

SEQ ID NO: 1311930 - RNA, 19 nt, Homo sapiens
  misc_RNA (1)...(19): siRNA sense strand
guagcaacaaauaucauga

SEQ ID NO: 1311931 - RNA, 19 nt, Homo sapiens
  misc_RNA (1)...(19): siRNA sense strand
accgauacauuagcuguuu

SEQ ID NO: 1311932 - RNA, 19 nt, Homo sapiens
  misc_RNA (1)...(19): siRNA sense strand
guuuauuaaugccagaaga

SEQ ID NO: 1311933 - RNA, 19 nt, Homo sapiens
  misc_RNA (1)...(19): siRNA sense strand
gcaaggggaugguuuagac

SEQ ID NO: 1311934 - RNA, 19 nt, Homo sapiens
  misc_RNA (1)...(19): siRNA sense strand
uaacuucugccaccgauac

SEQ ID NO: 1311935 - RNA, 19 nt, Homo sapiens
  misc_RNA (1)...(19): siRNA sense strand
aauaguacagcccaugauu

SEQ ID NO: 1311936 - RNA, 19 nt, Homo sapiens
  misc_RNA (1)...(19): siRNA sense strand
aaaucucgcugaccauaac

SEQ ID NO: 1311937 - RNA, 19 nt, Homo sapiens
  misc_RNA (1)...(19): siRNA sense strand
caaguacuaagguuucauc

SEQ ID NO: 1311938 - RNA, 19 nt, Homo sapiens
  misc_RNA (1)...(19): siRNA sense strand
gccagaagaagaauaguac

SEQ ID NO: 1311939 - RNA, 19 nt, Homo sapiens
  misc_RNA (1)...(19): siRNA sense strand
accauaacccuucuucuug

SEQ ID NO: 1311940 - RNA, 19 nt, Homo sapiens
  misc_RNA (1)...(19): siRNA sense strand
cgaacugugcgauaacuuc

SEQ ID NO: 1311941 - RNA, 19 nt, Homo sapiens
  misc_RNA (1)...(19): siRNA sense strand
ucaggcuccuccacaaauc

SEQ ID NO: 1311942 - RNA, 19 nt, Homo sapiens
  misc_RNA (1)...(19): siRNA sense strand
uguguuggauggucagcaa

SEQ ID NO: 1311943 - RNA, 19 nt, Homo sapiens
  misc_RNA (1)...(19): siRNA sense strand
gucagaucaugaagaacuu

SEQ ID NO: 1311944 - RNA, 19 nt, Homo sapiens
  misc_RNA (1)...(19): siRNA sense strand
agaauaguacagcccauga

SEQ ID NO: 1311945 - RNA, 19 nt, Homo sapiens
  misc_RNA (1)...(19): siRNA sense strand
acaagcaauacaaguacua

SEQ ID NO: 1311946 - RNA, 19 nt, Homo sapiens
  misc_RNA (1)...(19): siRNA sense strand
acgaugaugauccggauaa

SEQ ID NO: 1311947 - RNA, 19 nt, Homo sapiens
  misc_RNA (1)...(19): siRNA sense strand
ggucuucgccaagcagguu

SEQ ID NO: 1311948 - RNA, 19 nt, Homo sapiens
  misc_RNA (1)...(19): siRNA sense strand
ugccagaagaagaauagua

SEQ ID NO: 1311949 - RNA, 19 nt, Homo sapiens
  misc_RNA (1)...(19): siRNA sense strand
auacaaguacuaagguuuc

SEQ ID NO: 1311950 - RNA, 19 nt, Homo sapiens
  misc_RNA (1)...(19): siRNA sense strand
agcaacaaauaucaugaga

SEQ ID NO: 1311951 - RNA, 19 nt, Homo sapiens
  misc_RNA (1)...(19): siRNA sense strand
gcggagacaacagcaguga

SEQ ID NO: 1311952 - RNA, 19 nt, Homo sapiens
  misc_RNA (1)...(19): siRNA sense strand
ccgauacauuagcuguuug

SEQ ID NO: 1311953 - RNA, 19 nt, Homo sapiens
  misc_RNA (1)...(19): siRNA sense strand
caaggagcagcauauaguc

SEQ ID NO: 1311954 - RNA, 19 nt, Homo sapiens
  misc_RNA (1)...(19): siRNA sense strand
gguuucaucuuuuggaguu

SEQ ID NO: 1311955 - RNA, 19 nt, Homo sapiens
  misc_RNA (1)...(19): siRNA sense strand
gccaaggagcagcauauag

SEQ ID NO: 1311956 - RNA, 19 nt, Homo sapiens
  misc_RNA (1)...(19): siRNA sense strand
uggacaauuugaugauaca

SEQ ID NO: 1311957 - RNA, 19 nt, Homo sapiens
  misc_RNA (1)...(19): siRNA sense strand
gaaaagguccacgaacugu

SEQ ID NO: 1311958 - RNA, 19 nt, Homo sapiens
  misc_RNA (1)...(19): siRNA sense strand
cgauacauuagcuguuuga

SEQ ID NO: 1311959 - RNA, 19 nt, Homo sapiens
  misc_RNA (1)...(19): siRNA sense strand
gcagcuccaagucagauca

SEQ ID NO: 1311960 - RNA, 19 nt, Homo sapiens
  misc_RNA (1)...(19): siRNA sense strand
auuaaugccagaagaagaa

SEQ ID NO: 1311961 - RNA, 19 nt, Homo sapiens
  misc_RNA (1)...(19): siRNA sense strand
augaugauccggauaagga

SEQ ID NO: 1311962 - RNA, 19 nt, Homo sapiens
  misc_RNA (1)...(19): siRNA sense strand
uagaaaagguccacgaacu

SEQ ID NO: 1311963 - RNA, 19 nt, Homo sapiens
  misc_RNA (1)...(19): siRNA sense strand
guacuaagguuucaucuuu

SEQ ID NO: 1311964 - RNA, 19 nt, Homo sapiens
  misc_RNA (1)...(19): siRNA sense strand
caagucagaucaugaagaa

SEQ ID NO: 1311965 - RNA, 19 nt, Homo sapiens
  misc_RNA (1)...(19): siRNA sense strand
gauacaagcaauacaagua

SEQ ID NO: 1311966 - RNA, 19 nt, Homo sapiens
  misc_RNA (1)...(19): siRNA sense strand
caaaguagcaacaaauauc

SEQ ID NO: 1311967 - RNA, 19 nt, Homo sapiens
  misc_RNA (1)...(19): siRNA sense strand
gaccauaacccuucuucuu

SEQ ID NO: 1311968 - RNA, 19 nt, Homo sapiens
  misc_RNA (1)...(19): siRNA sense strand
ggacaaggacgcgaucuau

SEQ ID NO: 1311969 - RNA, 19 nt, Homo sapiens
  misc_RNA (1)...(19): siRNA sense strand
gcuggacaauuugaugaua

SEQ ID NO: 1311970 - RNA, 19 nt, Homo sapiens
  misc_RNA (1)...(19): siRNA sense strand
caauacaaguacuaagguu

SEQ ID NO: 1311971 - RNA, 19 nt, Homo sapiens
  misc_RNA (1)...(19): siRNA sense strand
ccaucgaccucgucauuga

SEQ ID NO: 1311972 - RNA, 19 nt, Homo sapiens
  misc_RNA (1)...(19): siRNA sense strand
gaugauacaagcaauacaa

SEQ ID NO: 1311973 - RNA, 19 nt, Homo sapiens
  misc_RNA (1)...(19): siRNA sense strand
guacaggugacgaugauga

SEQ ID NO: 1311974 - RNA, 19 nt, Homo sapiens
  misc_RNA (1)...(19): siRNA sense strand
ccaaggagcagcauauagu

SEQ ID NO: 1311975 - RNA, 19 nt, Homo sapiens
  misc_RNA (1)...(19): siRNA sense strand
agacaacaguguagcuuca

SEQ ID NO: 1311976 - RNA, 19 nt, Homo sapiens
  misc_RNA (1)...(19): siRNA sense strand
gagcuggacaauuugauga

SEQ ID NO: 1311977 - RNA, 19 nt, Homo sapiens
  misc_RNA (1)...(19): siRNA sense strand
gagccaaggagcagcauau

SEQ ID NO: 1311978 - RNA, 19 nt, Homo sapiens
  misc_RNA (1)...(19): siRNA sense strand
gcccaucgaccucgucauu

SEQ ID NO: 1311979 - RNA, 19 nt, Homo sapiens
  misc_RNA (1)...(19): siRNA sense strand
ccaaaguagcaacaaauau

SEQ ID NO: 1311980 - RNA, 19 nt, Homo sapiens
  misc_RNA (1)...(19): siRNA sense strand
gcucuggucuuugagaagu

SEQ ID NO: 1311981 - RNA, 19 nt, Homo sapiens
  misc_RNA (1)...(19): siRNA sense strand
uaguacagcccaugauuga

SEQ ID NO: 1311982 - RNA, 19 nt, Homo sapiens
  misc_RNA (1)...(19): siRNA sense strand
caaaucucgcugaccauaa

SEQ ID NO: 1311983 - RNA, 19 nt, Homo sapiens
  misc_RNA (1)...(19): siRNA sense strand
gcaauacaaguacuaaggu

SEQ ID NO: 1311984 - RNA, 19 nt, Homo sapiens
  misc_RNA (1)...(19): siRNA sense strand
cccaaaguagcaacaaaua

SEQ ID NO: 1311985 - RNA, 19 nt, Homo sapiens
  misc_RNA (1)...(19): siRNA sense strand
caagcaauacaaguacuaa

SEQ ID NO: 1311986 - RNA, 19 nt, Homo sapiens
  misc_RNA (1)...(19): siRNA sense strand
acaaauaucaugagagcau

SEQ ID NO: 1311987 - RNA, 19 nt, Homo sapiens
  misc_RNA (1)...(19): siRNA sense strand
acaaaucucgcugaccaua

SEQ ID NO: 1311988 - RNA, 19 nt, Homo sapiens
  misc_RNA (1)...(19): siRNA sense strand
gaacugugcgauaacuucu

SEQ ID NO: 1311989 - RNA, 19 nt, Homo sapiens
  misc_RNA (1)...(19): siRNA sense strand
gacaaggacgcgaucuaug

SEQ ID NO: 1311990 - RNA, 19 nt, Homo sapiens
  misc_RNA (1)...(19): siRNA sense strand
uccacgaacugugcgauaa

SEQ ID NO: 1311991 - RNA, 19 nt, Homo sapiens
  misc_RNA (1)...(19): siRNA sense strand
gaauaguacagcccaugau

SEQ ID NO: 1311992 - RNA, 19 nt, Homo sapiens
  misc_RNA (1)...(19): siRNA sense strand
ccaagucagaucaugaaga

SEQ ID NO: 1311993 - RNA, 19 nt, Homo sapiens
  misc_RNA (1)...(19): siRNA sense strand
gcuccaagucagaucauga

SEQ ID NO: 1311994 - RNA, 19 nt, Homo sapiens
  misc_RNA (1)...(19): siRNA sense strand
gggacaaggacgcgaucua

SEQ ID NO: 1311995 - RNA, 19 nt, Homo sapiens
  misc_RNA (1)...(19): siRNA sense strand
guagcaacaaauaucauga

SEQ ID NO: 1311996 - RNA, 19 nt, Homo sapiens
  misc_RNA (1)...(19): siRNA sense strand
accgauacauuagcuguuu

SEQ ID NO: 1311997 - RNA, 19 nt, Homo sapiens
  misc_RNA (1)...(19): siRNA sense strand
guuuauuaaugccagaaga

SEQ ID NO: 1311998 - RNA, 19 nt, Homo sapiens
  misc_RNA (1)...(19): siRNA sense strand
gcaaggggaugguuuagac

SEQ ID NO: 1311999 - RNA, 19 nt, Homo sapiens
  misc_RNA (1)...(19): siRNA sense strand
uaacuucugccaccgauac

SEQ ID NO: 1312000 - RNA, 19 nt, Homo sapiens
  misc_RNA (1)...(19): siRNA sense strand
aauaguacagcccaugauu

SEQ ID NO: 1312001 - RNA, 19 nt, Homo sapiens
  misc_RNA (1)...(19): siRNA sense strand
aaaucucgcugaccauaac

SEQ ID NO: 1312002 - RNA, 19 nt, Homo sapiens
  misc_RNA (1)...(19): siRNA sense strand
acaaggacgcgaucuaugg

SEQ ID NO: 1312003 - RNA, 19 nt, Homo sapiens
  misc_RNA (1)...(19): siRNA sense strand
caaguacuaagguuucauc

SEQ ID NO: 1312004 - RNA, 19 nt, Homo sapiens
  misc_RNA (1)...(19): siRNA sense strand
gccagaagaagaauaguac

SEQ ID NO: 1312005 - RNA, 19 nt, Homo sapiens
  misc_RNA (1)...(19): siRNA sense strand
accauaacccuucuucuug

SEQ ID NO: 1312006 - RNA, 19 nt, Homo sapiens
  misc_RNA (1)...(19): siRNA sense strand
cgaacugugcgauaacuuc

SEQ ID NO: 1312007 - RNA, 19 nt, Homo sapiens
  misc_RNA (1)...(19): siRNA sense strand
ucaggcuccuccacaaauc

SEQ ID NO: 1312008 - RNA, 19 nt, Homo sapiens
  misc_RNA (1)...(19): siRNA sense strand
uguguuggauggucagcaa

SEQ ID NO: 1312009 - RNA, 19 nt, Homo sapiens
  misc_RNA (1)...(19): siRNA sense strand
acaagcaauacaaguacua

SEQ ID NO: 1312010 - RNA, 19 nt, Homo sapiens
  misc_RNA (1)...(19): siRNA sense strand
agaauaguacagcccauga

SEQ ID NO: 1312011 - RNA, 19 nt, Homo sapiens
  misc_RNA (1)...(19): siRNA sense strand
gucagaucaugaagaacuu

SEQ ID NO: 1312012 - RNA, 19 nt, Homo sapiens
  misc_RNA (1)...(19): siRNA sense strand
ggucuucgccaagcagguu

SEQ ID NO: 1312013 - RNA, 19 nt, Homo sapiens
  misc_RNA (1)...(19): siRNA sense strand
ugccagaagaagaauagua

SEQ ID NO: 1312014 - RNA, 19 nt, Homo sapiens
  misc_RNA (1)...(19): siRNA sense strand
acgaugaugauccggauaa

SEQ ID NO: 1312015 - RNA, 19 nt, Homo sapiens
  misc_RNA (1)...(19): siRNA sense strand
auacaaguacuaagguuuc

SEQ ID NO: 1312016 - RNA, 19 nt, Homo sapiens
  misc_RNA (1)...(19): siRNA sense strand
agcaacaaauaucaugaga

SEQ ID NO: 1312017 - RNA, 19 nt, Homo sapiens
  misc_RNA (1)...(19): siRNA sense strand
gcggagacaacagcaguga

SEQ ID NO: 1312018 - RNA, 19 nt, Homo sapiens
  misc_RNA (1)...(19): siRNA sense strand
gguuucaucuuuuggaguu

SEQ ID NO: 1312019 - RNA, 19 nt, Homo sapiens
  misc_RNA (1)...(19): siRNA sense strand
caaggagcagcauauaguc

SEQ ID NO: 1312020 - RNA, 19 nt, Homo sapiens
  misc_RNA (1)...(19): siRNA sense strand
gccaaggagcagcauauag

SEQ ID NO: 1312021 - RNA, 19 nt, Homo sapiens
  misc_RNA (1)...(19): siRNA sense strand
uggacaauuugaugauaca

SEQ ID NO: 1312022 - RNA, 19 nt, Homo sapiens
  misc_RNA (1)...(19): siRNA sense strand
cgauacauuagcuguuuga

SEQ ID NO: 1312023 - RNA, 19 nt, Homo sapiens
  misc_RNA (1)...(19): siRNA sense strand
ccgauacauuagcuguuug

SEQ ID NO: 1312024 - RNA, 19 nt, Homo sapiens
  misc_RNA (1)...(19): siRNA sense strand
gaaaagguccacgaacugu

SEQ ID NO: 1312025 - RNA, 19 nt, Homo sapiens
  misc_RNA (1)...(19): siRNA sense strand
gcagcuccaagucagauca

SEQ ID NO: 1312026 - RNA, 19 nt, Homo sapiens
  misc_RNA (1)...(19): siRNA sense strand
auuaaugccagaagaagaa

SEQ ID NO: 1312027 - RNA, 19 nt, Homo sapiens
  misc_RNA (1)...(19): siRNA sense strand
uagaaaagguccacgaacu

SEQ ID NO: 1312028 - RNA, 19 nt, Homo sapiens
  misc_RNA (1)...(19): siRNA sense strand
augaugauccggauaagga

SEQ ID NO: 1312029 - RNA, 19 nt, Homo sapiens
  misc_RNA (1)...(19): siRNA sense strand
guacuaagguuucaucuuu

SEQ ID NO: 1312030 - RNA, 19 nt, Homo sapiens
  misc_RNA (1)...(19): siRNA sense strand
caagucagaucaugaagaa

SEQ ID NO: 1312031 - RNA, 19 nt, Homo sapiens
  misc_RNA (1)...(19): siRNA sense strand
gauacaagcaauacaagua

SEQ ID NO: 1312032 - RNA, 19 nt, Homo sapiens
  misc_RNA (1)...(19): siRNA sense strand
caaaguagcaacaaauauc

SEQ ID NO: 1312033 - RNA, 19 nt, Homo sapiens
  misc_RNA (1)...(19): siRNA sense strand
gaccauaacccuucuucuu

SEQ ID NO: 1312034 - RNA, 19 nt, Homo sapiens
  misc_RNA (1)...(19): siRNA sense strand
ggacaaggacgcgaucuau

SEQ ID NO: 1312035 - RNA, 19 nt, Homo sapiens
  misc_RNA (1)...(19): siRNA sense strand
gcuggacaauuugaugaua

SEQ ID NO: 1312036 - RNA, 19 nt, Homo sapiens
  misc_RNA (1)...(19): siRNA sense strand
caauacaaguacuaagguu

SEQ ID NO: 1312037 - RNA, 19 nt, Homo sapiens
  misc_RNA (1)...(19): siRNA sense strand
ccaucgaccucgucauuga

SEQ ID NO: 1312038 - RNA, 19 nt, Homo sapiens
  misc_RNA (1)...(19): siRNA sense strand
gaugauacaagcaauacaa

SEQ ID NO: 1312039 - RNA, 19 nt, Homo sapiens
  misc_RNA (1)...(19): siRNA sense strand
guacaggugacgaugauga

SEQ ID NO: 1312040 - RNA, 19 nt, Homo sapiens
  misc_RNA (1)...(19): siRNA sense strand
acgaugagcugccccauua

SEQ ID NO: 1312041 - RNA, 19 nt, Homo sapiens
  misc_RNA (1)...(19): siRNA sense strand
agacaacaguguagcuuca

SEQ ID NO: 1312042 - RNA, 19 nt, Homo sapiens
  misc_RNA (1)...(19): siRNA sense strand
gagcuggacaauuugauga

SEQ ID NO: 1312043 - RNA, 19 nt, Homo sapiens
  misc_RNA (1)...(19): siRNA sense strand
gcccaucgaccucgucauu

SEQ ID NO: 1312044 - RNA, 19 nt, Homo sapiens
  misc_RNA (1)...(19): siRNA sense strand
ccaaaguagcaacaaauau

SEQ ID NO: 1312045 - RNA, 19 nt, Homo sapiens
  misc_RNA (1)...(19): siRNA sense strand
gcucuggucuuugagaagu

SEQ ID NO: 1312046 - RNA, 19 nt, Homo sapiens
  misc_RNA (1)...(19): siRNA sense strand
caaaucucgcugaccauaa

SEQ ID NO: 1312047 - RNA, 19 nt, Homo sapiens
  misc_RNA (1)...(19): siRNA sense strand
gcaauacaaguacuaaggu

SEQ ID NO: 1312048 - RNA, 19 nt, Homo sapiens
  misc_RNA (1)...(19): siRNA sense strand
cccaaaguagcaacaaaua

SEQ ID NO: 1312049 - RNA, 19 nt, Homo sapiens
  misc_RNA (1)...(19): siRNA sense strand
caagcaauacaaguacuaa

SEQ ID NO: 1312050 - RNA, 19 nt, Homo sapiens
  misc_RNA (1)...(19): siRNA sense strand
acaaauaucaugagagcau

SEQ ID NO: 1312051 - RNA, 19 nt, Homo sapiens
  misc_RNA (1)...(19): siRNA sense strand
acaaaucucgcugaccaua

SEQ ID NO: 1312052 - RNA, 19 nt, Homo sapiens
  misc_RNA (1)...(19): siRNA sense strand
gaacugugcgauaacuucu

SEQ ID NO: 1312053 - RNA, 19 nt, Homo sapiens
  misc_RNA (1)...(19): siRNA sense strand
gacaaggacgcgaucuaug

SEQ ID NO: 1312054 - RNA, 19 nt, Homo sapiens
  misc_RNA (1)...(19): siRNA sense strand
uccacgaacugugcgauaa

SEQ ID NO: 1312055 - RNA, 19 nt, Homo sapiens
  misc_RNA (1)...(19): siRNA sense strand
ccaagucagaucaugaaga

SEQ ID NO: 1312056 - RNA, 19 nt, Homo sapiens
  misc_RNA (1)...(19): siRNA sense strand
gcuccaagucagaucauga

SEQ ID NO: 1312057 - RNA, 19 nt, Homo sapiens
  misc_RNA (1)...(19): siRNA sense strand
gggacaaggacgcgaucua

SEQ ID NO: 1312058 - RNA, 19 nt, Homo sapiens
  misc_RNA (1)...(19): siRNA sense strand
guagcaacaaauaucauga

SEQ ID NO: 1312059 - RNA, 19 nt, Homo sapiens
  misc_RNA (1)...(19): siRNA sense strand
accgauacauuagcuguuu

SEQ ID NO: 1312060 - RNA, 19 nt, Homo sapiens
  misc_RNA (1)...(19): siRNA sense strand
gcaaggggaugguuuagac

SEQ ID NO: 1312061 - RNA, 19 nt, Homo sapiens
  misc_RNA (1)...(19): siRNA sense strand
uaacuucugccaccgauac

SEQ ID NO: 1312062 - RNA, 19 nt, Homo sapiens
  misc_RNA (1)...(19): siRNA sense strand
aaaucucgcugaccauaac

SEQ ID NO: 1312063 - RNA, 19 nt, Homo sapiens
  misc_RNA (1)...(19): siRNA sense strand
acaaggacgcgaucuaugg

SEQ ID NO: 1312064 - RNA, 19 nt, Homo sapiens
  misc_RNA (1)...(19): siRNA sense strand
caaguacuaagguuucauc

SEQ ID NO: 1312065 - RNA, 19 nt, Homo sapiens
  misc_RNA (1)...(19): siRNA sense strand
accauaacccuucuucuug

SEQ ID NO: 1312066 - RNA, 19 nt, Homo sapiens
  misc_RNA (1)...(19): siRNA sense strand
cgaacugugcgauaacuuc

SEQ ID NO: 1312067 - RNA, 19 nt, Homo sapiens
  misc_RNA (1)...(19): siRNA sense strand
ucaggcuccuccacaaauc

SEQ ID NO: 1312068 - RNA, 19 nt, Homo sapiens
  misc_RNA (1)...(19): siRNA sense strand
acaagcaauacaaguacua

SEQ ID NO: 1312069 - RNA, 19 nt, Homo sapiens
  misc_RNA (1)...(19): siRNA sense strand
gucagaucaugaagaacuu

SEQ ID NO: 1312070 - RNA, 19 nt, Homo sapiens
  misc_RNA (1)...(19): siRNA sense strand
ggucuucgccaagcagguu

SEQ ID NO: 1312071 - RNA, 19 nt, Homo sapiens
  misc_RNA (1)...(19): siRNA sense strand
acgaugaugauccggauaa

SEQ ID NO: 1312072 - RNA, 19 nt, Homo sapiens
  misc_RNA (1)...(19): siRNA sense strand
auacaaguacuaagguuuc

SEQ ID NO: 1312073 - RNA, 19 nt, Homo sapiens
  misc_RNA (1)...(19): siRNA sense strand
agcaacaaauaucaugaga

SEQ ID NO: 1312074 - RNA, 19 nt, Homo sapiens
  misc_RNA (1)...(19): siRNA sense strand
gcggagacaacagcaguga

SEQ ID NO: 1312075 - RNA, 19 nt, Homo sapiens
  misc_RNA (1)...(19): siRNA sense strand
uggacaauuugaugauaca

SEQ ID NO: 1312076 - RNA, 19 nt, Homo sapiens
  misc_RNA (1)...(19): siRNA sense strand
cgauacauuagcuguuuga

SEQ ID NO: 1312077 - RNA, 19 nt, Homo sapiens
  misc_RNA (1)...(19): siRNA sense strand
ccgauacauuagcuguuug

SEQ ID NO: 1312078 - RNA, 19 nt, Homo sapiens
  misc_RNA (1)...(19): siRNA sense strand
gaaaagguccacgaacugu

SEQ ID NO: 1312079 - RNA, 19 nt, Homo sapiens
  misc_RNA (1)...(19): siRNA sense strand
gguuucaucuuuuggaguu

SEQ ID NO: 1312080 - RNA, 19 nt, Homo sapiens
  misc_RNA (1)...(19): siRNA sense strand
gcagcuccaagucagauca

SEQ ID NO: 1312081 - RNA, 19 nt, Homo sapiens
  misc_RNA (1)...(19): siRNA sense strand
uagaaaagguccacgaacu

SEQ ID NO: 1312082 - RNA, 19 nt, Homo sapiens
  misc_RNA (1)...(19): siRNA sense strand
augaugauccggauaagga

SEQ ID NO: 1312083 - RNA, 19 nt, Homo sapiens
  misc_RNA (1)...(19): siRNA sense strand
guacuaagguuucaucuuu

SEQ ID NO: 1312084 - RNA, 19 nt, Homo sapiens
  misc_RNA (1)...(19): siRNA sense strand
caagucagaucaugaagaa

SEQ ID NO: 1312085 - RNA, 19 nt, Homo sapiens
  misc_RNA (1)...(19): siRNA sense strand
gauacaagcaauacaagua

SEQ ID NO: 1312086 - RNA, 19 nt, Homo sapiens
  misc_RNA (1)...(19): siRNA sense strand
caaaguagcaacaaauauc

SEQ ID NO: 1312087 - RNA, 19 nt, Homo sapiens
  misc_RNA (1)...(19): siRNA sense strand
gaccauaacccuucuucuu

SEQ ID NO: 1312088 - RNA, 19 nt, Homo sapiens
  misc_RNA (1)...(19): siRNA sense strand
ggacaaggacgcgaucuau

SEQ ID NO: 1312089 - RNA, 19 nt, Homo sapiens
  misc_RNA (1)...(19): siRNA sense strand
gcuggacaauuugaugaua

SEQ ID NO: 1312090 - RNA, 19 nt, Homo sapiens
  misc_RNA (1)...(19): siRNA sense strand
caauacaaguacuaagguu

SEQ ID NO: 1312091 - RNA, 19 nt, Homo sapiens
  misc_RNA (1)...(19): siRNA sense strand
ccaucgaccucgucauuga

SEQ ID NO: 1312092 - RNA, 19 nt, Homo sapiens
  misc_RNA (1)...(19): siRNA sense strand
gaugauacaagcaauacaa

SEQ ID NO: 1312093 - RNA, 19 nt, Homo sapiens
  misc_RNA (1)...(19): siRNA sense strand
guacaggugacgaugauga

SEQ ID NO: 1312094 - RNA, 19 nt, Homo sapiens
  misc_RNA (1)...(19): siRNA sense strand
ccaaggagcagcauauagu

SEQ ID NO: 1312095 - RNA, 19 nt, Homo sapiens
  misc_RNA (1)...(19): siRNA sense strand
acgaugagcugccccauua

SEQ ID NO: 1312096 - RNA, 19 nt, Homo sapiens
  misc_RNA (1)...(19): siRNA sense strand
agacaacaguguagcuuca

SEQ ID NO: 1312097 - RNA, 19 nt, Homo sapiens
  misc_RNA (1)...(19): siRNA sense strand
gagcuggacaauuugauga

SEQ ID NO: 1312098 - RNA, 19 nt, Homo sapiens
  misc_RNA (1)...(19): siRNA sense strand
gagccaaggagcagcauau

SEQ ID NO: 1312099 - RNA, 19 nt, Homo sapiens
  misc_RNA (1)...(19): siRNA sense strand
gcccaucgaccucgucauu

SEQ ID NO: 1312100 - RNA, 19 nt, Homo sapiens
  misc_RNA (1)...(19): siRNA sense strand
ccaaaguagcaacaaauau

SEQ ID NO: 1312101 - RNA, 19 nt, Homo sapiens
  misc_RNA (1)...(19): siRNA sense strand
gcucuggucuuugagaagu

SEQ ID NO: 1312102 - RNA, 19 nt, Homo sapiens
  misc_RNA (1)...(19): siRNA sense strand
uaguacagcccaugauuga

SEQ ID NO: 1312103 - RNA, 19 nt, Homo sapiens
  misc_RNA (1)...(19): siRNA sense strand
caaaucucgcugaccauaa

SEQ ID NO: 1312104 - RNA, 19 nt, Homo sapiens
  misc_RNA (1)...(19): siRNA sense strand
gcaauacaaguacuaaggu

SEQ ID NO: 1312105 - RNA, 19 nt, Homo sapiens
  misc_RNA (1)...(19): siRNA sense strand
cccaaaguagcaacaaaua

SEQ ID NO: 1312106 - RNA, 19 nt, Homo sapiens
  misc_RNA (1)...(19): siRNA sense strand
caagcaauacaaguacuaa

SEQ ID NO: 1312107 - RNA, 19 nt, Homo sapiens
  misc_RNA (1)...(19): siRNA sense strand
acaaauaucaugagagcau

SEQ ID NO: 1312108 - RNA, 19 nt, Homo sapiens
  misc_RNA (1)...(19): siRNA sense strand
acaaaucucgcugaccaua

SEQ ID NO: 1312109 - RNA, 19 nt, Homo sapiens
  misc_RNA (1)...(19): siRNA sense strand
gaacugugcgauaacuucu

SEQ ID NO: 1312110 - RNA, 19 nt, Homo sapiens
  misc_RNA (1)...(19): siRNA sense strand
gacaaggacgcgaucuaug

SEQ ID NO: 1312111 - RNA, 19 nt, Homo sapiens
  misc_RNA (1)...(19): siRNA sense strand
uccacgaacugugcgauaa

SEQ ID NO: 1312112 - RNA, 19 nt, Homo sapiens
  misc_RNA (1)...(19): siRNA sense strand
gaauaguacagcccaugau

SEQ ID NO: 1312113 - RNA, 19 nt, Homo sapiens
  misc_RNA (1)...(19): siRNA sense strand
ccaagucagaucaugaaga

SEQ ID NO: 1312114 - RNA, 19 nt, Homo sapiens
  misc_RNA (1)...(19): siRNA sense strand
gcuccaagucagaucauga

SEQ ID NO: 1312115 - RNA, 19 nt, Homo sapiens
  misc_RNA (1)...(19): siRNA sense strand
gggacaaggacgcgaucua

SEQ ID NO: 1312116 - RNA, 19 nt, Homo sapiens
  misc_RNA (1)...(19): siRNA sense strand
guagcaacaaauaucauga

SEQ ID NO: 1312117 - RNA, 19 nt, Homo sapiens
  misc_RNA (1)...(19): siRNA sense strand
accgauacauuagcuguuu

SEQ ID NO: 1312118 - RNA, 19 nt, Homo sapiens
  misc_RNA (1)...(19): siRNA sense strand
guuuauuaaugccagaaga

SEQ ID NO: 1312119 - RNA, 19 nt, Homo sapiens
  misc_RNA (1)...(19): siRNA sense strand
gcaaggggaugguuuagac

SEQ ID NO: 1312120 - RNA, 19 nt, Homo sapiens
  misc_RNA (1)...(19): siRNA sense strand
uaacuucugccaccgauac

SEQ ID NO: 1312121 - RNA, 19 nt, Homo sapiens
  misc_RNA (1)...(19): siRNA sense strand
aauaguacagcccaugauu

SEQ ID NO: 1312122 - RNA, 19 nt, Homo sapiens
  misc_RNA (1)...(19): siRNA sense strand
acaaggacgcgaucuaugg

SEQ ID NO: 1312123 - RNA, 19 nt, Homo sapiens
  misc_RNA (1)...(19): siRNA sense strand
aaaucucgcugaccauaac

SEQ ID NO: 1312124 - RNA, 19 nt, Homo sapiens
  misc_RNA (1)...(19): siRNA sense strand
caaguacuaagguuucauc

SEQ ID NO: 1312125 - RNA, 19 nt, Homo sapiens
  misc_RNA (1)...(19): siRNA sense strand
gccagaagaagaauaguac

SEQ ID NO: 1312126 - RNA, 19 nt, Homo sapiens
  misc_RNA (1)...(19): siRNA sense strand
accauaacccuucuucuug

SEQ ID NO: 1312127 - RNA, 19 nt, Homo sapiens
  misc_RNA (1)...(19): siRNA sense strand
cgaacugugcgauaacuuc

SEQ ID NO: 1312128 - RNA, 19 nt, Homo sapiens
  misc_RNA (1)...(19): siRNA sense strand
ucaggcuccuccacaaauc

SEQ ID NO: 1312129 - RNA, 19 nt, Homo sapiens
  misc_RNA (1)...(19): siRNA sense strand
uguguuggauggucagcaa

SEQ ID NO: 1312130 - RNA, 19 nt, Homo sapiens
  misc_RNA (1)...(19): siRNA sense strand
acaagcaauacaaguacua

SEQ ID NO: 1312131 - RNA, 19 nt, Homo sapiens
  misc_RNA (1)...(19): siRNA sense strand
agaauaguacagcccauga

SEQ ID NO: 1312132 - RNA, 19 nt, Homo sapiens
  misc_RNA (1)...(19): siRNA sense strand
gucagaucaugaagaacuu

SEQ ID NO: 1312133 - RNA, 19 nt, Homo sapiens
  misc_RNA (1)...(19): siRNA sense strand
ggucuucgccaagcagguu

SEQ ID NO: 1312134 - RNA, 19 nt, Homo sapiens
  misc_RNA (1)...(19): siRNA sense strand
ugccagaagaagaauagua

SEQ ID NO: 1312135 - RNA, 19 nt, Homo sapiens
  misc_RNA (1)...(19): siRNA sense strand
acgaugaugauccggauaa

SEQ ID NO: 1312136 - RNA, 19 nt, Homo sapiens
  misc_RNA (1)...(19): siRNA sense strand
auacaaguacuaagguuuc

SEQ ID NO: 1312137 - RNA, 19 nt, Homo sapiens
  misc_RNA (1)...(19): siRNA sense strand
agcaacaaauaucaugaga

SEQ ID NO: 1312138 - RNA, 19 nt, Homo sapiens
  misc_RNA (1)...(19): siRNA sense strand
gcggagacaacagcaguga

SEQ ID NO: 1312139 - RNA, 19 nt, Homo sapiens
  misc_RNA (1)...(19): siRNA sense strand
gguuucaucuuuuggaguu

SEQ ID NO: 1312140 - RNA, 19 nt, Homo sapiens
  misc_RNA (1)...(19): siRNA sense strand
caaggagcagcauauaguc

SEQ ID NO: 1312141 - RNA, 19 nt, Homo sapiens
  misc_RNA (1)...(19): siRNA sense strand
gccaaggagcagcauauag

SEQ ID NO: 1312142 - RNA, 19 nt, Homo sapiens
  misc_RNA (1)...(19): siRNA sense strand
cgauacauuagcuguuuga

SEQ ID NO: 1312143 - RNA, 19 nt, Homo sapiens
  misc_RNA (1)...(19): siRNA sense strand
ccgauacauuagcuguuug

SEQ ID NO: 1312144 - RNA, 19 nt, Homo sapiens
  misc_RNA (1)...(19): siRNA sense strand
uggacaauuugaugauaca

SEQ ID NO: 1312145 - RNA, 19 nt, Homo sapiens
  misc_RNA (1)...(19): siRNA sense strand
gaaaagguccacgaacugu

SEQ ID NO: 1312146 - RNA, 19 nt, Homo sapiens
  misc_RNA (1)...(19): siRNA sense strand
gcagcuccaagucagauca

SEQ ID NO: 1312147 - RNA, 19 nt, Homo sapiens
  misc_RNA (1)...(19): siRNA sense strand
auuaaugccagaagaagaa

SEQ ID NO: 1312148 - RNA, 19 nt, Homo sapiens
  misc_RNA (1)...(19): siRNA sense strand
uagaaaagguccacgaacu

SEQ ID NO: 1312149 - RNA, 19 nt, Homo sapiens
  misc_RNA (1)...(19): siRNA sense strand
augaugauccggauaagga

SEQ ID NO: 1312150 - RNA, 19 nt, Homo sapiens
  misc_RNA (1)...(19): siRNA sense strand
guacuaagguuucaucuuu

SEQ ID NO: 1312151 - RNA, 19 nt, Homo sapiens
  misc_RNA (1)...(19): siRNA sense strand
caagucagaucaugaagaa

SEQ ID NO: 1312152 - RNA, 19 nt, Homo sapiens
  misc_RNA (1)...(19): siRNA sense strand
ggacauucaugcccaauag

SEQ ID NO: 1312153 - RNA, 19 nt, Homo sapiens
  misc_RNA (1)...(19): siRNA sense strand
gauacaagcaauacaagua

SEQ ID NO: 1312154 - RNA, 19 nt, Homo sapiens
  misc_RNA (1)...(19): siRNA sense strand
caaaguagcaacaaauauc

SEQ ID NO: 1312155 - RNA, 19 nt, Homo sapiens
  misc_RNA (1)...(19): siRNA sense strand
gcacagagccccacaaugu

SEQ ID NO: 1312156 - RNA, 19 nt, Homo sapiens
  misc_RNA (1)...(19): siRNA sense strand
gaccauaacccuucuucuu

SEQ ID NO: 1312157 - RNA, 19 nt, Homo sapiens
  misc_RNA (1)...(19): siRNA sense strand
ggacaaggacgcgaucuau

SEQ ID NO: 1312158 - RNA, 19 nt, Homo sapiens
  misc_RNA (1)...(19): siRNA sense strand
gcuggacaauuugaugaua

SEQ ID NO: 1312159 - RNA, 19 nt, Homo sapiens
  misc_RNA (1)...(19): siRNA sense strand
caauacaaguacuaagguu

SEQ ID NO: 1312160 - RNA, 19 nt, Homo sapiens
  misc_RNA (1)...(19): siRNA sense strand
ccaucgaccucgucauuga

SEQ ID NO: 1312161 - RNA, 19 nt, Homo sapiens
  misc_RNA (1)...(19): siRNA sense strand
gaugauacaagcaauacaa

SEQ ID NO: 1312162 - RNA, 19 nt, Homo sapiens
  misc_RNA (1)...(19): siRNA sense strand
cccacacccuacucaauua

SEQ ID NO: 1312163 - RNA, 19 nt, Homo sapiens
  misc_RNA (1)...(19): siRNA sense strand
guacaggugacgaugauga

SEQ ID NO: 1312164 - RNA, 19 nt, Homo sapiens
  misc_RNA (1)...(19): siRNA sense strand
ccacaauguuaaauucugu

SEQ ID NO: 1312165 - RNA, 19 nt, Homo sapiens
  misc_RNA (1)...(19): siRNA sense strand
cccaaugcauucauauuug

SEQ ID NO: 1312166 - RNA, 19 nt, Homo sapiens
  misc_RNA (1)...(19): siRNA sense strand
ccaaggagcagcauauagu

SEQ ID NO: 1312167 - RNA, 19 nt, Homo sapiens
  misc_RNA (1)...(19): siRNA sense strand
acgaugagcugccccauua

SEQ ID NO: 1312168 - RNA, 19 nt, Homo sapiens
  misc_RNA (1)...(19): siRNA sense strand
agacaacaguguagcuuca

SEQ ID NO: 1312169 - RNA, 19 nt, Homo sapiens
  misc_RNA (1)...(19): siRNA sense strand
gagcuggacaauuugauga

SEQ ID NO: 1312170 - RNA, 19 nt, Homo sapiens
  misc_RNA (1)...(19): siRNA sense strand
gagccaaggagcagcauau

SEQ ID NO: 1312171 - RNA, 19 nt, Homo sapiens
  misc_RNA (1)...(19): siRNA sense strand
gcggacagguuauggacau

SEQ ID NO: 1312172 - RNA, 19 nt, Homo sapiens
  misc_RNA (1)...(19): siRNA sense strand
gcccaucgaccucgucauu

SEQ ID NO: 1312173 - RNA, 19 nt, Homo sapiens
  misc_RNA (1)...(19): siRNA sense strand
ccaaaguagcaacaaauau

SEQ ID NO: 1312174 - RNA, 19 nt, Homo sapiens
  misc_RNA (1)...(19): siRNA sense strand
gcaauacaaguacuaaggu

SEQ ID NO: 1312175 - RNA, 19 nt, Homo sapiens
  misc_RNA (1)...(19): siRNA sense strand
gacagguuauggacauuca

SEQ ID NO: 1312176 - RNA, 19 nt, Homo sapiens
  misc_RNA (1)...(19): siRNA sense strand
uaguacagcccaugauuga

SEQ ID NO: 1312177 - RNA, 19 nt, Homo sapiens
  misc_RNA (1)...(19): siRNA sense strand
caaaucucgcugaccauaa

SEQ ID NO: 1312178 - RNA, 19 nt, Homo sapiens
  misc_RNA (1)...(19): siRNA sense strand
gcucuggucuuugagaagu

SEQ ID NO: 1312179 - RNA, 19 nt, Homo sapiens
  misc_RNA (1)...(19): siRNA sense strand
cccaaaguagcaacaaaua

SEQ ID NO: 1312180 - RNA, 19 nt, Homo sapiens
  misc_RNA (1)...(19): siRNA sense strand
gguccuaugggaaugagua

SEQ ID NO: 1312181 - RNA, 19 nt, Homo sapiens
  misc_RNA (1)...(19): siRNA sense strand
caagcaauacaaguacuaa

SEQ ID NO: 1312182 - RNA, 19 nt, Homo sapiens
  misc_RNA (1)...(19): siRNA sense strand
aauguuggcggacagguua

SEQ ID NO: 1312183 - RNA, 19 nt, Homo sapiens
  misc_RNA (1)...(19): siRNA sense strand
ccaaugcauucauauuugc

SEQ ID NO: 1312184 - RNA, 19 nt, Homo sapiens
  misc_RNA (1)...(19): siRNA sense strand
acaaauaucaugagagcau

SEQ ID NO: 1312185 - RNA, 19 nt, Homo sapiens
  misc_RNA (1)...(19): siRNA sense strand
acaaaucucgcugaccaua

SEQ ID NO: 1312186 - RNA, 19 nt, Homo sapiens
  misc_RNA (1)...(19): siRNA sense strand
acacccuacucaauuaaga

SEQ ID NO: 1312187 - RNA, 19 nt, Homo sapiens
  misc_RNA (1)...(19): siRNA sense strand
gaacugugcgauaacuucu

SEQ ID NO: 1312188 - RNA, 19 nt, Homo sapiens
  misc_RNA (1)...(19): siRNA sense strand
ccuacucaauuaagacaug

SEQ ID NO: 1312189 - RNA, 19 nt, Homo sapiens
  misc_RNA (1)...(19): siRNA sense strand
gacaaggacgcgaucuaug

SEQ ID NO: 1312190 - RNA, 19 nt, Homo sapiens
  misc_RNA (1)...(19): siRNA sense strand
ccacacccuacucaauuaa

SEQ ID NO: 1312191 - RNA, 19 nt, Homo sapiens
  misc_RNA (1)...(19): siRNA sense strand
uccacgaacugugcgauaa

SEQ ID NO: 1312192 - RNA, 19 nt, Homo sapiens
  misc_RNA (1)...(19): siRNA sense strand
gaauaguacagcccaugau

SEQ ID NO: 1312193 - RNA, 19 nt, Homo sapiens
  misc_RNA (1)...(19): siRNA sense strand
ccaagucagaucaugaaga

SEQ ID NO: 1312194 - RNA, 19 nt, Homo sapiens
  misc_RNA (1)...(19): siRNA sense strand
gcuccaagucagaucauga

SEQ ID NO: 1312195 - RNA, 19 nt, Homo sapiens
  misc_RNA (1)...(19): siRNA sense strand
gggacaaggacgcgaucua

SEQ ID NO: 1312196 - RNA, 19 nt, Homo sapiens
  misc_RNA (1)...(19): siRNA sense strand
guagcaacaaauaucauga

SEQ ID NO: 1312197 - RNA, 19 nt, Homo sapiens
  misc_RNA (1)...(19): siRNA sense strand
accgauacauuagcuguuu

SEQ ID NO: 1312198 - RNA, 19 nt, Homo sapiens
  misc_RNA (1)...(19): siRNA sense strand
guuuauuaaugccagaaga

SEQ ID NO: 1312199 - RNA, 19 nt, Homo sapiens
  misc_RNA (1)...(19): siRNA sense strand
gcaaggggaugguuuagac

SEQ ID NO: 1312200 - RNA, 19 nt, Homo sapiens
  misc_RNA (1)...(19): siRNA sense strand
uaacuucugccaccgauac

SEQ ID NO: 1312201 - RNA, 19 nt, Homo sapiens
  misc_RNA (1)...(19): siRNA sense strand
ggacagguuauggacauuc

SEQ ID NO: 1312202 - RNA, 19 nt, Homo sapiens
  misc_RNA (1)...(19): siRNA sense strand
aauaguacagcccaugauu

SEQ ID NO: 1312203 - RNA, 19 nt, Homo sapiens
  misc_RNA (1)...(19): siRNA sense strand
acaaggacgcgaucuaugg

SEQ ID NO: 1312204 - RNA, 19 nt, Homo sapiens
  misc_RNA (1)...(19): siRNA sense strand
aaaucucgcugaccauaac

SEQ ID NO: 1312205 - RNA, 19 nt, Homo sapiens
  misc_RNA (1)...(19): siRNA sense strand
caaguacuaagguuucauc

SEQ ID NO: 1312206 - RNA, 19 nt, Homo sapiens
  misc_RNA (1)...(19): siRNA sense strand
gccagaagaagaauaguac

SEQ ID NO: 1312207 - RNA, 19 nt, Homo sapiens
  misc_RNA (1)...(19): siRNA sense strand
accauaacccuucuucuug

SEQ ID NO: 1312208 - RNA, 19 nt, Homo sapiens
  misc_RNA (1)...(19): siRNA sense strand
cgaacugugcgauaacuuc

SEQ ID NO: 1312209 - RNA, 19 nt, Homo sapiens
  misc_RNA (1)...(19): siRNA sense strand
ucaggcuccuccacaaauc

SEQ ID NO: 1312210 - RNA, 19 nt, Homo sapiens
  misc_RNA (1)...(19): siRNA sense strand
uguguuggauggucagcaa

SEQ ID NO: 1312211 - RNA, 19 nt, Homo sapiens
  misc_RNA (1)...(19): siRNA sense strand
gucagaucaugaagaacuu

SEQ ID NO: 1312212 - RNA, 19 nt, Homo sapiens
  misc_RNA (1)...(19): siRNA sense strand
agaauaguacagcccauga

SEQ ID NO: 1312213 - RNA, 19 nt, Homo sapiens
  misc_RNA (1)...(19): siRNA sense strand
acaagcaauacaaguacua

SEQ ID NO: 1312214 - RNA, 19 nt, Homo sapiens
  misc_RNA (1)...(19): siRNA sense strand
acgaugaugauccggauaa

SEQ ID NO: 1312215 - RNA, 19 nt, Homo sapiens
  misc_RNA (1)...(19): siRNA sense strand
ugccagaagaagaauagua

SEQ ID NO: 1312216 - RNA, 19 nt, Homo sapiens
  misc_RNA (1)...(19): siRNA sense strand
ggucuucgccaagcagguu

SEQ ID NO: 1312217 - RNA, 19 nt, Homo sapiens
  misc_RNA (1)...(19): siRNA sense strand
gcggagacaacagcaguga

SEQ ID NO: 1312218 - RNA, 19 nt, Homo sapiens
  misc_RNA (1)...(19): siRNA sense strand
auacaaguacuaagguuuc

SEQ ID NO: 1312219 - RNA, 19 nt, Homo sapiens
  misc_RNA (1)...(19): siRNA sense strand
agcaacaaauaucaugaga

SEQ ID NO: 1312220 - RNA, 19 nt, Homo sapiens
  misc_RNA (1)...(19): siRNA sense strand
gaaaagguccacgaacugu

SEQ ID NO: 1312221 - RNA, 19 nt, Homo sapiens
  misc_RNA (1)...(19): siRNA sense strand
caaggagcagcauauaguc

SEQ ID NO: 1312222 - RNA, 19 nt, Homo sapiens
  misc_RNA (1)...(19): siRNA sense strand
gccaaggagcagcauauag

SEQ ID NO: 1312223 - RNA, 19 nt, Homo sapiens
  misc_RNA (1)...(19): siRNA sense strand
uggacaauuugaugauaca

SEQ ID NO: 1312224 - RNA, 19 nt, Homo sapiens
  misc_RNA (1)...(19): siRNA sense strand
gguuucaucuuuuggaguu

SEQ ID NO: 1312225 - RNA, 19 nt, Homo sapiens
  misc_RNA (1)...(19): siRNA sense strand
cgauacauuagcuguuuga

SEQ ID NO: 1312226 - RNA, 19 nt, Homo sapiens
  misc_RNA (1)...(19): siRNA sense strand
ccgauacauuagcuguuug

SEQ ID NO: 1312227 - RNA, 19 nt, Homo sapiens
  misc_RNA (1)...(19): siRNA sense strand
gcagcuccaagucagauca

SEQ ID NO: 1312228 - RNA, 19 nt, Homo sapiens
  misc_RNA (1)...(19): siRNA sense strand
caauguuggcggacagguu

SEQ ID NO: 1312229 - RNA, 19 nt, Homo sapiens
  misc_RNA (1)...(19): siRNA sense strand
auuaaugccagaagaagaa

SEQ ID NO: 1312230 - RNA, 19 nt, Homo sapiens
  misc_RNA (1)...(19): siRNA sense strand
uagaaaagguccacgaacu

SEQ ID NO: 1312231 - RNA, 19 nt, Homo sapiens
  misc_RNA (1)...(19): siRNA sense strand
cccacaauguuaaauucug

SEQ ID NO: 1312232 - RNA, 19 nt, Homo sapiens
  misc_RNA (1)...(19): siRNA sense strand
ccaccacccagccaugaug

SEQ ID NO: 1312233 - RNA, 19 nt, Homo sapiens
  misc_RNA (1)...(19): siRNA sense strand
augaugauccggauaagga

SEQ ID NO: 1312234 - RNA, 19 nt, Homo sapiens
  misc_RNA (1)...(19): siRNA sense strand
guacuaagguuucaucuuu

SEQ ID NO: 1312235 - RNA, 19 nt, Homo sapiens
  misc_RNA (1)...(19): siRNA sense strand
caagucagaucaugaagaa

SEQ ID NO: 1312236 - RNA, 19 nt, Homo sapiens
  misc_RNA (1)...(19): siRNA sense strand
ggacauucaugcccaauag

SEQ ID NO: 1312237 - RNA, 19 nt, Homo sapiens
  misc_RNA (1)...(19): siRNA sense strand
gauacaagcaauacaagua

SEQ ID NO: 1312238 - RNA, 19 nt, Homo sapiens
  misc_RNA (1)...(19): siRNA sense strand
caaaguagcaacaaauauc

SEQ ID NO: 1312239 - RNA, 19 nt, Homo sapiens
  misc_RNA (1)...(19): siRNA sense strand
gcacagagccccacaaugu

SEQ ID NO: 1312240 - RNA, 19 nt, Homo sapiens
  misc_RNA (1)...(19): siRNA sense strand
gaccauaacccuucuucuu

SEQ ID NO: 1312241 - RNA, 19 nt, Homo sapiens
  misc_RNA (1)...(19): siRNA sense strand
ggacaaggacgcgaucuau

SEQ ID NO: 1312242 - RNA, 19 nt, Homo sapiens
  misc_RNA (1)...(19): siRNA sense strand
gcuggacaauuugaugaua

SEQ ID NO: 1312243 - RNA, 19 nt, Homo sapiens
  misc_RNA (1)...(19): siRNA sense strand
caauacaaguacuaagguu

SEQ ID NO: 1312244 - RNA, 19 nt, Homo sapiens
  misc_RNA (1)...(19): siRNA sense strand
ccaucgaccucgucauuga

SEQ ID NO: 1312245 - RNA, 19 nt, Homo sapiens
  misc_RNA (1)...(19): siRNA sense strand
gaugauacaagcaauacaa

SEQ ID NO: 1312246 - RNA, 19 nt, Homo sapiens
  misc_RNA (1)...(19): siRNA sense strand
cccacacccuacucaauua

SEQ ID NO: 1312247 - RNA, 19 nt, Homo sapiens
  misc_RNA (1)...(19): siRNA sense strand
guacaggugacgaugauga

SEQ ID NO: 1312248 - RNA, 19 nt, Homo sapiens
  misc_RNA (1)...(19): siRNA sense strand
ccacaauguuaaauucugu

SEQ ID NO: 1312249 - RNA, 19 nt, Homo sapiens
  misc_RNA (1)...(19): siRNA sense strand
cccaaugcauucauauuug

SEQ ID NO: 1312250 - RNA, 19 nt, Homo sapiens
  misc_RNA (1)...(19): siRNA sense strand
ccaaggagcagcauauagu

SEQ ID NO: 1312251 - RNA, 19 nt, Homo sapiens
  misc_RNA (1)...(19): siRNA sense strand
acgaugagcugccccauua

SEQ ID NO: 1312252 - RNA, 19 nt, Homo sapiens
  misc_RNA (1)...(19): siRNA sense strand
agacaacaguguagcuuca

SEQ ID NO: 1312253 - RNA, 19 nt, Homo sapiens
  misc_RNA (1)...(19): siRNA sense strand
gagcuggacaauuugauga

SEQ ID NO: 1312254 - RNA, 19 nt, Homo sapiens
  misc_RNA (1)...(19): siRNA sense strand
gagccaaggagcagcauau

SEQ ID NO: 1312255 - RNA, 19 nt, Homo sapiens
  misc_RNA (1)...(19): siRNA sense strand
gcggacagguuauggacau

SEQ ID NO: 1312256 - RNA, 19 nt, Homo sapiens
  misc_RNA (1)...(19): siRNA sense strand
gcccaucgaccucgucauu

SEQ ID NO: 1312257 - RNA, 19 nt, Homo sapiens
  misc_RNA (1)...(19): siRNA sense strand
ccaaaguagcaacaaauau

SEQ ID NO: 1312258 - RNA, 19 nt, Homo sapiens
  misc_RNA (1)...(19): siRNA sense strand
gcaauacaaguacuaaggu

SEQ ID NO: 1312259 - RNA, 19 nt, Homo sapiens
  misc_RNA (1)...(19): siRNA sense strand
gacagguuauggacauuca

SEQ ID NO: 1312260 - RNA, 19 nt, Homo sapiens
  misc_RNA (1)...(19): siRNA sense strand
uaguacagcccaugauuga

SEQ ID NO: 1312261 - RNA, 19 nt, Homo sapiens
  misc_RNA (1)...(19): siRNA sense strand
caaaucucgcugaccauaa

SEQ ID NO: 1312262 - RNA, 19 nt, Homo sapiens
  misc_RNA (1)...(19): siRNA sense strand
gcucuggucuuugagaagu

SEQ ID NO: 1312263 - RNA, 19 nt, Homo sapiens
  misc_RNA (1)...(19): siRNA sense strand
cccaaaguagcaacaaaua

SEQ ID NO: 1312264 - RNA, 19 nt, Homo sapiens
  misc_RNA (1)...(19): siRNA sense strand
gguccuaugggaaugagua

SEQ ID NO: 1312265 - RNA, 19 nt, Homo sapiens
  misc_RNA (1)...(19): siRNA sense strand
caagcaauacaaguacuaa

SEQ ID NO: 1312266 - RNA, 19 nt, Homo sapiens
  misc_RNA (1)...(19): siRNA sense strand
aauguuggcggacagguua

SEQ ID NO: 1312267 - RNA, 19 nt, Homo sapiens
  misc_RNA (1)...(19): siRNA sense strand
ccaaugcauucauauuugc

SEQ ID NO: 1312268 - RNA, 19 nt, Homo sapiens
  misc_RNA (1)...(19): siRNA sense strand
acaaauaucaugagagcau

SEQ ID NO: 1312269 - RNA, 19 nt, Homo sapiens
  misc_RNA (1)...(19): siRNA sense strand
acaaaucucgcugaccaua

SEQ ID NO: 1312270 - RNA, 19 nt, Homo sapiens
  misc_RNA (1)...(19): siRNA sense strand
acacccuacucaauuaaga

SEQ ID NO: 1312271 - RNA, 19 nt, Homo sapiens
  misc_RNA (1)...(19): siRNA sense strand
gaacugugcgauaacuucu

SEQ ID NO: 1312272 - RNA, 19 nt, Homo sapiens
  misc_RNA (1)...(19): siRNA sense strand
ccuacucaauuaagacaug

SEQ ID NO: 1312273 - RNA, 19 nt, Homo sapiens
  misc_RNA (1)...(19): siRNA sense strand
gacaaggacgcgaucuaug

SEQ ID NO: 1312274 - RNA, 19 nt, Homo sapiens
  misc_RNA (1)...(19): siRNA sense strand
ccacacccuacucaauuaa

SEQ ID NO: 1312275 - RNA, 19 nt, Homo sapiens
  misc_RNA (1)...(19): siRNA sense strand
uccacgaacugugcgauaa

SEQ ID NO: 1312276 - RNA, 19 nt, Homo sapiens
  misc_RNA (1)...(19): siRNA sense strand
gaauaguacagcccaugau

SEQ ID NO: 1312277 - RNA, 19 nt, Homo sapiens
  misc_RNA (1)...(19): siRNA sense strand
ccaagucagaucaugaaga

SEQ ID NO: 1312278 - RNA, 19 nt, Homo sapiens
  misc_RNA (1)...(19): siRNA sense strand
gcuccaagucagaucauga

SEQ ID NO: 1312279 - RNA, 19 nt, Homo sapiens
  misc_RNA (1)...(19): siRNA sense strand
gggacaaggacgcgaucua

SEQ ID NO: 1312280 - RNA, 19 nt, Homo sapiens
  misc_RNA (1)...(19): siRNA sense strand
guagcaacaaauaucauga

SEQ ID NO: 1312281 - RNA, 19 nt, Homo sapiens
  misc_RNA (1)...(19): siRNA sense strand
accgauacauuagcuguuu

SEQ ID NO: 1312282 - RNA, 19 nt, Homo sapiens
  misc_RNA (1)...(19): siRNA sense strand
guuuauuaaugccagaaga

SEQ ID NO: 1312283 - RNA, 19 nt, Homo sapiens
  misc_RNA (1)...(19): siRNA sense strand
gcaaggggaugguuuagac

SEQ ID NO: 1312284 - RNA, 19 nt, Homo sapiens
  misc_RNA (1)...(19): siRNA sense strand
uaacuucugccaccgauac

SEQ ID NO: 1312285 - RNA, 19 nt, Homo sapiens
  misc_RNA (1)...(19): siRNA sense strand
ggacagguuauggacauuc

SEQ ID NO: 1312286 - RNA, 19 nt, Homo sapiens
  misc_RNA (1)...(19): siRNA sense strand
aauaguacagcccaugauu

SEQ ID NO: 1312287 - RNA, 19 nt, Homo sapiens
  misc_RNA (1)...(19): siRNA sense strand
acaaggacgcgaucuaugg

SEQ ID NO: 1312288 - RNA, 19 nt, Homo sapiens
  misc_RNA (1)...(19): siRNA sense strand
aaaucucgcugaccauaac

SEQ ID NO: 1312289 - RNA, 19 nt, Homo sapiens
  misc_RNA (1)...(19): siRNA sense strand
caaguacuaagguuucauc

SEQ ID NO: 1312290 - RNA, 19 nt, Homo sapiens
  misc_RNA (1)...(19): siRNA sense strand
gccagaagaagaauaguac

SEQ ID NO: 1312291 - RNA, 19 nt, Homo sapiens
  misc_RNA (1)...(19): siRNA sense strand
accauaacccuucuucuug

SEQ ID NO: 1312292 - RNA, 19 nt, Homo sapiens
  misc_RNA (1)...(19): siRNA sense strand
cgaacugugcgauaacuuc

SEQ ID NO: 1312293 - RNA, 19 nt, Homo sapiens
  misc_RNA (1)...(19): siRNA sense strand
ucaggcuccuccacaaauc

SEQ ID NO: 1312294 - RNA, 19 nt, Homo sapiens
  misc_RNA (1)...(19): siRNA sense strand
uguguuggauggucagcaa

SEQ ID NO: 1312295 - RNA, 19 nt, Homo sapiens
  misc_RNA (1)...(19): siRNA sense strand
gucagaucaugaagaacuu

SEQ ID NO: 1312296 - RNA, 19 nt, Homo sapiens
  misc_RNA (1)...(19): siRNA sense strand
agaauaguacagcccauga

SEQ ID NO: 1312297 - RNA, 19 nt, Homo sapiens
  misc_RNA (1)...(19): siRNA sense strand
acaagcaauacaaguacua

SEQ ID NO: 1312298 - RNA, 19 nt, Homo sapiens
  misc_RNA (1)...(19): siRNA sense strand
acgaugaugauccggauaa

SEQ ID NO: 1312299 - RNA, 19 nt, Homo sapiens
  misc_RNA (1)...(19): siRNA sense strand
ugccagaagaagaauagua

SEQ ID NO: 1312300 - RNA, 19 nt, Homo sapiens
  misc_RNA (1)...(19): siRNA sense strand
ggucuucgccaagcagguu

SEQ ID NO: 1312301 - RNA, 19 nt, Homo sapiens
  misc_RNA (1)...(19): siRNA sense strand
gcggagacaacagcaguga

SEQ ID NO: 1312302 - RNA, 19 nt, Homo sapiens
  misc_RNA (1)...(19): siRNA sense strand
auacaaguacuaagguuuc

SEQ ID NO: 1312303 - RNA, 19 nt, Homo sapiens
  misc_RNA (1)...(19): siRNA sense strand
agcaacaaauaucaugaga

SEQ ID NO: 1312304 - RNA, 19 nt, Homo sapiens
  misc_RNA (1)...(19): siRNA sense strand
gaaaagguccacgaacugu

SEQ ID NO: 1312305 - RNA, 19 nt, Homo sapiens
  misc_RNA (1)...(19): siRNA sense strand
caaggagcagcauauaguc

SEQ ID NO: 1312306 - RNA, 19 nt, Homo sapiens
  misc_RNA (1)...(19): siRNA sense strand
gccaaggagcagcauauag

SEQ ID NO: 1312307 - RNA, 19 nt, Homo sapiens
  misc_RNA (1)...(19): siRNA sense strand
uggacaauuugaugauaca

SEQ ID NO: 1312308 - RNA, 19 nt, Homo sapiens
  misc_RNA (1)...(19): siRNA sense strand
gguuucaucuuuuggaguu

SEQ ID NO: 1312309 - RNA, 19 nt, Homo sapiens
  misc_RNA (1)...(19): siRNA sense strand
cgauacauuagcuguuuga

SEQ ID NO: 1312310 - RNA, 19 nt, Homo sapiens
  misc_RNA (1)...(19): siRNA sense strand
ccgauacauuagcuguuug

SEQ ID NO: 1312311 - RNA, 19 nt, Homo sapiens
  misc_RNA (1)...(19): siRNA sense strand
gcagcuccaagucagauca

SEQ ID NO: 1312312 - RNA, 19 nt, Homo sapiens
  misc_RNA (1)...(19): siRNA sense strand
caauguuggcggacagguu

SEQ ID NO: 1312313 - RNA, 19 nt, Homo sapiens
  misc_RNA (1)...(19): siRNA sense strand
auuaaugccagaagaagaa

SEQ ID NO: 1312314 - RNA, 19 nt, Homo sapiens
  misc_RNA (1)...(19): siRNA sense strand
uagaaaagguccacgaacu

SEQ ID NO: 1312315 - RNA, 19 nt, Homo sapiens
  misc_RNA (1)...(19): siRNA sense strand
cccacaauguuaaauucug

SEQ ID NO: 1312316 - RNA, 19 nt, Homo sapiens
  misc_RNA (1)...(19): siRNA sense strand
ccaccacccagccaugaug

SEQ ID NO: 1312317 - RNA, 19 nt, Homo sapiens
  misc_RNA (1)...(19): siRNA sense strand
augaugauccggauaagga

SEQ ID NO: 1312318 - RNA, 19 nt, Homo sapiens
  misc_RNA (1)...(19): siRNA sense strand
guacuaagguuucaucuuu

SEQ ID NO: 1312319 - RNA, 19 nt, Homo sapiens
  misc_RNA (1)...(19): siRNA sense strand
caagucagaucaugaagaa

SEQ ID NO: 1312320 - RNA, 19 nt, Homo sapiens
  misc_RNA (1)...(19): siRNA sense strand
gauacaagcaauacaagua

SEQ ID NO: 1312321 - RNA, 19 nt, Homo sapiens
  misc_RNA (1)...(19): siRNA sense strand
caaaguagcaacaaauauc

SEQ ID NO: 1312322 - RNA, 19 nt, Homo sapiens
  misc_RNA (1)...(19): siRNA sense strand
gaccauaacccuucuucuu

SEQ ID NO: 1312323 - RNA, 19 nt, Homo sapiens
  misc_RNA (1)...(19): siRNA sense strand
ggacaaggacgcgaucuau

SEQ ID NO: 1312324 - RNA, 19 nt, Homo sapiens
  misc_RNA (1)...(19): siRNA sense strand
gcuggacaauuugaugaua

SEQ ID NO: 1312325 - RNA, 19 nt, Homo sapiens
  misc_RNA (1)...(19): siRNA sense strand
caauacaaguacuaagguu

SEQ ID NO: 1312326 - RNA, 19 nt, Homo sapiens
  misc_RNA (1)...(19): siRNA sense strand
ccaucgaccucgucauuga

SEQ ID NO: 1312327 - RNA, 19 nt, Homo sapiens
  misc_RNA (1)...(19): siRNA sense strand
gaugauacaagcaauacaa

SEQ ID NO: 1312328 - RNA, 19 nt, Homo sapiens
  misc_RNA (1)...(19): siRNA sense strand
guacaggugacgaugauga

SEQ ID NO: 1312329 - RNA, 19 nt, Homo sapiens
  misc_RNA (1)...(19): siRNA sense strand
ccaaggagcagcauauagu

SEQ ID NO: 1312330 - RNA, 19 nt, Homo sapiens
  misc_RNA (1)...(19): siRNA sense strand
acgaugagcugccccauua

SEQ ID NO: 1312331 - RNA, 19 nt, Homo sapiens
  misc_RNA (1)...(19): siRNA sense strand
agacaacaguguagcuuca

SEQ ID NO: 1312332 - RNA, 19 nt, Homo sapiens
  misc_RNA (1)...(19): siRNA sense strand
gagcuggacaauuugauga

SEQ ID NO: 1312333 - RNA, 19 nt, Homo sapiens
  misc_RNA (1)...(19): siRNA sense strand
gagccaaggagcagcauau

SEQ ID NO: 1312334 - RNA, 19 nt, Homo sapiens
  misc_RNA (1)...(19): siRNA sense strand
gcccaucgaccucgucauu

SEQ ID NO: 1312335 - RNA, 19 nt, Homo sapiens
  misc_RNA (1)...(19): siRNA sense strand
ccaaaguagcaacaaauau

SEQ ID NO: 1312336 - RNA, 19 nt, Homo sapiens
  misc_RNA (1)...(19): siRNA sense strand
gcucuggucuuugagaagu

SEQ ID NO: 1312337 - RNA, 19 nt, Homo sapiens
  misc_RNA (1)...(19): siRNA sense strand
uaguacagcccaugauuga

SEQ ID NO: 1312338 - RNA, 19 nt, Homo sapiens
  misc_RNA (1)...(19): siRNA sense strand
caaaucucgcugaccauaa

SEQ ID NO: 1312339 - RNA, 19 nt, Homo sapiens
  misc_RNA (1)...(19): siRNA sense strand
gcaauacaaguacuaaggu

SEQ ID NO: 1312340 - RNA, 19 nt, Homo sapiens
  misc_RNA (1)...(19): siRNA sense strand
cccaaaguagcaacaaaua

SEQ ID NO: 1312341 - RNA, 19 nt, Homo sapiens
  misc_RNA (1)...(19): siRNA sense strand
caagcaauacaaguacuaa

SEQ ID NO: 1312342 - RNA, 19 nt, Homo sapiens
  misc_RNA (1)...(19): siRNA sense strand
acaaauaucaugagagcau

SEQ ID NO: 1312343 - RNA, 19 nt, Homo sapiens
  misc_RNA (1)...(19): siRNA sense strand
acaaaucucgcugaccaua

SEQ ID NO: 1312344 - RNA, 19 nt, Homo sapiens
  misc_RNA (1)...(19): siRNA sense strand
gaacugugcgauaacuucu

SEQ ID NO: 1312345 - RNA, 19 nt, Homo sapiens
  misc_RNA (1)...(19): siRNA sense strand
gacaaggacgcgaucuaug

SEQ ID NO: 1312346 - RNA, 19 nt, Homo sapiens
  misc_RNA (1)...(19): siRNA sense strand
uccacgaacugugcgauaa

SEQ ID NO: 1312347 - RNA, 19 nt, Homo sapiens
  misc_RNA (1)...(19): siRNA sense strand
gaauaguacagcccaugau

SEQ ID NO: 1312348 - RNA, 19 nt, Homo sapiens
  misc_RNA (1)...(19): siRNA sense strand
ccaagucagaucaugaaga

SEQ ID NO: 1312349 - RNA, 19 nt, Homo sapiens
  misc_RNA (1)...(19): siRNA sense strand
gcuccaagucagaucauga

SEQ ID NO: 1312350 - RNA, 19 nt, Homo sapiens
  misc_RNA (1)...(19): siRNA sense strand
gggacaaggacgcgaucua

SEQ ID NO: 1312351 - RNA, 19 nt, Homo sapiens
  misc_RNA (1)...(19): siRNA sense strand
guagcaacaaauaucauga

SEQ ID NO: 1312352 - RNA, 19 nt, Homo sapiens
  misc_RNA (1)...(19): siRNA sense strand
accgauacauuagcuguuu

SEQ ID NO: 1312353 - RNA, 19 nt, Homo sapiens
  misc_RNA (1)...(19): siRNA sense strand
guuuauuaaugccagaaga

SEQ ID NO: 1312354 - RNA, 19 nt, Homo sapiens
  misc_RNA (1)...(19): siRNA sense strand
gcaaggggaugguuuagac

SEQ ID NO: 1312355 - RNA, 19 nt, Homo sapiens
  misc_RNA (1)...(19): siRNA sense strand
uaacuucugccaccgauac

SEQ ID NO: 1312356 - RNA, 19 nt, Homo sapiens
  misc_RNA (1)...(19): siRNA sense strand
aauaguacagcccaugauu

SEQ ID NO: 1312357 - RNA, 19 nt, Homo sapiens
  misc_RNA (1)...(19): siRNA sense strand
acaaggacgcgaucuaugg

SEQ ID NO: 1312358 - RNA, 19 nt, Homo sapiens
  misc_RNA (1)...(19): siRNA sense strand
aaaucucgcugaccauaac

SEQ ID NO: 1312359 - RNA, 19 nt, Homo sapiens
  misc_RNA (1)...(19): siRNA sense strand
caaguacuaagguuucauc

SEQ ID NO: 1312360 - RNA, 19 nt, Homo sapiens
  misc_RNA (1)...(19): siRNA sense strand
gccagaagaagaauaguac

SEQ ID NO: 1312361 - RNA, 19 nt, Homo sapiens
  misc_RNA (1)...(19): siRNA sense strand
accauaacccuucuucuug

SEQ ID NO: 1312362 - RNA, 19 nt, Homo sapiens
  misc_RNA (1)...(19): siRNA sense strand
cgaacugugcgauaacuuc

SEQ ID NO: 1312363 - RNA, 19 nt, Homo sapiens
  misc_RNA (1)...(19): siRNA sense strand
ucaggcuccuccacaaauc

SEQ ID NO: 1312364 - RNA, 19 nt, Homo sapiens
  misc_RNA (1)...(19): siRNA sense strand
uguguuggauggucagcaa

SEQ ID NO: 1312365 - RNA, 19 nt, Homo sapiens
  misc_RNA (1)...(19): siRNA sense strand
acaagcaauacaaguacua

SEQ ID NO: 1312366 - RNA, 19 nt, Homo sapiens
  misc_RNA (1)...(19): siRNA sense strand
agaauaguacagcccauga

SEQ ID NO: 1312367 - RNA, 19 nt, Homo sapiens
  misc_RNA (1)...(19): siRNA sense strand
gucagaucaugaagaacuu

SEQ ID NO: 1312368 - RNA, 19 nt, Homo sapiens
  misc_RNA (1)...(19): siRNA sense strand
ggucuucgccaagcagguu

SEQ ID NO: 1312369 - RNA, 19 nt, Homo sapiens
  misc_RNA (1)...(19): siRNA sense strand
ugccagaagaagaauagua

SEQ ID NO: 1312370 - RNA, 19 nt, Homo sapiens
  misc_RNA (1)...(19): siRNA sense strand
acgaugaugauccggauaa

SEQ ID NO: 1312371 - RNA, 19 nt, Homo sapiens
  misc_RNA (1)...(19): siRNA sense strand
auacaaguacuaagguuuc

SEQ ID NO: 1312372 - RNA, 19 nt, Homo sapiens
  misc_RNA (1)...(19): siRNA sense strand
agcaacaaauaucaugaga

SEQ ID NO: 1312373 - RNA, 19 nt, Homo sapiens
  misc_RNA (1)...(19): siRNA sense strand
gcggagacaacagcaguga

SEQ ID NO: 1312374 - RNA, 19 nt, Homo sapiens
  misc_RNA (1)...(19): siRNA sense strand
gguuucaucuuuuggaguu

SEQ ID NO: 1312375 - RNA, 19 nt, Homo sapiens
  misc_RNA (1)...(19): siRNA sense strand
caaggagcagcauauaguc

SEQ ID NO: 1312376 - RNA, 19 nt, Homo sapiens
  misc_RNA (1)...(19): siRNA sense strand
gccaaggagcagcauauag

SEQ ID NO: 1312377 - RNA, 19 nt, Homo sapiens
  misc_RNA (1)...(19): siRNA sense strand
cgauacauuagcuguuuga

SEQ ID NO: 1312378 - RNA, 19 nt, Homo sapiens
  misc_RNA (1)...(19): siRNA sense strand
ccgauacauuagcuguuug

SEQ ID NO: 1312379 - RNA, 19 nt, Homo sapiens
  misc_RNA (1)...(19): siRNA sense strand
uggacaauuugaugauaca

SEQ ID NO: 1312380 - RNA, 19 nt, Homo sapiens
  misc_RNA (1)...(19): siRNA sense strand
gaaaagguccacgaacugu

SEQ ID NO: 1312381 - RNA, 19 nt, Homo sapiens
  misc_RNA (1)...(19): siRNA sense strand
gcagcuccaagucagauca

SEQ ID NO: 1312382 - RNA, 19 nt, Homo sapiens
  misc_RNA (1)...(19): siRNA sense strand
auuaaugccagaagaagaa

SEQ ID NO: 1312383 - RNA, 19 nt, Homo sapiens
  misc_RNA (1)...(19): siRNA sense strand
uagaaaagguccacgaacu

SEQ ID NO: 1312384 - RNA, 19 nt, Homo sapiens
  misc_RNA (1)...(19): siRNA sense strand
augaugauccggauaagga

SEQ ID NO: 1312385 - RNA, 19 nt, Homo sapiens
  misc_RNA (1)...(19): siRNA sense strand
guacuaagguuucaucuuu

SEQ ID NO: 1312386 - RNA, 19 nt, Homo sapiens
  misc_RNA (1)...(19): siRNA sense strand
caagucagaucaugaagaa

SEQ ID NO: 1312387 - RNA, 19 nt, Homo sapiens
  misc_RNA (1)...(19): siRNA sense strand
gauacaagcaauacaagua

SEQ ID NO: 1312388 - RNA, 19 nt, Homo sapiens
  misc_RNA (1)...(19): siRNA sense strand
caaaguagcaacaaauauc

SEQ ID NO: 1312389 - RNA, 19 nt, Homo sapiens
  misc_RNA (1)...(19): siRNA sense strand
gaccauaacccuucuucuu

SEQ ID NO: 1312390 - RNA, 19 nt, Homo sapiens
  misc_RNA (1)...(19): siRNA sense strand
ggacaaggacgcgaucuau

SEQ ID NO: 1312391 - RNA, 19 nt, Homo sapiens
  misc_RNA (1)...(19): siRNA sense strand
gcuggacaauuugaugaua

SEQ ID NO: 1312392 - RNA, 19 nt, Homo sapiens
  misc_RNA (1)...(19): siRNA sense strand
caauacaaguacuaagguu

SEQ ID NO: 1312393 - RNA, 19 nt, Homo sapiens
  misc_RNA (1)...(19): siRNA sense strand
ccaucgaccucgucauuga

SEQ ID NO: 1312394 - RNA, 19 nt, Homo sapiens
  misc_RNA (1)...(19): siRNA sense strand
gaugauacaagcaauacaa

SEQ ID NO: 1312395 - RNA, 19 nt, Homo sapiens
  misc_RNA (1)...(19): siRNA sense strand
guacaggugacgaugauga

SEQ ID NO: 1312396 - RNA, 19 nt, Homo sapiens
  misc_RNA (1)...(19): siRNA sense strand
ccaaggagcagcauauagu

SEQ ID NO: 1312397 - RNA, 19 nt, Homo sapiens
  misc_RNA (1)...(19): siRNA sense strand
agacaacaguguagcuuca

SEQ ID NO: 1312398 - RNA, 19 nt, Homo sapiens
  misc_RNA (1)...(19): siRNA sense strand
gagcuggacaauuugauga

SEQ ID NO: 1312399 - RNA, 19 nt, Homo sapiens
  misc_RNA (1)...(19): siRNA sense strand
gagccaaggagcagcauau

SEQ ID NO: 1312400 - RNA, 19 nt, Homo sapiens
  misc_RNA (1)...(19): siRNA sense strand
gcccaucgaccucgucauu

SEQ ID NO: 1312401 - RNA, 19 nt, Homo sapiens
  misc_RNA (1)...(19): siRNA sense strand
ccaaaguagcaacaaauau

SEQ ID NO: 1312402 - RNA, 19 nt, Homo sapiens
  misc_RNA (1)...(19): siRNA sense strand
gcucuggucuuugagaagu

SEQ ID NO: 1312403 - RNA, 19 nt, Homo sapiens
  misc_RNA (1)...(19): siRNA sense strand
uaguacagcccaugauuga

SEQ ID NO: 1312404 - RNA, 19 nt, Homo sapiens
  misc_RNA (1)...(19): siRNA sense strand
caaaucucgcugaccauaa

SEQ ID NO: 1312405 - RNA, 19 nt, Homo sapiens
  misc_RNA (1)...(19): siRNA sense strand
gcaauacaaguacuaaggu

SEQ ID NO: 1312406 - RNA, 19 nt, Homo sapiens
  misc_RNA (1)...(19): siRNA sense strand
cccaaaguagcaacaaaua

SEQ ID NO: 1312407 - RNA, 19 nt, Homo sapiens
  misc_RNA (1)...(19): siRNA sense strand
caagcaauacaaguacuaa

SEQ ID NO: 1312408 - RNA, 19 nt, Homo sapiens
  misc_RNA (1)...(19): siRNA sense strand
acaaauaucaugagagcau

SEQ ID NO: 1312409 - RNA, 19 nt, Homo sapiens
  misc_RNA (1)...(19): siRNA sense strand
acaaaucucgcugaccaua

SEQ ID NO: 1312410 - RNA, 19 nt, Homo sapiens
  misc_RNA (1)...(19): siRNA sense strand
gaacugugcgauaacuucu

SEQ ID NO: 1312411 - RNA, 19 nt, Homo sapiens
  misc_RNA (1)...(19): siRNA sense strand
gacaaggacgcgaucuaug

SEQ ID NO: 1312412 - RNA, 19 nt, Homo sapiens
  misc_RNA (1)...(19): siRNA sense strand
uccacgaacugugcgauaa

SEQ ID NO: 1312413 - RNA, 19 nt, Homo sapiens
  misc_RNA (1)...(19): siRNA sense strand
gaauaguacagcccaugau

SEQ ID NO: 1312414 - RNA, 19 nt, Homo sapiens
  misc_RNA (1)...(19): siRNA sense strand
ccaagucagaucaugaaga

SEQ ID NO: 1312415 - RNA, 19 nt, Homo sapiens
  misc_RNA (1)...(19): siRNA sense strand
gcuccaagucagaucauga

SEQ ID NO: 1312416 - RNA, 19 nt, Homo sapiens
  misc_RNA (1)...(19): siRNA sense strand
gggacaaggacgcgaucua

SEQ ID NO: 1312417 - RNA, 19 nt, Homo sapiens
  misc_RNA (1)...(19): siRNA sense strand
guagcaacaaauaucauga

SEQ ID NO: 1312418 - RNA, 19 nt, Homo sapiens
  misc_RNA (1)...(19): siRNA sense strand
accgauacauuagcuguuu

SEQ ID NO: 1312419 - RNA, 19 nt, Homo sapiens
  misc_RNA (1)...(19): siRNA sense strand
guuuauuaaugccagaaga

SEQ ID NO: 1312420 - RNA, 19 nt, Homo sapiens
  misc_RNA (1)...(19): siRNA sense strand
gcaaggggaugguuuagac

SEQ ID NO: 1312421 - RNA, 19 nt, Homo sapiens
  misc_RNA (1)...(19): siRNA sense strand
uaacuucugccaccgauac

SEQ ID NO: 1312422 - RNA, 19 nt, Homo sapiens
  misc_RNA (1)...(19): siRNA sense strand
aauaguacagcccaugauu

SEQ ID NO: 1312423 - RNA, 19 nt, Homo sapiens
  misc_RNA (1)...(19): siRNA sense strand
aaaucucgcugaccauaac

SEQ ID NO: 1312424 - RNA, 19 nt, Homo sapiens
  misc_RNA (1)...(19): siRNA sense strand
acaaggacgcgaucuaugg

SEQ ID NO: 1312425 - RNA, 19 nt, Homo sapiens
  misc_RNA (1)...(19): siRNA sense strand
caaguacuaagguuucauc

SEQ ID NO: 1312426 - RNA, 19 nt, Homo sapiens
  misc_RNA (1)...(19): siRNA sense strand
gccagaagaagaauaguac

SEQ ID NO: 1312427 - RNA, 19 nt, Homo sapiens
  misc_RNA (1)...(19): siRNA sense strand
accauaacccuucuucuug

SEQ ID NO: 1312428 - RNA, 19 nt, Homo sapiens
  misc_RNA (1)...(19): siRNA sense strand
cgaacugugcgauaacuuc

SEQ ID NO: 1312429 - RNA, 19 nt, Homo sapiens
  misc_RNA (1)...(19): siRNA sense strand
ucaggcuccuccacaaauc

SEQ ID NO: 1312430 - RNA, 19 nt, Homo sapiens
  misc_RNA (1)...(19): siRNA sense strand
uguguuggauggucagcaa

SEQ ID NO: 1312431 - RNA, 19 nt, Homo sapiens
  misc_RNA (1)...(19): siRNA sense strand
acaagcaauacaaguacua

SEQ ID NO: 1312432 - RNA, 19 nt, Homo sapiens
  misc_RNA (1)...(19): siRNA sense strand
agaauaguacagcccauga

SEQ ID NO: 1312433 - RNA, 19 nt, Homo sapiens
  misc_RNA (1)...(19): siRNA sense strand
gucagaucaugaagaacuu

SEQ ID NO: 1312434 - RNA, 19 nt, Homo sapiens
  misc_RNA (1)...(19): siRNA sense strand
ggucuucgccaagcagguu

SEQ ID NO: 1312435 - RNA, 19 nt, Homo sapiens
  misc_RNA (1)...(19): siRNA sense strand
ugccagaagaagaauagua

SEQ ID NO: 1312436 - RNA, 19 nt, Homo sapiens
  misc_RNA (1)...(19): siRNA sense strand
acgaugaugauccggauaa

SEQ ID NO: 1312437 - RNA, 19 nt, Homo sapiens
  misc_RNA (1)...(19): siRNA sense strand
auacaaguacuaagguuuc

SEQ ID NO: 1312438 - RNA, 19 nt, Homo sapiens
  misc_RNA (1)...(19): siRNA sense strand
agcaacaaauaucaugaga

SEQ ID NO: 1312439 - RNA, 19 nt, Homo sapiens
  misc_RNA (1)...(19): siRNA sense strand
gcggagacaacagcaguga

SEQ ID NO: 1312440 - RNA, 19 nt, Homo sapiens
  misc_RNA (1)...(19): siRNA sense strand
gguuucaucuuuuggaguu

SEQ ID NO: 1312441 - RNA, 19 nt, Homo sapiens
  misc_RNA (1)...(19): siRNA sense strand
caaggagcagcauauaguc

SEQ ID NO: 1312442 - RNA, 19 nt, Homo sapiens
  misc_RNA (1)...(19): siRNA sense strand
gccaaggagcagcauauag

SEQ ID NO: 1312443 - RNA, 19 nt, Homo sapiens
  misc_RNA (1)...(19): siRNA sense strand
uggacaauuugaugauaca

SEQ ID NO: 1312444 - RNA, 19 nt, Homo sapiens
  misc_RNA (1)...(19): siRNA sense strand
cgauacauuagcuguuuga

SEQ ID NO: 1312445 - RNA, 19 nt, Homo sapiens
  misc_RNA (1)...(19): siRNA sense strand
ccgauacauuagcuguuug

SEQ ID NO: 1312446 - RNA, 19 nt, Homo sapiens
  misc_RNA (1)...(19): siRNA sense strand
gaaaagguccacgaacugu

SEQ ID NO: 1312447 - RNA, 19 nt, Homo sapiens
  misc_RNA (1)...(19): siRNA sense strand
gcagcuccaagucagauca

SEQ ID NO: 1312448 - RNA, 19 nt, Homo sapiens
  misc_RNA (1)...(19): siRNA sense strand
auuaaugccagaagaagaa

SEQ ID NO: 1312449 - RNA, 19 nt, Homo sapiens
  misc_RNA (1)...(19): siRNA sense strand
uagaaaagguccacgaacu

SEQ ID NO: 1312450 - RNA, 19 nt, Homo sapiens
  misc_RNA (1)...(19): siRNA sense strand
augaugauccggauaagga

SEQ ID NO: 1312451 - RNA, 19 nt, Homo sapiens
  misc_RNA (1)...(19): siRNA sense strand
guacuaagguuucaucuuu

SEQ ID NO: 1312452 - RNA, 19 nt, Homo sapiens
  misc_RNA (1)...(19): siRNA sense strand
caagucagaucaugaagaa

SEQ ID NO: 1312453 - RNA, 19 nt, Homo sapiens
  misc_RNA (1)...(19): siRNA sense strand
gauacaagcaauacaagua

SEQ ID NO: 1312454 - RNA, 19 nt, Homo sapiens
  misc_RNA (1)...(19): siRNA sense strand
caaaguagcaacaaauauc

SEQ ID NO: 1312455 - RNA, 19 nt, Homo sapiens
  misc_RNA (1)...(19): siRNA sense strand
gaccauaacccuucuucuu

SEQ ID NO: 1312456 - RNA, 19 nt, Homo sapiens
  misc_RNA (1)...(19): siRNA sense strand
gcuggacaauuugaugaua

SEQ ID NO: 1312457 - RNA, 19 nt, Homo sapiens
  misc_RNA (1)...(19): siRNA sense strand
caauacaaguacuaagguu

SEQ ID NO: 1312458 - RNA, 19 nt, Homo sapiens
  misc_RNA (1)...(19): siRNA sense strand
ccaucgaccucgucauuga

SEQ ID NO: 1312459 - RNA, 19 nt, Homo sapiens
  misc_RNA (1)...(19): siRNA sense strand
gaugauacaagcaauacaa

SEQ ID NO: 1312460 - RNA, 19 nt, Homo sapiens
  misc_RNA (1)...(19): siRNA sense strand
guacaggugacgaugauga

SEQ ID NO: 1312461 - RNA, 19 nt, Homo sapiens
  misc_RNA (1)...(19): siRNA sense strand
ccaaggagcagcauauagu

SEQ ID NO: 1312462 - RNA, 19 nt, Homo sapiens
  misc_RNA (1)...(19): siRNA sense strand
agacaacaguguagcuuca

SEQ ID NO: 1312463 - RNA, 19 nt, Homo sapiens
  misc_RNA (1)...(19): siRNA sense strand
gagcuggacaauuugauga

SEQ ID NO: 1312464 - RNA, 19 nt, Homo sapiens
  misc_RNA (1)...(19): siRNA sense strand
gagccaaggagcagcauau

SEQ ID NO: 1312465 - RNA, 19 nt, Homo sapiens
  misc_RNA (1)...(19): siRNA sense strand
gcccaucgaccucgucauu

SEQ ID NO: 1312466 - RNA, 19 nt, Homo sapiens
  misc_RNA (1)...(19): siRNA sense strand
ccaaaguagcaacaaauau

SEQ ID NO: 1312467 - RNA, 19 nt, Homo sapiens
  misc_RNA (1)...(19): siRNA sense strand
gcaauacaaguacuaaggu

SEQ ID NO: 1312468 - RNA, 19 nt, Homo sapiens
  misc_RNA (1)...(19): siRNA sense strand
uaguacagcccaugauuga

SEQ ID NO: 1312469 - RNA, 19 nt, Homo sapiens
  misc_RNA (1)...(19): siRNA sense strand
caaaucucgcugaccauaa

SEQ ID NO: 1312470 - RNA, 19 nt, Homo sapiens
  misc_RNA (1)...(19): siRNA sense strand
gcucuggucuuugagaagu

SEQ ID NO: 1312471 - RNA, 19 nt, Homo sapiens
  misc_RNA (1)...(19): siRNA sense strand
cccaaaguagcaacaaaua

SEQ ID NO: 1312472 - RNA, 19 nt, Homo sapiens
  misc_RNA (1)...(19): siRNA sense strand
caagcaauacaaguacuaa

SEQ ID NO: 1312473 - RNA, 19 nt, Homo sapiens
  misc_RNA (1)...(19): siRNA sense strand
acaaauaucaugagagcau

SEQ ID NO: 1312474 - RNA, 19 nt, Homo sapiens
  misc_RNA (1)...(19): siRNA sense strand
acaaaucucgcugaccaua

SEQ ID NO: 1312475 - RNA, 19 nt, Homo sapiens
  misc_RNA (1)...(19): siRNA sense strand
gaacugugcgauaacuucu

SEQ ID NO: 1312476 - RNA, 19 nt, Homo sapiens
  misc_RNA (1)...(19): siRNA sense strand
uccacgaacugugcgauaa

SEQ ID NO: 1312477 - RNA, 19 nt, Homo sapiens
  misc_RNA (1)...(19): siRNA sense strand
gaauaguacagcccaugau

SEQ ID NO: 1312478 - RNA, 19 nt, Homo sapiens
  misc_RNA (1)...(19): siRNA sense strand
ccaagucagaucaugaaga

SEQ ID NO: 1312479 - RNA, 19 nt, Homo sapiens
  misc_RNA (1)...(19): siRNA sense strand
gcuccaagucagaucauga

SEQ ID NO: 1312480 - RNA, 19 nt, Homo sapiens
  misc_RNA (1)...(19): siRNA sense strand
guagcaacaaauaucauga

SEQ ID NO: 1312481 - RNA, 19 nt, Homo sapiens
  misc_RNA (1)...(19): siRNA sense strand
accgauacauuagcuguuu

SEQ ID NO: 1312482 - RNA, 19 nt, Homo sapiens
  misc_RNA (1)...(19): siRNA sense strand
guuuauuaaugccagaaga

SEQ ID NO: 1312483 - RNA, 19 nt, Homo sapiens
  misc_RNA (1)...(19): siRNA sense strand
gcaaggggaugguuuagac

SEQ ID NO: 1312484 - RNA, 19 nt, Homo sapiens
  misc_RNA (1)...(19): siRNA sense strand
uaacuucugccaccgauac

SEQ ID NO: 1312485 - RNA, 19 nt, Homo sapiens
  misc_RNA (1)...(19): siRNA sense strand
aauaguacagcccaugauu

SEQ ID NO: 1312486 - RNA, 19 nt, Homo sapiens
  misc_RNA (1)...(19): siRNA sense strand
aaaucucgcugaccauaac

SEQ ID NO: 1312487 - RNA, 19 nt, Homo sapiens
  misc_RNA (1)...(19): siRNA sense strand
caaguacuaagguuucauc

SEQ ID NO: 1312488 - RNA, 19 nt, Homo sapiens
  misc_RNA (1)...(19): siRNA sense strand
gccagaagaagaauaguac

SEQ ID NO: 1312489 - RNA, 19 nt, Homo sapiens
  misc_RNA (1)...(19): siRNA sense strand
accauaacccuucuucuug

SEQ ID NO: 1312490 - RNA, 19 nt, Homo sapiens
  misc_RNA (1)...(19): siRNA sense strand
cgaacugugcgauaacuuc

SEQ ID NO: 1312491 - RNA, 19 nt, Homo sapiens
  misc_RNA (1)...(19): siRNA sense strand
ucaggcuccuccacaaauc

SEQ ID NO: 1312492 - RNA, 19 nt, Homo sapiens
  misc_RNA (1)...(19): siRNA sense strand
uguguuggauggucagcaa

SEQ ID NO: 1312493 - RNA, 19 nt, Homo sapiens
  misc_RNA (1)...(19): siRNA sense strand
gucagaucaugaagaacuu

SEQ ID NO: 1312494 - RNA, 19 nt, Homo sapiens
  misc_RNA (1)...(19): siRNA sense strand
agaauaguacagcccauga

SEQ ID NO: 1312495 - RNA, 19 nt, Homo sapiens
  misc_RNA (1)...(19): siRNA sense strand
acaagcaauacaaguacua

SEQ ID NO: 1312496 - RNA, 19 nt, Homo sapiens
  misc_RNA (1)...(19): siRNA sense strand
acgaugaugauccggauaa

SEQ ID NO: 1312497 - RNA, 19 nt, Homo sapiens
  misc_RNA (1)...(19): siRNA sense strand
ggucuucgccaagcagguu

SEQ ID NO: 1312498 - RNA, 19 nt, Homo sapiens
  misc_RNA (1)...(19): siRNA sense strand
ugccagaagaagaauagua

SEQ ID NO: 1312499 - RNA, 19 nt, Homo sapiens
  misc_RNA (1)...(19): siRNA sense strand
auacaaguacuaagguuuc

SEQ ID NO: 1312500 - RNA, 19 nt, Homo sapiens
  misc_RNA (1)...(19): siRNA sense strand
agcaacaaauaucaugaga

SEQ ID NO: 1312501 - RNA, 19 nt, Homo sapiens
  misc_RNA (1)...(19): siRNA sense strand
gcggagacaacagcaguga

SEQ ID NO: 1312502 - RNA, 19 nt, Homo sapiens
  misc_RNA (1)...(19): siRNA sense strand
ccgauacauuagcuguuug

SEQ ID NO: 1312503 - RNA, 19 nt, Homo sapiens
  misc_RNA (1)...(19): siRNA sense strand
caaggagcagcauauaguc

SEQ ID NO: 1312504 - RNA, 19 nt, Homo sapiens
  misc_RNA (1)...(19): siRNA sense strand
gguuucaucuuuuggaguu

SEQ ID NO: 1312505 - RNA, 19 nt, Homo sapiens
  misc_RNA (1)...(19): siRNA sense strand
gccaaggagcagcauauag

SEQ ID NO: 1312506 - RNA, 19 nt, Homo sapiens
  misc_RNA (1)...(19): siRNA sense strand
uggacaauuugaugauaca

SEQ ID NO: 1312507 - RNA, 19 nt, Homo sapiens
  misc_RNA (1)...(19): siRNA sense strand
gaaaagguccacgaacugu

SEQ ID NO: 1312508 - RNA, 19 nt, Homo sapiens
  misc_RNA (1)...(19): siRNA sense strand
cgauacauuagcuguuuga

SEQ ID NO: 1312509 - RNA, 19 nt, Homo sapiens
  misc_RNA (1)...(19): siRNA sense strand
gcagcuccaagucagauca

SEQ ID NO: 1312510 - RNA, 19 nt, Homo sapiens
  misc_RNA (1)...(19): siRNA sense strand
auuaaugccagaagaagaa

SEQ ID NO: 1312511 - RNA, 19 nt, Homo sapiens
  misc_RNA (1)...(19): siRNA sense strand
augaugauccggauaagga

SEQ ID NO: 1312512 - RNA, 19 nt, Homo sapiens
  misc_RNA (1)...(19): siRNA sense strand
uagaaaagguccacgaacu

SEQ ID NO: 1312513 - RNA, 19 nt, Homo sapiens
  misc_RNA (1)...(19): siRNA sense strand
gaaacuacauguucagaaa

SEQ ID NO: 1312514 - RNA, 19 nt, Homo sapiens
  misc_RNA (1)...(19): siRNA sense strand
aagcaaagguucaguauuu

SEQ ID NO: 1312515 - RNA, 19 nt, Homo sapiens
  misc_RNA (1)...(19): siRNA sense strand
gagaagaagguuuagauua

SEQ ID NO: 1312516 - RNA, 19 nt, Homo sapiens
  misc_RNA (1)...(19): siRNA sense strand
gcaaacaaaucaugugguu

SEQ ID NO: 1312517 - RNA, 19 nt, Homo sapiens
  misc_RNA (1)...(19): siRNA sense strand
cagaucaccugaaauauuu

SEQ ID NO: 1312518 - RNA, 19 nt, Homo sapiens
  misc_RNA (1)...(19): siRNA sense strand
gcaauauucuuguaacaga

SEQ ID NO: 1312519 - RNA, 19 nt, Homo sapiens
  misc_RNA (1)...(19): siRNA sense strand
guugggaacugcugcauua

SEQ ID NO: 1312520 - RNA, 19 nt, Homo sapiens
  misc_RNA (1)...(19): siRNA sense strand
gcaaagacaugccaucuac

SEQ ID NO: 1312521 - RNA, 19 nt, Homo sapiens
  misc_RNA (1)...(19): siRNA sense strand
ggacguauuuauuauguug

SEQ ID NO: 1312522 - RNA, 19 nt, Homo sapiens
  misc_RNA (1)...(19): siRNA sense strand
ccacagcacauaaagauua

SEQ ID NO: 1312523 - RNA, 19 nt, Homo sapiens
  misc_RNA (1)...(19): siRNA sense strand
gacacaagcuuucuuugaa

SEQ ID NO: 1312524 - RNA, 19 nt, Homo sapiens
  misc_RNA (1)...(19): siRNA sense strand
gaagaacuaccaccuauau

SEQ ID NO: 1312525 - RNA, 19 nt, Homo sapiens
  misc_RNA (1)...(19): siRNA sense strand
gaaugagacuucugcaguu

SEQ ID NO: 1312526 - RNA, 19 nt, Homo sapiens
  misc_RNA (1)...(19): siRNA sense strand
gaagaagguuuagauuaug

SEQ ID NO: 1312527 - RNA, 19 nt, Homo sapiens
  misc_RNA (1)...(19): siRNA sense strand
gcaaggaccagcaaacaaa

SEQ ID NO: 1312528 - RNA, 19 nt, Homo sapiens
  misc_RNA (1)...(19): siRNA sense strand
gaucacaacuugguucaau

SEQ ID NO: 1312529 - RNA, 19 nt, Homo sapiens
  misc_RNA (1)...(19): siRNA sense strand
gcaauggaccacagaaauu

SEQ ID NO: 1312530 - RNA, 19 nt, Homo sapiens
  misc_RNA (1)...(19): siRNA sense strand
gacaguggaucacaacuug

SEQ ID NO: 1312531 - RNA, 19 nt, Homo sapiens
  misc_RNA (1)...(19): siRNA sense strand
gcaagagauugauuugaau

SEQ ID NO: 1312532 - RNA, 19 nt, Homo sapiens
  misc_RNA (1)...(19): siRNA sense strand
gucaugaucugaaaccuaa

SEQ ID NO: 1312533 - RNA, 19 nt, Homo sapiens
  misc_RNA (1)...(19): siRNA sense strand
agcaacaucuggauuaaua

SEQ ID NO: 1312534 - RNA, 19 nt, Homo sapiens
  misc_RNA (1)...(19): siRNA sense strand
gaacuaccaccuauauaga

SEQ ID NO: 1312535 - RNA, 19 nt, Homo sapiens
  misc_RNA (1)...(19): siRNA sense strand
ggagcaacaucuggauuaa

SEQ ID NO: 1312536 - RNA, 19 nt, Homo sapiens
  misc_RNA (1)...(19): siRNA sense strand
gaagagaacagacagcaau

SEQ ID NO: 1312537 - RNA, 19 nt, Homo sapiens
  misc_RNA (1)...(19): siRNA sense strand
gagcaaugcagcaguuuaa

SEQ ID NO: 1312538 - RNA, 19 nt, Homo sapiens
  misc_RNA (1)...(19): siRNA sense strand
auaggagacuugucaauuu

SEQ ID NO: 1312539 - RNA, 19 nt, Homo sapiens
  misc_RNA (1)...(19): siRNA sense strand
gaaauuaagagucaugauc

SEQ ID NO: 1312540 - RNA, 19 nt, Homo sapiens
  misc_RNA (1)...(19): siRNA sense strand
gaaagugaugggucuagua

SEQ ID NO: 1312541 - RNA, 19 nt, Homo sapiens
  misc_RNA (1)...(19): siRNA sense strand
gcacaaauggaucagauga

SEQ ID NO: 1312542 - RNA, 19 nt, Homo sapiens
  misc_RNA (1)...(19): siRNA sense strand
gagcacaaauggaucagau

SEQ ID NO: 1312543 - RNA, 19 nt, Homo sapiens
  misc_RNA (1)...(19): siRNA sense strand
ggaauuagagguccuuuua

SEQ ID NO: 1312544 - RNA, 19 nt, Homo sapiens
  misc_RNA (1)...(19): siRNA sense strand
guacuucuccguugacaaa

SEQ ID NO: 1312545 - RNA, 19 nt, Homo sapiens
  misc_RNA (1)...(19): siRNA sense strand
agacagcaauggcagagua

SEQ ID NO: 1312546 - RNA, 19 nt, Homo sapiens
  misc_RNA (1)...(19): siRNA sense strand
cagcaaaacuuaaggaaaa

SEQ ID NO: 1312547 - RNA, 19 nt, Homo sapiens
  misc_RNA (1)...(19): siRNA sense strand
uaagagucaugaucugaaa

SEQ ID NO: 1312548 - RNA, 19 nt, Homo sapiens
  misc_RNA (1)...(19): siRNA sense strand
uagaagaacuaccaccuau

SEQ ID NO: 1312549 - RNA, 19 nt, Homo sapiens
  misc_RNA (1)...(19): siRNA sense strand
caacaugggacguauuuau

SEQ ID NO: 1312550 - RNA, 19 nt, Homo sapiens
  misc_RNA (1)...(19): siRNA sense strand
acacugaaaucugauguuu

SEQ ID NO: 1312551 - RNA, 19 nt, Homo sapiens
  misc_RNA (1)...(19): siRNA sense strand
gaacugcugcauuagauau

SEQ ID NO: 1312552 - RNA, 19 nt, Homo sapiens
  misc_RNA (1)...(19): siRNA sense strand
ccagaucaccugaaauauu

SEQ ID NO: 1312553 - RNA, 19 nt, Homo sapiens
  misc_RNA (1)...(19): siRNA sense strand
gaagucaaggucaauuaaa

SEQ ID NO: 1312554 - RNA, 19 nt, Homo sapiens
  misc_RNA (1)...(19): siRNA sense strand
gcaauggcagaguauauuu

SEQ ID NO: 1312555 - RNA, 19 nt, Homo sapiens
  misc_RNA (1)...(19): siRNA sense strand
guuagagucugaaguuguu

SEQ ID NO: 1312556 - RNA, 19 nt, Homo sapiens
  misc_RNA (1)...(19): siRNA sense strand
agaagaaacagaaggauuu

SEQ ID NO: 1312557 - RNA, 19 nt, Homo sapiens
  misc_RNA (1)...(19): siRNA sense strand
ugaggaaugugauuuggaa

SEQ ID NO: 1312558 - RNA, 19 nt, Homo sapiens
  misc_RNA (1)...(19): siRNA sense strand
gaaaagcccuuaccugaag

SEQ ID NO: 1312559 - RNA, 19 nt, Homo sapiens
  misc_RNA (1)...(19): siRNA sense strand
aaccagagauucauuuaug

SEQ ID NO: 1312560 - RNA, 19 nt, Homo sapiens
  misc_RNA (1)...(19): siRNA sense strand
aaacaagagugagcacaaa

SEQ ID NO: 1312561 - RNA, 19 nt, Homo sapiens
  misc_RNA (1)...(19): siRNA sense strand
gaaacaagagugagcacaa

SEQ ID NO: 1312562 - RNA, 19 nt, Homo sapiens
  misc_RNA (1)...(19): siRNA sense strand
gauggacagucaaagaaga

SEQ ID NO: 1312563 - RNA, 19 nt, Homo sapiens
  misc_RNA (1)...(19): siRNA sense strand
ugcaagagauugauuugaa

SEQ ID NO: 1312564 - RNA, 19 nt, Homo sapiens
  misc_RNA (1)...(19): siRNA sense strand
ggauuccuuucaacagaua

SEQ ID NO: 1312565 - RNA, 19 nt, Homo sapiens
  misc_RNA (1)...(19): siRNA sense strand
gaugauggcuccagaucca

SEQ ID NO: 1312566 - RNA, 19 nt, Homo sapiens
  misc_RNA (1)...(19): siRNA sense strand
gaauaugcagggaaggaua

SEQ ID NO: 1312567 - RNA, 19 nt, Homo sapiens
  misc_RNA (1)...(19): siRNA sense strand
ggagaagaagguuuagauu

SEQ ID NO: 1312568 - RNA, 19 nt, Homo sapiens
  misc_RNA (1)...(19): siRNA sense strand
gggaacugcugcauuagau

SEQ ID NO: 1312569 - RNA, 19 nt, Homo sapiens
  misc_RNA (1)...(19): siRNA sense strand
ccagaagucauaccuguuu

SEQ ID NO: 1312570 - RNA, 19 nt, Homo sapiens
  misc_RNA (1)...(19): siRNA sense strand
gaaugcaagagauugauuu

SEQ ID NO: 1312571 - RNA, 19 nt, Homo sapiens
  misc_RNA (1)...(19): siRNA sense strand
caguuggacucaaggauuu

SEQ ID NO: 1312572 - RNA, 19 nt, Homo sapiens
  misc_RNA (1)...(19): siRNA sense strand
caauccagaucaccugaaa

SEQ ID NO: 1312573 - RNA, 19 nt, Homo sapiens
  misc_RNA (1)...(19): siRNA sense strand
gacaacaugggacguauuu

SEQ ID NO: 1312574 - RNA, 19 nt, Homo sapiens
  misc_RNA (1)...(19): siRNA sense strand
cacaguagauggacaguca

SEQ ID NO: 1312575 - RNA, 19 nt, Homo sapiens
  misc_RNA (1)...(19): siRNA sense strand
gauaaugagaagagaauga

SEQ ID NO: 1312576 - RNA, 19 nt, Homo sapiens
  misc_RNA (1)...(19): siRNA sense strand
gagguugucucgagguguu

SEQ ID NO: 1312577 - RNA, 19 nt, Homo sapiens
  misc_RNA (1)...(19): siRNA sense strand
gaaaucugauguuuuguug

SEQ ID NO: 1312578 - RNA, 19 nt, Homo sapiens
  misc_RNA (1)...(19): siRNA sense strand
caacagauaaugagcuuca

SEQ ID NO: 1312579 - RNA, 19 nt, Homo sapiens
  misc_RNA (1)...(19): siRNA sense strand
uaggagacuugucaauuug

SEQ ID NO: 1312580 - RNA, 19 nt, Homo sapiens
  misc_RNA (1)...(19): siRNA sense strand
ggagcaaugcagcaguuua

SEQ ID NO: 1312581 - RNA, 19 nt, Homo sapiens
  misc_RNA (1)...(19): siRNA sense strand
aaagaggaauacaucagaa

SEQ ID NO: 1312582 - RNA, 19 nt, Homo sapiens
  misc_RNA (1)...(19): siRNA sense strand
guagauggacagucaaaga

SEQ ID NO: 1312583 - RNA, 19 nt, Homo sapiens
  misc_RNA (1)...(19): siRNA sense strand
gaagaaacagaaggauuug

SEQ ID NO: 1312584 - RNA, 19 nt, Homo sapiens
  misc_RNA (1)...(19): siRNA sense strand
ggaauacaucagaauggua

SEQ ID NO: 1312585 - RNA, 19 nt, Homo sapiens
  misc_RNA (1)...(19): siRNA sense strand
cagaagucaaggucaauua

SEQ ID NO: 1312586 - RNA, 19 nt, Homo sapiens
  misc_RNA (1)...(19): siRNA sense strand
aaccacaacacacgaauua

SEQ ID NO: 1312587 - RNA, 19 nt, Homo sapiens
  misc_RNA (1)...(19): siRNA sense strand
caugggacguauuuauuau

SEQ ID NO: 1312588 - RNA, 19 nt, Homo sapiens
  misc_RNA (1)...(19): siRNA sense strand
uaggugaaauuaagaguca

SEQ ID NO: 1312589 - RNA, 19 nt, Homo sapiens
  misc_RNA (1)...(19): siRNA sense strand
ggaaaacaauauugaggaa

SEQ ID NO: 1312590 - RNA, 19 nt, Homo sapiens
  misc_RNA (1)...(19): siRNA sense strand
ggaaggauaacuacugcuu

SEQ ID NO: 1312591 - RNA, 19 nt, Homo sapiens
  misc_RNA (1)...(19): siRNA sense strand
acaugggacguauuuauua

SEQ ID NO: 1312592 - RNA, 19 nt, Homo sapiens
  misc_RNA (1)...(19): siRNA sense strand
gccuggaccugccaccaua

SEQ ID NO: 1312593 - RNA, 19 nt, Homo sapiens
  misc_RNA (1)...(19): siRNA sense strand
uaaagaggaauacaucaga

SEQ ID NO: 1312594 - RNA, 19 nt, Homo sapiens
  misc_RNA (1)...(19): siRNA sense strand
gaaaucacagcuucagauc

SEQ ID NO: 1312595 - RNA, 19 nt, Homo sapiens
  misc_RNA (1)...(19): siRNA sense strand
gaccagcacgggcgaguuu

SEQ ID NO: 1312596 - RNA, 19 nt, Homo sapiens
  misc_RNA (1)...(19): siRNA sense strand
gaagaacagacacaagcuu

SEQ ID NO: 1312597 - RNA, 19 nt, Homo sapiens
  misc_RNA (1)...(19): siRNA sense strand
caaacagucccaaguggaa

SEQ ID NO: 1312598 - RNA, 19 nt, Homo sapiens
  misc_RNA (1)...(19): siRNA sense strand
guucgggacuucaaagcaa

SEQ ID NO: 1312599 - RNA, 19 nt, Homo sapiens
  misc_RNA (1)...(19): siRNA sense strand
gccauuaaauccuguaacu

SEQ ID NO: 1312600 - RNA, 19 nt, Homo sapiens
  misc_RNA (1)...(19): siRNA sense strand
gcuguuguuugccauagaa

SEQ ID NO: 1312601 - RNA, 19 nt, Homo sapiens
  misc_RNA (1)...(19): siRNA sense strand
gcuaugagcaacugaagga

SEQ ID NO: 1312602 - RNA, 19 nt, Homo sapiens
  misc_RNA (1)...(19): siRNA sense strand
ggaaugcaagagauugauu

SEQ ID NO: 1312603 - RNA, 19 nt, Homo sapiens
  misc_RNA (1)...(19): siRNA sense strand
uaagaagaauugguuugga

SEQ ID NO: 1312604 - RNA, 19 nt, Homo sapiens
  misc_RNA (1)...(19): siRNA sense strand
caugggaaauucauagaca

SEQ ID NO: 1312605 - RNA, 19 nt, Homo sapiens
  misc_RNA (1)...(19): siRNA sense strand
caaagcaaagguucaguau

SEQ ID NO: 1312606 - RNA, 19 nt, Homo sapiens
  misc_RNA (1)...(19): siRNA sense strand
ucaaagcaaagguucagua

SEQ ID NO: 1312607 - RNA, 19 nt, Homo sapiens
  misc_RNA (1)...(19): siRNA sense strand
ggacuucaaagcaaagguu

SEQ ID NO: 1312608 - RNA, 19 nt, Homo sapiens
  misc_RNA (1)...(19): siRNA sense strand
gacaauggaccucagauag

SEQ ID NO: 1312609 - RNA, 19 nt, Homo sapiens
  misc_RNA (1)...(19): siRNA sense strand
cauuaaauccuguaacuca

SEQ ID NO: 1312610 - RNA, 19 nt, Homo sapiens
  misc_RNA (1)...(19): siRNA sense strand
caagaucugcgaagacguu

SEQ ID NO: 1312611 - RNA, 19 nt, Homo sapiens
  misc_RNA (1)...(19): siRNA sense strand
gagcaauggaccacagaaa

SEQ ID NO: 1312612 - RNA, 19 nt, Homo sapiens
  misc_RNA (1)...(19): siRNA sense strand
agacacaagcuuucuuuga

SEQ ID NO: 1312613 - RNA, 19 nt, Homo sapiens
  misc_RNA (1)...(19): siRNA sense strand
ggaccacgcuggacgaguu

SEQ ID NO: 1312614 - RNA, 19 nt, Homo sapiens
  misc_RNA (1)...(19): siRNA sense strand
gcaacgaguucuucuucga

SEQ ID NO: 1312615 - RNA, 19 nt, Homo sapiens
  misc_RNA (1)...(19): siRNA sense strand
caacguaggcggcaucaag

SEQ ID NO: 1312616 - RNA, 19 nt, Homo sapiens
  misc_RNA (1)...(19): siRNA sense strand
gcagaagauugaggaguuc

SEQ ID NO: 1312617 - RNA, 19 nt, Homo sapiens
  misc_RNA (1)...(19): siRNA sense strand
gggagacaauucugacuac

SEQ ID NO: 1312618 - RNA, 19 nt, Homo sapiens
  misc_RNA (1)...(19): siRNA sense strand
ugcagaagauugaggaguu

SEQ ID NO: 1312619 - RNA, 19 nt, Homo sapiens
  misc_RNA (1)...(19): siRNA sense strand
gcaccaacuucgacgacau

SEQ ID NO: 1312620 - RNA, 19 nt, Homo sapiens
  misc_RNA (1)...(19): siRNA sense strand
aggaggagcugcuguacug

SEQ ID NO: 1312621 - RNA, 19 nt, Homo sapiens
  misc_RNA (1)...(19): siRNA sense strand
gccgcuaccugcagaagau

SEQ ID NO: 1312622 - RNA, 19 nt, Homo sapiens
  misc_RNA (1)...(19): siRNA sense strand
gcacuauccugaccuuccu

SEQ ID NO: 1312623 - RNA, 19 nt, Homo sapiens
  misc_RNA (1)...(19): siRNA sense strand
caacgugugcgaugacuac

SEQ ID NO: 1312624 - RNA, 19 nt, Homo sapiens
  misc_RNA (1)...(19): siRNA sense strand
gagacaauucugacuacga

SEQ ID NO: 1312625 - RNA, 19 nt, Homo sapiens
  misc_RNA (1)...(19): siRNA sense strand
acaauucugacuacgacua

SEQ ID NO: 1312626 - RNA, 19 nt, Homo sapiens
  misc_RNA (1)...(19): siRNA sense strand
ccucuuaccgggagacaau

SEQ ID NO: 1312627 - RNA, 19 nt, Homo sapiens
  misc_RNA (1)...(19): siRNA sense strand
gccgucggaucaucaucaa

SEQ ID NO: 1312628 - RNA, 19 nt, Homo sapiens
  misc_RNA (1)...(19): siRNA sense strand
cgggagacaauucugacua

SEQ ID NO: 1312629 - RNA, 19 nt, Homo sapiens
  misc_RNA (1)...(19): siRNA sense strand
gcuaccugcagaagauuga

SEQ ID NO: 1312630 - RNA, 19 nt, Homo sapiens
  misc_RNA (1)...(19): siRNA sense strand
ggaccacgcuggacgaguu

SEQ ID NO: 1312631 - RNA, 19 nt, Homo sapiens
  misc_RNA (1)...(19): siRNA sense strand
gcaacgaguucuucuucga

SEQ ID NO: 1312632 - RNA, 19 nt, Homo sapiens
  misc_RNA (1)...(19): siRNA sense strand
caacguaggcggcaucaag

SEQ ID NO: 1312633 - RNA, 19 nt, Homo sapiens
  misc_RNA (1)...(19): siRNA sense strand
gcagaagauugaggaguuc

SEQ ID NO: 1312634 - RNA, 19 nt, Homo sapiens
  misc_RNA (1)...(19): siRNA sense strand
gggagacaauucugacuac

SEQ ID NO: 1312635 - RNA, 19 nt, Homo sapiens
  misc_RNA (1)...(19): siRNA sense strand
ugcagaagauugaggaguu

SEQ ID NO: 1312636 - RNA, 19 nt, Homo sapiens
  misc_RNA (1)...(19): siRNA sense strand
gcaccaacuucgacgacau

SEQ ID NO: 1312637 - RNA, 19 nt, Homo sapiens
  misc_RNA (1)...(19): siRNA sense strand
aggaggagcugcuguacug

SEQ ID NO: 1312638 - RNA, 19 nt, Homo sapiens
  misc_RNA (1)...(19): siRNA sense strand
gccgcuaccugcagaagau

SEQ ID NO: 1312639 - RNA, 19 nt, Homo sapiens
  misc_RNA (1)...(19): siRNA sense strand
gcacuauccugaccuuccu

SEQ ID NO: 1312640 - RNA, 19 nt, Homo sapiens
  misc_RNA (1)...(19): siRNA sense strand
caacgugugcgaugacuac

SEQ ID NO: 1312641 - RNA, 19 nt, Homo sapiens
  misc_RNA (1)...(19): siRNA sense strand
gagacaauucugacuacga

SEQ ID NO: 1312642 - RNA, 19 nt, Homo sapiens
  misc_RNA (1)...(19): siRNA sense strand
acaauucugacuacgacua

SEQ ID NO: 1312643 - RNA, 19 nt, Homo sapiens
  misc_RNA (1)...(19): siRNA sense strand
ccucuuaccgggagacaau

SEQ ID NO: 1312644 - RNA, 19 nt, Homo sapiens
  misc_RNA (1)...(19): siRNA sense strand
gccgucggaucaucaucaa

SEQ ID NO: 1312645 - RNA, 19 nt, Homo sapiens
  misc_RNA (1)...(19): siRNA sense strand
cgggagacaauucugacua

SEQ ID NO: 1312646 - RNA, 19 nt, Homo sapiens
  misc_RNA (1)...(19): siRNA sense strand
gcuaccugcagaagauuga

SEQ ID NO: 1312647 - RNA, 19 nt, Homo sapiens
  misc_RNA (1)...(19): siRNA sense strand
gagaggagguggcacugaa

SEQ ID NO: 1312648 - RNA, 19 nt, Homo sapiens
  misc_RNA (1)...(19): siRNA sense strand
gaauggaggucaaaacaaa

SEQ ID NO: 1312649 - RNA, 19 nt, Homo sapiens
  misc_RNA (1)...(19): siRNA sense strand
ggaagugaguucagagagu

SEQ ID NO: 1312650 - RNA, 19 nt, Homo sapiens
  misc_RNA (1)...(19): siRNA sense strand
gugcagguaugguuuaaga

SEQ ID NO: 1312651 - RNA, 19 nt, Homo sapiens
  misc_RNA (1)...(19): siRNA sense strand
uggcucaacuuccuacuuu

SEQ ID NO: 1312652 - RNA, 19 nt, Homo sapiens
  misc_RNA (1)...(19): siRNA sense strand
ccacugauugcuuggauua

SEQ ID NO: 1312653 - RNA, 19 nt, Homo sapiens
  misc_RNA (1)...(19): siRNA sense strand
gcugacugcuuggauuaua

SEQ ID NO: 1312654 - RNA, 19 nt, Homo sapiens
  misc_RNA (1)...(19): siRNA sense strand
gcagugcuccugugucuau

SEQ ID NO: 1312655 - RNA, 19 nt, Homo sapiens
  misc_RNA (1)...(19): siRNA sense strand
gacuguggaucauauuuga

SEQ ID NO: 1312656 - RNA, 19 nt, Homo sapiens
  misc_RNA (1)...(19): siRNA sense strand
ggacuguggaucauauuug

SEQ ID NO: 1312657 - RNA, 19 nt, Homo sapiens
  misc_RNA (1)...(19): siRNA sense strand
gaagcacuguuugccaaga

SEQ ID NO: 1312658 - RNA, 19 nt, Homo sapiens
  misc_RNA (1)...(19): siRNA sense strand
gcagguaugguuuaagaau

SEQ ID NO: 1312659 - RNA, 19 nt, Homo sapiens
  misc_RNA (1)...(19): siRNA sense strand
ccagggauauggagcuuca

SEQ ID NO: 1312660 - RNA, 19 nt, Homo sapiens
  misc_RNA (1)...(19): siRNA sense strand
cugauugcuuggauuauaa

SEQ ID NO: 1312661 - RNA, 19 nt, Homo sapiens
  misc_RNA (1)...(19): siRNA sense strand
uggaacaaguggccaauuc

SEQ ID NO: 1312662 - RNA, 19 nt, Homo sapiens
  misc_RNA (1)...(19): siRNA sense strand
gggcauggacuguggauca

SEQ ID NO: 1312663 - RNA, 19 nt, Homo sapiens
  misc_RNA (1)...(19): siRNA sense strand
acugauugcuuggauuaua

SEQ ID NO: 1312664 - RNA, 19 nt, Homo sapiens
  misc_RNA (1)...(19): siRNA sense strand
cauggacuguggaucauau

SEQ ID NO: 1312665 - RNA, 19 nt, Homo sapiens
  misc_RNA (1)...(19): siRNA sense strand
auacucaggcuucagguua

SEQ ID NO: 1312666 - RNA, 19 nt, Homo sapiens
  misc_RNA (1)...(19): siRNA sense strand
gaucauauuugaccccuau

SEQ ID NO: 1312667 - RNA, 19 nt, Homo sapiens
  misc_RNA (1)...(19): siRNA sense strand
ggaacaaguggccaauuca

SEQ ID NO: 1312668 - RNA, 19 nt, Homo sapiens
  misc_RNA (1)...(19): siRNA sense strand
cugcuuggauuauaaagau

SEQ ID NO: 1312669 - RNA, 19 nt, Homo sapiens
  misc_RNA (1)...(19): siRNA sense strand
cagagguccuaucccauga

SEQ ID NO: 1312670 - RNA, 19 nt, Homo sapiens
  misc_RNA (1)...(19): siRNA sense strand
gcagucaccagccaucuca

SEQ ID NO: 1312671 - RNA, 19 nt, Homo sapiens
  misc_RNA (1)...(19): siRNA sense strand
cagguuauagucaaggaua

SEQ ID NO: 1312672 - RNA, 19 nt, Homo sapiens
  misc_RNA (1)...(19): siRNA sense strand
caaagugagaccugccaaa

SEQ ID NO: 1312673 - RNA, 19 nt, Homo sapiens
  misc_RNA (1)...(19): siRNA sense strand
gaaauuccagguuuuguga

SEQ ID NO: 1312674 - RNA, 19 nt, Homo sapiens
  misc_RNA (1)...(19): siRNA sense strand
gcaccucagucccgaccau

SEQ ID NO: 1312675 - RNA, 19 nt, Homo sapiens
  misc_RNA (1)...(19): siRNA sense strand
gucaaugggcugagucuga

SEQ ID NO: 1312676 - RNA, 19 nt, Homo sapiens
  misc_RNA (1)...(19): siRNA sense strand
cagguaugguuuaagaauc

SEQ ID NO: 1312677 - RNA, 19 nt, Homo sapiens
  misc_RNA (1)...(19): siRNA sense strand
cugacugcuuggauuauaa

SEQ ID NO: 1312678 - RNA, 19 nt, Homo sapiens
  misc_RNA (1)...(19): siRNA sense strand
gauaugcuggcucaacuuc

SEQ ID NO: 1312679 - RNA, 19 nt, Homo sapiens
  misc_RNA (1)...(19): siRNA sense strand
gggugcagguaugguuuaa

SEQ ID NO: 1312680 - RNA, 19 nt, Homo sapiens
  misc_RNA (1)...(19): siRNA sense strand
ucagagaguggaacaagug

SEQ ID NO: 1312681 - RNA, 19 nt, Homo sapiens
  misc_RNA (1)...(19): siRNA sense strand
gggcugagucugaccacuu

SEQ ID NO: 1312682 - RNA, 19 nt, Homo sapiens
  misc_RNA (1)...(19): siRNA sense strand
cagacauccucguggaaau

SEQ ID NO: 1312683 - RNA, 19 nt, Homo sapiens
  misc_RNA (1)...(19): siRNA sense strand
gagggugcagguaugguuu

SEQ ID NO: 1312684 - RNA, 19 nt, Homo sapiens
  misc_RNA (1)...(19): siRNA sense strand
ggcugagucugaccacuuc

SEQ ID NO: 1312685 - RNA, 19 nt, Homo sapiens
  misc_RNA (1)...(19): siRNA sense strand
gcauggacuguggaucaua

SEQ ID NO: 1312686 - RNA, 19 nt, Homo sapiens
  misc_RNA (1)...(19): siRNA sense strand
guacccagacaucuucaug

SEQ ID NO: 1312687 - RNA, 19 nt, Homo sapiens
  misc_RNA (1)...(19): siRNA sense strand
gaacaaguggccaauucac

SEQ ID NO: 1312688 - RNA, 19 nt, Homo sapiens
  misc_RNA (1)...(19): siRNA sense strand
aaugcugacugcuuggauu

SEQ ID NO: 1312689 - RNA, 19 nt, Homo sapiens
  misc_RNA (1)...(19): siRNA sense strand
acucaggcuucagguuaua

SEQ ID NO: 1312690 - RNA, 19 nt, Homo sapiens
  misc_RNA (1)...(19): siRNA sense strand
ccacuucggguauggacuu

SEQ ID NO: 1312691 - RNA, 19 nt, Homo sapiens
  misc_RNA (1)...(19): siRNA sense strand
ucagacauccucguggaaa

SEQ ID NO: 1312692 - RNA, 19 nt, Homo sapiens
  misc_RNA (1)...(19): siRNA sense strand
ugacugcuuggauuauaaa

SEQ ID NO: 1312693 - RNA, 19 nt, Homo sapiens
  misc_RNA (1)...(19): siRNA sense strand
gaccuauacucaggcuuca

SEQ ID NO: 1312694 - RNA, 19 nt, Homo sapiens
  misc_RNA (1)...(19): siRNA sense strand
gcuaagugccgccaacaac

SEQ ID NO: 1312695 - RNA, 19 nt, Homo sapiens
  misc_RNA (1)...(19): siRNA sense strand
ucaccagccaucucaauca

SEQ ID NO: 1312696 - RNA, 19 nt, Homo sapiens
  misc_RNA (1)...(19): siRNA sense strand
gccaacaacagcaacaaca

SEQ ID NO: 1312697 - RNA, 19 nt, Homo sapiens
  misc_RNA (1)...(19): siRNA sense strand
uuaagaaucgaagagcuaa

SEQ ID NO: 1312698 - RNA, 19 nt, Homo sapiens
  misc_RNA (1)...(19): siRNA sense strand
uaacucaaccacugauugc

SEQ ID NO: 1312699 - RNA, 19 nt, Homo sapiens
  misc_RNA (1)...(19): siRNA sense strand
cagcaacaacagcagaaug

SEQ ID NO: 1312700 - RNA, 19 nt, Homo sapiens
  misc_RNA (1)...(19): siRNA sense strand
gcaacaacagcagaaugga

SEQ ID NO: 1312701 - RNA, 19 nt, Homo sapiens
  misc_RNA (1)...(19): siRNA sense strand
agacauccucguggaaauu

SEQ ID NO: 1312702 - RNA, 19 nt, Homo sapiens
  misc_RNA (1)...(19): siRNA sense strand
ggauaugcuggcucaacuu

SEQ ID NO: 1312703 - RNA, 19 nt, Homo sapiens
  misc_RNA (1)...(19): siRNA sense strand
ggcuucagguuauagucaa

SEQ ID NO: 1312704 - RNA, 19 nt, Homo sapiens
  misc_RNA (1)...(19): siRNA sense strand
ccuaucccaugaccuauac

SEQ ID NO: 1312705 - RNA, 19 nt, Homo sapiens
  misc_RNA (1)...(19): siRNA sense strand
uuuaagaaucgaagagcua

SEQ ID NO: 1312706 - RNA, 19 nt, Homo sapiens
  misc_RNA (1)...(19): siRNA sense strand
gauuauaaggaccaaacug

SEQ ID NO: 1312707 - RNA, 19 nt, Homo sapiens
  misc_RNA (1)...(19): siRNA sense strand
gcucaacuuccuacuuugg

SEQ ID NO: 1312708 - RNA, 19 nt, Homo sapiens
  misc_RNA (1)...(19): siRNA sense strand
cgagggugcagguaugguu

SEQ ID NO: 1312709 - RNA, 19 nt, Homo sapiens
  misc_RNA (1)...(19): siRNA sense strand
uuaacucaaccacugauug

SEQ ID NO: 1312710 - RNA, 19 nt, Homo sapiens
  misc_RNA (1)...(19): siRNA sense strand
cagcagaauggaggucaaa

SEQ ID NO: 1312711 - RNA, 19 nt, Homo sapiens
  misc_RNA (1)...(19): siRNA sense strand
agucgagggugcagguaug

SEQ ID NO: 1312712 - RNA, 19 nt, Homo sapiens
  misc_RNA (1)...(19): siRNA sense strand
uacucaggcuucagguuau

SEQ ID NO: 1312713 - RNA, 19 nt, Homo sapiens
  misc_RNA (1)...(19): siRNA sense strand
gagaggagguggcacugaa

SEQ ID NO: 1312714 - RNA, 19 nt, Homo sapiens
  misc_RNA (1)...(19): siRNA sense strand
gaauggaggucaaaacaaa

SEQ ID NO: 1312715 - RNA, 19 nt, Homo sapiens
  misc_RNA (1)...(19): siRNA sense strand
ggaagugaguucagagagu

SEQ ID NO: 1312716 - RNA, 19 nt, Homo sapiens
  misc_RNA (1)...(19): siRNA sense strand
gugcagguaugguuuaaga

SEQ ID NO: 1312717 - RNA, 19 nt, Homo sapiens
  misc_RNA (1)...(19): siRNA sense strand
uggcucaacuuccuacuuu

SEQ ID NO: 1312718 - RNA, 19 nt, Homo sapiens
  misc_RNA (1)...(19): siRNA sense strand
ccacugauugcuuggauua

SEQ ID NO: 1312719 - RNA, 19 nt, Homo sapiens
  misc_RNA (1)...(19): siRNA sense strand
gcugacugcuuggauuaua

SEQ ID NO: 1312720 - RNA, 19 nt, Homo sapiens
  misc_RNA (1)...(19): siRNA sense strand
gcagugcuccugugucuau

SEQ ID NO: 1312721 - RNA, 19 nt, Homo sapiens
  misc_RNA (1)...(19): siRNA sense strand
gacuguggaucauauuuga

SEQ ID NO: 1312722 - RNA, 19 nt, Homo sapiens
  misc_RNA (1)...(19): siRNA sense strand
ggacuguggaucauauuug

SEQ ID NO: 1312723 - RNA, 19 nt, Homo sapiens
  misc_RNA (1)...(19): siRNA sense strand
gaagcacuguuugccaaga

SEQ ID NO: 1312724 - RNA, 19 nt, Homo sapiens
  misc_RNA (1)...(19): siRNA sense strand
gcagguaugguuuaagaau

SEQ ID NO: 1312725 - RNA, 19 nt, Homo sapiens
  misc_RNA (1)...(19): siRNA sense strand
ccagggauauggagcuuca

SEQ ID NO: 1312726 - RNA, 19 nt, Homo sapiens
  misc_RNA (1)...(19): siRNA sense strand
cugauugcuuggauuauaa

SEQ ID NO: 1312727 - RNA, 19 nt, Homo sapiens
  misc_RNA (1)...(19): siRNA sense strand
uggaacaaguggccaauuc

SEQ ID NO: 1312728 - RNA, 19 nt, Homo sapiens
  misc_RNA (1)...(19): siRNA sense strand
gggcauggacuguggauca

SEQ ID NO: 1312729 - RNA, 19 nt, Homo sapiens
  misc_RNA (1)...(19): siRNA sense strand
acugauugcuuggauuaua

SEQ ID NO: 1312730 - RNA, 19 nt, Homo sapiens
  misc_RNA (1)...(19): siRNA sense strand
cauggacuguggaucauau

SEQ ID NO: 1312731 - RNA, 19 nt, Homo sapiens
  misc_RNA (1)...(19): siRNA sense strand
auacucaggcuucagguua

SEQ ID NO: 1312732 - RNA, 19 nt, Homo sapiens
  misc_RNA (1)...(19): siRNA sense strand
gaucauauuugaccccuau

SEQ ID NO: 1312733 - RNA, 19 nt, Homo sapiens
  misc_RNA (1)...(19): siRNA sense strand
ggaacaaguggccaauuca

SEQ ID NO: 1312734 - RNA, 19 nt, Homo sapiens
  misc_RNA (1)...(19): siRNA sense strand
cugcuuggauuauaaagau

SEQ ID NO: 1312735 - RNA, 19 nt, Homo sapiens
  misc_RNA (1)...(19): siRNA sense strand
cagagguccuaucccauga

SEQ ID NO: 1312736 - RNA, 19 nt, Homo sapiens
  misc_RNA (1)...(19): siRNA sense strand
gcagucaccagccaucuca

SEQ ID NO: 1312737 - RNA, 19 nt, Homo sapiens
  misc_RNA (1)...(19): siRNA sense strand
cagguuauagucaaggaua

SEQ ID NO: 1312738 - RNA, 19 nt, Homo sapiens
  misc_RNA (1)...(19): siRNA sense strand
caaagugagaccugccaaa

SEQ ID NO: 1312739 - RNA, 19 nt, Homo sapiens
  misc_RNA (1)...(19): siRNA sense strand
gaaauuccagguuuuguga

SEQ ID NO: 1312740 - RNA, 19 nt, Homo sapiens
  misc_RNA (1)...(19): siRNA sense strand
gcaccucagucccgaccau

SEQ ID NO: 1312741 - RNA, 19 nt, Homo sapiens
  misc_RNA (1)...(19): siRNA sense strand
gucaaugggcugagucuga

SEQ ID NO: 1312742 - RNA, 19 nt, Homo sapiens
  misc_RNA (1)...(19): siRNA sense strand
cagguaugguuuaagaauc

SEQ ID NO: 1312743 - RNA, 19 nt, Homo sapiens
  misc_RNA (1)...(19): siRNA sense strand
cugacugcuuggauuauaa

SEQ ID NO: 1312744 - RNA, 19 nt, Homo sapiens
  misc_RNA (1)...(19): siRNA sense strand
gauaugcuggcucaacuuc

SEQ ID NO: 1312745 - RNA, 19 nt, Homo sapiens
  misc_RNA (1)...(19): siRNA sense strand
gggugcagguaugguuuaa

SEQ ID NO: 1312746 - RNA, 19 nt, Homo sapiens
  misc_RNA (1)...(19): siRNA sense strand
ucagagaguggaacaagug

SEQ ID NO: 1312747 - RNA, 19 nt, Homo sapiens
  misc_RNA (1)...(19): siRNA sense strand
gggcugagucugaccacuu

SEQ ID NO: 1312748 - RNA, 19 nt, Homo sapiens
  misc_RNA (1)...(19): siRNA sense strand
cagacauccucguggaaau

SEQ ID NO: 1312749 - RNA, 19 nt, Homo sapiens
  misc_RNA (1)...(19): siRNA sense strand
gagggugcagguaugguuu

SEQ ID NO: 1312750 - RNA, 19 nt, Homo sapiens
  misc_RNA (1)...(19): siRNA sense strand
ggcugagucugaccacuuc

SEQ ID NO: 1312751 - RNA, 19 nt, Homo sapiens
  misc_RNA (1)...(19): siRNA sense strand
gcauggacuguggaucaua

SEQ ID NO: 1312752 - RNA, 19 nt, Homo sapiens
  misc_RNA (1)...(19): siRNA sense strand
guacccagacaucuucaug

SEQ ID NO: 1312753 - RNA, 19 nt, Homo sapiens
  misc_RNA (1)...(19): siRNA sense strand
gaacaaguggccaauucac

SEQ ID NO: 1312754 - RNA, 19 nt, Homo sapiens
  misc_RNA (1)...(19): siRNA sense strand
aaugcugacugcuuggauu

SEQ ID NO: 1312755 - RNA, 19 nt, Homo sapiens
  misc_RNA (1)...(19): siRNA sense strand
acucaggcuucagguuaua

SEQ ID NO: 1312756 - RNA, 19 nt, Homo sapiens
  misc_RNA (1)...(19): siRNA sense strand
ccacuucggguauggacuu

SEQ ID NO: 1312757 - RNA, 19 nt, Homo sapiens
  misc_RNA (1)...(19): siRNA sense strand
ucagacauccucguggaaa

SEQ ID NO: 1312758 - RNA, 19 nt, Homo sapiens
  misc_RNA (1)...(19): siRNA sense strand
ugacugcuuggauuauaaa

SEQ ID NO: 1312759 - RNA, 19 nt, Homo sapiens
  misc_RNA (1)...(19): siRNA sense strand
gaccuauacucaggcuuca

SEQ ID NO: 1312760 - RNA, 19 nt, Homo sapiens
  misc_RNA (1)...(19): siRNA sense strand
gcuaagugccgccaacaac

SEQ ID NO: 1312761 - RNA, 19 nt, Homo sapiens
  misc_RNA (1)...(19): siRNA sense strand
ucaccagccaucucaauca

SEQ ID NO: 1312762 - RNA, 19 nt, Homo sapiens
  misc_RNA (1)...(19): siRNA sense strand
gccaacaacagcaacaaca

SEQ ID NO: 1312763 - RNA, 19 nt, Homo sapiens
  misc_RNA (1)...(19): siRNA sense strand
uuaagaaucgaagagcuaa

SEQ ID NO: 1312764 - RNA, 19 nt, Homo sapiens
  misc_RNA (1)...(19): siRNA sense strand
uaacucaaccacugauugc

SEQ ID NO: 1312765 - RNA, 19 nt, Homo sapiens
  misc_RNA (1)...(19): siRNA sense strand
cagcaacaacagcagaaug

SEQ ID NO: 1312766 - RNA, 19 nt, Homo sapiens
  misc_RNA (1)...(19): siRNA sense strand
gcaacaacagcagaaugga

SEQ ID NO: 1312767 - RNA, 19 nt, Homo sapiens
  misc_RNA (1)...(19): siRNA sense strand
agacauccucguggaaauu

SEQ ID NO: 1312768 - RNA, 19 nt, Homo sapiens
  misc_RNA (1)...(19): siRNA sense strand
ggauaugcuggcucaacuu

SEQ ID NO: 1312769 - RNA, 19 nt, Homo sapiens
  misc_RNA (1)...(19): siRNA sense strand
ggcuucagguuauagucaa

SEQ ID NO: 1312770 - RNA, 19 nt, Homo sapiens
  misc_RNA (1)...(19): siRNA sense strand
ccuaucccaugaccuauac

SEQ ID NO: 1312771 - RNA, 19 nt, Homo sapiens
  misc_RNA (1)...(19): siRNA sense strand
uuuaagaaucgaagagcua

SEQ ID NO: 1312772 - RNA, 19 nt, Homo sapiens
  misc_RNA (1)...(19): siRNA sense strand
gauuauaaggaccaaacug

SEQ ID NO: 1312773 - RNA, 19 nt, Homo sapiens
  misc_RNA (1)...(19): siRNA sense strand
gcucaacuuccuacuuugg

SEQ ID NO: 1312774 - RNA, 19 nt, Homo sapiens
  misc_RNA (1)...(19): siRNA sense strand
cgagggugcagguaugguu

SEQ ID NO: 1312775 - RNA, 19 nt, Homo sapiens
  misc_RNA (1)...(19): siRNA sense strand
uuaacucaaccacugauug

SEQ ID NO: 1312776 - RNA, 19 nt, Homo sapiens
  misc_RNA (1)...(19): siRNA sense strand
cagcagaauggaggucaaa

SEQ ID NO: 1312777 - RNA, 19 nt, Homo sapiens
  misc_RNA (1)...(19): siRNA sense strand
agucgagggugcagguaug

SEQ ID NO: 1312778 - RNA, 19 nt, Homo sapiens
  misc_RNA (1)...(19): siRNA sense strand
uacucaggcuucagguuau

SEQ ID NO: 1312779 - RNA, 19 nt, Homo sapiens
  misc_RNA (1)...(19): siRNA sense strand
gaacagagccaaaucaaag

SEQ ID NO: 1312780 - RNA, 19 nt, Homo sapiens
  misc_RNA (1)...(19): siRNA sense strand
gugcucaccuccuggauca

SEQ ID NO: 1312781 - RNA, 19 nt, Homo sapiens
  misc_RNA (1)...(19): siRNA sense strand
gcugugggcuuccucuucu

SEQ ID NO: 1312782 - RNA, 19 nt, Homo sapiens
  misc_RNA (1)...(19): siRNA sense strand
cuaccucuccuucaccaua

SEQ ID NO: 1312783 - RNA, 19 nt, Homo sapiens
  misc_RNA (1)...(19): siRNA sense strand
gucaacaucuucugguucu

SEQ ID NO: 1312784 - RNA, 19 nt, Homo sapiens
  misc_RNA (1)...(19): siRNA sense strand
gguuugcuuuccugccuuu

SEQ ID NO: 1312785 - RNA, 19 nt, Homo sapiens
  misc_RNA (1)...(19): siRNA sense strand
caacaucuucugguucuuc

SEQ ID NO: 1312786 - RNA, 19 nt, Homo sapiens
  misc_RNA (1)...(19): siRNA sense strand
cagaacagagccaaaucaa

SEQ ID NO: 1312787 - RNA, 19 nt, Homo sapiens
  misc_RNA (1)...(19): siRNA sense strand
caaaucaaaggcuaugucu

SEQ ID NO: 1312788 - RNA, 19 nt, Homo sapiens
  misc_RNA (1)...(19): siRNA sense strand
acacagaacagagccaaau

SEQ ID NO: 1312789 - RNA, 19 nt, Homo sapiens
  misc_RNA (1)...(19): siRNA sense strand
agaacagagccaaaucaaa

SEQ ID NO: 1312790 - RNA, 19 nt, Homo sapiens
  misc_RNA (1)...(19): siRNA sense strand
gggacuaccucuccuucac

SEQ ID NO: 1312791 - RNA, 19 nt, Homo sapiens
  misc_RNA (1)...(19): siRNA sense strand
ccuccuggaucaccaucuu

SEQ ID NO: 1312792 - RNA, 19 nt, Homo sapiens
  misc_RNA (1)...(19): siRNA sense strand
ccaaaucaaaggcuauguc

SEQ ID NO: 1312793 - RNA, 19 nt, Homo sapiens
  misc_RNA (1)...(19): siRNA sense strand
acagaacagagccaaauca

SEQ ID NO: 1312794 - RNA, 19 nt, Homo sapiens
  misc_RNA (1)...(19): siRNA sense strand
uguccaaugaggagaaauu

SEQ ID NO: 1312795 - RNA, 19 nt, Homo sapiens
  misc_RNA (1)...(19): siRNA sense strand
ugucccagccuacacagaa

SEQ ID NO: 1312796 - RNA, 19 nt, Homo sapiens
  misc_RNA (1)...(19): siRNA sense strand
gaaccugugccggaaguac

SEQ ID NO: 1312797 - RNA, 19 nt, Homo sapiens
  misc_RNA (1)...(19): siRNA sense strand
gaagacaucuccaugaauu

SEQ ID NO: 1312798 - RNA, 19 nt, Homo sapiens
  misc_RNA (1)...(19): siRNA sense strand
caccaaggcugcucuguuu

SEQ ID NO: 1312799 - RNA, 19 nt, Homo sapiens
  misc_RNA (1)...(19): siRNA sense strand
ggaauuacacugucacuug

SEQ ID NO: 1312800 - RNA, 19 nt, Homo sapiens
  misc_RNA (1)...(19): siRNA sense strand
guaugaagcuugacauugg

SEQ ID NO: 1312801 - RNA, 19 nt, Homo sapiens
  misc_RNA (1)...(19): siRNA sense strand
gaacuugggcugcaucaau

SEQ ID NO: 1312802 - RNA, 19 nt, Homo sapiens
  misc_RNA (1)...(19): siRNA sense strand
gagguaguaugaagcuuga

SEQ ID NO: 1312803 - RNA, 19 nt, Homo sapiens
  misc_RNA (1)...(19): siRNA sense strand
caucaaugcucaaggaaag

SEQ ID NO: 1312804 - RNA, 19 nt, Homo sapiens
  misc_RNA (1)...(19): siRNA sense strand
gcaccaaggcugcucuguu

SEQ ID NO: 1312805 - RNA, 19 nt, Homo sapiens
  misc_RNA (1)...(19): siRNA sense strand
gaaaggaagacaucuccau

SEQ ID NO: 1312806 - RNA, 19 nt, Homo sapiens
  misc_RNA (1)...(19): siRNA sense strand
aggaagacaucuccaugaa

SEQ ID NO: 1312807 - RNA, 19 nt, Homo sapiens
  misc_RNA (1)...(19): siRNA sense strand
agaaggugcuggugacugu

SEQ ID NO: 1312808 - RNA, 19 nt, Homo sapiens
  misc_RNA (1)...(19): siRNA sense strand
gaaaauccccaaaguagga

SEQ ID NO: 1312809 - RNA, 19 nt, Homo sapiens
  misc_RNA (1)...(19): siRNA sense strand
gcguuuccaugucacguaa

SEQ ID NO: 1312810 - RNA, 19 nt, Homo sapiens
  misc_RNA (1)...(19): siRNA sense strand
ggaagacaucuccaugaau

SEQ ID NO: 1312811 - RNA, 19 nt, Homo sapiens
  misc_RNA (1)...(19): siRNA sense strand
gccaggagguaguaugaag

SEQ ID NO: 1312812 - RNA, 19 nt, Homo sapiens
  misc_RNA (1)...(19): siRNA sense strand
cauccaccaugugcaguaa

SEQ ID NO: 1312813 - RNA, 19 nt, Homo sapiens
  misc_RNA (1)...(19): siRNA sense strand
caaggcugcucuguuucuu

SEQ ID NO: 1312814 - RNA, 19 nt, Homo sapiens
  misc_RNA (1)...(19): siRNA sense strand
ccagcgcguuuccauguca

SEQ ID NO: 1312815 - RNA, 19 nt, Homo sapiens
  misc_RNA (1)...(19): siRNA sense strand
aggcugcucuguuucuuuc

SEQ ID NO: 1312816 - RNA, 19 nt, Homo sapiens
  misc_RNA (1)...(19): siRNA sense strand
ucaaggaaaggaagacauc

SEQ ID NO: 1312817 - RNA, 19 nt, Homo sapiens
  misc_RNA (1)...(19): siRNA sense strand
aaggaagacaucuccauga

SEQ ID NO: 1312818 - RNA, 19 nt, Homo sapiens
  misc_RNA (1)...(19): siRNA sense strand
ugaauuccguucccaucca

SEQ ID NO: 1312819 - RNA, 19 nt, Homo sapiens
  misc_RNA (1)...(19): siRNA sense strand
gugccaggagguaguauga

SEQ ID NO: 1312820 - RNA, 19 nt, Homo sapiens
  misc_RNA (1)...(19): siRNA sense strand
aacuugggcugcaucaaug

SEQ ID NO: 1312821 - RNA, 19 nt, Homo sapiens
  misc_RNA (1)...(19): siRNA sense strand
ggcuugccuuucugaguga
